United States Patent Application Publication US 2011/0183924 A1 - sequence listing, part 46

SEQ ID NO: 118187 - DNA, 6620 bp, Homo sapiens
tactgtataaggttctatacctggtagcttccaggtggtagttggtaccagaatgggcgcaaacttagtctcttctccattctgacttcaaacctgggtcactacaatttcttggatcacgaaaactgcattcttccttaaatggtgtcactaagttgtctttctgtttctttctgccatggtcattgtcagcagtgaccccaggccaaagaacagtttttcattcattctcaatacctcgatgagaccatgtgctactctgtgtttccacaactctagtgtgattttgaagttgtatgtttttctgttcctgtctagtgagacagtctctaatcttactggatctcatcattaggtaattcaatgacaagtttaattggggaaaagagagaaggatctagtcccccgaatttgttttgggtcctgtcccagttgtcttctggttagtaggtttttgtgcttaagaatatgttgacttcaggcatttaacaagggacaaaacatctatttttagtgacttaaggaagtggtaggaacagaatctaagtgtagccagatgaaaggtgacttattttgtttagacaggcagaactgtggactaccatgatctgtttcatcaaattattccaaaacaacagatcctttttcaggctttctttttctttttcttttctttctttctttttttcctaaacttccttttggcagatgtggcctcatggatgagctggtacacgacttagcctcagccttggagcagacatctgagcagaataagcttggtgaactgtgggaggagatggcgctgagcccccgacagcagaggcggcagcttcggaaacgccgaggtcggaagcgtcgttctgacttcactcacctggcagagcatacctgctgctacagcgaggcctctgagtcaagtctggatgaggccactaaggactgtcgagaagtggctccggtgaccaattttagtgactctgatgacacaatggtagccaaacgacacccagctctcaatgccattgtcaagagtaagcaacattcttggcatgaatctgactcctttactgaaaatgcaccttgtcgaccactcaggcgcaggcggaaggtgaagcgagtgacatcagaggtggctgctagccttcagcagaagctgaaggtgtcagattggagctatgagagaggctgcaggttcaagtctgctaagaagcagcgtctgtcccgctggaaggagaatactccctggacctcatcaggccacggattgtgtgaatcagcagaaaataggactttcctaagcaaaacaggaaggaaagaaaggatggagtgtgaaacagatgaacaaaaacagggctctgatgagaacatgtcagaatgtgaaaccagcagtgtgtgtagcagcagtgacactgggctctttaccaatgatgaagggcgacaaggtgatgacgaacagagtgattggttctatgaaggagaatgtgtcccaggattcactgtccctaatcttctgcccaagtgggctcctgatcattgttctgaagtagaaagaatggattctggattggataaattttcagattccacattccttttaccttctcggccagctcaaagagggtaccatactcgcttgaatcgtctacctggagctgcagctcgatgcctcagaaaggggcgaagaaggctggttgggaaggtgatacctctcacagttagcttggctcagtggggagataatattccctatgggagttgtgtatcctattaacaatcagaggtgctacagaactccctgaagttaatggagccaactggaatgtgttgggagtttacaagagtgaacattatgtagaatgtgaatggatatacaaataaaagatgaaacgtaattcatatagaagtactgacaaaaaaaaaaacactgtcattacagtgtctattgcctgtaaacctacaagcctgagctgtgtcttctgtaacttttgattaatgttatgttattattgtgtaagttaaaatactcttggcttctttatgactcctcttgaattcatgaatgcatctttgttctttcctaattttggtctttcatcctagaattcattaaaaaaaaaaaaacaaaactgttactgagtttcaagagcccctccttggccatgagggagaactatctgctgtttattcagttctgcctttgccagggatggtactagggactcagctcatttaatccttccagcaacctacaagggcaagcaccttcagcagatgaggaaaacttaggttcgaagaagttaaggaatgtctgatgttacccagataggaatggtagaatagagatttgaacccaggtctacttttatctttttacatttttattgaattttattttttactctactttgagattgaggaataaattaagacagggctcatcctcagtcagagaagatggtggtgggcaaagaataaggaagggagaggcattgagagcattaatttgtttgttcacttggtaagcatttagaatgcctgctaggtggcacaatatgtgccacagtctggcttcccttaaggggatactgttttatagtctgaccagggaacagttttctgaagttttaagcatgcaaaagaaatgagactgtttatttccagacgagcccaagattcttatttctttttatctttaaattcaagttcaaatcttttttttttttttgagatggaatctcgctctgtgacctaggctggaatgcaatggtgcgatctcggctcactgtaacttcctgccttccaggttcaagcaattctcctgcctcagcctcccaagtagctgggattacaggcgccccaccatgcctggctaatttttttgtatttttagtacagatggggttttaccatgttggctaggctggtctcaaacccctgacctcaggtgatccacccgcctcggcctcccaaagttctgggattacaggcatgagccaccgtgcccggcctcaagttcaaatcttgaattagaagacatttgattattggaaaactgatacctttcaaattactcattttacagacaaaacgctgctttttctgttttgggagcttattgttaacagggatagctagcagaatagcagtacatggggtggaagaaggagaggttttacttttattgtttaggcttgacagataatgttccccctgccacctgtgttactttctttcagctcttataaaataagagccatccacttccatggaaacaagtcactttatcttgaaggtttccctttagcttgcctggaagggagtgagggcctgttggatgtgcctttaatgatttcaaatgaataggataatatttacttgtttaattcatcttcatcaccttaaagggatatttatcatttctagaagaggtcaccgctctgccccccttcttccccctcccccatctctcttctgcttttctaaattgtaatcataaataatgagtttcattcacagctccctgccagtgagctgctaattacacaaagtactgcttgtaatttacacagtaataaactgtaaatttaaacattacggcactttaagttaataatttttctgctgtaacaaatagctcatttttcacccatcttttcccttggcccccctaccatgtctgtctgtgaccaggaggcatagctataagaaatgcagaacatgaagaatatagtatatgaaaacttctcatttaactccactaccgcccggactctgacctcagagtaatttttctacagccagttctgctgaaatgtgtagcctgatgtttagcacggtccacacacatagatgaatatagacacaaatgtgtttgaagaacagccttgatgttcttggcattcacgcccgtgacttgtgttctctcaacacaacagttactcagatgtgtgttggtatgctttcccaggtgccatggtaggtaagcattgtgaatgtactcaagttaaatgaagagtgaattgccgttttccaattttttggaaatggttcgtttctgaactctttgtggtgttatgggtaagcttttacactataatcttgagaaccctgaatttaggaatcaattttatacaaatttctatttttatttcatgagatgatgtttgagggacaaagtacagagtaacaatttttgcaagtcacaaaattctcttgatgtatttatatttagtcagcagatatttacattttaccagtgaggatttggtaatgtcccaggatgaaggctgttggaactataatcaaatcacgtagctctctaggaagcttggtgtgttggcctgttaaaaattggctactgttgaattttctaaaaaaggatttttactcctatatacttcagtagttacaggaggtatagtacttattaaaataccatatatggtgaacagtgtctatgatgtatttataaagacttttggatcactagagaataataaatgtagggtaacatgtaatacttttaagatggattccaataaaaagaagtatagttgctgttttattttaagattgacttttaacatgtgccttttgaggttgccttagctggcacagttatgggaaagattgatattgtactttatatgtttgtttctgtggttggatgatactcttgtctgccttttctttttaggagaccagcataaacactttggggactgagaggataagccatatcattagtgaccctcggcagaaagatttctggttaccatcagctgggaaaagagaacgaaatcaggtaagatcatttttctttgtcatctttattttatcatttggtttccttttctttagaaagaataaagcgttggcttctgattttcctcacatttctgcttgtgcacatgagttcaatcccctgtctcccctttactccctggatgttcttgccgatgcttctcaccgaaggtgttcaccagcacactgctctgccagacaggcaaatgtacactggggaccaccatgttcacgtgacatcaagaggaagcggaaaccagtggccacagcatctttgtctagccccagtgcagttcacatggatgcagtggagccaaccacaccagcatcacaagcccccaaatcacccagctctgagtggttggtgaggacctctgcagcagagaaagccacagacgcaactactgctacattttttaaaatgccacaagaaaagagccctggatacagctagagagcaggacttcaccctccaggagctgactgggtgttgctgaagcaaatgttggactttgtgttagatagtcttgcatatcttaatcgacattcccagtcctttcaccaccagaaccaactcctctttcaaacacagcagtggattctttctctcagaaggtcatgttgtgggaatcttttttttaaatagtgaaatattgaggcagcaattttttacaaaaaggtcatcctctgctctatttgttaccttgttattgctgtctcaacatttactacagctccatttacagaactgttgcttttttgcagttgtctttgttcttgaaaaaccagtaactgcttctgcataccttttgtgtagagcttttaatatcatttgaggaagttccaaatttgtagccagttccaaacaaatttaaatattgagttgagacctgtatggaattgtgttcgcaggagataaggcttgcctttgagcctactcttgattcatgcagagtgccaataagataaatcaaccaagttttggggcctcaaaagagacaccagcaactgggccttgagaacttccatttttttgcagattgtctgcagaaactcagacagctcatcagcagcagcagctgtattgtattttacctcatcttcagagtttatgttctactgaaagaggacgtgtgtatacacacacacacacacacacacacacacagagattggtataatggagaagatggtttaggtgtacagcaaatttaaaatagtcagtggattgtgtcttactacttcatgtcccagtgtaagcctttatgtcctaagcaggactttattgttagtattataggctaataacctgcagcagaaattcatactctattataataatggcttcttggggccatgctttggggaagtaaaatgtctttttgacatgcctttatacatggcgtgtttatgatggctcagctgcatgtggagttatatatacagtcgtgcctgaagttggatgctactttgtcaaaatgagaaataagtgatggcctggagctgctggagagaagccacgctttctagaaaatattatcaggagtgtctgtcattcattcaggggcctagctgacagaagggctcttttttttataccaatgagtgcgtttactctgaaatacatagaagctcttggtgaagtgctccctgctctggtcacattgtagagggactcccactcatgcatctgcttattttctgtcttaaataggtgctgaatggggcagcacctccttcccccaaagtgcgattgcccctgtttcccatacgaagtgtaatgacgggttgcttttaaaattatagtccttatc

SEQ ID NO: 118188 - DNA, 6318 bp, Homo sapiens
tactgtataaggttctatacctggtagcttccaggtggtagttggtaccagaatgggcgcaaacttagtctcttctccattctgacttcaaacctgggtcactacaatttcttggatcacgaaaactgcattcttccttaaatggtgtcactaagttgtctttctgtttctttctgccatggtcattgtcagcagtgaccccaggccaaagaacagtttttcattcattctcaatacctcgatgagaccatgtgctactctgtgtttccacaactctagtgtgattttgaagttgtatgtttttctgttcctgtctagtgagacagtctctaatcttactggatctcatcattaggtaattcaatgacaagtttaattggggaaaagagagaaggatctagtcccccgaatttgttttgggtcctgtcccagttgtcttctggttagtaggtttttgtgcttaagaatatgttgacttcaggcatttaacaagggacaaaacatctatttttagtgacttaaggaagtggtaggaacagaatctaagtgtagccagatgaaaggtgacttattttgtttagacaggcagaactgtggactaccatgatctgtttcatcaaattattccaaaacaacagatcctttttcaggctttctttttctttttcttttctttctttctttttttcctaaacttccttttggcagatgtggcctcatggatgagctggtacacgacttagcctcagccttggagcagacatctgagcagaataagcttggtgaactgtgggaggagatggcgctgagcccccgacagcagaggcggcagcttcggaaacgccgaggtcggaagcgtcgttctgacttcactcacctggcagagcatacctgctgctacagcgaggcctctgagtcaagtctggatgaggccactaaggactgtcgagaagtggctccggtgaccaattttagtgactctgatgacacaatggtagccaaacgacacccagctctcaatgccattgtcaagagtaagcaacattcttggcatgaatctgactcctttactgaaaatgcaccttgtcgaccactcaggcgcaggcggaaggtgaagcgagtgacatcagaggtggctgctagccttcagcagaagctgaaggtgtcagattggagctatgagagaggctgcaggttcaagtctgctaagaagcagcgtctgtcccgctggaaggagaatactccctggacctcatcaggccacggattgtgtgaatcagcagaaaataggactttcctaagcaaaacaggaaggaaagaaaggatggagtgtgaaacagatgaacaaaaacagggctctgatgagaacatgtcagaatgtgaaaccagcagtgtgtgtagcagcagtgacactgggctctttaccaatgatgaagggcgacaaggtgatgacgaacagagtgattggttctatgaaggagaatgtgtcccaggattcactgtccctaatcttctgcccaagtgggctcctgatcattgttctgaagtagaaagaatggattctggattggataaattttcagattccacattccttttaccttctcggccagctcaaagagggtaccatactcgcttgaatcgtctacctggagctgcagctcgatgcctcagaaaggggcgaagaaggctggttgggaaggtgatacctctcacagttagcttggctcagtggggagataatattccctatgggagttgtgtatcctattaacaatcagaggtgctacagaactccctgaagttaatggagccaactggaatgtgttgggagtttacaagagtgaacattatgtagaatgtgaatggatatacaaataaaagatgaaacgtaattcatatagaagtactgacaaaaaaaaaaacactgtcattacagtgtctattgcctgtaaacctacaagcctgagctgtgtcttctgtaacttttgattaatgttatgttattattgtgtaagttaaaatactcttggcttctttatgactcctcttgaattcatgaatgcatctttgttctttcctaattttggtctttcatcctagaattcattaaaaaaaaaaaaacaaaactgttactgagtttcaagagcccctccttggccatgagggagaactatctgctgtttattcagttctgcctttgccagggatggtactagggactcagctcatttaatccttccagcaacctacaagggcaagcaccttcagcagatgaggaaaacttaggttcgaagaagttaaggaatgtctgatgttacccagataggaatggtagaatagagatttgaacccaggtctacttttatctttttacatttttattgaattttattttttactctactttgagattgaggaataaattaagacagggctcatcctcagtcagagaagatggtggtgggcaaagaataaggaagggagaggcattgagagcattaatttgtttgttcacttggtaagcatttagaatgcctgctaggtggcacaatatgtgccacagtctggcttcccttaaggggatactgttttatagtctgaccagggaacagttttctgaagttttaagcatgcaaaagaaatgagactgtttatttccagacgagcccaagattcttatttctttttatctttaaattcaagttcaaatcttttttttttttttgagatggaatctcgctctgtgacctaggctggaatgcaatggtgcgatctcggctcactgtaacttcctgccttccaggttcaagcaattctcctgcctcagcctcccaagtagctgggattacaggcgccccaccatgcctggctaatttttttgtatttttagtacagatggggttttaccatgttggctaggctggtctcaaacccctgacctcaggtgatccacccgcctcggcctcccaaagttctgggattacaggcatgagccaccgtgcccggcctcaagttcaaatcttgaattagaagacatttgattattggaaaactgatacctttcaaattactcattttacagacaaaacgctgctttttctgttttgggagcttattgttaacagggatagctagcagaatagcagtacatggggtggaagaaggagaggttttacttttattgtttaggcttgacagataatgttccccctgccacctgtgttactttctttcagctcttataaaataagagccatccacttccatggaaacaagtcactttatcttgaaggtttccctttagcttgcctggaagggagtgagggcctgttggatgtgcctttaatgatttcaaatgaataggataatatttacttgtttaattcatcttcatcaccttaaagggatatttatcatttctagaagaggtcaccgctctgccccccttcttccccctcccccatctctcttctgcttttctaaattgtaatcataaataatgagtttcattcacagctccctgccagtgagctgctaattacacaaagtactgcttgtaatttacacagtaataaactgtaaatttaaacattacggcactttaagttaataatttttctgctgtaacaaatagctcatttttcacccatcttttcccttggcccccctaccatgtctgtctgtgaccaggaggcatagctataagaaatgcagaacatgaagaatatagtatatgaaaacttctcatttaactccactaccgcccggactctgacctcagagtaatttttctacagccagttctgctgaaatgtgtagcctgatgtttagcacggtccacacacatagatgaatatagacacaaatgtgtttgaagaacagccttgatgttcttggcattcacgcccgtgacttgtgttctctcaacacaacagttactcagatgtgtgttggtatgctttcccaggtgccatggtaggtaagcattgtgaatgtactcaagttaaatgaagagtgaattgccgttttccaattttttggaaatggttcgtttctgaactctttgtggtgttatgggtaagcttttacactataatcttgagaaccctgaatttaggaatcaattttatacaaatttctatttttatttcatgagatgatgtttgagggacaaagtacagagtaacaatttttgcaagtcacaaaattctcttgatgtatttatatttagtcagcagatatttacattttaccagtgaggatttggtaatgtcccaggatgaaggctgttggaactataatcaaatcacgtagctctctaggaagcttggtgtgttggcctgttaaaaattggctactgttgaattttctaaaaaaggatttttactcctatatacttcagtagttacaggaggtatagtacttattaaaataccatatatggtgaacagtgtctatgatgtatttataaagacttttggatcactagagaataataaatgtagggtaacatgtaatacttttaagatggattccaataaaaagaagtatagttgctgttttattttaagattgacttttaacatgtgccttttgaggttgccttagctggcacagttatgggaaagattgatattgtactttatatgtttgtttctgtggttggatgatactcttgtctgccttttctttttaggagaccagcataaacactttggggactgagaggataagccatatcattagtgaccctcggcagaaagatttctggttaccatcagctgggaaaagagaacgaaatcaggtaagatcatttttctttgtcatctttattttatcatttggtttccttttctttagaaagaataaagcgttggcttctgattttcctcacatttctgcttgtgcacatgagttcaatcccctgtctcccctttactccctggatgttcttgccgatgcttctcaccgaaggtgttcaccagcacactgctctgccagacaggcaaatgtacactggggaccaccatgttcacgtgacatcaagaggaagcggaaaccagtggccacagcatctttgtctagccccagtgcaggtggtagaaggacagcccccctgccctgagacaacactcggaggcctgtattccagcgagagtgccctgacaagacagctctggccacccttgcctggctcctccaccttcccgtcagtttcgtgagttctccagccttttcccagctggtcattgttggtgaaagctaaggagcaagtaggagttctcaagatgaaatggatgacccatgagaccggtatggttatcattcccattttatacaagaagaaaagaaggctgagagagtttaagtcacttgctaccacatgagtaggttgcggcagagctgggacaggctcatcatagcattgatttcattgtgtcatgaatgcctgttttcttttctctttccccaattcagctgttaactggttgatggcatacaccacaatttttgttgactttaaaaatattgtaaagtatagcacatatacattattaaaagaaaaactgcagctgcagctgggctagattaaatttaaaggagtttaattgagcaatgaatgatttgtgattcgggtagcccccagaatcacagcagattcagagagactccggggacgcctcctggtcagaacaaatttatagatcaaaataagggaagtgacatacagaaatcagaagtgaggtacagaaacagctggattggttacaggttggcatttgccttatttgaacacagtttgaacgctcagcagtgtatgagtggttgaagtatggcggctgggattggccaagactcagctattgttacaggtgcatactcctaagttaggttttcaatcctgtctacctattaagttaggtcgcagttcatccacaaggactgaaatatagaagtatggagtccttctcagaccatttttagttcactttaacgacataaaactgcacaaaacatacagtataaagtgcaacggattattatacaacaaaacacctgtgtattcattgcccagacattgccagcattccagaaaatcctcccagaccccctgtcaattcttagccctcttcttcccttccaggaacagctcccatgaactctagccctacagttagttctatctattgcttagatttgtgagatttatccatgtgtgacatgtagctgtaatttgtgtattttcattttggtatatgatatagtttggttgtgtgtccctgcccaaatctcatattgaaatgtaatccacaa

SEQ ID NO: 118189 - DNA, 2995 bp, Homo sapiens
  misc_feature (2970)..(2970): n is a, c, g, or t
agagagggaagccccggcggtgagagtcggcccaaaaagcggcggccgttggaggtggctgcggcagctgatgtggcctcatggatgagctggtacacgacttagcctcagccttggagcagacatctgagcagaataagcttggtgaactgtgggaggagatggcgctgagcccccgacagcagaggcggcagcttcggaaacgccgaggtcggaagcgtcgttctgacttcactcacctggcagagcatacctgctgctacagcgaggcctctgagtcaagtctggatgaggccactaaggactgtcgagaagtggctccggtgaccaattttagtgactctgatgacacaatggtagccaaacgacacccagctctcaatgccattgtcaagagtaagcaacattcttggcatgaatctgactcctttactgaaaatgcaccttgtcgaccactcaggcgcaggcggaaggtgaagcgagtgacatcagaggtggctgctagccttcagcagaagctgaaggtgtcagattggagctatgagagaggctgcaggttcaagtctgctaagaagcagcgtctgtcccgctggaaggagaatactccctggacctcatcaggccacggattgtgtgaatcagcagaaaataggactttcctaagcaaaacaggaaggaaagaaaggatggagtgtgaaacagatgaacaaaaacagggctctgatgagaacatgtcagaatgtgaaaccagcagtgtgtgtagcagcagtgacactgggctctttaccaatgatgaagggcgacaaggtgatgacgaacagagtgattggttctatgaaggagaatgtgtcccaggattcactgtccctaatcttctgcccaagtgggctcctgatcattgttctgaagtagaaagaatggattctggattggataaattttcagattccacattccttttaccttctcggccagctcaaagagggtaccatactcgcttgaatcgtctacctggagctgcagctcgatgcctcagaaaggggcgaagaaggctggttgggaaggagaccagcataaacactttggggactgagaggataagccatatcattagtgaccctcggcagaaagatttctggttaccatcagctgggaaaagagaacgaaatcagttttgaactttgcagtaagaaagcagaatgaatctgatttgcatatggtttagttcaacatcagaatcctgcattgagaagtactatgttgaagcctaaacgtatggagcagaaggtagagctgctttgggtgaagtggggtcaaagccttagagcagtggtccccaaccttatgtcaccaggaaccatttttgtagaagacagtttttccatggacccgggttgggggcgtggtgaggggggtggttttgggatgattcaaatgcattacatttattgtgtactttatttctgttgttattacattgtaatatataatgaaataattatacaactggtcataatgtagcttgtgctcctgcaactacacagtcccacctgggggtgatgggaaacaatgacagatcatcaggcattaggctttcataaggtgtgcacaacctaggtccctctcatgctcggttcacagtagggtttgcactcctataagaatctaatgtggctgttgatctgacaggaggtagagctcaggcggtaatgcccacgatggggagcagctgcttgctgacagctcacctcctgctgtgcggccccggggttggggacccctgccttagagcctctccttcttagtcttttccctggctaccccctgaggggccccttggcatatttaggcccatgtggagggctcacaatttaaaaattaactcacagtggttatcgatatgtttctttatgtgtgaagctttgtgatttttttggaggattgcattatcttggtgattagttgtaaaatagatgaacactgacaggtgaaaagttgtaggcttcctgtttgttgtgggtttttttgttttttttttttaacaacttagtagcttactgagttgatatacacgatccacattttagacttggaatcttcattatgaatttgctgtttcaaaatgaactagagtggtagaagacataactggtgtatatgtatgagatgattttagatggcatatagatgcccaatttttaagttatgtattatagtgtacattggaaaagatgtaattatggtatcaagcctgttatttcacggaaatatagtaaggacaaagctgagcaaaaataattgatatgaggaaaaataataagtaaacagtagtacaggttgtaggcagataaggaaagtcatgaaggtggtatgtgagagactgcagtttggggaacactaagctagagcactaatcatgtttgcatcagaggatccaaaggcagaaggggacctgtggcagtcacctgatccagatccgttatttgcaaatgacgaactggagatctgtaagattcaaactatttgcccaaagtgatacagctaatagaaccaagattggaacctctgtggcagatagaacagttgcttagtttgtattctcataaaacaagtttgaagttatcattccgggttcttccagtctttgtatgtcagagggtattaagttctaaactttttagagaggactgttatgttgtgggaaaagtccaaagaaagctagcaaacataaagtgagggatctcctttgatcctcacagccaccttttgaagtcaaatagatgttttgcagatgagaaactgaaattatactctgaaagcaatatttcatttagccctcataataaccctgtaaaataggtagggcaggcctggcacagtggctcatgcttgtaatcccagcactttgggaggctgaggcaggtggatcacctgaggtcaggggttcgagaccagcctggccaacatggngaaaccctgtctctactaaaaatac

SEQ ID NO: 118190 - DNA, 1821 bp, Homo sapiens
tgtttggtataacaagagttggatagtcaaaggggaaaagtaatcaaatgtaggttaccctttaggatcaggtccgtttcatgtaagccttactaaaatagtcttattcattcctgcagttcaatcccctgtctcccctttactccctggatgttcttgccgatgcttctcaccgaaggtgttcaccagcacactgctctgccagacaggcaaatgtacactggggaccaccatgttcacgtgacatcaagaggaagcggaaaccagtggccacagcatctttgtctagccccagtgcagttcacatggatgcagtggagccaaccacaccagcatcacaagcccccaaatcacccagctctgagtggttggtgaggacctctgcagcagagaaagccacagacgcaactactgctacattttttaaaatgccacaagaaaagagccctggatacagctagagagcaggacttcaccctccaggagctgactgggtgttgctgaagcaaatgttggactttgtgttagatagtcttgcatatcttaatcgacattcccagtcctttcaccaccagaaccaactcctctttcaaacacagcagtggattctttctctcagaaggtcatgttgtgggaatcttttttttaaatagtgaaatattgaggcagcaattttttacaaaaaggtcatcctctgctctatttgttaccttgttattgctgtctcaacatttactacagctccatttacagaactgttgcttttttgcagttgtctttgttcttgaaaaaccagtaactgcttctgcataccttttgtgtagagcttttaatatcatttgaggaagttccaaatttgtagccagttccaaacaaatttaaatattgagttgagacctgtatggaattgtgttcgcaggagataaggcttgcctttgagcctactcttgattcatgcagagtgccaataagataaatcaaccaagttttggggcctcaaaagagacaccagcaactgggccttgagaacttccatttttttgcagattgtctgcagaaactcagacagctcatcagcagcagcagctgtattgtattttacctcatcttcagagtttatgttctactgaaagaggacgtgtgtatacacacacacacacacacacacacacacagagattggtataatggagaagatggtttaggtgtacagcaaatttaaaatagtcagtggattgtgtcttactacttcatgtcccagtgtaagcctttatgtcctaagcaggactttattgttagtattataggctaataacctgcagcagaaattcatactctattataataatggcttcttggggccatgctttggggaagtaaaatgtctttttgacatgcctttatacatggcgtgtttatgatggctcagctgcatgtggagttatatatacagtcgtgcctgaagttggatgctactttgtcaaaatgagaaataagtgatggcctggagctgctggagagaagccacgctttctagaaaatattatcaggagtgtctgtcattcattcaggggcctagctgacagaagggctcttttttttataccaatgagtgcgtttactctgaaatacatagaagctcttggtgaagtgctccctgctctggtcacattgtagagggactcccactcatgcatctgcttattttctgtcttaaataggtgctgaatggggcagcacctccttcccccaaagtgcgattgcccctgtttcccatacgaagtgtaatgacgggttgcttttaaaattatagtccttatc

SEQ ID NO: 118191 - DNA, 377 bp, Homo sapiens
aaggtgttcaccagcacactgctctgccaggtaattgtcttttagtagcggttatttgcttctggacaatactatattcctttctattacccctcaaattatagagtatgcttgtgtacagtatccaatttgatcctgacaatcttttgaggtaaatagatgttttacagatgtagaaactgaggcagagcagtgaagtatctttcctgtggtccaaggctagtatgtgattaagtctcaactttgacctaagtcttctggctcatatttcattttatttctgctgctaaaagccccatcttcaaacaacattattaatgttccttgccatgagcctgcaataccctgcataatctgacttctccctacatgtacag

SEQ ID NO: 118192 - DNA, 6230 bp, Homo sapiens
tactgtataaggttctatacctggtagcttccaggtggtagttggtaccagaatgggcgcaaacttagtctcttctccattctgacttcaaacctgggtcactacaatttcttggatcacgaaaactgcattcttccttaaatggtgtcactaagttgtctttctgtttctttctgccatggtcattgtcagcagtgaccccaggccaaagaacagtttttcattcattctcaatacctcgatgagaccatgtgctactctgtgtttccacaactctagtgtgattttgaagttgtatgtttttctgttcctgtctagtgagacagtctctaatcttactggatctcatcattaggtaattcaatgacaagtttaattggggaaaagagagaaggatctagtcccccgaatttgttttgggtcctgtcccagttgtcttctggttagtaggtttttgtgcttaagaatatgttgacttcaggcatttaacaagggacaaaacatctatttttagtgacttaaggaagtggtaggaacagaatctaagtgtagccagatgaaaggtgacttattttgtttagacaggcagaactgtggactaccatgatctgtttcatcaaattattccaaaacaacagatcctttttcaggctttctttttctttttcttttctttctttctttttttcctaaacttccttttggcagatgtggcctcatggatgagctggtacacgacttagcctcagccttggagcagacatctgagcagaataagcttggtgaactgtgggaggagatggcgctgagcccccgacagcagaggcggcagcttcggaaacgccgaggtcggaagcgtcgttctgacttcactcacctggcagagcatacctgctgctacagcgaggcctctgagtcaagtctggatgaggccactaaggactgtcgagaagtggctccggtgaccaattttagtgactctgatgacacaatggtagccaaacgacacccagctctcaatgccattgtcaagagtaagcaacattcttggcatgaatctgactcctttactgaaaatgcaccttgtcgaccactcaggcgcaggcggaaggtgaagcgagtgacatcagaggtggctgctagccttcagcagaagctgaaggtgtcagattggagctatgagagaggctgcaggttcaagtctgctaagaagcagcgtctgtcccgctggaaggagaatactccctggacctcatcaggccacggattgtgtgaatcagcagaaaataggactttcctaagcaaaacaggaaggaaagaaaggatggagtgtgaaacagatgaacaaaaacagggctctgatgagaacatgtcagaatgtgaaaccagcagtgtgtgtagcagcagtgacactgggctctttaccaatgatgaagggcgacaaggtgatgacgaacagagtgattggttctatgaaggagaatgtgtcccaggattcactgtccctaatcttctgcccaagtgggctcctgatcattgttctgaagtagaaagaatggattctggattggataaattttcagattccacattccttttaccttctcggccagctcaaagagggtaccatactcgcttgaatcgtctacctggagctgcagctcgatgcctcagaaaggggcgaagaaggctggttgggaaggtgatacctctcacagttagcttggctcagtggggagataatattccctatgggagttgtgtatcctattaacaatcagaggtgctacagaactccctgaagttaatggagccaactggaatgtgttgggagtttacaagagtgaacattatgtagaatgtgaatggatatacaaataaaagatgaaacgtaattcatatagaagtactgacaaaaaaaaaaacactgtcattacagtgtctattgcctgtaaacctacaagcctgagctgtgtcttctgtaacttttgattaatgttatgttattattgtgtaagttaaaatactcttggcttctttatgactcctcttgaattcatgaatgcatctttgttctttcctaattttggtctttcatcctagaattcattaaaaaaaaaaaaacaaaactgttactgagtttcaagagcccctccttggccatgagggagaactatctgctgtttattcagttctgcctttgccagggatggtactagggactcagctcatttaatccttccagcaacctacaagggcaagcaccttcagcagatgaggaaaacttaggttcgaagaagttaaggaatgtctgatgttacccagataggaatggtagaatagagatttgaacccaggtctacttttatctttttacatttttattgaattttattttttactctactttgagattgaggaataaattaagacagggctcatcctcagtcagagaagatggtggtgggcaaagaataaggaagggagaggcattgagagcattaatttgtttgttcacttggtaagcatttagaatgcctgctaggtggcacaatatgtgccacagtctggcttcccttaaggggatactgttttatagtctgaccagggaacagttttctgaagttttaagcatgcaaaagaaatgagactgtttatttccagacgagcccaagattcttatttctttttatctttaaattcaagttcaaatcttttttttttttttgagatggaatctcgctctgtgacctaggctggaatgcaatggtgcgatctcggctcactgtaacttcctgccttccaggttcaagcaattctcctgcctcagcctcccaagtagctgggattacaggcgccccaccatgcctggctaatttttttgtatttttagtacagatggggttttaccatgttggctaggctggtctcaaacccctgacctcaggtgatccacccgcctcggcctcccaaagttctgggattacaggcatgagccaccgtgcccggcctcaagttcaaatcttgaattagaagacatttgattattggaaaactgatacctttcaaattactcattttacagacaaaacgctgctttttctgttttgggagcttattgttaacagggatagctagcagaatagcagtacatggggtggaagaaggagaggttttacttttattgtttaggcttgacagataatgttccccctgccacctgtgttactttctttcagctcttataaaataagagccatccacttccatggaaacaagtcactttatcttgaaggtttccctttagcttgcctggaagggagtgagggcctgttggatgtgcctttaatgatttcaaatgaataggataatatttacttgtttaattcatcttcatcaccttaaagggatatttatcatttctagaagaggtcaccgctctgccccccttcttccccctcccccatctctcttctgcttttctaaattgtaatcataaataatgagtttcattcacagctccctgccagtgagctgctaattacacaaagtactgcttgtaatttacacagtaataaactgtaaatttaaacattacggcactttaagttaataatttttctgctgtaacaaatagctcatttttcacccatcttttcccttggcccccctaccatgtctgtctgtgaccaggaggcatagctataagaaatgcagaacatgaagaatatagtatatgaaaacttctcatttaactccactaccgcccggactctgacctcagagtaatttttctacagccagttctgctgaaatgtgtagcctgatgtttagcacggtccacacacatagatgaatatagacacaaatgtgtttgaagaacagccttgatgttcttggcattcacgcccgtgacttgtgttctctcaacacaacagttactcagatgtgtgttggtatgctttcccaggtgccatggtaggtaagcattgtgaatgtactcaagttaaatgaagagtgaattgccgttttccaattttttggaaatggttcgtttctgaactctttgtggtgttatgggtaagcttttacactataatcttgagaaccctgaatttaggaatcaattttatacaaatttctatttttatttcatgagatgatgtttgagggacaaagtacagagtaacaatttttgcaagtcacaaaattctcttgatgtatttatatttagtcagcagatatttacattttaccagtgaggatttggtaatgtcccaggatgaaggctgttggaactataatcaaatcacgtagctctctaggaagcttggtgtgttggcctgttaaaaattggctactgttgaattttctaaaaaaggatttttactcctatatacttcagtagttacaggaggtatagtacttattaaaataccatatatggtgaacagtgtctatgatgtatttataaagacttttggatcactagagaataataaatgtagggtaacatgtaatacttttaagatggattccaataaaaagaagtatagttgctgttttattttaagattgacttttaacatgtgccttttgaggttgccttagctggcacagttatgggaaagattgatattgtactttatatgtttgtttctgtggttggatgatactcttgtctgccttttctttttaggagaccagcataaacactttggggactgagaggataagccatatcattagtgaccctcggcagaaagaaaagaataaagcgttggcttctgattttcctcacatttctgcttgtgcacatgagttcaatcccctgtctcccctttactccctggatgttcttgccgatgcttctcaccgaaggtgttcaccagcacactgctctgccagacaggcaaatgtacactggggaccaccatgttcacgtgacatcaagaggaagcggaaaccagtggccacagcatctttgtctagccccagtgcaggtgattacatgcggttatcatttattgagcatgtaccgtgtgccaggcactaaattatgtgttttgtataccttttcatgtaatgtttgtgatagtgtaggtcattttattcccactttacatgggaaaattgagactacaagaaataattagcctagttcttgctgactctgaagtctgtgctttttcactgttacatggctatctagagtttgaaaccctatattccactatcagcaatctccagtcatctgagcttttgttttagcagacaggaaattaggtccatgttaatgaaagtccaggtgaagtggcagttcagtcaggcagtcacacagggttatttactttcttattttgcatacagtacagtacattcttactgcttttataagtagaatgctaatattttactggtcatgacattcctaattaaaaacaattttttaggctaaaacttttcagttttttttttttttttttttaacaaaactaacactaattggtagaagccaaaatagtgcttctctttggtggggggcagtgaccaagagagggcacaaagaaaccctctgggctgttggcagtgctccatatgatgaacttggtgggggtgtgtggctgcttacataggtagaatctggagctgtgcacttagggttgatgtccttcactgtgtgtatgttatccttcaatgaaaaaaaggggagagttatgtatttattaatatttcagtgagaaaactggatattgaatataccattgaatattttattttctttagaaaatactacctattatataaatcagaacagttgatagctgaatagagagtaaacctcacacagatggggagggagccctatcctctaccttaacttagtaagttttggtgaactgtgaaattgtcctctttgtgcttctgtttggaaagtctgctttatggtggttcatactggacaatcttcattacaggtctgatgattatagtacttttttttcagtgctttccacatggccaggccctgagctgaacactttgtaaacattatttcacctaatctttgcaacagccttataaggtagatgctgtttttattcccaatttacacatgagaaaaccaaggcttaaatcacttccctgaggccacatggttgataaattgcagagccaagatcagaccggtttccttgtgactctagagctgtcctgcagatgttcttctt

SEQ ID NO: 118193 - DNA, 5740 bp, Homo sapiens
tactgtataaggttctatacctggtagcttccaggtggtagttggtaccagaatgggcgcaaacttagtctcttctccattctgacttcaaacctgggtcactacaatttcttggatcacgaaaactgcattcttccttaaatggtgtcactaagttgtctttctgtttctttctgccatggtcattgtcagcagtgaccccaggccaaagaacagtttttcattcattctcaatacctcgatgagaccatgtgctactctgtgtttccacaactctagtgtgattttgaagttgtatgtttttctgttcctgtctagtgagacagtctctaatcttactggatctcatcattaggtaattcaatgacaagtttaattggggaaaagagagaaggatctagtcccccgaatttgttttgggtcctgtcccagttgtcttctggttagtaggtttttgtgcttaagaatatgttgacttcaggcatttaacaagggacaaaacatctatttttagtgacttaaggaagtggtaggaacagaatctaagtgtagccagatgaaaggtgacttattttgtttagacaggcagaactgtggactaccatgatctgtttcatcaaattattccaaaacaacagatcctttttcaggctttctttttctttttcttttctttctttctttttttcctaaacttccttttggcagatgtggcctcatggatgagctggtacacgacttagcctcagccttggagcagacatctgagcagaataagcttggtgaactgtgggaggagatggcgctgagcccccgacagcagaggcggcagcttcggaaacgccgaggtcggaagcgtcgttctgacttcactcacctggcagagcatacctgctgctacagcgaggcctctgagtcaagtctggatgaggccactaaggactgtcgagaagtggctccggtgaccaattttagtgactctgatgacacaatggtagccaaacgacacccagctctcaatgccattgtcaagagtaagcaacattcttggcatgaatctgactcctttactgaaaatgcaccttgtcgaccactcaggcgcaggcggaaggtgaagcgagtgacatcagaggtggctgctagccttcagcagaagctgaaggtgtcagattggagctatgagagaggctgcaggttcaagtctgctaagaagcagcgtctgtcccgctggaaggagaatactccctggacctcatcaggccacggattgtgtgaatcagcagaaaataggactttcctaagcaaaacaggaaggaaagaaaggatggagtgtgaaacagatgaacaaaaacagggctctgatgagaacatgtcagaatgtgaaaccagcagtgtgtgtagcagcagtgacactgggctctttaccaatgatgaagggcgacaaggtgatgacgaacagagtgattggttctatgaaggagaatgtgtcccaggattcactgtccctaatcttctgcccaagtgggctcctgatcattgttctgaagtagaaagaatggattctggattggataaattttcagattccacattccttttaccttctcggccagctcaaagagggtaccatactcgcttgaatcgtctacctggagctgcagctcgatgcctcagaaaggggcgaagaaggctggttgggaaggtgatacctctcacagttagcttggctcagtggggagataatattccctatgggagttgtgtatcctattaacaatcagaggtgctacagaactccctgaagttaatggagccaactggaatgtgttgggagtttacaagagtgaacattatgtagaatgtgaatggatatacaaataaaagatgaaacgtaattcatatagaagtactgacaaaaaaaaaaacactgtcattacagtgtctattgcctgtaaacctacaagcctgagctgtgtcttctgtaacttttgattaatgttatgttattattgtgtaagttaaaatactcttggcttctttatgactcctcttgaattcatgaatgcatctttgttctttcctaattttggtctttcatcctagaattcattaaaaaaaaaaaaacaaaactgttactgagtttcaagagcccctccttggccatgagggagaactatctgctgtttattcagttctgcctttgccagggatggtactagggactcagctcatttaatccttccagcaacctacaagggcaagcaccttcagcagatgaggaaaacttaggttcgaagaagttaaggaatgtctgatgttacccagataggaatggtagaatagagatttgaacccaggtctacttttatctttttacatttttattgaattttattttttactctactttgagattgaggaataaattaagacagggctcatcctcagtcagagaagatggtggtgggcaaagaataaggaagggagaggcattgagagcattaatttgtttgttcacttggtaagcatttagaatgcctgctaggtggcacaatatgtgccacagtctggcttcccttaaggggatactgttttatagtctgaccagggaacagttttctgaagttttaagcatgcaaaagaaatgagactgtttatttccagacgagcccaagattcttatttctttttatctttaaattcaagttcaaatcttttttttttttttgagatggaatctcgctctgtgacctaggctggaatgcaatggtgcgatctcggctcactgtaacttcctgccttccaggttcaagcaattctcctgcctcagcctcccaagtagctgggattacaggcgccccaccatgcctggctaatttttttgtatttttagtacagatggggttttaccatgttggctaggctggtctcaaacccctgacctcaggtgatccacccgcctcggcctcccaaagttctgggattacaggcatgagccaccgtgcccggcctcaagttcaaatcttgaattagaagacatttgattattggaaaactgatacctttcaaattactcattttacagacaaaacgctgctttttctgttttgggagcttattgttaacagggatagctagcagaatagcagtacatggggtggaagaaggagaggttttacttttattgtttaggcttgacagataatgttccccctgccacctgtgttactttctttcagctcttataaaataagagccatccacttccatggaaacaagtcactttatcttgaaggtttccctttagcttgcctggaagggagtgagggcctgttggatgtgcctttaatgatttcaaatgaataggataatatttacttgtttaattcatcttcatcaccttaaagggatatttatcatttctagaagaggtcaccgctctgccccccttcttccccctcccccatctctcttctgcttttctaaattgtaatcataaataatgagtttcattcacagctccctgccagtgagctgctaattacacaaagtactgcttgtaatttacacagtaataaactgtaaatttaaacattacggcactttaagttaataatttttctgctgtaacaaatagctcatttttcacccatcttttcccttggcccccctaccatgtctgtctgtgaccaggaggcatagctataagaaatgcagaacatgaagaatatagtatatgaaaacttctcatttaactccactaccgcccggactctgacctcagagtaatttttctacagccagttctgctgaaatgtgtagcctgatgtttagcacggtccacacacatagatgaatatagacacaaatgtgtttgaagaacagccttgatgttcttggcattcacgcccgtgacttgtgttctctcaacacaacagttactcagatgtgtgttggtatgctttcccaggtgccatggtaggtaagcattgtgaatgtactcaagttaaatgaagagtgaattgccgttttccaattttttggaaatggttcgtttctgaactctttgtggtgttatgggtaagcttttacactataatcttgagaaccctgaatttaggaatcaattttatacaaatttctatttttatttcatgagatgatgtttgagggacaaagtacagagtaacaatttttgcaagtcacaaaattctcttgatgtatttatatttagtcagcagatatttacattttaccagtgaggatttggtaatgtcccaggatgaaggctgttggaactataatcaaatcacgtagctctctaggaagcttggtgtgttggcctgttaaaaattggctactgttgaattttctaaaaaaggatttttactcctatatacttcagtagttacaggaggtatagtacttattaaaataccatatatggtgaacagtgtctatgatgtatttataaagacttttggatcactagagaataataaatgtagggtaacatgtaatacttttaagatggattccaataaaaagaagtatagttgctgttttattttaagattgacttttaacatgtgccttttgaggttgccttagctggcacagttatgggaaagattgatattgtactttatatgtttgtttctgtggttggatgatactcttgtctgccttttctttttaggagaccagcataaacactttggggactgagaggataagccatatcattagtgaccctcggcagaaagatttctggttaccatcagctgggaaaagagaacgaaatcaggtaagatcatttttctttgtcatctttattttatcatttggtttccttttctttagaaagaataaagcgttggcttctgattttcctcacatttctgcttgtgcacatgagttcaatcccctgtctcccctttactccctggatgttcttgccgatgcttctcaccgaaggtgttcaccagcacactgctctgccagacaggcaaatgtacactggggaccaccatgttcacgtgacatcaagaggaagcggaaaccagtggccacagcatctttgtctagccccagtgcaggtggtagaaggacagcccccctgccctgagacaacactcggaggcctgtattccagcgagagtgccctgacaagacagctctggccacccttgcctggctcctccaccttcccgtcagtttcgtgagttctccagccttttcccaggtgctcagaagttatttaggatctgagactcttgcttgggggtgatgagtagctcctgtatttgcagaatgaattctcggtgggacctttggaacaagcttccatgaaataaatggccatattggagaagcccaagtggcaaggaactgtcagcagtctctaagagctgagggtagactccagcaagaaactgaaaccctcagtctgacagccacaaggaaataaattctgccaacaacctgaagaagcttggagcagatctttcctcagttgagcctctgatgagactgcagcccgagctgtcacctggatagcagctggtgaaacccttcaacagagaaaccagccaacctgtgtgtaaacttctgacctgcagaaactgtagataaagagtgtgtgttatttagaactgctaagtttgtggtagttaagcagcatagaaaatgaatacagtaggccaggagtggtggctcacgcctgtaatcccagcacttt

SEQ ID NO: 118194 - DNA, 1339 bp, Homo sapiens
attcggcagcgaggttccagcccccagcagccccgtcctgggctacatgaggggagtataaaccacccaagtactgtcaggactcaccaccagaaccaactcctctttcaaacacagcagtggattctttctctcagaaggtcatgttgtgggaatcttttttttaaatagtgaaatattgaggcagcaattttttacaaaaaggtcatcctctgctctatttgttaccttgttattgctgtctcaacatttactacagctccatttacagaactgttgcttttttgcagttgtctttgttcttgaaaaaccagtaactgcttctgcataccttttgtgtagagcttttaatatcatttgaggaagttccaaatttgtagccagttccaaacaaatttaaatattgagttgagacctgtatggaattgtgttcgcaggagataaggcttgcctttgagcctactcttgattcatgcagagtgccaataagataaatcaaccaagttttggggcctcaaaagagacaccagcaactgggccttgagaacttccatttttttgcagattgtctgcagaaactcagacagctcatcagcagcagcagctgtattgtattttacctcatcttcagagtttatgttctactgaaagaggacgtgtgtatacacacacacacacacacacacacacacagagattggtataatggagaagatggtttaggtgtacagcaaatttaaaatagtcagtggattgtgtcttactacttcatgtcccagtgtaagcctttatgtcctaagcaggactttattgttagtattataggctaataacctgcagcagaaattcatactctattataataatggcttcttggggccatgctttggggaagtaaaatgtctttttgacatgcctttatacatggcgtgtttatgatggctcagctgcatgtggagttatatatacagtcgtgcctgaagttggatgctactttgtcaaaatgagaaataagtgatggcctggagctgctggagagaagccacgctttctagaaaatattatcaggagtgtctgtcattcattcaggggcctagctgacagaagggctcttttttttataccaatgagtgcgtttactctgaaatacatagaagctcttggtgaagtgctccctgctctggtcacattgtagagggactcccactcatgcatctgcttattttctgtcttaaataggtgctgaatggggcagcacctccttcccccaaagtgcgattgcccctgtttcccatacgaagtgtaatgacgggttgcttttaaaattatagtccttatc

SEQ ID NO: 118195 - DNA, 603 bp, Homo sapiens
taaattgaaaagtataacagctgaaatgaaaaattcactagaagcgcacaagagtagatttaaactggcaaaagaaagcattagcaaacttgaagatggactgccagcttacattagcaacacgcaaaaacataaaaacttaaaataacataataaaagcagaacattaaattcttccatgccatgagcacagctaaagtcaatgcttgcaagagtagaaaagcaattttctttatggctgttacagtgctccttatggaataatattttaatcttaaaggattgattgaaaggaaaccattaggtaactaacagtttgtggacagggaatacaaatcacaaaggtttcatgagaatgactaaagttgtagaatgaatcagagaatctaaagaccttgctaattatagctaatgtgattaagtgccagcttttttttggagacagggtctgggtttctcacccaggtctgttgcccaggctggagcatgaccactgctcaatgcacccctcaacctccggggctcaagcaatcctcctgcctcaggttcctgtgtagctgggaccacaggcctgtgctaccatgcccagctaatttttgattt

SEQ ID NO: 118196 - DNA, 657 bp, Homo sapiens
taaattgaaaagtataacagctgaaatgaaaaattcactagaagcgcacaagagtagatttaaactggcaaaagaaagcattagcaaacttgaagatggactgccagcttacattagcaacacgcaaaaacataaaaacttaaaataacataataaaagcagaacattaaattcttccatgccatgagcacagctaaagtcaatgcttgcaagagtagggagagggtcaagagagaaacacaggaaaaatagagaaaggtgagacatcttttaaaagcaattttctttatggctgttacagtgctccttatggaataatattttaatcttaaaggattgattgaaaggaaaccattaggtaactaacagtttgtggacagggaatacaaatcacaaaggtttcatgagaatgactaaagttgtagaatgaatcagagaatctaaagaccttgctaattatagctaatgtgattaagtgccagcttttttttggagacagggtctgggtttctcacccaggtctgttgcccaggctggagcatgaccactgctcaatgcacccctcaacctccggggctcaagcaatcctcctgcctcaggttcctgtgtagctgggaccacaggcctgtgctaccatgcccagctaatttttgattt

SEQ ID NO: 118197 - DNA, 512 bp, Homo sapiens
ttacccaccactctacacacaatatatacaccactctacaatgtacacaccactctcaatgtacacaccactctacaatgaacacaccactctacacacaatgtacacaccactctcaatgtacataccactctacaatgaacacaccacactacacacaatgtacacaccactctgcaaacaatgtacacaccactctacaatgaacacaccactctacacgcagtgtacacaccactctacaatgaacacaccactctacacaccatgtacatgccactctacaatttacccaccactctacacacaatgtatacaccactctacaatgaacaccccactctacacaccactctacaatgtacacaccatgctacaatgaacacaccactctacactgaacacaccactctacacacaatgtacacaccactctacaatgtacacacctctctacacaatgtacacaccactctacaatgtacacaccactctacacacaatgtacacac

SEQ ID NO: 118198 - DNA, 491 bp, Homo sapiens
agtagattgttctgactatgctgcgggtgttggacttctattttcagatagcattatgcatcatgattttattaactctctggtatttgtaacattaaaaatactacagattggtttacttactgtgttcacagttcatcataacttcagtcatcttaaaatgatttcatttaagccttcttataaactgctttagaggcaactaattgtagcttagtattcagaaagaccaggctaataaagcctaatattcctttgcagttgaaccactgtgaataattcagttattaaaatctgtgacctgtagtgtaaaagaacgaagcatttactttttctgcctttaaaacattttttaaaattttataagatattataactccatatgttgattttttttttttgtgttttgtttgaactacagtgtgattctaaggaatccttaaaaaatgtgtagcacccttgaaatatgagtatagatgaatatttatagt

SEQ ID NO: 118199 - DNA, 349 bp, Homo sapiens
tgtgtgtgaaatgaatttgtgtggagcgttatgtgaatttttatgaacttatcttttattgttgatctagaaatgcttgtgataacctagaattccagacctcggtttcttatgtggataacaatgattggagattttggatagggagctaactttgctgtggaattgagatactaattatttgtgtaggattgataaatttaggatcaaaagtagaggtatgacacatttcaaaactgccttagagcaggggggtgttcaatcttttggcttccctgggccacactgaaagaagaattgtcttggaccacatataaaatacacgaacgctaatgatagctgatgaact

SEQ ID NO: 118200 - DNA, 279 bp, Homo sapiens
ggctccagccatcttgtctgaattgcaagctggaggaaggaagaaagacagaaaagcaagaagggacatctcccaccagagtcagatccctttagcagctttgccttatgttccatacaagacttctgccaatatctcattgaccagaacttagccacatggctatacctagtagcaaagggaggctgagaagtgcagtcttttattctgagtaccaaggtaccacctaaaaatcagggttccattattagtgggaaatggatgtcataagcagacagc

SEQ ID NO: 118201 - DNA, 575 bp, Homo sapiens
agcagtatcaggggatccccagccctatcccaggaaaagcagcacccctcaagtggcaaacagtgacctccacacccccacgcctgccttcctaagtcctgtccgtggagatggaggggcagacaggggccagttcctgggagggcagtgtgaccaggagcaaggaagcagagtgcccctggcagagccagtcgctcaacctgctccacactaactacacctcagagcgtctacaaatgggaggaggtcacaccaccctgctctgccccacctctgtccaccacagccttcctgcagaccctgtgcccttggttgtcctaaatatcccacaggaaagataatcatgatacatatgaggaaactgaggcacggggggggggggcagcttgcccagaaccacccccattctgcaccttcttttcctctttattcccacaaaagcccaggaaggaggaggcatgaacctaggagatggaggcttcgccttcactgtgtcttacggatgcaggcacggaggcatgcgaggattaagtggtttgcccgagggctccagctgagcgacacttgaacctgca

SEQ ID NO: 118202 - DNA, 362 bp, Homo sapiens
actccatgaaaggctagaagctttgccatgaacttttcagggtgaaacattaatgatggtgatctatactggaggtcacataattctcactttcctgattctcccatacacagggaataacgaaaaaatgaaattcctaaacttcaaagacatttccaactggaggccccatatacaaccaattagctggccagtgggtggcgccaaaggtttatcacggcctttgggcgaagggttcccatttggtcccgctggaaagcaattcagttatccattcagcacacatagatggctgtgtgccatgtgctgcgtcttgagacgagaaagacagagtctaatttcaattcacaccagggactaag

SEQ ID NO: 118203 - DNA, 369 bp, Homo sapiens
tttacatgaacagcctcaaggacatcattcacatgggccacccagagggcactgcaccctcctgaggtggctgcccgggcctcatctcacttccctactcccaaactcgagcatgctgttgcaccacctcttccccatccaaactcgggctgctccttgtgcaggtgctaatggagtgttaagtctcagaattcatagcattaatggtactatcaacaatatcagtacctttgataccagcagttaataccaatgatcaatcctaataatccatcatgttagctatagagctaaatggggctcattcctacatgcagaaggagatttcatccctggaagtggaggcaccaggacagagaggttttgggc

SEQ ID NO: 118204 - DNA, 235 bp, Homo sapiens
tggagagggatacatggcaagaaactgcaggtggcctccaggagctaagggaagcctctggataataaccagcaagaaaatgccgaacacagccttaaggccacaaggagatgaattccactaacatcctcagagagcttaaggcagaactttctgcagttcagcctctgataagaccaaagccccagctgacatcttaaattgcagcctactaagaccctgggcaggggaccca

SEQ ID NO: 118205 - DNA, 319 bp, Homo sapiens
catttcttgaaaattttaattctcatagctccaatgacactgcattactttggctcacccgccacatgtcaatgtttcctttttctgtgtgtgattgtagtccacctgcccacagcatcctgctctcacctgtaggctttacaccaatggtgagtctttgctttctcattttctgtatttcattcaagagttttcttcaagcttcagctatgactcttatttgccttgtgtaaaacagtatcacctcactatacaacgttaagaatatcatttaatctgagattgcttctctctcatttatttatttatttattttttt

SEQ ID NO: 118206 - DNA, 471 bp, Homo sapiens
aataaataaattattcgaacagctctattagttccatcctttaccttaaaatatagcatatttataacgttattgaaatttttcaaaatcctcagatgcaagataccttattacaatagaatgattcagccttactttaaaatgttcatggaaaaaataaaataaaatgttcatggagtatgaagatcacagtctttgaggtcagagaaactgagattcaaagaccagctctgttatttattagcagtttgacctcgattccatcatctgtaaaatgcagatgtctaccccttatagtcttacggtgaacaacagaattaagataaaaaaatttttttttgaaagagtcctgctctgttgcccaggctggaatgcagtggcacaatctcagctcactgcaacctccacttcccagttcaagcaattctcctgcctcagcctcccaagtagctgggactacaggcacgcacc

SEQ ID NO: 118207 - DNA, 634 bp, Homo sapiens
ggaggtcaaggctgcagtgagctgtgattgcaccactgcactccagcctgggtgacagagcaaaaccctgtcacaagaaacaataaataaaataaaataaaataaaataataaaataaccgttagcaagattaaccaagaagagcgaaaatccaaataacctcactaagaaacgaaacaggaaatattacaactgacaccacagaaatacaaaagatcattcaaggcaactatgaacatctttatgcacataaactagaaaacctagaagaagtggataaattcctggaaaaatacaaccctcctagcttaaatcaggaagaattagataccctgaagagaccaataacaagcagcaagattgaaatggtaatttaaaaattatcaacaaaataaagtccaggaccagacggattcacagcagaattctaccggacattcaaagaattggtgccaatccttttgacactattccacaagacagagaaagaaggaaccctccctattcattctatgaaggcagcatcaccctaataccaaaaccaggaaaggacacaactaaaaaagaatacagaccaatatccttgatgaacatagatgcaaaatccttaacaaaatactagctaaccgaatcc

SEQ ID NO: 118208 - DNA, 311 bp, Homo sapiens
taaatcagtcctggatcagttactcagactcctggtgagagtccagaggccagagcccagaacatgaaagttgggaagaaaatcagatgttggctttcgttcaggctctacctcaactcactgtatgaccttggccaagtcacttcccttctctggactttacttttttgtctgaagcagagaagagttaaaacctaggaaagaggctgggtgtgctggctcacgcctgtaatcccagcactctgggaggccgaggtgggtggatcacctgaggtcaggagtttgagaccaggctggccaacatgataaaa

SEQ ID NO: 118209 - DNA, 341 bp, Homo sapiens
attgtgtgaattcactttgacaagtccatctaggaccatgcaaaactagagttgactgtagtattagaaagccctcagggcaaggtgtggtggttcatggcctgaaatctcagcactttgggaggctggtgtgggggcatcacttgagcccagttcaagacaccacgctgggcaacatagggagaccctgtctctacaaaaaaaattaaagaattagatgggctacttggaaggctgaggttgggagatcacttaagcccaggaggtcaaggctgcattgagctgtgatcgtgccactcactgcagcctgggcaacagagcaaccttgtctcaaaaaaaaa

SEQ ID NO: 118210 - DNA, 619 bp, Homo sapiens
tctttcaaacaaacgaaaactagtaactcctgtcccaccttgttaattatgtacttcctaaaccaagccagttcttttcacatgtatggacaaacagattctattctagaaaatatctagacatgggctacaaatccacctcggcgttctttaacataaagaaggtactgtcaagcataatagaataaaaggtgcaccaatatacatagaaataacccataataatcctggttaccaagaaaccagagaggttccaggctagttggacttaatccactcaatccttaagcactcatttaattatctctctctccatcttgttccccaattctagcagagaactctcccacaacatgtgtgtacgcatacacaccacacactcaacatatgcacattcactcagactctcagataggagaaaatttgaccatcaacagctgccgtgttattaagcacacgttggaatgttctcattaaatcaagtttttaggaaagggtctctacagtattaactgattattttctcgaaacctcatgttggaatacaaactccaaagccagaagaaaaacctaaatgtttacatatccaaacggattattttatttcatcttatcttat

SEQ ID NO: 118211 - DNA, 431 bp, Homo sapiens
gctcagatccccatgtcatctaccacagttgcaacagcatccctttcccagttggtacctttggctaaaatggggctagaggaaagggttcccatacgaccagctaaaggaagaagaataatcctgagcttctctctgcaaaggatggcactgcctcctttgagagtgttgcttctgagctgacgtttcagctgtgcctttagatagctgttccagtgttctgtgaagttggctacttctaaatgattttgttgtagaagatatagctagagctcccatggtcatgagttcaatcctgcatctcctttactgtgaaatgggtcacctgttcaaatgttttttgtgtggtattctatacccatagatcagacattctttaagcccctggattatggtgctggctaaggtactacaatcaggaaagacaagcc

SEQ ID NO: 118212 - DNA, 417 bp, Homo sapiens
gtggacatatatgatgaatcattctgaaaaggatgaagagaaatacaaatgtaataattcagcagcagaggcaggactgcagaacctccccaccaattgtgaggcaggattgcagcagcctctgcgctggcctccagcctccatcctcagccctttttagtccattgtttgaaatagaaagcagacttgtttttcagaaatatttctttcagcatatgttcagctatatgacttccctaatcaggaatttgtgagatctcaccatcaccttcttcttttttttttttttttttttttttaaagaattttccccttttttcccaagggggcccccaaaattaaaattggatccccaaaagggaaactagataggaaaccccaacctgaaaaattgggagagaccagcaagagggcagc

SEQ ID NO: 118213 - DNA, 778 bp, Homo sapiens
tggtgccccgtgccttcttgacccccttattaactcttcatgtatccaaatcagaaagaatcaggtgtaacttaatatatttttaaagacatcttttaaggaactagttttgcattttcagctttggttcttcattgtaatacatgctagagatgtttgggtcctttaccagttttttccaggaattgtttcctgttattcttaatgtagtagtaaagatctacaggtaggactcaccttcctatatgtttgtctctctcttcttgccttggcatagatagccttcttttacctacctttttattttcaaaatacattttaagtgatacatgttcattttttatttttatttttatttattttatttattttttgagatggagtctcactttgtcgcccaggctggagtacagtggcacaatctcgactcattacaacctccgcctcccaggttcaagcaattctcctgcttcagtctcccgagtagctgggactacaggtgcgtgccaccacacttgactaatttttgtatttttatagagacagggtttcaccgtgttggccaggcttgtctcaaactcctgacctcaggtgatctgcccttcttgacctcccgaagtgctgggattacaggcatgagccactgtacctggtgatacatgttcatttttaaaactatataggaatgaaaaattacttgtgtctcctttaccaagagataaacattcccaacttttaaaaattcatattaaggacatacgtataaatcatagaatag

SEQ ID NO: 118214 - DNA, 566 bp, Homo sapiens
atctttgtactcccaggatgtagctgcaatgactacgtcctcaataaatatttgttaaatgaatatcaccatcttcatttaaaggatgaggaaactggctcagtgatgaggtaatttgccccaagtaacatagctactaagtattttatataaattataatgaccttatcttcgtactttacaagcatttaaaaatacatcatctcgctttaatgctcacagcaacctatgaaataggctttccgattactgttttatagataagaatggaaatttagtgatataccctaggcccactcgaatcctagtttatatgaagtacagctgtttctttacattgtacttgatcactacctgggtatgggagcctctatttttatgtaccaagtacattaagggtagggtataggggaggaaagatggaagtaaggcagtttaaaggcacaggaaagaggctggagcccaggtgtacaggcccatctaaagaccataaactggtattgtaatgtcaactgcacatgccactctgaaatccaatattggcccaaaggtttttcttgatatta

SEQ ID NO: 118215 - DNA, 597 bp, Homo sapiens
cagctttcccaacaggacaataacaaaggcaaagatctgggagaagcatggtttgatgggaggtgcattaaggagatgggatctaattagaatgcagaggctattttggagagcagtggggaggaaggccaaataaggatattaaagccaaaataggactgtacaaatcagaggagtttaaatttagtgaagaaatagagccacgtattaataagtcagaaagcctgatgaaaacattatttaagaaaaattgatttgtgaattaactcttattttacaaatttatcttaccagctttcaaatatattcttaatattttataaacatctttatttcttattttctcttgttggcttctggatctcttataggagaggaaaatattatgttcataaatgtcctcagagaatttgaaattttcctcaaaatggggtataaaactcaaagactatgtagtttgaaggctaaaagttaaaaagtagatttatcatactgcatatctcaaggtacacatctgattcttctgcctatgaccatcatacactgttggtgggtatataaattggtatgacctccacagaggacagtatgacaata

SEQ ID NO: 118216 - DNA, 341 bp, Homo sapiens
tccctcttgtgatccatcccacaaattgcttcatagtaccaaaacgctgtattctaaatgtcactcccctctccctgcttaaaaaccttcagtagttccctacggactatagaatgaactttgaacttggtctggcattcagccttccacgtgtagagttaagcatctctaacctcacatcttctgacttttgaacaaatgagacctctgcttcatataaagtctccttgtcctctgaacatgtggattcccgcttctgtctttgctcacttcactttccctacctgatgttccctctccctgcctcttgttttttaattttttttttcaaatccattttc

SEQ ID NO: 118217 - DNA, 243 bp, Homo sapiens
gattacaggcatgcgccacacgcctggctaattttgtatttttggagagatggggtttctccatgttgatcaggctggttttgaactcccgacctcaggtgatccacccacctcaacctcccaaggtgctgggattacaggcatgagccaccgtgcccggccctgaaatcttttaagtctctttggctactaggccccaggttggtcacaggacagcaaaaaaacaggactgcatttcatcaa

SEQ ID NO: 118218 - DNA, 403 bp, Homo sapiens
cttttgatgctctgtttttaaaaaccatctttggttttggcttgcttgtttgttttgctaccctccccacaacccttgagtaggattgttttaaaactgggtaaacagcccatgtttgcagagcttttggtgagtctcctgtgctttcccccgtgcaggggcgtgggccttgtgttgacagcctgccgtcagctgctcccttccatgttcccagcaatcggctcaacaaggtggcccagtcacaaacaagagagactggcttcaacaaaaaggagaaggtgctggctcccaaaatgtaaaagtgttggactgggctagcttcagccatggctggatccagcagctagtgagtgctggcaggatcctccgtctctgtctatctttacttttcctccctctccct

SEQ ID NO: 118219 - DNA, 803 bp, Homo sapiens
gtttgagtccagcttctttcactgacttttcttttaaaaaagcaaaacaaagcataccaagtgacatattatcagcttgtactttgtactgtgtaatataaggcagtgattttgatttgtttaaggtagagaattttaaaattttacactgcaataaaagatttctgttttgttctttctgttgctttaagcatggggaagataggcctaggggacttcctatgtggtatcggagtaactggtgaagctgctgttttgctgctctttgtaaaaaactaggctttataccagtttctctttctttttattttaagacgggctcttgctctgtcgcccaggctggagtgcagtggcacgatctcgcctcggcttactgcaacctctgcctcccaggttcaagcgattcttctgcctcagcctcccgaatggatgggactacaggtgcgcgccaacacgcctggctaatttttgtatttttagtagagacggaggggggtctcaccatattggccaggctggtctcgaactcctgaccttgtgatctgccagcctcggtctcccacaatgctggaattacaggtgtgagccactgtgcccggccaccagtttctctttcattacacactactatgaggtgtttgtctcccacttccattgtccaagaaaaatttttattgctaagattccagagtaataagttgataagtacacacatgcatatatacccccctcttatatacatatatttaataccaggaattaaatgtataatgtgtatttaagaaagtcatgttagtactgca

SEQ ID NO: 118220 - DNA, 352 bp, Homo sapiens
gcaaaggttatacaggaaatttggtttgcttttataatataaaaaattattttaagaaaagaagctattggggccgggtgcagtggctcacacctgtaatcccagcactttgggaggccgaggtgggtggatcacgaggtcaagagattgagaccatcctggccaacatggtgaaaccccgtctctactaaaaatacaaaaaattagccgggcgtggtggcaggcgcctgtagtcccagctacttgggaggctgaggcaggagaatcacttgaacccgggaggcggagcttgcagcgagccgagattgcgccaccacactccagcctggtgacagagcgagactccatctca

SEQ ID NO: 118221 - DNA, 313 bp, Homo sapiens
  misc_feature (22)..(23): n is a, c, g, or t
aagcgggtgctctagaggatcnnccgggtgcatgcatgtgggcacttcccaaagccattcccattagtacaagatgattgatttgccccgctccggggcaatgactatcttcttcctttgaagaaacttggaagcaagagcccagtcccatggaccatgagggaaggtacacaccagtgttggggagacacagcaggtggtgtccaccatgaagcagggtctgagccaagacctacatgcacacatgcacacatccacatgcatgcacacacatacatgcacacacgcacacatctgcacacagatgcacacg

SEQ ID NO: 118222 - DNA, 683 bp, Homo sapiens
atggtagtgcggaagcggaagaggctgcagggccgggaagcctctgtttggtccggccaggtcccgggatccgggccgccagctgcgatgccaagtccccggaggagcatggagggacggccgctgggcgtctccgcttcgagcagcagcagcagccccggcagcccagcccatggcggcggtggcggcggcagcaggtttgagttccagtccctgctcagcagccgcgccacggccgtggaccccacctgcgcccggctccgtgcatcggagagcccagttcaccgccgcggctccttccccctggccgcggcgggcccctcgcagtcgcccgcgcctccgctgcccgaggaggaccgcatggacttgaacccgtccttcctgggcatcgccctgcgctccctgctggccatcgacctgtggctgtccaagaagctgggggtgtgcgcgggagagagctcgtcgtggggcagcgtgcgaccccttatgaagctgctggagatctcgggacacggcatcccctggctgctgggcaccctctactgcctgtgcaggagcgacagctgggccgggcgcgaggtgctgatgaacctgctcttcgccctgctgttggacctgctgctggtggccttgatcaaagggctggtccgcaggcgccgcccggcccacaaccagatggacat

SEQ ID NO: 118223 - DNA, 572 bp, Homo sapiens
agcggataattgctgccaaaatcatcacaagctgtacgtcatcaaggctccctttgcactcccaagaagaactgttcattttaaacaaaagtgatgagaattcctccagaggtgggaacagagaaaacttcatgcttggtaaagcacctgaggcacccattacaatctgggacaagatgaggacatcaacactcatgctgtattccacatgggaggccaagtcaacgcaagatgatttttaagagatataagagccaggcgcggtagctgacacctgtaatcccagcactttgggaagctgaggtgggaggctcacttgaggccaggagatcaagaccagcctaaccaacaaagcaagaccaagaccccttctctacaaaaaaataagaaaattagcctggcgtggcggtgcacacctgtggttccagctacactagaagctgaagggggaggttcacttgagccccgagtttgaggctgcagtgagccacattagcgccaccgcactacagcctgggtgacagagcaagagcctgtctccaaaaaaataaaataaaagctataaatactgc

SEQ ID NO: 118224 - DNA, 327 bp, Homo sapiens
cctgcctcggcctcccaaagtgctgggattacaggcgtgagccaccatgcccagcctaaatgtttttatttttcatagagacggggactcgctgtgttgcccaggctggtcttgaactctagactcaagcctcccttttcagcctcccaaagtgctgggattacaggtgtgagcacgtggctggacttggctttaagagaccagctaaagaatatagtggtaggaaaataaatacaggcataactcagagatagtgtgggattagttccagactactgcaataaagcatatatggcaataaagccagtcacacgaagtttttcgttt

SEQ ID NO: 118225 - DNA, 469 bp, Homo sapiens
agcggagcgggggataaggttaccacgcccgcggtggccggggacactctgagtttcgcgtgtggcttttagggacgtttatatttgaatttccctgaaccgccgagtgtgggcggtggcgcagatccgtcccggaaacctccgggctccttcccgcctttctcaggcccggcccctccaaggggtccccgcggggcggcgggagggccctgggcccagagccgcgcgggtgggcagtcccaggcgtccttccttacagccctgagcctggtccgggaaccgcccagccgggagggccgagctgacggttgcccaagggccagattttaaatttacaggcccggcccccgaaccgccgaagcgcgctgcctgctccccattggcccatggtagtcacgtggaggcgccggggcgtgccggccatgttggggagtgcggcgccgcggcccgcgccacctccgccccccgc

SEQ ID NO: 118226 - DNA, 197 bp, Homo sapiens
catctgtttcctgatacaccaagcagctattcctccattatggtgacacaaagccccattaagttttatgtaatttttctcaggaatcaaaaaggtaagaaatcagatgtccatggaatttttatggaatacttcacataagtatgtattcattaaacaataacaaacaactaacatatgtaaatgttggcggtata

SEQ ID NO: 118227 - DNA, 669 bp, Homo sapiens
cgacagagcgagactccttctccagaaaaaaaaaaaaaaaaaaaagtataattgatattttgaaagaaaagagaaaatggaatcataatgttcaataaaaatcagaataggcagagagtggaagataaagaaacaagtgggtcaatgaatagaaaacagttataaatacagttgatattatctcagttatatgaataatcactttaaatgagaatggtctcaatacacaaattaaatgacagagactatcggagtgaacaaaaaacaagaaccaactatatgttgtttatataaagacacatggctagccacaatggctcacacttgtaatcacagcactttggaaggccaaggccgggggatcacttgaggtcaggagtttgagagcagcctgggcaacacagtgaaactctgtgtcaacaacaacaacaacaacaacaacaataacaacaacaaaaattaactgggcatggtggtgtgtgccatcccagtagtcctagttactcgggaggctgacgtgggagtattgctttagctcaagagttcaaggttgcagttagctatgatcacaccaatgcactccagcctggatgatgctgtcttaaaaatattaaaaccaaaatatggccaggagtttgagagcagcctggacaatacagcaagacccca

SEQ ID NO: 118228 - DNA, 537 bp, Homo sapiens
tgtctgtagaagcacaaacaacaggctgcattagatgctgagaaaaaactaatttttttccatctgaatcatgagctcacctcggaggtagtggccctgtttggtaagtgaagagaactgggaagagagaaccatctttagctatagcagaatctttgcctcactgtgttaatgtgtaaacctctcaacaggaacataccacctgcttgctacgtattctaaagagtaagcaatttaattcataaagaacagagatgagagttcacattagttagacaggtggagctggtagtgggccactgctaagctaaaacctggcatgagcttcgcctacagtcacatccaatttcattactgttgctagagaatcagtgagttcccagatgctagaccctagaagctctgccttgggcttttttatttcaggagttcttcaggcttcttgggtgccaacaatataatttaggaagagcaatatattcccacaatctcaatcattaacagcagtgtgtgtgtgtgtgtgtgtgtgtgtgtgtg

SEQ ID NO: 118229 - DNA, 619 bp, Homo sapiens
aaatatcctccagtgtgaataagtatctcaccatgtgacattgagcaatttacacaatgagcctcatttaaccgttcaactcatacattcagacaaaacatatctgctgtgcaacagatgctgttgtgggctctggagacaggtgaggaaccaggcagagaaggttcctgcccttgtggagcttctgctctaaggaaggcggagacagacaacaagccgatacataaatatgcaaggagaaaacgatcagtgagggacaaggactttgcaggcaactaagagagcgtggcgtggtagcagtggctgggcgtcctttagattgggtggtcagcgtccttcagagggagtactttgagctgaaacccaaaaagcatgaagcaatcagccaagaaaagctggggcaatctaaatcaaacagcagaaggttatgcctgggaaggttatgttcatctgagcgtgcttcagctaagcacgcacgaactccagacacggcaaacagtccagggaactacctgccaccatttcaaacgccgctggggaactgttcagctttcctgctttagtacttaacctgcgacaccaacacatccaatcagtaaaacacctcagtcggaatgaa

SEQ ID NO: 118230 - DNA, 270 bp, Homo sapiens
attatataatcttaaatttaagggaactgagcataaatatgttgaattagtggcttcctattagatcccagtgaactcctcttaaaacagggctcttatctgtgtagcatatgcgcagttgtgatgttgtgaaagtttgtctttacatcactctcttccctatactcaccttcagcaggccctgctttcactttggcatgctccactcacccagcagcaatttttacaatcagtaatagctctttcacgagtgcttctttctcctctggg

SEQ ID NO: 118231 - DNA, 742 bp, Homo sapiens
cggacgcgtgggtcgacggacgcgtgggctgctgtacttttctctctggcttcttgctattggctgggactcaagatggaaacatttatcagctggatgtgaggagtccaagggctccggtacaagtcatccacagatcaggagcaccagttctatccctgctaagtgtcagagatggattcattgctagccaaggtgatggaagctgttttattgtccagcaagacttagactatgtcactgagctcactggggctgactgtgaccctgtgtacaaggtagccacatgggagaagcagatctacacatgctgtcgagacggtcttgtacgacgctaccagctttctgacctctgacttcttggaaagagcagtcccggttagtgaaaaggtttgaccctgatcaacaatgagcagaaacatcatcagtccttcccaaggaccatggcgtttaatgtcttgggcaccccttggaaatcacagaaagtcagctgtactggccgtgtggaactctcatcccaagacctactttgaactgagtaagaaggtcattgtgcccactgcatttgttccaacttctccttgtataaactcaccccagcaacacagggcaaggatatagatgcttttagtttgttcttaaaccagttttgttaaatgtttacaaggacctcagtactaaagcctgttctctggaggaaataaagaaaatatgtttggaggtgcctgaaaaaaagaacttg

SEQ ID NO: 118232 - DNA, 934 bp, Homo sapiens
actcacttccgggaaggggcggaagaggtgggctggtggaggcggggtcgagatggcggcgcctttgaggattcagagcgactgggcgcaagccctcaggaaggatgaaggggaggcctggctgagctgtcatcccccaggtaatacccatgaattatatatgctgtgactttaaaggagaaggattaatacccttaaaagaaagcttcctactttctcctggcccagcctccttacataatagtctgcaaacatgcttgaccagtctgtactgtatggccaacaccccaactcctccattccaagggaaggccttcagattgattttccatttgaaagccacagacttattcatggagacattgttgatgcatcttaattagtcacttaccctgtgctattgtattctaagcacttctgcagcttcaactgggactttcttgatgataatttctagatctacagccccagccctgacttctccatgttcaagcagagattgatcagttgtttgctagatatttctgcttaaaggtctcactgtcaccttaagttactggacttactgaagtccaaaaccaagctaagtacatttgttgtcaagtgagttctctttcctgatttttctcatttcttaagttaccatcatttttctaggcatcagagtgaaaaacctagttacttgaccctgccatatccaggaagctcccaagtcttatcaatttttcttttgaacaacagtcttatatcattcacaggattcttttcaaattgtaaccgaggtggtaccattctaaaacaaatcaaccttccttctaaattctgtaagaaagttttgttttgctgattatctttcatttcaaatgctgctgatatattgtatttctatgagaaataaagttttggccaggcacagtggctcacacctgtaatc

SEQ ID NO: 118233 - DNA, 924 bp, Homo sapiens
gatggtcccccggtgaaccgcttacaggctttggataaaaaggagggctcaaagatttgcctgtcttatttcggtccccgtggatagactatatgaaaacgttcaatctgactttcgaggaccatacaggtgacctaaggcatgacctgagtagtctccttagttctagtccggggcttcaatgaccgcctccaccatacatggctctgctacatatgggtccttctcttggctttaatacgctgactttgcgcactgtggaccttccaaagaactagctaataccactttactcaagacctgctactgttgaagtgtacgtccccataggggctcccgggtaccaagttctattcacaccagactccatggaagtcacccaagtatcataatcccctgcgtaagttgtccagacgactggaattctactctagctcagtccaaggtgatggaagctgttttattgtccagcaagacttagactatgtcactgagctcactggggctgactgtgaccctgtgtacaaggtagccacatgggagaagcagatctacacatgctgtcgagacggtcttgtacgacgctaccagctttctgacctctgacttcttggaaagagcagtcccggttagtgaaaaggtttgaccctgatcaacaatgagcagaaacatcatcagtccttcccaaggaccatggcgtttaatgtcttgggcaccccttggaaatcacagaaagtcagctgtactggccgtgtggaactctcatcccaagacctactttgaactgagtaagaaggtcattgtgcccactgcatttgttccaacttctccttgtataaactcaccccagcaacacagggcaaggatatagatgcttttagtttgttctaccccacaggaggggtctctatacaataggatccc

SEQ ID NO: 118234 - DNA, 667 bp, Homo sapiens
actcacttccgggaaggggcggaagaggtgggctggtggaggcggggtcgagatggcggcgcctttgaggattcagagcgactgggcgcaagccctcaggtgaatccaggcccagaacagagtcagaggaggcgggtagtggatgttgctttgcgtcaaggagagccatgcctggtccagcatatcaataggggttacttcgtcaattgtcgagggatatggagggaacagggtccggaaaaagaagttcaaacccgtatggtcattctctgaaaagctatccctaggccaagggagcacatgagctgtgtgatccccgcgtcagaactagtatcagtgagttggagaaagacagggatactgggaggcaggaaggcttttggccaagcagtcatttagcaaatattgattagtcgtcagttacttccagaagtctctgtactcaccaccactttgtgtatgtgatggaacctttgtattctcctaggcccctaatgctatattaggcatactggacgatactattaaggaaatgggcgtggggcccccggcccccccctttttttttttttttttgaaggtaacttgtagattcagttttctttatgaattggagttaatgatgtcaactcttaaggaggagggtggtttttgtttctgtgtgtgt

SEQ ID NO: 118235 - DNA, 390 bp, Homo sapiens
cccgctgatgcagggtcagctggcggtcttgaggatcagagcgactgggcgcaagccctcaggaaggatgaaggggaggcctggctgagctgtcatcccccagggaaaccatctttgtatggcagcctgacttgtcaaggaattggcctagatggcatcccagaggttacagcttcagaaggatttactgtgaatgaaataaacaagaaaagcattcatatttcatgtccaaaggaaaatgcatcttctaagtttttggcaccgtggcgatcctgcggtcccagatagcctgaatcctgcccggagtggaggctgaagcctgcacagtgtccaccctgttcccactcccatctttcttccggacaatgaaataaagagttaccacccagc

SEQ ID NO: 118236 - DNA, 1788 bp, Homo sapiens
actcacttccgggaaggggcggaagaggtgggctggtggaggcggggtcgagatggcggcgcctttgaggattcagagcgactgggcgcaagccctcaggaaggatgaaggggaggcctggctgagctgtcatcccccagctgattgttaaaaagatcctggcatctcccttctctctcttacttcctctctcaccatgtgatctctgcatacactggctccccttctccttctgccatgagtggaagcagcctgaggctctcatcagaagcagatgctggtgccatgcttcttgtacagtctgcagaaccggaaaccatctttgtatggcagcctgacttgtcaaggaattggcctagatggcatcccagaggttacagcttcagaaggatttactgtgaatgaaataaacaagaaaagcattcatatttcatgtccaaaggaaaatgcatcttctaagtttttggcaccatatactactttttccagaattcatacaaagagtataacatgcctggacatttccagcagaggaggtcttggtgtgtcttctagtactgacgggaccatgaaaatctggcaggcttccaatggagaactcaggagagtattggaaggacatgtgtttgatgtgaattgttgcaggtttttcccatcaggccttgtggtcctgagtgggggaatggatgcccagctgaagatatggtcagctgaagatgctagctgcgtggtgaccttcaaaggtcacaaaggaggtatcctggatacagccatcgttgatcgggggaggaatgtggtgtctgcttctcgagatgggacagcacgactttgggattgtgggcgctcagcctgcttgggagtccttgcagattgtggttcttctatcaatggagtggcggtgggtgctgctgacaactccataaaccttggctcccctgagcagatgcccagtgaacgggaggttggaacagaggccaaaatgctgctcttggcccgggaagataagaaacttcagtgcttgggactacagagcaggcagctggtgttcctctttattggctcagacgctttcaactgctgtacttttctctctggcttcttgctattggctgggactcaagatggaaacatttatcagctggatgtgaggagtccaagggctccggtacaagtcatccacagatcaggagcaccagttctatccctgctaagtgtcagagatggattcattgctagccaaggtgatggaagctgttttattgtccagcaagacttagactatgtcactgagctcactggggctgactgtgaccctgtgtacaaggtagccacatgggagaagcagatctacacatgctgtcgagacggtcttgtacgacgctaccagctttctgacctctgacttcttggaaagagcagtcccggttagtgaaaaggtttgaccctgatcaacaatgagcagaaacatcatcagtccttcccaaggaccatggcgtttaatgtcttgggcaccccttggaaatcacagaaagtcagctgtactggccgtgtggaactctcatcccaagacctactttgaactgagtaagaaggtcattgtgcccactgcatttgttccaacttctccttgtataaactcaccccagcaacacagggcaaggatatagatgcttttagtttgttcttaaaccagttttgttaaatgtttacaaggacctcagtactaaagcctgttctctggaggaaataaagaaaatatgtttggaggtgcctgaaaaaaagaacttg

SEQ ID NO: 118237 - DNA, 2168 bp, Homo sapiens
atcacttgaggtcaggagttgcactccagcctgggtgacagagcgagacttcatctcaaaaaaaaagggtagcataaatgctattttaccttagctcatgtacacctgataatttctttctgtgctgtcacacttgagtaggcgtagccttcttggggcactaactgttccactcccaattttgtaaatactactccactgactcttgcttagtatttaggattatggagaagcctgggcgacagagcaagactccatctcaaaaaaaaaaaaaaaaaaaaaaaaaaaaagaaaatgtattttagtcttgaaagtgtattccctttcaaattagagtttagtgctatagtgtgtatgtttgacccctccaaatctcatgttgaaatttaatcctcagtgttggaggtagggcctaatggggggtgtttgggtcatgggggcagacccctcatgaatagattaatgtcctccctggagagtgagagtgactgagttctcactctgttctttcctgagaaagctgattgttaaaaagatcctggcatctcccttctctctcttacttcctctctcaccatgtgatctctgcatacactggctccccttctccttctgccatgagtggaagcagcctgaggctctcatcagaagcagatgctggtgccatgcttcttgtacagtctgcagaaccggaaaccatctttgtatggcagcctgacttgtcaaggaattggcctagatggcatcccagaggttacagcttcagaaggatttactgtgaatgaaataaacaagaaaagcattcatatttcatgtccaaaggaaaatgcatcttctaagtttttggcaccatatactactttttccagaattcatacaaagagtataacatgcctggacatttccagcagaggaggtcttggtgtgtcttctagtactgacgggaccatgaaaatctggcaggcttccaatggagaactcaggagagtattggaaggacatgtgtttgatgtgaattgttgcaggtttttcccatcaggccttgtggtcctgagtgggggaatggatgcccagctgaagatatggtcagctgaagatgctagctgcgtggtgaccttcaaaggtcacaaaggaggtatcctggatacagccatcgttgatcgggggaggaatgtggtgtctgcttctcgagatgggacagcacgactttgggattgtgggcgctcagcctgcttgggagtccttgcagattgtggttcttctatcaatggagtggcggtgggtgctgctgacaactccataaaccttggctcccctgagcagatgcccagtgaacgggaggttggaacagaggccaaaatgctgctcttggcccgggaagataagaaacttcagtgcttgggactacagagcaggcagctggtgttcctctttattggctcagacgctttcaactgctgtacttttctctctggcttcttgctattggctgggactcaagatggaaacatttatcagctggatgtgaggagtccaagggctccggtacaagtcatccacagatcaggagcaccagttctatccctgctaagtgtcagagatggattcattgctagccaaggtgatggaagctgttttattgtccagcaagacttagactatgtcactgagctcactggggctgactgtgaccctgtgtacaaggtagccacatgggagaagcagatctacacatgctgtcgagacggtcttgtacgacgctaccagctttctgacctctgacttcttggaaagagcagtcccggttagtgaaaaggtttgaccctgatcaacaatgagcagaaacatcatcagtccttcccaaggaccatggcgtttaatgtcttgggcaccccttggaaatcacagaaagtcagctgtactggccgtgtggaactctcatcccaagacctactttgaactgagtaagaaggtcattgtgcccactgcatttgttccaacttctccttgtataaactcaccccagcaacacagggcaaggatatagatgcttttagtttgttcttaaaccagttttgttaaatgtttacaaggacctcagtactaaagcctgttctctggaggaaataaagaaaatatgtttggaggtgcctgaaaaaaagaacttg

SEQ ID NO: 118238 - DNA, 1160 bp, Homo sapiens
actcacttccgggaaggggcggaagaggtgggctggtggaggcggggtcgagatggcggcgcctttgaggattcagagcgactgggcgcaagccctcaggaaggatgaaggggaggcctggctgagctgtcatcccccagcctgaggctctcatcagaagcagatgctggtgccatgcttcttgtacagtctgcagaaccggaaaccatctttgtatggcagcctgacttgtcaaggaattggcctagatggcatcccagaggttacagcttcagaaggatttactgtgaatgaaataaacaagaaaagcattcatatttcatgtccaaaggaaaatgcatcttctaagtttttggcaccatatactactttttccagaattcatacaaagagtataacatgcctggacatttccagcagaggaggtcttggtgtgtcttctagtactgacgggaccatgaaaatctggcaggcttccaatggagaactcaggagagtattggaaggacatgtgtttgatgtgaattgttgcaggtttttcccatcaggccttgtggtcctgagtgggggaatggatgcccagctgaagatatggtcagctgaagatgctagctgcgtggtgaccttcaaaggtcacaaaggaggtatcctggatacagccatcgttgatcgggggaggaatgtggtgtctgcttctcgagatgggacagcacgactttgggattgtgggcgctcagcctgcttgggagtccttgcagattgtggttcttctatcaatggagtggcggtgggtgctgctgacaactccataaaccttggctcccctgagcagatgcccagtaagttgataatgatatgtagcattgttttattttcttaggcccccttcagtgattgccttagtttctccttttcttcctcatccttttctgctctgtgcctggtatttctgttttcaccatacgattaatatttactctgtacctactatgtttctattactttggaatctacaaaggaagtatatgtcatagcactgcgtttcagtaagtacaatctaatgtagaagatgagataaatgcctataaagcaggggtgtccgatcttttggcttccctgggccacattggaagacttgtcttgggccacacataaaatac

SEQ ID NO: 118239 - DNA, 1112 bp, Homo sapiens
atcacttgaggtcaggagttgcactccagcctgggtgacagagcgagacttcatctcaaaaaaaaagggtagcataaatgctattttaccttagctcatgtacacctgataatttctttctgtgctgtcacacttgagtaggcgtagccttcttggggcactaactgttccactcccaattttgtaaatactactccactgactcttgcttagtatttaggattatggagaagcctgggcgacagagcaagactccatctcaaaaaaaaaaaaaaaaaaaaaaaaaaaaagaaaatgtattttagtcttgaaagtgtattccctttcaaattagagtttagtgctatagtgtgtatgtttgacccctccaaatctcatgttgaaatttaatcctcagtgttggaggtagggcctaatggggggtgtttgggtcatgggggcagacccctcatgaatagattaatgtcctccctggagagtgagagtgactgagttctcactctgttctttcctgagaaagctgattgttaaaaagatcctggcatctcccttctctctcttacttcctctctcaccatgtgatctctgcatacactggctccccttctccttctgccatgagtggaagcagcctgaggctctcatcagaagcagatgctggtgccatgcttcttgtacagtctgcagaaccggaaaccatctttgtatggcagcctgacttgtcaaggaattggcctagatggcatcccagaggttacagcttcagaaggatttactgtgaatgaaataaacaagaaaagcattcatatttcatgtccaaaggaaaatgcatcttctaagtttttggcaccatatactactttttccagaattcatacaaagagtataacatgcctggacatttccagcagaggaggtcttggtgtgtcttctagtactgacgggaccatgaaaatctggcaggcttccaatggagaactcagggtaaaggatttggatgtacttttagtaaaccagttttgttaaatgtttacaaggacctcagtactaaagcctgttctctggaggaaataaagaaaatatgtttggaggtgcctgaaaaaaagaacttg

SEQ ID NO: 118240 - DNA, 514 bp, Homo sapiens
cctgtaatcccagctgcttgggaggctgaggcaggagaattgcttgaacctgggaggtggaggttgcagtttgctgagatcatgccattgtactctagcctgggcaaaaagaacgaaactctgtctcaaaaaacaaaaaaaaagttggcccacgtaataagatctatttgccattctgggtctttggaccatcttctttacactagtgatctacagaagcaaataaaaatactgagtttttaaactctggatgcagttttctcttagttatatgaattttctttctgcctttcaggtgatggaagctgttttattgtccagcaagacttagactatgtcactgagctcactggggctgactgtgaccctgtgtacaaggtacaggcctgagacgacaccagacctgggtgattctcatgagagatctagggcttttatgagactgaatccagataccttgtggtcattagggatgataaaatagtgcttattgtataagcagtgtggtaggatg

SEQ ID NO: 118241 - DNA, 1617 bp, Homo sapiens
actcacttccgggaaggggcggaagaggtgggctggtggaggcggggtcgagatggcggcgcctttgaggattcagagcgactgggcgcaagccctcaggaaggatgaaggggaggcctggctgagctgtcatcccccagggaaaccatctttgtatggcagcctgacttgtcaaggaattggcctagatggcatcccagaggttacagcttcagaaggatttactgtgaatgaaataaacaagaaaagcattcatatttcatgtccaaaggaaaatgcatcttctaagtttttggcaccatatactactttttccagaattcatacaaagagtataacatgcctggacatttccagcagaggaggtcttggtgtgtcttctagtactgacgggaccatgaaaatctggcaggcttccaatggagaactcaggagagtattggaaggacatgtgtttgatgtgaattgttgcaggtttttcccatcaggccttgtggtcctgagtgggggaatggatgcccagctgaagatatggtcagctgaagatgctagctgcgtggtgaccttcaaaggtcacaaaggaggtatcctggatacagccatcgttgatcgggggaggaatgtggtgtctgcttctcgagatgggacagcacgactttgggattgtgggcgctcagcctgcttgggagtccttgcagattgtggttcttctatcaatggagtggcggtgggtgctgctgacaactccataaaccttggctcccctgagcagatgcccagtgaacgggaggttggaacagaggccaaaatgctgctcttggcccgggaagataagaaacttcagtgcttgggactacagagcaggcagctggtgttcctctttattggctcagacgctttcaactgctgtacttttctctctggcttcttgctattggctgggactcaagatggaaacatttatcagctggatgtgaggagtccaagggctccggtacaagtcatccacagatcaggagcaccagttctatccctgctaagtgtcagagatggattcattgctagccaaggtgatggaagctgttttattgtccagcaagacttagactatgtcactgagctcactggggctgactgtgaccctgtgtacaaggtagccacatgggagaagcagatctacacatgctgtcgagacggtcttgtacgacgctaccagctttctgacctctgacttcttggaaagagcagtcccggttagtgaaaaggtttgaccctgatcaacaatgagcagaaacatcatcagtccttcccaaggaccatggcgtttaatgtcttgggcaccccttggaaatcacagaaagtcagctgtactggccgtgtggaactctcatcccaagacctactttgaactgagtaagaaggtcattgtgcccactgcatttgttccaacttctccttgtataaactcaccccagcaacacagggcaaggatatagatgcttttagtttgttcttaaaccagttttgttaaatgtttacaaggacctcagtactaaagcctgttctctggaggaaataaagaaaatatgtttggaggtgcctgaaaaaaagaacttg

SEQ ID NO: 118242 - DNA, 633 bp, Homo sapiens
gtacctgttcagaacatgtttgtgaagggatggagtcatttatgcagctccatcttctctgcccttgtagttcctttactccatcctccatcttagggagtttttttctcttgctaggtatcctggatacagccatcgttgatcgggggaggaatgtggtgtctgcttctcgagatgggacagcacgactttgggattgtgggcgctcagcctgcttgggagtccttgcagattgtggttcttctatcaatggagtggcggtgggtgctgctgacaactccataaaccttggctcccctgagcagatgcccagtaagttgataatgatatgtagcattgttttattttcttaggcccccttcagtgattgccttagtttctccttttcttcctcatccttttctgctctgtgcctggtatttctgttttcaccatacgattaatatttactctgtacctactatgtttctattactttggaatctacaaaggaagtatatgtcatagcactgcgtttcagtaagtacaatctaatgtagaagatgagataaatgcctataaagcaggggtgtccgatcttttggcttccctgggccacattggaagacttgtcttgggccacacataaaatac

SEQ ID NO: 118243 - DNA, 1677 bp, Homo sapiens
actcacttccgggaaggggcggaagaggtgggctggtggaggcggggtcgagatggcggcgcctttgaggattcagagcgactgggcgcaagccctcaggaaggatgaaggggaggcctggctgagctgtcatcccccagcctgaggctctcatcagaagcagatgctggtgccatgcttcttgtacagtctgcagaaccggaaaccatctttgtatggcagcctgacttgtcaaggaattggcctagatggcatcccagaggttacagcttcagaaggatttactgtgaatgaaataaacaagaaaagcattcatatttcatgtccaaaggaaaatgcatcttctaagtttttggcaccatatactactttttccagaattcatacaaagagtataacatgcctggacatttccagcagaggaggtcttggtgtgtcttctagtactgacgggaccatgaaaatctggcaggcttccaatggagaactcaggagagtattggaaggacatgtgtttgatgtgaattgttgcaggtttttcccatcaggccttgtggtcctgagtgggggaatggatgcccagctgaagatatggtcagctgaagatgctagctgcgtggtgaccttcaaaggtcacaaaggaggtatcctggatacagccatcgttgatcgggggaggaatgtggtgtctgcttctcgagatgggacagcacgactttgggattgtgggcgctcagcctgcttgggagtccttgcagattgtggttcttctatcaatggagtggcggtgggtgctgctgacaactccataaaccttggctcccctgagcagatgcccagtgaacgggaggttggaacagaggccaaaatgctgctcttggcccgggaagataagaaacttcagtgcttgggactacagagcaggcagctggtgttcctctttattggctcagacgctttcaactgctgtacttttctctctggcttcttgctattggctgggactcaagatggaaacatttatcagctggatgtgaggagtccaagggctccggtacaagtcatccacagatcaggagcaccagttctatccctgctaagtgtcagagatggattcattgctagccaaggtgatggaagctgttttattgtccagcaagacttagactatgtcactgagctcactggggctgactgtgaccctgtgtacaaggtagccacatgggagaagcagatctacacatgctgtcgagacggtcttgtacgacgctaccagctttctgacctctgacttcttggaaagagcagtcccggttagtgaaaaggtttgaccctgatcaacaatgagcagaaacatcatcagtccttcccaaggaccatggcgtttaatgtcttgggcaccccttggaaatcacagaaagtcagctgtactggccgtgtggaactctcatcccaagacctactttgaactgagtaagaaggtcattgtgcccactgcatttgttccaacttctccttgtataaactcaccccagcaacacagggcaaggatatagatgcttttagtttgttcttaaaccagttttgttaaatgtttacaaggacctcagtactaaagcctgttctctggaggaaataaagaaaatatgtttggaggtgcctgaaaaaaagaacttg

SEQ ID NO: 118244 - DNA, 1578 bp, Homo sapiens
cccgctgatgcagggtcagctggcggtcttgaggatcagagcgactgggcgcaagccctcaggaaggatgaaggggaggctggctgagctgtcatcccccaggaaaccatctttgtatggcagcctgacttgtcaaggaattggcctagatggcatcccagaggttacagcttcagaaggatttactgtgaatgaaataaacaagaaaagcattcatatttcatgtccaaaggaaaatgcatcttctaagtttttggcaccatatactactttttccagaattcatacaaagagtataacatgcctggacatttccagcagaggaggtcttggtgtgtcttctagtactgacgggaccatgaaaatctggcaggcttccaatggagaactcaggagagtattggaaggacatgtgtttgatgtgaattgttgcaggtttttcccatcaggccttgtggtcctgagtgggggaatggatgcccagctgaagatatggtcagctgaagatgctagctgcgtggtgaccttcaaaggtcacaaaggaggtatcctggatacagccatcgttgatcgggggaggaatgtggtgtctgcttctcgagatgggacagcacgactttgggattgtgggcgctcagcctgcttgggagtccttgcagattgtggttcttctatcaatggagtggcggtgggtgctgctgacaactccataaaccttggctcccctgagcagatgcccagtgaacgggaggttggaacagaggccaaaatgctgctcttggcccgggaagataagaaacttcagtgcttgggactacagagcaggcagctggtgttcctctttattggctcagacgctttcaactgctgtacttttctctctggcttcttgctattggctgggactcaagatggaaacatttatcagctggatgtgaggagtccaagggctccggtacaagtcatccacagatcaggagcaccagttctatccctgctaagtgtcagagatggattcattgctagccaaggtgatggaagctgttttattgtccagcaagacttagactatgtcactgagctcactggggctgactgtgaccctgtgtacaaggtagccacatgggagaagcagatctacacatgctgtcgagacggtcttgtacgacgctaccagctttctgacctctgacttcttggaaagagcagtcccggttagtgaaaaggtttgaccctgatcaacaatgagcagaaacatcatcagtccttcccaaggaccatggcgtttaatgtcttgggcaccccttggaaatcacagaaagtcagctgtactggccgtgtggaactctcatcccaagacctactttgaactgagtaagaaggtcattgtgcccactgcatttgttccaacttctccttgtataaactcaccccagcaacacagggcaaggatatagatgcttttagtttgttcttaaaccagttttgttaaatgtttacaaggacctcagtactaaagcctgttctctggaggaaataaagaaaatatgtttggaggtgcctgaaaaaaagaacttg

SEQ ID NO: 118245 - DNA, 1150 bp, Homo sapiens
gtacctgttcagaacatgtttgtgaagggatggagtcatttatgcagctccatcttctctgcccttgtagttcctttactccatcctccatcttagggagtttttttctcttgctaggtatcctggatacagccatcgttgatcgggggaggaatgtggtgtctgcttctcgagatgggacagcacgactttgggattgtgggcgctcagcctgcttgggagtccttgcagattgtggttcttctatcaatggagtggcggtgggtgctgctgacaactccataaaccttggctcccctgagcagatgcccagtgaacgggaggttggaacagaggccaaaatgctgctcttggcccgggaagataagaaacttcagtgcttgggactacagagcaggcagctggtgttcctctttattggctcagacgctttcaactgctgtacttttctctctggcttcttgctattggctgggactcaagatggaaacatttatcagctggatgtgaggagtccaagggctccggtacaagtcatccacagatcaggagcaccagttctatccctgctaagtgtcagagatggattcattgctagccaaggtgatggaagctgttttattgtccagcaagacttagactatgtcactgagctcactggggctgactgtgaccctgtgtacaaggtagccacatgggagaagcagatctacacatgctgtcgagacggtcttgtacgacgctaccagctttctgacctctgacttcttggaaagagcagtcccggttagtgaaaaggtttgaccctgatcaacaatgagcagaaacatcatcagtccttcccaaggaccatggcgtttaatgtcttgggcaccccttggaaatcacagaaagtcagctgtactggccgtgtggaactctcatcccaagacctactttgaactgagtaagaaggtcattgtgcccactgcatttgttccaacttctccttgtataaactcaccccagcaacacagggcaaggatatagatgcttttagtttgttcttaaaccagttttgttaaatgtttacaaggacctcagtactaaagcctgttctctggaggaaataaagaaaatatgtttggaggtgcctgaaaaaaagaacttg

SEQ ID NO: 118246 - DNA, 586 bp, Homo sapiens
tagagatggagttccgctatgttggtcaggctggtctccaaatcctggcctcaagtggtccaccctccttggcctcccaaagtgctggaatttcaggcgcgaactacgcgcctggcctcttttccactttaaatggaatgataaaactaaaaatgaaaaggacgggagagaaagagtctttttgaaataatatttgacaggatttattaagaagatcacaatagtagctaataacaataaatactatttgagtgctcattatgcaccaggtacttttctagatatttgacatatttaatttagtgtattttcagttcattttcctaacttatgagatagatattatttttacaaccattatactagtgaagagatcaaggttcaaataacttgcccaaagttatataagaataaagtaacggaaccactgtaactccaatgattccaaagctcttggggaaatgaaaggactctcagagaaggagagcattacattggtggaatgcctgcatttgggttttttacatagaatcaacatggcagacggtacagaaaagccacggaagggtgggagtctttggctata

SEQ ID NO: 118247 - DNA, 692 bp, Homo sapiens
gagccagtgtaaatctagtccaagggcaggggaagatgagatgagatgtcccaactctagcagtggggcggaaaatagaggccagttccttcctccttcaccttttgttctattgaggccctcagggaattggatgatggctacccacatgggaagggctgcttctttgcagttcacgaattcaaatgctagtcatccagaaggacccttactgacgtaccaagaaactgtattttatctgggcaccctgtggcccagacaagtagacacataaagtgagtcatcacagcaagtatgacaatgccgtgtactggaggcagtgtgtggatgtgcagccactttgcattccatatgacctggcaactgacttctgactgatgtgacttaaaaacagagatcccctggctggggctgggatgtttctaggcctcaggaggtgcacacatctgtctaatacataaagggtctgtctaatacataacgtgtaccctgtcataaaactcttcaggctgaactggaggttccagttctctttctcttcatagttgcctcttccacaatggaaagttattcctgatctttgctttgttgctacagggaggggaaaaaagcctatgaattgccaaaaaagaggcctttaaaatattaatgttgagaatttcagctgagattcttattctggcagtttctgg

SEQ ID NO: 118248 - DNA, 117 bp, Homo sapiens
gagggctctgaagtactgggtggccatataccagcagcacagtgaatcttctagctgtcactaatgtgcttagctcataggattgtcaggaaggtccaatgtgatatgagtatatgt

SEQ ID NO: 118249 - DNA, 786 bp, Homo sapiens
atccagacaggtcgacgtagctggtcagtaaattagctggtccaggcgaagctggggccattttggtacagcaaatttctgtactcctcaggggctattattggttttcttactcacatattccctggagactaagtagcactgctttttgcctacaagcctaaattgtcaggtactgacattaagaacagggaagctggaaagaggtactgacctttaagtcacattcctgttaaatacaataataatatcctctcacaaagtgaaggatctttttaaatcatccccttcttcatttcatatgttgctattcctacacaggtatatgatttaaaaagctgtctattactgacatacatatgcatgagaaatacaagccttaacaaatgaatcctttagcatcataaatgcttacccagtaatgtctacaattagaccatattcttcttcagccattttctcaaaatgtaaagccagttgtactaggtacgtaagtaccacacccagccagtctagttataatgagttttcctatgatagaaggcatttcctcaaacttcagctttattttatctgcatgtgggttgcatttaagaaaggaaatttatttctcacattcaatcatatatactgcaagtaagcatctgaagaatacaaggcttccataatccaaacaaaaataattttgtatttaaatctgattcatacagccagagatcagttactcagaatggatcagaaacactgggcctgtgctaaaacatacacaatttaaataaaagccag

SEQ ID NO: 118250 - DNA, 333 bp, Homo sapiens
gcaggacccacccacctcagttcaaaccaggcagcaccaccgtggcacactaggggtcagcagtgtgccccgggtaggccgccacggccacagagtacgctccttaatttgggagctagtcacacgggtttgctcgtcatatgaaaattcatcaacagcacatctaaagaagtgtgtacacatttttgtatgtcaaacttcaatgtttattatatatataatctatatagatctatatctatatctatctagatatagatatagatatatatttttgtttgtttgagacagagtctcactctgttgcccaggctggagtgcagtggcgcgatc

SEQ ID NO: 118251 - DNA, 247 bp, Homo sapiens
ctcatattctgaatatataagcatctatagttcagtaagaaaaagacagttttttaaacagcaaaagacttccggcactacataaaacagggtgtccaggtgattaataagcatatgtaaaggtacacaacctcattaattatcaaagaaattcaaattaaaacccaagtgcaataccactatgcacctaccaaaatatcttacgtgaaaaagacaaaaatactaaggttgctgaggaggcaaagta

SEQ ID NO: 118252 - DNA, 544 bp, Homo sapiens
ctcggctctaccttgtctgagacaaggtcttactctgtcactctagcctggacgacagagtgagactccgtctgaaaaaaaaaaaaaattaaccgggcgtggtgacagacgcctgtaatcccagctacttgagaggctgaggcaggagaatcacttgaacctgggagatagaggttgcagtgagccaaaacggtgccactgcactccagcctgggcaacagagcgagactccatctcaacaacaacaacaacaaaaattactcatagaacattttccaggtcaggaaagatgagaagagctggatagacctttccagatgtaagacccccaaacctaaatatgccgggtacgtttaaggcccctttaaggtggataactccccctctgccctcagcccagaaaagcttgtttccaataggccttggctggagggtggggaaatgtcccatccttcacggaatgtgtgggattgtgggtcagttccatggggtacctgcttgccccagccaccagtgagtacccactggagacaggaaaaaaaaa

SEQ ID NO: 118253 - DNA, 438 bp, Homo sapiens
gtccattatacatggagtggctgattgaaggtatttctacatactgacttgaaagttctatcctttcattaaaggttcttctacatattgacctgaaagacaggttcctccatcagtcctcctgtcatcctaattgtgactctagctgacttttatttccatttctgcatggttgtcttaatactacttgtacatattatgttctctctaggccttcttttctaagccatttctcaaattttatttgcagtccactggtaatccacctagctacttaagaaaaataaaatattagccctcttttggtttgaacaattaagtattacctactagaaacctctaagagatttattaaaacttgctaaaatttggcacttagtacattcaacacagtaagtctgtactagagacttgctcttgagtgggggtaggagtggg

SEQ ID NO: 118254 - DNA, 787 bp, Homo sapiens
tgctctgggaaacgcctgctgctcttgcccttgcccacgggcccccagccccagcccctctcctgtggcccaccacccctgctttggtgccatgcagctgccacccttcgacatgtggaaggactacttcaacctgagccaggtggtgtgggcgctgatcgcaagtcggggtcaaaggctggagacccaagagattgaggagccaagtcccgggcctccgctggggcaggatcaggggctgggggcgccaggggccaacgggggcctggggaccctgtgcaacttctgcaagcacaacggggagtcccgccacgtctactcctcacaccagctgaagacaccggatggcgtggtggtgtgtcccatcctgaggcactacgtgtgtcccgtgtgcggggccaccggtgaccaggcccatacgctcaagtactgcccgcttaacggtggccagcagtccctctaccgccgcagcgggcgcaactcggccggacgcagggtcaagcgctgagcatcgtgagatgctcaccacccgacccctgaccctcctggtccatcccacccaagtccctaaactctctcttccagtcacccagccctttggaatttctggcccccagaactccaccctggctggatcctgaaacagtggaggctgctgggagccaggccagccccgcccccttggacctgtcagccctcggagctctggcctgtgggcgttggcctgagggtccttggtgccgcgggaacccttcctgcacggccctgtagcgccctctgggccccg

SEQ ID NO: 118255 - DNA, 587 bp, Homo sapiens
gcacgaggagggcttacttggaaatggtatgtttcccaaagatatatcagagaacaccataactactatgacactttatgggtggtataatcatctccctaaaccagacctctgaagatttggttgggggcagaatgaatgatctctatcaaaataagcagctgaatgtcatggattttgctcttgggtgttagttttgaagtcagggattgttttgccaacactccacttttgagctacaggggcagtgatttaattgcaaatttgattctcctatcactgaaaacagtgtctgttatttgagtcacatacttagactgaggaagccatgtatcttccacgtttctgcgtgtttctgatatgaaaaatgactcactgataatgcatatttacagctcttttttacattctaagactgtaatattgaccttagtttcattaaaggatatctgcatatccatcagtaattttctatatctctacattttcctgaatgtaagactatgcctgtgaaaatagtggctaaaggagtatcccctagaatttcagttgttacctagccatttcaaactagacctaagaaagaa

SEQ ID NO: 118256 - DNA, 420 bp, Homo sapiens
tgaggctacaggagcaggaaggagccaggtcaggaagggcctttcgtaccactcagagtttgagttttattttgaaggtaacatggcgtcacattaagcaatgttgaaagaattaccctatgaaattgtacttcaaaactaaagtaccaaatacatgatcccgagttattaataaattccttattttaaagtgtaaatatttgaaacagtatctgagaccacatgcaattgttaaatactgtcaactagttgcatacaagattgtagcgttctgtaatccctaggacagtgtttgattgaccggggaccctcaagagagcatggcgagtgtggggtgtgcctggataggccccctttgcaggcagtcttttgagagtctcaccatcgaatggcctcctagggcgtgtgaacgttattgtt

SEQ ID NO: 118257 - DNA, 443 bp, Homo sapiens
tgaatgaatgatctggggagtggcgtgggcatcaggatttttaaaagctcccagaggactctaggtgcagccaaagttgaataccactggccacagggtctctgtcagttgaaacacagcttgtgaaataaaatgctttctacaagtggtaaataataaaggccctaaaatccattctcaacatcctgcatgtacatttcaagtggaggcatttctgaaggaaatgttaagttccctgtgattgccaatagggtaaaaagccatcatttgcactgaccaggtcccacggacagtaaaagccacaaagacatacagggtttggcatgaggaagcttgtgcacttggcagttaagtctgtgaggctgcagctgtcacagtgggtttgcaggggagtcctgcaaacccactgtgatcaggtggttatcaggtgattgaaatgtggc

SEQ ID NO: 118258 - DNA, 197 bp, Homo sapiens
ccgccagggacattacagttgatactaagggaggaaggaagggatggaggataagtgcaggcagctgcttcacctctgctgttccagggagccccaattccacacaccccaacaccacagccccctcctaccatctaccctgagaactgctagagcccctccaccccataataggaacctccacagtggagcagccc

SEQ ID NO: 118259 - DNA, 306 bp, Homo sapiens
tcagaatgtggcctttgggaaggacgatgttgaaggggaagaactccttccactgaatgccgctgctgtctatgctaaaacatggggagatgggccgggcacggtggctcacgcctgtaatcccagcactgtgggaggccgaggcgggcagatcatggggtcaggagttcgagaccagcctgaccaacatggtgaaaccccatctctactaaaaaaaaaaaatacaaaaattagctgggtgtggtggcgcgtgcctgtaatcccagctactcagggggccaaggcaagagaatcacttgaacccag

SEQ ID NO: 118260 - DNA, 218 bp, Homo sapiens
cttaggatgatcatttttcatagtcttaggaagagcttgttaaataatggactgtctttatataaacacaactaggccgggcgtggtggctcatgcctataatcccagcactttgggaggtcgaggcaggtggatcacctgagggtcgggagtttgagaccagcctgaccaacatggagaaaccctgtctctactaaaaatacaaaattagccaggtg

SEQ ID NO: 118261 - DNA, 414 bp, Homo sapiens
  misc_feature (65)..(66): n is a, c, g, or t
ctaaaaaatacaaaaattagccaggtgtggtggcaggtacctgtaattccagctactcaggaggnnagagacatgagaatcgcttggacccaggaggcagaggctgcaatgagccgagttcgcgccactgcactccagcctgggcgacagagcaagactctgtctcaaaaaaaaattttagcgatgtcaattcatttttaaagtgggggcttaagggtttggtctggtttggtttggttttgccatgctggccaggctgggcttcgaactcctgaccccaagtgatccacccacttcggccccccaaagcgctgggattacaggtgtgagccagcatgaccggctgctaaaatttcttaggaaaaaaacctttaaaggtagacatgctggaatccttgaactcttcatttcatt

SEQ ID NO: 118262 - DNA, 319 bp, Homo sapiens
ttggttgtaggttgcaaatatcaataaacatagttaagagttttatttttcttgtattttttagagacagggtctctctctgtcacccaggctggagtacagtggcacaatcatagcccactgcagcctcaaacttctggactcaaccaattctctgacctcagcctcctgagcagctagaactacaagcatgtgccatcatgcctggctaatttttatttatgtgtagaaacgtggtctcactatgttgcccaggctcaaacttctggtctcaagagatcctcttgccttggcctcccaaaatgctgggatttgtttt

SEQ ID NO: 118263 - DNA, 324 bp, Homo sapiens
tcacacttctctggcctctgccttttcactctccctctcacgtgctgcggcacagacccacagaggctgctgggcgcatggtgtcgcaagagcaggagggcaggagaggagaatcctgctggaggaatctaaaacatcactcagcactaaattgtttttgtctgggacaaactagtttccgtaaagatgtgatttatgataacatgtaatgggattattattcttttaaaataaatttggctacagtggctcaggcctgtaagcccagcactttgggaggccaagatgggtggatcgcttgagaccaggagttcgagaccagcc

SEQ ID NO: 118264 - DNA, 441 bp, Homo sapiens
ggatgtgatgtgttttgaagacataagaggcaggaaagtttggttgccaaaaataaagagaaacagggaagaatttagcttctgaactggatggtcactcttgccagaggccttggaggagggcaaggttttgcattttgtttgccaattttttccttaaataaagtgccctggacttcaggtcagtcttgccccttgagctgctaaatgattctgccagattctttcagctgagctgtgcggggtcctgaagacctgctttgacttcctctgcaccaaactgactcactccccagggaacaagatcaaggctgaggaagagaaaaagcagggcatgaatggaccctatacccaaaatagtaattccattttctccacctgccattctaccatcacagtgaagcttttctaaattgtaagaggctcttgtaaaaatgaagc

SEQ ID NO: 118265 - DNA, 412 bp, Homo sapiens
tggatgtggtagtgtggtaaagcaggacaggagagggatatttgaaacctcacttaaacctgcttgcagaaggagtcacacatgcaaacatgcacacacacggagtccctctcagatcgctctagagcctcatccaaattcacaaattatgtctcagctaatactttccgtcttggcacaacaaagcgcaaggttcttctgttaggagcttgcatttaaagatggggaagagagtcctcccattgccgcatggattgttttctccctttagtttagttgtggatataggatttatctttgggataactgcagccatgattgatgcccatgactattccagaggtctggcctctagagagttctggctttccagggtccatacataatacatgagtaatctaatgtctgagcc

SEQ ID NO: 118266 - DNA, 542 bp, Homo sapiens
aatagacaaccttatacaaatcattctgaagtttcacatttcttcaatttaaatttatgacattcaactattttgaagtggtcctcaaaagtactatataagaaacatgttgcctggcgcggtggctcatgcctgtaatcccagcactttgggaggccaaggtgggtggatcatgaggtcaagagatggagaccatcctggccaacatgatgaaaccctgtctctactaaaaatacaaaaaaaacaattagctgggcatggtggcatatgcctgtagtcccagctactcaggaggctgaggctggagaactgattgagcctggcaggttgaggctgcagtgagccaaggtcacaccacttgcattccagcctgagcgacagagcaagactctgtctctaaaaaaaaaaaaaaaaaaaagccaaactaacagaccctcaaaagtgacattttgaggctatgcaaaggccatatataggaacccttaaatggcgacagcctccccactgtgtcagcctgacatacaatacccgtcttttcccta

SEQ ID NO: 118267 - DNA, 723 bp, Homo sapiens
atccaggtacaagtggagtcattcagttaaacccatgttattaagggtcagctgtacctatatatgtcatttgagtgtaatggttaagaggatgggactgaattccaaatcctggctttgccatttattagtgtctgtgggcacaatccttaatctgtcttaaatttctggtctgtaaaatggagatgataaaagtgcctactttatatgggtataggaatccaagctcataatgtgtgattagctcttatcagactgcatgggacatattaaatagtaaataactatttaataatctgtagaatattactagtttgacatcaactttactaatatttagtatttaactcacccattgtttacttctatatagacagtcgggatacttgcccttttaagttttgttgttgttgttgttgttgttgtttttaaaacattcttcagatgcttttacattgatcaaaaatcactgatgctgaccggaactcaaagtgataagctacttgctaactatcaatatcaatgttttcattatgatatttctctttggagaagaccagtgtaaaagaggagttgatcagtattcctttcctgtcaactgaccttcatgttgtactctcttcctcaggcttcatctttcttaatttaaaaattcatgtttgtctgtagtaattacaaaaattcattataggatttccaagttctaatagttgctttctagat

SEQ ID NO: 118268 - DNA, 230 bp, Homo sapiens
ttcggcacgaggtaaatgttataactagtcactgatgggcacaaacctcaaatccctttcactgctaggttgtcagtgaagcagagatagatatttgtggtttgtgcccatcagtaactaattagagaagtaaatgttataactagtcagtattctgtggctacaatgtggcaagttaaaataatatccttaaggtgggcgctaacgcaatatgactggtatccttatga

SEQ ID NO: 118269 - DNA, 354 bp, Homo sapiens
tttaagagatagaaccttacttagtcacccatagttcatgtaacctcaaactcctggactcaagtgatcctctgtcacttcagcctccaccatgcctaattaaaaaaaaaaaaatttctaaagatagggtcttgctatgctacccaggctgactgtgtactaattggatgatgtctattattattggtttactacagttgttaatattatgcaaaatatctttgatcgataaagagcttctcctggtcctttgggcatggctttctgaggggaagacgacctctgggatgctcaccctgccctcttcccctctcatccccatctgtcccctctgccaccatgaggaacattttc

SEQ ID NO: 118270 - DNA, 365 bp, Homo sapiens
tgttctgtatgaacttgagaactgtaatctgctgttgttgaaataatgtatagatgtcaattatacccagttgattgatggtgctattgagttccatcatgtccttactgattttctacctgctggatttcaccatttctgatggaggggtgttgaagtttccaactataatagtagattcatctattctcccttgcagttctatcagtttttgcctcatgtattttgacactgttattaggcaaatacacattaaggattgttatgtcttcttggaatatttcttcctttatcattatgtaatacctctctttagccttgataacttttcttgttatgaagcctgctctatctgcaattaatac

SEQ ID NO: 118271 - DNA, 264 bp, Homo sapiens
ctgggaccaaaccataagaaagattacaccactcagtatacattctgcaaccagtggagccagacttaaaaacaatctgtcaacttcactcttccatcctcatttaaaagagtaacttgcactttacctttaaaatgtgctatccaatcatcagtaccaatccagtgaccacttactaatgcagtgttactttaaccaacctagggctactagtgggcattttcaatctctccagctctactccacgctagatataagaaaccc

SEQ ID NO: 118272 - DNA, 470 bp, Homo sapiens
acaaagaagttctgtgttgtctgtcgacttttcttgtggaattgtttccttctttttccagaatttttaaatatatttttctttatatttgaccttttttctcttattaaaatgaagacttggtagtagtaatccatgacccattaaaatttatgtattacattttcctcaagaactctagtattgtggtggctttgttccttcttatgtccctgtgtgagttgtatcacccagtaacctaccatagtgggtagccttgtgaaaaatccacaaaaataccaactgggaccttattcatgaaaaatgtgtcttaaatgataaggaatgaacagctccaaaatgcttactattcattggaaatttattcacaattcttgggaaaccaatcttcaaatactataaaaatgaatgttctagaggttttaagtacagggacttgtctgtagggggtcagggctggcaatgcaaat

SEQ ID NO: 118273 - DNA, 568 bp, Homo sapiens
tgaaatgagtgatgagatacatatacatatacacacacatatatttgtgttgctaagtataccattttatatatatatatatatttatacatagttttacgtacacacactaaactgacaggttattcttttctagatgggagagaacaagacctttgtaatggaaaatggtggttcctgtctaatccattttaaagcagaatgaatgtgtctggcacagtggttctcaaaatgtggttttcaaaccagcagcatcagcattttatcaaaatgcaaatactcaagcttcagtcagaaactctaggggtagagcccccaccaatctttagtttatccagctctccaggtgtttccaatatatgttaaccactagttgtagagaaccactacaactagtattcaatagtggttcaatagtggttcaatagtgtattgaaccactagttgtagagaaagttccagagagactattgagcagaaagctaactatctagaaatggattttgtttgtttgtttgtgtttgcagtgaaagtctcagcatggatcctagggtctttaacacttctg

SEQ ID NO: 118274 - DNA, 408 bp, Homo sapiens
ccaagtcgcacatcccaaatgagcaggtcttctggtgggactgaggaaggaaccaaggtaagaataggagctcaacaattacctagatagagtctccacagcccagacaagccaggactagagaagtagacttcagaaatccctggaatttctggcttttgggaagaccttgtaacagatcactgtattttgtctgcctaccctcctcacttccttttcccattttgtctggtaacaggatcttccttcctaaggaaaatccactggatgtggttcagtagggctcacactgctccgtcatcttctcgaactccagacctcaggtgatccacccacctcggcctctcaaagtattgggattacaggggtgagccactgcacccggccggctcagtcatcttctcccta

SEQ ID NO: 118275 - DNA, 305 bp, Homo sapiens
tcaccctagggctccgagccaccacgcccctctgcctttcccgagggatgctggtgcttgtgacttgtccagcagggaggtgggtttctgactgcccctctctgaccctgactcttagatgccaggtccagggcagctgtgctcacagacgctgcattctctgtgcgtccggcggaggagatgatgggacggggaactctcgctgccgcccaccccataaagtgtaaccggtctcttccttgcacctgatcaagacatgtaacgttcaacttgtgcaaggcgtaagtgtcctcacagtaaaccat

SEQ ID NO: 118276 - DNA, 511 bp, Homo sapiens
tttaagggccgtagacttaaaaacttgaaaaaaagaaacaaaatacgaaatcaaagtttgattagatatactaacaaacaaaaaagaagtgtatcctggataaatcaagacatctgctaatgcaaaaaggttaaaaaaaaaaaaaagaaagaaatgcatgataagcttagaacactttatatggagaatttttaagtacaccctggcaaatttacctttgtgattttacttcataaaaaagaaattgaacttaacttagtttgtatttttgtgtcacagaatgacacttcatatgacacaaaatcagtcgtctggagtcccaagatctgtgttctagccatatctgatttttatctagctctatgaaaacacacacacacaaagctgatgttctacatgagttcaataatattcaaggctacttagctgtgagaaggcgagcacctttcattaatgcttctatagtagaaaaaatgtggtattctttaagggccgtagacttaaaaacttg

SEQ ID NO: 118277 - DNA, 398 bp, Homo sapiens
cagcttctgaggcttccggttcccccaaatccttgcccacactcaagataatcagtcttcaatatgagccatttaaataagtgtttagtggcatattggtgcagtttaaatttgtattttgcaatggctgatgatgttaagcattttacacatgcttatttccatccacatatcctcttggctaaagggtttctgaaaatccctgacatatttttgattgggttacttggtttctactgagttgagagtttttcataaatgtctttatcagctatatatttgcaaagtttcttccagtctataggggtatatagtctataaataaatcttttttttttttttttttgagacccagtctcgctctgtcacccaggctggagtgcagtggcccaatctcg

SEQ ID NO: 118278 - DNA, 322 bp, Homo sapiens
agattgtaccacttcactccagcctgggtgacagagcgagactctgtctcaaaaaaaaaccaaacaaaaccctcccaaaaaacccaaaatatataaattagtgctattaagtgcagtgaaaattgaaccagggcaagagaggatgccaagagaggatgatttcctctgtagaaccaggcaaagcaaaggaagaagctttctctcaagaaagtgacacaccccgaggacaaaaccagtaatccccatgcatggatggcaaagttggatatatgtatgttgggctccctgagtggcaggagaggtggggctgagttgcaaactg

SEQ ID NO: 118279 - DNA, 418 bp, Homo sapiens
tgtgacttagaatggttaactatctgggaatgcaggccagtagatctcagccctgttttacccaggccctattcaaaatggatttgctttggttcaatatgcctctgacattttccccctctattattattgttatttttttaaacaaggaaacccttaatcctaagggttgtagtgggacgaagatcaatcttctgttactacttcatgctgaatagaggtgatgatattcttgcctattagcgtcttttgtatttgaggtagagaggagctcaatcagaaagcatcagtttgatgacggccattcctaactcccagttccaacaataggtgatatctggaagattaataagtgttcactttaagaaaacacccagtaagtttattctgcatttctacacaaggagtagaatggcaa

SEQ ID NO: 118280 - DNA, 656 bp, Homo sapiens
atccttacaagacagaggcaagcagagaaggcatagcagcagcgaccggcgctctgttttcattttccactctggccaggggataaactggaccccagtggactccaacaccaactctctgcttcccagttactttcgattttctttcccttctccttctttctctccctctctggcattcaaacagaagcacaagaggacccaccagtggcaactctaagcctccttgcaggccacattccctgctgacgtggtccttcctgcaggagagcccttctgtgattatctaataatagccagggtggctgagaatagaatctggctcaaggactctgcacacccggggcagagacactgaatctgtgggtcagggcctggcaacattccttggagcctccccctctgagcccactctttgggcacccttaggcttgcctgccccccttataaggggctttgtcagccctgccatccgctgtatttcatgtgctggttcctagctaaggagaattgggcagagcaaaccctttctcaccctggtctgacagttgtgatcccgacagaatgcgaccttgtttggagaaggcgaccttgttgggttggctgtgttctgaaaccaggcttgggagtgttatatatttattatatacaggctt

SEQ ID NO: 118281 - DNA, 523 bp, Homo sapiens
tgcaacagggtctcactctgttgctcaggctggagtgtggtggcactatcacagctcactgcagcctcaacctcccaggttcaagcaatcctcccacctcagcctcctatgtagctagaattacaggcatgcgccaccacgtccaactaatttttaaatttcttgtgttgggtcttgccgtgttgcccaggctggtcttgaactactcctgggctcaagtgatcctccctcctcagccttccaaagtgctggaattacagacattaggcaccacaagaatgatctgcatcttggttatggttgtggttgtatgggtgtatacataacttaaaactcatcaaactgtacattttaaataggtacagttgattgtatgaatagatatacagcataccctactaaagttgttattaaaaaaatcattagatgagatttagagcagattagaagcagcaaaatagtggatttatgaatgggaaaacaggcagcagtaagtattcagatgaaagtacagaaagaaaag

SEQ ID NO: 118282 - DNA, 269 bp, Homo sapiens
cccctggctctgaacttagtactggctgaacttagggaaattgttatgcacttattttttctgttaggaagttggctcaagagttgcttatgtgctatcagggagcagggacatggaataatgattttttaaaagctttaccttgatgtctatgtctctacattagacaattgtatgttcaggggatagaaggaacagttgcaatgatcagcgtctcaccctgggcagctgttgattttgtaattaatgtagttcaaaagaagcctttc

SEQ ID NO: 118283 - DNA, 610 bp, Homo sapiens
ccctgccagtaaagattatttatttactttccacagggagttaagagtggtgggcggtttggggatagcaccaggagatatcagctgtgatggcttggagaaacagtgtaaaccggcagtgtaaacaagagcagggcatgtatgagtagttgagaacggtgaataggattatgactagacagaagatagtagggatgacaagtttttggggcacagcccaagttgggctggtgtctggaatgagacgggggcctaataaaaaggagtgtctatacaggagctcaaatgggctgtaacctgtagcattccgaggacaggcccgaattttgagaagggaaagtggtaaaagtattgtctagtcattttttagttggtggctgagcttggtgaggtgcgtttttaaaagaccattagtccattctaccttttctgaagattgaggatggtaagaggtatgagggtttcactgaataccaagagcctgagaaactgcttgggtgatttaactagtaaaggccggtccgttattggactgtatagaggtgggaaggccaaaccaaggaattatgtcttacagaaaggaagaaatgaccgcagtagccttttcaga

SEQ ID NO: 118284 - DNA, 342 bp, Homo sapiens
tgaggtcagttgggtagggttttggccagcagaggggtgaagcatggatgtttccaggaatggtggggaggtgcaggagctatctgggggacaggagatgatctgaagtggccgggccaggcagagagggaaccaagaggtcctctgaggctggttgggccaggccttgaacattcttaaagcgctgacttgtgtcccatggaaacaagactcccttgaaatggggaggggagacgtgcagggttggggagctaactgggggtttggagtgttagggagagctcagatgagctgaccccaaaggcctacgctggccagcacacgagagagattccatctcac

SEQ ID NO: 118285 - DNA, 248 bp, Homo sapiens
ttccaagttgtaacaggccaaggttgtagaaaacattatactgacattttctgtggcccttaacattttatttcagtctatctattctttgtattcatctttccacactaaagatttctaatgtttctaatcttcctctgtgtgaatcccatggccccagcctcttaaataatgtagtgcctttctctgtacctccttcagtcccattattagagagtttttaaaaaataatcatagacttttagggc

SEQ ID NO: 118286 - DNA, 744 bp, Homo sapiens
gctctctgatcctcccaggtagggctggcagactctatgtaatcccagggacaccctgtagaatatctcttgcctccccttgctgagataagccatgtccctctctcctctgctttgtgcagtgctgggtcactgtttgctcccccatgcattggtgtcatctgtcactcagtgctctatgctcaaagtagtagttacagggtgcgtagtgatcactagctgagctctactggaaacactggactctcctaataaactaataaactgagttaaaaaatacattaaagccacagctgaaaaagataatttttaaaaaggattgcttctgatctcttggatttctgggactaactcttacataggagtctaacccagttagcaaatagtgtattcaataaatggagtgaaacacataaatgttcttccgaatttagctgcttgctcttcaacctctgtctcaaatctcaagactatgtacagaaaaagggcaagggtcaaggagagctgaggaaggctaacataagtttgatgtcaggagtgtatgtgtgatgcacgggatttcatggtcatgcatagatagcacacgatgggacaatttccacacggcctttgaaaacaggaaggtctcgtacattggcttagatcgagagcttctacaagctctcacatgtcgacaacccaaatacctggggactcctaggtccacatgccagattctcggaatctagacatacatggcaacgg

SEQ ID NO: 118287 - DNA, 423 bp, Homo sapiens
ttccactgcccttggaataaagactaatccccttgatgttgcttaggaaacgctacatagtatctttgcttttctagttacataactggctactttcctccctgttctctatgctcctgcaatttaacgtgtgtcttgctttctttgctcttgcacatgctgctctctcttgcctggcactgtttcatctaatttccttggctcattcctactcctttaggtccccactcagccatcatcactttctctaggaagtctcaacctcaggtctatggtaagcagctgattgtgaagctcataaagcacccaaattcctttatttctcatctcacgctatgaaataatagcttgtctaatgattaactttctctcctttgaggtcactagattgttgtgtccccagcccctagcacaattcctgga

SEQ ID NO: 118288 - DNA, 610 bp, Homo sapiens
aagaatcctttggcagcctctcttggtttgtcagtgcagtataaggcaaatagaccttcatttttagacaatggtgtggaagttaccatcttgcatacaaagcccagggacccagcctactgtcaggaaagatggaggtcacctgattatgatctgcaggtagagaaagcatcaaaggctgaaggagaacttgtgtgacagtcaggagagtcagactgaagtctcaatatagggatagagggttcttcagagacacagcaccaataggatgtgtgcgtgtgtgtgtgtgtgtgtgtgcgtgtgtgcatgcagagagagagagagagagatttattttgaagaactaactgacacaatcacaattatggaggctggcaaatccaaaatctgctgggtgggcctgcaggctggagacccagggaagagccaatgttgcagtttgaatctgaagaccatctgttgtcactactccctcttgcttaatggggaggttaattttgtgttctattcaggccttcaactgattggacgaggctcactctcattatagatggcaacatgctttactcaaagtccaccaacttagatgtcaacatcatccccaaacacc

SEQ ID NO: 118289 - DNA, 422 bp, Homo sapiens
agaggatccccccggctcgggtataggcctgacattctgtcctttgggtcccctgtgactccagagctccttcccttctggggcgcccacatctgcgacacgcttgtttgcccagtgcattttctacacttagagttcctctcgtgctctcatatttccatttaaagccctctcgagaggtctgtctcctgccagcagcattccttctagtttactagaactccatttctcatcctgccaggaatccagccgtggagtgagcttcagcaagcctctctgcagtctcttgtctgctccaaaactgtggcctctggttgtgagaaatgggcatcctgagtcagtgagagcagtagttagcttgcagcagcttcccctctccccctgagtgagcctttcttcctcttcctcctctttcattcagc

SEQ ID NO: 118290 - DNA, 296 bp, Homo sapiens
aaataccatttcatcagcgtcagaaaaaaattcctctgctcagctctccaaacagcgacctggccttcttatacggggagtggggagaaacgttagggcacagacccctttgagaactggatgggggtcatggatcagtcctccatgaccatgcaagcatatgactgcaccacctgcacacacacagcggtacacacacaggcacacacagccacacaatgcatagaggcacacatgcatgcacacacacaggcattcatgttaccagcaatttgaaggccatttctagctctcaa

SEQ ID NO: 118291 - DNA, 535 bp, Homo sapiens
tgatcaacatgcccatgacaagaaatagagaactaccctgatgggtttagatagatgatctgttagagaatggatgctgagaaaatatcaccatacctcattaaagtttctatataagattagcttttgtgactaaaaaattctaccaggaaaagggatgagatttaatagtaaagaagtatagatagagggaatattccaagggtaaaattacttgttgtcatatgtaaaacagaaatggagagaaaggagaattggagagagaaaaaaacaaaacactagtggttccagtccaggaaagagaaaagcaaggtctacattgaaatgctgatcatgaaatcatgtgacatagtccttgtcagaattcattgagaatcattggtgtgtatttttctgctgttcagcctaaacaagttaaaagccagactataatttttgaattgaaaagcaatgtgtctaacagtatgcatatatatacatgaaaatatgtaatccaaacaagtaatggatgtgttttatgtatgtattcctgaac

SEQ ID NO: 118292 - DNA, 650 bp, Homo sapiens
aggtggagcgtccttactgcacagggtgtggagggaatggcgtgggctcagctggctttgtcatcggacacgccgcaggctcagtttctgcctctgtttcccactaagctgtttagcacagaagaagttatttaaccacatctttggcctcagtttttaatctctgaattgtaaagaacagtaatgagtctttcatggagtttttgtgcagattaattcagtttctgcaaagtgcttagtattttgcctaaaactcagcaagtatgaaatgaggttgttgtcaatttttactgcagaggatatgacttagaaccacacctctaccccctggtgcccgtcatcaacaggtgaggcccacctgacagatgggggaaggcagagaagtacagccctgacaagcaggctcgtgaaaatcagactttgttctgttcacaaaggcgcagctcacctcgtgcccatggaacgccgcctttattaacacagcacaggcacgtcccaccagcgtgcaacaccgtgcggcgtggaactgccatctctaggcatgaacctccgctttgcaggcttgtttccttgtttgtcaccgaggcaaggtgctgcacagaattcatttcttatgtttgcagtcacagtgcagtcatcaaatccagaga

SEQ ID NO: 118293 - DNA, 436 bp, Homo sapiens
ctgatgcaggaacagaaaaacaaataccacatgttgtcacttaatggtggaagctaaacaatgagaacacatggatactaggagagaaacaacagacactgggcctactttagggtggagtgtggaaggaggaagatgatcaggaagaatgcctattgggtactatgcttattacctgggtgataaaattatctctacgctaaacccccatgatatgcagtttacgtatataaacctgcacatgtacccctgaacctaaaataaaagttaaaacaaagaaagttgattttttgtaaaagattaacaacactaacaaatctttatctagaatgaccaagtgcaaaagggagaagacttgaattactaaaatcaagaatgatacagaggatatcactaccaacttcacagaactaaaaaggatagtatgaacaattgt

SEQ ID NO: 118294 - DNA, 375 bp, Homo sapiens
tggttaattcagcctctcgggaatgtagccttttatcctttcatgcaaacatgtctgttttgagtatatagaaatgcaccctacagtgttcataaaaccaacagatgtgtaattgcagtcctggagcattggtcagttcaccttatccttctttagaagactgatttttgtcaatgcaacattttgtttctactgctgtggatcctttcttccttcttcttcttctttttttttaattagcagtaccagcaatcctgctgtaagacatatccaaaagaatgaaaatcagtacattaaagggacatctgcacccccatgtttattgcagcactattcacaatagccaaggcatagaatcaaccattcattgagtgt

SEQ ID NO: 118295 - DNA, 1104 bp, Homo sapiens
ttgtctccaaagcagtcatctaaaatctacacccccacgattagatgagttattactgagaagttattgcacccacaaaaaagctgccatttttttccaaagatgtcaaaagctagaaggccaggtcttctcaaagtaaaatacactgtgtattggggaaaaaagggtaagaggcataattaccaagttaggcatagtctgtcaagttgtatttagctattatcatggaatagtgttattccctgataatgaatgttggcatcataaccagaatgattattctcatctccatatcttcgtatttacatctaggaaatataaagcttatttatagtgaacactgagagtggtctctctccaaggagtaaagtaaatatgccctggctaactagtgtaagtttgtattctacataattaaccattataagaagtcactgagtagatcctaacttaagggatatttgtttgtgtttgagtatttctcgtgtggtgtttctaagtttgaaaagtgttttataagcatagagcttatgtgtgctactggggacaaatgtctcattttaaaggaaagagggttttctgagatggcatgaaatgagtgaaatctatttattgcctgaaagctaaagtggaatatgaaggcaagtctttctgaacagagcagtcctgtcactgactaacccagggaaaggacaggaaaaagctagaaagtgttttgaaaactcttctgcttaccttttgaattgggacattaacaaagtaaggaccatttatgtgactggcttcctttggttagttatgattcattcattaattaattcatcagatttatatagagcacctgccatgagccaggcattatactagatgtttgggaaacattggtaaacaaaagcaaagatccctgcttttatggaacttaagatattctgagacactggatcatacattctagtgcagtcaccttattaaaacttaagattttgtgatgcaaacaaacagccagaagctacaaataatgtaaatgttatatttaaaaaatacaatttcaaagaaatgacatttaaaccagttttaggaaagctgaagacaatattgctttta

SEQ ID NO: 118296 - DNA, 276 bp, Homo sapiens
acactttgttgcacgtgacatttgcctcataggttcacctgcctcaggcttcctggctccatcctgtgacttattatttttttaataatacccaagtacagctgggtgtggttgctcacacctgcaatcccagcactttgggaggctgagggggggtggatcacctgaggtcaggagttcaagaccagcccggccaacacagtgaaaccctgtctccactaaaaatacaaaaattagccaggtgtggtggcgggcgcctgtaattccagctacttg

SEQ ID NO: 118297 - DNA, 329 bp, Homo sapiens
gttatttgcctctcttcttctttattaccattcctctagcccaaatcaccatcatcctcacctaaattacttcctactatgtctctctgaccccatcatggcccctagactcattaaatttagcatccagagtgattatttttaaatcaaagtcagatcagtcactattctgttccatggtgccaatggctccccattgtaagagtaaaatccatgacccccttctatctgtccagtcacatctcctaccactctttcccttgtccactgtactccaattacatttagcattcttgctattcctcaaaaattctaatatctttcttgcc

SEQ ID NO: 118298 - DNA, 316 bp, Homo sapiens
gacttcatcaaggctgtcctactccttgccccttttcctataggactcatctctactgaatcccaaaatcttttgcttgtcagggtgagacagggtcttactctattgcccaggctggagtgctgtggtgcaatcatggctcactgcaatctctatctcctgggtgcaagtgattctcccaactcagcctcccagaagctgggaccacaggtgcatgccactgtatctggctaatttttaaaatatctgtagagattggggtggggggtctcactatgttgctcgggctggcccaaatcttactttagaaagaatc

SEQ ID NO: 118299 - DNA, 363 bp, Homo sapiens
cactgcagcctcccaggttcaggtgattctcctgcttcagcctcccaagtagacctgccactacacacagctaatttttgtatttttagtagagacagggtttcggcaagtgggccaggctggtctcgaactcctgacatcaagtgatctgcatgcctcagcctcccaaagtgctagggttacaggcataagccaccatgcccggccagtaaatacccatttccaagatagcgtctttcagatcggcaacgatgcaaacacttgataacagtgttagcaagggtgtggttaaatgggcagtcctgttcattacagatcaggagacttcactgtagagcctttaaaactttgtgaattttgaac

SEQ ID NO: 118300 - DNA, 616 bp, Homo sapiens
atcaatgtgaatctggtcctgagctttttagaaaataagagtggtggccgggcgcgctggctcacgcctgtaatcgcaacactttgggaggccgaggcaggcagatcacaaggtcaggagatcgagaccaccctggctaacacagtgaaatcccgtctctactaaaaatacaaaaaattagccaggcgtggtggtgggtgcctgtagtcccagctactttggaggctgaggcaggagaatgctgtgaacccgggaggcagagcttgcagtgagccgagatcgcaccactgcactccagcctgggcagtgagagtgagactccgtctcaaaaaaaaataagagtggttaactttttggttgatattagtattatttgtgagaagagtttccccacccttcttctgatagaacaattgtctgtcactggagaaatctccctccagagctttggcaaagttactctgatctgggtctgtttaaaaggccgggtctctaatttaggaatcggtgatttggaagcttttgcagaacatcaccagaagaagggaagcttcccagagtcagaagctaaattaaaataatttccaaggctatttgatcagccttcttccttttt

SEQ ID NO: 118301 - DNA, 650 bp, Homo sapiens
caacggtgcgcaactggtcgatgagtgatttttttatggaacttcacactttaaagcacttatctatatgatttaattcttataatcctgggatagaggaattactatacccattttgtaattctcagaggtagggaggttaataagtaatagttgcttaagagagtaagtaacagctggaatttgaacccaagtcttttgacttcaagttcagtgttctttccattcttttgcattgccttcttaactttaatgtattgatatgattaaggaaactgaattgtttaatgcctgctattgatcaggacctgtgcaaggtaatttgcagtagttatctcatggcagacaatcttgagaggttgttattaaccacatttcatagatgagggaactgtgttagagaaggtaaaatacttgcctaaggccctagaatccaaccaagctctgtaaagataaagctctttccctgtatctatgtggaagcaaaaaagaaaaagaaagctaaaatccatttatgtttctgaaaggaaagaatctgagttccttcactaaactaagaccgtgggatatgtttgctgtgttccatcgtatcatagtgacatgctttgtaaaggcatgtcacttgatgtacatccagatgtagcttaggg

SEQ ID NO: 118302 - DNA, 657 bp, Homo sapiens
ggattattgaattagagatcttcaactggtaagtatataatgcagatactccaaagtgtggaaaaatccaaaacctgaaacacttctgcttccaagcatttcagataggggatacttaacttgcatattttaatctgtaatgttatttaatactatatttaaattaacattcttagtcaagacctgtaaaagtggtaaacttactgagtattcacttgtccttaaaatcaaatactgtttgtagtattgaagtactgccattgttttttaaatggatacttagtggtgttaaagtaaatagcagtagaagcagatagtgtaatttataagaagcctcaccaagatagaagaattcctgcagtattatgttttcttacatgtatttcaccttatatttcagtattaggttgtgcatatttaccctgaaagagaagcagcagaagagaattcatatgtgtatgcctacaaaatataaaaatcagtatttttgagtaaaatctatattttaatagatttttttatgtattaaaagtaggaaactttgcatttgacagccctcaaattgggaattacttgtctaatcttctgtttattaccctatcttgatttagtagttagcagcttcatggctgtaaaatacttttattttacatgaca

SEQ ID NO: 118303 - DNA, 438 bp, Homo sapiens
atacatgcgtgagtgggcacacatgtatcttcagagcagtgttgaggcaccgctgagctactcccctcccctctcccaatggcccctactgggctccttatctcctaagccacaactaacaggcaaagccactgaaagcatgcaaatgccctccctgttgtcgcagccaactccagataacccagtatatggactatcaaggctcttggcttctcttggtcctccctgcctgagagcagtttctgctctatcatccatcctcttcaaaagggtgagctcagatgggaagaagagagagagcacccagggtatacacggcgctcccttctgagtagcgctaattaaaagttggctggaaagtgagggaggcagtaactgtgattaatgcacgttctgtggcctcagaggtcatcaggagttggctgatggacagttgga

SEQ ID NO: 118304 - DNA, 845 bp, Homo sapiens
gactcaatgctttcctcagaagctgcctgggtatcgcaatataaggatatcactgacgtggatgaaatgaaagttccagattgtgcagaaacttttatgactctactcttggttataactgacaggtataaaaatcttcccacagcttcccgaaagcttcagttcctggagttacagaaggacttagtagatgattttaggatacgattaacacaagtgatgaaagaagagactagagcttcccttggctttcgatactgtgcaattcttaatgctgtgaactacatctcaacagtactagcagattgggctgacaatgttttctttctacaacttcaacaggctgcactgggggtgtttgcagagaataatactctgagtaaattgcagctaggacagctagcctctatggagagctctgtctttgatgacatgattaacctcttagaacgtttaaagcatgatatgttgacccgtcaagtagaccacgtttttagagaagttaaagatgctgcaaaattgtataaaaaagaaagatggttgtccttgccatctcagtcagagcaggcagtgatgtccctgtccagttcggcttgcccgttgctgctgacgttacgagaccatttacttcagttggagcagcagctttgtttctccttatttaaaattttctggcaaatgcttgtagagaagctggatgtatacatctaccaagaaataattcttgctaatcacttcaatgaaggaggagcagcccagctgcagtttgatatgactcggaatcttttcctttgttttctcactattgcaagagaccagaaaattattttaaacagtaagctcaa

SEQ ID NO: 118305 - DNA, 481 bp, Homo sapiens
gcactgagccttactgtgtctgtagtggtgtcaaatggcaagcacctctacctgccaccacccttggcaaatcccctacctttaaattccaccaagaggcttttcccaccacccggccagtccatggcacttcctagttcttcccttctgaaagactcttcacagcaacaatgcaatctatgtgaaattgaattagcagatttgaaaagtgtaatgtgaaagttttaattgtcactttatgcacaaatttggaaacaatttgatcctcccattattttttcttacaaattacaagatttcaaagccagatggctgaactataaactctgctcacccttgaactggtaaaccgaaatagcccatcctttgtccacatcctgtgaatcttttgttgcttgtaggcattggaaggctgtgagtcattttggtaatgattgtgctgttattttaacatacactgttattataattggaaatcctt

SEQ ID NO: 118306 - DNA, 700 bp, Homo sapiens
ctcccatttttctctccacccacataaaatagtatgttcagtgaaatgccactttctatctttaattgttcgtatcatatatgcgaactttttagacatgaacatgacatgttcagctaggcagagttctcatagataattttcaaatattttccttggctgtaatttatgtattcatttatatcctatccgtcttttgagcttcagatctatatactcttttgtactctcatcactccgcactttgctgtttcttacctagactctcttttacacaatatgcacatttttaccattgtggggtccaaatttaagataccttccactcactaataatatgaacttatatttcctgggagtagccaggttaaattttctatactttggtccataatttgatttgatatgattgtttcatttataatttgcccaaatacatggagcacaaaatttagtgaatttataaatctggatttgccttgtgtccttctgagttttcaaaggcaagtattcaacagtccctgtgtgatgactgacagggttatttgcctcatccacatccaccttcggaatacattaacttcctttgtaatttatttgaaagtagtgttaaactcattcagatcattcagttggattttcccaatgaagaggaaaaggaaagtagttattcctagctccatttcttattttccaccaa

SEQ ID NO: 118307 - DNA, 584 bp, Homo sapiens
ctgatatggtttggctatgtccccacccaaatctcatcttgaattgttgctcccataatctccatgtgtcgtgggagggacctggtgggaggtaattgatacatgggggcaggtttttcccatgctgctctcgtgatagtgaataagtctcatgagatctgatcgttttataaaggggagttctcctgcacacacactcttgcctgctgccatgtaagatgtgcctttgctcctctgccttctgctgtgattgtgagacctccccagccatgtggaactgtgagtccattaaacctctttttctttataaattacccagtctcgggtatgtctttattagcagtactaatacattaacccactaacccactatttgtatctgcttgctcccaggagagttgagttgtagactacaagataaaacataacttaaaaaataaggcactagggtagtttagtaaaacaatggccagctttgaaaccacttatcaaactctggaaccttggaaaaattaactaacctaccagaatgttacgtttcctcatctgtaaaatgcagtaacaactttacagagttgttggga

SEQ ID NO: 118308 - DNA, 396 bp, Homo sapiens
ggacactgggaaaacaagctccaacactgccttaaaaggatcattgccatgataaaatctgagtttgagacatcatgaagaaatgcccttggataggaatctgaaggggaaaaacacttaccagttccaagaaatgtttactctctggtttataacccaaagcaatgagtcttttggtgtccggaatcagttttcttaacaaaggagatctgattctttcttacatttctgtaatgttcttctttgactctgatgatgatgcagactaacacttgaattttagatcaggaagaaaaatacacagctttagaaaattctactggagctaatattgttgtgtggtctagaaaggattagaagtctccttttaatctagggcaaaggaaaagaatcctt

SEQ ID NO: 118309 - DNA, 362 bp, Homo sapiens
aaaaggggaagggagacacttcttagccaatgacttacaggctcccccattcctgcggctcagtgcccatttcgaggccacaggtgttggtggcttcacaccactgtgctggagctcagcgaggccttcaccttgaactgctcacatgagaatggcaccaagcccagctacacctggctgaaggatggcaagcccctcctcaatgactcgagaatgctcctgtcccccgaccaaaaggtgctcaccatcacccgcgtgctcatggaggatgacgacctgtacagctgcatggtggagaaccccatcagccagggccgcagcctgcctgtcgggctagtcgggagactgtcggctagtcgaag

SEQ ID NO: 118310 - DNA, 416 bp, Homo sapiens
tctgtgacctgcaatcatgagtcttaaaatcatacagggcttaatctacctttttagtcttatctccaactactcacctttctgaattctgttttggacaagcatgactcatttcatcatgaaaagatcttttgttggccttttgcacattcatgatttttttttactcttctctaaaatgccctcctctccttcctttttccagacctggtttaaatcttactttttctgtaaagtttttcctggacacactagttagttttttactacactggaacttaacctttatcataacaattgtctaaataatttgagaaggaatcatatagtactactttgtatcatctcttctattattttgaaagactgtttaatttttcatgtcttacattcccaactaaagcctaaaattgttt

SEQ ID NO: 118311 - DNA, 237 bp, Homo sapiens
ttttgaattatgaatggtgtaagcatgtaaacacaccagtaacagtaaaatccattaaaaaacacaacacttatttagtgcttaccatgtactctgtgctagacactattttacgtgatttacaggtatggatttttttaaaacttaaatccattagctaggtgctattgtcactccattgtgcataagcagaatttgaggcacagagaggtcaagtcaccagcccaagttcacaca

SEQ ID NO: 118312 - DNA, 601 bp, Homo sapiens
agtcgagcgcggaaccggtgtatcgatgccactggtgtttatcgatgccactggtgtatatcgatgccactgtcaactgagctttcagaagttgtcagtggctaaatgatagaccagaaatggaaaggatgaattccagccctacacctaccattaattttcaagcattgctgaggcagtcatgatgctaatcttggcttcaacttttctcatcttaaaaacaagggcattgttttgtgaagcaattggcggtttgttaggatttaattcagtgtgcagggttggataacaatggttcttaaaaatggttcttcaaaagaacaatggttcttttgctttgaaaccaggcagaatgggcattaactttcctcataagggaggagggagagcaggttacacagttcctaattgagatctgtcacttcagaagtagggacctttaacaaatggccatttggaggcgctgggggagatgtactctgtagtatttttgaggaaatattttatgattgtgctctaggtttcttgcttattcattgatcaatattgacaagcattccttaagacaaaaatattacattcttcaggtagcatacataga

SEQ ID NO: 118313 - DNA, 501 bp, Homo sapiens
cgtgttggcacatgtctgcagtcctacttgggaggctgaggcaggagactactttgaacccaggaggcagaggttgcagtgagccaatatcgtgccactgcactcgagcctgggcaatagagcaagactccatctccaaaaaaattaattaattaaataaaataatgttaagcttagtgttagttgttctggacattttaaaacattctttgtggcagagaaatagctttctgttaattatacagcctgccagtattcacaagagtttttcatcctattaaaaagtatagttgggctgggtgtggtggctcacgcctgtaatcccagcactttgaaaggccgaggcgagaggatcacttgagaccaggagttcgagaccagcctggcccacatggcgaaaccccacctctactaaaaatacaaaaattagcttggagtggtggtgcacgcctgtagtcccagctactcaggaggctgaggcaggagaatcacttgaacccg

SEQ ID NO: 118314 - DNA, 464 bp, Homo sapiens
ggattttaaatagggaattcagacattggctaggggactatgctaggtgatctttaagattccttagaagctctagtctgactcttactgggttggtcaagactaggaaataaaataaagaataggagctaagagggatgactgtttaaaaataaaggaatgtgctagcagttatttaaggtggcacctgaagtttagagacacagaaataaatagatgctaggtttggctcatgagtaaagataaaacttactcttataaatcaaactgtagggttttgaaatgaacttgatcaaaattgagtcagatttcaagtcaaggtctttgagcaaatttagaatttgcttgatattctgaagatttgagattccagtattcattataggaaaaactttgaaatatataaatcaattttagtaattttatatttttttctttttcttttttcgagacaagccccacac

SEQ ID NO: 118315 - DNA, 313 bp, Homo sapiens
cccttcacccgccattcaaacatccgtccacctatcgctcctctgacatctccccggccatttctcatctaccgtcattgccacatctgatatctcctattcacctgctcagtcacttccctatccacccactgtcatctccattaccccgtcccacccctgcctaccgcacacactcattcctccactcacccattcacgcacacctattcattcacttcctgcaccatccactcatccactcgggtgggcgatgccaggaaattggggtgtgtgtgtgtgtgcgtgcatgtgtgcacttacacacatgagt

SEQ ID NO: 118316 - DNA, 350 bp, Homo sapiens
gattctgatcctgtttttatttctcacagaatgccaattcctgtccagttgatcgaactctatttaagtgcatttgtattcgagctcaatttggtggtaaaatcttaagaaaggtgagtgtggacgctgccgtggaggccccagccgtgcttctatcccggccctgtgggacagagcatgctttccaaagtgggcttgctctcctgaaatgagggttggttaaatgcttcatagaaatcaactcaagtgccccttgtggccatgagccctgtctggggggtttggggtctgggttgggggttagaggcagagatattgccagctcctgggatatcccttcgaccccaccc

SEQ ID NO: 118317 - DNA, 297 bp, Homo sapiens
agctgcaatttctcgtgctcacggttgtacagtattccattgtgtggctctgtgatgacttagtgatccatgctactgttgatgggcatttgggtagtttccagtttggggctatcataaatagtgctgttataaacagttgggacatgccatattgtgaatgtttatgtatgcatttctcttggatgcaaaccaaggaatgaaactgccaagtcatagggtacagtataaatacattgtgcttaagtagatgctggtcagcagctttctgaaacatcgggtcaatgttcactccca

SEQ ID NO: 118318 - DNA, 354 bp, Homo sapiens
atgtgttaaatgccattcagagaacccaagacactgaccctatccaaggggttggcaaactcaagggataagatactaactcaaccactacccatgtacaagacttatagacaaaaaattaagctattttaaaaacatatgtgaagcatattgtgatggttaattttatgtgtcagttgaactgggttaagggatacccaaatgtctattaaaactttatttctggatgagtctttcagggtgtattcagaagaaactggcatttgaattggtagactgagtcaagtacatctgccctcaccaatgtgggcggacaccacccaatctgttgagggcctgcctgaatacaatgaa

SEQ ID NO: 118319 - DNA, 289 bp, Homo sapiens
attaaacttttgtttacttatttttattttacagatgtcaaagtgccaaccctggaccatggttgggaggtcacagtgagtcaccttctggctcagcagaagaattttctgatgctctaatagctggtcaaaagtggaatagagttgcctgggtctggctctattgcccaggctggaatgcaatggcgtgatctcagctcactgcaacctctgcctcccaggctccaatgatcctcccacctccgcctcccaagtagctgggactacaggcgcatgttaccatgcctgg

SEQ ID NO: 118320 - DNA, 691 bp, Homo sapiens
aactgagccccggaccaaaccattccagctgccgacacccttgcagcctttttggagcaggacagatgcttccacgacgggtcaaaagccattttggaagtgggcaacaccggacaatttttgaaggaggaacgctaaaccctggcgaagtggcttcaaatacagtatttgcataaaaggggatatttctacttcatgatttctcaacctcggcacatattgaactgggcagtttttgtgtgggggttgtccggtccttgtaggatgctgagcagttgccctggtctttctccccactcaatgccagtagcactccccaaaacatgtctctccagatattgccaaatgtcgtctcggggagaaaaatcgtcctcagttgagaaccgcttctatttgaactccgaaccgggttatgattcaatagctaactatggtggtgatttagtccatgtatgaatgtcatttttaagctagctttttggatttgaggttatggctgaaaggactgataaataatatacatatttgaccacagtctgcgaatatgaagtttattctttgagtttcaggcactatgcctccttgactcaatgaagaaccaaatcaacttacagctagctactcatgggcttgaactttctgctgctgcttcagctcagctgtctacaactagaccacatagctggatgaa

SEQ ID NO: 118321 - DNA, 190 bp, Homo sapiens
gtttccctatgcctggggttttagtctctggagagcgcaatgctttttcagctgaatttgtttttagcaaggatggaagtcccttcctctgctttccatctcaccgtatttcagttcctcactattttcaaggtgaagaggcaaatcaaggaattaagactttagagttctgcttctgtcaggggccagg

SEQ ID NO: 118322 - DNA, 678 bp, Homo sapiens
tgtgtgctgctttttgttctgtcattttgcttttttatatatacctctttacatgtattgatataatacctcatatttatcactataaatggccaaaaaaaattgatggcagactattcttatgattattgaatactgatttccaattttaataaggaaaatctgaaacaatgaataaatttggggcttaagctggttagcattaaacttcattcttcaatatcataactgaaaataaagtactctgtaaggtaacttcatgaaaaattacctatttttttattttaatcatttgtaaatctgggcatataaagatatcaagttatttaaaatgttacctttcaaactagagtttacaagcagggtgtgcctgcttgtgtttataggaagtaagttcactaacggcaagagcaacattttcttttatatttcccctggcttatagtacaatgcttttgcacagaggtggggcccaataaacaaaacaaggttaggaaaacttattaaagcatcatatgaaacataaacatgttttgtaatgtagatttaaaagtactcgtggtcgttgttgttgttgtttttagcctgagtttcgcttttgttgcccaggctggagtgctgtgagccaagattgtgccactgcactcaagcctggacaacagagcaagaatctttctc

SEQ ID NO: 118323 - DNA, 380 bp, Homo sapiens
gagtcgacaaatgggggcatggggccagggtggggaggggttaaaatgatctgatttatattttagaatgactactgtaaagttctgtattaaagtagaagtgccaagaatggaatcagggacaccaattaggaggctactgcagttaattaacacctttggactcagtcagtagactggtgagaaaaggttgtattatcagatatcagaaagaagcaatagaatttcctaatgaattagataatcctgaacagctgcctactccaaactctttgatttgaaagagtggattaattaatctacattaactgtttaggccagctggatttttagatgcttgaaatgaacacaatcctgacacactacattttatgtcgact

SEQ ID NO: 118324 - DNA, 339 bp, Homo sapiens
tatgggaattctgtgtttaaccttttgaggagctgccagacggttttccaaagtggctgcaccgtttgacattccctccagccgtgtatgagggttcgctttctccacgccctcgctaacacctgcgattttcttgttatgtgagccttctcgtgaatgttattccactgacattaatctcatggcaccgtcagtgattgaaatgatcttcttgttctctgtcttcgcctctggatcatgaccttcccgaggactgaatgtgtcataaaatccccagtctctagcagtacatgtgtattgagttggatcacatgctgctggacccatggcttgtcatca

SEQ ID NO: 118325 - DNA, 101 bp, Homo sapiens
tcctccctctacaggaagatccttcagttaggaacacagtggcattagcatatacctactttcgctggggggcacagtgactcacgcctgtaatcccagca

SEQ ID NO: 118326 - DNA, 854 bp, Homo sapiens
attccagagagagagactgcgatttgcctttctttcctaaagggctgagttccccaaacattagtgacaaggcctatagtgctgctgaggctccagtatctttcacttattctgccagaagagacacttggttggtacattattttctttttcccagataattggctctttctgttttgagagaccaatacaatattgttaccaggctgttgagaaattcttatttctttggaatggtataaaccaaaggataaatcagtttttcagaaatccctagtctttttctttctaatatgctcaaatgttaatcttatttataaatcttgatgactctttctttattcaagttgatatcaggttaggaatttgcgatatgggattgctaatttaaaatacaccagttattcactggactaagaagaaagatcaaattggcttgcagagaattctttaaaaacaatgaaaacaagaacaaacaaagattttataaaattttatccattgatcctacattctgttgctcaagagagaagcttaccaggatgtgactttctgaagccagtgaatttatcatgactacctggtttagcacatagattcgcaaaggcatttcatgtccctgggcccagtagagagaatcagcagtaagaatacaattactttaattttactgtagaaacgtaatcaaaagtagatatagccgggcgtagtggctttcgcctatagtcccagcactttgggaggctgagatgggcagatcacgaggtcaagagatcgagaccatcctggccaacatggtgaaacctcgcctccactaaaaatacaaaaaaattagctgggcatggtggcatgtg

SEQ ID NO: 118327 - DNA, 473 bp, Homo sapiens
acacactactcaactcagggatctttagtgattagcttcatgtaaagacttaaataatgctatttcttaatcttgacttgacattgttgacttcctacaatggaagaggagttagcttctcttacactgtctttcccacaacatattatcacccccaccctcgacacccacatttcctctcctattagtctccctaagcagtttgatattggctgaaacctgcattcacagtttagtataactgtatgtttaccatttcctgttgagccctttattggtttatgattacatttcctttaggtacaacttttgatttttcctggagttaattacattgtttttctcatttgcttggttttctatgctcttgtcactactttacccaaaagtcgctgccctaaatgtaaagctcttcccaacaaagtcatgtgcatcaggtaatatgctccactttctcttcgagatgttcctga

SEQ ID NO: 118328 - DNA, 403 bp, Homo sapiens
ccagtgccatgtccaggtgccagatttgttatctcaaacatcaccctgcaagtgcaccaagatttcctaatgttagtcagagatctcatctccagaatttgtttttgaagacccatttgaccagggaaagcaacagggaaaaagtagcctttgaacctggcagaatgaataagagttcactgcagaaaagcagtctgcaagaacagaatgatgccgtaaggaagcctccttgggaaaccaccttgaattggttaacaaagttgctgagagctgagcattgccttggtctgttgtacagccatctttataaggaaaaagaagcagtcatggactaaacacagagcaaactgaaaggcctggagaaataactctccctcccccactttttctttctgtgttcaat

SEQ ID NO: 118329 - DNA, 478 bp, Homo sapiens
gggggtgataataaaagggaccttgatatgaaccgcttgggaaccacctgtgtaggaggcagttcgggagcaactctcaaaaggtgcagtggcttgcaagattcagagctggcgtgggcagggacacccctctcagagctaacacagtgcaccgcagccctggcgccagctcggggaatcaggtgggccctacacgagaaggttccacagatactgcctgcctaaagtggatcttgagtcagatcctacgaaagccagaaggagggcatggctgagagtacctcggagaggcagaaaaaggggagctgactcaacactgctctgttgggaagatgtggggagagattctggagatgaccttggctcctggagatggcatcttaaagcagatctctgccaggcgagatcccgtggcccatgggacacaccttcactgggcctgagctgtctgtcggcttcatctactgggacactggca

SEQ ID NO: 118330 - DNA, 472 bp, Homo sapiens
acttagtgagaatatgcctctacaaaaaaaactaaaaaaattagctgggtgtggtggcaggcactgtggtaccagctactcgggaggctgaggtgggagtcgcttgagccccagaggttgtcatgatacttgaataaacaaaaattaaaattttaaataaaataggaacaatcaggcaaagaaaggcagaagacaagagtattgcaaggaaagagaagataaaagcaaagaacttaaaaagtggcaaaacacctaatgctcagagtaccgatccctaatctgtgttatgtcctcctggagaaaattatgttaaaaccatttgaggactttttgcttatcacacatcattactttgatcctgatctccatgattctgatacctgtcagaggaaatcctctgagttaaattaattctcttacggtcctatgacccatagataaagcagaaattccatatggttccatgtttatc

SEQ ID NO: 118331 - DNA, 443 bp, Homo sapiens
gtcattaaggaaatgcaaatcaaaaccaccagataggctgggtgtgctggctcacgtctgtaatcccagcactttgcgaggccgaggtgggctgatcacttgaagccaggagttcaagaccagcctggccaacacagtgagatcccatttctaccaaaaatacaaaaaattagtttggcatggtggtgtgcacctataaccccaggtactcaggaggctgaggcatgagaatcgtttgaacctgggaggtggaggttgcggtgagtggagactgtgccactgcactctagcctgcgtaacagagtgagactatctcaaaaaacaaccaccatcaccaaacaaaccacctaaaacccaccagataaccatttcacacccattaagatagcagtgataaaaaaaagagtggccaggcacagtggctcacgcttgtaatcccagca

SEQ ID NO: 118332 - DNA, 728 bp, Homo sapiens
gcaaagaaaatatactatcaaagtaaattttttgaaaagttaaaacctgactctcacagaaatacaaaacgaaatgccaaagatgtattaacttattaatgaggaaaccaggcagagttaatgcaggtccagagtactgaaggaactgatctttaggcattagaataagattgctagattggagacaaaactggtgacgttctgcatgcactaaaaccacagtttttagagttatcctttctgctggacagaaatctataagctaacgttgtagtttcacactatctgtgctctaacagcaactaacaaagtcaaatgcattggcattcttctagggaattaaataatccttgggtgaagctgtgaaacagtgctctagagtaatatgagaaggccacacagctccctaatctttttcttttttcatgttttggataattttaattaacaatcgctttttaagattattattttcttttgagacgaagttttgcttttgttgcccaggctggagtgcagtggcgcaattttggctcactgcaacctccgcctcctgggttcaagtgattctcctgcctcatcctcccaagtagctgggattacaggtgcccgccaccacacccagctaattttttgtatttttagtagagacagggtttcaccatgttggccaagctggtctcaagttcctgaccttcaggtgatccacacaactcagtctcccaaag

SEQ ID NO: 118333 - DNA, 401 bp, Homo sapiens
ctcaggctggactcagagaagcctccccagctcccgcagctatgctgcggcctgaggctgtgctggacctggcttcatttctgctccaggatggcaggctgtgtcttcttcatggctgcatgaccagcctggggtgggtgtgcccggggaaagtaggtgtacactgggagccgtgccatgtttcaggccctgtcctggctctgcctcgggtgcgggaccttggtcctccacactggctgggtggggctggatgggttgagattcacatgtgctccttacgaccacgggtccctgggtgcccgcagcagggcctccacccttcgctgtgtgcatattcgtgtgcttatgagtttggctttgtttgattaaaggtttctgctgctagaaagataacttgaaag

SEQ ID NO: 118334 - DNA, 629 bp, Homo sapiens
tggaaccatttcacttgtaacattcttttgtcccatagcactctgctaaactactgtctttcaaatatctttctgttttgtttgtttgtttgtttttgagacagtctctctttgtcgcctaggctggagagcagcaaaccctgcctcctggatttaagggatcctcccacctcagcctccggagtagctggaaatccagcagcacgccaccatgcctggcttatttccgtatttttagtagtaatagggtttcactatattggccaggctggtctggaactcctgacctcaagtgaaatgcccacctcggcctcccaaagtactgggattacaggcgtgagccatcgcgcccagccatctttcatatatctttctaaagcaaaaaaagccaaattcttccatcatggtttcctttgggacttctagacctatagtaagtctattttaaaaaattatctgatacacttagctttgtgtgtttattcttttttcccaaattttgtgtggcttatattagttactattcattattgttgagttatttttcagattcactcatacttgaactgaatgactttgattataaattctttggatataaagagcactgtcactttaaattattctgt

SEQ ID NO: 118335 - DNA, 658 bp, Homo sapiens
tccctcgggacttctgcctcctgccaccagaagctgcctacagagactgaagcccaccacgttctcgattaactgcagtcatggacggctccagagatcttctcccttttgtctctggcacaaaagcttgctcggtgtgaagacaacacatgagttatcacctctgccaacaatgcatgcattcttggggaggctaggggacactgggagccctggctgtggccaaggaggcactaaatcaagctgcttcttggaggctttcatggtttcctctaaacaaagcagctctcatctcacagcatgaaggagtttctgaacacagttgctaaaaaggcaccaggctgtcctcgagatgtggaattctcaactgagcaggtggactaaggggttcgcaggtcacggcacgagctcctaggaaccccaagtagcagcaagagggttacatgagatgatagtaagtttcaccactttcacttaccataaaggaaagcggccactacaaatccaataattagtccactcaacatttctctcctgcgcccacgtacctggtggtcttctggaagctggggacgcaaccatgaatgaaacaaagtccctggttttgaagagcatacactgtactaacagagattggggctgaaaaattcgtatttca

SEQ ID NO: 118336 - DNA, 531 bp, Homo sapiens
acattaaggaagactgattttgtataaaaatgtccaataccatattcttgaaatatatttttaacaatttatggaggtatactggatataaaataaactgcgtgtatttaaactgacaaatgtgtcagtgaaaccatcactacagtcaagataatgaacatatccatcactctaaaaaatgtcctcttgtccctttgtaatctgtttattatagcccttcccaccatccacagcctatgcttaagcaatcagagctctgctttctgtctctataaattacttggtattttctaaaatgttatataggtggactcatacagcatgcactctttctgtctggcttctttcactcagtaatcattttaagattcattcattttgtagcatatatcagaagttcatttctttttattgcggagcagcatactgttgtatggatacaccatggtttatttatccattcacctactgatggacgttttgtttccagttttttgttgttgttacaaataaagctgctatgaatacttg

SEQ ID NO: 118337 - DNA, 246 bp, Homo sapiens
gaagctaaaacaaaattcaccaagccacaaagacatcagtaagaacaacagagatctgaaagtctaattccaggagaaaacagggatatatcctcattccttctgcaagtcaaccttgggcaggccactcctcctccgcttgagcctcagtttcctgtttgtgcccagtgttgggttcagcagagcacagtacacagaagaaagtcccaggtagaatcctcagtttgtctgctacccaactcccaa

SEQ ID NO: 118338 - DNA, 377 bp, Homo sapiens
tcacgggcagggtgctggggatggaaccccacaaagccagccgagaaggggcagccggagggcaagaagcctgacgtgatgatgtgatgcaatgtcatgatgccacatggtgtggggtggtcagtggggccagccactccagagccctccaacaggagcatggctgaaagttgtctgctgggtttagtgacaaagagcttgttgttaacctcagcagaatggtggagatgaagtcagactgaagtggggagaagcggaggtgaggagaagaggtggcaagtggagggaagacattcaagaagcttgacagggaggtggggagaaatgggtagcagctagaggatgaagttttgtttgtctaagataggagagagttg

SEQ ID NO: 118339 - DNA, 286 bp, Homo sapiens
tcctccacctcggtcacagcggggtctgtcccctgcagcaggtggctcaagcctattcacccacccttcctcactttcctctcattccaacaacccccatttttctagatcttattagccagatccctgtggtcctagacctctgtttcttaacaaccagtacttcttcctgagctcctgatgtcttccttcatgccattttctcttggggtgtggcttgtggtaggctgcaggaacctggtgacactgttgcccctcgagtgtaaatgccgtctgttctgcatat

SEQ ID NO: 118340 - DNA, 353 bp, Homo sapiens
agcccctgtgctaagagggttggatgggtgggaggaaagaggcattactatctggtctcctcctctacagtgtcattggaacacttacttccaatctccttgccaaaagttcctaagtgcctgggctttctttgatgttttctctgttccatagcctgtgctctcgtggcaaggtgagtaggaaagcactgttatgtttctgaggaacaaagtgcttcttattcctgaccctcagagaacagagcattcgccactttgtcatcccactcacgggagcccaggagggcatgtactcaggggcctcccaccaaagtgctgggctgagaatcaaagacctccatgtggactcccca

SEQ ID NO: 118341 - DNA, 840 bp, Homo sapiens
tcatcatagctacaagaggtggacacaagcttctggccataaggcagtagacaaggctcagacatatcctcctgagcataaactatgaggaaactcgataaaaaagaggaaacgactgttttcagatgctggacgagaggcaggctcgtggctggcgcagctccagcactgagggcatggagggagctcacagaggctgaggcagctggaagcctcgggcagggctctggagaggagggaatgatacagggagctcccggagcctgcatcagggtctccctaagcctttgctgaataccccgctgcccagtcatagggcgaaaccgcatcaaaccaaagaacgactgggaagctgtaagcaaaacaactctccaagctcacagggcagagagccagtcacgctcccaacagccaaggcggagggccctggctgacccctcagccattcaggagacacccggggcagggtacgtcacttagcagatgggttaggctataaaccaaccctagagaaaggctgttctcggcccaccccaaagctgtaaaaacaaacccccaaaggatcaaggggctcttcaggcagcttcaatcgcctgccagggcaaagcccccaaggtgattatttttttgtaatagtcacaaatggaaacaaccccaatgctcagtagcaggtggacagaagaacaaagcgcactctgtcccaaccacgggacattcctagcaaaaaaaggagccgccgctgagacacacagtagcccagctcggtccgaggcaggaggctgagggagagaggcagacagagcgcagaccgcaggactgcacagcgcaagactctgagat

SEQ ID NO: 118342 - DNA, 526 bp, Homo sapiens
  misc_feature (487)..(487): n is a, c, g, or t
  misc_feature (505)..(505): n is a, c, g, or t
gagtctccgtcttccccccagcaagaagcgtttgttcctgcaattcggggggccgcctttgcgcgcggggtgcgctgcttcttggagagttccctcacgggtcacatcgcggaggttcgcgccggcgccgggtcgcggcctccctgcgcagcttctttggcacctggtaaccttcagtggctccgtccgctcggagttaggaggctgtgtcgagctaaccttgaccttgtcctgcagtttttgctgaccatccccaacagcacactgtaaagagttagggtcctctcgaagagttgggactgggcacttttgttggtagtgctaaatttcaacaccctgaggagtacgctgcccaaattattgtaggaaagaattacctggtttagtggttataatactttttgtccccaccacacttgaataacagaaaaaccctcccaacagggctgctgatgattctgtgagggacatgatgattatgataatntgctatagctgatggtgntggggtgatctggtatttttg

SEQ ID NO: 118343 - DNA, 601 bp, Homo sapiens
gagtctccgtcttccccccagcaagaagcgtttgttcctgcaattcggggggccgcctttgcgcgcggggtgcgctgcttcttggagagttccctcacgggtcacatcgcggaggttcgcgccggcgccgggtcgcggcctccctgcgcagcttctttggcacctggtaaccttcagtggctccgtccgctcggagttaggaggctgtgtcgagctaaccttgaccttgtcctgcagtttttgctgaccatccccaacagcacactgtaaagagttagggtcctctcgaagagttgggactgggcacttttgttggtagtgctaaatttcaacaccctgaggagtacgctgcccaaattattgtaggaaagaattacctggtttagtggttataatactttttgtccccaccacacttgaataacagaaaaaccctcccaacaggggctgactgcaaaagtgattttctgtgtaggggacattggatgtatttatgtatatatcagtgcctatcagtctgtatgtgtgtttgggggtggatgctgtgtaatttaaaaaaatctatggagattctgataatttgataacctgtttctccggt

SEQ ID NO: 118344 - DNA, 327 bp, Homo sapiens
ttagtagaaacggggtttcactgtgttggccaagctggtctcgaactcctgacctcaagtgatccacctgccttggccttccaaagtgctgggattacaggcatgagccaccacacccagcctatattgaaactctaaaactaaaaaacccctaaagttagactcatttaaaagtagatatgtttaagaacatactggacacagtaggagagagaactgatgaagacagattaccagaaaaattttaactaaagaacggagacaagaaaacatagaaaaatacagaaaaatgtctgaaaggcatgtgggtaacagcaaaatatatat

SEQ ID NO: 118345 - DNA, 655 bp, Homo sapiens
acttccaaagcctcttcaggtagatgactatgtggcaagacctgttggtagaaactaccaggcttctctgtgtgtgagtagaaagtagagggtaaagttggtatcccagtcttccggtcacctggtccaggaaccgctgaaacgttcttagcctcttcagttagatgactacctggcaacgactgttggtagaaaatactcggcttctctgtatgttgtgagtaagaagtagaggttacagttggtgtgccagttgtctggtcaactggttcagaggcaactgaaattttcagagcctcttcagttggatgactatgtggcaagacctgttggtagaaaacaccaggcttctctgtgtgtgagtagaaagtagagggtaaaattggtatcacagtcttctggtcagctggtccaggaaccgctgaaacattcttagcctcttcagttagatgactacttggcaacgactgttggtagaaaatgctgggcttctctctatattgtgagtaggaagtagaggttacagctggtgtgccagttgtctggtcaactggttcagaggcaactgaaattttcagagcctcttcagttggatgattatctggcaagacctgttggtagaaaataccaggcttctctgtgtgtgagtaagaag

SEQ ID NO: 118346 - DNA, 419 bp, Homo sapiens
agatattagctagggcttccattatctgaaggcttgactggggctggaggatccacttccaagatagctcactcacatggctgttggcaggagaaggccttgctttcttgccatgtggatctctctacaggacaccttgggtctcctcatgatactacagctggcttcactcagagcgaatgaccagagtgagagagagggagagcaagagagagtgagagagagctagagagagcacgagagagagaagatccaacacctttgatgacctaatcctggagcacacacactgatgcttctgctttattctgttcattagaagcaagttgccaagtctagtccatactagggggaggtgtattcaagtttaccttttgaaaggggggagtatcaaaaggatttatggataatatcttaaa

SEQ ID NO: 118347 - DNA, 394 bp, Homo sapiens
gggacattggcgacaccaccatccagctcagctggagccgtggcttcgacaaccacagccccatcgctaagtacaccctgcaagctcgcactccacctgcagggaagtggaagcaggttcggaccaatcctgcaaacatcgagggcaatgccgagactgcacaggtgctgggcctcaccccctggatggactatgagttccgggtcatagccagcaacattctgggcactggggagcctagtgggccctccagcaaaatccggaccagggaagcagccccctcggtggcaccctcaggactcagcggaggaggtggagcccccggagagctcatcgtcaactggacgcccatgtcacgggagtaccagaacggagacggcttcggctacctgct

SEQ ID NO: 118348 - DNA, 452 bp, Homo sapiens
gggacattggcgacaccaccatccagctcagctggagccgtggcttcgacaaccacagccccatcgctaagtacaccctgcaagctcgcactccacctgcagggaagtggaagcaggttcggaccaatcctgcaaacatcgagggcaatgccgagactgcacaggtgctgggcctcaccccctggatggactatgagttccgggtcatagccagcaacattctgggcactggggagcctagtgggccctccagcaaaatccggaccagggaagcaggtgagagtcctgtgtgtcccaaaaagctatcatcagggcagagaccctggcaccacttatagggaatgccaagccagccgcaattatgctgagttccaaccctgctcacagggttcagactctcacaaaacagaggaggacagaacaccaagttgggaccagggccactgcatgga

SEQ ID NO: 118349 - DNA, 559 bp, Homo sapiens
aaaccttacccaatctagaatgacaaaaaccttaattttccttaaaatctgtcatgcaaagtggaaactcttctttttcctctaatacttatccacttgacccagtatccatataaatgagtcatcttacccctttccactacttttatatatcaccatgtaatcattcttttatacatattgggggccactgaaggagtttttatacatatttttctaaagacaaacaaatctctttactgtatgtttttctgtaattctcaatcttttaaacacaccaacatttttcacctttttaatgcttaatttttctcctgattctttatattctagcaaaaattctcaaacttgtcctccatctcagtattactcatttaaaattgttgggttgattgtgattattattttgctgtttataatgcagattttaactttttgtaatggattttccaatgtctttattatctttacttatttaaatccttttatttctacttttcaggtataatctttattatttcagtctgctacttgttttattttgttgtccgtggttcct

SEQ ID NO: 118350 - DNA, 677 bp, Homo sapiens
gtggacaatcaagatagccaaattgatttcttcaaatggaaagtactaacaaaaatatgttgctattttatagtaataacacatattttccatgggaatagtttgattgggtagaattgacacatgcatataaatgcaaggaattaactatgattatattattagcagttattgtggcaataatttcagaaaatggttatatccatctgtctgagaaaacagactttaacacaaaatgaagtcatattcattacacgaaaaaagtgattagaacctagtagtaaagccagctaaatgcgtttctactaagctccaagtttaagttttaatgcatttttaaatgtttctggtctcaaaacattgaacagctgacaatttccctcaagagaacaataccttgaggggaaaagcaattagaatatggattgaccagcaatcagtaatcattacttggtacattaaatgtagtacgctggcacctggttaagtaatttagaaactggttaagtatctggaaaacaggtttctcaagttaaatgtgaaagctcacagaaataaaatggactttctcacagttacaacgtatcaagaagaaaactgcagaataaggttttagaaagttaaaattgggtgaacatattaaagggaattggaatcaaagggattgaagtagaaaa

SEQ ID NO: 118351 - DNA, 834 bp, Homo sapiens
agcggctcgtgcgccgaataatagaccttagtttaggtattggggccaaaggatggatgaccatttcaaacgatccaggctaagccaggaggagagctcaaagtctgatctggtacgttgcaaggatcgagggacagagcgtgcagcaagtggccaatgaatagaagtctggttttctgagcatccttgcagctgcaggcttcagtctaccagagaatgtgaggtgttattcttctagggcagtggttagaaaagaaaatgaaagtagcagtactcttttcctaatgcgaccatagatgatcagaatttgtaatccataaggtagaagctgctgtgcctgaagaaatagaaagtgggcagaggtggaggggcaagagcaggaggtgaccaatcttggaaataaggaagggagagaggcagccaagccagcagctcctaggattagtcactgcctggagccagctcttggaagttccccaggagctgtccagtcttatgtcatgtctagtcagcagagtcccaaagaagcttgtcattctctaggcatttgtgcttacattctgatgggcctaatagcagggagatgacatggagcccaggcagaactgctgagatttctactggtcatgacctccatcttctccttcacacctttcctacctttctttttccatgcattcaacagacatttattacccaataagtgccaggtagtaagcgaggacctggggagagcagatgagtaagaaaccgtctctgtctctcaggagctctcagatttttagggacacattgtgcatcctaataaacacagtgcatcccatgaatgtgtaa

SEQ ID NO: 118352 - DNA, 295 bp, Homo sapiens
tgtcacccaggctggagtgcaatggcatgatctcggctcactgcaacctcagcctcccggattgaagtgattcttgtgcctcagcctcccaagttgctgggattacaggtgttgagccactgcacctgccgtatcttaaatttttaactttttattttaaaataatttgacttttgaaaaacagtacaaacaatagtcatataaccttcacccacattttctaagtgttactatttgtcatatgtgctttgtcattcattcattcactcattctctctctgaaatgtatgagagt

SEQ ID NO: 118353 - DNA, 1308 bp, Homo sapiens
  misc_feature (22)..(22): n is a, c, g, or t
gcgcgggcgagtgtagggctgncgctgccggacgcggtgctagtcgccggatgaagtgaggccctctcaccccgctgcctctaggttctgggaagatggcgaaggtctcagagctttacgatgtcacttgggaagaaatgagagataaaatgagaaaatggagagaagaaaactcaagaaatagtgagcaaattgtggaagttggagaagaattaattaatgaatatgcttctaagctgggagatgatatttggatcatatatgaacaggtgatgattgcagcactagactatggtcgggatgacttggcattgttttgtcttcaagagctgagaagacagttccctggcagtcacagagtcaagcgattaacaggcatgagatttgaagccatggaaagatatgatgatgctatacagctatatgataggattttacaagaagatccaactaacactgctgcaagaaagcgtaagattgccattcgaaaagcccaggggaaaaatgtggaggccattcgggagctgaatgagtatctggaacaatttgttggagaccaagaagcctggcatgaacttgcagaactttacatcaatgaacatgactatgcaaaagcagccttttgtttagaggaactaatgatgactaatccacacaaccacttatactgtcagcagtatgctgaagttaagtatacccaaggtggacttgaaaacctcgaactttcaagaaagtattttgcacaggcattgaaactgaacaacagaaatatgagagctttgtttggactttatatgtcggcaagtcatattgcttctaatccaaaagcaagtgcaaaaacgaaaaaggacaacatgaaatatgctagttgggcagctagtcaaataaacagagcttatcagtttgcaggtcgaagtaagaaggaaaccaaatattctcttaaggctgtcgaagacatgttggaaacattgcagatcacccagtcttaaggtttcaaaaactctttgacattagatttcacaactgcacaattgaacttattggcctgtaacttatttactaaatgctcagtgctatttatatactacagtaattttctgttaagaaggcagttgtaaagaatgtgtttatataaacctaaaaatgccttttactgctaagtggggagatgggggaaatccatggaagagagatttaagacttattgattgtacatcagtctcttcatatcacatatacatgtatatatataaaactctaatgtagtataaccttgttaaataaaccatgatgatttattaaacttgc

SEQ ID NO: 118354 - DNA, 2214 bp, Homo sapiens
  misc_feature (22)..(22): n is a, c, g, or t
gcgcgggcgagtgtagggctgncgctgccggacgcggtgctagtcgccggatgaagtgaggccctctcaccccgctgcctctaggttctgggaagatggcgaaggtctcagagctttacgatgtcacttgggaagaaatgagagataaaatgagaaaatggagagaagaaaactcaagaaatagtgagcaaattgtggaagttggagaagaattaattaatgaatatgcttctaagctgggagatgatatttggatcatatatgaacaggtgatgattgcagcactagactatggtcgggatgacttggcattgttttgtcttcaagagctgagaagacagttccctggcagtcacagagtcaagcgattaacaggcatgagatttgaagccatggaaagatatgatgatgctatacagctatatgataggattttacaagaagatccaactaacactgctgcaagaaagcgtaagattgccattcgaaaagcccaggggaaaaatgtggaggccattcgggagctgaatgagtatctggaacaatttgttggagaccaagaagcctggcatgaacttgcagaactttacatcaatgaacatgactatgcaaaagcagccttttgtttagaggaactaatgatgactaatccacacaaccacttatactgtcagcagtatgctgaagttaagtatacccaaggtggacttgaaaacctcgaactttcaagaaagtattttgcacaggcattgaaactgaacaacagaaatatgagagctttgtttggactttatatgtcggcaagtcatattgcttctaatccaaaagcaagtgcaaaaacgaaaaaggacaacatgaaatatgctagttgggcagctagtcaaataaacagagcttatcagtttgcaggtcgaagtaagaaggaaaccaaatattctcttaaggctgtcgaagacatgttggaaacattgcagatcacccagtcttaaggtttcaaaaactctttgacattagatttcacaactgcacaattgaacttattggcctgtaacttatttactaaatgctcagtgctatttatatactacagtaattttctgttaagaaggcagttgtaaagaatgtgtttatataaacctaaaaatgccttttactgctaagtggggagatgggggaaatccatggaagagagatttaagacttattgattgtacatcagtctcttcatatcacatatacatgtatatatataaaactctaatgtagtataaccttgttaaataaaccatgatgatttattaaacttgcatatgaagattctaacttcattttgttatactcacagtggatatattgtttaagaactcagtttctagttaactccttactggtgatagcaaagtcacagcatatgtagctgaccgaagcagattattttgactttgtttatattgtcgaattggattttgctgtacattccagtgggctatttgaattgttttatctgctgtaatatccttctgatgaatcttgcttaaaatatgtcattctccacaaggttcagcaatatttctttgtaaaatttttgttttgatataggacataattgagatttttacatataaaatgccttaagataaatatgtgttacgacactttaacttttatgcaagttatatttattgaatcctttaatagtaaattacatgaaagaatattaaagaatcataaagagtagggattaaaggggttgtagttatttttaattttgaaaaaaataagaaaattaaaactatccttagaaacaaaaatgttaaaattttcctattctatcattaccttagttagaattttttatttttctcttttcataataaacaaccattatgctaccttcaacagtatttgacatgtttcaacaaaatagaagagacttgaaagttaaatttcatttagacacaaatcagtttttaaaatagcaactgttcaccgcaaatatttatggtatttgtttataataaatatatttaaatttatttttactaaaaatatacagaggcatctacagacttgtcattgctgctttggacaagtggggattgtggaggaattgacaatctagaagtgtttagaaagaaaagtattgtcaatatcagcttcttttaaccttttgaatagttctgctaataaattattctccatatctagtctaat

SEQ ID NO: 118355 - DNA, 2109 bp, Homo sapiens
  misc_feature (22)..(22): n is a, c, g, or t
gcgcgggcgagtgtagggctgncgctgccggacgcggtgctagtcgccggatgaagtgaggccctctcaccccgctgcctctaggttctgggaagatggcgaaggtctcagagctttacgatgtcacttgggaagaaatgagagataaaatgagaaaatggagagaagaaaactcaagaaatagtgagcaaattgtggaagttggagaagaattaattaatgaatatgcttctaagctgggagatgatatttggatcatatatgaacaggtgatgattgcagcactagactatggtcgggatgacttggcattgttttgtcttcaagagctgagaagacagttccctggcagtcacagagtcaagcgattaacaggcatgagatttgaagccatggaaagatatgatgatgctatacagctatatgataggattttacaagaagatccaactaacactgctgcaagaaagcgtaagattgccattcgaaaagcccaggggaaaaatgtggaggccattcgggagctgaatgagtatctggaacaatttgttggagaccaagaagcctggcatgaacttgcagaactttacatcaatgaacatgactatgcaaaagcagccttttgtttagaggaactaatgatgactaatccacacaaccacttatactgtcagcagtatgctgaagttaagtatacccaaggtggacttgaaaacctcgaactttcaagaaagtattttgcacaggcattgaaactgaacaacagaaatatgagagctttgtttggactttatatgtttgcaggtcgaagtaagaaggaaaccaaatattctcttaaggctgtcgaagacatgttggaaacattgcagatcacccagtcttaaggtttcaaaaactctttgacattagatttcacaactgcacaattgaacttattggcctgtaacttatttactaaatgctcagtgctatttatatactacagtaattttctgttaagaaggcagttgtaaagaatgtgtttatataaacctaaaaatgccttttactgctaagtggggagatgggggaaatccatggaagagagatttaagacttattgattgtacatcagtctcttcatatcacatatacatgtatatatataaaactctaatgtagtataaccttgttaaataaaccatgatgatttattaaacttgcatatgaagattctaacttcattttgttatactcacagtggatatattgtttaagaactcagtttctagttaactccttactggtgatagcaaagtcacagcatatgtagctgaccgaagcagattattttgactttgtttatattgtcgaattggattttgctgtacattccagtgggctatttgaattgttttatctgctgtaatatccttctgatgaatcttgcttaaaatatgtcattctccacaaggttcagcaatatttctttgtaaaatttttgttttgatataggacataattgagatttttacatataaaatgccttaagataaatatgtgttacgacactttaacttttatgcaagttatatttattgaatcctttaatagtaaattacatgaaagaatattaaagaatcataaagagtagggattaaaggggttgtagttatttttaattttgaaaaaaataagaaaattaaaactatccttagaaacaaaaatgttaaaattttcctattctatcattaccttagttagaattttttatttttctcttttcataataaacaaccattatgctaccttcaacagtatttgacatgtttcaacaaaatagaagagacttgaaagttaaatttcatttagacacaaatcagtttttaaaatagcaactgttcaccgcaaatatttatggtatttgtttataataaatatatttaaatttatttttactaaaaatatacagaggcatctacagacttgtcattgctgctttggacaagtggggattgtggaggaattgacaatctagaagtgtttagaaagaaaagtattgtcaatatcagcttcttttaaccttttgaatagttctgctaataaattattctccatatctagtctaat

SEQ ID NO: 118356 - DNA, 1203 bp, Homo sapiens
  misc_feature (22)..(22): n is a, c, g, or t
gcgcgggcgagtgtagggctgncgctgccggacgcggtgctagtcgccggatgaagtgaggccctctcaccccgctgcctctaggttctgggaagatggcgaaggtctcagagctttacgatgtcacttgggaagaaatgagagataaaatgagaaaatggagagaagaaaactcaagaaatagtgagcaaattgtggaagttggagaagaattaattaatgaatatgcttctaagctgggagatgatatttggatcatatatgaacaggtgatgattgcagcactagactatggtcgggatgacttggcattgttttgtcttcaagagctgagaagacagttccctggcagtcacagagtcaagcgattaacaggcatgagatttgaagccatggaaagatatgatgatgctatacagctatatgataggattttacaagaagatccaactaacactgctgcaagaaagcgtaagattgccattcgaaaagcccaggggaaaaatgtggaggccattcgggagctgaatgagtatctggaacaatttgttggagaccaagaagcctggcatgaacttgcagaactttacatcaatgaacatgactatgcaaaagcagccttttgtttagaggaactaatgatgactaatccacacaaccacttatactgtcagcagtatgctgaagttaagtatacccaaggtggacttgaaaacctcgaactttcaagaaagtattttgcacaggcattgaaactgaacaacagaaatatgagagctttgtttggactttatatgtttgcaggtcgaagtaagaaggaaaccaaatattctcttaaggctgtcgaagacatgttggaaacattgcagatcacccagtcttaaggtttcaaaaactctttgacattagatttcacaactgcacaattgaacttattggcctgtaacttatttactaaatgctcagtgctatttatatactacagtaattttctgttaagaaggcagttgtaaagaatgtgtttatataaacctaaaaatgccttttactgctaagtggggagatgggggaaatccatggaagagagatttaagacttattgattgtacatcagtctcttcatatcacatatacatgtatatatataaaactctaatgtagtataaccttgttaaataaaccatgatgatttattaaacttgc

SEQ ID NO: 118357 - DNA, 2358 bp, Homo sapiens
ctgataaccaaagcccatcaaaggcattcatcatttcttttgcattgtttttgatttccagtattttcttttgattcttttttagagtttccatctctgtttacattacccatctgtttttgcatcctgtttactttttccattagagttgtgaaaatacatgtcattgtttaaattcctagtctgtttatgccagtacttctaccatatctacatctggtcctgatgcttgttctgtcttcaacttgtgtggctagtttttacttttgtactttggacaaattgaatcagtatttttttaagggaaattttctataagtactatatacatgatttgctttacttaacaaaataagaatgtagtaaacgtttactgttatatgaagatggaagacttcggtaacgattataaatggcatttaaagcaattataaatgcatttaaattaaaatattaaagccagtttaatttttttctgtatttactatttatcactatatttttaaggtaataattgtagatgtttctttttctttttaaatagatatgatgatgctatacagctatatgataggattttacaagaagatccaactaacactgctgcaagaaagcgtaagattgccattcgaaaagcccaggggaaaaatgtggaggccattcgggagctgaatgagtatctggaacaatttgttggagaccaagaagcctggcatgaacttgcagaactttacatcaatgaacatgactatgcaaaagcagccttttgtttagaggaactaatgatgactaatccacacaaccacttatactgtcagcagtatgctgaagttaagtatacccaaggtggacttgaaaacctcgaactttcaagaaagtattttgcacaggcattgaaactgaacaacagaaatatgagagctttgtttggactttatatgtcggcaagtcatattgcttctaatccaaaagcaagtgcaaaaacgaaaaaggacaacatgaaatatgctagttgggcagctagtcaaataaacagagcttatcagtttgcaggtcgaagtaagaaggaaaccaaatattctcttaaggctgtcgaagacatgttggaaacattgcagatcacccagtcttaaggtttcaaaaactctttgacattagatttcacaactgcacaattgaacttattggcctgtaacttatttactaaatgctcagtgctatttatatactacagtaattttctgttaagaaggcagttgtaaagaatgtgtttatataaacctaaaaatgccttttactgctaagtggggagatgggggaaatccatggaagagagatttaagacttattgattgtacatcagtctcttcatatcacatatacatgtatatatataaaactctaatgtagtataaccttgttaaataaaccatgatgatttattaaacttgcatatgaagattctaacttcattttgttatactcacagtggatatattgtttaagaactcagtttctagttaactccttactggtgatagcaaagtcacagcatatgtagctgaccgaagcagattattttgactttgtttatattgtcgaattggattttgctgtacattccagtgggctatttgaattgttttatctgctgtaatatccttctgatgaatcttgcttaaaatatgtcattctccacaaggttcagcaatatttctttgtaaaatttttgttttgatataggacataattgagatttttacatataaaatgccttaagataaatatgtgttacgacactttaacttttatgcaagttatatttattgaatcctttaatagtaaattacatgaaagaatattaaagaatcataaagagtagggattaaaggggttgtagttatttttaattttgaaaaaaataagaaaattaaaactatccttagaaacaaaaatgttaaaattttcctattctatcattaccttagttagaattttttatttttctcttttcataataaacaaccattatgctaccttcaacagtatttgacatgtttcaacaaaatagaagagacttgaaagttaaatttcatttagacacaaatcagtttttaaaatagcaactgttcaccgcaaatatttatggtatttgtttataataaatatatttaaatttatttttactaaaaatatacagaggcatctacagacttgtcattgctgctttggacaagtggggattgtggaggaattgacaatctagaagtgtttagaaagaaaagtattgtcaatatcagcttcttttaaccttttgaatagttctgctaataaattattctccatatctagtctaat

SEQ ID NO: 118358 - DNA, 1843 bp, Homo sapiens
tgtagcaggggccagactgtgacgtgggaattaagcccagctctgcaggttgcattttcatctttttcatcttctcacgccttgagggctgcaagaaagcgtaagattgccattcgaaaagcccaggggaaaaatgtggaggccattcgggagctgaatgagtatctggaacaatttgttggagaccaagaagcctggcatgaacttgcagaactttacatcaatgaacatgactatgcaaaagcagccttttgtttagaggaactaatgatgactaatccacacaaccacttatactgtcagcagtatgctgaagttaagtatacccaaggtggacttgaaaacctcgaactttcaagaaagtattttgcacaggcattgaaactgaacaacagaaatatgagagctttgtttggactttatatgtcggcaagtcatattgcttctaatccaaaagcaagtgcaaaaacgaaaaaggacaacatgaaatatgctagttgggcagctagtcaaataaacagagcttatcagtttgcaggtcgaagtaagaaggaaaccaaatattctcttaaggctgtcgaagacatgttggaaacattgcagatcacccagtcttaaggtttcaaaaactctttgacattagatttcacaactgcacaattgaacttattggcctgtaacttatttactaaatgctcagtgctatttatatactacagtaattttctgttaagaaggcagttgtaaagaatgtgtttatataaacctaaaaatgccttttactgctaagtggggagatgggggaaatccatggaagagagatttaagacttattgattgtacatcagtctcttcatatcacatatacatgtatatatataaaactctaatgtagtataaccttgttaaataaaccatgatgatttattaaacttgcatatgaagattctaacttcattttgttatactcacagtggatatattgtttaagaactcagtttctagttaactccttactggtgatagcaaagtcacagcatatgtagctgaccgaagcagattattttgactttgtttatattgtcgaattggattttgctgtacattccagtgggctatttgaattgttttatctgctgtaatatccttctgatgaatcttgcttaaaatatgtcattctccacaaggttcagcaatatttctttgtaaaatttttgttttgatataggacataattgagatttttacatataaaatgccttaagataaatatgtgttacgacactttaacttttatgcaagttatatttattgaatcctttaatagtaaattacatgaaagaatattaaagaatcataaagagtagggattaaaggggttgtagttatttttaattttgaaaaaaataagaaaattaaaactatccttagaaacaaaaatgttaaaattttcctattctatcattaccttagttagaattttttatttttctcttttcataataaacaaccattatgctaccttcaacagtatttgacatgtttcaacaaaatagaagagacttgaaagttaaatttcatttagacacaaatcagtttttaaaatagcaactgttcaccgcaaatatttatggtatttgtttataataaatatatttaaatttatttttactaaaaatatacagaggcatctacagacttgtcattgctgctttggacaagtggggattgtggaggaattgacaatctagaagtgtttagaaagaaaagtattgtcaatatcagcttcttttaaccttttgaatagttctgctaataaattattctccatatctagtctaat

SEQ ID NO: 118359 - DNA, 1916 bp, Homo sapiens
  misc_feature (22)..(22): n is a, c, g, or t
gcgcgggcgagtgtagggctgncgctgccggacgcggtgctagtcgccggatgaagtgaggccctctcaccccgctgcctctaggttctgggaagatggcgaaggtctcagagctttacgatgtcacttgggaagaaatgagagataaaatgagaaaatggagagaagaaaactcaagaaatagtgagcaaattgtggaagttggagaagaattaattaatgaatatgcttctaagctgggagatgatatttggatcatatatgaacaggtgatgattgcagcactagactatggtcgggatgacttggcattgttttgtcttcaagagctgagaagacagttccctggcagtcacagagtcaagcgattaacaggcatgagatttgaagccatggaaagatatgatgatgctatacagctatatgataggattttacaagaagatccaactaacactgctgcaagaaagcgtaagattgccattcgaaaagcccaggggaaaaatgtggaggccattcgggagctgaatgagtatctggaacaatttgttggagaccaagaagcctggcatgaacttgcagaactttacatcaatgaacatgatttgcaggtcgaagtaagaaggaaaccaaatattctcttaaggctgtcgaagacatgttggaaacattgcagatcacccagtcttaaggtttcaaaaactctttgacattagatttcacaactgcacaattgaacttattggcctgtaacttatttactaaatgctcagtgctatttatatactacagtaattttctgttaagaaggcagttgtaaagaatgtgtttatataaacctaaaaatgccttttactgctaagtggggagatgggggaaatccatggaagagagatttaagacttattgattgtacatcagtctcttcatatcacatatacatgtatatatataaaactctaatgtagtataaccttgttaaataaaccatgatgatttattaaacttgcatatgaagattctaacttcattttgttatactcacagtggatatattgtttaagaactcagtttctagttaactccttactggtgatagcaaagtcacagcatatgtagctgaccgaagcagattattttgactttgtttatattgtcgaattggattttgctgtacattccagtgggctatttgaattgttttatctgctgtaatatccttctgatgaatcttgcttaaaatatgtcattctccacaaggttcagcaatatttctttgtaaaatttttgttttgatataggacataattgagatttttacatataaaatgccttaagataaatatgtgttacgacactttaacttttatgcaagttatatttattgaatcctttaatagtaaattacatgaaagaatattaaagaatcataaagagtagggattaaaggggttgtagttatttttaattttgaaaaaaataagaaaattaaaactatccttagaaacaaaaatgttaaaattttcctattctatcattaccttagttagaattttttatttttctcttttcataataaacaaccattatgctaccttcaacagtatttgacatgtttcaacaaaatagaagagacttgaaagttaaatttcatttagacacaaatcagtttttaaaatagcaactgttcaccgcaaatatttatggtatttgtttataataaatatatttaaatttatttttactaaaaatatacagaggcatctacagacttgtcattgctgctttggacaagtggggattgtggaggaattgacaatctagaagtgtttagaaagaaaagtattgtcaatatcagcttcttttaaccttttgaatagttctgctaataaattattctccatatctagtctaat

SEQ ID NO: 118360 - DNA, 642 bp, Homo sapiens
  misc_feature (22)..(22): n is a, c, g, or t
gcgcgggcgagtgtagggctgncgctgccggacgcggtgctagtcgccggatgaagtgaggccctctcaccccgctgcctctaggttctgggaagatggcgaaggtctcagagctttacgatgtcacttgggaagaaatgagagataaaatgagaaaatggagagaagaaaactcaagaaatagtgagcaaattgtggaagttggagaagaattaattaatgaatatgcttctaagctgggagatgatatttggatcatatatgaacaggtgatgattgcagcactagactatggtcgggatgacttggcattgttttgtcttcaagagctgagaagacagttccctggcagtcacagagtcaagcgattaacaggcatgagatttgaagccatggaaagatatgatgatgctatacagctatatgataggattttacaagaagatccaactaacactggtgaaaccccatctctactaaaaagcaaaaattagctgggcgtggtggcatgtgcctgtaatcccacctactcaggaggctgaggcaggagaatcccttgaacctgggtggcagaggttgcagtgagctgagattacgccactacactccagcctgggcgacagagcaagacttcgtgtcaaa

SEQ ID NO: 118361 - DNA, 480 bp, Homo sapiens
  misc_feature (22)..(22): n is a, c, g, or t
gcgcgggcgagtgtagggctgncgctgccggacgcggtgctagtcgccggatgaagtgaggccctctcaccccgctgcctctaggttctgggaagatggcgaaggtctcagagctttacgatgtcacttgggaagaaatgagagataaaatgagaaaatggagagaagaaaactcaagaaatagtgagcaaattgtggaagttggagaagaattaattaatgaatatgcttctaagctgggagatgatatttggatcatatatgaacaggtgatgattgcagcactagactatggtcgggatgacttggcattgttttgtcttcaagagctgagaagacagttccctggcagtcacagagtcaagcgattaacaggcatgagatttgaagccatggaaagatatgatgatgctatacagctatatgataggattttacaagaagatccaactaacactgactccaggcctgtgatgggag

SEQ ID NO: 118362 - DNA, 331 bp, Homo sapiens
ttaatcgaggaaataatagatacataaggaactaggtcttatatttttaatttttaattaaaaaatatttttatttttaattttaaatagttcatgatgggccacagtttattttaaatagatttaagactctccaataaaatttgacttctcaccctcaccaacagggtgaaaccccatctctactaaaaagcaaaaattagctgggcgtggtggcatgtgcctgtaatcccacctactcaggaggctgaggcaggagaatcccttgaacctgggtggcagaggttgcagtgagctgagattacgccactacactccagcctgggcgaca

SEQ ID NO: 118363 - DNA, 438 bp, Homo sapiens
ctgataaccaaagcccatcaaaggcattcatcatttcttttgcattgtttttgatttccagtattttcttttgattcttttttagagtttccatctctgtttacattacccatctgtttttgcatcctgtttactttttccattagagttgtgaaaatacatgtcattgtttaaattcctagtctgtttatgccagtacttctaccatatctacatctggtcctgatgcttgttctgtcttcaacttgtgtggctagtttttacttttgtactttggacaaattgaatcagtatttttttaagggaaattttctataagtactatatacatgatttgctttacttaacaaaataagaatgtagtaaacgtttactgttatatgaagatggaagacttcggtaacgattataaatggcatttaaagcaattataaatgc

SEQ ID NO: 118364 - DNA, 1267 bp, Homo sapiens
cacgtgactgcgtctccccgccctctcaccccgctgcctctaggttctgggaagatggcgaaggtctcagagctttacgatgtcacttgggaagaaatgagagataaaatgagaaaatggagagaagaaaactcaagaaatagtgagcaaattgtggaagttggagaagaattaattaatgaatatgcttctaagctgggagatgatatttggatcatatatgaacaggtgatgattgcagcactagactatggtcgggatgacttggcattgttttgtcttcaagagctgagaagacagttccctggcagtcacagagtcaagcgattaacaggcatgagatttgaagccatggaaagatatgatgatgctatacagctatatgataggattttacaagaagatccaactaacactgctgcaagaaagcgtaagattgccattcgaaaagcccaggggaaaaatgtggaggccattcgggagctgaatgagtatctggaacaatttgttggagaccaagaagcctggcatgaacttgcagaactttacatcaatgaacatgactatgcaaaagcagccttttgtttagaggaactaatgatgactaatccacacaaccacttatactgtcagcagtatgctgaagttaagtatacccaaggtggacttgaaaacctcgaactttcaagaaagtattttgcacaggcattgaaactgaacaacagaaatatgagagctttgtttggactttatatgtcggcaagtcatattgcttctaatccaaaagcaagtgcaaaaacgaaaaaggacaacatgaaatatgctagttgggcagctagtcaaataaacagagcttatcagtttgcaggtcgaagtaagaaggaaaccaaatattctcttaaggctgtcgaagacatgttggaaacattgcagatcacccagtcttaaggtttcaaaaactctttgacattagatttcacaactgcacaattgaacttattggcctgtaacttatttactaaatgctcagtgctatttatatactacagtaattttctgttaagaaggcagttgtaaagaatgtgtttatataaacctaaaaatgccttttactgctaagtggggagatgggggaaatccatggaagagagatttaagacttattgattgtacatcagtctcttcatatcacatatacatgtatatatataaaactctaatgtagtataaccttgttaaataaaccatgatgatttattaaacttgc

SEQ ID NO: 118365 - DNA, 1178 bp, Homo sapiens
  misc_feature (22)..(22): n is a, c, g, or t
gcgcgggcgagtgtagggctgncgctgccggacgcggtgctagtcgccggatgaagtgaggccctctcaccccgctgcctctaggttctgggaagatggcgaaggtctcagagctttacgatgtcacttgggaagaaatgagagataaaatgagaaaatggagagaagaaaactcaagaaatagtgagcaaattgtggaagttggagaagaattaattaatgaatatgcttctaagctgggagatgatatttggatcatatatgaacaggtgatgattgcagcactagactatggtcgggatgacttggcattgttttgtcttcaagagctgagaagacagttccctggcagtcacagagtcaagcgattaacaggcatgagatttgaagccatggaaagatatgatgatgctatacagctatatgataggattttacaagaagatccaactaacactgctgcaagaaagcgtaagattgccattcgaaaagcccaggggaaaaatgtggaggccattcgggagctgaatgagtatctggaacaatttgttggagaccaagaagcctggcatgaacttgcagaactttacatcaatgaacatgactatgcaaaagcagccttttgtttagaggaactaatgatgactaatccacacaaccacttatactgtcagcagtatgctgaagttaagtatacccaaggtggacttgaaaacctcgaactttcaagaaagtattttgcacaggcattgaaactgaacaacagaaatatgagagctttgtttggactttatatgtcggcaagtcatattgcttctaatccaaaagcaagtgcaaaaacgaaaaaggacaacatgaaatatgctagttgggcagctagtcaaataaacagagcttatcagccagcaaccagataagaaaatgctttaagttccactctggggaaagctggcctctgaaatcttaatgcaggaatgggatgcaggcatggaagaccttacacggttaaaagagaccatagataataatcctgggggagttctccactttcagtctctttccagcgagaaacattgggtcattcactgggcctggtggggttcttcaatcaacccaaaggttgggaaaaattattggactcttccttataagccaaattctaggcctcacaatgtggc

SEQ ID NO: 118366 - DNA, 2162 bp, Homo sapiens
  misc_feature (22)..(22): n is a, c, g, or t
gcgcgggcgagtgtagggctgncgctgccggacgcggtgctagtcgccggatgaagtgaggccctctcaccccgctgcctctaggttctgggaagatggcgaaggtctcagagctttacgatgtcacttgggaagaaatgagagataaaatgagaaaatggagagaagaaaactcaagaaatagtgagcaaattgtggaagttggagaagaattaattaatgaatatgcttctaagctgggagatgatatttggatcatatatgaacaggtgatgattgcagcactagactatggtcgggatgacttggcattgttttgtcttcaagagctgagaagacagttccctggcagtcacagagtcaagcgattaacaggcatgagatttgaagccatggaaagatatgatgatgctatacagctatatgataggattttacaagaagatccaactaacactgctgcaagaaagcgtaagattgccattcgaaaagcccaggggaaaaatgtggaggccattcgggagctgaatgagtatctggaacaatttgttggagaccaagaagcctggcatgaacttgcagaactttacatcaatgaacatgactatgcattaaacacacaacattttgttgagttaagtatacccaaggtggacttgaaaacctcgaactttcaagaaagtattttgcacaggcattgaaactgaacaacagaaatatgagagctttgtttggactttatatgtcggcaagtcatattgcttctaatccaaaagcaagtgcaaaaacgaaaaaggacaacatgaaatatgctagttgggcagctagtcaaataaacagagcttatcagtttgcaggtcgaagtaagaaggaaaccaaatattctcttaaggctgtcgaagacatgttggaaacattgcagatcacccagtcttaaggtttcaaaaactctttgacattagatttcacaactgcacaattgaacttattggcctgtaacttatttactaaatgctcagtgctatttatatactacagtaattttctgttaagaaggcagttgtaaagaatgtgtttatataaacctaaaaatgccttttactgctaagtggggagatgggggaaatccatggaagagagatttaagacttattgattgtacatcagtctcttcatatcacatatacatgtatatatataaaactctaatgtagtataaccttgttaaataaaccatgatgatttattaaacttgcatatgaagattctaacttcattttgttatactcacagtggatatattgtttaagaactcagtttctagttaactccttactggtgatagcaaagtcacagcatatgtagctgaccgaagcagattattttgactttgtttatattgtcgaattggattttgctgtacattccagtgggctatttgaattgttttatctgctgtaatatccttctgatgaatcttgcttaaaatatgtcattctccacaaggttcagcaatatttctttgtaaaatttttgttttgatataggacataattgagatttttacatataaaatgccttaagataaatatgtgttacgacactttaacttttatgcaagttatatttattgaatcctttaatagtaaattacatgaaagaatattaaagaatcataaagagtagggattaaaggggttgtagttatttttaattttgaaaaaaataagaaaattaaaactatccttagaaacaaaaatgttaaaattttcctattctatcattaccttagttagaattttttatttttctcttttcataataaacaaccattatgctaccttcaacagtatttgacatgtttcaacaaaatagaagagacttgaaagttaaatttcatttagacacaaatcagtttttaaaatagcaactgttcaccgcaaatatttatggtatttgtttataataaatatatttaaatttatttttactaaaaatatacagaggcatctacagacttgtcattgctgctttggacaagtggggattgtggaggaattgacaatctagaagtgtttagaaagaaaagtattgtcaatatcagcttcttttaaccttttgaatagttctgctaataaattattctccatatctagtctaat

SEQ ID NO: 118367 - DNA, 2057 bp, Homo sapiens
  misc_feature (22)..(22): n is a, c, g, or t
gcgcgggcgagtgtagggctgncgctgccggacgcggtgctagtcgccggatgaagtgaggccctctcaccccgctgcctctaggttctgggaagatggcgaaggtctcagagctttacgatgtcacttgggaagaaatgagagataaaatgagaaaatggagagaagaaaactcaagaaatagtgagcaaattgtggaagttggagaagaattaattaatgaatatgcttctaagctgggagatgatatttggatcatatatgaacaggtgatgattgcagcactagactatggtcgggatgacttggcattgttttgtcttcaagagctgagaagacagttccctggcagtcacagagtcaagcgattaacaggcatgagatttgaagccatggaaagatatgatgatgctatacagctatatgataggattttacaagaagatccaactaacactgctgcaagaaagcgtaagattgccattcgaaaagcccaggggaaaaatgtggaggccattcgggagctgaatgagtatctggaacaatttgttggagaccaagaagcctggcatgaacttgcagaactttacatcaatgaacatgactatgcattaaacacacaacattttgttgagttaagtatacccaaggtggacttgaaaacctcgaactttcaagaaagtattttgcacaggcattgaaactgaacaacagaaatatgagagctttgtttggactttatatgtttgcaggtcgaagtaagaaggaaaccaaatattctcttaaggctgtcgaagacatgttggaaacattgcagatcacccagtcttaaggtttcaaaaactctttgacattagatttcacaactgcacaattgaacttattggcctgtaacttatttactaaatgctcagtgctatttatatactacagtaattttctgttaagaaggcagttgtaaagaatgtgtttatataaacctaaaaatgccttttactgctaagtggggagatgggggaaatccatggaagagagatttaagacttattgattgtacatcagtctcttcatatcacatatacatgtatatatataaaactctaatgtagtataaccttgttaaataaaccatgatgatttattaaacttgcatatgaagattctaacttcattttgttatactcacagtggatatattgtttaagaactcagtttctagttaactccttactggtgatagcaaagtcacagcatatgtagctgaccgaagcagattattttgactttgtttatattgtcgaattggattttgctgtacattccagtgggctatttgaattgttttatctgctgtaatatccttctgatgaatcttgcttaaaatatgtcattctccacaaggttcagcaatatttctttgtaaaatttttgttttgatataggacataattgagatttttacatataaaatgccttaagataaatatgtgttacgacactttaacttttatgcaagttatatttattgaatcctttaatagtaaattacatgaaagaatattaaagaatcataaagagtagggattaaaggggttgtagttatttttaattttgaaaaaaataagaaaattaaaactatccttagaaacaaaaatgttaaaattttcctattctatcattaccttagttagaattttttatttttctcttttcataataaacaaccattatgctaccttcaacagtatttgacatgtttcaacaaaatagaagagacttgaaagttaaatttcatttagacacaaatcagtttttaaaatagcaactgttcaccgcaaatatttatggtatttgtttataataaatatatttaaatttatttttactaaaaatatacagaggcatctacagacttgtcattgctgctttggacaagtggggattgtggaggaattgacaatctagaagtgtttagaaagaaaagtattgtcaatatcagcttcttttaaccttttgaatagttctgctaataaattattctccatatctagtctaat

SEQ ID NO: 118368 - DNA, 828 bp, Homo sapiens
  misc_feature (22)..(22): n is a, c, g, or t
gcgcgggcgagtgtagggctgncgctgccggacgcggtgctagtcgccggatgaagtgaggccctctcaccccgctgcctctaggttctgggaagatggcgaaggtctcagagctttacgatgtcacttgggaagaaatgagagataaaatgagaaaatggagagaagaaaactcaagaaatagtgagcaaattgtggaagttggagaagaattaattaatgaatatgcttctaagctgggagatgatatttggatcatatatgaacaggtgatgattgcagcactagactatggtcgggatgacttggcattgttttgtcttcaagagctgagaagacagttccctggcagtcacagagtcaagcgattaacaggcatgagatttgaagccatggaaagatatgatgatgctatacagctatatgataggattttacaagaagatccaactaacactgctgcaagaaagcgtaagattgccattcgaaaagcccaggggaaaaatgtggaggccattcgggagctgaatgagtatctggaacaatttgttggagaccaagaagcctggcatgaacttgcagaactttacatcaatgaacatgaaatagaatcagattctcatgcgcattttcttgtgcatgaatatttaaccttgttctcatactacaaacaactgatgagaaacagaatgaagacatttgtctattgtctgtggtctatatatataatgtgatctagaggattgaggtagtctatttgcataagtctaaggaaagtgggagctaaaataaaagtaatagctgtaatttaatgaatgtatactatat

SEQ ID NO: 118369 - DNA, 665 bp, Homo sapiens
  misc_feature (22)..(22): n is a, c, g, or t
gcgcgggcgagtgtagggctgncgctgccggacgcggtgctagtcgccggatgaagtgaggccctctcaccccgctgcctctaggttctgggaagatggcgaaggtctcagagctttacgatgtcacttgggaagaaatgagagataaaatgagaaaatggagagaagaaaactcaagaaatagtgagcaaattgtggaagttggagaagaattaattaatgaatatgcttctaagctgggagatgatatttggatcatatatgaacaggtgatgattgcagcactagactatggtcgggatgacttggcattgttttgtcttcaagagctgagaagacagttccctggcagtcacagagtcaagcgattaacaggcatgagatttgaagccatggaaagctttgggtccaggaatggcaagaccagcaagaagatcaccattgctgactgtggacaactcgaataagtttgacttgtgttttatcttaaccaccagatcattccttctgtagctcatgagagcacccctccaccccatttgctcgcagtatcctagaatctttgtgctctcgctgcagttccctttgggtccatgttttccttggtccctcccatgcctagctggattgcagaggtaaagttatgattatgaaattaaaactaa

SEQ ID NO: 118370 - DNA, 581 bp, Homo sapiens
cacagtgtcaaaacatagaggtgtttggtgtccattacccatattggttactcagttgttacatgacaactcatcaatttctttaaagaatagataaataaatgttactggatgaattgtatccctctaaaatttgcagtaagtcttaaaccccagtatctcagaatgtgactgtatttggagatagtctcaagaggtaattaagttaaaataaggtcattagggtaagccctagtgccatttgactggcatccttataacaagaggaaattgggacacatacaggaagaccatgtgaagatacagggaaaagacagtcatctaaaaaccaaggaagaaactgactctgccaatgtcttgatcttggacttatgatctccagaattgtgagaaaataaatgtctattgtttaaatcacccagactgtagtaatttatgatggcagccctagcaaactaatataacaatgcttcttttggaggcatagacggtaaacactggatatgtgatataaacagactggtcctgttttaggactcaactctcactccatccctgtgcccgctctgagcatagtctag

SEQ ID NO: 118371 - DNA, 770 bp, Homo sapiens
gtgtcattttacgaagtcaaagaaaagatgtaaaagtaaaatccttcagggcacacctgttaaatgaatcaccacctttctagcacaggggtattaggatcttgtgcaacaatcaccaccggagacattaggatccctgaaacacctgcctcactcactgtcatgtctgcagtgaatgcagaacagtgtctgattaccaagtacatccagcacacgcattggacatggatgttgaccgagttccacttggtgtgcctgaggcaggcaggaaattctcttggaaacagaatccttaaggggattgggggggggaagcacccatgagctagaactcaattctaccctacagtaagcagcacttcaagggccgggcatggtggctcacgcctgtaatcccagcatgttgggaggaccaggcacgtgaatcacttgagatcagaagttaaagaccagtctgaaaatatagtgaagcctcatctccactaaaaatacaaaaaaaccagccgggcgtggtggccggcgcctgtagtcccagctacttgggaggctgaggcatgagaatcacttgaacccgggaggtggaagctgcagtgagctgagatcacaccactgcactccagcctgggtgactctgtctcaaaaaaaagcacctcaagaccgagaagcggccgggcgccatggctcatgcctgtaatcctagcactttgggaggccgaggcgggcggatcacgaggtcaggagatcaagaccatcctggtctaactcgatga

SEQ ID NO: 118372 - DNA, 615 bp, Homo sapiens
atcagttattttcgcctgccatagtgtacaccagtcttgaaacttgttactgtcgtagagcaaccaaaaatttgagaataccgaattgtattccctacccgtccccaggatgtcccattttggaaaatatggagccctgcgatctggattggctcataagaatgttaaatctaaaaagactgatcgtatccgtcatgcacctaatgtgtgtccagtgtttaacatagtttcctatgtacaggattggagatgtcgaaagatttcttgacctcttaacattgttcattatattcttttctttagattctctgaacttttactccactgtcataatttaattgtcaaggttcataggataacattcgatgtccctgccattagtcaactatgttgggagtgtgatttgttctccaatgtggcttgttatttatgtttcatctccacttagctttccccataggaagacacttccatagggagtgttttgtgttttgtagggtgacctctgttgtagttctatttccagatgatttccctttcgcagattgtcagctgtgcagatcagacctttttgcttaagtccttttgtttgatacgctaatcctattaagtatc

SEQ ID NO: 118373 - DNA, 770 bp, Homo sapiens
aaaaaagtacagaccaatattcctcatgaatgtagatgcaaaaaattactaaattattgccagatttaaggccagtgtacaaaaatcaattattttcctatattgtaggaataagcaaaataaattttgaaaagggatactgttttcaaaagcatcgtaaacattaaataatgtaacataatatagtcataatattaatgcagaaaaccatacaatgttattgggagaaggtaaagaagttctgagtaattagaaggatataccatattttgttgattagaagtctcaatattgtaaagatttcacttcttaacaaattgattcaccgagtcaatgcagtcccaactcaaaatccagtaagttttttttctttttttttgagaacttgacaagttgattctaaaatgtatctggaaatgcaaaagacctagaatagcccagacaatcttgaacagtgggaaggctagccatattggatatcaagacttaatatggccggtcatggtggcccacacctgtaatcccagcattttagtaggccaaggtgggaggattgcttccagcctttttttttttttttactaaaaaaaaaaagagagagacaacatgacactgtaattattaagaaagtgtaatattaatggaagaatagaaaaattgatcaaaagactagaatagagagtgctgaagcagaatcacatatatctggacacttcatgtatgagcaaattgaccctaaagagaagaagggaaataattaaatttttttc

SEQ ID NO: 118374 - DNA, 882 bp, Homo sapiens
ctctcttgaattgcctttgcacctttgtcaaaaaatcatttggctgtatttatttggttcttgagttcttgagttgaggagacaaagttaagagtgggaaaaccaaagcacctagagctcttagaacagacagaagaccagagatgagagaatttcatagagagtaaaccgcaactctctgcagagggtccctctggagtgttcagcaagctgctgatcagtgcatgcgtgcaaaaactacctgaagtcaggaaaagaaccatctgaaaggattaaagaaaacagtgcctggtgcttataaatggccaaaaatagtgcctgttcccaccagacttgcaaaacttcaaaaaagggaaaatggtacaaaaaacaaatggaaataacaaatagagacaaagacaacaacaaaaatagaaaacagacaatagactcaaactgaaaaaattagtaatcttatgatatggcttggctgggtccccacctaaatctcatcttgaattgtagcttccataatcctcgtgtgtcatggcagggacctggtgggaggtaactgaatcacgggggtgggttttccatgctgttctcatgatagtgaatcagctgcacgagatctgatggttttataaagggcagtttcctgcacaggcactcttgcctgctgccatgttaagacttgcctttgccttcaccttctaccatgattgtgaggcctccccagccatgtggaactgtgagtccattaaacctctttttctttataaattacccagtcttgggtatgtctttattagcagcgtaagaacagactaatacatcatattaagtggaatggtccaaaaactccaaataaaagggagagcttgtcagattggataaaaaacc

SEQ ID NO: 118375 - DNA, 490 bp, Homo sapiens
tatacatcaataaaagggtaagtaaaaagtttatagctgtaatcagataatgaataattataacactaatctattagatttagtgtagatcatctgaaaattacaattagaacaaaaactgaaatgctccatttttcacaaatatggtcctctcagaaaaaagttcccttattcccatgagagaaagaaatctaaacagaaagtatataccactagagattaacaattcttccaaaaagttgagatccactagatatttttattaaaatccactccctaacattaataccagaaatatgtatagcagaaacttacatcttacattaaatacagaagacattctacttttaccaccctcaattacctcttctaaccagtaatcttctctactttgtatttattatatatctataacaacaaggaatttacctttctttttcaaaatgtccaataaaacatgctttgtggtccacagacaaagggtattata

SEQ ID NO: 118376 - DNA, 297 bp, Homo sapiens
aaaagaatatttacttatcccagaaagagtggatactgttaaaatcatatttagagtatcataaagtcttaaaaacgtttttccatgttatgtactttttaaatgagttttaattcaacttgatgaagcataagaatgtaataagacactaaacagatgactatattgattttaagaaccaaacatctatattacctatgtaaaaaatagtaaaatcagactgaggaatgatgaaaatctatcaactgatgtgactggaagagaaagaagcagtgagaaaactgcttatcactcgaa

SEQ ID NO: 118377 - DNA, 510 bp, Homo sapiens
agcacattggatagagttcataaaacagtgtatcaccttagactaaaggtttctctgcctctatcttggaaatacggccaacaaattccagaataaaatttggtacaacttaaaagcatataatgaaattttgtattcaagagagtaaaaatcacggcgtccattgtctgattaaagattgccaggcatagaaagagcaagaaaatagcaatacacaaccagggaagaaaaatcagtcagcagaaaagagcaagaaatgacagagatggtggagatagaaggcaagtacattaaaacagctatgataaacgtttcccatgtgtttaaaaaggtagaagaaaatgtgaacattacagtgcaaaaactggaaaatataagaaagacccaaattgaacctttagaaaagaataatacagtatctgaaatgagaaacactgaatggaatgtccagtagagtggaaactgcagaagaaaatgttagtgaacttgaagacatagcaaatagaacca

SEQ ID NO: 118378 - DNA, 433 bp, Homo sapiens
ataaattgctcagtctcaggtagtatctttatagcaatgtgagaatggagtaatacacaggctcagaaaagttccttgcatttggcaattgagagaataatgggatgatgacttctgtcagaaaagtttgtgatcaggaggtgggggtggaattctgacttgggtgggccagaggaactcaacggtggaaaaataagtggtgacatcataaattgacacctgtgagagatggcggatgaactgaataaagtgtagggtatttagcttgtcatgattgtccctgagaaacaggttgcaggaatgctacttgcattgaataattttattagttatcatttaattcctttaaattgatttctttagttccctatcagagacaagctcaaactacacacaatgaatacatcacggacttctccttctctttatttcg

SEQ ID NO: 118379 - DNA, 241 bp, Homo sapiens
tgtaacttttggcaagttgcctaagctctctggatctcagtttccccacctataaaaatgggatcaataggccaggcacggtggctcgtgcctgtaatcccagcactttgggaggtcgaggcgggcggatcaccagaggtcaagagttcgagaccagcctgaccaacatggagaaaccccatctctactaaaaatacaaaaaaattagctgggcctagtggcacgtgtctgtaataccagc

SEQ ID NO: 118380 - DNA, 546 bp, Homo sapiens
ctcgggtctagcctgtcggtcatgggtagtattttcctagtatttattttattttatttttggtgtttcacatatttaagggattttataagatgggatgctggacatagtaatatttggttgtggggtgtctagatttggctttctcttagagtgtttggtttggtagccacctaaataacttgctggtcagttttatcccttcagggctacatgggagttggtctagagaaggcttggctttaatggtagtagctcctacctaaggcatgatccttctgagtctttactaaatgctcccagtgtcaccgtgttctcttcactcaggttagagagaatttgaggagtctcccagtcctttataagtacggggagacaaggtagagccgagctctaccttgtctctcggatctaccttgtctctcggctctaccttgtctctcggctctaccttgtctctcggctctaccttgtctctcggatctaccttgtcttctttttctctcagcccagatccagtaggtatcaggaccttcaaggtaaggt

SEQ ID NO: 118381 - DNA, 592 bp, Homo sapiens
caggtgaagagaggcccagtctgaggacaagaccctcgcccttgctgagctacaattgtggtggagatttgaagaggtcacatcagtcactgctcaagcagtcacacaaacgccaaacagaactatgatctagggtctgactctctatgtagacggaagaattgtgttaactataattcccttcatccacgagtgtgctcacacgacagtcacacatgagccaagagctcaaactaagcaagttgttatgtctcactctggggtcaaacccattacctggcatgctaagttttctgaagttccaatatatgagtttgtttcccacagttccttttactgaagggtgtcactgaatcatttgtatctggacagctcctgccacctccccattctctgtaggcttctagccacttgaaagcctggtgaggcataggggctggacaatccaataagcaacaggctgagtttttgctgagtgtgcaccctctgtggcatgtgtgcaggacacagagacatgtcctgccactctctaccaggtagctgaggtcccaatgccaggaactgcagagatagcttgctagcattttaaata

SEQ ID NO: 118382 - DNA, 416 bp, Homo sapiens
  misc_feature (12)..(12): n is a, c, g, or t
ccctattgagcncgcacccctccttccctctctcacgatcttcctctctcacgtatgggagggtcccaggatctaggccactggccaatcccctgcacttgaactactaccttaggctactctccacttctgaaacttctctcccacacccttaggaatcccaaattccccacccaccaccaggccactgggcatggcagagaagcataaggttttaaagtacaattaactcctaacccctcctgaccccatcgcatgtccctgtgttcccccaaagtttttcccaccctggttagcatcgctcatccacacatcctcttaggtggccctgagcgtcgctgattggtgtggtgcctacgtctcctgcagtagccgttgaatgaatggagacatgaacacacgcatacgtgagagag

SEQ ID NO: 118383 - DNA, 458 bp, Homo sapiens
tgggtgatgatgtgtgacatgtgtatctatatgggaatcatgcctctgaatgtgtactgtgtctgtgtgggggatctgtttagtccttctataaaaacaaaacaacatgctcgtaccagccaacatttcaacgcagctaccccaagacttcctgcttctattctggtgagaaagggaagcttcgggcgccaacccccagtggcctaatggaaagggaagcttcgggaaaagccaagagaagaaagagctggtgtgtctctgtcattttcatctgggttaagattggagggaagtcatcattggtgattgtgctactgtagggccggcagcccacgccttcccatctgctgaaaggatgaagtcagtcctctgggggaaaagggggtggagaggggactctgtaaaaatgaaaaaggaagctttttaggagctttgaaggaggggttggggtagaggga

SEQ ID NO: 118384 - DNA, 262 bp, Homo sapiens
tgactatagtacttgctaaagtttgagaatcgtggaactggatgatcacacccatcatttattgaaatcttttagacctcaggaaggcaactctattctttatgccttctacccagtatttaggtggcactggctgtgtgccagtcacttcccaggcaccagggaaacactccttgacatgatagacaagatccctgctctccagcagcttacatttagagaaaggagactgactgtaaaccaagattatggcaggtataat

SEQ ID NO: 118385 - DNA, 198 bp, Homo sapiens
aattgaaaggtataggatttctttcaagatgatgagaatattctggaattagatagcggtgatggttgtgcaatattatgaatattctaagaactactgacttacacactttaaaatggtaaaaattctgaatgttatgttaggtgaattttatctcaaaaaaatttttttaattctaattggaattttgattgagat

SEQ ID NO: 118386 - DNA, 471 bp, Homo sapiens
ttcctgatcgcggcctgctgagctcaagtgacccttccacctcagcctcctaagtagttttgactacaggcctctgtctcccgggttcaagcgactcttctgcctcagcctcccaagtagctgggactacaggtgtgccaccatgcctggctaatttttgtattattagtagagatggggtttcaccatattggccaggctggtcttgaactcctgacctcatgacctccccacctcggcctcccaaagtgctgggtttacaggcctgagccaccgcacctggccccagctgtgtgatcttaggcacatttacttcttgtactctcagttcctcatgtaaactcgggataataatatacgtcttgccgatctgtcatgcttgtgtccaggatcaaatgatgcaacgtgtcataatgtacacgaaaacacttttaaaagcaccacatgctccacaaatgtcgagtattatta

SEQ ID NO: 118387 - DNA, 249 bp, Homo sapiens
attgagtcttttgttattgatatatatttctaacctatggctcttccctttctcaacttagccagatgttctgcatttattgtcttcacttatttggagatggggtaacacagggaaatagggggaaaaaaatcctgagtcaatattttgccttctgagtttcacaaaacctatacctgaagaagggggaagaggagagatcttgatgcatagaagaaaagcctcatgagaaacagccagcttcttccc

SEQ ID NO: 118388 - DNA, 299 bp, Homo sapiens
cagcctttagagtcacactgcagctacttttgtacaacttgggaaagtccttccatctctccaagcctcagtttcttgctgttaagggggataaataatcatacccatcacagagagttaccataacaattaaatgagttaattcatgtaaaatacctgacatgtaataagctgcacttgaatgatagctactatcctaataataataatgttgttgttgtcatcatctgggttaccagctgatgataagtcaaaaggtatatgttagaccataagtctgtgtctgactacctagacct

SEQ ID NO: 118389 - DNA, 394 bp, Homo sapiens
cgacttctgctctgcgtcgaccttctgctctgcgtcgaccttctgctctgcgcgaccttcaatgctctgtgtacttagaccttagactcctcaactatctcagagggcttctgcctagtctttcacctcttccaaaagactgattccatggccacaggaaaacatgcccccatgtgacaaacagggcttgaactcaggcgatttgaagtactggtaatgctctgatcatgttagttacataagtgtgttcagtttacaaaaattcacagaactaaatactcaatgctatgtgttcatgtctgtgtttatgtgtgtgtaatgtttcaattaagtttttttaaaaaagagatgatttccaaataagaaagccgtgttggtagggcaggagcagacc

SEQ ID NO: 118390 - DNA, 525 bp, Homo sapiens
gcatgaattgcagggctgtgggagagatgctcaggaaggaaaatggctgttgggcagcccctgcctcccttactcagtcttctggtcttaatatgagcaccatataggtatccatattctcagtttcaggcatgccttcctctgatctacaccacctgtctctcaagctctttttctccactacccaaactgtagcatgcacttggaccccagtagggtttaaaatccattgatcctacttttcatggttgctcactcacctcaacttcttacttccccctttcactggtttctattgcatgatccatcattgtaaagatacctttggtttcacaccttgcctttctttcactttgttatactcatctggcaaaaatccccatcttgttcaacttagctatttctcttgcttgtccctgtgtatctgaccatggctggagataagcatgcagccatcccatttcctatccctaaattctaggactccaatgagttgttcacgatgcccagcagtccagccatgtt

SEQ ID NO: 118391 - DNA, 554 bp, Homo sapiens
cagcctcccaaaatgctgggattacaggcatgagccatcgtgccaggcctagactgggtaatttataaacaatggaaatgtatttctcactgttctggagactggaagttcaagatcaaggcgtcggcctctggtgtctgtccagggcgcctcgttactgcatccttatgtggtggaaggtaggagggcaagagggctgggcgctcccatcagcctccttcacggcacccatcccattcatgaggcctgccttcatcaatattataaaataaaaaatatcccataaaaataccactggaatgtagccatgctcctggatgccagcctagagttagcctcagagatcaggccagcacacctgtaactctgtccggcttgcactattaataaaaatatcctatcaataaaccagaggccctcaatcccatgataccttaagagattcagtagcttttcctgagtttaatgaaaagaaaaaaacttctgcccttaagtagaactaaaattaatactttattaacatgctaagaacattttaaatcaacaaccaccag

SEQ ID NO: 118392 - DNA, 269 bp, Homo sapiens
tgaggagggaccagccacaggaaaagccagagagttttcacagcagaggaaacagtaagcgtgcaagttctgcagcaggaaggagctgggctcagggacagaacaaaggcctgtttgctggtacacggagagccagggtccagggtcacaaaatgagcttgcagaggtggagatgagtcacaggatggggccaagggaccatgccaggagcttgggccttatgccaagaatgatgagatgcccctgatggtaggaggggtccatgaaca

SEQ ID NO: 118393 - DNA, 197 bp, Homo sapiens
cacccccaacgtcaaatgtatacccaccctctgttcacacgattcctgtgcttagaaggccctgtccttcttccagaagacactcttcccacttttcctactttaacctcatctgtgaactctttcccactcatgcataattaaccattcagttctctgtccttccaaagtactttgttcacaccattaattaagca

SEQ ID NO: 118394 - DNA, 286 bp, Homo sapiens
ttagtctgtttcccttattacacatgtggtttcctctttctaaattcggacttatgccccattttagaaggtcaggagaaagtaacgcataatgcaaaagtatttcaagcaaatcatatgatatctgtacttgataatttctcatggttttacaccaagagaatcactgcatattgaagattacacattttttaaaagctagaacactgagccttcctttcagacaattcaaacaaggagcgtattgctgacacagcaacactgtggtctcagactgtgggaaatg

SEQ ID NO: 118395 - DNA, 602 bp, Homo sapiens
cttggtgatcgttagaaaagaaaccagatagcctattatagaatgtccaacagggaaattttaaaaatgtaacaaagtgctaaaatagtaagcaacaatatttgaggaactggagtaagtagtcacctacagttcctttgtaacatgatgcttcagttggaaaactgtaggctgccaaagctcctaaataattaatatttcgaatatgcaatttagaccaaaaaaaagtgcagcttcataaaaccttggagaaaacaacaaaaattgttacaaaaaattaactttattataagagatttattacattcaatttgaaataggtattttcatgtgcactttgatttaatattattaatatggacttccttcacaaaattcacaatttcagtatttccacttagttatagtaaattgtaaatgttagctgttcaagaactcaagaaaaatgagggcaaagaaaaaggtctgtagctttcatccaggttgtgataccttaaaagtaagaaatgagactcagagctggagaaagaggactggtatcctttatagagaaagagcaatagagaggacttgaaagtatctgaattattggcatcttttta

SEQ ID NO: 118396 - DNA, 400 bp, Homo sapiens
gcctgtacaaggacagtactaagttgaagagctcaccaattatgaaagaacatgatttgggtatatttttgcccaatgacgcttgcagtaagaagccaagggttttttcttctgagaagtggccagtcatttgaaaacggctggaagaaatgattgtttcaaaattggaagacatttcctccacaggacaaacttcgctgtggctttgtatattcaggcaaataggaagaaatctaacaattgtagaggttaaagaccttgagttccctggaagcatggcaggtttaatatctttttatatgcatatcggaaaattgagtttagcagaaagtcatttcactactctgaccactgcaagtttatgtaacttttgacaagtggattaatgttttcctatgtc

SEQ ID NO: 118397 - DNA, 480 bp, Homo sapiens
tgcatggagtggccagccactgggcttcagagccaaacaaacctgggctcaaagcccagccctgcccccctgttgtgtgatgtccaggacagtggtgctagtagttgatgtgctcatctgccccacctctgcctggctgtactcgcagctagtacatgtatagtatataagtgcccgactgtatcattgtatgttccagagtggtcagggtcagggtggtcatggctgagcttttttttttttttttttttgtgcgtccctgtgtgcccaggctggattgcagtgggccccatccggattccttgaagccctcaaatttccttccgggccttaagtgatctacctgcctcagcctcctgagtagctgggactacagacctggaccaccaagcctggctaatttttaaaaatatttgtagaagttgggggggtcggggggctctgttgcccaggctggtctcgagctcctggcctcaagtg

SEQ ID NO: 118398 - DNA, 202 bp, Homo sapiens
ctccaacatcgaaaattacatttcaacatgagatttacaggggacaaacacccaaactatatcagatgtcatctggcttgtgaagccttaaatttgccctgaattggacttactttgccccacctccgtgattccagagctcatatctttcattatgcagcattgatcacattcagtcgtacactttagttatataaccttt

SEQ ID NO: 118399 - DNA, 519 bp, Homo sapiens
gcagatttcaggcaatctcagttcctacttatccactaattcttgctggccatcacttgaaaatagtaagcatttcttgtttgtctattttaaaatgaatgttatggtatatatcttaggtatatgacatgatgttataggatacatataaatagttatctgctactttgtatcctctggccaacatctccctgtttcttccccctactccagcccctggtaaccagtgttttattttccatcactgtatatttgactttttttttttaagattccacatataagggagatcatgcaatagttttctatgtctagcttatttcacttaacatagtgccttccaggttcatccaagtggcagaattgccttctttttaaaggctgagtaatatttcattgtctgtgtatataaatacatacatcagtttctttattccttggtttgttggcaaacacttagatggttgctgtatcttggttactgtgcataatgttgcaatgaatgtaagggttcagata

SEQ ID NO: 118400 - DNA, 569 bp, Homo sapiens
gagcggggcgcgagcggtgttcaggccggggctggtgagagggcgactggctgcgagtgcctacggggtttgttggctgagacgtctagcccactccctggaggggtcggcacggccatgctctttggacatcatcttccatactaccccggttcgcagactcgaggagcttagtagaggctggcgggacgcccgagggtactgtgtggatggaggctgcgcgtcggacactggatccgagaggaaaattagttacacagctaattttagataaattgagccagttgatagaatttgtcatgtttagactccttctgtgtttgagttctctccccgacccccaaccaaattgtaggacgttgtctttatgagcctggcattcagtaggctttaaaattaatatctttctgggttgcagtgattccaagcataccatcgttctgtccaccaaaccagaaacaagaagtaatcacacatcttcctaatatgcccagataggcttaattattgttcccaatggagaaaatttacagttaaacatcaggtttcccttagggtgatcatgatca

SEQ ID NO: 118401 - DNA, 267 bp, Homo sapiens
ctgtctaacatagcaggtttctgtccaacctcccgtcccaggatctaggggaggtgtgaatgtaaaggcaagagaggacaaggcattgcatggagcttcaaggagcttcagcctgcatgggaagttggaaaagaaaccgcagtgtgggtagagctcagggctcccaaggatttggtccccacaggcactccgcttgccagtttacaaagtgctccacgggtatcattttagacagccctccaaacagcctcatgaggtcagatttat

SEQ ID NO: 118402 - DNA, 234 bp, Homo sapiens
tagaatatagtttcatttaaaaaaaattgatggggataatgccaattcgtctgagatttcacagaagacatgagtactcatcgtgatcttggggaagggataggtttggggttggcaaagaattgggaacattgggtctggtggggaagaaagtgtcagtgaaaaccagaggtgggactgatcctccatgggatactctatgtgaatgcaatggagagcctgagtccggggaga

SEQ ID NO: 118403 - DNA, 876 bp, Homo sapiens
agacaaatatccctgaacgcttcaaagcagatcatgcaccttggtccactgggatttctccattgcagagcctcttttggaagatatggttttgccctgggttttcctaaggatggaatggctacagagaacccactaatgagatgtctccagaagctggagctggggctgtctgggtgggtcctgggagtcctgaagcaatcagaaagcagtgagtgggttctagaaggagatggtttttgaaggtgggggagacttggtcaagactcaactcttggttctgtctgttctctacaggacttcaagaggctgatcaccaatctgaagattgacttcttcccagggtccccactggctacctcattatctttcaacagcctcatgctgatatctacagcaaagcagcacacctctttttttttttttcttgagacggagtctcgctctgtcgcccaggctggagtgcagtggcgcgatctcggctcactgcaagctccgcctcccgggttcacgccattttcctgccttcgcgccattctcctgcctcagcctcctgtgtagctgggattacaggcgcccaccaccacacccggctaattttttgtagagacgggtattcaccatgttagccaggatggtctggatctcctgaccttgtgatccgctcacctcggccttccaaagtgctgggattacaggcgtgagccaccacgcccggccacacctctttttaagagacaacatggggtgctcagcaatcatggaatttgccaaaataattaaatacaacccccaattcttctctggacaagttatccaacatatctgagcctcggtttcctcatctgtaaactaataaaataaaatctacctccc

SEQ ID NO: 118404 - DNA, 689 bp, Homo sapiens
ggcagggaggtcatagcttcaagcagttcattcttcaggcaaggaaaactattgggaagatttcctttttgttatcgctggcatttttatttaatcccatcattttccccacagtctgggcagaagtacaaaagcttcagacaggcacattctgcccctttctctttttctcgctgccaaaagtaaccttggcaattgatggtttagggaaaaactaccacgccccctttcctcaatcttattttctctcatccatcctttcttattctctttttttcttcgcacttctcttggggtctaaagatcaggagggtagaaagagtcatcttaatggagcctgatgttagcagccctgcctatttctctgtattgattgtagtggaaggttaggaagaaatcttccctgcatgagggcacatatgtccctcccgcagtcgtcagcctggttgctgtggaagagggctggtgttgttattagagcctgtcacagccaatgaatttcattccaggccctacacaggaaacttcataaaggaaaaacaccaagaatgaaaagaattcaagaaccttggtttgtatatctgagtgcacattaggacattgaaagcacatttaatttcatgcagaaaatcatcatgatatcatcacaaaagacagttttgaaatcagaaagtgaatacggtaaaagg

SEQ ID NO: 118405 - DNA, 503 bp, Homo sapiens
gccaagctaaaaatgccctgggggtaactagcacttggactagttacaggaatgtagcttcgtctcagaggattccaaaagctaatgccttgcttaccaagggcttgtaatctcacaggatgtgatgggtggggcctcagatctgctgatgggagcataaattggtacaaccactttggaaggcaactggctatctagcaaagttgaagaccctacaatctaacagttctcctaggtgcatatcccagagcaagtctcacattgatgcagtgagatagtgaataggaaagttcatagcaccattatttttaagtagtaagaacccggaaacaatctaaatatccatcagtaatagatatatgtgatagtcatacaatggaatactgtggcaataaaaaataattagagctacatatgaaatagggatgaaacatggatgaacaaagaatgttttagaggaatatgatatttaaaatttgaagcatgaaaaatatgtgtttatg

SEQ ID NO: 118406 - DNA, 454 bp, Homo sapiens
aattgcttgaaccctggaggtggaggttgcagtgagctgagatggcaccactgcactctagcctgggcaacagagcgagaccctaactcaaaaaaaaaaaaggacagaggggaggaaggagcagaaaccaaaaatggcaattagggagaaatctcaggaatgtggcatcccatctccccttgagacctatcactgaattcacaacccttcgagctcatgctggtgcactgagtcccttgggcgctgtaaaggtttaaccccttgactgtaaactcagacttagagacatctgagtcacacagtccccgccattgtcacatattctcactgacactgcagtctgtgactcctccaatgtttcacgtgtattttatatttattgatgtctccttccgcagattcatttctttgtacttaataaactttagtaagtggaaatgcttccagtcgtttc

SEQ ID NO: 118407 - DNA, 460 bp, Homo sapiens
tggtgcttcgcctcaagcgccttggcgggaggcaggtgggggccctgggaatgaacctgtgccccgagttcctccttagaaagcaggtggcggccctggccttgtttctaatatcttcctccacctctaaaaattaggtggcagagccagctccactctgcgtgtgcccccgactctattccgcttgtgagccccactcggaaagtaggcagcggtccggacttcccttagagtcttctaacttaaaaatcgggcggcggcacattcctgggaaagggaatgtgtcttccctgtgaatgtgtctttcctgtgaatgttctctgcaaaagtcagatagcttaatcagaccaagtcagatgtaactacgatctggctgcagaaagccggcgtctgggctccttgctttatgtcttatatcccttttacattccccacaggttctaagcagtagacctgtcat

SEQ ID NO: 118408 - DNA, 249 bp, Homo sapiens
gttttatcctagattctgagaggtcctcaaagtgggagagtcagctgccaaggattaaagggcaaggaggaattcaatgaaggctaggagtaaagggataagaataggactataagccaaaacagcaagctctttatcactgtcttggagaccccggggggatcatttaattcctctgcacctcactgcctctacctgaaaaactgagatatttagccacttggtctcatttgtagggttgtaatgaga

SEQ ID NO: 118409 - DNA, 253 bp, Homo sapiens
aggaatgtagcagggcataggcacatatgtacagagtgacattagtgttggggggcaggaaatatgaagagatgtcaagtagaaagaagataatgccattcaagagttgtcaagggccaggatatttaagcagaaagcagctgagtacattacatcagatgtggccaagacaaccagggacagagagagcaatggccaggagacaaccttggcaggcctgtttcctggcacagtggtatggactccacatttt

SEQ ID NO: 118410 - DNA, 488 bp, Homo sapiens
gataaaggacatctagaaaaacctcacagttaaaaatcatacttaataagactgaatgcatttcccctaagatcaggaataagacaaggatgcctactctctccactcctagtcaacattttactagaggttctacccaaggcagttgggcaaaaaaataaataaataaaaggcctccagactgaaaaggaagaattaaaggatgatgttgtctcttttagcagacaacatcatcttgtaaacagaaaatcctaaggaatccacacaccaaaaaagttagaactaataaagttcagcaaggttgtagaatataagatcaataatacaaaaatcaatcatgttctatatattagcaatgaacaatctgaaaatgaaatttagaaaagaaccatttacaatggagccaaaaagaatacttaggaaatttttttttttgagacagagtctcgctctgtcgcccaggctggagtgcagtggcacgatctcag

SEQ ID NO: 118411 - DNA, 190 bp, Homo sapiens
caggtctccaggtgtccggctggagccctctccacttcctccatgcctcctgagaagctgctggaagacatttgttccctgtgggttgggtgagccatgggatggctcccagagaaatggcagaacaggctaagtacttgggcagcactatttgaggcactctgggccattgccagacctagaggctggg

SEQ ID NO: 118412 - DNA, 403 bp, Homo sapiens
caaacatacaaatacatataggtacctagttccttcattctccatcggtgcaatactgttgtgcaatcgacttatttaatgttttactgtattcacattgtgaacacttttcacagctgagccatgtggtattcttttgttacttttctattctttcacaatttttgccttctctggagttaatctttttttttgtttgttgctacaattttcaatgtacttagctgtcactgcagtgctaagccatctacatgtttttttctaattgactaaatcctctctcagcatgttaaaataccaaagtccaggagtttaattaaagacatctgtttttgagccttcccacctactttattcagaatgggtttctgcctcagttttgtgcataacttttacgctgaaa

SEQ ID NO: 118413 - DNA, 482 bp, Homo sapiens
ctcccatgcacatagactttaccatgccatgctgtcactgcagcagggatagggtgggggtggtgtcagcaattcaagactatctttcctaccctctgcagtgcctctttcagctatccaggtactgagtgttcatctgattttttgttctcatgtatgtatatgtgcttttttgtgtgtagatagttgtcaaatttggtgttcctgtagggggatgactaatggaaactttattcagccactgcgctcttctccttattctccttatattattgtcaaggaaccagactagactgggtggaatttcttcctggatggagaataatttttaccaatataattgttaaaacaaagcaaaaatatgtatcactgtttcatgacttagttgcaggattcataacccaaaccagtaaactcgtactctcctttcttggacctcttcagtctgccccaaagactgggaattttatcaagcaagatgt

SEQ ID NO: 118414 - DNA, 259 bp, Homo sapiens
attatatcacagttctttctggaacgttgctcatgtagcttcctacatatgtgcaactatcctcctctttttctcctcatacctgcctaccccctctgttcatattcccctctcaaaatctctttctgtttttcttttcttagtgactttcaagatgtccttttaactaggaatagaacctgtcagatatgctaacataactgtatctgctttcaaattgtgtgacctcttgttgatggtgagcaacatattttcaact

SEQ ID NO: 118415 - DNA, 351 bp, Homo sapiens
cagcccactcggctgaatgcaaccaacaccaatacccgtgtgaaccacttgggactaagaggatgtttctgccactgccattgtcatcattcacatcaagctggctgccccaggggttcaagaacatccccacccaccccacctactgttgtcactgctggcatccaagtaatctgtctggaaactcaacaattggcccatctggactcactaacaatggtgccagaccaccctggagcccaaagacacacatactcatcccactgctgccaccactggggctcaaagaccgacctacctggtgttacagtccccagcaaaaccacagcctcatttaataattgcaccctg

SEQ ID NO: 118416 - DNA, 390 bp, Homo sapiens
atacattataatgaaacagtagtacattgagactgtcacctttttaaactaccgagggttctttgttgggtgctttttattatatatgccttttaaacttttttttttaatttcacacaaaggagtcaggtgcagtggctcacacatgtaatcccagcactttgggaggcagaggtgggcggatcacttgagtcaggagttcaaaaccagcatagccaacatggcaaaaccccgtctctactaaaaatacaaaaattagccaggtgtggtggcacatgcctgtggtcccagctacatgggaggctgaggcaggaaaattgcttgaacccaggaagcagagaacccaggaagcagaggttgcagtgagctgagaccgtgccattgcactcc

SEQ ID NO: 118417 - DNA, 1401 bp, Homo sapiens
  misc_feature (595)..(595): n is a, c, g, or t
  misc_feature (657)..(657): n is a, c, g, or t
aatttaatttatttagctattaaatgatagacttggtctaatcaatgtcaaatttcaaataagttaaatttgaaggatgattagagatgatgggcatttaattcctagagaagaaaattcatttttaaaaaactaaagaagaaactaaaaactccatttattaatttactttttttcctttttcttttcttttccttcttccttttcttttttttttttttggagttgggagtctctcaacctctttggccgaggcgtgaagtggtgccacttgtggtgttgaatactcaagctctcacagtgtgcaaacctctcgtggcctctcgcggggaactctcgagagtgtgaatctctctcctgtggccttcagagccttcgcacaaaggtatagctgggagattaacagggacaacacacaaccacaacacaaacatcttcagacctataattttgtggaccatctcccttatagacaagaagtatgttggggttcacacacatgtgtttgggggcacagaggcgtgggctctgggaactctcgcttgaaccttcagggggtgatctcacacgctgtgccttggggggcctctcccanaagaggtatcagcgggggatatttacacggagcgccatatgacaaccccgagtgtggttggnccccatatattctaatatgtacacatcatgtctcactctgtggttgggggacactttatattgcggggggggatatctctccagctattttctcccatattattcacacccagcgtttctctgggggtcgactacacatcctccttctcgtggggacaccaaaccatctacaatattccatcaggtgttacagagcacccacttctccatatctaccacactcaacagtgggctcagcgataactcgcggggtcgcctacattttagaaaaaccaatcatctcttcctgggtcttctcctaaaaccatgtctcatatatttgtctccctctcaaaatcttcaccttttagactttttccaccgccatatataagacttctcccatccataagtcttcccctatctacataagggggggttcccacagcacaccggtggaacgttcctcttgtggagacgccactaaattcgcgggtggcggctacaattttcatcaaacaacaggtctctgtggaaaaagttcgccccaaaagtttaagtcgcttccacccgccgtttctcatattactcacaaggcggactagagggtgcgatccatcaacaggactttgtgggccgacactgtgagtgtttgtgaattcccctctctgtgacaaaactgtggacaattacttggggggttctcctacaacacaagcgttcctctctatgatttccttccaccaaacggctcacaacggtcaa

SEQ ID NO: 118418 - DNA, 781 bp, Homo sapiens
tactttcacttttgctttaataaatcttgccaccgcacactctttgggtctgcatgtttctctaatggagctgtaacactcaccactgaggtccatggcttctttccttgaagcctgtgaaaccacgaacccttcaatcaagaaaagacctttgatcaggagaagacttctcgtctcatttctggggacacattcaggatttctccaaagcaggtgaaggtacgctcgagcgtggtcattgaggacaagtcgacgagagatcccgagtacatctacagtcagccttacgtctgcaggtgtacccaacagctccgaagagacagcgaccatcgagaacgggccatgatgacgatggcggttttgtcgaaaagaaaagggggatgtgtggggaaaagcaagagagatcagattgttactgtgtctgtgtagaaagaagtagacatgggagactccattttgttatgtgctaagaaaaattcttctgccttgagattctgttaatctatgaccttacccccaaccccgtgctctctgaaacgtgtgctgtgtcaactcagggttgaatggattaagggcggtgcaggatgtgctttgttaaacagatgcttgaaggcagcatgctccttaagagtcatcaccactccctaatctcaagtacccagggacacaaaaactgcggaaggccgcagggacctctgcctaggaaagccagagacctttgttcacgtgtttgtctgctgaccctctccccacaattgtcttgtgaccctgacacatcccc

SEQ ID NO: 118419 - DNA, 199 bp, Homo sapiens
atcctgccccacgctcatgagagctcttcaagaaagcactggcaatgctcacgatggattttgaaacaggcagagatgaactctcccaagtggtaattcccacacctacatcaacagcctccagctccagagagcaccacgtttatttcttcttgacttttttttttttttttttgagatggaatctccctctgtttcc

SEQ ID NO: 118420 - DNA, 500 bp, Homo sapiens
agacagaggataatcacaagttcctggaggataatattggaaagggaatctgacaggagagacatctgatcacactcagaggtggcagaggaacggcagtgggatgtctgttgccttgccatccagttgtttggctcaaacctctgcatacgcttcctcaaccagtacttctccaaggggcctcacatcaagtgagtttttcaaatgcatggagctacaaggcccactccagactagagtcagaacttctggggcaaaagtttggggcctgggcatctgtatctttaaaaagctcatcaggtgattctgatgcactccctgttgctataaaccatggccagatcgctgctcctgcctgggtcggtgtgtctgcctgaccattggtacttagagaacaggacggagacctgtgtaattctctccattcagaagctactctggcaccatacacaacggtgcacaattgaagggcttgttctgctcctccacatggcaccttt

SEQ ID NO: 118421 - DNA, 320 bp, Homo sapiens
aagggaaaacagcagtgttctgtatgcatagaattgcaccatccccctggcgccactgaccctgcctgctatcctgggtcagggatgtgcagtggctggaggagtggctgcaggtgggggtggtacacacagcagggcagcttctccgagaaggctccccactgtagccaccccctcatgaatgtcacacaggtgaggtccacgaggactgcagaaactaggaagccctctgccagaggctcactgcttttccctgaatacttcagcagagagtccatggagccactgatctaggaatgggaattgatgtcagtggacag

SEQ ID NO: 118422 - DNA, 244 bp, Homo sapiens
aaggttcaaggaatcgtgctggtgcttactagctgcattaacttgaaaaagtttcttagtctctctgaacctttctttacctgaaaaaattatgaggataattcctgcactgtatgtctatggtgatttttatgtgtgaaaaagtctataagacaccaatgacagcagtgggttccttgaaaatgctcattaagtggtaattgtaagatgatgatggcaatgacggcaatgaaggggatgcttg

SEQ ID NO: 118423 - DNA, 582 bp, Homo sapiens
ttagggcatgtgcaaaagagcaacgatagtgatcaactatggggtctaagttggtaagaaggaactgacaatgttgggaggtatggatgagggacagtgaaaaacagtagaatcaatatagctgaggttccacggaaattggagaattattgcagctggagttactacatagagatagtggtctgagtgcggaatactcaaaatgaagagtatgaagggttccagtaatagaaaagacaaaacccaggatgcgggtgcatgggagcaaatggtgaggaagaatgaaggaaagtatcactgcaggaagagagctcaagggtctctgactctacctgaataactacttcaaattccaaatacacacaatagttacatttataatttctgacaagaaaagaagaagaaattgagatgtttcttaacctttctcaaatggggttctgtcaaagaaaataacttaagtaactattctctcaattataccaatgatgaaaaatagctagaaccattctacatgaacaggagataagtcatttcattatatgcaatgatttgtttggaaactcattctctcatgaaacc

SEQ ID NO: 118424 - DNA, 282 bp, Homo sapiens
tagaggttattttaaagtgacaaggatggcttttttccttgggtgccttcccacatgtgccagaattacttatatttatagtaagtggcttgtcctttttattaacattgttgtgacatcgctgatttcaattttaccttatgcaacactaaaaacttccatgaattaccattggttcacctaaaatttgcaagattgctttattaaacctgggactagttattaaagttttatgagctccacgggtttcctcacattagattcaagctctgactactcaag

SEQ ID NO: 118425 - DNA, 346 bp, Homo sapiens
taaagaagagcaaaatattatcattattcaggtagagcaccacatttttccttttaattctttaataacttttgaaaaattgaagtagaaaaaaactacaattctaagatgacaggaaaaaaattcactagactaataattcagagatcaccttgaaattgtcctgcccctgtgactatgtgagtattgtccgcacctactcaaatgctgcctctaggcccagcttgtaaacatcatcaagtttcttttgggtattgctataccaatacatacaaaatctgttttcatcttagtataaactcacataggccacaataaaaagtgaaatttcatgtttttagagtaa

SEQ ID NO: 118426 - DNA, 700 bp, Homo sapiens
tgtggtggctcacgcctgtaatcctagcactttgggaggctgagacgggcaaatcacaaggtcaggagttcaagaccaacctggccaacatgatgaaaccatgtctctactaaaaatccaaaaattagctgggtgtggccgggcgtggtggctcatgcctgtaatcccagcactttgggaggttgaggcgggtggatcatgaggtcagatcgagaccatcctttctgacatggtgaaaccctgtctctactaaaaatacaaaaaaaattagctgggcgtggtggcaggcacctgtagtcccagctactcgggaggttgaggcaggagaatggcgtgaacccaggaggcggagcttgcagtgagctgagattgtgccactgcactccagcctgggcgacagagtgagactccgtctcaaaaaaaaaaagagatgatgtttaaacccaccatgtagctagctttggaaagacaaaatttttttggagggaatcttacttttcagtgactcttgagtcttccactcaaaagctgatctgctttctactctgcaagtctgattccaactgatcttgttctcaactattagatgaaacaacagcctctggtcctttggcagacagaaacatgactgcctatcaaatctcagttcagatacacacctacccatgtttgcataaggttctaatgccatctggtgatc

SEQ ID NO: 118427 - DNA, 555 bp, Homo sapiens
tccacagagagagaaggaagatcagtggtggccagaggctaagagggaagagggaatagggagaattgctaatggactcagggtttctttgggtgatcaaagtgttttaaaattgattacggtgctggtgcataactgtaaatatactaaaagccactcaagtgtacactttaaatggctgaactgtatgcaaattacatctaaattaagctggtaacaacaacaaaggttcatcccgctgcagtgtgcagaatggagacagggcagagaccagtgaagaggctgctgtacaaatgcagctggaaagggcagtggctgaagaacggagaggggttcacaggatcagactacaagggggccagaggaggagactacatcctgaggacgccacaaattatcctgggtacctggtaactctccagagaggagagtgggaaacaaatgaggtatctgcaattatcatcaagcagcaaacatgtatgtaaaatctcctacacataagactaagaggaacacacaaagtgtgcagccctgtgcaaaagtatgtggggagtg

SEQ ID NO: 118428 - DNA, 893 bp, Homo sapiens
agacgtgaagctggcccgagacgtggagccatgctgcgtaccgaagtgccccggcttccccggtccacaaccgccattgtctggtcgtgccatctaatggccactgcctccgccatggctggaccttcctctgagacgacctctgaggaacagctgatcacccaggagcccaaagaggccaactccactacgtcccagaagcagagcaagcagaggaagcgagggcgccatgggccccgcaggtgccactccaactgccgcggggacagcttcgccacctatttccgccgggtgctgaagcaggttcaccagggcctcagcctttcccgggaggccgtgagtgtcatggattctttggttcatgacatattggaccgcatcgccaccgaggctggtcgcctggcccgctccaccaagcgccagaccatcactgcctgggagacccggatggctgtgcgcctgctgctgccggggcagatgggcaagctcgccgagtccgaaggcacgaaggctgtcctcagaacttcactgtatgccatacagcaacagagaaagtgaatacgctgatacaagaagcaagaatattagaaaaatgtcatgaaaatagttgaagagaaatgctcactgcacaaggagaccaagaaaaaccccccacgaaatcagccacaactaaatcgctctggacggtgccgccaggtgaccctacatgtccggagcaacactttgaaaaccaaagacgcttggcagaaccctgttcctttccagagacagagctgtgtaccttgtctaaaacaccgcatctcactcagtgacttatttctcattatgctaattgttttcgctttaaagcgccagtctttctgtcaaatgggacatacaaataaatttctaaa

SEQ ID NO: 118429 - DNA, 660 bp, Homo sapiens
agagattgtgtatttccaggaatttatatattttctctagattctagcatgtgtgtatagaggtatttctagtagtctctgaggatctttgtatttctgtgggatcagctgtaatgtcacctttgtcatttctgattgtgcttatttggatcttctctctttttttcttttttaatctagctagtagtttatcaatcttttttttcctttcagaaaactaacttttgatttcattgattctttgtatggattttggggtttcaattttgttcatttctgctctgattttagttatttattttattctgctagctttggggttagtttgttcttctttagtttctttaggtgtgatgttaaatcattaatttgaaatcttctaactttctgaggtcagcatttagcactataaactttcctcttaacactgcttttgctgcatcccagagattttggtatgttctgtttcttttttcatttatttcaaataatttttttattcctgcctcaatattattgtttacccaaaagtcatttgagaggaagttgtttgatatccatgcaattgtgtagttttgagagatcttcttggtattgatttctatttttattccactgtagtccaagaataaggctgatttggttttgatttttttgaat

SEQ ID NO: 118430 - DNA, 299 bp, Homo sapiens
ctgtctcaaaccttaaccactctttaactccttccaaactcctaaaagattaccttgcctacttcctccaagagaaaaggaggcccttttgtaggaacttcctcaactcttgcttcttacctcacctgcattctcagtggaggtgttcttcctcgtggacaaagcagactttttttctacctctgctctgttttatatcccatctggccttctcagaaaccttactctactggttatacccttgctatctatctagtatcttcactatctctctgttattgcctcttcaccttcagcct

SEQ ID NO: 118431 - DNA, 300 bp, Homo sapiens
atattcattgagcattaactccctctcttcatgtgactctagtctagaggttcagagacctggactccctcaagtcttgcctttaccattaactggttcttaaccaagaaccagcctcttaattcacactaggagattatctgtaaacgaattcctttcctgttcagctatgaagttcaaatgagataatacacataaccttaactttgaaaattataaaatgtctcacaaaagcatagtattagctgtgagagtgcatgtgtctacatgtacagttgtgtacatgtgatggtccagtgg

SEQ ID NO: 118432 - DNA, 238 bp, Homo sapiens
ttatctgtccacagaagaatctcctcccaaatacagaacttgcagtttttccaaaatgagatgtccagagaccacaaataccacaccactgggatcaacagccacactgggttactgaggacacacctcaaaacagcgaggaggagtgcacgggagcagcaccgactctatgtctatgtaatgttccaatttctgcagttacataaatgaattctgaaatcgctgtgtgttggtgctt

SEQ ID NO: 118433 - DNA, 679 bp, Homo sapiens
  misc_feature (254)..(255): n is a, c, g, or t
agacagatagaatcgagccggtaccaattccattccagcgtagagcagcccaagaggcaccgtacccatgttaaaactgcatgcttgtactgcaaatgcagcttccagacagcggctcccaccctcagctactccgccatgctgctgcccctgagctctttgggagctgccactgccaccccagtgggtcaatggggcaagttggcatgaggaacaagaatcattgtcagaaatcttaaagaatccctcactgnncgggcacgtagctcacacctgtaatctcagcactctgggagtctgaggcgggcagatcacgaggtcaggagattgagatcatcctggccaatgtggtgaaaccctgtctctactaaaaatagaaaaattagctgggcgtggtggcgggcgcctgtaaccccagctacttggtaggccgaggcaggagaattgcttaaaccagggaggcggaggttgcagtgagccaagatcacacccctgtactccatcctgggtggcagagcgagactccatctcaaaacaaaaataaagtatatacctactttgcggaaaacagaaactttgtggttgctgaatactgagacattactctcttttctggtgactcattctggtaattcagtttatctcttctgataattctaatgcctatcttttcccactg

SEQ ID NO: 118434 - DNA, 290 bp, Homo sapiens
tggctatcaagggacacctggggccgggcaacttctaaagaaaagtggtctctttggctcacagttctgcaggctgtacaagaagcctggcaacagaatctgcttctggtggggcctcagcctgctcccacttagggtggagggtgaaggggagccatgtgtgcagagggcacagtgggagaggaagccaaagggagggaggggccacgctcttttaacacctggctcacgcaggaactaattgagcaagggcccgctcatgactggcaggtggggtcggcaggaagcca

SEQ ID NO: 118435 - DNA, 366 bp, Homo sapiens
tagtgtttatccctccttatagggtgcaaaaagtcccttgtgcttagtgagtctcagttaatacctacaatggatgatgagtctccagcaagggattaatgacttataaatcattggaggcatggtggctccaagttatatgtacatattagcacatgtgtccaagacctttctttttctctctccttctttctttcaccctttgttttcttttttttttttaattatactttaagttttagggtacatgtgcacattgtgcaggttagttacatatgtatacatatgccatgctggtgcgctgcacccactaactcgtcatctagcattaggtatatctcccgatgctatccctcccccctcccc

SEQ ID NO: 118436 - DNA, 408 bp, Homo sapiens
ctcagattcaaaacagtcgagggctagatataaaactttatattaaccttaagttaaaccattatcaagagttagaattacgactatgacctaggataaaatgagtaaaactagggattgtttccttctagttttgtttgtttgtttgtttgttttttctgagacagagtctcgctctgttgcccaggctggagtgcagtggccgatctcggctcaccacctctgcattcaagcgattcgcctgcttcagcccgcgcctgtcaccttctagttttatactatgatttcagaagataagaatattggttcctatgaccttccttgctagatggtaaatttcataaggccaaggggccatagtctcatttttatcctctccttgccacatgtaacaccaagcactatacc

SEQ ID NO: 118437 - DNA, 552 bp, Homo sapiens
cttaagacacaccataacccagagcaaggccctaactctcttcaactccatgaaggctgagagaggtgaggaagctgcagaagaaaagtgtgaagccagcagaggttggctcatgaggtttaagggaagaagccatctccataatgtacaaatacaaggtgaagcagcaagtgctgctggagaagccggagcaagttctccagaagatctagctcagattattgatgaaggtggccgcactaaacaatagattttctttttgttgttgtttttttgtttttgttgttttgagacacagtctcactctgtcacccagactccatctcaaacaagcccactccagcagggggtgccatatgctagagaatctcctgggccgggcccgaccaagccaggccccgccaagccaagccaagcgggcagggccaggcatggtggctcaggcctgtaatcctaggcctttgggaggccgaggcaggcagatcacttgaggccaggagttcaagaccagcctggccaacatggtgaagccctatctctactaaaaataca

SEQ ID NO: 118438 - DNA, 381 bp, Homo sapiens
caaaaattagtcaggtatggtggcacacgcctgtaactccagctatttgggaggctgagacaggagaatcacttaaaccagtaaggtggaggttgcagtgagctgagatcgcgccattgcactccagcctgggcaacagagccagactccatctcaaacaagcccactccagcagggggtgccatatgctagagaatctcctgggccgggcccgaccaagccaggccccgccaagccaagccaagcgggcagggccaggcatggtggctcaggcctgtaatcctaggcctttgggaggccgaggcaggcagatcacttgaggccaggagttcaagaccagcctggccaacatggtgaagccctatctctactaaaaataca

SEQ ID NO: 118439 - DNA, 227 bp, Homo sapiens
tttcaaatcacatcacatctaatttaacttttaattttaagggactggtccagatagtagctgagaaccattgtggagacacaaaatgggaacaagtttcctaagaaagctaacaggccatctggggcataatctaacaatgaatctcatctaaacccaatgtcccttggaatgaagtttttcctcttaggattaagacatttagttctatctcttgcctagaactt

SEQ ID NO: 118440 - DNA, 379 bp, Homo sapiens
cacactcacctctctctccaggccccccgggttccctccgcctctcttgctgcctgttctctccttttgcaggttgcgtttattggcttatctctgggggttggtgctcttccttgttttcatggaaactgcatggccccaagaggcccaagcagctttgagctgcaagggcaggatcatgcaggccaccgctgccctgccgcttagccacagggcactatttctgactcggtttattagagacatggtgtggcagtctctagaccccacagtcgggctggcatccggggacaggaccaacatccccacaccccagaggcgaactagtggtgagtgtaaagagcccctctccaggggaagacagccagccgggtgcagt

SEQ ID NO: 118441 - DNA, 790 bp, Homo sapiens
tatgcctctacttcattccttcatgtgacaactaatgaaaaaacagatggaccctgcttgcaaaaccataggtactaaaaaacaaactccagggccacttcagcctcttgagtagctgggattacaagcacaagccactgcactgggtaagttcatacactgtgtgtgtgcttgggtgtgtgtgtgtcagggtctcattctgtggctcaggctggaaagcagtgatgcaattatagctaactgcagcacgagccactgcactggctaagttcatacacacacacgtgtgtgtgtgtgtgtgtgtgtgagattctgtggctcaggctggagtgcagtgacacaattatagctcactgcagcatgagccactgcactggctaagttcgtgtgtgtgcgcgcatgtgtgtgtgtgtgtgtgtgtcattctgtggctcaggttggagtgcagtgatgcaattatagctcatggcagcacgagccactgcactaagttcatacacgtgtgtacgtgtgtgtgtgtttgtgtcattctgtggctcaggctggagtgcagtgatgcaattatagctcactgcagcctgcaactcctggacccaagtgattttttacctcagcctcccaagtagccaggactacaaatgtcaaagtgtgggactacaggcatgagccctatacccagcctaatttcacacccttttaagcctgttaaaacatcatgtgacattctaaaatttttcaaatataagcaacttattttctttaagtggagaatcataaatgctcagattaa

SEQ ID NO: 118442 - DNA, 412 bp, Homo sapiens
taaacgcaccaatcaacgacctgtcaaaacaggccactcggctctaccaataagcaggatgtgggtggggccagataagagaataaaagcaggctgcccgagccagcattggcaactcgctcgggtccccttccacgctgtgggagctttgttctttgcaataaatcttgctactgctcactctttgagtccacgctgcttttatgagctgtaacactcaccgcgaagatctgcagcttcactcctgagcccagcgagaccacgagcccaccgggaagaacgaacaactccagacgcgctgccttaagagccgtaacactcactgtgaaggtctgcagcttcactcttgagccagcgagaccacgaacccactagaaggaagaaactccgaacacatctgaacatcagaagg

SEQ ID NO: 118443 - DNA, 103 bp, Homo sapiens
ttcacttacatttaaatccttatttaggcatgtgtgcagccttaatttccatattttaagctatattgcaggttacttatagcaatgctagaattcagtgaaa

SEQ ID NO: 118444 - DNA, 458 bp, Homo sapiens
acatttattgcttgctatgtgccatgtaatagggaataaatctaaatctccatggacttacattttagtgaaggaaactagacaataaagataaatttgtaaatgcagatagtaggtcaaatggtagaaagttctctatgaaaaatagttcactcctgtaatcccagcattttgggaggccgaggcgagcgaattgcctgaggtcaggagtttcagaccagccacatttcagcgttttaagtgtttaacgttaacacacacatgtcccatgctgacaatagcgtgtcatggacggcctgctgttagtgatgacctgacctgccacacaatgaacggagatgttcttcattgacgataatgtgggtgtccgaatcaggatccacaggtcagtgtcccagctccaccattgactagctgtgtgattccgatggagccaaccgtggactagtgggtaccga

SEQ ID NO: 118445 - DNA, 342 bp, Homo sapiens
ggctgaccatgaggatccccacactgggtcgagttccgtcacttgttacatgtatgactctgagcaagatacttaaacatctaacatgaggaaagagcataagataactaatataccatctgttccacaccacaccattgttggttgccaattgtcaggattaaatgttagacagcagcatcttaagtatcaggtccataccaatacacaagcaagatttgtcaaatgactaagtggaaaaatgaaaaagatagtctttctttttcattctccttgccctccaccccactttgatttccctcttttcacttttattcttttttttctttttttttttttttg

SEQ ID NO: 118446 - DNA, 431 bp, Homo sapiens
  misc_feature (192)..(192): n is a, c, g, or t
  misc_feature (231)..(231): n is a, c, g, or t
  misc_feature (297)..(297): n is a, c, g, or t
  misc_feature (383)..(383): n is a, c, g, or t
  misc_feature (395)..(395): n is a, c, g, or t
  misc_feature (429)..(429): n is a, c, g, or t
tgaactgatatatttaattagatccttaaagcccataggatttatactggtcatttctgtcaattgtgaatctgctcatacttgttcttcatgaaactatggaataatttttcatgtattttcatgtgtcaatctgaaaagaaacttaggttctccagaacagaggagtttatttgaaaatagcagaggcgngtggatcatgaggtcaggagatcgaggccatcctggcanacatggtgaaaccccatctctactaaaaatacaaaaattaaccaggcgtggcggcatgcgctggtnaatcccagctacttgggaggctgaggcaggagaatcacttggaacccgggaattcagaggttgcagtgagctggagatcacgccantgcactccagcngggcaacagagccaagattgccttttcaaaaaanat

SEQ ID NO: 118447 - DNA, 268 bp, Homo sapiens
ttcactgttaaggtctacagcaaaccaatcctcttcctccgttagtacgagttccggccaatgacgttcgccctcttaggtttttttttttagcccgccctccaaaagcgtgacagccgttgggtcataagtctacagggcagaatgttcacgtggcctatttcacgacccagagttcctctgaccagagggtttttttttttccttttccttttttttttttttcctgcagggaggcattatgggtttgtggtttttttcccccccc

SEQ ID NO: 118448 - DNA, 484 bp, Homo sapiens
tttccctttctcccatctacctctcccgtttttctccctcatgacattgatttgttgaaaagaatggtcggttcatctgtacctcatactgagttttttttattgcttcctcaagatagcatgtaatttcttgatcttccatatgtcttacaaactaagtctctgaagttaattaaaattcggatttaatattttagacaaaaaatgtcaatagcaacatgcttgatattgaagcacatcaggaagcacatcttttttggatcacttttaatgatactaagaataatagctaggttagtgatagtctaatccttccaatgtaaagttatattcttttagcttgaggccaactagaaatctgtggcatcatactttggctccatgggaatatccaattcccaaacatttttgtctgacagttttagcacccattaatgatcctggcccaaatcaattattcataacaggttgtaacaaattgtca

SEQ ID NO: 118449 - DNA, 616 bp, Homo sapiens
ggggggagggatagcattaggagatatacctaatgataaatgacgagttaatgggtgcagcacaccaacatggcacatgtatacatatgtaacaaacctgcacattgtgcacatgtaccctaaaacttaaagtataataataataaaactaaataaataaataaatctacgggtggatttttcagatgcactggcagagcaaatatcggttttatataaaaagtcagcataagccaattggagaaatgtgagggaatgcttctaactacttcattacatcctaatcacaaaagcagaaaggacaatggataaagacaaaagcaaatgtacattatcacattttggccctatacaactattaggacaagagaggaaggagaaaagcaggcccacgtcagtttaaaaatgccatacactgcactccaggtctggtaatctggctcaaccagattgaggctggtaacctggctcaaccagttctgcgatttcacccaagaacagaagacagcaagagaaactcactttgaccccctatgattccatctccaacccgaccaatcagcacaccccacttcccaagcctctccccaccaaattatccttaaaaactctgatc

SEQ ID NO: 118450 - DNA, 357 bp, Homo sapiens
tctatggaagtcctttgaaaacagaggtgtatgggttttttttttttcttctaatgtgtactctgtaagagtagaggcctactcttggtacttgctgtgttaccagagcccagaacagagcctggcccaagggagtggctccctaggtatttgctgaatgactggataaatgaaggaacaaacaggcactctccctaaattagcagagttcttcttctcaagaagtactattgtgctaagaatgtcttcagttcacttttctcttgggcacaatcttagcaaaaactgggaattgcatcattaaccccaagatagacagacagatgcatacacacacacacacacacacacacacac

SEQ ID NO: 118451 - DNA, 373 bp, Homo sapiens
aaggctccctaaggcctaggcacagaaccgacccatggatacttccatccacataccactggctaagcaagtcacatggtagaagccagcatcaaagggtgggtatactgggttgaatagtgtctcccaaaatatatgtttcttggaacctcggaacatgactttacttggaaaaagggtctttgcagatgtaattagttaagatgaggtcgtactagagtagggtgggccataaatccaatatgactcatgtccttctaaaaagagaagagacaagggaagcaaagacacaaaggagatggccatgcaaagatggaggccaagatgggagtaacgctgccacgagccaaggagtgctgagggttgctgagaa

SEQ ID NO: 118452 - DNA, 718 bp, Homo sapiens
gaaagttatttttaaagacatttttatatatacacacattcaactttcgtaaagtttatattcagctttttatagtacatctgacattgtagaaaagcattttcttatatatagttgaaatatatattcaactttgatttagtaaagtatatgaaaaacataatttacattcagcattttatagtgtatgtttatattcagctttttatagtatatgtgaaatcctagaaaagtattattttcctgaataagaaccaggaagaaactgattaaagagctataccacataatttctctagtactagattatcttacagtcttctacctcttcaagatacaaaagtcatggctgtgaggctatcattacccttttaccaaagttggaaaaggacagcatccaaaataagtcagctataaaaaaaagtaaagtcggccgggtgcggtggctcatgcctgtaatcccagcactttgggaggctgaggcaggcggatcacttgaggtcgggagttcgagaccagcttggtcaacatgatgaaaccccttctctactaaaaatacaaaaactagccaggcgagatggcacgtgcctgcagtcccagttagtcaggaggctgaggcacgagactagcttgaacccaggagacagaggttgtagtgagctgagatcgcaccactgcattccagcctgggcgccagggcaagactctctcaggaaaa

SEQ ID NO: 118453 - DNA, 429 bp, Homo sapiens
aggactcctgtctcctgagcccacagtccgatcaaagagagagccaaagaaataacaacggtgcctggcgagaatgttgggggagccaggttccggctgcaacagggcagagcacggggaaggttccctccgcctggggcaggcagggtaaacctccccacagaggggacagctatgaggagactcagatgccaaataggaatcttttcagccacgtgtcgtgactcatgcctgtattcctttttttttttttaaagacgggtctcactctgctgcccaggctcaagtgcagtggtgtaatcatggcttactgcagcctccaactcctgtgctcaggctatccgcctgcctcagcctcccaagcagctaggactacaggcacacaccaccacacctagctaatctgttcagttttggtagagatggggg

SEQ ID NO: 118454 - DNA, 382 bp, Homo sapiens
tcatgaatgtcaatcatatgctgtctcaagaagaaaaagaaaatccaaataaacctataacaagaaaagaaatttaatcagtaatcaaaaacctcccgacaaagcaaagcccaggaccagatggcttcactggtgaattctcccaaacatttaaagaagaattaataccaatccttttcaactcattctatgaagccagcatttttctggtaccaaagctagaccaagacattgccagaaaagataactacagaccaatacaaatgcatgaatatagaaagcaaaaattttcaaaaatgtactagcaaaccaaatctttttttttttttctttctttctttcttttttggaaacagcgtatcactctgtcactcaggctgga

SEQ ID NO: 118455 - DNA, 424 bp, Homo sapiens
gctgcttttattattccacattgtattcataaatcataacattacattgtaccctataaatatatacaactataatctgttaattgccaatcaaacattttttaaaaaagagtctctagaagcttattcataatgccctcaaccggtaacaacccagtttatccaaatgtcatgcagtaaatatgctagtagaattgattggcatatttacataatggagtattatatagcaatgaaaagaaccaactactgctacatgttaataacatggatgaatcttacagacataatcttgaaagaaagaagccatgccgggcgcggtggctcatgcctgtaatcccagcattttgggaggccaaggcgggtggatcacaaggtcaggagatcaagaccatcctggctaacatggtgaaaccccagctct

SEQ ID NO: 118456 - DNA, 608 bp, Homo sapiens
gctttttcatttctctctgacaatgatttctttgcatggtacttgattttctaaatgcttttttcaatggatactatactctggactcatgcttaggtcatatttgtgcagggatttttaaccttagcaccattggcatttgggacaagatatttcttgttgtgggggctgtcctgagttctgtaggtgtttaacagcatctgtgacctctgcctactagattccagtagcacccctgccaagccacccaagttgtgttaaccaaaaccatctctaaacattgccaaatgtctcctgaggggcagaatcacatctggtcgagagtcacttttttagaggggacttcagtatgtgctgccatagaaaactgtgatttgttatgttagtatttcttggagagagccatgacagttactaatcaatactttctagacttgtctttttttttttttttttttaaggcagagtcttactctgtcacccaggctggagtgcaatggcacgatcttggcttactgcaacctctgcctcctgggttcaagcgattctcctgtctcagcccctcagttagctggaattacaggagcatgccgccatgcccagctaat

SEQ ID NO: 118457 - DNA, 183 bp, Homo sapiens
cgcccgctcactctttggggccactgtccatgatggccgcattatcgtggcagctggggtcaccgacacagggctgaccagttctgccgaagtgtacagcatcacagacaacaagtgggcacccttcgaggccttcccacaggagcgtagctcactcagcctggtcagcctggtgggtaccct

SEQ ID NO: 118458 - DNA, 350 bp, Homo sapiens
taagcctcgacacacaagagaggtcatgaatatcattactaatatttctatataataattagcaagaatttaccctttgccaagccctggaattttaacatgcacaataacctcatgaagttggcatcgccatccccatggtacagaaccaggattcagagatggtgggtaactcacccagggttacctagttagcatcaggggccaagagaagagataaccgggctaagtaggtaatggaaagtgatctcttagctcagttttcatatagaaatttggagaaaggcagggactgaaatgtgaaatctctctgcagtggtggttttgccgctcgaagatgggttttcccc

SEQ ID NO: 118459 - DNA, 384 bp, Homo sapiens
gtagcacttaagtgcagcttgtaagaaattgctgtggttcatcagtagatcaccacctttggtgctcatcagaatcattttgtaaggatttaaaaattttttcggctgggcaccaggtggctcacacctgttatcccagcacttggggaggtggaggcaggaggatctcttgagctcagaagttcaagaccagcttgggcaacatagctagatccctgtctctacaaaaaaaatttaaaaggtagctgcgtggtggcttgcacctatagtcccagctacttgggaggctgaggtgagaggatcacttgagcccaggaggtggaagctgcagtgagccattagtgcaccactctactccagcctgagtgacagagcaagacccta

SEQ ID NO: 118460 - DNA, 367 bp, Homo sapiens
ttcaccttttacctatctgttgcacagaacaccatgaaacgtactgtgaggatgctggtctaggtatgaatctttgtgtaataaagttggcttccacatagaagcgttattggaaatctcagttactgtaaggtagcatcagaggtactggaagaaaagaaagtgacatgatcttaggtagcagcatgtctagagacccaaagttcactccatgtggtggtatgtcagaatttccttccttctaaggctgaatgaaaccttgaggacatttatgctaagtgaaataagctggttactaaaactgtatgattccacttatgtgaggcatttagaatagttaaaattgtagaggcaaaaagtagaatgg

SEQ ID NO: 118461 - DNA, 652 bp, Homo sapiens
attggccttattggaacaatgcaaatgaaaattaggaccggcatgaacatctgtatatacgaacaatcattttattgtagagctttaataaacattactgatctgtagggtgttacttttcttcaacagaaattattcattttttatcttttttttctttttttgctaactgttctgcttgggaattgtagtaagacactgtgttaacttttaatgcagttacttagaacacttctctctcccaaaacctcctgcaggttagccctaagaagcttaccatcattctcatcactgtaatccaccagaggagaagtaaacatggctttggcccttggaaaagtgatttcaactctaactttgtgctaggacattaaaaaaccacagaaagaaagtcagtgcaattatcttgtaggcatacaggctgccaccaagtgtggataatgtctgaccaagctataaatcagcagagcatgacaggccaattcccattatcaagaccctcatggggcatcatagtttcattgtagtggaattttgttattttcagaaacttcataaaattatctagttttcaggactatagatgacatatgtggcatccagttttctggaggtcgtaagaaggtagaaaagacctaccgtggaagtaata

SEQ ID NO: 118462 - DNA, 347 bp, Homo sapiens
tgtaatatttatgtataagtagcagtggataaggtatttaaagaatattgtaatttcagtaattctatttgtgataatctatttttatgaaatactcctaaatataaaaaaagttacacataagaaaaaataaaaaaagttacacgtaagaataccttttactttgatatgtcgatattcattgacttctgcacaaagtgagagaaaactatctcactgtatctatatgtatgagaatagaagtcttcattttaaaaatgtttcctgaatgggatagagagataaagagagtccttgactttgagcaggttagaggaaatacacatgagaaatggtgaataaaagga

SEQ ID NO: 118463 - DNA, 338 bp, Homo sapiens
gagcctgagtctagaatttgtctcctgagttaaaggacatttctggccatggaaacgaagagctcctcacaaaacttcaaagtggcagtttgagaacaaggagaatttttagaggatccttaaactggtcatatttgtaactggcgtctgcactgtatagacaaagtactgagtggcagatttcaggtggctttcagaggtctgatttgtgttcagttacacttttgggtctcacatttctacatcctgcttctctctaattccagtttctacttcatttttcaaaagccctacacagttttccagtaacttttccctgatgctgccctcccacagag

SEQ ID NO: 118464 - DNA, 773 bp, Homo sapiens
tgcacaacatgtttctaaaaacaaatgggtcaatgaagaaattaaatgggaaatttaaaaatatattgggaaaaatgaaaatgtaaatacaacatactaagacttacgggatacagcaaaagcagttctatgaggaatgtttatagcaaaaaaaaaatatcaaaaaagagagaaagatctcaaacaacttaatgttacaactcaaggaaataggaaaaagaacaaactaagcctaaagctaggagagaaaaaatacaataaagatcagagcagggataaagaaatagagactagaaaaataatacaaaacattaacaaaattaagggttgatttttgaaaaaataaaattgacagattttagctaacttaagagaaaaggagagaagggtaaaataaataaaatcagaaattaaaagagaagacagtagaactgataccatggaaataccaaagatcataagagactattataaacaattatgcaccaacatataggacaacctaggagaaatggataaattcctagacatataccacctaccaagaagctgaacagaccaataatgagtaagcagattgaattagtaattcttaagatctcccaccaaaggaaagcacagccatggtagtttcacagctgaattatagtaaacatttaaagaactgatatcaatccttctcaaactcttccagaaaaccaaagaggagggaatactttcaaaccctttttatgagtccagcattgctgtgataccaaagccagacagtgatg

SEQ ID NO: 118465 - DNA, 403 bp, Homo sapiens
gacagtgcttgttctgcaaagttaagtgtgtttctttttgtggaccatgagaacatctccaactgccctttttgacttggccaccagggaactcagcgccatgttctcaaatccagtttagtaactggccttctggcctgtatatctttattctaccttccatcctgctctgttctgcttttacctcttattctagattatctttctttagtcctaattttaaatttatatctataatcttgttatatatatttcttggcatctactgtaagtgggtagtgaacgaataaacaaaatgtgatgaattttagaggactaagaagggcctaagtcacaccaagattcatgctggataatttgtcatcgacccagactgtggttctgcactcgccagtaaccagtt

SEQ ID NO: 118466 - DNA, 497 bp, Homo sapiens
ctcctctctcacagagtaaagctgtccctggccttggcaaatgcagcgtctcacacgaaaatcaatcaagaaggacgtcactcctgaaacaaacttctgctaaactcgaattcacaataataatcccctcatccaatagctgaaccatcatttccacatcctgaaagctttcctgaaaagcaacatgggaagaaaaagtccttatgacagttcctcactcgccttccaaggccaggtgcctttctagaaagatgagctctgctgagcagggcgtccatcttacaacgctgatttccagcgagaggcctcaaggatccaaaagcaaagcattcctgaagctgagttcaacccttctgccccctggggctgtgagtctgaagctgagcctccaactcctgggctcaagctcctccaactcctgagctatgactacaggtgcacaccaccacgcctggccaattattttcttcttttctttctgtcgtgagatagggtct

SEQ ID NO: 118467 - DNA, 444 bp, Homo sapiens
aaatccaaaagatgtagaaagatatatacaatttgcatgagagatattatgatgaaaaatattaaaatgagaacattatgatcccatttttgtataacacatgcacagaactcttaaactgagaatgaaaaattctagaagcctgagtgtctgcagttctggttctggtcacaagatggtgcttgccaggtttactaagctttgtccaggcaaatatttttatgaagtggacaaagcaatgaaatatgttttgtattagccgactatgagacagcatgtagagtgtgattgaaattccattcaaaatattataaatatctagaagaaaaatccccaccaataactgacatgaagactcacacagaaatcataaaaaatgctgctacatagagtctggcccatagtagaaacaagtcaattgttctttcccttctctcttttctc

SEQ ID NO: 118468 - DNA, 733 bp, Homo sapiens
ttcatgtgctttccgggagaaagcaaaggaattcttggtgtctaagaatgaggaaatggtacagagacagactatctggacccttctttccatatacattgatggtgttcaagaagtgtttgagaccagctattgcttgtatccttcccatgaaaaactgcttaatgatggatttagtatgcttctgcgagcatgtcgagaatctgaacttaggacagtattgagcttcctacaagctgttctggccagaatcaggagtatgcatcaacaattgtgtcaggaacttcaaagggacaatgtggacctatttgtacagtcttcattatcggctaaagagcgccaccttgctgcagttgccagtgcactgtggagacatttcttttcatttttgaagagtcagagaatgtcacaggtagtgcctttctcacaacttgcggatgcagctgcagactttactttgctagcaatggacatgccaagcacagctccatcagattttcagcctcagccagttatatcaattattcaactttttggttgggatgatatcatctgccctcaagttgtagcaagatatttaagtcatgtcctacaaaatagcacattatgtgaagcactttctcattcaggctatgtatcttttcaagccttaaccgtaagatcatggattcgttgtgttttgcaaatgtatattaaaaacctctctgggcctgatgatttgctcatagataaa

SEQ ID NO: 118469 - DNA, 382 bp, Homo sapiens
gcctgtgctcacggttggccgtcgtagaagcatggataagcatagcccgtgtgaatctgtgaacctgcccgcgctcgcggttggccgtcgtagaaggccccataagcatagcccgtgtgaatctgtgaacctgcctgtgctcacggttggccgtcgtagaagcctggataagcatagcccgtgtgaatctgtgaacctgcccgcactcgcggttggccatcgtagaagcctggataagcatagcccgtgtgaatctgtgaacctgcccgcactcgcggttggccatcgtagaagtgtggataagcatagcccatgtgaatctgtgaacctgcccgcattcgcggttggccgtcgtagaaggccccataagcatagcccgtgt

SEQ ID NO: 118470 - DNA, 641 bp, Homo sapiens
tctagtatatgtcttttttaacagatacattgttagctgtcagagatctagagaaataaagctgctcggggttccatgtcatatttttcagggagacctattgaacatattgacatccaagtcctgaaattgtttctgtttagattaaatgaattggggagctatattctggatctgatcaatgacttgtaaaccttcctctaagtggcttacataatttcagaataattggaaggtgtctcaccttcaaaatgaaagataaaatgtgagggaaatacttagctaaactttattgttctttagcagttaaaaattcaatgtgtgagtgttgggtcagtgttatgtttctcctcctggattgtttttatgaattgttatctcttctgatcccttcattttatgtccctagcaatttttattacactttctcatattctctctagcctcttaaatactccctcgtttttgtttgcttgtgctccgcaattctgtggagttatgatttttagcatcctgcttctccttggcccagccctcagatagtcctgcgtgaggacctgggtgagggttagagctcacactgctgacagatgcttactttttctatgctttataggcagatatttctcttcatcttcttc

SEQ ID NO: 118471 - DNA, 224 bp, Homo sapiens
attatttcatataacagtttgtaatttgcaaatccctttaactttttctatctgtcttactttctcatcacatggaacaagcatatcatatgttttcttccttttgtaagtgaggaaatttaaatttagaaaggttacatgtcttaccttaagacctacagagttggccgggcgcagtggctcacgcctgtaatcccagcactttgggaggccgaggcgggcgg

SEQ ID NO: 118472 - DNA, 595 bp, Homo sapiens
cagcgtatagctaatttttttcttttatttcttagtttttctcctgcaggaaagattgtgaaatattactgaactaagcaccaaagggatatattttttttcttggacctgcccatgtaagaccttgtgacatattgctgggccctacacctagatgatgtgagttttctgcccgtcaactattttatgtgactctcctctcttatcttcactttgtccataggttagcttttaatatacctttgggcctgggtcatgctaatagaagcaagagtgacttattgttgggcccagcacacaggggatgtgattcttctgcttggttcctgccgaaatggtcattgtgacatatctatgggtcagttggctaaatgacaggactctttttatctttctggagcagtccacagtaggaaatttgacatatcgctgggcccagcacatatctgatgtgactctcctctcatgccaaggccttgcctactgtagtgattgtgccatatagctgggcccagctcctacgttatctgactcctgttttcttcctgagccctatgaaaagattgcattattaaatatttctgggtcttttacc

SEQ ID NO: 118473 - DNA, 363 bp, Homo sapiens
ccacacccctggggccctgctctgcatttggggaactgaggcagggaggggtccacacctctctggtaaccaggtttgcagagtaccagcaacctgcaaagcccttcacttgtccacagtccggagaggcgggaaggaggcggccagagtgcacccccgcagccacatcactgctgtagactccaggatggccacgcgcggtggctcatgcctgtaatcccataatcccagtactttgggaggccgaggcgggcggatcacctgaggtcaggagtttgagaccagcccggccaacatggcaaaaccctgtctctactaaaatacaaaaattagccgggcgtggtggcgcacgcctgtagtccc

SEQ ID NO: 118474 - DNA, 165 bp, Homo sapiens
cgcttttctttcccggtgaactttcccaactgctgatgttacgtgcactaagcacatgattttcctattcattcccgaatctcacattttaccgggatggtgacatccctgtggggccttgtgggctctgagctcatctacacccaatcctagtcagctctgctg

SEQ ID NO: 118475 - DNA, 731 bp, Homo sapiens
agggagacatgagacattaatcaatatgtaagaagtacattagttccagaaagaaaggtggagactgctcaaatcaaggctcccaggctcaaagcactgggggcttccaggtcacagataggtgagagacagatggttgcattcttttgagtttctggtaagtctttccaaaggaggcaatcagaatatgcatctatctctgtgagcaaaaggatgacttgaatagaatgggaggcagatttgtcctgagcagttcccagcttgaagaggcccaagatactttcctttcacatttaccccattttctttttcaaaatcttttggagaaagcattttgcaagaaaatgagtatctggtctcaggtttcatctgatctctcattgctagataagtaggtccggaaagctcatttttagcaggttgtaaagtctcatgcagtgtgaagagaaaatagggagaaggaaggaagagaaaaaaaaaacagcaaaagaacaatcccagccctggcggggtggctcatgcctgtaatcccaacaatttgggaggctgaggcgggtggatcacctgcggttgggagttcgagaacagcctgaccaacatggagaaactctgtctctactgaaaatacaaaaaactagccaggcatggtggctcatgcctgtaatcccagctactcaggaggctgagacaggagaatcacttgaacccaggaggcggaggttgcagcaacc

SEQ ID NO: 118476 - DNA, 872 bp, Homo sapiens
gttttgttgggggctgtagcaaaaccatcctgacatggatgcttactcagagtcacccacttccttgctgaatccatgggtgtctgatgtagtgctgctacagaccttttccttttgtcctttcctctgttgctgtggatttgatcatctcacataggacccaaactgtcaccctgtgctcaaagacttaaggcttcctttctctcattgctagcccctagggagtagagtttcttggtctccttgctaaaaaccagttcctttaggaaacaaaccaaaacaaaacaaacttataaaaaggaaaatatctcttaagcatggtactaaaatttatttaaattaaatagatttctgtggacttacctgggaatgaaacaatttataaatattggtccaatgagatactattttctaaatttcaaaaaactaatttacaaacttaactgggaaattttatttttaccaggaactgtttgaagtcagattctggtttccagctagtcttccatttttataaatttatgtacatttatatataaatataaatcataaaaacaaaggtaaaaatacacattataaatatgtatacatgcatgaccttttgccattataatatatattcatatatatatatgtatatacattgtacatatacaagtatataaggcaggtgagaaggataacagtaagtaaaaaagcttgtgtacttacgccatgctaacataagggctagcaataaggctcaccgggacactgtaataggatacttgacactaaaagtacatatgactacaacataacatcggcgagacgctgagaagcacggacccaaccaagaaaaacagacacacacaagaacacaacgaacccac

SEQ ID NO: 118477 - DNA, 303 bp, Homo sapiens
catgattgccgacgctgcattcagaagacagacaagatgcgattcctggttcagaggaactaggtctgctccgcaggtggggaggggaggtcaggtgtggcaacatggtgacaatatcatgtagcaggttgtaaaacagagctaagagtcatgggccatggaacacaggcgggagctgcagcctggactgggcaggtggtgcatgtggggttgcgtttgttgttctaaagggcagatgggcttttaccagcagaagaggagagaagctcatttaggttgaggcatgagtaaagggatggcgat

SEQ ID NO: 118478 - DNA, 174 bp, Homo sapiens
tgctaccgggctggcgggagctgctgttgaacccatgtcctgtcaccagcagtagatgctcactcagaggccagcccaggggccacttggcaggggtggactctgcctctctgctcacaggggacgagtcctcaaagccatctccagaatgaaataagaacaacacaaagctgg

SEQ ID NO: 118479 - DNA, 781 bp, Homo sapiens
cagagttataaaaagagaacaatcatttttatatccaaaaatggaactgttcgcatctgtattatttcttccatagcactgaccatgtttgaatctccttacagcctgcgagatccccctttctttctttgttcttcatgtgagtcagcaatgcctgggagtagttttgctttttcacagatggtttgtttattaagcactctacacagttgtgtcaaggctgtgattccactccaggaggagggaagatgaaataaaaacaaaacaaaatagtcaaatgagaagactaacccacttgggccagagagactggaaagaggagggaaaggaaggggagggaaagggagaaaaggaggaaataaatcagtgattgagtgaggcaaacaccttgagatctctcatggctttcccttttggctttcctaagagctccttcatctttaaatgggcgatctcataagtcagtggtgtggatttcaataaattataaatattaagtgccttatgcagtaggcacacatgttatggaattaatcgttttgtttgacaatgcttaataccctaattctctcacccagtaaaaccaacacacacacacacacacacacacacacacacacacacacacacactctctctctctctctctctctttcctttaggggaacggtttagcctcaggttataaaatataaggattccatttccttctatggttttgtactattcatctcttttcattctgtattaatatgtatgtctaaagcctaagagaacttac

SEQ ID NO: 118480 - DNA, 514 bp, Homo sapiens
attatgtgatgaatcacatttatttatgtttgttaaaccaaacttgcatccaggaatcaatattgcctgcctgaccgtggtggattagcatcttaatgtgctgctggatttgatttgttagtattttgctgaggatttttgtgtctatgtttatcaggatacttagcacaagttttcttttttctttgtatctctgccaggttttggtatcagaatgatgctgacctcatagaatgagttagggagaagtccctcctccttgattttttggaatagttttgttggttttgtaccagctctttcttttatgtctggtagaatttggctgtgaatccgtatgtcccagggctttttcttgttggtagcttattacagaatcaattttagaactcattattggtctgttcaggatttcagtttcttcctggttcaatcttgggagatggtatgcttcctggaatttattctttttttttctaggttttttagtttgtgtgcatagtggtgttagtaa

SEQ ID NO: 118481 - DNA, 513 bp, Homo sapiens
agaggctgcctgcattccttgtcatgtggcctgctccatcttcaagccacaatagctcattaaatatttctagtgcttcagatttctagctttctctttttccatcaaccaaaaatctttctgcttttaaaaggttcatgtggctaatctccctttctttaagtcaactgtttcatataacataagctaatcataagagtaaaacccatcatatttacagtcccagggcattttagaattctgcctgctgcagcttcattggtcaattctatcaactgtagttacaatagccaaaacaattttgaaaaaaaagaataaatttgaggatttataccatctgatttcaaaacttgctatatagctacagaaatcaagacactgttgtattggcataaagataggcatatagcttaacagaatagaatcgacagaaatagagtttatatttacatttgaaggttttacatttatagtcaatttttgacaaaggtaccaacatcgttcaatagagaa

SEQ ID NO: 118482 - DNA, 382 bp, Homo sapiens
ctgaagtgcagtggtgcaatctcagcttaatgcagcctctgcctcatggatttaagcaattctcctgcctcagtctcccaagtagttgggactacaggcagatgccaccatactcggctaatttttgtagctttagtagagatcaaatttcaccatgttggccaggctcgaactcctgacctcaagtgattctcccacctgggcctcccaaagtgctgggaatacaggaagaattaatacccaaggggtgctcctagaatattatttttttaacaaggctctggtttggcatttaccttcctgcgaactttgccctgggcatttctttctctgtttctttatcaacatagaaacttactctcttaagttggtttacctcccg

SEQ ID NO: 118483 - DNA, 455 bp, Homo sapiens
gcacgagatgtgaatggatagctaagtgtcactggacctaagaagaggatcagtagcctgaccaaggaccgtgtggagaattcagagcacgtggccccactgatctatcattttagattcaattccccatccaagctgccaagagcttttaagattctgtttcttggccgggcacggtggctcacacctataatcccagcactttgggaggctgaggccagcggatcacgaggtcaggagatcgagatcatcctggctaacacggtgaaaccccgtctgtattaaagaaaatacaaaaaattagccgggcgtggcagcacacgcctgtagtcccagctactcgggaggctgaggcgggagaatggcgtgaacccgggaggtgcagtttgcagtgagtcgagatcgtgacactgtggtccggcctgggcgaaagaacgagactccgtctcaaaaaa

SEQ ID NO: 118484 - DNA, 437 bp, Homo sapiens
gtgctttgtgatgcccaggtgcaaggattgcttgaggccgggagatcaagaccagcctgggtgacagagcaagaccctgtctgtacacaaaaaagagaccctgtctctacaaaaagaaattttctcgctctgctgcccaggctggagtgcagcagcgtgatctcggctcactgcaacccttgcctcctgggttcaagtgattctcctccctcagcctcccaggtagctgggactacaggcatgagccaccacatctgtcctctacaaaaaatttttttaaaaattagctgggggtgatggtatgcgctggtagtcttagctaccttggaggctgaggcaagaggatggcttgagtccaggagtctgaggctgcagtgagctgtgattgcacaactgcactgcagcttgcatgacagagcaaggcccagtctcaaaaa

SEQ ID NO: 118485 - DNA, 311 bp, Homo sapiens
ctgtctctttactaaaatatcctattttgaccctttctttgaattgtaactagttttgtaattacacagttatatgtctatttttgcatatacaatgttaactttttatcagtaaagcctcatggctcaacttgtagatcaacaaccatagatctacagttgttgtgatatgcaaattgtcactgcctcttcctttgtcctttcagcactaacccagcatttttggaaggaacctggttttctgagaatagcaatatgtttcaggccattctgatgttcccttactcccacacatggaattagcttctttg

SEQ ID NO: 118486 - DNA, 473 bp, Homo sapiens
taaaatacttacattaataattattattaattatctgacaaatgctaatgtatcagattaagcaggcagagataagagttgtaaggaatggatcaaatgacaaataaattttagtttgttatgggagggagctggaagtgtagaagaaaggaagggcttggtatacttctggggaactcaggcctgggaagaaccggagtgtaggatcaacttgatgggtgggacaaaggggagtaaatagccaggggtagaaccaatggtagacttcatgattatgcttaacgtgaatcttgatacttagattcttttctcagggaggtgatattatctataaagaaagtggaaaggcagataagaaagatcaagtttgttgagcttgaaggagtattgagaatccagtcaaagatatttaagagggagtctgagatatggaatagagatgtggcaaatcattgatttattcgcctaaacat

SEQ ID NO: 118487 - DNA, 728 bp, Homo sapiens
atcgtggctaagtagttactgctgggccggaaggtggtagtcgtacgctgcgagggcatcaacatctctggcaatttctacagaaacaagttgaagaatctggctttcctcggcaagcggatgaacaccaacccttttcgaagcgcctaccacttccgggcccccagccgcatcttctggccgacagtgcgaggcatacatgctgcgccacaagaccaagcgaggccatgcctccctggactgcctcaaggtgtttgacggcatcccaccgccctacgataagaaaaagcggatggtggttcctgctgccctcaaggtcgtgcgtctgaagcctacaagaaagtttgcccttctggggcgacaggctcaagaggttaggtggaagtaccaggcagtgacagccaccctggaggagaagaggaaggagaaagccaagatccactactggaagaagaaacagctcatgaggctacggaaacaggccgagaagaacgtgaagaaaaactgacaaatacacagaggtcctcaagacccacggactcctggtctgagcccagtaaagactgttaatttctcatgcttggcctggcctgcccttcctccgtcgtcgccctggaatgtgcgggacccaggggcagcagcagtccaggtgccacaggcagcctgggacataggaaagggtcttagttactgccttctgacgttacttgaaagcgctcggagaattg

SEQ ID NO: 118488 - DNA, 637 bp, Homo sapiens
ttagaagacaggaataagcttcaggagtaagcattctgaagagagcttggacgttgttggcaactggcggggacaagctgagcccatggagatcacagagcaggcgcccaattaatgtctgttgatgattcattttttcattcaacaaacatttaatgaggcctacaatgtgcaccggattaggcactgtgaatacaaagatgagtaaggcactgtccttgcccttaaggaatttaaagtctggtagacgagagccatagacacggacaatgataatacaacctgctaagtgctaggacacttagcaggttgtattatattccatccgagtaggatttcttcagaggagcaccactccaggttgctgctggatccatgaagtcctcccaggcaccagggtctgctgttgtttttgtcacgtgctgggtgtcccaagatctaacaataatagctgtaattaatgtatagagtgcctatgacaaacactttacaaatatcttcatggaaactctgaaaattaatagttatattagaggaagaaactgaagttcaacaagtttaagtcacacagccagcaagcagttgaattaggtttcaaatccagttttgacaaagtctaatgcatttttctgttttc

SEQ ID NO: 118489 - DNA, 322 bp, Homo sapiens
ccggctccagccctgcacccccgacccccggcctcaggtgcagctccgcagccatccccggaccagggcgggcacttggcctgttgctcagcgcaaccaccctcgccctcccgagccatgcacagggagacaagcgtccggccccggccccccaggcctccctgcagcaccccgtaatgtaatgcactggggcgggggaggcgggggaggcggcggcggcggcaaccgcggaggcgcggcggcagccgcactgccccaatctagacacatccagaagaggaggaaaatggctccgagcagggaccgcctgctgcactttggg

SEQ ID NO: 118490 - DNA, 427 bp, Homo sapiens
ttcagatggagggtgtgttaggaagtaaggagaggcggataggcaaggtacattttgcatggggcaaattataaataatttgtggtaagagaatgaattctagtgaattaaagagggtcaatttttttttaacattcttcctatttcctccattaaatttggaatgagctctctgactgctttgaacaacagattataagaagatgctgtgccattttccatgcccagaatttaggagcctgctagcttctacaacctgttccttggaaaacttgctctaaaaaacctgccaccaccattctctaagagcccaaaccacatagagggtcacatgtagacactccagctgacagccctagcagagccccagctgagctctcatgcaaagagaacatccacggccaccacgtgcaggagccctcttgga

SEQ ID NO: 118491 - DNA, 700 bp, Homo sapiens
ggcgtccgtctgccgcctcaccgcttggccccgcccctcgccacctgcccggccaggcgcgccggggccgtcccagtacgtcgccctgtttacgctggctctttctcccagtcttttttcgttttaagatgtgagaagagatgggattcttcaatcaaggccacaagcgggaaatcagtctgcaggaccgatgccagcaggctcacgcaccgagaacggctactccgcccagctgagaagcgcggggccctgacgcgggcgcgctcctcgcattcttccgttgggctgggaggctggagggcaggcggcggcggccgcgcatgcgccgggagcggccggagctgcgggacgcggagggccgactgcgcctgcgcgctggttgcctggttacggcgtggccgcgggcaccgagcggcgccggaagttggtcgatggctgccgccagtccctggccagcgtcctggggtttccccgacgcatcctctactgtcccttcgctctgcacagaggcccgggcagggaggggcggcccggccaccgcgcggagccgggtgtccgccgactcgcaagggggacgcgcgggctcctcgtccccaagctccgccctgcgcctttgctgcgccgggccctcccaggcccaccctggccccagccctgctgtcctcccggggaggtgcggcctactcggttcgttcccccg

SEQ ID NO: 118492 - DNA, 313 bp, Homo sapiens
gaaagacagtgttgtaactgataaaggatgggaggtataaaaatagaaactgaggccgggcacggtggctcacgcctgtaatctcagcactttgggaggccgaggtgaacggatcacgaggtcaggagttcgagaccagcctggccaacatggtgaaatgacgtctctactaaaaatacaaaaattagccgggcatgatggcacgtgccagaggctgaggcaggagaatcacttgaacctgggaggtggaggttgcagtgagctgagatcatgccattgcactccagcctgggcaacagtgagactccgtctc

SEQ ID NO: 118493 - DNA, 211 bp, Homo sapiens
accaactgggtagggacagctgggccggagacaattaagctctgttactgttcagagaagaatcgggctgtgctaagggcataattagcattgtgctcagaggagcagccacccattggaggagcagacaggcctgggctgagaaaagggcctggggggtgccgatgaatagcgaagtgccgatgaatagcgaggtgccgatgaatagcga

SEQ ID NO: 118494 - DNA, 267 bp, Homo sapiens
tgctcacagcagtgcttaaaaaaaaataactattattaatagttgtaatttatatatctatatatttacatatgtagatatataactgtatatttcatatatgatatctactttcttatatgtatataagctttgatataataatataagctttttttttttttttttgagatggagtctcactctgtatcccaagctggcgtgcagtggcacaatctcagctcactgcaaccttcacctctgggattcaaatggttctcctgcctc

SEQ ID NO: 118495 - DNA, 622 bp, Homo sapiens
acaaatttaagctaaatggtggcatgtgagctgaagccatgactactcctggggcttttgcacagaagctatagagcctgagggccaaagttttaatggcacggtggctctaggaaggaggcctggactcaaggtggaattgagtgctctggagccttgaaggtctgactttttcatgaaaaggggctagaaaaacttcaatacttggagaaatagagaggaagcttgacttgactggaaaaaaagttaccagcaagaacttaaacacatgggattgtactatatatggttgtggaatctgtattttttattacttatgaggtatgagacccttcaacctgaaaaattaacgtaagaactggtctagtaccatggaaacctctactgcgaacgcaaagtcattccataggcatatttcaacaacctatacctaacagcactcccacagtgagaatgacctctgaagacgagttcacaatgaaaaactatattcaggaaaccattccaagttggaaataataaaaccatttataagagactataaaaatggtatatttaaaatgattaagatgtcttagtttaggttcacaagaaaaaagaaataaaatgattaagaactaag

SEQ ID NO: 118496 - DNA, 1169 bp, Homo sapiens
gctaatgcttatgtcttcctattcctggtcattttcccttccccaaatgggactcagagaggagagagaaggtagccagctctttgctgataatgtgggaaggagtttatctgtattaaatataatgtgggtttcaaatagctgagtgttcagtctgttccttcctcccccattcccaacctcaccaccccccaccccgacctctgcaaaggggctcaagaaagaacagttgccttgtctgtggttcacatgatcacggactgtgtgggttgaccagacttagatttgttttgtctctttagccaaagtgttctgatgtgaggaatgggggtggaacttgatagagatacatacaatttctttaggtcaaaaaaacaggcaagaaagaactcactaagtcttgccctgcaagtatccaggaacctctcccaccagttctttcatattcctctcttaattccttttttccttctagttctgccatccccttctaactagcttctgttctgttttaatcatccctttctgataggaagggttagtgtcagatatcctgatggtttgatggtggaaggagactaagtagaagactaagcagaagactgggatcttgtagagcagctggtagagggtgtgctccaaatcctcaaagactagatcagaggagagacaggccacacctgctctttcttccagctgtgcctttttagttggagctcctagaagttatagccatacattttaaaaccctctttcccattccagatctccaaatgaattcaactgtttgtccaaccttcattagatagatctctaagatttccctgcatagggaggccctaatccttttcttctggtttctgaaaagagcagaaaactgcctggcgcggtggctcacgcctgtaatcccagcactttgggaggccgaggcaggtggattacttgaggtcaggagttcgagaccagcctggccaacatggtgaaacctcatttctactaaaaatacaaaaaaaaatagctgagtgcggtggcgcacgtctgtaatcccagctactctagaggctgaggcaggagaatcgcttgaactcgggaggcggaggttgcagtgagctgagatcacgccattgcactccagcttgggcaacaagagtgaaactccatccccccca

SEQ ID NO: 118497 - DNA, 1116 bp, Homo sapiens
gctaatgcttatgtcttcctattcctggtcattttcccttccccaaatgggactcagagaggagagagaaggtagccagctctttgctgataatgtgggaaggagtttatctgtattaaatataatgtgggtttcaaatagctgagtgttcagtctgttccttcctcccccattcccaacctcaccaccccccaccccgacctctgcaaaggggctcaagaaagaacagttgccttgtctgtggttcacatgatcacggactgtgtgggttgaccagacttagatttgttttgtctctttagccaaagtgttctgatgtgaggaatgggggtggaacttgatagagatacatacaatttctttaggtcaaaaaaacaggcaagaaagaactcactaagtcttgccctgcaagtatccaggaacctctcccaccagttctttcatattcctctcttaattccttttttccttctagttctgccatccccttctaactagcttctgttctgttttaatcatccctttctgataggaagggttagtgtcagatatcctgatggtttgatggtggaaggagactaagtagaagactaagcagaagactgggatcttgtagagcagctggtagagggtgtgctccaaatcctcaaagactagatcagaggagagacaggccacacctgctctttcttccagctgtgcctttttagttggagctcctagaagttatagccatacattttcttcattagatagatctctaagatttccctgcatagggaggccctaatccttttcttctggtttctgaaaagagcagaaaactgcctggcgcggtggctcacgcctgtaatcccagcactttgggaggccgaggcaggtggattacttgaggtcaggagttcgagaccagcctggccaacatggtgaaacctcatttctactaaaaatacaaaaaaaaatagctgagtgcggtggcgcacgtctgtaatcccagctactctagaggctgaggcaggagaatcgcttgaactcgggaggcggaggttgcagtgagctgagatcacgccattgcactccagcttgggcaacaagagtgaaactccatccccccca

SEQ ID NO: 118498 - DNA, 608 bp, Homo sapiens
tataaagactgctctgagcctcttagcaaaggcagctatcctcagtgactgcctgactgtaagaacatacataaattgggaaatatctatagtatgttagcttattttttttgagcagttcctactccctagcacatatctttgatatgagcaatcctgaagaatagtctactgtgacagagactggctctgttctttctttaaaatgtatcacagctcccagatgccttgcaatttggtgggctcgtgtgactggctgtcaccagcagtgtggaggagggggtgatgtgtgtcacctccaggtggttaagagcttgtgtaacttctccccatcgtgtctgaaggctggatgcagccaaaatttcaatgctttagaaggtagcagaatgattcattggatttgggatgccgaggcgggcagatcacctgaggtcgggagttcgagaccagtcggaccaacatggagtaactccatctctactaaaaatacaaaattagctgggcatggtggcacatgcctgtagtcccagctacttgggaggctgaggcaggagaatcgcttgaacctggaaggcggaggttgtggtgagttgagatcgagccattgc

SEQ ID NO: 118499 - DNA, 359 bp, Homo sapiens
atcacattaaggaagtatgtttccttttattctgagtttaagaagaatttcaaaaatcatttaaaatcattttaaaatcatgaatgatttaaactgtttttcttttcttccatctattgatatgattgttttatttttcacctttattttgttaatgtggcaaattatgtgggttttctgttgaacctctttgcattcctgagataaaactgacttggtcatgatgcattattctttttatgtagctggattcagtttgaaattctttatgcattacaattattaacaccttaaactgaccttttaaaataggctaaaacagtggtttgagttgaggttttttttttttttttttttga

SEQ ID NO: 118500 - DNA, 469 bp, Homo sapiens
aaggcaggatacagtaggttaaaaaggttgtcctgtacagaacacacccacagaaattgcacacatgtaaggaaaattgtggcaggaaagaagcttggctcttttgcctttcttcatttccgcccccaagtttgccttgaacttggaatcttacgttataaacgttgccaaattgcagctccaatcaggaaacagatggttaggcagtaccagaaaacacaaataattgtggggaccatgaacattagttcatgaacattagaaaaccctgatggaaagtttagaactatgtacattttttttttttttggtgaatatcagacttaaataattgcgaaaagaatggtctagaaatattttgctaggtattagaattttgtggtacagtaaacaattaatcaacttctagtttataaaaaatctgctgtgctgtataattcttaaaaataaatttagtcagtgatggatg

SEQ ID NO: 118501 - DNA, 701 bp, Homo sapiens
atcctttttgggaaagaggatctttatggttgaaatccaagcaataaatgtatatgcatgtaagaatgaccattttgtagccgcataataatattgattcagaatcatcattggaatataaaaccatgaagtataagtatgttagggaataggatatttacacaaagcatctcttcacaattacttactaattttaaagggcaaaaggatacctttatagttaaactctggcagatgctaccttaacctagtgatcaaagttactatcaccaataatgggataaactgacgtcacatacctcagtacatcttcacataacatactgagaatgcgtttctgtatcagagaatcatttctgagaatcatttctgtagtattcctgcccaagtgcctaacctgaatctaataatgaagaaacttcagacaagtgaaaattgaggagcattctatgatgcagctagcctctgctctataaaaagtcataaaacacaaggaaaactaagaaatcttcaaggttaaaggagactaaaaccccatgacatctagatgcatggtaatagattataatatgatgataatagatccttggattaccattatggtaatagagccttggctcagggaaaaaaaaattcacaaagggtgttttgggagacagttgacaaaatttgaaaatggattgtatgttagataatattat

SEQ ID NO: 118502 - DNA, 831 bp, Homo sapiens
gattctgtgtgcccaaagaactgtccttggaggagagtttcaaatgtctttcattttaatgtctggccttggtgattgtttaagaagtcccctgaatgaatttttgggtgaactcggggcctagactggctcaggaaatctggcactgagccccatatttactttggccaaacacaatacttgctgtgcagccacattcactatgcactgctcacaccacgcagcttgagagctttgtccctgattcaaatctgctgggtattattcagtctgaaaatttacttttacaccaagcatataaacaaaatgaaatacagtttaagaaatcagctcataacatttacaattaaattcattaatcaaggcagcttatggaaatgccacatgtgaactgtaaactttataaatattcaagtagtgaacaactagacaatcacattggcagctttgtttcagtataagtgatgtagaatattaccatccatcagcttgcagttttgttttaaaacttgttgaaccatgtatatcatcaaaaagaacttttggttacatttctgtttccatatgtttcccatttaccttcctctctagatttatgtgccttcgtactaattagcacctgcactgaattcagaaagcagcacttgaatcaaaccaagtcaagctgtctgtgaaggaaaaaaataccaagttccaagatttcttgttaatggagatgaacagtacactttgttgatgttcttattcacatgtgtcttcttaaagtatgagaatttagtatatgttctttcagtatatgcaaatatatccacatgggtattttcaaactat

SEQ ID NO: 118503 - DNA, 707 bp, Homo sapiens
actcactgctgcctctgcctcctggcttcaagtgattctcctgcctcagcttcccgagtagctgggattacaggtgcccatcaccacgcccagctaatttttgcatttttattagagatggggttttaccatgttggtcaggctggtcttgaactcctgacctcaggtgatctgcccacctccgcctcccaaagtgctgggattacaggcgtgagccactgcgcctggcctgttgttttcttctaaactttttgtagagatggggtctcactatgttgcccaggctcactgtgagctcctggcctcaagtgatcctctgccttggtctcccaaagtgttgggattataagcgtaagccactgtgcccagcctaagggatgcagtgaatattgctaacccatattactatcctataacaagcttcatcaaaaagaattctaatgggctgggcagtggctcatgcctgtaatcttagcactttgggaggctgaagcgagtggatccctcgagcttaggagtacaagaccagcctgggcaacaaagtgagaccctgactatacaaaaaatacaaatattagccgagtgtggtggcatgtgtgtgcagtcccacactttgggaggccggcaggcggatcacgaggtcaggagatcgagatcgttctggctaacatggtgaaactccgtctctactaaaaatacaaaaaatt

SEQ ID NO: 118504 - DNA, 420 bp, Homo sapiens
cgaaagggcgacagccacaattgggcatgttttagtttaagggcagctccgaagagctcccagcatatgacaaaaaatcagaggaaaactaccaatcagattcagggctcactgtcattctcagggtacccactggcaattgtatgttttactacaagtttattttacttacattatatatgggaaaatgtttaagaaattagaattttaacactgaactgctttattagctatttcatttcaactctgatatattctttaataacttttaattatgctttatattaaataatatctacatgattatatcttcccatctctttaacttgtttttaatactttgaacactcaaatttactttctgggagaaaaaagaacgcaaaatgaagacacaatgttttgtgcacgtgaacaaggcca

SEQ ID NO: 118505 - DNA, 687 bp, Homo sapiens
gggcatctctagaaattcaatagctaacttaatgtcaaaagttacatactctctcctcctaacgtcaggactatgttggggatatccactttcatgtcttccatttagcgttgtactggaagttctagctaatgcagtaaggcaaggaagagaagtaaaaggcatccaaattagaaaggaagaagtgaaactttttaattctcagacaatatcattgtctatgcagaaaatccaatggaatccacaaaaaagctactaaaactaataagtgaatttagcaagtggcaggatacaaatcactgtacaaaaatcaattgtatttctctatgctatccacaatcaacaattgatttttaaaaactcatttattatagcatcaaaagatttgaaatacttaggggaaaaaatctgataaaagatgtgcaaggccaggcgcatcggctcatgcctgtaatcccagcactttgggaggctgcagcaggcagatcacttgagcccaggagtttgagaccagcctgggcaacatggcaacctgtttctacaaaaaatacaaaaattagccaggtatggtgacatgtgcctgtagtcccaactgctcaggagtctgaggtgggaggatagtgtgagtccaggaggtggaggttacagtaagctgagatggcgccactgcactccagcctgggcgac

SEQ ID NO: 118506 - DNA, 143 bp, Homo sapiens
ttgtcaacctccagcatcacgaatttaaaatgcaaaaggaaaaaaatactttaagaatagaaaaggccaaatgttggtggcccctggcccattccggcactcccatccagacttgctgcctccatagcccagaccctaggaga

SEQ ID NO: 118507 - DNA, 276 bp, Homo sapiens
acagcttatttacaaggggatttagaaattgcagtgaatacaccatgaggaagatggccttctctcatagaacaatgactcctaattttgtaggattggtacaggagggcgaaggttcacagaaggattgcatattctcaactattgatgtctctttcccttggggatctcatgagttactgctgccatcacagaactgacctcatgggggcaatgctcccaaacccacagcaaccctgaggcaaggctggaacatttactaacgtccagggtaat

SEQ ID NO: 118508 - DNA, 307 bp, Homo sapiens
aagcagtgcaaatctaactagagatttgattccttaggcactaggaaagctcagcttgggggctgtctgcctcatctgagaggaaggaaagtggagatataaacggattaagaggataggagaccaggggacagactggtgtccaaatttgatgcataccacatttgacatttggctaatgaaggttgatggaaaacaacttttactcgattaggatagaaaagttttttaaaaagctgagtgtaattgacatgaattagtgataaatgaccaaaaaaaatacaccactaatctaaaatactttatg

SEQ ID NO: 118509 - DNA, 951 bp, Homo sapiens
attctgttgtcattgaagtctttatgggacattaaagccttaggtctggggtaaaatattgcagcctccagcctctccagcagttacgttcatgccacttctgtgccattggagtaattcatgaatgacactaaggactaatggcttgaggggaagtctttagattataccaaggatcaactgtaaacaaagagaagttttttgttttgtttttaggctccaacttgcctattttattttgtcagctttacccagtttttccacaatatgccaaaccctatctgtaattttgatggctgaactgtatgtatatatgcgcacacagcataaagtgcatattttgttagaactagattaatgccacaatattcagaaaacttctccctgtgttttcaaaaaattgacatattttgtggttagactgaaatgaggtaaatgtacatgttattgtagtactaatggattgttagatatttgctgtaatgttaacagttaatttatgccctgtaaatgaatattgaatatgaaacactgttacagggaaaactgtatagtctgcacaataaatgctgtataggaaacaagccttactccaaataattttttttgctagttcacacctctgagtagttggctctataggtgtgaagaatctagagaatgtataatttcagtgataaactagattataaagtaagtttaattgctgaaaagagtaagctttgccagcttcatatattctcttgttgcctgtttttgcaagacacatttcaggatatgcttttgggagccaatctaatgttacctgtatttgcctctcgtaaaaatcttaagctttgtgatttaaatctaagcaagcaggaagtgacttgagagaccttgtaagtcctgttaggaccagttatccatgatgaataataaggaagaaatttttatatgtgtggggataat

SEQ ID NO: 118510 - DNA, 553 bp, Homo sapiens
ctcggctctaccttgttcgatgctagtttctaaatggtcgccagaaagtccttctaagactttcacagattatattattcacttagctgaagtcgtatcacgatagaagccacttcaccaaggttgaaggatgggagctcaaaagcctcatctaactgttgtcaaatggccccttgatttcaacaagagataacgaacactgtcaccaagagacactgagtaagaagggattctgaagcagtttttctcttttagtcctcatgtcatctgagattctatgagactgcaaattcatcattctaaaaagacctaaggcataaccaagtcagggatttcttttcgtaagcgagagggcactttcttctaagtgaagctggtgtgcaaatttaaaaataaaagggcctttaggataaaaataaaaatgaaagggccttcaaggaattcctcatgctccatgaatcagagcctgaaaaaccactaatctcatccatcctctgcacctttcagatgagaaattcaaagcccataatgcaagtggttgttggcaaggtga

SEQ ID NO: 118511 - DNA, 396 bp, Homo sapiens
gtgatctttttataggctcatttttcttattctgaaacagagacactttatctgattgctcagctgaaagatagtatctggatggacctgctatttgtggcttggtctctttagatttatttgaggaataagaattggagagctgggatgcttgatcatcctcatctaagaccactcgtttgggaatggcctgattatattcactctggtctgtagataaactgtccatggatgatacaccctgtgacttcttcacaggctgatatgctttagcagaaggttgttcctggctacatgaagatgtgggtttttcatgagttatcttagcaccagctttctctccttcccaaaaggatattctgtcactcactcttttgtatttctctctctgcactt

SEQ ID NO: 118512 - DNA, 189 bp, Homo sapiens
tgaatgccatgtttctgttaattggactgtgtcatctcagggaccgttatttattaatagatgctcggagccctggacaagttcatcatgatcaccagaggacttgaaagaggccaagggacagatgggtattgccgagtgtgagggcagtctgcttgaattccaggcacaccctccttgatgatgctg

SEQ ID NO: 118513 - DNA, 415 bp, Homo sapiens
  misc_feature (366)..(366): n is a, c, g, or t
  misc_feature (392)..(392): n is a, c, g, or t
taaattgacaaaaattgtatatgtttactgtctacaacatgatgttttgaaatatgtgtacattgtggaatggtaagtcaagctaattaacatgtattacctcacatacttagcattttttttgtggtaagaacccttaaaatctactcttagcaatttcctttttctatttatttatttatttgagacaagctggagtgcagtggtgcaatttcgcctcactgtaacctccgcgtcctgggctcaagcaattctcatgtctcagctacccagggaggctgaagcaggataatcgcttggaacccgggcggcggagattgccagtgagccgaggtcatgccacttgcacttgcagcctggggcgancagagcgaggattttggcctcaaaantaaacaattaaattttaaaatta

SEQ ID NO: 118514 - DNA, 199 bp, Homo sapiens
aaaatttataatctcagtggggtggaagtggaatgcatataaacataataatcagtattacaaatcagaatttgataaaccctcttaaagacagtgtaaaggaaggatgtttgcagtgtgtcttcttccagaatgtaacttgaatctgtacttggccgcatctctgctgattctgcctgtcagaggcaccatcctttct

SEQ ID NO: 118515 - DNA, 313 bp, Homo sapiens
tacgaatcaggtgataccggtgttatcgatgccactaggtgatgaggtgaggtaatcaaatgacatagaagaggaaggagtccactgccagggtaggtgcagtggagcaagtcttacaatgtgcaggattataactccagcaatgacccctaggctcatgctcattccccaggtggcagtttcagaacacattgctcaggtctcaccctgtaaatgtaggtaccagccttctagttgaccatcagaacacacaacgccaagatcttactccagccacctgccaggacctggagggcaggaggagagttctgcc

SEQ ID NO: 118516 - DNA, 666 bp, Homo sapiens
cagcctcaatttattttatgaagctagtggttctctgataccaaaaccacacaaagataatacaagaaaataatattacaagccaatatccctcagtgatatagacacaaaattttttaacaaaatattactaaatagactgggcacaatggctcacacttgtaatcccaacactttgggaggccgaggcgagcagatcacctgaggtcaggagttcaagaccagcctggccaacatggtgaaaccccatctttgctaaaaatacaaaaattagctgggcatggtggtggctgcctataatcccaactactcggcaggtggaggttgcagtaagcagagatggtgccactgcactccagcctcggcaacagagtgagactctgcctcaaaaaaaaaaaaaaaattactaaatagaatttgccaatatataacaaagaattctatgccatgaccaagtagggattattccagggatgaaggttggttccgtatttgagaatcagtcgatgagatccacacgttaccagctaccgaagataactcacacgatcacatctgtcagtgttgggaaggcccgtgacaagtttaacatctattcatgatttaaacttggaaaaacagagaaggagaggaacttcctccgctggataaagagcatctgtacaa

SEQ ID NO: 118517 - DNA, 469 bp, Homo sapiens
ggaagcacttaggggcaagcaacggtcaccaagcaccacagcacccagaaggtcctgctgaggtcccgctgaccgccccagcgcctgggaaatgcactctgtcaatcaacaccgcaaaacaggctaagatactgtgaaggactcaaactttttttttaaaacagggagagaggttttttttttttaagataatagcatttggtttttcaaatgttcatgaatgatagggcaaatacagaataaattaacaaaggcagtatgaaggaataaattaaaaaaagagagagaaagctctcgtaagcaaaagctgccttccaactacatggaaaaacactctagtgccctaagtaaataaataataaaaggatattgaaacaatacaccctgaaaacgcttgtgccttctctgttctcctgggcagaagcagtgctgacaggtttatgctaccgaggttacagacccagctagc

SEQ ID NO: 118518 - DNA, 412 bp, Homo sapiens
ccaaagaaggttagaatagggcttgtggttctggattagagttagaggcatcaataagaacttatgttcattctttttttgaactttgaatatttctttatgacttctttccttatgtctctgtaaatattgtctgaagttggtagaaccttccccttcaaccccagaagaaatttattgctaattgtcacaataggactgacagctgaattagtgaggagatccacatgcctataggaaaggtgtttttgagcctaccacctgctgttcaggtttgtcccttattaaaaggctgcatactgggctgggcacagtggctcaagcctgtaatcccagcactttgggaggccgaggagggtggatcacctgaggtcaggagttcaagaccagcctggccaacatagcaaaaccc

SEQ ID NO: 118519 - DNA, 475 bp, Homo sapiens
actcattcaagagacacacgcccattcccacacccgctgcacaggaaagagaaagaagtcagactcggaccctgtccccaactgccccaggctgggaaattcaccagcactgcggacagagcaggggataacagcagcatcagaaagacccataaggccataggtttgcagagggaatgcagtccctcagcaaggagcttcagtcggactaaaccagcagaaaaggcggtttccgagtaccatgctcgcacaacagggagcctctttctaggaagtgggatttacaggctgagatgttggagccccacctccctcatttagctgcagaagaggtctgggttggagggagtccagactctggtcctggagttgagtctattcatgttatccatgagaaaacgggggcccagagaggtcaagcaacttgctcagggccacacagctgctcagtggacaagggagactgggagcagct

SEQ ID NO: 118520 - DNA, 374 bp, Homo sapiens
cctgggcactccaccccactgcccagcacatcctgagtgctgctatgggctaggcggcctgggctaagccagctgtgaccaagacacagagtctcagaatcctggggctcccttcagcagggggcaggcacagagaacagaaacggcttatgagaaggtgcaaagagggatacagggaacacagaggcagggcggggatgggggctcactgggaggcagcctccaggctcagcaggacaggggtggaagtgagcccatgaacgcttgtgggactgcattccaggcagagggaacagctggtgccaccagggcagagggacagggcagagggatggagggcctcacatacccctgggagtcctgtggctagtcct

SEQ ID NO: 118521 - DNA, 659 bp, Homo sapiens
agcggccggcggggccccaccgccccgggcagtgaggggcgtagcacctgggccagcagctgctgtgctcaatttctcgcggggccttagctgccttcccgcggggcagggctcgggacctgcagcccgccatgcctgagcctccccgcgctccgtgggctcctgtgcggcccgagcctcccggacgagcgctgccccctgctccatggcgcccagtcccatggaccacccaagggctgaggactgcgggcacatggtgcgggattggcaggcagctccacttgcagccccggtgcgggatccactgggtgaagccagctgggctcctgagtctggtggggacgtggagaacctttatgtctagctcagggattgtaaatacaccaatcggcactctgtatctagctcaaggtttgtaaacacaccaatcagcaccctgtgtctagctcagggtttgtgaatgcaccagttgacactctgtatctagctactctagtggggacgtggaaaacctttgtgtccacactctgtatccggtggggacgtggagaacctttgtgtctagctcaggggttgtaaaggcaccgatcagcgccctgtcaaaacacaccactcggctctaccaatcagcaggttgtggatggggccagataagagaa

SEQ ID NO: 118522 - DNA, 105 bp, Homo sapiens
tcaagatggggaccacagacagactagctggtgagtaaacacaatgctgccatctcttgtgaatctagcctctttcttgcagtgttttcaagatctcaatgggct

SEQ ID NO: 118523 - DNA, 342 bp, Homo sapiens
gtgtaatagtgaacaagacagccaacaagagttgtgaaggaggccgttcagcaagcaatgaagtgctagtgcaggaaggcccgagctgggaaatgtccggagagaccctgtgaagtgatgcagggatcaggaaagcttcctggtggaagcaatgtctgagctgaggctcaccacaaagaggaatgggagtgactgctagagggaaagtgttccaggcagtggaaagctgtggccaagacctgggggggtctgagaggccattgtacatttgaagacaggtggctggaacccagagtgagactctaggaagggaagagagttagtctggagctgcaggcaggg

SEQ ID NO: 118524 - DNA, 686 bp, Homo sapiens
agctttcttttcatacagtaaagccatcctcctcacccttcagtgtgtccatgtgactaacatttgctggtcctgagacaagaaccgagattttagctgaaccaaggaacaaaaactcctgcatcaagagcacttgaatttctgactgctattttgtgtatttcaacgaattttagcctggacaaataaataactatataattataattctattaatatgaaaagttagagtgaattctcctaataatttataattattatatattttaaattatgtaaatctgcatgctgtaatcattacctcttggcagtttttgaaaattcagaaatgtcttcatatctttgtcttgttctgaaagcggaagcaggacaaatgcaaatggtgaattattaaccaacaaggagtacagaaaaaatgtaatagcttaagggaccaaaaatgtagtgagatatggataggaaataaaaataagaaaagaggacataagcagttgacgaatattatacaaataccgagataccagagaagcaaatgagtttctttcaaaatgaccatgttatcagtaaacaaagaaacgagaaaaatacattgaaagtagcacaagctacattctaaaagtcagacgcgaagctatgacaactttagaaatgtaaactgctctcttagtagccaaggttagtttcac

SEQ ID NO: 118525 - DNA, 343 bp, Homo sapiens
accagttatccactcactgacttaggtgcctccactagaattctcagcacgtttttgcagaacctgggcaacaagagcgaaaccccatctcaaaaccacaacaacaacaacaggacaacagagatggacgacggatcgggaaagccaaccagacagcgtgaggccaggacggaaagaggcacagggagctctgctcagtgtcgctacaggggatctctcaggctcacaacgggccactcctctagggaagttctggtctcatcatgatccttgtttggtctcactccccatgtccttctctgtccctcctccaactgccatttatttatttaactgaaaaagt

SEQ ID NO: 118526 - DNA, 977 bp, Homo sapiens
tctactgttttccaactcattaatttttggttttaacactatcaacttttttcattccactttttttgtttattagctttggaaattggatatttagttggtatatttttcatgtttattgttatggtaactgctttagctgtatcctaaaatttctgactatgaatttccaagagaaagtaccatttttccttttgattgctttaaattaatgtctgattttaaatcatgtaggcagagaatgctgtttgtatatttctattctttggattattgaggtcttctttgtggcctaaaatgtcacttttgtgaaaattcaatgtgcaacttgaaagaaggtatttcctcttaatagtatatagaatttgatagatacctatgagatctgccttattgattatgttatttatgtcttttacatctgtagtaatatttgttaccttcattttcttggattctgagagatttgttaaaatctccaatactgtgttttgtctgtttattctcacatctcctatagtttctccttcacaaaaattgttgatatattatttggtaagcaagtattaataatagttacattttcattatgaatggtagtcttcaacattgtaacgtgttattttatttttaatgctttttgatgcaaatactactagtcaaacactgaggttgtactgaaggaaactgaggctgtttatctgaaatagtattacagaccttaaattaatacgtagcatttttaaactaagtgtcttgtactctttaatgatttcagctcagaacctagtggcagtaatggggggagcgattggcatgctttgtcagcgcttgagtaaatagcgatcagctgggaaagacatgcctaactgtatttctgaaggatagaaagaaacctagaataaatgtaaagttttgatcttcatatttgcaaataattattcttctgtaacaccaagctaagaagaggtaagaac

SEQ ID NO: 118527 - DNA, 283 bp, Homo sapiens
tagctgtcacaacactaccatctccccaactcagactcaagccaaatatcccctagtcattctgtactcccagatgcccctcactggcttttactgatcagaaacctatacaagaaaatatgaagagaccagccaatcgcgcctgtaatcccagcactctgggaggccaaggcgggtggatcacttgaggtcaggagttcaagatcaacctggccaacatggtgaacccccgtctctactaaaaattctaaattaccaggcgtgatggcacatgtctgtaatc

SEQ ID NO: 118528 - DNA, 449 bp, Homo sapiens
tatgttcaaagatcttccctgaggacataatgacatagcacctataattaatggcatgcagtggtacagatcagaaatataaatctcagtcccagccttattcctgcttaagtcttatgggattctttctggaaatcaaaaattctaccagagtatgtctagtactcttccttctcttcatactgcaataaaagtgtcctaagatactttttctacatgttagaccttctaaacttaaaaccatcttaaaactgatagcaaaagaatcttccagctgttagaaaaaggaggaagttaagcatttatcagtggttgtcattgttggcacacacacaaactgtggttgaattttaagtctggatccttaattatggcttaatgtttatacattaaggtttcactatgatgcagcactgaaataaacagttgtgtaatagaagattgcatat

SEQ ID NO: 118529 - DNA, 407 bp, Homo sapiens
cttttgtccggcctgtggacaccaggaaactcccaggatgcccttccagtcctcctgtacagccagaccctggccaggaccagacacaacaaattaagcacttaaggcattaacgactagccaagtgttgaagattgaggaggaaggagaatgaaaagagggaattgaaagaaaagcagaaggtccaacccatccctccttccccacgaccagaggagaaaggaggcccgggccaagtggccgagttggttcgtttattcattcattcattgattcattcattcctcggattcctatttacggaagagggaatcccagaagtccagcgcgggccggaacttcagaagtcccgggggaactcaaccaagtgccactgagagggaaaaaccccacccgagatccgcgga

SEQ ID NO: 118530 - DNA, 438 bp, Homo sapiens
gaaagaggtcaaggcagtagcttctctggggtagatgagatcaccgtgggagacagtgcagggtgagaatggaatcttatgtctaatcaaggtatagggacagatggggaggagagccagaaaaacaggctgtgaggaacatgggacaagaggtgccacagaagcctggagagaccaagtatcaacaaaatatatcaacaaaatgatctgataaatacagcagacaggtcaagataaacacttaagttttcacttgatttggcaattatacactgcaattttttaaagaacagttttgatggagtggtaagacatgagcctaactgcagactgaacaaaaaccaggagctgagactgtgcacaagataaagagatacttttctttcaagaagcctggttgcaaggtcagggaaattatgcacttgtaagaagaggatg

SEQ ID NO: 118531 - DNA, 644 bp, Homo sapiens
atcttttggtgaatatatatacacatttctgatgtatatctaccaagaagaattgttaggtcataggttgtgcatgttttccactttagtagataatgcctatattagtttgctaggactatcataaaagcataccgcaactgggtggcttaaacaacagaaatttattttcccacagttttggaggctagcagtccaaaattaaggtgtgggcagggtttgttcctcttgagagctgtgaaggaattgtcttttccagggctctctttcttgacttgtaggctactgttttcttcctatttctattcacattgtcttccctctgtttatgtctctgggtccaaatttgccttttttatatggacactagtcatattggttacattggtgataccctaatgacttcatcttaagtaattatgtctgcagtgaccatatttccaaataaggtcacattctgaggtactgggggtttgaacttcaacatatgaatttgggtgatacataatacaaaccataccactgctaaacattttccaatgtaatttcaccaatctttacttgtatcaacagtgtttaagagttccacttatatctcatcctcatcaacacttcattttgcctatctttattttcattttaga

SEQ ID NO: 118532 - DNA, 730 bp, Homo sapiens
  misc_feature (171)..(171): n is a, c, g, or t
  misc_feature (181)..(181): n is a, c, g, or t
  misc_feature (187)..(188): n is a, c, g, or t
  misc_feature (191)..(192): n is a, c, g, or t
  misc_feature (213)..(214): n is a, c, g, or t
  misc_feature (277)..(277): n is a, c, g, or t
  misc_feature (300)..(300): n is a, c, g, or t
  misc_feature (302)..(302): n is a, c, g, or t
gatgcggatgccgtcacgtcgttaatacctacgattatacggaacccttgtggacgtcatcgccgacagacgttccgaagcctctcgaactactgtcggaccagcgtaccgactggagcgttccggtataaatcgctagtcgtatagtacggacacgtacgtgcagtgccncactgtagcngagagnnggnngcaccatgtgctgttctgacnnaatgtagatcgcgtagttactagactctacacctgtggcccgtctcgttttaatacacaagcntacgtgtagacccctagggacanancccgcctgagccgatgatgctcaattcttctcgactccacgagacggccttcctgagtcccaaacgcctgttcccgtacaaggagtgcaaggagaagttcggcaagcccaacaagaggcgcggcttcagcgcggggctgtgggaaatcgagaacaaccccacggtccaggcctccgactgcccattagcctcagagaagggcagcggagacgggccttggccggagcccgaggccgcagagggcgacgaggacaagccgacccacgctggtggcggcggcgacgaactggggaagccggacgacgacaagcccactgaggaggagaaggggccgctgaagaggagcgcgggggacccgccggaggacgcccccaaacgacccaaggaggcagcccccgaccaagaggaggaggcggaggcggagaggg

SEQ ID NO: 118533 - DNA, 632 bp, Homo sapiens
  misc_feature (88)..(88): n is a, c, g, or t
  misc_feature (98)..(98): n is a, c, g, or t
  misc_feature (104)..(105): n is a, c, g, or t
  misc_feature (108)..(109): n is a, c, g, or t
  misc_feature (130)..(131): n is a, c, g, or t
tagcaggctcgtactgcctgtggtgtgtgcctacgagtagagttccggaataaatgctatgtaattatcgagcctacgtgcagtgccncactgtagcngagagnnggnngcaccatgtgctgttctgacnnaatgtagatcggtggtctatgactctcactgagccggtcgattttttacaaaggatcagtgacccgaggacaaccgtgtgacgtgatgctaactctaacgcggcatcgcacgagaaatgcctctttgagatcccaaacgcctgttcccgtacaaggagtgcaaggagaagttcggcaagcccaacaagaggcgcggcttcagcgcggggctgtgggaaatcgagaacaaccccacggtccaggcctccgactgcccattagcctcagagaagggcagcggagacgggccttggccggagcccgaggccgcagagggcgacgaggacaagccgacccacgctggtggcggcggcgacgaactggggaagccggacgacgacaagcccactgaggaggagaaggggccgctgaagaggagcgcgggggacccgccggaggacgcccccaaacgacccaaggaggcagcccccgaccaagaggaggaggcggaggcggagaggg

SEQ ID NO: 118534 - DNA, 583 bp, Homo sapiens
agcgggtgtgggccaccgtgaggttcggcataaagcatgtatttcgacctacggtgcatgccgcatgtgcaagagcggcgcacactgtgctgtcctgccaatgtatatcgtgagttataccccactggccgggataaaaaaacgtattaacccagcacaaccgttaccgattgtgtaactctaactcgcatccacgagacggccttcctgagtcccaaacgcctgttcccgtacaaggagtgcaaggagaagttcggcaagcccaacaagaggcgcggcttcagcgcggggctgtgggaaatcgagaacaaccccacggtccaggcctccgactgcccattagcctcagagaagggcagcggagacgggccttggccggagcccgaggccgcagagggcgacgaggacaagccgacccacgctggtggcggcggcgacgaactggggaagccggacgacgacaagcccactgaggaggagaaggggccgctgaagaggagcgcgggggacccgccggaggacgcccccaaacgacccaaggaggcagcccccgaccaagaggaggaggcggaggcggagaggg

SEQ ID NO: 118535 - DNA, 553 bp, Homo sapiens
gcccaggcggggtccgcagaaccagctatgtcggcctacggcatgcccatgtacaagagcggggacctggtgtttgccaagttaaagggctatgcccactggccggcgaggatagagcacatgacccagcccaaccgctaccaggtgtttttcttcgggacccacgagacggccttcctgagtcccaaacgcctgttcccgtacaaggagtgcaaggagaagttcggcaagcccaacaagaggcgcggcttcagcgcggggctgtgggaaatcgagaacaaccccacggtccaggcctccgactgcccattagcctcagagaagggcagcggagacgggccttggccggagcccgaggccgcagagggcgacgaggacaagccgacccacgctggtggcggcggcgacgaactggggaagccggacgacgacaagcccactgaggaggagaaggggccgctgaagaggagcgcgggggacccgccggaggacgcccccaaacgacccaaggaggcagcccccgaccaagaggaggaggcggaggcggagaggg

SEQ ID NO: 118536 - DNA, 439 bp, Homo sapiens
cctggaaggcattgtgacccaagaaagaagtcttcctggctgctccctgggaatcctgtccccaagagccctagatcctgacttctgctctgagggtcagggagtacacatctgcagaaactgtcaaagccacgctattcctaccactgtcttccagcaacgctgacctgatgagagaattctaagccccttaaacttagcactccacgtttggatttagattaattcaacatagccctggaatgacaaaacagcatttatgctacaaatgaggagcccgaagcccagagacaggagtgacttccctaaggatgcaggacattctggtggcaatgcaaggctagaatccagagtcctggttcaggtctttttgtttcaaatttaaacaacattcattcctacgaacatgtatgagcacctattaagtgcgatgcattct

SEQ ID NO: 118537 - DNA, 516 bp, Homo sapiens
agtgattgctcacggtgagcaaaaatacaacttttgaccgttatgatgctcccagtcacattgggatcacatttaaataattcattacaaactcatgagaaaagtataacaccttggagaatcagaggaggagtccacaggggcattgtttaacctgggccttgaagaatgagtaggagtttaccaaatagaaaataagtcaagaggagttagtccaaaggaaattggtcaagtagagagagacaggaaggacgataatgagtaaggagagcagcaaccagactcttgtggctgagatggagaagaaagaataaggagggagagacaggccaagactctggtaacgaacgcaggaaccggttggcaatggtaccaaacagtaggctaagaaatcaggactttttcttgtctgaagtagaggtcactgaagcattgagagctagtgaacaacaacacaatcactaacttagaaaaagccttctggaggtaaaaattgagtggaagctagtcgtgggt

SEQ ID NO: 118538 - DNA, 756 bp, Homo sapiens
accccacggtgtgtaaactaaagtttgtgcccgcccaaaaagaggtgtttgccccaagagccccggcacgtgtgttttgagccccgctgtgtggggacacacaaatgtgtgccccaaccaccttctggaggcgtgaattaagggatgcttcttgggactagacacacgggcgtagcttgtgattctgggccccaaccattactgtgggttgttaaagccttcccgacagggttgttggggggactttgaaaggccccttttttgagaacaccacaggggggggggggaacgggaaaaaaagggccaaccccagggaagcaataaatagagaagcagcctcacaaagtgctggaagagagaaagcaatgctctttccagaggaggaacacggaaaaatcagccttgtgggtgaacaggaggagagtcacattcgccagcaggcagcaccctgtgcaggcagtgggagaaatctgagcttcagcagcgtccggagcaggatttgcacgaagtctcccgtttcaagttttatgtctcctggagtcctggggaaggcacccagcccacccacagctcccttctcagagccctaagaattgatgagaaagcccctcactaccacatgcaggacacgcagaaacttcagatgagtggactggtcacgtgatacagcaatgacaaaaacttcagtattggcattcattccagctgatggcattccaggagcttttaatgaattaaagccacatttgcctgaag

SEQ ID NO: 118539 - DNA, 857 bp, Homo sapiens
accgcccactgacagcgtgttccaatcagaggcggagaggaacaaaagaggcgaggtccgggagacccatacagggcggtttccacagagaccccagacgcagtcttggctccaccctcaccgcggcccagggctaatactggacttctttccttatcgctgtagaaaaaactagataagcctgctagattctgaccgatttcactctgacattggaaagggtcctacaaagaattaggttccaccgttataggtgctagcttacagcagcggttcttagacttttggccttaggacttatttacaagactcttaaaaaccgttgaggagcacaaagaccatttgctttttgtgggttttctctcatttttaatgttttttttatttcaatagttttgggtgtacaggcgggttttggttacatggatgagctcttgagtggcgaattccgagattttagtgtacccgtcacccaccagtgtacactgtacccaatatgtagtattttatccctcaccccgctcccaatctcctccctacctggagttcccagaatccattatatcgctctgtatgtctttgcatcctcataactgaacatgcagtatttggttttctattcctaagttacttcacttagaataatggcctccagttccatccaaagttgctgccaaaagatattatttcgttcctttttatggctgagtagtattcaatggtgtatatatactacattttctttatccactcgttagtcaatgggcacttaggttgggccccatatctttgcaattgcgacttatgctgctataaacatgcgtgtatatgggtctttttcctttgggtagataccc

SEQ ID NO: 118540 - DNA, 314 bp, Homo sapiens
agatctgaagtgggaaggccggccaggctctcccaccatccagaggcaaaatgaggtctgggtctgtagagaacatccccagtgaagggtaagagaggagagtccagctgagatagacgatgggaaggaaagagagttttggaggtttcttgcagatgagagcagatatattttaatgaggatgaagatgatcctagtgttgtaaatgttaaggatatcttgaatgtgtttacatttggtagttattaacacacgtctgcaggtaaacatgatttttctggttatcctttgcctttaggagagaaaaagaggca

SEQ ID NO: 118541 - DNA, 714 bp, Homo sapiens
gcataggctccataaaagactgagacctaatcacaagactacaaaatgttcccctcaatcaggctggagtataataacaggagattacagctaaaagaactgcaaggctcaaattctatttaagaagtagtctctaggggaaaccaaagacaacagaagagataaaaacaagaacactaggggaaattataccctctgaaacctgtagctacttcaaacagtaagcagcctaactcacacatacataaacataaaatctaacagtaaaggccaaattacctcaatcccttttatctacatcgtatccggcttcccacaaaatacgaagcatgctcaaatgcaaaaatcacaatctaaagagtcaaagagtcagaaccagactcacatatgacagagatttggggattatgagagtctgaatttaattattaatatgcaaaggtggaaaagtaaacaacattcaaaaatatgtgtgtaatgtcagcaaagacatggaaatgttaagaataatttttttaaatgggagaaatcaaatatactgtaacagaaatgaagaatgctttaatgagctcatcagtagactagacacctgtgaaggtcacagaccagaggcataggctcaataaaagactgagacctaatcacaagactacacaatgttcccctctccccatctcttaacaccatagcaattagtcaattagaagatatgtc

SEQ ID NO: 118542 - DNA, 378 bp, Homo sapiens
ttttagaatcacagggtatcacttagtctaatcctggctttttatgtatgaaaccaggaaggcctttgataccgaaaggaatcttttggctatgtggtaactgaatacaataaattatttttagctcatttaaaaaatttatatcatactagatcatcttgaagttgctttttgtcggtatctactctctattttacttttcctgttaatcaacttgttgctactttctggatgcttcttgtctcctgctcctttatcttaccactaacttctccctcatcttgtcactgttgccatgtaaaccccataagagtagatttacttagaaatctggattgatgggactggtatggatgggtctgctatccaaaagacttt

SEQ ID NO: 118543 - DNA, 534 bp, Homo sapiens
ctccattttctcacagggtaactatactcgagactaataaatatacttatctcatagggtagttgcatttaagaacagctgttatatactgtcattaacctattgagtagatgttattggtatctctattaatatcttgtgactctgcaattccatttctaagatgttatcctggggaaaatatcaatgatgtgcccttctactccccgcaaaaaggcacaaagatatttactgcagccttacttaatataccataaggcaaaaacaacctaagttgttttcacagcagctccttgttttcacaaaaaactgtggtatgttcacaaggtaaactctatccagctattgaaaatccaaaatcagagtacacaatgcactgctaaaggattggggaggggtcactaagaacaaatgtgacatggatatgggaaaggaagggaaaggaagggagaggaggaagagagagagaaaatgaatgaataaatgagaataaggatatgatcacactttccttttattaggaacacaggtgtg

SEQ ID NO: 118544 - DNA, 520 bp, Homo sapiens
gatgggacagcacgagccacttacaggggtagcaggcaacatgagcccagctgggaacatcaccgctcggggtgcagtggggggccctccttctcaccgcatggcaatgctgttggttctgctccgacagtgtggaccacggacccaggcttcctgtctcatggcctttatctgcccatctagaaattctgagggaggctgagcaacggccaccaacagctcccgcccagcccagggtccagaatgcctgtgcccacctccaacctcactcgggtgctccgggacaggctgtccctctcctggcctggaaggaggcctgttcacagaacccagggagctgggcctggaaggaggcctgttcatggaacccgtagcaggagctggactctacggcgtggaccagctgcctgttgttgtaaataaggtgttactggaactcagccatgcccatttatgaactgtctatagctgcttttgtgagcggtcgttgactagctgtgatggagactctacggcccta

SEQ ID NO: 118545 - DNA, 355 bp, Homo sapiens
tttaggggcttggctagtggaaagattgctattctattcacaatgaggcagtggctagtgcagctcttctctgatcagcagagatcattgggagcctaagtttagagtcactgttttggggacaagggtgctctgcctaagtctctgtgtgctcaaatggaggcctagtctctgcattgggctgcctccagcctcacccttagaagttccacctcctaggctgggcacggtggcgcacacctgtaatcccagcactttacttcgggagggtgaggcgggtggatcacctaaggtcaggagttggtgaccagcctgactaacatggtgaaactctgactctactaaatacaaaaaa

SEQ ID NO: 118546 - DNA, 246 bp, Homo sapiens
gtgaagggcaaccacaggttccaaggaagacaagctgaaacaatgcaaactggttttatattagatacgtgacttaaaatatctcaatacagttttctccaaaaaaaaaaaaatagttagccgagtatgggggtgtgcttggtatggcttgagcccaggagtgagtttgaggctgcaccgagcaatgactgtgccactgcactccagtctgggcaatggagtgagaccctgtctctaaaaaaaaaa

SEQ ID NO: 118547 - DNA, 231 bp, Homo sapiens
atttctgtctctgctcgacaccgctctctgtgcctcccttctttgtccctctgtgtcactcgccctcacctctgctgctgttcctgccagcctgtctgcctccccgcctcccctgctccttccccgtggctccctctccccacatccctgaggactcacttacctggggtcctccgggcggcccaagagggttattttcccccagtgctttcaacatgtttaatttgttgc

SEQ ID NO: 118548 - DNA, 244 bp, Homo sapiens
cccaaagtgatgggattataggcgtgagcgactactctggctgaaactttataattctcttaataaaatgaaactttctaattctcttaataaaatgaaacccttaataaaacaaaaccctgtaattttaaacactacagaaacctgctgactcttgaatgtagtacatatctcttcagattttgtcacgatgaatttagttctaggtacctgaacagaaactttaaaattctcttaataaaat

SEQ ID NO: 118549 - DNA, 610 bp, Homo sapiens
tcacccagagctaaatagaatgagcctaagaactacaggtctttgatctacctgtgaatcctaaaagactgctgttaattcattgtttgtaaagggagtggctctaactgaaagcaccacaggaggtccttttccaggattctttcatcccagggccctcccaaatgcctgtgtgggttttcggtgctttgacaagttcattggaccacacccttcccaaagcaccagagctaggcttcagtttcagctctgccagtgttttcccgtgtgacccctgcaaaagtctgtgtcctctttgcacttcagttctctcatctacacaagttctgtgaaagtttctgcctcaacgaatttgccaggtcattgtaagaacaaaccctggagccagtttgcaaattgtaaaattgtttctcactcttaatctagtgcaccttccaggcaatgtcagaaaagaaaacaagacctagactatatagaaagaagtgagctttgttaggattttattagtttggtgaatgcaatacattttgtgcatttatttgtttgctgaaataaaaacatttgcacattgttctgcttataaatgtatatgctcatggtgctcattggt

SEQ ID NO: 118550 - DNA, 395 bp, Homo sapiens
ccaccatgatctttcccacctcagaacattcaaataaactgttttctgtctagaagaatgctcttcctatcctcctctctttggccctaccttgtcacttcggatgggtacagtgcccctttccttttatatcacccagcaacattctgcaccgttcctatgacacattcttattcaacatttgatgagtggtatgtcatctctcctagctggtaaggcccaacaacagcagggaccaatgctaaatctaaacctttaaaagatctaaaatgaagtaattaacagttcaggatcaagaaaacacgctcctaagaaaacctaaaatacaagttgtacagcaaacaaattggtttaagtaaacgtcaatttctctctgcacttaaaaaaaacacaat

SEQ ID NO: 118551 - DNA, 412 bp, Homo sapiens
gcaagtttagagtaatggttcccaaattaggctgcttattaggctcccctgagaagcttttaaagttacagcttccttgactccctccccattacccagaatcaaagcaatagttgatggagcctagaaaactgaatttttaggccgggcacagtgggtcatgcacgtaatcccagcattttgggaggccgaggagggcggatcacctaagttcgggagagaccagcctgaccaatgtggagaaaccccatctctactaaaaatacaaaattaggcatggtgcatacctgtaatcccagctacttgggaggctgaggcaggagaattgcttgaacccgtgaggcagaggttgtggtgagctgagatcacgccattacattccaccctgggcaacaagagcgaaactccgtct

SEQ ID NO: 118552 - DNA, 392 bp, Homo sapiens
aagaaacttcacaattaaggaatttttgaaatatttcatgacgtagaaagcacaaaggataaaatgttggaagttgactcatacttacaaaggtacatgacaattctataaggcatagaaaaagatactcactctgtattataagttatatactgagaagaagtcaagaactattcaaggacgtatgatatggttcaggttttttgcaaaatacgtagaggtaattcatcgttgggtaattgacagatggctttctgtgttacgaaagatattttgcttcaggctagcagtaaccatcttaagcattgtatatagctttttaagactgtttaaaaactatcatgggttaaggggctgatttacattctttatgctaaacttgttagcctcaa

SEQ ID NO: 118553 - DNA, 743 bp, Homo sapiens
ggtgattagaccatgagcgctccaccccccatggaggggaggtgcgattcatgctgttataaaagggctagctgggctcctttttccgttactgccttctgacctatgatgacgcagcaaaggtcctcgccagacgccagccccttgatcgtggacttcccagcttccagaactgtgagaaaagaaatttctgttcattataaattacccagcctcaggtattcggttatagcagcacaaaacagactgagacggcttgctttgtgggtatttatttttttgagacggagtctcgctgtgttacccaggctggactgcaatggcgcgatctctgctcgctggaagctcctcctcccggattcacaccattctcctgcctcagcctccccagtagctgggactacaggcgcctgccaccacacccggcaaagtttttgtatttttagtagagacggggtttcaccgggttagccaggatggtctctatctcctgacctcgtgatccgcccgcctcggcctcccaaagtgctgggattacaggcgtgagccgctgcgcccggcctctttgtgggtttttaaggatctgcctctgagctttcaacgtgcgcccactgttctgcaacttggtttgctcacccaatgtaaagctgaatggtttcagattaagatatacacaagtgggattctaccatggaattctgccatacctgagatttcttgagggaactcttgttttcatactt

SEQ ID NO: 118554 - DNA, 432 bp, Homo sapiens
cctaggcaacacggtgaaaccctgtctctatgaaaacacaaaaaattagccaggtgtggcggcgtgtgcctgtagtcccagctactcgagaggctgaggcaggagaattgcttgaacccgggaggcggaggttgcagtgagctgtgatcgcgccactgcactccagcctggcaacagagcaagactcaatctctaaaacaaaacaaaacaaaacaaagccagacttggtggcacatgcctgtagtcccagttacttgggagggctgaggcaggaggatggcttgaacccaggaggtcaaggctgcagtgagctatgatcacaccactgcactccagcctgggagacagagcaagacctcgtctgaaaaacaaagacaaaaaacctcgaactgcaaacttaaaatgggtacatttattgtattaaattatact

SEQ ID NO: 118555 - DNA, 568 bp, Homo sapiens
tcaacagaaaaggagaagtggtagaaacaatagcaaaagaaaaatggaaagttggaggatatgctttagtaactacattcacatagaaggttagatatgctttagtaactgtattcgcttgaagctggcattgcagcacatgactgtctgctttaaggccttagctacctgctgacaatgctagtccccttttctttacataactgtcttctcatccttggagtcttagctcgagtgtcttgtgtcaagctgtccaccctatttgaggagccctctgtcctctacccctactctaattctttctcaccacctgtttgttttcctcatagcatatgtatgtgtgtgtatatatgtgtatgtgtgcgtatgtatatatgtgtatgtgtatatgtatatatacatgtatgtgtgtgtatatatgtataacacacacacatacacatatatttttggccccatagtaggttgtgagatctgtaagagcaaggattacatctgtttggttcaccatcatctatatagtgcctagtacatagtgcatatttgttgatgagttatcttggtggct

SEQ ID NO: 118556 - DNA, 603 bp, Homo sapiens
tggtctcgaactcctgacctctggtgatccacccgcctcagcctcccaaactgctgggattacaggcatgagccaccgtgcccggccaaataaccccttttaaatgatgctgttagcctatacgtgccctctgatccagccagtttcttttccatggcatttctgtccatgccctacctcttcccatcttaacactattgccctgctgttccctcactatcaaagccgcctcctgaagtcttctcccatctccccaagcagtagtctcccgctcctgaatggctcactcttgctagagctgtcttatggcccatgccacatgcttccttttgttataatcttttgtgtcccttatttcctctagattgcaaactctttgcctgtgggaagtatgtcttacacatttgtatatcctcacaacacacagcctcatgtagcagacatctaatacttgtttaaaaatgaagtttagggacagcttaggagatctcgctgtctgctaggtgagtcccaagtccgtgtggttgtacctacccaagatgaaggtaagaacacccaagcctgcctcctgctcaacctgctgccctaagaaaacctctgcat

SEQ ID NO: 118557 - DNA, 622 bp, Homo sapiens
ctcggaggagagttactcctagtgatcgattcggatttgtgacgctgcgagtcccagttagtgtgtacgatgacaacaggtagtgatctatgagtcatgtattcctaggcattatcgcatgtgtcgatggaagtagttgttggatgcatctaacaaatatgatcatatccggggagaatgcgtagagtttatggagatagaaatcacagaataggtcgttcatggaagtcgagtgagaggatgtctcatgaagatgtgtcgtaagcgcatatcggtatctaaatgtatagtttaattctgatgttttctttaattttctctttggatgatctgtccaatactgggattggggtatttaagttccctatattactgtattgcagtctatctctccctttagatctattaatacttgctttttatacttggggctctggtgctgggtgcatagatatttataatagttatatccgcttgctaaattgacacctttatcattatataatgaccttctttgtctctttttatagtcttgactggtagcctattttatctgatacaagtatagctactcctgttcttttttggtgtccagttgcacggaatatccttttccacccct

SEQ ID NO: 118558 - DNA, 826 bp, Homo sapiens
cgcgctcgtggggaaaaggcagggagggggtggtgtccccagccggtttggggggtgcgttgcccggagacggaaagtttgggagcccgagcaggctcggctgcagcctcggggagggggtccagcgggtggcggccctggggatggggaaggagcaggagctgctggaggcggcccgcaccgggcacctcccggcggtggagaagctgctgtccgggaagcggctctcctcaggctttgggggcggcggcggcggtggctctgggggcggcggcggcggcagcggcggcggcggcggcggcctcggctcttccagccacccccgtctccagtctgctcagaaatccaagcatccatgagggcagactctgtcttcctctccatctgcactcgtccagcccctagaaggcgcacttcacgtgttctgctgagctacatgccactgctggacgagggccaaagtgtgaacgtgtgtcgaccagcactggctacacagcccctgcaaccatgctgccttctgcaactggcccatcacggactgtcgcgatcgacggttcctttctgagcgaaccgacggccgcctgaccaaccgtggcctgacctcacccgcgcctgcttacgcctcctgccatttgcgcggccctggacagggcgaatgcccagcactagtgcgagtctgctcacttccacattcacggtggcccttccaccgcgcaccaaggaagctcgcagtggacacatgaacaccggtggacccaacggtgaaccatgcccagtgccattggtcggcagctgcctggctatggcccaccccaagagcgtggtg

SEQ ID NO: 118559 - DNA, 626 bp, Homo sapiens
gtacaactagaaagaaggtactattagcatctcactgttatgggtggggaattggagtctcttaggtcaagggaagagtaggtggtaaaggagcaaggattgcaaatgggccatctggccccaaaacttgagcatgtggccaccgagcaatgttctctatagggtgcatggcagttttggggctggtacttcctgaaggtccaccaaaggctggagctgagcagcagctggtctggccaatctcctgaccaaacccagccaagcatccttgctgtttaaagatcaaggatgacactgcatgtcatttatccattcagttcattcatttatgaatgcccagtgattagaacagaacctaggacataggcctacatattcactgggaacttcctaggttctgtcctagtcactgggcatttagcagtgggcaagacaagtctctgctctcatagcattctaaattggggagccagaaaataaacaagtaaaaagaaaatgaacaagatgatgtctcataggaacaagtgctttgaagaagccataagggtaacctggggcagtggtgctgctggtttgcctagtggtggtcagggaaggcctccctagcatgtgacatctgagtggag

SEQ ID NO: 118560 - DNA, 1441 bp, Homo sapiens
gagcccctaacctcgccccacctcccaaaacttctccccctgccgtcgggctatggtaaaggggaaaggacaggactcaggaccttgagggaggcattgagtcagagggcagagaggggtcaaggagacccaggcgggaggcgcggaagcatacagtctgcggggacaaggactgaacggggtagtgggagccaggtccctggttcccttcacgcccccacccccagcctcagctctgtctgggtggaacgaatgtctgctaatgaactaaacaaacaggtctcttaatcttatcatggagctgacccagagactggcacagatatccaaagtatcataattggcaggtcagaattaaaactacatacatcatggtgactttatagctgaggcaaagtggagctcaagtgttactttcccagtaagcaaatcataatgaagtatcatgctggtgactaatttaactaacattgtccaggaaattgctgttgtccaggaagagaagagttgagccgagtgtcaactactaggcttctggcaccatcctgcacaagaaattgataatgcacgtatcaccatcacgatacgagagcaactcgaagaatcttaacgtataccacggtaaacacctacggcacccaactcagtctacagcaggacacccaaaagttaaattcactttggctgtggctgtgctccaggcttttacacctggtgaacgtctagaataactgccacagaaaatacatctatgacatttaatcactgagtgttcgagagaaggcaaagcccggacaccaagtaagccaggtacccctgaggcaaactccagaggcttccctgggccgtgaaaccagccaaagaaggcaaaattcacccaccctccaaaagacgtttgcgttcccacgcatgttctccgccctgagatagcttagaacacagctctaccaacgacttttcatttccattaacctattcctgattctttgattcaaggaaccttgccatccttagctctttggattatttatgaggtctgatttataatacaaaattatacagtgtaccatagttaaaaccttgaaggaaaaaatgcattttgtatttcttcttcttggagaggcccaaacacccctccccagggttggaaaggagagtggaggtagggtaatggaactccctctcaggcctctgaatatggagaaattaagaagaatgggatggggttgggggacagaggtagtaagcaaacaaatgacttatttttaatctagagttacccatttggagagagatacagggttatatcctaacggtacctttttaaaaaataagtcataagtatgctcatgccctaacaagttagtgaatttttccagtaaaattaaaattaaatagaaagccatggtaaattacccatttcatttctccttctagattt

SEQ ID NO: 118561 - DNA, 320 bp, Homo sapiens
ctttgcaccaggatgctgtttccaccagacacagctgctgactcactctgcagctctctgctttgctctgtggtttgtaaaccgtttagtttttttttcccccttttttgctcagtctgtacccctttgctaccctgtttctctccctttcttttaacaatattaggagattactttcctctgtaaaattaaaggagtgcctctgtcttcttaaaagccacagccgctccctttcacccacagggttctctgtaggtggacaatgctgcttgccactgttttttacctccaaatatgttttattttggtaattaccctaa

SEQ ID NO: 118562 - DNA, 818 bp, Homo sapiens
aacaagggcagtatagagtcaaaaagcaacactggaaaagggagagaaaagagcaaaacaaaattaggctggagtgggttttttagtttagtttagtttagttttgttttgtttgtgcattaagaagcatagcaggcttcaacatgacttgctggctaaaagttctaacatgaagagtcttttcaagcaaataccccacagaattcctcttatacatcaaatggagtatcagaatcctttggtcataaccttaatatcagacaattatatgtggatatttgtaaagatacattttcaacaattcaattaaatacaatggaccaaaatctgatagattccaaaaagttttgcctttcccttttcatcaaatcttacgtacctgaaattctcttgcatagggctgttcacttacactcagactttaagctcctttaaaggcacctgtgctctaagagaaaggatttcaatgaaaggtatgctaagactcgggctctgccacttatttaggcctgtgagtaagggcaagccaccgacctgtttatgctctgattggcttatctgtataatgaagttactaatacctaccacgggagattgtaagaatttctaaaattcaatgaatttgaactattttataaatgctgaagttgcactggggttcacacctggaatcccagcactttgagaggctgaggcaggaggatagcttcaggggaggagttcaagaccagtctggtcaacataatgagatcctctctctaaaaagaaattgaaaaaattagacggatggtggcacacacctctagtccccaccactc

SEQ ID NO: 118563 - DNA, 402 bp, Homo sapiens
attacaggcgtgagccacgacgcccgcccggccagaaaagtaacttttgtaggcgatggggtggcaatgaggttggagggaaggagactactttagtgacccaggcagggatagtgagagccccaaccagatgtttctgtgtcgagtcattacctgtcctctggctgcctgaggcccaacactttgtacagtctctaaagtaatcaagactgctccatggtaactttcttttgataattcttttatgctcaagagtgggctgagttaatgcaagacattttagagatgtcgtatgccttgtgattttctttttttctttttttttttttgagacggagtctcgctctgtcgcccaggctggagtacagtggtgtgatctcgactcgctgcaagctcctcctc

SEQ ID NO: 118564 - DNA, 386 bp, Homo sapiens
actcagtctcagtttcaacctctcttggagaccagggagggtgcagaccagattcgaaaacccagggcatcggcaccccaagggggctcgtggagcatggacgcgggcgcgtttctgcctggggtctggagctccgggaatctgcattgcgaaggagctcccagtggtggtgatgctgtgagttcgcgggctcggctccgggaaccgccggcccaatcagccctggactcccggcgccgctgcgtcatcctcccagttagtgggcaggaagcacagggacatgacccggtgtctggatgcggggatgagggatgacccgcgaggacatcagctctgtgacaggcacccacagtgcaggccgtggttggtttgctgggagggaggga

SEQ ID NO: 118565 - DNA, 434 bp, Homo sapiens
cccctttgctcacataaacacatattttccttatttattttaaaattaggtcctttagggcaatacagtaaatatctgtgctccaaaaaaatcaatcctgtcacaccaatgtttaacggactttgaaagaatgcagctgtatggaggaaatgaattctgttctctgtcaaaattgtaaaggactgcttgttttaacagctactgaagatggaagcatttatactgcggccatacggcttgtcaaaactagatatgttcctgtgtttaaaatatttgggattttccaaaagttaccattttctcttgatccttcttaaggagtactaggtttctgattacagttaactcctacttcactgttaaactgtctctgaatagacttaaaatatttagcccatttagataaatgattgagcgtcgttgttacgcattcc

SEQ ID NO: 118566 - DNA, 674 bp, Homo sapiens
tacttggaagaagggctgtaacctttagcttcccccagtttagcccgttggccttgtctaggctggtctgtttctgactcttcttttcctcatctaatatagacctacttttcttttattggaagtaggaagaggaaaaatagacaaaggaagagaaaaatactagattaaggctcagatattgtaggcatgagacctggaaactggagactccttttgggacagagttgtagcagcaagcccaactatagaagaagggaactggggcctgttggtggcatggtgaccagagattttggtgttgttttggtgcaacaacagaccagcatttcttcctgatgagagacaattgaccatggagtggttctggccagtctatggagaatgtgcagcaaaggttttcctgtcatctgcttcatcttttgatgtcagagggcctaaaactccaccctgggattatgctaacactgccattttttgtacacaggacccatgaagaggcatgaagctcaattgcacatgtgcatgtttttccttttgtaaatattaatgactcctcctataatctgttgaatatgtacacttaaccactcaacttaccatacgtttctgttcccttttcccctcccttgaagtatctgtttttggcttctgaccagagactacacttccca

SEQ ID NO: 118567 - DNA, 103 bp, Homo sapiens
taatgtcaatcaacaggaggctgataaaattatgaaacatccacactacagaatactatagtgatttggccgggcacagtggctcatgcctgtaataccagca

SEQ ID NO: 118568 - DNA, 729 bp, Homo sapiens
agagaaggctgagttgaggtggtactgaatttatgacaagcattcagcattttctgtgacaaatatctgttggacatcaattatgtgccagacactgttctaagttacagctcagctaagacagacacaaagccttgagctgcatctgagtgagagcccgagcacctgccatatgttgagtgcttgctatctgccggcacagtgcagaacacctgtgatgttaatcctacagaaaattgtagaaggcaggtgctatcattaactttacttcttcccaggtgaggaaacaatttcagagcaagttcacctcactgatgtgacaatgtacttcaatggactttatggggaacaagaagacatcttctcactagggctacaaagtgcatagaatgcatgttggatgctctgttactgtgaagggagagtcacccagataataaagccagcattgaggtcaagaggaacagcatcgattgttaatatgctgtctgctttcaacccccaaaggattattttcagaatgaaatgatctgtggtctttaaggggtggggatgggaggagctgaagaactctcgatccttcgaagaggtcccagtggacttgatttctcagtggaaacagagggatttccttctgcagtgggaaagagacacgaagtgataaaccgagcaccctctttgaagatttcccagtatatttgtccctagaggagtgcgcctccgggagat

SEQ ID NO: 118569 - DNA, 853 bp, Homo sapiens
agcataattctttcaaaaatagcttcttaatgaataccacttcaattttaaaacctatggttgaatcagaaaacaataagaatagttctccttccctattcttccttttccttctctatgtaaaatatggaagataaaattttactttccaggagatgttgaaagcatttaatttactttatgcttgacaaagaatagtcagcttcaaatgaaagtaacatgtaagtgaagtgtgttgtggaattgttacttcttacgatacaatgctcagaatttaactgttttggtttatagtatctttaaagtgtatagtagcccactgaaagcaggtaactattgagatatagaaaggatgtcctcctaactgatccctttttttactttttctggggcaaaaaagatatcttggtgtatttacacttgtttctttctctgtacaaatatatttttaagaatttgtgttgtttttccagttaaaattcctttacagaaaattcagaaaaataaataagaaaaaactcatttatatctcctgatatctcttcaggtttccagaacatatgttttaagtcctcttttgtgtctttaatttctctttctgtgtgtgctagctacttctctgtacttctccagactgttccagatgggaaactgaacatcttcttgagatcttccttgccttttcctattcttactccccaagggggaaaaaaatgtgtggagaacagacttttatcaccattttggggaagtagaaatgggatttcattacagccatgcaatttgtatttctaccttaaacattctcatactctaaaacacattttctggtttcccatgcattatggagaat

SEQ ID NO: 118570 - DNA, 581 bp, Homo sapiens
ttcactggatccaacaagttcaaagctaaactgatcacctctccttacaagcctatctttcaaagccctgagaatggcactaccatctactcagttgctagtagatctaaaaatatgatatgatatatactgtctaatgcagaaggagatggagacaaccaaaccatatagcctaaaattagatgacaataacaagtaactattattacaagaaatgtaaatggtaactattttgaaaaaaaaaaagactaaactatatcatacctagaagaacctaacctaaaacaaaaagatacacaagagttaaaagcaaaagaacagaaagaaatgaaaataaaaagaaatactaacataatatttatttaacaagtattatgtgtcagacacaaagttaagtaagttgttcaaggtaaaataattaagtagaagttaaggttttaatatcatacaaagttgtaatcaaagcaaaaagatattatattgaccaaaaggcttgttttataataattagggatgctctacactgaagataaaaccatcctgggccgggcacggtggctcacgcctgtaatcccagcact

SEQ ID NO: 118571 - DNA, 394 bp, Homo sapiens
gattagtgatcgagagccatttttgctggtggcaatcatatggtacttttaatgggaatattagaaaggcaccggtaatgaccttgttgcagcacaaaggagagagtgtggggtgcccctgcatgttgtcccacctcttgtgacgtgtatcgttttggaatttccagtggcttgatcatgaactactgcaggaatccagatgctgtggcagctccttattgttatacgagggatcccggtgtcaggtgggagtactgcaacctgacgcaatgctcagacgcagaagggactgccgtcgcgcctccgactgttaccccggttccaagcctagaggctccttccgaacaaggtaaggagtctgtggccagacatctacacgcttcgatgctgggat

SEQ ID NO: 118572 - DNA, 379 bp, Homo sapiens
attactctgaaagttacaatttgaaattgggtagaaaatccttaataacattactgactcattggtaattaaatatggagcttccatatttaattcaagtaattcccaaacttgaaaggaagaactactaatgaaggtttttatgcataagataatacactgtttactaatgttcaaaccacacaaatacttgtgaagctacaaaaatttagtcaatatatttaaaatctattattaaaatatgttatcagcccagctaagtggctcacacttgtaatccaagcactttgggaggctgaggtgggaagatcactttagaccaggagtggagttttgacaccagcctggtcaacagagtgagacccaggctctaccaaaa

SEQ ID NO: 118573 - DNA, 349 bp, Homo sapiens
agttggtactggctggcaagggagcctctctctgggactgtgtgggcttcctgacagcatggtggctaggctccaagaacaagtgttccaagagacctaaacagacagaaactgcaggcttcttctgacctagcatttgatgtcccagagtgttacttctgctgcatttttttttttttttttctgagacggagtcttgctccatcacccggtctggagtgcagtggtgtgatctcagctcaccgcagcctccgcctcccgggttcaagcgattatcctgcctcagcctcccaagtatctgggactacaggcatgtgccacaacacccggacaatttttttatgtttag

SEQ ID NO: 118574 - DNA, 256 bp, Homo sapiens
tgtatataaatggatggttggatgaatgaatacgagtgaatggatgaatgaatgaatgggtaaacagataaatggatgagcagatgaatgaatggatggatagatggttggttttatgaatgaatggatagatggatgaatgggtggaaaggtgaatgaatggatggatgaatgaatatgtggattcacaatcactttctatcctgacccctccccgacccacaaggctcttccaggcaaaaccccagttctcagg

SEQ ID NO: 118575 - DNA, 302 bp, Homo sapiens
aaaacatacattacataactctacaataatgaattttagatatatctgaaataaattctctatcaaaagacacaagttgctaaaactctctgtgggaaacaaagcaggcaaaaacaaccaattgaaaacaggcaaaaacttaccgagagaaaactattggagatttttccgtgtaaaactaactcttatctattttctgtagcacccagaaaacctctcttagtgtggagggcacaaattctatggaaagttctttccaggggcaatagcaatccaccattatcagatctgccatttctcaa

SEQ ID NO: 118576 - DNA, 301 bp, Homo sapiens
cttccttccagtattgttttacattcttattaattctttcaatgatgaaacggagtacttcagtaaatgttcctgagtcttcagatgtgattggtgactgttactaagagaaccagattaagagtcacaatgatttagccatgtaaccttggagggacataaactggagacaatttaggattggtaagcacagggtgattggcttatggagagagcaaacctgaaccatttcaaaaaggggaacctgcaataatgttcagcgatgtgctgtgtgaatatgacactatatggatttagtacc

SEQ ID NO: 118577 - DNA, 908 bp, Homo sapiens
tcttttgggggtgattaaaatgttctgaagttgtttgtgctgatggttgcacaattttgtgaaaccaaatggtaaaaaccattgaattgtgcattttaaatggatgaattgtatggaacatgaattgtatctcaataaagctgttatttaaaagaaaaaagtcaggaattactcaggcgacactgaagaggatgtgtacatggcttctttccatggaaggagacaaaccaccttgtattattgaagagaaagactctggtatcccagccttctactcttactatatacacagtttctattttggtcctttttaaagccttcttgttatagttagtgagcaacagttaagtcgaaaaccacagtgaggccttggttacagcttacccttgttttcaatcaacaaaaaatatgactaatgtcactgtggctcgactcaaccacatatgtggattcaggaggctttggacatgtgctagaggctgctggggctgaccagctggaaggacagcagttagctgaacttaggctccaggaataagatgttggtgaagcctgggaaaatgtcttccgtgagctgggggtggaaagttgttgtggaagtaaccctgaaggaaaaaagagttctctggctggcttggcccagagatacaggctggaaattagtaagaagagcagattttgaggccagcatttctctagctaacttctagcccagcgccccttttccatcctactatttcatacatgacccccaagggaagccatatcaggttcctagagttgggagaagagagactcagggggaacctgtactgaagtgactgtggcagaggcagggtgaggctgaagagcaccagaacatgagacatttccccgctgtcacttagtaacaagggccctgtgatgat

SEQ ID NO: 118578 - DNA, 438 bp, Homo sapiens
gtgccaccatgatcctgaatgtgggaaagagaatacagaagactgtcagccacaatgctgagggggcacagtgcaaactgccctggggtttgctggtgggagaaggaagaggtcagagccttagataactggggcggacggattaaatatatttaagaatcgggccaggtgcggtggctcaggcctataatcccagcactttgggaggctgaggcgggcagatcacctgaggtcaggagtttgaggccagcctgaccaacatgtagaaacccccatctctactaaaaatacaaaattagccaggcgtggtggcacgcgcctataatccaacctactcgggaggctgaggcaggagaatcactagaacccaggaggtggagggtgcggtgagagcgccattgcactccagcctgggcaacaagtataaaacaccatctc

SEQ ID NO: 118579 - DNA, 353 bp, Homo sapiens
aggcatgagccaccgagcccagcctgttgtctcttattttggtctgttttggtcccttccttcatgggcttgtgctcgtgattctgaacgtttgactctaaccacaagtgaatctttctcctggtgactcaaataaaagtatgatttttacctgtggaaaaaacttttaaaataaaaaataatgaattattcaatccatagaattagaccgtcttaactcttactttagtaaacaaatctgaactggtaggaggagataaagattttccaaaacacacatgcctccaatgattcagattctgcaattctcaactgaattagaacgttagaataacctgggtgcttttaaaaaa

SEQ ID NO: 118580 - DNA, 920 bp, Homo sapiens
gcttcatttagtcatacttgcaaagtcccttttgccatgtaagttaacagtttcacaggctccgcggattaggacgtagacatttgcaaagggggaaggtagaattattctttccaacacagacagtagcaaaagcatttgtgactcttaattgtcagaactttgcctctctagcactaattctctttatttaagatggataaatccatgtttgtttatatataaaatagtttgcttctctttttgtctcctgtcatctaacactatatatattttttctgtatactttaattcactctatctcttgctcattttagttgcccaggctggagggcaatggtgcgatctcagctcacagcaacctctgactcccgggttcaagcgattcttttgcctcagtctcccaagtagccaggattacaggtgtgtgccaccacggctaactaatgttttgaatttttagtcgagacagggtttccctatgttggccaggctggtctctaactcttggcctcaggcgatccacccgcctcggcctcccaaagtggtaggattatggacgtgagccaccacgcccggccaagactattttcttaagtaaggtaaattgggtggttgtaggaagaaaacatggcctgtgggtcctagaaaatcaggaacctggaactgacagtctgctgtgactcccacccctccctctgcggaggtggcatggattcagagaggaccaacctgtggagaatgggatcataggaaaccctgaaaaattactgggttccttctgtaatctagaagcaggagacacttgaggaccagaaggtgccatgcagacagaataatgagcttcttggtaacctgtagtaacctgtgtccactgatgaccaatagtctatggcttgaagatcatccacaatctcctg

SEQ ID NO: 118581 - DNA, 366 bp, Homo sapiens
agatgacagtcacaaggtggaacaaaaggataattacattatcatcttagactatgagaagttgatgggaaaagaatgtaaaaggtaaagtgattacataagtaatatactaatataaaatatatgataaagatatttaaatatattgaacagaagaaataaaaataccccatgggcttgaactgcacaagtccattgacatggattttcttctgcttcagagacatgaagactttcctctttcactcagcataaagaggatgagaatgaagacctttatgatgatccacttccacttaatgaacagtaaatacattttatcttaagattcttttttttgagacagggtcttgctctgtcacccag

SEQ ID NO: 118582 - DNA, 429 bp, Homo sapiens
tcttgactcaggcgctggttaccaggtggctgtgagcatttacccgtttggggcctcagctcccccacctgtaaagcagctaagtggtcagtgttaaaatcccactcaattatctatagtgctttctctcagaaagcagagtgttactcttcatggaggagaggaaatggcccaagcgtgccgcagccttctctgatgattaaatcctgaagagtacaaatgttcctgcaagcaaatgacacaggatgaagaatgtgaagttgaaatgggttttggctcatggctgaaggcaggagcctaaatttgttaaagaagcacataaataaattaaaagcatcatgcgtttttatttagcccaaatgcatttcggttgctagtgctttttgagcgcggttgccgtgcatgcgtgtgcatctgttggtcactagt

SEQ ID NO: 118583 - DNA, 446 bp, Homo sapiens
aaggatccctgcagtgtgctgggctgtctgctttggatgggtcgttttatttatttattattattattttgagacagaatgttgctctgttgcccaggctggagtgcaatggcgcgatctcagctcactgcaacctctgcctcctgggctcaagcaattctctcacctcagcctcccaaatagctgggattacaggcgtgggccacaacacccggctaatttttgtatttttagtagagacggggtttcatcatgttgaccagactggtcttgaactcctgacttcaggtgatccacccgcctcggcctcccaaagtgctgggattacaggcgtgagccactgcgcccggcctctagtatcctttataataaactggcaaacattaagtgtttccctgagttctatgagccactccagcaaattaatcaaacctaaacggggataa

SEQ ID NO: 118584 - DNA, 433 bp, Homo sapiens
tcatgccggacaccaggaccctgacggcacgcccgcactcctgcttagtgaggaagccagcatcgtgcagcggctgctggacagaaggcatactcgttagtccgtccttgtcagctggggctcgctgcagcctcggtgagggcccagctgggaatgtccttgccctcatctcctccctgtcacttctcccaggtaagagacagtaaggtctccaaggtcccttgtttaggtcataggagcagacagcaaagatgcaaacatccctcgtaccaagcggcaagaaagaaatcatcctcacactggtcacactgtccaaccacagcagatgatgggcgcgtctgtggacaacctcgagaccacgtagggcgctgtcattacgtatgtcattgcttcttggctacactgtgtcaatgttttctggctacactgagtc

SEQ ID NO: 118585 - DNA, 328 bp, Homo sapiens
aaaccttgatgtgtcctgtttcattgtgctatccaaagacctacaaacctccagagagagcagttagttgctaataagggctctcataatttccatcaagcagtagtttcacagatgggcatccaccttgctcccttcctggagatcaaagtacatactttattattttatattatgttccttaaaataatattgtacccttcttcatttcaggggaatgaaatggtgttttatcgattccttaaactagaaaggtcgtagtgtgttgcagatatttccagagtatttttctggggattgaaagtgatagaactatgtattagggctt

SEQ ID NO: 118586 - DNA, 451 bp, Homo sapiens
tgagtcttagctatgccattgactaattgtatgaccttaagcaaactgatatccactctaggttttcttatctataaaacaagactggggatttccaaagtctcttccaggtcttaactctacatgaaccctaggatctaggcaccataaaatccatttcccactttttagatgacttccagagtcaccttaattatatccttttgtgcctccgtgtttactgctcaaccaacatcaaacttgtggagagcaccaatgagttcctggtaataatatcctctagaccataaataccacatgtccaatgtgtccgtaccactgattcttcctagtgtattaatcattataaaagcctagatataagtgtgctggggaggttgatataaagccaccaattgagaaaaaaccccaaacacatagtttgcacagtgttgaatccacggtgggcatt

SEQ ID NO: 118587 - DNA, 877 bp, Homo sapiens
aataggagagtggtaaagtatctaggtctttattgttttgttttggtttttccaggtattaacaactaccactctaagttgacgtacaagtgaaaaacaacccaaattgactgttttgggggaagaaaactcagaatgtgttatttgaaaagtttttataaataagaacaaggcttgttcatcgctgtatctccaagacacagcatatagtgcctggtataaagtagctattcatgaaatgttagtgaaggggtatagccctttagggttaccaaaaccaatacccttgacatatatgctattttcagttgtaggatgtggatggagttctggcagcaggagggctgagcctggagcctcctgggccttgctctgtgatgtgggtagggagtcaccagtcatgagcacaggtgcagggaccccagtctttctctctgcttcctaaggtctcctctcctattccccatctgctgagtatcacggcctgagaggccatctgaagcaaataggaagtctccgtacagacccttgtgagacttatatggggagatgccttgaaatgttcccttctgcagacactgagcagcctagcattcttatttgttaggactgtaattatgaccacctccatgtgcagttcatcaggttcctttgcaaggtgaggcacacatgcatcccttttaaagttagagggtttgggaaaggatgttctgggcttggacactgctggaggagtctggcctgggcaatctggcctgggcagcctcctgatggggagaggagcccagcctaaagaattctaaggcccaagggtttgtgctgttttgcttttgtttattaaagctgcacaaactgctttactgtttacagttcacca

SEQ ID NO: 118588 - DNA, 304 bp, Homo sapiens
tgcggctttctgagaggtgaagttacttgacaggggtaagtggggagagaaaggcagaggggaggagaaaggagcctgcacctactgagtgctcacaaagtgccctgtgctctgcccatgggttacctcaattttctcatttaagtcccttgctgaccctgagaaacagagattatcatcctcatttgatgcttcaagaaactgaggctcagacaggctgagcaacttccccaagatcacacagtgatttgcacccaggcccatctaaagcattcataccgcgctgccttgcatggaggaaggg

SEQ ID NO: 118589 - DNA, 353 bp, Homo sapiens
cctggggtgatggccggagaggaaggctggagaggaaggctggggagggcccaccgtgggtattaccaagaaacccctgattcctgccgcagaggtctggtgcgatggggcctttgggagagcactgagctgggggccacaaggagattccatccccattctgttgtctgcacgttcactggtgcgataaaaaccaaagatgaatctcaggcaggcctgggggcttgtctcctgagagcacctgcaccccggcccccaggcagggctgggtctcagcccggcttcttgctggggactctgtggggcgggagctgcactgggccccccctggctccctgcactcaggccccttg

SEQ ID NO: 118590 - DNA, 796 bp, Homo sapiens
actgttgagctgctcagtgcccagcttagaggaccaggaaaaggagtcaccggccgtatgctggaggcttgagacacggcacagaggcgcagctcgcctcgctatggttggtggtggcagtggagattgcgattgcagcgcggctggaaggtcctttaggttgtttgagggacattgatcaaggaaaccggagaaacttaaaatgctcttccgcttctttggaacagtcacagagaaaagtgaactcctttcattcttgcagtaatttttcttgctgatgggaacagttcaagtcaagtgacatgtgaggaacattttgtgtttaacgtaaaccttcctatcccaactacattgaaacagtaatgatgcaacaagattttgaaagaacaaagaggaactacagaatcattgcttacattgacaccggccctgttgtcccaatggatgggttttttttggatgaacgtcaaaattgaccctgctgttaaagcttgaaacttggatctgttgtatctgagttctctcctcaaaaaaagaccttcaggaagtatcagataactgaaacataccagatcacagcaccacatgcctcctgcccctccctaatttctgttctcttatacattgttaaatttttttcctgcccctattagtcaagcccatggatttgagactgagcttccagctcctgggccgcagcaccaggttaaagctttcttccttggcagtacttgtcacctcagtgactggctttttctccgatgagcaggaggacctggacgaaacccctagtgtt

SEQ ID NO: 118591 - DNA, 469 bp, Homo sapiens
ggcggcgccgagctgaggtggtgagggactagctcccggatgtggagaagctggggagaaggcgtgggaggaagatggactcggtggagaagggggccgccacctccgtctccaacccgcgggggcgaccgtcccggggccggccgccgaagctgcagcgcaactctcgcggcggccagggccgaggtgtggagaagcccccgcacctggcagccctaattctggcccggggaggcagcaaaggcatccccctgaagaacattaagcacctggcgggggtcccgctcattggctgggtcctgcgtgcggccctggattcaggggccttccagaggtgcgcatgtgcgagagtgggcggcgcggcctgggcgggggtcgggagagggagtcgggctgctggaggggctggggcctccggggccaccgctcttggaagggggccatctctcatgccagggatgtgcaagat

SEQ ID NO: 118592 - DNA, 633 bp, Homo sapiens
aaccttcactaatacaactcttcttagtactccaatcaatacccctgaatcatgaaatgttctactctgctactgggaacaggaactatttctggccctgtgtgaactccgtaaatggttctctctaatccttttgagtggctccttccctgaactaaggggtttcctcacatgggtgcactgatcagtactcaaccgaatactcgagtgggctccctgggcatctgcaggccagtgttctcttctctgtgcatctcttgcctctttgtttctctgcctgtgaactctagctgccccagctgccctggattttcattttacctcttcaatgaggagagactgctggggcctgctgatgttccttctccccgcaccgcggtctggaaactttctccgagcattaaatcagagcaatcatagggctctatttctcaggtctcaggattcgctgttcttaatcaccttagacctaataacttcagagtttgacatattttctccagttttacagttgtttcaggtgacagggtaaatctgagccccattagcttagccaatcatgtgtggacacaaatgtaagaattttaagagttcagttttgacctgttagataagtagttgagtatacaaatc

SEQ ID NO: 118593 - DNA, 290 bp, Homo sapiens
cctggaggcagagcagacatcctcatatgacccctaagggtatacaaagccctcatctgatccctgcttctttccttacctccccacctaaaagtggatgtgggttgatgacaactagactctagcagccactaaggaggtaacagagcagcctggtcctagtcttctaacctggatccctaatgtctttatttctcagttggctctcctttttcccatacatgtttcccttgggccccttctccagcctaaccattcctttttattgttgcacagcatgaaaaacagtg

SEQ ID NO: 118594 - DNA, 159 bp, Homo sapiens
agtgagactccatctcaaaaagaaaaaaaagaaatatgcttatccctttccttctgccattttcattttgctaaaaacctcaaacccaagtacagtcaatatgttctgctaaaatttaggaaaggaggtgggaaccacacctttttttccttttcacta

SEQ ID NO: 118595 - DNA, 621 bp, Homo sapiens
ggtggcgtgggtggcggtggtggcagcgccgggatgccgcgggttttagctggccgcacgctgactctcaggggcctgggtccctagttccccgcggccctccaggcgttcatcatcccctcctcaaagccagactccctttgcagtatggcattctgtgtatgctggggtcttcctgttacagcaggacgcacccacataccccacctcgtccttcccccatcattatcccctgccctctgaggtggtgaggcccatcggatctttgtatttaagtggtgagccatataccgagcatgtgtttgtgggtgaactgtgctgggactgaggttcacttctctgttcaaatcagttagataagggcattctgtttagtctgtaaagagatattgagaaatgtcttgagtcaaaacgtgaaaactttcttcaactgatgatatggagtctaaacacacacacagagtcgagacacagtcacacaaatctagacacgagtctagatacacacacacacacacacacacacacactctctttgctccttgggatcaactgtgtgcttctcgagggcgtaatacactctgcctggtcagtcagagatggtggtacaggggagaggtc

SEQ ID NO: 118596 - DNA, 722 bp, Homo sapiens
cttccacttaatgaagagtaaaaatattttccctcccttatgatttttcttaatagcattttctttcctttagcttccttattgtaagaatacaataaaacatacaaaatagtatgtatatgtgtaacacatataacatacaaaacatgcgttaatcaactgtttatgttatcagtagggcttccagtcaataacagggtattattagttaacttctggtggagtcaaaagttatatctggattttcaacctcacagggtgtcaatacccctaatccccacgttgttcaagggtcaagcagtgtactttcatttcagaggtggagaaagctctgctattatcagccacaggaaacatagtagaccatcattcacttcaatttggtaagtcagcagtttttaccacatcataggtttcaaggggtgctggcaacagtagttgctgttaacttgagcaggatagagaaccttggcagaacaggttcaaaaaacatcacacagtcctggaattggtaactcattattttagcatagtagataccaaagaatagatgtaagccttacagacctaagttctgctacttacttaattacatagccttaggcaagtcactgagtctcagtttccttatctataaaatggggtaacaattaccttgtagggctagtcaggcacattatcatgaaaacttaatagcacttagcagggagcatgctataagt

SEQ ID NO: 118597 - DNA, 440 bp, Homo sapiens
  misc_feature (251)..(251): n is a, c, g, or t
  misc_feature (254)..(254): n is a, c, g, or t
cttatggtgatgatgtgagagtacggtcaaacagtggtgtggtcctggtgccgggtagtggtcagattctctttattcatcttcggagcagttggaagtggattcacatgagggttatggatagagtatggttaacaatcttcccagggaaacgggttgggtctgatgcggagatgggggtaggcgatgaactcgggtctctcgtgctctccgtggtgcgacttcaggtacacattcagcatgctgactgncancccggggagcgcgacgaagaaggtgagagtcttccacatgcatgcacccaggcctgggtgcgaatgtctttcagcaaagtcctgctttataggctcttgcatattattcttcatctccaccttgggaataatgagctttttcctttctttgagatgtatctcaggaggtagaaagcaccatcaaga

SEQ ID NO: 118598 - DNA, 157 bp, Homo sapiens
actcagagtcaatgcccccaccggtgaccctccatttaggggatccaagttctctttttcgccaatgatgtagctgttagagaactctagcttctgtcagagatctccaattagattcccatcttgcacagactcgggttggctgttacaatcgaag

SEQ ID NO: 118599 - DNA, 309 bp, Homo sapiens
gaaagactaaagtaggctgagtgcagtggctcacacctgtaatttcagcactttgggtgaggggagtattattggaggccaggagattgagactgagatgcacaagatggcaagacgctgtctctacaaaaaaaagtttttaaaatcaggcaggcatagtggtttgtgtgctactgagactgtggtggtggtctcatctactcaggagactgaggcaagaggatcccttgagcccaggagtttgaggctacaatgagctgtgatcatgccactgcactccagcctgggtaacagagaaagactgtctcc

SEQ ID NO: 118600 - DNA, 533 bp, Homo sapiens
gcacgagtgatgtcagaaagaaaaacaattgcaatatcttttgtgtactatgtcacagaactgcagccagggaaggggttaacatgttattctctgcaggtaagtttcctctctctctctctctttctcaatccattctttaaagggctgggtaaatcattggtggagctgggcgggatagcaggcagagggagggtgttcaggctgcattttaggggaagctgcaaggacaattggggcaggagggtccacagagttacccaaggggaagaaggacattgatccagctgcctctgtctgtggggtagcttctcaccatgttcccttctctatcagcttttgtcttctctggacactaaaaaaacaaacccaaatatggtcaaatagaagaaaaggaaggcaaagaaaaggaggaggaggaaaaggaaaatgaaagagaaaagaaagaagaaattcttttaaaagaaaaagaagctagaaagttacaaggtgaataaaattaaaacactgccagaaaaaaaatgtaagaaaaa

SEQ ID NO: 118601 - DNA, 154 bp, Homo sapiens
cgctccagatctcaggggtcctgagcctgctccgcaggtgaggtggcggagggcggggggcgggggcacagggtctgggcctggggtttcctcggccggggaggaggctcttccatggcatgagcacagcctagcagttctctgaacaaaaccc

SEQ ID NO: 118602 - DNA, 655 bp, Homo sapiens
aattattgatttgagatttttctgctttttcattgatggaattctgctataagcttccttcagagcatggttttcaattaatcctgtaagtttttttaggttttgtctactttttcatttatcttaaaatactgtcttatactacttgtggtttcttttttggccttttattattttggaaaatttttgctaatgttcacatttttaggagtttcccagatttcttcttttcattgatccctaatttgcttttattatgatgagaaaatattctttgtattattttaatccttcaatttaattgatgtttgttttatggctttgcatagtgtcttagaaaatgttctgtgtgcatttgggaagaatacagattctgctgttgaatggcgtgttccatatgtatctgttaggtgtatttggtttctaatgttgttcatattttctatttccttgttatcttgtgtctagttgttatacccattagtgtaagtggggtattaaagtctccaactatcattgctgaattatttcatttctgtcaagttttgcttcttgtgtttctgtactctttccctgagtgcatacatgtcaataagttttacattttcccgattaatttaccctttgtcgttataaaatatccttatttctgtta

SEQ ID NO: 118603 - DNA, 247 bp, Homo sapiens
gggctggggtttctggctgggagtggggaggggctgcacggtgatcggtggctactccacctccagaaagagcgtgtggcttctctgcctcggggaggatattctgctctcttgtgagttttgcaagccacccgagattctctcttgaattgctgtcaagaaatagagaccggcgttgtctctggccctcgctggggaagcttttctgaggttttgtttttttaatttgagacggagtttggctttt

SEQ ID NO: 118604 - DNA, 403 bp, Homo sapiens
acaaacaaacatatcctagctgtggccactgagtaggcctagaaataatgacacatcagtcacaataagcacatcatatatccagatcttgatttccaaataccattttttcctcactaatagtaacaatactcctcgaagaaaagctgatttgaggggtgggccatacaaaatgagcccagatcatcttgttgcaccagaaagtaaataggtactcaaagaattctggagacatatgaaaacacagaagccagtttgaaagagtttacacagaccaaatttgggatgattttagtatcaagataataacagtaatgagttacagaccactaaataagaatatgtatatgaatcattcaaataaataattgaacaaataaataaatgggatgtggagggagga

SEQ ID NO: 118605 - DNA, 774 bp, Homo sapiens
gccttttctttcctttggatgcaagcatgcttttcacaggaggtgatttaggagcagtttgttaacccatttaaaaagtgaattagggcgaactatgccttttctactggccaaaaaagaagagggagggctggatacataatctagctgccacactcccaaatcctatcacggtaggtctttttacaaactaggaacagaattgctagatcagttctccagagaggaatgtgccataaaagaaacagaaagtaaatggctagcaggaatcactgtctaagaatgggactgtgaaagggattacaaaaaccttgcacaattaatagcctaaattcatttaacttaagcataaccagcaatttaaaatcttttcccttgtgtcttctcttcaagctccgattcggtgcacttttcatactaaactctctattccttctatttctaatatgcctttcggaggaaataagaactaaatgtatgctgacagatttccacagatgggaaatgtatggagagaagcagaacaaactcaaggcaaaaatgatagtgttttgttgtctgtgtgtttttgaagaagtatcctttgctccctcacatgtggaatacagaacacacagttttaaaagcaacagttgtattaggcctaactcagtagttacctcataaagtattcttgcttttcatgtaggggcatggatattatttcagcactagtgaccaacctttttttctctaagtaactctgctttaagataagaactaagaaataataac

SEQ ID NO: 118606 - DNA, 483 bp, Homo sapiens
aatactcagaggcaatcatccactcttgagtgtactctttccagttctgaataggggtgggttggatggggctcaattcctctcccacttccaccttcccacaaaaagaataaagaacaggagaaccagcccatgctacctgcaggttacataaacattctcaccacccagcaagaactgcctccccaaaacccaagtcagtactcactgttttctctcagtccaacaatccatccgactcctcctgaggctagctgccaagaggagactgtctgcagggtttgggattactaaaggcaaggtgccacatattgtttgctgctggcccctgtctaaggcagcctggctgagaatgtttatgtaacctgtcgggctagtcggggccccgactagcccgacagggcaccatccttaggggagaaggtctacagttatcattatttaacttcattactttcagtctggacgactaggctagtcaga

SEQ ID NO: 118607 - DNA, 167 bp, Homo sapiens
gtaaaattgaattcactgactttgatctaaatagttagggttgtgaatattagtctaggttttaatctaatccaaggaatggttacttctctttagtttttcctttctgattataaaaatagagagttgtgctatgaatttcaataaacagcctggttgggagaaca

SEQ ID NO: 118608 - DNA, 443 bp, Homo sapiens
gagtacatcttgagaagttttattggtttcttaaatgttttaatcatcatcatcttatcatttttgtggtttaggtttttgttagttaacttgataacacatctttgaagaaaggattctatttatttgataatattttctgggattcagtttaatgcaggtttaccaggtaattgagcatccagtgaagggtgacgagtcatatggctttaaattgaatcttagtgattttctactaagaatgggtactagatagaaactcctccagatgatttgcttttgacattctttccctctgtttcaaatgttttactcatatttcgaaattacatgtaggtgaagcctgtaaatttttcagatatcaaagtctttcttgaataaacgactaaatctcattggaagcattactataatataataaatgaaagttgtacatttttcaa

SEQ ID NO: 118609 - DNA, 473 bp, Homo sapiens
aagtataaataaattgaaatagaatcttccctgctgtttccctcgagttccattcctgaatgctcctccagagttggtgtcgacagaggcctccttatggctccctgcagcaggtcgtgccgcacctccgcctccgcctccgtcccccgagtctccatgtgttcgcggcagggaccgccggctcctggtgaggccgcgtggcgatgcgctgggtggatgtgcctggctggtggatggggcgttttgacggcacaggtgacgcagcctcaggcatcctgtgctcacgtgcccgagtgagcattgacaggggactggctcctgaagtggaattgttggccttcacacgggcatttagacttgttagtgttgaactcagtatgtgcatcttgtacatggaagcaaaattctagaaaaatatccattatgtatcgggagtaatcattttcgttttcatatttccaagcctttgaacc

SEQ ID NO: 118610 - DNA, 326 bp, Homo sapiens
ttaatcctagttctgccacgtctttctctcaatcacccaggctacaaactctagagtcctcatcatgtggttgtgaagaccttctaatcttctgatgctacatcttgataattctcactgacacctggactcttaaaataaaggtgatgtctgcctgtaatcccagcactgtgggaggctgaggcgggtggatcacgaggtcagaagatcgagaccatcctggctaacacagtgaaacttcatctctgctaaaaatacaaaaaaaattagctgggcacggtggtgggcgcctgtagtcccagctactcgagaggctgaggcaggag

SEQ ID NO: 118611 - DNA, 433 bp, Homo sapiens
ccagactagctcgacagctagcctgacagccccgactagcccgacagccccgactagccctgacagctcccatttactaatttgatgctcacacaggtgacgttttttagggaggccctacatcatctgggcccgacgctagcacctccccgcttaggtacttgagccccctggaggaggctgtgaacagtcatggcagggaaaggagacgcaagacaaaacgacattattacggtgcttttccatttttctttttgcacaaaaacagtccatttattcaagtgttctccagcacaagtacattagaaaggagctttattatattcttctgggcacaaaaaaaaatgtgatgaaggcggaactgacagactttctacatctgttgtacgcattgacctctttaattatttcataaacagctatgtcacgagca

SEQ ID NO: 118612 - DNA, 394 bp, Homo sapiens
acgattagtctaatatggacctctgggcttctgggtagtaaagtcctggtgaggaaaccaccagggcatcagtaagtgccagatgttgggctaagctcactgtccaagcaggcctcaccctcacgaccccatataggcatcattcccatttcaccataaggaaactgaggctcagcaggcttaaacagctggtccagggccacattgtgagtaagcggcagaaacaggatgtgggccgaggtctccacttgggtaacctagctcgagatttgctgcttctgctgaatccagccctgagcctggtgccctcccagggacaggagagcctgaagtcacatgggtcctggagttgagacccaatgtctttgtcgacgcggccgcgaatttagtagta

SEQ ID NO: 118613 - DNA, 384 bp, Homo sapiens
tgtatcaattattttgattcagccatgatgagggaactagtaagatgttaaagtcacttaatatgaaaatttgaggaggtatttataggcaatttaataagggaatattaagactgttgggttacatacagaattagttaataccctacaagaaacataaaagagtaggctttgggttatattttcctctggctaaaaattacttgcatctcagtgggcgtggtggctcacacctgtaatccagcactctgggaggctgaggctggtggatcaactgagtttaggagttcgtgaccagcctggccagcatggtgaaaccccgtctctactaaaaaataccaaaaattagctgggtgtggtggtgtgtgcctgtaatcccagctg

SEQ ID NO: 118614 - DNA, 467 bp, Homo sapiens
ggtggtgcatgcatgtgaacagaatattgggcaactgtacaaacaaggaagcagctctttatgtcccaataatgagacatccttcaagatgcatcattacatggagaaaagattgaaaactctgtatagtagctactgcttgtggggaaaagagagaaaattatatgtgcactatattccacactattaaatgaactggtgacattaatggccccagggaagagtggccaagctggcaggctttggaacagtgctgagagggagacttgcactgtggactcatttttgaaccttcagaatttgagccttgtgaatgtatcactgtattacattttcacaaaaccttcacaggaataaaacactgcatctctgaaatgagcaggataccatgatagaaacaaatggagaacataaaaacatttgcaaattaaaatacaggctgccccagtccatccccaccccatgtc

SEQ ID NO: 118615 - DNA, 757 bp, Homo sapiens
cgtggtggctcacacttgtaatcccagcactttgggaggctgaggcggtcggatcacctgaggtcgggagtttttgagaccagtctgatcaacatggagaaaccccgtctctactaaaaatacaaaattagctgggcatggtggtgcatgcctgtaatcccagctactcgggaggctgaggcaggagaattgcttgaacctgggaggcagaggttgcggtgagccgagattgtgccattgcactccagcctgggcaacaagagagaaactccatctcaaaaaaagaaaaaaagagagacagagagaatgctgaatgttgtgagcatttccttttaagggcactgattgttgatataagttgttcttgaatggtgacataggtgccaagttgcataaaagaggaacgtggttcagcaaaaattgtacttctcaaatatgccaggaacctatgccagtgcaacagcatccctgcacctgggaaccaggataagaggtgggggccaagggatgcaggcagaaatacgctgcatctgccatctgacagtgggtaaaatatacaatgctccattgtaaataaaatagcaatacatgggctggacacggtggctcacgcttataatcctagcactttgggaggctgaggcgggaggatcatttgaggtcaggtgttcgagaccagcctggacaaaatggtggaatcccatctctactaaaaacaaaaaaattagccaagcgtggtggctggcacctataatcc

SEQ ID NO: 118616 - DNA, 767 bp, Homo sapiens
aaacagatgaggttggctaaggcatttgagtcataacttagtttaagtacaatataacaaaaaggtagatttctgacagtaagtagtaattatattatttccaaatttgcttttaacttgagaacagtagctttaatttttatattcaagcatacattctacttcatttcatataggaccatgtttttataagataagatacataattctatgtagaatagtttggtgaaggaattcttattttaaggtgcttttatatagttattttgtatattggtacaatgttaaaggtgatgaattaaggaacatcaccaagagaggacaatttcttctaacttctctttttaaatttaatctggctgaggtttagtattaggactaatacaagtgtcttgctctgacatgcatcaagcaagagctagctattttacttcatagctagtttcttgcactctgtggagactgccagggccgcagctcacagcctgttctgagctgcagtgctttatcccaccttgctctccaggcttctgacttcaggcctgtgggggccgggaggtgggcagcggcagtggcctgaggagccctgtagaactacggctgaaaaagaaagtagattgaggtggggggaggaaattaacaggaatctagagtttttctaattcttatcgtcttatcgttcttgtgtttggatgctggtagtttttttttttttagacagagtctcgctctgtcacccaggctggagtgtagtggcacaatcttgg

SEQ ID NO: 118617 - DNA, 704 bp, Homo sapiens
aaacagatgaggttggctaaggcatttgagtcataacttagtttaagtacaatataacaaaaaggtagatttctgacagtaagtagtaattatattatttccaaatttgcttttaacttgagaacagtagctttaatttttatattcaagcatacattctacttcatttcatataggaccatgtttttataagataagatacataattctatgtagaatagtttggtgaaggaattcttattttaaggtgcttttatatagttattttgtatattggtacaatgttaaaggtgatgaattaaggaacatcaccaagagaggacaatttcttctaacttctctttttaaatttaatctggctgaggtttagtattaggactaatacaagtgtcttgctctgacatgcatcaagcaagagctagctattttacttcatagctagtttcttgcactctgtggagactgccagggccgcagctcacagcctgttctgagctgcagtgctttatcccaccttgctctccaggcttctgacttcaggcctgtgggggccgggaggtgggcagcggcagtggcctgaggagccctgtaatcccagctactaaggcaggagaatggcttgagcccgggaggtggaggtcgcagtgagctgagatcgcgccagtgcgtcacagcctggggcaacagagtgagactctgtctta

SEQ ID NO: 118618 - DNA, 404 bp, Homo sapiens
cagttctgtggtcttgagtaagacacatggcctctcttggcctcagtttccctatgtataaaattaggctagaattgggctagaacatttctgtgaatcccctcagccccaaagcattgtaattctctattatctccgtcttcttgactgtctttctaactgtctatcagagatctaggtgacaaataaggagaagtgtgaatcaaagacgtcagcagatgggatcctgaggcttgtgtgttagcccgtgtcttctgcttttcctatcttgacctctctatgaccagcaaggaagtattactttattgtgataatgcttgttactctaatacattccccaacttcagctggcagtttgctgacctaagaaaggaaaattccagcattcaacccttctctctcct

SEQ ID NO: 118619 - DNA, 252 bp, Homo sapiens
acactttctacatcttgaaggcaaggaatctgaatcttgaagagattaaatgaattgtccaaagtcacgtgggggtttgggagaaggaaaatcatgaacacacattcttctactctggagaagtggggaaggtgacctgggaaaccatctgaaagggagcaggatggattctataaaatatagagtgttcaatgaaaacaacctgatgctcctcccagtaccatcacatttttctagctgcatatccttagg

SEQ ID NO: 118620 - DNA, 327 bp, Homo sapiens
ccaacatagaactgatcagatactttatactataattatttatctgtcttttcactagactataagttctttgagggaagaaactagacctgatccatctccatcccatcattagggtctgctaccaagtaaacacttgatacgtgtcccttaaatgaatgaatattgtcaaggagttattttctgtctctcccaaaaacaactgtactgctgacttgttattttgagtaagtaagtaaagtcttgtttggaaaacctcagatcatatatattttgccctgtctccataccagatggaattgtatctccgagaggcatagacacagg

SEQ ID NO: 118621 - DNA, 165 bp, Homo sapiens
acatctttatattattgtttctttttctctagggaactctaatacaatctcttgttactgaatcaaggtgataacttaggttcttactctgtgtctcttatattttcttttagagagggaggcacataaaataaaaattggaacataacatttacttgcctaata

SEQ ID NO: 118622 - DNA, 801 bp, Homo sapiens
agcgggtttgggaaagagaatatggaattcatatttctttaaatcattcttttaaacttttaatttttatgtagttttagtacatcttatttgctagtactgtgtcatctttttggctgtatttttcactggctgccacctggccaaatcaccacttgggttataacagcagcctctgactggtctccttccgtctgaccttggcccctgcactctactctcaacgtagctctcagagtgatggaactcagaacttgtcactcctgctcaaaaacttccagtttcacccaggggaagtatcaaggtgacatgaggggacaggaaatattgtccctaaatgttctaagagtggatctcccatgtattcaagcaatcgaggggtgtttaatgagctccatctacatagcaatgatacagcatagctctgctggggctctctgctctccccttctccacaaaagggaaggacaggtaagaacaggcacaataaaatagaaaccagacagaaagaattgggaacaaggagacaagacaagaatcatgctttacgtgatttaatcctaatatttttatgagaggatggctatcatcatttcattttaaagatgaggaaaatgaagccgggtgcggtggctcatgcctgtaatcccagcactttggaaggccgaggaagatggctcacctgaggtcaggagttcgagaccagcctggcagagagatggcagagatggtagagatggttgctgcaaatgccattatttcattcctttttatggctgagtagtattccatggtatgtat

SEQ ID NO: 118623 - DNA, 987 bp, Homo sapiens
gtgacattctcattagggagtttcctgaggataatctcttccaggagtatccttttaaaaaattagatacctaattacatttcttttttgcatttttccatactctcctcgttttccagcggaggtgtgagaatctggctaggggacagagagtagcttggcttttgcaagtaatctgtatcagagagcatgtccattcctagtataaagggaggaaataggtatagtaggaggatggttactgggacgggacaggataaggaaatgggcagtttcttagttcctcctatgttagatcttagaaatggcttcattacttgctttaaagtgtgtgaattttcagaacaggcaatatatgcacattaaaaagtaagtataaaaacaaccttaaagtcaaaaagaaatgaggttttaattgtctgcactcaagtgccctccatttgcacaaataatggacagctgactgtatatcttatatttggcatataagtagccatttgaaggtttaaaaactgaccattaatgtgaagacaggctcagcatctcccttcagctcttcatagcagctccctcctaagactcgtgccaaagtgaatgaagtaaggatggctggaaattcctaaggaactcactccaaaagcagttctgctcagagatctgccatctgctggctgcagaacagtagaagagctgggttctattgtacaaaaagtacaggtcctggacctcagtttggtctgtagtgtggctccacttatattccaggatatacagttagattgtaattttcgaagaactcactgttggtgtgtaagaatcttcatccaagaaaaaagcatgtgtgtaagtttgtgtgtgcctgtgtgttcctttgtacaagtgcttatacattgcatgggaagtagggctggaggaggatgtgtcactttctagggtggggagtattaacccctgcttttggcaagagcctgtttgcatcaatagaaa

SEQ ID NO: 118624 - DNA, 829 bp, Homo sapiens
gtctaaccttttaaatcagttttttaaagactggatgccatgattttctttgatctcactctgtcacccaggttggagtgcagtggtgtgatcttggctcactgcaacctctgcttcccaggctcaagggatcctcctacctcagactcccaagtagctgggaccacaggtgcacgccagcatgcccgactgattttttgtatttttggtagagacggggtttcgccaggttgccgaggctgatgcccatgattttctatgtgatactgtcttctccgtcatcaagaacattttttaagattactcttattatgtctctgggattaatctccaagctgctgattacatcgtgcacgtttgatactgtcactttcatgatgttaaccaatatcacgaaaatgaaaatttcatcaggaaaagcaactcagtcccaagagtttttcagtgagctcattctttaacaaatcgctcctgtgcaggcattgacagctgtgtcatgacagctgcctgaccatagtaaggtgtcatcaattataaaatgcattccagttttcagagatgttttgaaagagatgatggaagattcagaggtagagaatagataccaaatctatagactatttatatcccttaataaaatgctaggaaaaaacagaaatcaaaattataatagaaaataattttaagccaaggaatatttgaaccctaccgatcaaaagtactcttcaagaagcattatttggctctgggtgtctgaggtgggaggactgcttgaggccaggagttcaacaccactttgggcaatataatgagatctcacctctactaa

SEQ ID NO: 118625 - DNA, 775 bp, Homo sapiens
gtgcattcctcactttgattacttcaaagtctattattttgttttcaattattctgtttttctggcactggagaaaatcaatttgttttattttctcttattcatgcactcaattatgctcttcgggcacatttaatcactttgatgtttccattttatggcccgtctctaggcacttcagctgcattgctgccaatgggcaagcaggactaatttgcatgtcacaatagacttgaaattctaactcaatttagaaatctttgtgaaatctccctccaaaatgtgcttggagctgcaaagagggcagaaggaatgttggcaaaccagggagcctgttaaagatactttcctttctcaaaagactgtgagctccttcatgacccgaccatggcttggggaagtccctgtccaggtacagcagaaaaccatgggatgggaggtctgcagaccctcctctggaactctgtggtgagaatcctgcagcagctgcccctcagtggcaaggccaaggaggctaggcccacttaccctggcagaaaatgacccttagcactgctggatttggtggctgtgctcaagacagcacctgaatctcagttgtctaaagagcctccaggtagactgacaaagttgtcaacagttaggcattccaaaaccctgagtggtttaccttatttttcctaataatttccaaccttccttctaccccttgatcattttagaactagaagctggagggaaatgagcaatacaatcgctttgggcatgtacttcg

SEQ ID NO: 118626 - DNA, 258 bp, Homo sapiens
gaggattttgatatgtgttattggattgacagaaacaagaaaatggggtggggtgaatacagctatattcaaaggaaaggaattttattaggaaggcatgtgccagagacaaggtttctggtgagcctttgaggatgcaaagaacgcagtggagccgaggagactatttaggaaaggagagcatgaggaagaatgcagagctggagacaaccactgggctgaagctgagtgatgagtggagtgtgaggctagactgga

SEQ ID NO: 118627 - DNA, 177 bp, Homo sapiens
tctgttggctgccatccaaggtttctgaaaatgcgggagagtacaaagtgttaatatacctaactctgcatttaaagctgacttcaaaatttgtggcatatttggcctcaagtcgtttgttaaatttttagaaaaataaacgttataagttgtcctctttcaccccgaccgcagtca

SEQ ID NO: 118628 - DNA, 260 bp, Homo sapiens
tgaacagttccactggggaggctggagaactaaggaaacacctgtacatagtgtccgctgccctgactcccgcttagcgcacccttaggcaggcgccccttccacctttccccgagagccgtcgtcgctggagggggcagggtccagcccgcctggatcggtggtgtgcacctgatgggatttgggaaatgggctatccgtaaagctttatcttgcttggcttagctgtgagaagtggttctcttcctctggtcccttct

SEQ ID NO: 118629 - DNA, 912 bp, Homo sapiens
gttccaaacaaggtcacattctgaggccctgggggttaggccttcaacatatgaattcgaggggacacaattcgacccgtaacagcttctgtctccccacacatccgatgtgcttctccctctgccacgcttaggctggggtctctaccaggcacctcgacccgagtcctcactcaggccggctctgagcctcacagctctgtctgtgggagctgccctagttttccacggacctttattaggtgacatgggaatatcgagcagtgccccagaatccctgggttttgacacagtgcttcctcctcacctgaggcagcattcccaccctcctgcagggatctctccgaagagattcctctgcagagatctctggcccgcggagctcccttctccagcggtcagctcggcagtgagcggccccacatggccagagggcatctctgctcctgtgtttgggaagcagacccacgttccccagaggaccgggagccaggactgccactcctgcgaccccaccttaccagagtgggaaagaaaaatccctccatagccgattagctgtcacggccactctgtgtaaggactgcagaggcgtggcaaggccgtgactggcgtccgtccacagaagccctctcacaggcatggccactccagttcggcattctggcggtggggaaacggctcctaggtcggtcccaggttagaagcctgttctgccccccacaggcctgcatctcagtgttaaggggtgcagtctccccgctgcaaccattccaccagtctgttaggcctcctgcttctaggtgaagggcgtggagtgagaccagtggaactgatggacacaagcttatcgccacactggttttcctctgaaacaaggccctggattacaagtgtcatttgtggaatccc

SEQ ID NO: 118630 - DNA, 234 bp, Homo sapiens
aggctgatctcgaactgctgaccttgtgatcctcccgcctcagcctcccaaagtgttgggattacaggcgtgagccaccgcgcccggcccccaacgtttctttttaagcctgtcatatctcacattaaatgtgtaagtctctgaactgtagggctttgaacaaaggaaagttccatgagaatactatatgatgccaatttctactgttaggaacgcgataacaggtaagaaaac

SEQ ID NO: 118631 - DNA, 268 bp, Homo sapiens
tggaagcccatctgcaacacactgcctaaaattagacacaactaataactatttaactagactggcctattctcaggactaagagactagttccatggcttataagacaattcaccaactcaatttctggactataaaatttctttaaaatttttcacaccgaggaatgctggggctcagaagacaataccctaaaatgaaggcctcagtagcagcctcagaagcagaagtttttctctgaccctctcctgtcctcctgttgcagttc

SEQ ID NO: 118632 - DNA, 860 bp, Homo sapiens
aaccctttacaggaggaggagcacagagacaggcaggggcaggagctggggcaagctcttttaggctctggccccacggtggcatctaggggtgggtgcctgcagctcccgaagccccattgggcatgctacagtgctcttttagcttgccatatgcagatgggttaagtgttaaccagctcagtaccttcttggtatttgggttcttgtccagcatccaggaagaattgggtcacacatggacttgaaggatggtgtattcgggattttattggatgatggaggtggctctcagtgggatggatggggagctggaaaggggatggagtgggaagatgatcttcccctggagttcggctgtcctgtggccgatctctctgaccatccccagctgaatggctcttgacattcagatgctccttctcttctctccttggccacgctgctcttatgctcctctgcacattctgtttgtctgctcatctgcctgtggaacctggggtttggggtttatatgtgtacaggatagcatggtgtggcaggccaaaaggcaacatttgggtgcaaaaacagggatgcctgttcccatttagggccacaggtttccaggcttgagggtggggccttagctggggtactgccttcttctacccagcatttccctgtctcctgtccatatcactagggtttttgtttttgctgagcccacacagaagtaggatctgctagggttttatctagattgggctactgaatgttaaggattcctcagaatgttaatttgctttctgcaggtgacaactgtgtggatcctgcctggcaggcaagcagcaaattacttgatatggtagtagatgatg

SEQ ID NO: 118633 - DNA, 667 bp, Homo sapiens
gccaccgtgcccggcctgtgaatgaatgtctttaatacataaagagccttcacaaaatcaatatacaaagattggccgggtgcagtggctcatgcctgtaatcattgcagtttgggaagccaaggtggaaggatcgctggaatccaggagttcaagaccatgtctgtgaatagagtgatacctgctgtctctataaaaataattaaaacaaagctgaaggagaccttgctatgcagccccctgccgcttgtgcacccttgtcgacccacacgcaccttcaggagggcggcgcacacctggggtagtcacagtgcaggactctggctcaatagcgcctttgcattggtttggaccttcgggagggcggtacacgtctggggtagtctcagtgcaggactctggctcaatagtgcctttgcattggttgggaccttcgggaaggcagtgcatgcctggggtagtctcggtgcagaaggactctggctcagtagcacctttgcatcagtttggaccttcgggagggcggtgcagaaggactctggctcaatagtggctttgcatcggtttggaccttccggagggtggtacacgcctggggtagtctcagtgcaggactctggctcaatagcacctttgcattggtttggaccttcgggagggcagtaca

SEQ ID NO: 118634 - DNA, 585 bp, Homo sapiens
gagataattccacttcatagggaacatatgtatgcatttgttttagcctagtggtagggagagcagtagataaaagtagagataattagggaaggggaagaaatggcattatagaaggagaatgcttatttcatgggttcagtagatgtttatgggacttttaaaaattgataaaacattttaaaaggtggtatatgatgaaaagaaagtctgctttccaccacaaactcccagcctttccttaccccaaccccccaatccaagcaaccatattcaatcacatatgtctaggagaaatatattgtatctttcattcttatctttggcatatgaagatctttttgtatttagcacatatttcttacttttttaaaaaagaccgcatgccttgctagtgtagatgaaccataatttattcattttccgtaatttattttaccattttctattgacagatatttaggttgtttttagccttctacaaacactgctgtaatgaacaatacatatataagtctttgcattagttagtatctatacagaatgtattttcaaagtgtgactgtaagattgagactgaagtta

SEQ ID NO: 118635 - DNA, 311 bp, Homo sapiens
gtagagatggggtcttgctatgtaaggctggtctcaaattcctgggctctagcaatctgcccaccttggcctccccaagtgggattatagggcatgagccacagtacccagcctgtatcttaaacttacaaatttctgtatatagatttattttatgtataaaaatatatattaaaatctacacatataaaactgtccacctatataaaataaaataatagtataatttttattttatttttttgagacggagtctcgctctgtcacccaggctggaagtgcagtggcgcgatctcggctcactgcaaact

SEQ ID NO: 118636 - DNA, 339 bp, Homo sapiens
caaaagcatgatcagtagtgagtggctccataatccagaaagcagtgattgaggggtagctgtgggcacagcccagaaccagagaggcagtaaggagagagaacattcaaggggacaggatcttaatctggacatggaaggcactttaagacagatcaagatcaggagacagggtgttcgctatatgggggaaatcaataatgaactgccaaggaataaggatttatttgtcagagtttctcccaggaaacctccgccatctttcccccctcctatagtttcagaacttacagagaagctgatgcaggagtcagttagggatcaatctatcatctttat

SEQ ID NO: 118637 - DNA, 342 bp, Homo sapiens
atctttttttccatttattttttccttcccaggaaaagaaatccccttttagttggcgggaatctattgttagttttccttctctaaaatagagccctcttggcacatccagcagagaactgcaaggcaaacagacttcagcatgtttcatgtcggtgaatgcagaagttagctcactggcttcaatagttgagaactccactttctcccttcatgactgcatgtgtgccttcctgaagctgtgcacttataaaaatgagggttgacctatcgaaataggaacggaccattctttcattcagcgtatggttcagagtttgagttcaattagacagaggtttt

SEQ ID NO: 118638 - DNA, 374 bp, Homo sapiens
tgagctgagattgtgtcactgcactccagcctaggcaagagaaccaggctcctcttaaaaaacaaacaaacaaacaaacaaacaaacagagatgaccagcccaaaggtaatgaacagacaagggagttgaaagttaccaaagagacacacggatcaagtctgcagaagacagagcgtagagtcctggattagatgatagaatccagattcaatgagggctcagttagctagaatgtgagtccaaactgacaagaggaaaatttaaaggaatacaattttacctgcttttgcttttggtatcaccatgccataggcattgatggaagacacttggcctgggagcaattttatgtgaaaaatatcttggggtttcg

SEQ ID NO: 118639 - DNA, 287 bp, Homo sapiens
caaagtgcaaaggtgagctgatgtgtcagaagaaggggtgaaatctgcagcacttctgttcaacatgcccaagaggaaaaacaagcaacagcgacagcaccagaagaggaagattcctcaaggcaaaactacgtttctctggagtgcccaatcctctccaatgtgacttggataattctcaataatttaagcaacttggagtcctaatgttttttgccagagactaatttagagtttgccaatggactgtctctgaccaatgaagaagtgaggggtggtctcctggg

SEQ ID NO: 118640 - DNA, 601 bp, Homo sapiens
cacataaatgattgaacacttactttaattcagaaacatgcagaactcaagatctttgctaatctctacggagggtgaaggaggaagatgaagtttaatccactgatgagagtaagtacgctgttagggcttcattttctgctttctgatagatcctattgatggagaggaccacagtgacaatcacagtggaacacttggctcatccggagtagctttaacacacttggtgtgagctgcagggccactagagaagtgacagccacagacactgtctcccatgatgattagctggcctggaacaccagctcttccttatctattgttggtatggcacaagtacaaaatatataatatgtatctttgatctctaactttcccaatgagaacagagtgacccagaaacattgtgtgaaatatctaaagtctcatacttggttcatggagaggagggaccagattccaacttctgggctgcaattgatattattactttcttatgatttccacagttactgcttttgttattatttcttgctttttcagatgagttagtactctgcacagacaaggtagagccgagctcggctctaccttgtct

SEQ ID NO: 118641 - DNA, 277 bp, Homo sapiens
gcggcgccacgttgctgtccggaagtacgaggagatgcgggaggaagcttccaacatccgccctcaggtatgccattctgacccccgagacgtggccgcggtggcgtggggacgaacgccagggcgtccagcacctgcttcgggcggtcaacatggagcccgaccagtaccagatggggagcaccaaggtctttgtcaagaacccagagtcggtgagtgtgtttgagggacaggcagagaaggagaggggaagagagagaaaggtatagagagggac

SEQ ID NO: 118642 - DNA, 1853 bp, Homo sapiens
  misc_feature (1029)..(1029): n is a, c, g, or t
acagtttctgcccccgttgtaccacagagtgctatgcaggttattgggatcccgcccagcatccagcagctggtcctgcagctcgtggcggggatcttgcacctggggaacatcagtttctgtgaagacgggaattacgcccgagtggagagtgtggacctcctggcctttcccgcctacctgctgggcattgacagcgggcgactgcaggagaagctgaccagccgcaagatggacagccgctggggcgggcgcagcgagtccatcaatgtgaccctcaacgtggagcaggcagcctacacccgtgatgccctggccaaggggctctatgcccgcctcttcgacttcctcgtggaggccatcaaccgtgctatgcagaaaccccaggaagagtacagcatcggtgtgctggacatttacggcttcgagatcttccagaaaaatggcttcgagcagttttgcatcaacttcgtcaatgagaagctgcagcaaatctttatcgaacttaccctgaaggccgagcaggaggagtatgtgcaggaaggcatccgctggactccaatccagtacttcaacaacaaggtcgtctgtgacctcatcgaaaacaagctgagccccccaggcatcatgagcgtcttggacgacgtgtgcgccaccatgcacgccacgggcgggggagcagaccagacactgctgcagaagctgcaggcggctgtggggacccacgagcatttcaacagctggagcgccggcttcgtcatccaccactacgctggcaggctcctacgacgtcagcggcttctgcgagaggaaccgagacgttctcttctccgacctcatagagctgatgcagaccagtgagcaggccttcctccggatgctcttccccgagaagctggatggagacaagaaggggcgccccagcaccgccggctccaagatcaagaaacaagccaacgacctggtggccacactgatgaggtgcacaccccactacatccgctgcatcaaacccaacgagaccaagangcccgagactgggaggagaacagagtcaagcaccaggtggaatacctgggcctgaaggagaacatcagggtgcgcagagccggcttcgcctaccgccgccagttcgccaaattcctgcagaggtatgccattctgacccccgagacgtggccgcggtggcgtggggacgaacgccagggcgtccagcacctgcttcgggcggtcaacatggagcccgaccagtaccagatggggagcaccaaggtctttgtcaagaacccagagtcgcttttcctcctggaggaggtgcgagagcgaaagttcgatggctttgcccgaaccatccagaaggcctggcggcgccacgtggctgtccggaagtacgaggagatgcgggaggaagcttccaacatcctgctgaacaagaaggagcggaggcgcaacagcatcaatcggaacttcgtcggggactacctggggctggaggagcggcccgagctgcgtcagttcctgggcaagagggagcgggtggacttcgccgattcggtcaccaagtacgaccgccgcttcaaggtgaggcactagtgggtgggcacagcaagaccctgactacagcctggcaccctcacctggcccagatgcacctgcccacagccagatatcccccagcctagatccatctgttccatcacaggtacaccctcacctggcccatatgcacctgcccacaggcatagatcccccagcctagatccatctgttccatcacaggtataccctcacctggcacagacacacctgtccataggtatctatcccccagcctagatccatctgttccatca

SEQ ID NO: 118643 - DNA, 708 bp, Homo sapiens
acagtttctgcccccgttgtaccacagagtgctatgcaggttattgggatcccgcccagcatccagcagctggtcctgcagctcgtggcggggatcttgcacctggggaacatcagtttctgtgaagacgggaattacgcccgagtggagagtgtggacctcctggcctttcccgcctacctgctgggcattgacagcgggcgactgcaggagaagctgaccagccgcaagatggacagccgctggggcgggcgcagcgagtccatcaatgtgaccctcaacgtggagcaggcagcctacacccgtgatgccctggccaaggggctctatgcccgcctcttcgacttcctcgtggaggccatcaaccgtgctatgcagaaaccccaggaagagtacagcatcggtgtgctggacatttacggcttcgagatcttccagaaaaatggcttcgagcagttttgcatcaacttcgtcaatgagaagctgcagcaaatctttatcgaacttaccctgaaggccgagcaggtgggcggccaagcagtcagggatgggggatcctggggtgggggtggggtggaaggaccatgaggatcccttagcaactaggggacaccccagccctccccaccgcgttcccacctctctgtgccaacctacccaggctccatagtgatacttccttctgcctctaaagctttgggaaggacc

SEQ ID NO: 118644 - DNA, 506 bp, Homo sapiens
cccccacccaccaatctgagctataactttcaccgccccccggcctctgatgcaagctgcagctctctcctggctcatctaggttgtaacccccacctccccttacctctgacctgggatacagccacgatcctctaacctcaacttgaacatcagctctcctggaagcccgccccccatcccttattgtgaactgtagataccccccagccagcgctgtagacactgcctgatcctctcaccgccacagcaggccccaggaaagccttgaccacctgggctgtaagcaccccacgcccaccctcccagccaggtttctcagtccctcactgtcctcagcactgtcccctccaggctggcaggctcctacgacgtcagcggcttctgcgagaggaaccgagacgttctcttctccgacctcatagagctgatgcagaccagtgagcagtgagtggtcccaggcatggggacctccggctacaaccccccaaggggatggagggagg

SEQ ID NO: 118645 - DNA, 427 bp, Homo sapiens
agtcaagcaccaggtggaatacctgggcctgaaggagaacatcagggtgcgcagagccggcttcgcctaccgccgccagttcgccaaattcctgcagaggtgaggagccctccacccccgccctcgccatccccttcatcagaacgcccagccaggcctgtctgctatgagcactcccacaccccagccctccgccctcaggtatgccattctgacccccgagacgtggccgcggtggcgtggggacgaacgccagggcgtccagcacctgcttcgggcggtcaacatggagcccgaccagtaccagatggggagcaccaaggtctttgtcaagaacccagagtcggtgagtgtgtttgagggacaggcagagaaggagaggggaagagagagaaaggtatagagagggactgagagagagagagag

SEQ ID NO: 118646 - DNA, 2969 bp, Homo sapiens
  misc_feature (1029)..(1029): n is a, c, g, or t
acagtttctgcccccgttgtaccacagagtgctatgcaggttattgggatcccgcccagcatccagcagctggtcctgcagctcgtggcggggatcttgcacctggggaacatcagtttctgtgaagacgggaattacgcccgagtggagagtgtggacctcctggcctttcccgcctacctgctgggcattgacagcgggcgactgcaggagaagctgaccagccgcaagatggacagccgctggggcgggcgcagcgagtccatcaatgtgaccctcaacgtggagcaggcagcctacacccgtgatgccctggccaaggggctctatgcccgcctcttcgacttcctcgtggaggccatcaaccgtgctatgcagaaaccccaggaagagtacagcatcggtgtgctggacatttacggcttcgagatcttccagaaaaatggcttcgagcagttttgcatcaacttcgtcaatgagaagctgcagcaaatctttatcgaacttaccctgaaggccgagcaggaggagtatgtgcaggaaggcatccgctggactccaatccagtacttcaacaacaaggtcgtctgtgacctcatcgaaaacaagctgagccccccaggcatcatgagcgtcttggacgacgtgtgcgccaccatgcacgccacgggcgggggagcagaccagacactgctgcagaagctgcaggcggctgtggggacccacgagcatttcaacagctggagcgccggcttcgtcatccaccactacgctggcaggctcctacgacgtcagcggcttctgcgagaggaaccgagacgttctcttctccgacctcatagagctgatgcagaccagtgagcaggccttcctccggatgctcttccccgagaagctggatggagacaagaaggggcgccccagcaccgccggctccaagatcaagaaacaagccaacgacctggtggccacactgatgaggtgcacaccccactacatccgctgcatcaaacccaacgagaccaagangcccgagactgggaggagaacagagtcaagcaccaggtggaatacctgggcctgaaggagaacatcagggtgcgcagagccggcttcgcctaccgccgccagttcgccaaattcctgcagaggtatgccattctgacccccgagacgtggccgcggtggcgtggggacgaacgccagggcgtccagcacctgcttcgggcggtcaacatggagcccgaccagtaccagatggggagcaccaaggtctttgtcaagaacccagagtcgcttttcctcctggaggaggtgcgagagcgaaagttcgatggctttgcccgaaccatccagaaggcctggcggcgccacgtggctgtccggaagtacgaggagatgcgggaggaagcttccaacatcctgctgaacaagaaggagcggaggcgcaacagcatcaatcggaacttcgtcggggactacctggggctggaggagcggcccgagctgcgtcagttcctgggcaagagggagcgggtggacttcgccgattcggtcaccaagtacgaccgccgcttcaagcccatcaagcgggacttgatcctgacgcccaagtgtgtgtatgtgattgggcgagagaaagtgaagaagggacctgagaagggccaggtgtgtgaagtcttgaagaagaaagtggacatccaggctctgcggggagtctccctcagcacgcgacaggacgacttcttcatcctccaagaggatgccgccgacagcttcctggagagcgtcttcaagaccgagtttgtcagccttctgtgcaagcgcttcgaggaggcgacgcggaggcccctgcccctcaccttcagcgacacactacagtttcgggtgaagaaggagggctggggcggtggcggcacccgcagcgtcaccttctcccgcggcttcggcgacttggcagtgctcaaggttggcggtcggaccctcacggtcagcgtgggcgatgggctgcccaagagctccaagcctacgcggaagggaatggccaagggaaaacctcggaggtcgtcccaagcccctacccgggcggcccctgcgccccccagaggcatggatcgcaatggggtgcccccctctgccagagggggccccctgcccctggagatcatgtctggagggggcacccacaggcctccccggggccctccgtccacatccctgggagccagcagacgaccccgggcacgtccgccctcagagcacaacacagaattcctcaacgtgcctgaccagggcatggccggcatgcagaggaagcgcagcgtggggcaacggccagtgcctggtgtgggccgacccaagccccagcctcggacacatggtcccaggtgccgggccctataccagtacgtgggccaagatgtggacgagctgagcttcaacgtgaacgaggtcattgagatcctcatggaagatccctcgggctggtggaagggccggcttcacggccaggagggccttttcccaggaaactacgtggagaagatctgagctgggccctgggatactgccttctctttcgcccgcctatctgcctgccggcctggtggggagccaggccctgccaatgagagcctcgtttacctgggctgcaatagcctaaaagtccagtcctttggcctccagtcctgcccaggccctgggtcaccaggtcactgctgcagcccccgcccctgggccctggtcttcctccaacatcacacctgctgcccattctccatttctgtgtgtgtcaaaggggactaacagcagaatctacctcccaactgccatgtgattaagaaatgggtcttgagtcctgtgctgttggcaaagtgccaggcacagttggggaggggggggtccttaacaagcgtgactttgctcattctgtcatcactaaggcaataaacctttgccaggtgaaaaaa

SEQ ID NO: 118647 - DNA, 1135 bp, Homo sapiens
acagtttctgcccccgttgtaccacagagtgctatgcaggttattgggatcccgcccagcatccagcagctggtcctgcagctcgtggcggggatcttgcacctggggaacatcagtttctgtgaagacgggaattacgcccgagtggagagtgtggacctcctggcctttcccgcctacctgctgggcattgacagcgggcgactgcaggagaagctgaccagccgcaagatggacagccgctggggcgggcgcagcgagtccatcaatgtgaccctcaacgtggagcaggcagcctacacccgtgatgccctggccaaggggctctatgcccgcctcttcgacttcctcgtggaggccatcaaccgtgctatgcagaaaccccaggaagagtacagcatcggtgtgctggacatttacggcttcgagatcttccagaaaaatggcttcgagcagttttgcatcaacttcgtcaatgagaagctgcagcaaatctttatcgaacttaccctgaaggccgagcaggaggagtatgtgcaggaaggcatccgctggactccaatccagtacttcaacaacaaggtcgtctgtgacctcatcgaaaacaagctgagccccccaggcatcatgagcgtcttggacgacgtgtgcgccaccatgcacgccacgggcgggggagcagaccagacactgctgcagaagctgcaggcggctgtggggacccacgagcatttcaacagctggagcgccggcttcgtcatccaccactactattaaactgtaacttgtctagtaaattgtcaaaaaaaaaaaaaaaaaaaaaaaaaaaaaaaaaaaaaaaaaaaaagacaaaaaaaaaaaaaagggggcggcggcgcccacccaaaaaatttacccgcgggggggcccagaagttgagcggaacaccccgattttgtggtgaacagagggggcccccaaagggggcggcgcttataaaaggagcgcagaagaagcacgagggcccgcgactttaaaacaagagcgcgctcggaagtgggaaacaacggccgcaaaccgggggcgcaacatggggagaagaaacaccctatacgcggggggggggggacaaatagggggcaaaaacgccaccagg

SEQ ID NO: 118648 - DNA, 950 bp, Homo sapiens
acagtttctgcccccgttgtaccacagagtgctatgcaggttattgggatcccgcccagcatccagcagctggtcctgcagctcgtggcggggatcttgcacctggggaacatcagtttctgtgaagacgggaattacgcccgagtggagagtgtggacctcctggcctttcccgcctacctgctgggcattgacagcgggcgactgcaggagaagctgaccagccgcaagatggacagccgctggggcgggcgcagcgagtccatcaatgtgaccctcaacgtggagcaggcagcctacacccgtgatgccctggccaaggggctctatgcccgcctcttcgacttcctcgtggaggccatcaaccgtgctatgcagaaaccccaggaagagtacagcatcggtgtgctggacatttacggcttcgagatcttccagaaaaatggcttcgagcagttttgcatcaacttcgtcaatgagaagctgcagcaaatctttatcgaacttaccctgaaggccgagcaggaggagtatgtgcaggaaggcatccgctggactccaatccagtacttcaacaacaaggtcgtctgtgacctcatcgaaaacaagctgagccccccaggcatcatgagcgtcttggacgacgtgtgcgccaccatgcacgccacgggcgggggagcagaccagacactgctgcagaagctgcaggcggctgtggggacccacgagcatttcaacagctggagcgccggcttcgtcatccaccactacgctggcaaggtgcgccccctgcccctaccctaccctgtgcctcctcgcagacccccagggctccaggctgtagcccccaccctccagcacccaggctggaaagagcctgctaggacccttatccagggctgtagaattccactgtcccccgcctcaatccaccccctactaaccagaac

SEQ ID NO: 118649 - DNA, 414 bp, Homo sapiens
cctaagggtgtcatgcccctgagccagcgtttgcattgctgtacagaaacctcccacggacacatccagcttctccaggcctctctcgtcccgcagaaacccttatagacatcaacagtgtccctccccgcaggatccccctctccccaaatctagctctcctggggcccctgcctgctgtttgcaaaggttccataacctttccaggcagctgcagcccgtcggcagagttgtaacagcagctgccatttcatgccagacacttggcaccgcattatctcagcgaacaaagctcaatgcccctgttttggcagcggggggtggggggactgagatgccaggacataaagtggtggaaggcaggattcgaatccaatgctgccttgtttcaaaccagggctataaaccaggacg

SEQ ID NO: 118650 - DNA, 278 bp, Homo sapiens
tgtttacacctataatctccctctcctgttttcctagtttctattcaagtatttggggtaactgatatttcttaaaacaatatgtattcttggaaagagatgtttctagaatccccttcttaggtgacttattaggaaaaattataagaataagaacgagaatagagaagaaaagtaattgaagacatccacttcaactctaaatccccctaggagaaaaaaggctagcacttatttaaatgcccttcttaggtgacttattaggaaaaattataaga

SEQ ID NO: 118651 - DNA, 589 bp, Homo sapiens
ccatgctgggggctatatgagaataggaacagggtgagagctgaccccaggagccctcgtccaccctctggcctcacccctgggaacagggaagcctccctgtcctggctgtttggagagagagctccacgcagggcgaagctgggacctggagccctccgcaggatacggcccgctggttctcagcctctgccggccccagacgcaccaacctggagaaggtgcattaatgggtcggagagcgtgggtggacgggccaggcagggagagacggagccctgtgcgggctcacagaggaggccttcaactctaaggccttacccagcaaggagacactgctctgccgtgggctccggtgtttgcctcctgagggagggcaggagccactaggacccaaaggccggaagccaggtccaggcccttcacagggacggccggggtgcagtgatcagggcctcggccccgttctcagaggccacccatccatggtgcacccctccctgtggaaggccagaggccccatgagatatggggatgcagttcccaccccagagggtccaccaccctgtgagctgtcactcagagcagg

SEQ ID NO: 118652 - DNA, 550 bp, Homo sapiens
gcacgagatttcctgaaagccctgagctgatcctttttcaattagccaactttcagctgagtctgttaactctacttgggtttttcatttcactgaaatttgcttctagctccagccctcctgtaatcccttctatattggcatagctggctgagcagggacgcttccatcccctgcagtcacttaagattactgcccatggagacttcccacccaacagtcaagttgccatgttgctatatgtcgtatatttccagaaggaataccttgaatgaacattctagagctcattgagatgagagacatgttaaaacaatatatggtggctcccagcacttcgggaggccaaggtaggtagatcacttgaggccaggggttcaagaacaacctggccaacatggtgagaccctgtctgtactaaaaatacaagaattaaccgggtgtggtggcccatgcctgtagtcccatctactcgagaggcagaggctgcagtgagccgagatcatgccactgcactccagcctgagtgacagagcaagtctctgtctta

SEQ ID NO: 118653 - DNA, 389 bp, Homo sapiens
tgatagctcattgtggttttaatttgcatttcctggattagtgatgttgagcatcttttcatatacctgctggccatctgtacattttctttggagaaatgtctattcaaatccttttttcgttttttaaccaggttatgtgttgttctgcttttgagttatagaaattccttatatgtattttggatattatttatcagatacatggcttggaaatattttctcccattctgtagattgccttttcactccattaatcatttcctgtactgtgcagaagctttttagtttgatgtatccatgctcttcttatattacccctgctcagccctggagttggtcatttctccaagaagccatgactccttagtggacagtggtacgtggaa

SEQ ID NO: 118654 - DNA, 298 bp, Homo sapiens
ctcagaatcaacaaaaaattatcctacatggttgcaacgtattcaacatttcaggaatttccctgtaacaactgtaacacagttaagcaacaggtatgctggaggttagttaatgctgtgttttccagaattaaagatataaatgcatttctcaaatatatacactacattcctttaaatcactgtgggtgcgacggcttacgcctataatcccagcactttgggaggctgagatgagtggatcacaaggtcaggagttcgagaccagcctgaccaacatggtgaaccagatctctac

SEQ ID NO: 118655 - DNA, 401 bp, Homo sapiens
cataattgcagctttcataatcttaccattgagggagcattcccaacctgttaggtgtcaggcagaataggacataaggtttctgggagctggcatttaaagattagatgagatggatcaacacagatcattgtgtcatctgatttcattcatgtgaaactgtaagtaatccctgggcctgtgcttcctctgggaggtttctgggaagaggaggaactggataaggcagggggagcattcatagtagggcaccttgggcagggctgtgtgtgtgtctggctcatggtggtgctaggatggcatgaacttggttcctacatctttggtccacatgggccccactggccatgcacacaggtgtgtagagtaatgtaaatatggcagctgggaaggtgcaagta

SEQ ID NO: 118656 - DNA, 481 bp, Homo sapiens
tacttttccacagggttcagttatcagtggtcaactgtggtccaaaaatattaagtgaaaaattgcagaaataaacaactcacaagtttccaattgtgtgacgttctgggtagcatgataaaatcttgagccatccaactccattccactagggacatgaatcatccctttgtctagtctggatacaggctgtggatgcagtagtgaatccacactgtttgcactctccgcctgttagtcagttatctagtgactagatatctaggttatcagaccaactgtcccagtattgcagtgcttatgttcacatgaccattattttactttataatggccccaaaatgcaagagtagtgaggctggcaatttggatatccccaaagagaagacgtaaagttctccatttaagtgaaaaggtgaaagttctcaacttaataatgaaagaaaaaaaattgcatgccaaagtcacccaggtctacagt

SEQ ID NO: 118657 - DNA, 607 bp, Homo sapiens
ctcatccctcaggtctcgttgatttgtgccaaatgagggcaattactagacatatggacacctcctctacctaatgaaaagctgactccctcattcagtcatgttttttatccaaatatgttttaagtgaaccagcaaaaccatgcagagccacttcacagagtatgcagtttgtggactgaaaatagagggatcaggagctgaaatccagcccatgctcagcactctgagccacgtgtctcagcatggatctacatccacctgaaagaagggcatctcttcctttgcaccaagtaacctcagcttgccaagtcaagtgcctaaagggctgttttctcctacggcacatttttcaacattcacatcaggtatcctattgtctacccagtgtcataggactatttgacctgtgaaatcacatctccctgggtctcattttcctcatctctaaaatgaaaagacgggcaaaataaattctaaacctccttccatgttaaaaactctaaagaacaaacaacctaggcttccctggctctttcagagttacggtgtaatctgccaaagaggaaaaataacgactagacctcgagatcctagcggcttccta

SEQ ID NO: 118658 - DNA, 240 bp, Homo sapiens
gcttaaactatagcctgctacatacctaggccatatgatatagcctcttattcctaggctccaaacctgtacagcatgttattgtagtgaatactgtagacaattgtggtacagtggtaagtatttatgtatccaaatattatctaaacatagaaaaggtacaataaatgatacacctgtacagggcacttaccaatacagaagcatgaccatttatatagaaagttttaaggaatctca

SEQ ID NO: 118659 - DNA, 417 bp, Homo sapiens
agagccggcagggtgtgaagccagattggaggctttctgcagagtcaggcctcccaaatcctgggatggagtcaaggagcttttggctgtcccacccttttggtagtgccccggtcactcttcctcctccaagtccccatatccaagcctgtcatatctcttcagctctaggggcctgtctgtgacttccaccctaagggagctggcactttgtgtcatgctacattgtccacatcaccgattccccctccctctctccccttccttcttcctccctgttcttttttttttttttcctttgcaacggaatctggctctggcatccaggctggagtgcagtgacacaatgtcagctcgctacaacctctgcctcccagattcaagcgattctcgcctcagcctcctgagtacctggga

SEQ ID NO: 118660 - DNA, 327 bp, Homo sapiens
cttacagatgtagggcatcatatccataggagacattcgccaggcataaggatcctctggagagacacatcagcttgaggaatacagggtggtggctctgtccagccaccctgccccatctcctaccctcccatccattctgcattgggtgcctcctgcatgcagagtcctcctccaacagcaaatgcctcccagatttgctgaagggcctgctccagggtctctgtggagacgcccctgggacccttgctgaccaccctccacaatctgcacccccatcctgtgcccccttcgttttttttgtcccaccactacctggtggtgaga

SEQ ID NO: 118661 - DNA, 2797 bp, Homo sapiens
  misc_feature (500)..(500): n is a, c, g, or t
  misc_feature (951)..(951): n is a, c, g, or t
  misc_feature (1085)..(1085): n is a, c, g, or t
  misc_feature (1088)..(1088): n is a, c, g, or t
cttcgaatcagttattttataacagtatatactaaacatcattactccttttcaaacataaataacgcaatacaaattggacaaaaaattcaggaaagatctgggatcaaaaaggaggtattgaaacatcacatgtactccataattatatacaaatattttgtacccataatatttaaaatacagaaaattaaaaggtacattttcctcaaagtgcatgcttcttttgctatgcaaaactgcaggatatggaaagaagtgtattaaaacactaaatcactttatgtggaagataaaagggatggtacccaatgtacaacttcatgtagtgcactgatatattcaatataaatgatgtattaacttcaagataacatgagaaagttaaattatctaacttatttcaaactaggggatagtatgttctcattattagaagccagaattctgcttatccatttctattattagaaaaaaacataatttttattcttgtcttngaaatagacaccttgatataattctctgtaaatgtagcatgatagtctgtttacagagtttatatcattccaagactgcacttctaaagtgagaaaatattaaaggatataaactcactcctctctacaaaattccttattttttatgcaatggctttaaaatgtatggaaggggagttatggaaacaatccatacctggaaagcattctatccatgcctttgaaatggttatctagtactagattcttatcggtgcctagctatgtaatgtgtgtagcttaagatttttaagaaagaaggataaaatgctcaatataaatttaaaaagcacttttattggaatattgagtcatgtatttgctttctgtaagtccttttatctataaaataatagttgagaaaggcaaatagaatatgtggaggaattaaaaattcagttgtagggtggtnaatgaaaaccaaatttttcattcaccacattaaatgtaaatgggtattatactcaatttaagcagcaaagttgctcctttttttttttttttttttttgagacagagtctcacactgtcacctgggctggagtncantgttatcatctcgcttcactgcaacccctgcctgctgggttcaagccattctcctgccgcagcctcccatgtagcttcttaagatgtgaagatttttaaattaagatgactcttgggatgaaccatttggtgttggttaaagacttttactgacatatttttaataatttttttaacttttattttcaggtcaatggcacatgcgtaggtttgttatgtaggtaaactagtgtcacagggatttgttgtgcagattatttcaccacccagctattaagcctagtacccattaattgtttttcctgatcttctgcttcctcccaccatccaccctcccagaggccccagtgtctgttgtttccctctatgtgttcatgtgttctcataatttagctcccatttgtaaatgagaacatgcagtatttggttttctgttcctgccttagtttgttaaggataaagacctccatccagctccatccatgttcctgcaaaggacttgatctcactctcttttatggctgcctaacattccatggtgtatatgaaccacaaaataaagatggttcttaacttttaaattaagatttttaaattaagatgaatcttgatttttaaattagtatggttttaagatagttttacagatagattagataatctatctagagatagatagggagagatatctatcaatacatatctctatctagatatagatagatggttttctatatagacctatctatctatatatgtatacatctatatatgtctacacatatctctatacacatatatatatttatatctacatctgtatttctacatgtatataggtatgtatatatctacatgtatatatgtatatagatagatatatacataggtatctgtatatatgcatatacatgcctatctatctttatctacatgtattacatagatagggtaattactgataaatcctttggtcttctttgtaaatctctgggctaaagacccctccagtattatacgtgttctggtctagattgctcactcaccggttctcctcactatctagagaagatccacttagcaggcctccccttaaagaagggcaccttaactggactcactcctcccatagtagactgcacagtacacaagcagaagaggagagctcagtaataaagtcaccataaaggataatttttaaatgaataaagacatcagaaaatccagtattggctagcacatatggctatcagcaagctcaccctacaaaaaaatagtgagaaaacagttcgaatattggccgtttggggcacatattctacaaaaaggaaaagttttgaaatgtatatatatttaatttaactctttaaaatatttgtaggcaagcccagtggctcacacctataatttcagaactttgggaggccagggcaggaggattgcttgaggccaggagaccagcctgggcaacatggcaagaccccatatctacagatggttttaaaaaattagccaggtataacacgatgaaaccccgtctctactaaaaatataaaaattagccgggcatggtggtgggcgcttgtagtcccagctactcgggaggctgaggcaggagaatggcatgaacccgggaggcggagcttgcagtgagccaagatcatgccactgcactccagcctgggcaacagagcggagactccatctca

SEQ ID NO: 118662 - DNA, 665 bp, Homo sapiens
  misc_feature (1)..(1): n is a, c, g, or t
  misc_feature (21)..(21): n is a, c, g, or t
ncctttctcctacgatccttncctcttcacgccaggagcccttaaatggagtacccacagggaatggagctctaggctaagtgctttgggattacaggtgctttgctcttgtttggaggtccagacatatgcttgagaagcagcttgggatactcaagagaggcctgaactggtaccctggaggccaggatgaaaacccaggcctctccatttactttcttgggccccagagtccacatttgggattcactgtctaccagggcacctctctgggtggcatctaggagccggaggcaggccagagtttcacccaggctggagtgcagtggcgcagtcatggctgtctgcagcctcaacttcctgggctcaggcagtcctcctgccttagcctcccacagtgctggaattacaggcacaagcccccgtgcccggctttcagctagtttttgtagctcatagtgattattcttggagccaataatcgtgcatgcatccacatcttgaaattacatggtgtcaccttgaccagtctgttgacatatgcagattaggtatttatgagatccagagacttataggggaggggtggatttcagggaaaagggaacctcttagagaaaggtagggagtgtctgcagttctgcctgtgaggagggtaccaggac

SEQ ID NO: 118663 - DNA, 249 bp, Homo sapiens
attttaatcatttcctgcaggatatgaaataaagccccaaacactcttatgaagcctcaaagctctccagtaactttactaaccaagtgatatgtaagtcagtttcataaatttttgaatataggcatcaaatcagttccaagagctcagcagcagaagattgcagcagggacatcccactgcctaggaactgaggacatattttagacatctattaaagcatatccggatttggctttggtcagtcag

SEQ ID NO: 118664 - DNA, 342 bp, Homo sapiens
aaacgtttattgtctatgttattactttatgtgatgttgcattaaaaaactcatttttgactgggtgcagtggcttatgcctgtaatcccagcactttgggagtccaaggcgggtgtatcacctgaggtctagagttcaagaccagcttggccaacatggtgaaaccccatctctactaaaaatataaaaaattagccaggcatggtggcgtatgcttgtagtcccagctacttgggtggctgaggcaggagaatagcttgaacccgggaagtggagattgcagtgagccaagatcgtgccattgcactccagcctgggtgacaagagcaagactccatctc

SEQ ID NO: 118665 - DNA, 143 bp, Homo sapiens
aatgggcccatggggttgggtagcagagattcaaggatcctgctctacccatggccctgaatgtgaccatcgctgttgagcaatgggccatcccagtgggtctcctggggcctggttggggggcggagttgtttccctgggat

SEQ ID NO: 118666 - DNA, 201 bp, Homo sapiens
gtccagataccctctagttggcaaacaagtgacaatatgcaaattatcagaagccacaaagatttcacatgcatgtccacgcagatgccctctcacatacacatgtccagataccctctagttggcaaacaagtgacaatatgcaaattatcagaagccacaaagatttgcttcggtggggagcctgaacaaacaaggaac

SEQ ID NO: 118667 - DNA, 417 bp, Homo sapiens
taatacattatcaaaacattatcctgaatcaagttctagcttcttttaccctaattttaaaaccagtaaacctttggacaccagaatttaaaattgattccgtaattgttttccttcttaaattgtatcttctaagtatatatggctttaataaaatgaagtgttttaagttgatgagaaaattttgattttggattgttaatatgttacaaagtatatttgttttaaattttttaatgaaaatagtttttataagaatgtacagataggctgggcgtgttggctcgtgtgtaatctcagcactttggaaagccaaggtaggcagatcgcttgagcccaggattttaagaccatcctgggcaacatggcaaaactctgtctctacaaaaaatataaaaattagccaggcatgatggc

SEQ ID NO: 118668 - DNA, 747 bp, Homo sapiens
gtgataaggttaggctgcataggatgtaccagctgactggatgtggatattaaaggcaatgggggtattaacaattatttttaaaatacagcaagaatttaaaaaacttttaatcaatcaaaaattccttatttaagaattatataaaatatcagtaagtgaaaaacatttaaaattgtattttatcagggattataacttaagtagaagatacatgttaatttcttaaaacatttcatttctgtgctaagctctttcaaagcactggatggtgatctaaaggtcaccaaattctttgtcccaaattggtaattttaaagtaaacataatttcaacgttaggcctattttgttatttgctgagaaatgtctcaatgtcaaccaggcagttctcctctcttattaaagtccatgctcagaatgcctgtgtaacctatccttagtgataaacaaggtggcagatagatacatgataaaacaagtttgccatgtgcctcaatgtggctgacatttatacttctcagaccttgctattttagggaaggtatcagtataaccagggcattctttttcctggaactaaaaatccttaataatcagtcactattataaacagaatgatttacatacaggaatcaataaacagttgcttttggttaatggttatctggagtaggaggatagttatatttcaaatagaatagaaagctttattggaatacttacatgtctttttagtttgaggacc

SEQ ID NO: 118669 - DNA, 114 bp, Homo sapiens
gggaaccctgttgcttgtcggtgtctgtttccaagacggcagaaagcctgaccatcgcggggccctggcgggagcgttgccatacaagtttccttccaccagggggagcacgtg

SEQ ID NO: 118670 - DNA, 543 bp, Homo sapiens
ttattattatactttaagttttagggtacatgtgcacaatgtgcaggttgttacatatgtatacaagtgccatgctggtgtgctgcacccattaagtcgtcatttagcattaggtatatctcctaatgccaatactagtttttttaatgaactattcttttagtaacctattcttcagtcttgcttgtcctgcacgtcacatcaactctggtataaggtacggggaatatattctcccttctttttgaaaattgtttctgcaggctgggcatggtggctcatgcctgcaatcccagcactttgggaggctgagttgggtggatcacttgaggtcaggagttcgagaccagcctggccaacatggtgaaaccccatctctactaaaatacaaaaattggctgggcatggtggtgcacacatgtagtcccagctactcaggaggctgaggcagcagaattgcttgaacccgggaggcagaggttgcggtgagccgagatcgcaccactgcactccctcttggacaacagagtgaaactccgtctc

SEQ ID NO: 118671 - DNA, 626 bp, Homo sapiens
gtggcatgtgcctgtaatcccagctactcaggaggctgaggcaggagaattgcttgaacccaggaggcgaagattgcagtgagcagagattgcaccactgcactccagcctgggcgacagagcaagcctggggaaaaaaaaaaatagaggtcacatcgattctaagccacctcttcagagacaaatgaaatatgcagccgaagttgtccacaaaataaaacgaagtctcaatttctattgttgtgtgtgcacacagccccaataatttaggacagattttcctaatcataggacagaaagaatccaggcctttgataacaaatattagctgtctgccggatcaatactgtagtgcactttaaggaaataaacagcatgcactcctaaatattttccatgcaaattttgtgtaaaaaacaatcaccttctaaagatatttttattatatgaggaattcgcgtttactgtagaatatgtggcaaattaaataagcatacagagcaaaataaaacactccacccagaggcaaccatctctttattatttatataaaaagacatataaagagagaactatgctacacctgagacagtattttatataccattttgcatcctgcttttttc

SEQ ID NO: 118672 - DNA, 385 bp, Homo sapiens
ttccttgccacctcccactcagaggctgaagaaccagatactttcttagcctcccttgcagctaaggatgactacgtgacctggctttggccagtgagatgtttgctgcgggccttctgaaaaagtatttgcttttctgagcagaggcacaaatagctgatgttgtccccttctttctttctgctttgaatatagtcaagccgtctggagctgtgacagccatcttgtgaccatgtggggatgagcacgaggaagaagacaacatgtgaaggaagaaagtcagaaagagcccaatttcttgatggcatcattgagcagctgaacccatgccacagttcctgttaacttaaaaaaataaataaagccatatgtgtttaagccacta

SEQ ID NO: 118673 - DNA, 658 bp, Homo sapiens
aacagctataatgtgatatgaaaatatttttgatatatgttggtgagaaagttgcagacactgataataagactataatttgttgactacattcaattagaaatgaataaaaataaaggtttaatttttcccatcaaagtccaaagagcacccctaaattctattcacagaacctcaggggaggaaatcttgtaccagagagtccattaattagtataaaggatgtaagaaataatatttcattggtgaaatgaattctgttaaaaatatgtgcaatggctagaaattttgtccatgtatgaaggtacatgcttgcatgaataaaagataaaaatctggcaagccagcccaacagttcagcatgttctggaatggcatctaggcctcagactttgtgtgatcctataaagagccagcttgccagatgtccctagtgataataaatgttattttcagccactacatgttgggggtaatttgtaacacagcaataaataaataaaataaataaatagtatcacgtaatagaagattttcctgttccaaccagaagataggttgatcctgttaccataatattaggccaactatttcatgtggattttttatgtaaaggacttgctggagttcctaaagatcagagcatgtattaggttgg

SEQ ID NO: 118674 - DNA, 275 bp, Homo sapiens
acagaactcagatgtttgagaattgacaatcaagtcctcctggacctagaagcataagaattctgttagattagctcttgccacccctgtcagaacttaactgttcatagatttatgttattgacccactttcttcaagagcagaggcagtttttcaggcagtgctgacgccagaattggaaaagcagattctcatttaacaaacatgacctcagtaaaaacagccatgttgttggtctccatttgaaggcagaggtagggattgggagtatgtg

SEQ ID NO: 118675 - DNA, 552 bp, Homo sapiens
  misc_feature (28)..(28): n is a, c, g, or t
  misc_feature (94)..(94): n is a, c, g, or t
  misc_feature (153)..(154): n is a, c, g, or t
ctcgacggtgtctgcaaatagtagggancaataaatactcagtgaatgaccaggaatggtggctcacacttgcagttccaacactttgggaggncaaggtggaaggattgcttgagccaggagttcaagaccagcccgggcaacacagtgaannctcacctctaaaaaaataaaactagccaggcgtagtggtgtgcgcctgtagtcccagctactcgggaggctgaggctggaggatcgcttgagtccaggagttctgggctgtagtgcgctatgccgatcgggtgtccgcactaagttcggcatcaatatggtgacctcccgggagcgggggaccaccaggttgcctaaggaggggtgctgagtgttaaggcctgaaatccaaggcttggagagcctggaattctgatgtccaagggtagaagaagaatgtgtcccagctccaggagagagacaaatttgcctttcctatgtttttattctatttagccccccagccagttggatggtgttcacccacattgagtgcaaatcttccccacttagtcactc

SEQ ID NO: 118676 - DNA, 456 bp, Homo sapiens
caacacccgacggggtggacaggaagagaggaaggaggaagagagggagggagaaagtaaagaaaaactttacccctagagatcaaaggttaaaacttagctcttccctggaattgtctgatcttgattcaagggcataggaagtgtatggctgctctcattttataccagaaaacagcagagtccctgattctttgctctaaaaccactataaaaggaaactggatctaaaatcctgtttcaccctgaattgagaatccatctgtgcactctgagcgctcttcctcaccccatccttcaccgaacagaaaaaggaggcgggcagtccagtgctttgcacatccctaccacaggaccacactactgctaaggtgtttaaaaaccaggatcctcatttttgctcattctcaaatggctgcttcttcagacatgacccaccccgtcgggtggagccca

SEQ ID NO: 118677 - DNA, 471 bp, Homo sapiens
tttgaggcactaagaagaatatagacatcacttttaaaacagctcctattagagcaacatgaattctgtgaaaactgaaggaagaacaaacatcaaatttatgatgaagcttgagtagaagaatagtaaaatcactgatactttacaaaaaaactgtatgaggacaatgacccaaagaaatcaacagtttacaaatgaataactcattttaaaaatggatgagatgatattgaagaagcagcccacagcagcagatcatccacatcaatctgcaagggaaaagttcatctggtttatgctcttatttattttccttttttaaaaattttttttcttttttttttctcagagattatggttctgatcatgccctagttgaagagaacagataataaacagcagaaaaaatagctgacaccatacatttcaacgggtccagcttatacatttctaacagaaaaattaaagtgg

SEQ ID NO: 118678 - DNA, 843 bp, Homo sapiens
cgagcctggatttccagcctctctattcaggtgagtgctggagaatggctgttcttaagtcaggttttatttttagttcccgctccagctctgtgtacgcaaatcgcagggtcaggaggcacaccctgggaggcacagtgcatgctcatgcttttggtaacatctgattcactcagccccagacccagcctaaacaggtcctgagggagattgttagatctgcctttgaattaaaacctccactgaggtgagaagctgtggtgtaacgtttgattaatttacctatgatttctgatccgtcgtgaagtaaatcagccttgatggaggaattgtactgatggaatattgaggaaatgccaggtctagttagagatttagagaccttcccccatccccaactctgcacgcaggtgccacacatttgtacacacttgggggcatcaagagaagggcacacagagggggcacatagagtgggtgggagcctcaggccccatccttgttgccgacggttttaccatcacattcatgactcactcttcaagtttaacacttgaatcttgaaaggcccttggaaaggatgtaagatggtttcattttgtaatagcttctctagtgaatagttttagagacaagttctggggtcttgaatctgaatactctaagagctaatgggttcatttggtaaaaatgtatgctgttgcttgagaaagagggcagagtttattaatcaattcttccttctccctcagaagacaaatgtggcagcagtcacacacactctcagaaacaccatcaaatttgtatcctactgactttgccacagtcacacttaaaatgaca

SEQ ID NO: 118679 - DNA, 609 bp, Homo sapiens
ttcacactgggtcgagtcagtggcacgatcttggtctctgcaactccatcttccaagctcaagcaatcctcccaaagtgctgggattactgctatgagccacatcactagacctaattctcacttacaaaatgagatacgtataacaaaaaaatgaagagaacatctctttaaatgaggtctcaacttatttcctatcatacacatatgcttagggagtaggttaaaaatcatttaagattctcaactcttgttttgaaaaacacttaattaaccttgttaaatatcaaactttacgaccataatcataaccttaagggaaagagcgtcttttcctttggcccatttgctcacggcaggcaatcttcttagtgctgagtgttttccttcagcctaaatgctaaaaattcaggacacagtcattaatagggatgacagcggtagcatttcatttatgaatattcatgaagtgaaatccatagcattaattacattaatttacatacctgaatacaagtgagccataagtgataactaagccttaaaaaaatgttgctaaccatatattgtatgttttcttttaaatgttatttaataagggtgaaggtga

SEQ ID NO: 118680 - DNA, 402 bp, Homo sapiens
aaccacaactgctacctagggattgttgatcatttttaaggatagtctgcaatctcaggacctctactgggtttaggttatctaaagctgggcctggaattgatttgataagacaggcctggagagaactgaattgccctaaataagagagtaaaataatttagaattttcttgcacattctgggaagtggagtggggaaagaagagcaagcaaatagtgagggacccaggtggaatggccatgtcagaatttttgaaaaggaaagaaatagaaaggtcttttaagaaaacattgagttgttgactgggcagtgctgggcagtaacctctcttgctcaccaccaagctttgtgctaagtgcaagagctgtaaataactgtgtagcaggaagaaggaagggga

SEQ ID NO: 118681 - DNA, 445 bp, Homo sapiens
ctacaattatatatctacaagccccaaatgaaaatcaacgaaaaatagtaagctcagaatggtgacaaagagcaaacttaaaatagctataaatcagcagtcagttggagtgtcccagtctcttgaaattcagttaaaatgagccattttatgcactgttgaagctcaaagcttacctcaattcgtttttaacttctaagaggtttatgttctcatcctcacatttgaccctgggctcttgtttttgtatatgctgtgtttctttccttactatatcattttacttgagtctgaagatcataggaaatattgaatatataggttttaaaatagaagtgtgcacagaaacataatttatgaatttactcatttttcatccatgcaaaaatcagataacagttataaaactgttaaataaaaaaggaaaacataatctctcttcaat

SEQ ID NO: 118682 - DNA, 142 bp, Homo sapiens
caccgtctgccagctgcactcctcaccaattctttcttggagaaacttcatggcagcactcatagccatagacctctccggctccagggcaggatgcctgtgttcaaatccctgctccacaacctcccagcagtgggcctcg

SEQ ID NO: 118683 - DNA, 571 bp, Homo sapiens
tatcggatgccacagcccgatccatctcctctcgggccagcttggcgataatgggccacataaggtccgtgagtatcttcagcgtgcttcttattcccaaacacccggctgcctaggaccttccggtagatgatgccatctttatggagaatatctgttccaaaggcctccataaaggtggcatcgataaacaccgggtttatcgaggccagtattgggtggaaatcattgttaattatgcccatggagaattttatcattgctcaaggagaggtgtgattttttaaaagtgcgtttgtgctttgtgcagaagtcttcagcgtgtgactggattcaatgctgctactcttttggtctgaatactgaaccagccaggcatcacaggagacacagctgagctcccaggccatcatgggtgacagggtcagagctgagctgctccctccctccaagtctgcttgaaagtagcctgcctaaggatagtatgcagacatatacatttttttcctttcaaatgtggaataatacttaaagaatcctccctggaggagatgatttttcaaacacaaag

SEQ ID NO: 118684 - DNA, 530 bp, Homo sapiens
ttatactttgctgtctaatatgtgtatggctaaaattttgcataatgacaggagaaaaacaaagacagagggatgaagaagaacaatcaaaggaggccaacaaagagtgccagtgaaacaggaagaaaaccagaagcatgctatcctggaaatcaagcgtcccgactgtctattgctgcataacacacccccaaaactctatggcttaaaaatataacaattatacacagtatagagattcctcaaaaaactaaaagtagaactgccatatgatccatttttaatttctttagaaacctccatactgttttctgtaatggctgtaccaaaagacatctgaattttatggataccttttagtcacagctcctttttggaatgtctcctttgtaaaatactttaaatagctgcaagaagatgggggagagggtgaaaagatgcatacaaattcttgtgtctctgacagagaataagcaaatagcagagattagtttttccttaatcttctttttttttttttctttgggaga

SEQ ID NO: 118685 - DNA, 330 bp, Homo sapiens
ttctcgcaggcctccctcccattctgaatggccccctctagcctgagccctgcccttttatgagatgcggtccagttccgtcccccgctctggccccgcccacaactctgctcctatcgcagctccacctcaggcccgaccccttccacacaaccctgcccccagcagcccctgacttggcctcggcccaggcttgaccgtctgactactcagcccaccctgactcctccccaaaaggagaccaaagctgaattcgggtccacggccgcccatccctccacccaaaattttcaccaagactcggtgcccgacccctttccaccctctccc

SEQ ID NO: 118686 - DNA, 765 bp, Homo sapiens
aactcaggggatgggtccctccccaaatgaaggctggcttaaacagcacccccaggccactctccaattcagtccaagtcgccactaaggaattttccttcccctcacagctaatccgaagagctgaccgtctgctgttgacaggccagcttgagtgaggtatgatccgcgcacgtgaacagtttgacaagagcagtgtcatgagctttgctgcgtgtacacctgtgcggcgatcacatccattacgccaaagggtatttctagcaccccataagaccccaatcatatcccagcacgagactccagggatcactgacctgctttctatcactgttgctcagttttacctttttaaaaagttcaaatcaatgggatggtatagtaagtataaactcagtaagtctggcttccttcactcagcaagagagaccctttcatgtttccaagcaccgccgctgccgcgcattacactgcgtggagacgccacggtccacgtatcccttcacctgctgacaggcacctgagttgttcctgctctcagactgttagaataaggctctacaaacattcctgtacaagtcttcatgagaccacattttctcttgggtttctcttagattaaataccgaggaatggaactgcagggtcacaccgtaagtgtgtacaaagctaccaaaccatttccaaagtggccgtaccacttgctactcccaggggcaacaggcctggctgctctgcatctctgccagcagtcaggatggtcag

SEQ ID NO: 118687 - DNA, 278 bp, Homo sapiens
atggtgaagaatgctgctgggaacatgagtgtgcaaattggtccttgaacacctgttttcccttcttctgggtatagatctccacagaggggatctgataggccacggtatccttttcattttgtttaacaagcacatacgtagctcttgttgggtgccaatttaatattcataacctcactaagagggaggtactgttacctccgttttacagatgagcaaactgaggctatgtgggtttaacaggcaggatttgaaccaggcagccagatgctgct

SEQ ID NO: 118688 - DNA, 483 bp, Homo sapiens
agaagcactgagtcgtgtctctgggaaatttgagtctcggggaaggcaggtgcttccttggtaggataattggaaagggggctctcgggacagcatgaccatctctagaatcatacaagcactagtggccccaaaactctcactccctggactaagctgtcagtcccttggggaagaactgtggcacataaatagtgcattaggggactgaggcatgagtcacagcttcttagaatggggaaggcccttggagatcaacaagctcaactactctttattttaaggatgagtcgaaaaatagggcccagagaggtgggagaactagtctaaggccacatagcaaattactgtataattactgttaattcaagtagtacacagcttggcgccccctaaaaagtgggacttccaatataaattcattcttacctcattgaaatacatgatatatgcaaaatggagttctttctccaaatattagtt

SEQ ID NO: 118689 - DNA, 339 bp, Homo sapiens
agaagcactgagtcgtgtctctgggaaatttgagtctcggggaaggcaggtgcttccttggtaggataattggaaagggggctctcgggacagcatgaccatctctagaatcatacaagcactagtggccccaaaactctcactccctggactaagctgtcagtcccttggggaagaactgtggcacataaatagtgcattaggggactgaggcatgagtcacagcttcttagaatggggaaggcccttggagatcaacaagctcaactactctttattttaaggatgccacagtgttcgcctgatccacagtcgcctgatccacagtcttcgccttat

SEQ ID NO: 118690 - DNA, 474 bp, Homo sapiens
tgaaccttgtcttccataattagttattattgagtacttactgtgtacagagactatgcgtggccttcatatatagtattcccatttagtcctccttgatgtcctgtgagttaagtttttaatccttattttatcaataacatacctggagcttggagtggtgaagtaacttggcccagctctcacaagggtgagtactagattcaagatttgcactgaggttgatccaactttagagccatgcccttaacttttctactcttctgccacgtaaaggaactttatcctttaagacagggcagaacattgtttttaattttttttctaaattaacaaaatttcaatattagaatttgctgggcacagtggcccacacctataatcccaacaactcaggaggataaggtgggaggatcacttaaggccaggagttcaagaccagcctaggtaatgtagcaaagatcccttctctac

SEQ ID NO: 118691 - DNA, 305 bp, Homo sapiens
gtggccaggtgtgtattactccaggctgaatagcacaggctctgcagtgtgtatgctgcaacctgtcctggaagcagaaggaggctaggcccagtggtgagaacaggcccagtggtgagagaacagcccctgtgagggagtttcctaaaggaaaagtgggatttccctacatgatagtttgtcataagggatggaagtgaggctccttcagtaaaatctgttatccatgacagcctgtggcaatggcgctttgggaaactgaggcttgtgtacagaaactcctctctatgttctttccgtggaag

SEQ ID NO: 118692 - DNA, 393 bp, Homo sapiens
tagtaacaacaggggcaaaataataattttgtagccagtattacatacttacctcaaattcacagtaaagcgttagagataaagtaattcccagttaccaccacatttcatatttgtgagtagtagaactagataaggaggaaataacattaaatgatgaaatcacaatattttggcaaaccttaaagcatttttttcatttaaaatgcttctttcttctgcttatagaattaatacaagctcattgtaagaaatttagaaaatatagacaaatgaggattgggatgaattattcatgtatacttctcagtaaggtaggaacagcaatttggcaattgaaaattggaacaatgccaccatgaagtgacttttgaatgttatgatacacacaca

SEQ ID NO: 118693 - DNA, 714 bp, Homo sapiens
attgaataaattcattcttcccccactgaattttaatgtcatctatttctcagttttctatgctgttccactggtcaacccctgtgccaatactaccctgtcttaaattactaaagctttaaaataagtcttgaagtcagctaggtcagtcctatccacctaatcagtttctggaaggtatataaagtcatgcagccactctggaaactaacttagcattaccaagttgaacatgtcattacctaattatatgccttgcctcctagttgtacaccttagattagtgtttctcaagctgtgagtcttcatctacagggtcatgagtttcaaccagaaactttcttttttaatgagatagaattcaataatattttaagacgacatctcagacaagaagagagactgttattccatgcaccttttgttttggatctatcacattatgtaagtatgtgtgtacaggatcccatgtgaaaaatatttatttcttgctatcttgcctctgagtagagaaagataacagacattaagaacacagaccagaaaggaaagattgggattttgctttgaaagctattgcttaaagttatttccacaaatgtacaagaatatgtaagaatgtatatttatcattgtaatagtgaaaaattggaaatgtcaatatcctctgtaaaaggaatgcagacaacagaatactatataacactgaaaatg

SEQ ID NO: 118694 - DNA, 452 bp, Homo sapiens
gttcacagaaacaactggaaacaaacttagcttcctttcaaagccattaaaatacggccttaaatttttatgcattaatcaattaagtataattgtctcccaataagtataattgtctcccaacctagaaaacccagaatgattcagagagacaaagaactctaaggatatgtctctgcaaactgttcgtttcaccaaaggattcactgcagaattaattttctgtaaaatctgtacctcctataattttcaacatgttctatctttaaagataacatttacacaagtgttgatagcatatgtggaattcacgtgttacttgtgtaaatcattataaatatgtaatagaattaaatgttttaatcacttaagaatatcttcgaatgttcctgagtctccgagatcataggcagattatgcagtcttcatctgtgattttgtttagtcaccta

SEQ ID NO: 118695 - DNA, 527 bp, Homo sapiens
agcaatcatgtgaaagtgggaaacattgatataagaatttatgaatgagaaaacaggaatagaaacagagacggtgtcatgaaattcaaacagatgccaaaatacagctcttggcagaaaaaggtttggattcgtggtcctagtaagagtcctctttttttcctggatgaaggctggaggtatagcataagggaagtaatgagaatagtttctttgtctctatacctaaccttttcatactatcaacaaaatacttgggcaatgagtggcatgggttacactaaaaagaaagttctcagggctttctgcttcccttctacattcagagatcttagttgggctggtagcacatgagttctgctgaacctcattactaggtttgtatagtacaagcatggctgaccttctttattgtttaatttaatttttaattttcatttacttattttttagagatgaggtgttgttctgtcatccaggctggaagtgaagtggtacaatcatggctcactgcagcctcgacttcc

SEQ ID NO: 118696 - DNA, 614 bp, Homo sapiens
tggggggaatagaaaccttaaaagggcaacacaaagttttgaatagaagaggccaagcagcctcgcccagaagctgatgtttgtgaatgtactgggccttctaaagcggcgcttcacacaccttttcacttcttggcacaggtaggaaaggatgatattacaagggtcaaaatgggggtaaacagaagaggctgctcctgcagaaggcttcctgcagaagcccttgcacttggagggctgggaagacccatgctgtatctgcatccctgtcattcgtttcacggcatccagttgggaagctctgcttaaagctttgtctggcacgttttcttagctacatttttccactccagctgagactgcctcactgagttgtcaacacttggtcttcttcagcagtgaggaaccaacaagacaggaggctgggtcaatactcaacttggcaaactccaggaaatggtgcttaaaacgtttggcttcttgaatggaattcatggtactgctcccagcctgcacctgggttctccaacttgagacaatttctccccgcatccccccacccttccctggctttcactcactagcaagtgggctgcttctactttctttctcac

SEQ ID NO: 118697 - DNA, 427 bp, Homo sapiens
attgccaatgtgttcacctcagaaacactggaagccagataccagggaatattgttaaaatgataatcaggaacaaaaagagatcaaccgggaatgctgaatccagcaataaaatgccttgaaggtcatccatgtcggataaatgcatattgtgcactgccccaaagaaagaaaccggaaactgtaagaattggaaatcagcaggcttatgtaacaagagaggtgacccgaaggaattaggtagaagaagaattgaacaagaaaggaactttctgcagcccacgtaatgaagaatccagcaattggcaaatgtagatagatgtaaatgcaaaatattttcttgatcaaatttctatatctttgtaaatgagagttgactacttgaaacaaaatgatagcaagatatttaacttcagcatatgtagag

SEQ ID NO: 118698 - DNA, 466 bp, Homo sapiens
tgtaggaagtggggcctagtaggaggtgattggctcatgggggtggtttctaatggcttagcactatccccctagcgctgtctcctgacagagttctcacaagatctggttgtttgacagtgtgtgacacctgcccctttgtgtgcgcgctctctctcctctcttttttttctctctctctcctgctggctatgtaaagatgtgcgtacttccccttcaccttttgccatgattctaagttttctgaggccaccccagaagcagaagactgtatagcctgcagaaccgtgagccgattaaacctctcttcttaataaattacccactctcaaatacgtctttatagcaatatagcaatgtaacaacaaactaatacaggtacagaagtaaattatttattggcctgttatagacttagtaaatttgctttctgtgactaaaataagaagtgagctggctaggcacg

SEQ ID NO: 118699 - DNA, 320 bp, Homo sapiens
gcttcctgcattaagatagccttgcaagacaaaaagtgcgagctgagtcgaacggcacgcttggtgccatagttgatctacattgtggtgctgcgtccttattttgtcaccaactggtcacaaagtgtggattgtcagtgtctcataggccacatgtcaagtggcatggtctaaacacactctaaaatttacttattttgggctgggtgcggtggcttgtgcctgtaatcccagccctttgggagtccaaggtgggtagatcacttgaggccaggagctcgagaccagcctggccaacctggtgaaaccctgttactgct

SEQ ID NO: 118700 - DNA, 319 bp, Homo sapiens
tttatatcagtaccgattacacgaaagtaaaatgtatttaaaatatctggttaaatccacatttagtatcatcattattttgactacgttttgctgactgttgagccagtgtagaacactaaaattgcgcttttattggacaactttttttattttccttgagttcaaaatggcctcgtggtttcattagcttagtttatttcagatgtttgcttgagttccacggtctccaccaactctgctctccaccaactctgcggaagccttcaacaacactctccagagttaaatgttagattacattcgtcagtttcagttt

SEQ ID NO: 118701 - DNA, 657 bp, Homo sapiens
ctaagtcgcgcgttcgacagctccctcctttacacacccgcgtgcaaatgagccgctgctctgtcatgaagtgagaatgtgagcctctttcaaaccctagaaaaggaaagtttggtaaggcgggggctgcgcagatctgctgttctctggaacctaaactgggaaccctagacttgcgcagaaaattaatagttttccatttttctttaaaaaaattaacttcaacgaaaaattgtgtgtattcaaaaaaattattggattaccatgtctgatcagctgctgatgacctaccaataagcgttttaaacacacatgcacattcacgcgtgcgcgcgcgcgcgtacacacacacacgcgcgcatacacacacacacacacacacacacacacacaccccaggggctatgtgcagtgaggaaggccgtcataagtaactaagaattcagagggagtcgcaagggcttttaagtgtgtaaaggctgtgtacgtgtcctccttgttacagagagcagagggagggggcagagggaatgagcgtcggctcggcgttttcgctgtgcctgtgtgtttcgcgtgttgtcagctggctctggtttctaagggctgagcgctgccatccattacacctgcggcagatggctcaagtggtagaatggt

SEQ ID NO: 118702 - DNA, 781 bp, Homo sapiens
ctaagtcgcgcgttcgacagctccctcctttacacacccgcgtgcaaatgagccgctgctctgtcatgaagtgagaatgtgagcctctttcaaaccctagaaaaggaaagtttggtaaggcgggggctgcgcagatctgctgttctctggaacctaaactgggaaccctagacttgcgcagaaaattaatagttttccatttttctttaaaaaaattaacttcaacgaaaaattgtgtgtattcaaaaaaattattggattaccatgtctgatcagctgctgatgacctaccaataagcgttttaaacacacatgcacattcacgcgtgcgcgcgcgcgcgtacacacacacacgcgcgcatacacacacacacacacacacacacacacacaccccaggggctatgtgcagtgaggaaggccgtcataagtaactaagaattcagagggagtcgcaagggcttttaagtgtgtaaaggctgtgtacgtgtcctccttgttacagagagcagagggagggggcagagggaatgagcgtcggctcggcgttttcgctgtgcctgtgtgtttcgcgtgttgtcagctggctctggtttctaagggctgagcgctgccaggggcgggggccagcatccaccatccacctcggcaccctagtggtgaaacaggactcatttgtttggtgcagagcggtgacgacctagaagagactggagtgtggttaggtcggccccctgccatccattacacctgcggcagatggctcaagtggtagaatggt

SEQ ID NO: 118703 - DNA, 303 bp, Homo sapiens
cgcgcctgtagtcccagctcctcaggaaactgaggcaggaaaattgcttgaacctgggaggcggaggttgcagtgagccgagatcgggccactgttctccagcttgggcaacagagcaagacggcgtctcaaaaaaaacaaaacaaaaacaacaacaaaaaaacatagttcccaaagcagctgctggcacatctgaggaatgtagctgtctaccctagcaaatctgccttcctaataattaaacaatccaagaggtggggggatgggggaaggacagcattaggagaaatacctaatgtgaat

SEQ ID NO: 118704 - DNA, 810 bp, Homo sapiens
agggaagaccaaagtctagaggactgtcttggtggccctgggcgagtcttgaactttggtgccatcatctgcaaaagggaggaaagaatgcctgcgtggtgcagctacgtggatacgcagtgaagacccgcatggtgggacgcctggcacttaacaatggtagcatttggccgggcgcggtggctcacgcctgtaatcccagcactttgggaggccgaggtgggcggatcacgaggtcaggagatcgagaccatcccggctaaaacggtgaaaccccgtctctactaaaaatacaaaaaattagccgggcgtagtggcgggcgcctgtagtcccagctacttgggaggctgaggcaggagaatggcgtgaacccgggaggcggagcttgcagtgagccgagatcccgccactgcactccagcctgggcgacagagcgagaatccgtctcaaaaaaaaaaaaaaaaacaatggtagcatcgttttcagtgcccaggaagaaggcagctgggacagggaaagggccaccacaccacacccaagcccatacaacaggagagccactttcagcagctctgagcaggacagacttgtggccaagtcaagaaagtaaggtctggtcccagcgaggtggctcatccctgtaatcccagtgctttgggaggccgaagcgggggcggggtggatcacttgaggtcaggggtttgagaccagcctgaccaacatggtgaaacctcaactctactaaaaatacaaaaattagggccgggcgcagtggctcacgcctgtaatcccagcactttgggaggctg

SEQ ID NO: 118705 - DNA, 434 bp, Homo sapiens
tttgtgtcttctaagttcccctgttgtccttgctctgctctgatgtagctgagaccacaggcgcgcaccaccacgcctggctgatttttgtatttttagtagagatggggtttcaccatgttggccaggctggtcatgaactcttgacctcaagtgatccgcccatctcagccccccaaagtgctgggattacagacctgagccaccacccccggctgaatgttctgtttttaatacatcagagatacatgttttgaattcttcattagagtcagaatgatttgacattttcagtgctactgatttcagagcatacaaaatgcagttttatgtatttatctttttaatttagaagaagtttaatatttaaaagaaaatttcctggaaaaaacggctcattcgattctcttatttaacaaacactgcacttactg

SEQ ID NO: 118706 - DNA, 319 bp, Homo sapiens
acatagagtctcgctgtgttgcccaggctggagtgcagtggtgcaatcatagctgagtgcagtggtgcaattgtggctcactgcagccttgacctccctcagctcaggttatcctcccatgtcagctgcctgagtaactgggactgcagacacgtaacactgcatctacctcctttaaaacattttttgtagtgatgagttctcactatattacccaggctggtctcaaactcctgagcttgagcaatcctcccaccttagcctccataagtgttaggattacaagtgtgagctgccacatgggctacggcagtttcat

SEQ ID NO: 118707 - DNA, 284 bp, Homo sapiens
aattttctgtattcctactaatcttttttggggtctgctttctatatcaaatactaaggcagatatattacaatctcctgctatactggaaaaacttttcaattttttccttgtacatctgttaattttttgctttattttgtggctatggttattaattgcatgtaactttaaaacatatatattcctgccaaattagccatttcccattatgtatcaattctttttgtctttaagtctatttgaaattatatactagctttctttccattaatattagtcag

SEQ ID NO: 118708 - DNA, 640 bp, Homo sapiens
aggaatatttgtgacatgcagaagaatgaagagtgggatccttgtaggaaaccacagacatctgctcatcctgaaactctgaggctattgtctgaactcaaaggcaatattttttaaagtcacaattactcaagagtttttagaacagaggtcacctgctttcagactgcacctaattcataataacattttaaaaacatttgtataattatttacaaataaaattactcatcaattccccttctttcccctactcccaactataagccaagttcaacattttattctcctttctttcctcaatacatgcatagacagtgcagaagcataagaatgggcataatgtatgtaccatcggacaagtgctaccttgagccttaatacctattagtgttttcattgtcttaaaattataagatagagtctatgactgattccattctgcagataagaaaagtggcacgacatgcagctgaatactggcagaactaagatacaaaccctggcaactcactacaaattctttggttttaatacttttaaaatactttcttgaaagaaattaataaattggttatttcataattacatcaatgaatgactgaatcaactaatgaatgaaaaataaaaagacaaaaaa

SEQ ID NO: 118709 - DNA, 894 bp, Homo sapiens
ctcattaccaaggcctaaagcctcaaaagttcttcagacgcatgggataatcaacggtggaaacccgtgattttttggcaaaaaggcctttccagttaatggttaaccagtcagggttttacccacagttttgaccttaagtgcagtgactctcttatttccaccgctcaggtctgggagaatgtctgcagcttttcacgatgtctgtccttcacagcgtctccaaccctctccccaagttggctccagggcttgggagaaataaagtgctctccctcagactgggttgctcagatccccagtggaaagaatttgccacagcaacccaaaccttcagcagacaacactctgataagtgagcagccatcaacatcaaagcaagacactctaccaacaaagagattacaacccactgaaggcccagatgatccttagtatttttttaccaataaaaaatttttcaattaaggcaaaacttacgtgcagctacgtttggaaaacaagagtcctcatcaaccaacctcgcagccagttaagtaaagatgatagggcccaaaggcaaaggaaagaaccattttttacatctttatgagataaaacaaagccaaatacgacatcattacacatccaccagattgccaaaagtttagtgtcacaataccaaatgcagactacaatgtagagcaatgggatttctcatacgtggtcaacaagtgctttagaaaaaaattcagtattttcttacaggattgaaaatagtcctacccatgacagagcactccaatacccatgtgtctaacatggggactaggagaggcatgtacaagaatgttcaatacaatgttgttcataatagccaaatgccaaggaaaaataaaacctttaacagcaaaa

SEQ ID NO: 118710 - DNA, 1420 bp, Homo sapiens
ctcattaccaaggcctaaagcctcaaaagttcttcagacgcatgggataatcaacggtggaaacccgtgattttttggcaaaaaggcctttccagttaatggttaaccagtcagggttttacccacagttttgaccttaagtgcagtgactctcttatttccaccgctcaggtctgggagaatgtctgcagcttttcacgatgtctgtccttcacagcgtctccaaccctctccccaagttggctccagggcttgggagaaataaagtgctctccctcagactgggttgctcagatccccagtggaaagaatttgccacagcaacccaaaccttcagcagacaacactctgataagtgagcagccatcaacatcaaagcaagacactctaccaacaaagagattacaacccactgaaggcccagatgatccttagtatttttttaccaataaaaaatttttcaattaagatagctcctaatttaattattataacaaaaatttactgagcatctactatgggcaaacatgggaaatctaaacatgcatgagtcccagtcctagctcaggatgactttagaacctaatggaaaacataaacatatacagaaggaacgtcaacccaacatcagagtctttttaatggttatatagaacatccttcaagacaccacagaagagcacgcctgaaggggtgcctgccacaaaggatgtgaggggtaagcagggcgggcagcatttcccaatcccgctgatctccacaaccataggagggggcagcttcccttcccccattccatatcagtctattcatacattacaagacaaagtatgattccttccaagaaagagtatgtcaaggaccacacacatacaggattttacagaatctttgaaatcatctcttttcaacattgtcatcgttcagataaagaaaatgagatcaggcctcacactggacactgaatcaaagtctttggggagataggcccaaaaatatgtataaaaaataaaatggaaacacaggttcttatgatcctcaaggtgtgagaagcactctgttggacaataagggaaagggcattgtaaggaagaaaacaacatgaaggaagcacttggacatgaaagcgcaaacgcaccgcgtggccagggatcatgggagatgaggctggaagcagggtggttcagaagtgagggctttgtatgccacaccacggcgtttgagcccatagtgatgacaaaaccatggaagatttttaaaacaaggaagtgatgagattgaccctccacctctacatatccagaactcttggatacccatgagaaactatgaaccactcaatagaaaactgggcaaaaggaatgaacaatttacaaatatcaatgtccaataaaatctgaaaaatattctctctcaacca

SEQ ID NO: 118711 - DNA, 450 bp, Homo sapiens
tgtggtggctcatgcctataatcccagcactttgggaggctgaggcgggtggatcacctgaggtcaggagttcgagaccagcctggccaacatggtgaaaccccgactctactaaaaatacaaaaattagctgggcttggtgtaatcccagctgtaatcccagctactcaggaggctgaagcagaagaattgcttgaacccgggaggcggaagttgaagtgagccgagatcgtgccagtgcactccagcctgagtgacaagggcaaaactctgtctcaaaaaaaataaataaataaaaataaaaataaataaattgtggtaattgtgtaaccacactaattggtcaatagctggattgtgatagtggttacacaattgcatgcatgtgtcaaaattcacagaactgtgtaccataaacagaatttactgcatgaaaaccatatatatttt

SEQ ID NO: 118712 - DNA, 430 bp, Homo sapiens
tatacccaaaatattctcattatcctcaacattaattctgtacccattaaacaatagctctgcttttctctgccccatcagcccctgataacctctattctactttgtctttgaatttgtctatcctaggtagctcataagtgaaatcatgcaatatttgtcctgtgtctgacttattatactaagcatgttttcaaagtttacccacgtcatagcatgtgtcagaatttccttcctttgtatgtatatactacatattgtttatgcactcatctgtcaacaggcgcttggttggctattatgaatgctgttataaaggtactgtacaaacatctgtttcaaaccctgtttttgattcttttagatatatgcctaagagaggactgctgggtctatatggtagtcctatgtgtaacctttcgagaaactg

SEQ ID NO: 118713 - DNA, 561 bp, Homo sapiens
cttttggcaatccaatgcttagcatacatactgcttcctctgggagatacttcccagccagagctagctctgggagggatggaaccaccccagactagttttcagaactgggatactaagtgctagggggcttactatggcaaacagtgttaactatgctggttcagtccaggtttggacagcatccatgaggtaagtcaaattcccagcattccagccccatcaaatggttcccaggaatgacagcccaatgctgccctcttctgtgctgctgaaaagatctgaatggtcaaatacctgatttagcctagcaaaaaggaatactttttcatttgttctggaagagaatacacttgttccttagtatccacagggattggttccaggacccctgcagatagcaaaatctgcagatgctcaagtcccagatataaaatggtgcagtatttgcatataagctacacatattctcccatatactttaaatcacctctagataacttataatacctaatataatgtaaatgctatgtaagtaattgttatactatattgcttctt

SEQ ID NO: 118714 - DNA, 442 bp, Homo sapiens
  misc_feature (333)..(333): n is a, c, g, or t
tatgggtgcatgcatgtgatgctccctgtactgcatcggcattgcaggagggaggggatgtgtgcattgaagttgcaacacctccagctgtgtgtagctggagagcaccccaatgagaggaggagggtgcaacttggagaaagaatgcggttgaggcggggttgcggtggaagcaagaaggtacccgatgagccaagagagttaggaatgcaaatagcccttccctcctctgatttatggtctctctctttttaaactttctatgttctcagtagaaagcaactaaatgtaaacagcaaagggcttgatgattcttaagggagaaaagtctgnctggtgcatgcatgtgctttctcatgcaattatgtgaaaagaactagggagaaggtttaagaactaaaagctgagcagattaaatgagttttgccccaaattttggcta

SEQ ID NO: 118715 - DNA, 438 bp, Homo sapiens
agttttgacaacaaagagcagttgtcaacagcagttttgaatgtttgcatattctagttgtcttctctgtcactttagctgtatgttaaaagaaaaggcaagaagaatgttttccagcagctgtggcagagtctatggcatataaacaattcaccagcattcgacatccacagcagacatcattaatcaattagaatgttctttcccactaaaacccacatggagtttcttaatcctttttaatgccaaactacagaagctacaccatttaattagagttgatatgtaagatataacctattctccatgctggacttaggaaaatgttctacaagaaaccagaaatctagttatcataccaagaaacgcaagtgtaaccttataaaggtatcactcatgaggactagctttggaatgttattgcaatcaaagaactac

SEQ ID NO: 118716 - DNA, 621 bp, Homo sapiens
caggcgtgtcccaccacgtccagctaatttttatatttttagtagagatgggatttcaccatgttggccaggatgggctcaatcttttgacctcgtgatccacccatctcggcctcccgaagtgctgggattacaggcatgagccatcgcgtccggcctaaataaatatttctaaaacatattcgtttctaacttttaactcagtaaatatgcttatatataacccataactgcaaaacctctttggaatcctcaaaaacaatgtctgtaaaaggatgccaataaaaccacctctgcaaaaattacaacagtgagagaaatataatataactgacttcatcttgcttctaacctcacaagctaactgcccttgctcattcctgggcataggccaagctaagtatgggacgaattttgtttatagtttaaccttaaagcaagggttagcctggcgcagtggctcatgcctgtaatctaagtactttgggaggctgaggctagaggatcacttgaagccaggggtttgagaccagcctgggaaacagagtgagaccctgtttctacaaaaaaataaaataaaaaaaaaagagagcgagagagagaaaagaaagaaaagaaaag

SEQ ID NO: 118717 - DNA, 276 bp, Homo sapiens
caaaactctgtctcaaaaacaataaattatgaaaaagtaaaaattgatgatttagaagacagcaatttatcccttactcttcaccctgacggtcagccatcgtcgccttccccctaccctcttgtgtttgttaggaagcattaatcctgtgtggccctcggctgaggggtttagtagctgtggaggcagatgtgtgtgtggcctggctggtttctgccattgcttccagctgtgtctggaggatgacagcagagacctccacagggaccccagctg

SEQ ID NO: 118718 - DNA, 429 bp, Homo sapiens
aaggcaagtgaggaacagaaaacgaacttctgtggtggtccagggccaatagattgggttctaggaaggcagcggtgggcagcagtggaagtttgaaggacctgcagactgattagtttctggccaaaatttaggagccattgttgacaggtatggaacgaaacatcctggaccctaagacctaaacaagtgatccttatctaggattggcaccaaggcattgtgtggagctggacggttcctaacacctgttattttataaaataaatattaggaaacccctattcattttgaatgtgttaatgaaagtgaactgctaatcacagttagcacttgtatcttttctactaaatgtgtgaaatgtgccttttagggaaatataatacacattttcattcttgtttaccttcttcatacgtagctggttta

SEQ ID NO: 118719 - DNA, 434 bp, Homo sapiens
tgtccatctggtaaggaaccacttcaataaggtgaaactgaaggtggcaaaaaaagtcgaagcactcagcatttagaccaggattctacgatgccaataaagtgaaacacagtgtttattttagtcgtttaaattgaagaatgccttttcatagtctctccaacatgaccctgttagactatttcactcatttgctttccatacctgccatttcttcctcccagtaaaacataaaaacccccaacttagagatgcaacactgaatctcagataaaacctgtaagttaaatgatttccctctatgagctttgggaaagttaagacaaaagaatcaaaattaataccaaatgcatatagcaggagttcgaccactcccagtgtaggggagaatgaaggagagttgtaaggaaattcatttgcatctacccgctaca

SEQ ID NO: 118720 - DNA, 573 bp, Homo sapiens
agactccattctcaggtattatatacaaggtaaaatgggcattcagaatattttagtagtgtagaaggtagaagattattccttttaagaaattaagtctagtcattatggagtagagtcagaaaattcaggaaggccttagatgctaattcctctaatgaagctatggttttaagagaaagggaaagtaccaaggaaaagaacaaaagcagaatatccttaaggagctgaagaatgaacaatcaacctggttggaagtctggtgattgttgtgcccaattgagcaaatccttctataagtttatattcttttaaaagatctgtttcacagaaaagttggcaagcaaatcaggaaaccacgaatgagcgatataagcagtactgtgggtttggagattagctgattcagaaaggatgaaaacaggacgccagagcttatataaccacaactcttcatcttctgtgtgtctatggcagcttacagtgaatcctgttcctgaggcagacaggcaaagagaaataattttaacttttcctttggtcttctggaaacctagaagccactgccttgtt

SEQ ID NO: 118721 - DNA, 793 bp, Homo sapiens
ctgataagtggcatttggaaaaatggggacagggtgtttgaggtataatggtttcctggacctggtacttgctaagggcttggatttccagggtaagaaattaacattgtaactggttcgataaaggaggttaggtaaatacaaaatattgagatcccctgtttgcttcttctgaggaattctcagagcacaggttgcaaggtgcgtattttccaggcaagaaattggaagtctttcggggtaatctaatcatttagggagaaaaagcttataaaaactgctgccaggtttttccaaggaaacaaactccctggccatgtcaccctagaggaaaatatcataatccgtaaagcccgatcggtggagctttcaatggctttttaaataagagcagatatccaaggatcccaggatatttaaagaagacatctaatgtgcacatgagggaccagaactaatatgcaggaaagaaggcaatgtgactatgaaaggaaatgaaaattaaaatgcaaaaacaaacaaggaaaatacttacagctgttagctaatattctcaaagggaatagagaaaattttacatccatgaaataaggtattattttaaaagaaacatataaagaacaaaaaataactctatgatagtagaaaaaaaagcccactagaaaaaaaatgaaagataaagttcaataaataccccagtagagcaaaatgacagacattgaaaatatggaaaattaggagactcatccagtaggttcatttccaaaatagtaaacatactagaaaagagaaa

SEQ ID NO: 118722 - DNA, 493 bp, Homo sapiens
cgagccctgacccaccggcggctgcggcggagccgcgccggcgccccccatgcgccagacggcaggacggcggcgtcggggggcgccatggcctcggcggcggcgggcgaagcggaggaaaccacccggttgcgcaagccgcgcttctcattcgaagagaaccagatcctgatccgcgaggtgcgcgcccactacccgcagctctacggcgcgcagagccgtcgggtgagcgtggcagagcggcggcgcgtgtgggacggcatcgccgccaagatcaacggtatcaccagctggaagcgcacgggccaggaggtgcagaagcgctggaacgacttcaagcgccgcaccaaggagaagctcgctcgcgtgccgcactccacgcagggcgccgggcccgccgcggaggacgctttctccgcggaagaggagaccatttttgccatcctggggccaggtgtggcggcgccgggggcaggtgctggggcggaggagc

SEQ ID NO: 118723 - DNA, 691 bp, Homo sapiens
gtaatacccagagtttgggtggaggctgctcctcggctagggccccaactaaaaccaaatagctagacaaggagtctaccttgttttaaccaagtagtctgctctgcaatacttgctgtgttttatctgtgtgcaagcaagaagcgccatcaactgcacagaatcttctctgttgagttagtaggtaatctcgcatcccatgactgggttaaattaaagcggggagtgcaggttatctgcagaggctactactgatggtgaaattttcactgcaacgttgtcctgccacgtgagaggcataagtaaggaaagattaaggagagtaagagtctcacatttatgagggggagtcttgctccaatgtggtttgctgttgtgaatgtctctggttgtggcattggccatcctagtgaactctgtgtggcccatgcattaggcatgagacttattccttgcgatttgcgtagatttgtccagcttcagcttatagggcttcaggaactaagcaggttcctgctatctaacaggtagataataaaaactcagtgaacagtgctgcaatctaaataacaggcatactggagttttcttttgaaatgtaattttcctctctaagtcactcccatttctaccaaagataatcacagtaagaccagtttgcctgactaaccacatatttgaaagcacatat

SEQ ID NO: 118724 - DNA, 796 bp, Homo sapiens
ttttaatagtaaaatattataataccgttacatttaactcataagattagttagataaattgaggtatgttttccatgaaactcaatatgtagtaatattaggattatagttttaacaattactggcatatcaccaggaacttttaagtgcagagaaagctaaaaatcacacagccagtggccaagtggcttacagtttacagcctagcatgtaagccgttatatcacggagtaataagagcagcgattcagttaagcttgtgatactatgacattttgattaaaaccagaataggttcaattctgtttccatagtttctagctctgtgaccttaagaaagttacttactcttatccaacctcagttttcccattgtaaaaataaggataaagcatacttactaaatacctgaaaattaaaatagtataatactaagtctgcaatacttggaaaatgcttaataaatgaattcttattattactgttcttaatgatataacaagagagcaaggagaaaggaggaacaggaaaaaataagtcaccacctaagaaatgactgttgacattctttctgccttgtcttctttccaacttgtgtgtgtgtgtgtgtgtgtgtgtgtgcgcgcgtgcatgcgcgcgtgcgcatatacccatatactctcacatagctatgcctgggcttcatttaagaagaaacactgaggccaggcaaagtggctcatgcctgtaatcccagcactttgggaggctgaggtgggtggatcacctgaggccaggagttcgagaccagcctga

SEQ ID NO: 118725 - DNA, 837 bp, Homo sapiens
gaatttcttccagtcaactggcacagtcctttgcattctactggtgtggatgtagatctgcagcgaataaccctgcccagcattaaccgcctcaggcacttcaccaatgacacaattctggatgtcttcttctacaatagtcccacctactgtcagactattgtggacacagttgcttctgaaatgaaccgaatatacacactttttctacagaggaaccctgatttcaaagggggtgtatccattgctggtcatagtttaggttcgcttatattgtttgatatcctaacaaatcagaaagattctttgggggatattgacagtgaaaaggcctcgtatgtacagaccgagatcttcacggaacatacggaattccttctagcgagcaagacacgacacagatattaaactcattttcaggcaccagacaccaactcaatggggtattcaagagaagcagaacccgacaggcctggctcccagggagcaaacacttccgccacaaggacatcgtcgagttcctggcagctacgcagttaaacttacctagacacactggtgacctaatctgggactgctagggcatattggggccaggatgtcatggtgaacagtacaccccccgggacaccactactacattaaaatccaggaaagaaagtaactgccgcttatggtgcgcgtgatggggacatatcgtcccccacatgtgagacagcctgggtcaccctgttacgttggttccaccggaaggcgaaagctaatacagcagcgccactctggaattcccgaagagccatcaccaggaaatgttgacagacgctgtggcaacacggg

SEQ ID NO: 118726 - DNA, 476 bp, Homo sapiens
ataatgctgtgcccacactcaagactaatggcaaagtgtgttttagttaagttactcggaaagagtttatatagaatgacaacatcacatagtttaaataagggatgggattgtaagctttcagaagtggttttatttggtcccccttcctttattttgtcacaaatgctgggggcacatatggagatggccaccagcctgattaagcctgccagcagagtcttagagacagacattcccaggagcctcccaaatctcaggctcacaaagtccaagtaagattgggtgcctgggacttgagtggctttgtctaaggatctttcttctttgacctgggtgcgcatgtcttcacaacctcaactgctatgctactgaacaccattgcacatgcatactgtgaatcgaccctaccacaaacctgtgacctacatttgaacatactttgttacggggaatagcaaaagtcagtggcttcg

SEQ ID NO: 118727 - DNA, 722 bp, Homo sapiens
ggcacaacctacgtgtgttgtccaaccttagccacgacagcctaaagacaatctcagtctcttttcccctccccaggccatatctctctcttattttttaagtgctaatgccaaagaagattttactttatccttgcttggctgatatgcccattcctgcaccaacagcaattgccaagatcaggtatcacgattgattgctacacaaggatcatgtagagaggaggaaaattacaaaaaagcaccaataaaaggcagatggaaagtatgctggaaaaacaaattataaatgacattgcctttgctatatagacggtgaattaacttgcttagctagtaagttgtggaggactgtttccagtctgggtctgcctgactttagaccttaagtgttctaatgtaggtactcttcattcattacttctgttattatttttataatatttattttacactaaatatatgttaaagctcaggcatccattacaaagaacctaaatatctctttggtctgtttctactgaaacctactttcctgatttagaagctagaagttaccatggatgatttctgttctattttcccccacagactagtttctttatggttatataggaatagtctatatataatatttataagatagtttgacacaatttaggatccaagtactatttagatcttaacacactaaaatatacatttcttcgtgaagcttccag

SEQ ID NO: 118728 - DNA, 520 bp, Homo sapiens
gaattgatgtagtgaaaatatgccataatagtatctcaccatcacctctgtgtatttactcattcttttcacatttgagaatattatttagtaatagtatgctgtagtactaatagtgaaagaacaataaaaaattaattttttttttacaaataaatatttgacaaaagctacaaaacgaaatgagaccatataggaatgtataaagaaaattcatcccaatagatttcttgggagctgtagagctatggccaacagtcatttcaaagtgtagcttgaaatctctattgtgctactgaagattatcaggattttttgtagcttcttcacttttttttttagacggagtctcgctctatggcccaagctggagtgcagtgacgccatctcagctcactgcaacctctgtctcttgggttcaagcaattctcctgcctcagcctccccagtagctaggattacaagcatgtgccaccacgcctggctaaaatttgtatttttagtacagacgggatttcac

SEQ ID NO: 118729 - DNA, 349 bp, Homo sapiens
cgggcgaggctggctcggagggtcctgtgctggagagccgcgcttttcccgggcccgggaaaggaggccagactcgcttgcaggaatgaggcactgtcggctgcggagccacgcggggcccgggctggggactcaggaggaagccgagggtcagcacctgtttgtggagcagggccctgagcgccaactcccagggctggtgaggaccaggctggcctgcgggatgccctcccggccagcaaggatccgccagcctgcggcgctgagccagcgcaggtcagctccagagacacgcagctgacccaggccagaactacccttgaggcccagtcagatccacctcacctgg

SEQ ID NO: 118730 - DNA, 446 bp, Homo sapiens
gcaaataagaaactgagtttttaatttaaatttgaatcactgtatgtggctactgattaacccattggacggcacaaacctaaaatattgtatgactgggtttgaaatagcaagaatgatgtgaggacacaaaggtggagtgagaatatttaagagaagatagctgggtgcggtggctcacgtctgtaatcctagcactttgggaggctgaggcaggcggatcacctgagatcaggagttcaagaacagcctggccaacatggtgaaaccctgtctctactaaaaatacaaaaaattagctgggcgtggtggtaggcacatgtaatctcacctacttgggaggctgaggcaggagaattgcttgaacccaccaggcggaggttgcagtgagctgagatcgtgccattgcactccagcctgggcaacaagagcaaaactgtcttctc

SEQ ID NO: 118731 - DNA, 186 bp, Homo sapiens
tctctcatcttgcatttactgcctcatgaggagctccctctgacagctgactaaggaacactttaggcctgatttgtgatggttcaacataaaccctctagcactaactgaaagcagacagctatagcatgagattgtaatgctatagctgtctgctttcagtaagggcaaaaggttataggggaa

SEQ ID NO: 118732 - DNA, 742 bp, Homo sapiens
ttcagatggagtctcgctctgtcgtccaaagtgctgggattacaggcttgagccaccgcgactggcctgataggaggtgtttaaaaggagcttcaaaagaggtcagtgctctacactgaacgaaggatggagggtaatggtaatgcctccacattaaaatgacacaaatgctgctgtcttactgaagtttggtactttctgtgggatagatacttttcactttgttctgtggctttggtaaatttcagaagtctgaaatgattgattttagtgactttgcgagtgttttcatcattttgcagaggagacttggtttcttgtggtttgcattcatcagtgtcagaagctgatctctctattcaatcttgcagttttaagtaatgcattgaacagtcacataacagaacgctgagcaggagaactaaatttctagtgtaatcagaatggcaggcactaaatgaattattttacaataagcctgtgtcctttttattaactgttcagtggagaagtttggagtctataaacttgtaataaatgtggcctgtaagaactacaaatactggaaagctctgaggatgtaatttctaatttgatgaagaaaacattctctttaattaacttggcaaggagaaggcttcaataaaaagaaaggcaactatgcctggggcggagctggagtggaaataagatggcagacattggacgtcattgaaggcctggtgatgtggttttagtccat

SEQ ID NO: 118733 - DNA, 346 bp, Homo sapiens
agctcaccagctgtcattcgtgttagtgtattttatgtgtggcccagacaattcttcttccaatgtggcccaaggaagccaaaagtttgaacacccctgctttacaaccacacgaagtcagggtgaaccccacctccatcacttactgaccacaggacatcggacaatttacttaggttttctgaacttcagtgtcttcatttgtaataaaagtttacttagcacagaagccagcctgagcactctggctgttcaataaatggcacctattgttgctgttgttatcaatccatccaaagagcactacttttacccaagccactcattccccacaatgtgctgatat

SEQ ID NO: 118734 - DNA, 406 bp, Homo sapiens
tcgttaattcttaatggttattaattactgtttaatatgacttaatggcaagtttgtgtagcacttaatttacatacattctgtgctccaagatttgagaatgtagttttgggaaagataaagtctttccatgggtaataatcaggtcatcatgagtgatggatggaatgggatgaggttccattctggacgtggtttctagctcatctgaggattcttttcccattgctcaaagtgaccttccatagaagaaccttccatggaacctgtgatgaccaaagacactcaagcaatgactttttggaaacttcttataagctgctctcctcagaggagaaaatcatcagatcggaagagaacctagtctgttgaaatatcctacctgaaagttggttcatccttgaca

SEQ ID NO: 118735 - DNA, 477 bp, Homo sapiens
ttatccccttgcaaagaagaaactgaagctccaagagttgaggaacttgcttgtgtcacacattcagtaactggtagactctagatctcaacttatgtccatgtaatgtcaaagcccaagttcctaaccaaagacagtttctcaatttacaaatggcaaaactttaggcagaaaggtgcagagacattcccagccacacagcaaattagaaaggatgctgctgaaaaatctgacattttatgacatctttcaaagatgctttgttacactctagcctgaataactctcactgggtccattctacatctctggctcagttcatgcttcatttgctctatgttgtctcaatagatgccattattggtgaaatggaggccaatgtcctctaagattacacaatgtcaagtaactcacaaaacttcagtccgcttcatcacaactttctataaatacaaaactttaagcttaagccctttt

SEQ ID NO: 118736 - DNA, 377 bp, Homo sapiens
gcacgagggataatggagttttaagagcagttaggaattaccctaaattttaaatttgagacaaatgtgttttccgtgatgcaagaactgctgccagtctaaggaagtacaagaaagagatttttgaattagtgagctatataaaattgtcctcacattgattttctaaagtagcctgccaatcagaggtcatttttagttcaccattgcctcttacttagtatgaattttccattttgcacacaaatataagaaatacaatttaaaaaatggtacattaggaaagctaaagtactttacttgactcttagtttacattgccttagtgacaccagccaatgaggaatgaaaaatccaggtgagttagagcaatgatc

SEQ ID NO: 118737 - DNA, 654 bp, Homo sapiens
gccaaatgcctagttgtctaaactgagaccagggtccctcgcccgggaaacttgtttctactggcagacatccttgtggctcttgtctggcctgaccatcacacttacactgggagcctaaccatatgcccagagaaaacccagcctggggcagcccctggttcttcagatggaaggtacaatgcaccaccagaacagaaaacaagttcaaagaccttttacttccagaccctgagcaaagagagtaccatgagtcaggagggcagtcctctgtttccaggtcacaggaggcaggaacaaaaagagtcagacagagagagtgcacatcacaactagcagtgtatgttataagggaacagggtgtgggtcacttcaagttcacaggcaaatgcctgaatggtccattacaagcagctacaggaaagcagggagcccggtctgccaggtgggagagacacctctaagttctcacgccctctgggtgtggtgtaggactggaaactgggctctgcctctgatacgagaaagttaaacctgtactcgaaatggatgccaaggcaacataaagtcatcagaatctactacattatctctgaataaaatgttgaaaacaaaaaaataaaaaagtttatgcagtgtttttcactgagatac

SEQ ID NO: 118738 - DNA, 288 bp, Homo sapiens
ccttcacttccttgagcctcagtttccatcagtaaaatgagaaaacagcccctgcctctgcggggttcccagaagacctggagattaaatctgtccagtgtcaggcacacggcagggaatttttatggtgtctttattggccatcctggcattatgcattagccacaagggtacccagcctcaacctcaaaagccacagaaaaaggccacctgatcctccagacaacatgtgtggccatggctgtgctgatggtcttacagaggcagtcactgtcctacactcctgag

SEQ ID NO: 118739 - DNA, 614 bp, Homo sapiens
acaatgcacttttctttgtgcattcacacgatgcattttcttttcttatcaccaaactgttttgaaagataaaagtacttcctgaatatgtggatggtgagccacgtgaatggaagacatggagatatggactgttaacaccttgtcaaacatttattgtcccttccacctctaaacttctgtgataataggtgaacaggacccacgtggtgcagaatactgcgatacacactgcggaataattcagtgcagaacaacacgtggattgctcagtacaacttgttcatcacatcctcctgttcactgaagaattatggaaatattctctgagctgctttcctccctgcccaacgagtcatctctgtgtgaaaggccaagcttataaatcctgaagaaagagacattatacaaatgtaagctgttgtcacaacaatgataagaaatcaggagtcgaaagatgtggagtaagggggaatttcagagaaaccacaaaacacaaaataggaaacagagacaggagaagattgctatgacaaaattgcagaaggtgaaatctttggcagcctcttatttctctggagaatatgatattgtcaggctgaggtggaagaatc

SEQ ID NO: 118740 - DNA, 343 bp, Homo sapiens
ggatatgctgtctcaaggttgggagaggtggaagaaaatatgtatgtaggcggactggcaaagttcagactcatgttgttcaaggatcagctaatatatacatatctttttgtcgtttcaaataaatgattctgcttcccagggcaagtgctaggaagcacattaactgtatattagtctgcaattgaattgcttttgttctttctttggtattccagagattttataatctatgttaaaatcatgggttctgaaacttggtgagacagggcttttgaaagagagcacttttggctgtgtaatgtaaatctgtttctcttcagaaagacaggggccctgtaga

SEQ ID NO: 118741 - DNA, 447 bp, Homo sapiens
ccaggaatgagcaatggagcagcctggcaccaactttgcaggctgcatggaggctgatttctggccctctcctgaaggccaatctagagcaaatggtttgaaaatattataattacatgaaattgaagaagaaactccctgatgattcaggtgattaaacactagagtaggctttcagataattcagaggcctgaagttagaatcttattccagtgtactttgcggcatcctttttggaaacagatgattggactaggttcattcattcattcatttgacaaacaaaaaaaagaaaggcatcagataccaaatccacttcatatctgtgatgcctgaaggattagggggcattaggaacagtgagtactgtacagtgaacaattatctgattataaaccattaaataccaagatccacaatatttatttgttgtctttcatttgccc

SEQ ID NO: 118742 - DNA, 209 bp, Homo sapiens
attgaacatctgtgtaacaggtactgggaatacagtgttgaacaagacagacaacattccatacataatagtgttttggggggacccagtaaacaagtaatatcacataatatgtgcagtagtgaaaataaaatggaataatgtggtagagaatgatggggaagctactgtagacaggaaggtcaagtctgaggacatggcatttaaaa

SEQ ID NO: 118743 - DNA, 248 bp, Homo sapiens
acagcaaatcaaagaagaaaacagatgctgctgacaaaccaagaggatttgccagaggtcttgatcctgaaagaataattggtgccacagacagcagtggagaattgatgtttctcatgaaatggaaagattcagatgaggcagacttggtgctggcaaaagaagcaagtatgaagtgtcctcaaattgtaattgctttttatgaagagagactaacttggcattcttgtccagaagatgaagctcaa

SEQ ID NO: 118744 - DNA, 774 bp, Homo sapiens
ggcttctactgtggacctggcattatgccacgccttcgatgtacattggagaaccagagagccaaggcattatatttcccaactctcctgcagttagctgggggccacatggctgagttccggccattggaatgttgctggaactgatgtataccacttccaggattggtctataacaccttccttgaatcttcccttctctgtctttcctggtcttctggaagttcttagacaacggtggaaccactagatagataacaggttcccgattccctgaacgagtgtgatagagtgtcctcaccaacccacattggaatatgacatgggtaagaaataattcttagttgtggtaaactgctgagatttgggaagatttttttttgtaacattatggtaaattgttgaattcatcaaaggtatggcctttgatgaatcacacattcctctgttcacacccttgtattcttccttcccacatggactctgtctttggctatgtaacttgctttggccattgggacatcagcaaatacgagataagcaggggcttgaaaggtgtttgtgcattaaggcttagcctgttttgctgctgagaattcttcttccacaaagtaaagaagcttaggctagcccactgacaactatggcccaatcatccaccagcaccaagggcaagacgtgaaaaaggccataatggaaagtctagtcttagaaaagctgctggatgaccacaactctgtaagcaacccaaagcaagattagcaaaaccaccta

SEQ ID NO: 118745 - DNA, 456 bp, Homo sapiens
ctatttagatttttaactgttaacccaaactgattattcccacctctgattttatcattttatagatatatatgtgtgtgtgcatacatatgcatatatatatatatgtgtgtgtgtgtgcatatatacatatatatatatatataaataaattttagggacagggtcttgctttgttgctgcccaggttggaggagtgcagtggcatgatcacagcttattgcagccttgagctcctgggctcaagcaatcctccagccttggcctcccatagtgttaggattacaggcatgagccaccatgcccagccaagatccattattttgaggtcgcctgtatgtatcctttatcaaaaccttctttcaagaaagcatcctgtgaaattatgttcctaaattattgttttcatgtaaatgtctatttctcataaagatattggatataatgataaaatta

SEQ ID NO: 118746 - DNA, 204 bp, Homo sapiens
tttgtcttaatttcttaagatttcaggataattttaccaggataagtgtctcttttctacttttttaaaatcaaatcttctgcaagcaattttaataccagactaaatgtatcaaggaaaaaatagcaatgatacttctagatcctatatttttttctctgaacttagctaccaaagaacagatcttaatctgaaatattgaat

SEQ ID NO: 118747 - DNA, 353 bp, Homo sapiens
catataatatgtttcagactggaacttctttaattcgtggctttagtttattttaaattaatccatttctactctctagattaaaaatcatgaatctcttgatttgttaataatgaaaactacttgtggtttttttttcgctcaataaattacatttgtaaagttgatgtgtgttttcttttgccagttttattaatagaaaagtaatcattgagctgtttttatgcattttgttagtattttgagatagggtctcactctgtcaccacgttggagtacagtggtgctatcatagctcactgcagccttgaccttccaggcccaagcaatcctcctaccttagcctcccaagt

SEQ ID NO: 118748 - DNA, 437 bp, Homo sapiens
tgcaaggaccattgaagagacacaggacttttaacaggtaaattggcagaatgttagggactgtttctcctcttctgcagtcaccacccaaagcacttgcctcccctgttttacccaatatggtggctgtggaccacacacttctttaggggatttgcttgggttgggctaccccaacatctatttccctactttttgcacaatgcccatctccctttggggaaattgcccctctcccactgtgtatggtcttgggttggtgggaggtcaaagtgccctgcttagttgagtaggctagctataagtaaaggtattctgccattgcttggtggggtgggctggctgtatgttaaggttccctgccattgtctagtagtgtaggctggctccatgtcaaggtatcctgccattgctggtggggtgagctggctacaagt

SEQ ID NO: 118749 - DNA, 312 bp, Homo sapiens
ttagaccatgcaagatatcattttcctatcaagaaaatgacctcatttttatgccacagatatttcaagggtagaagaataagaaatttcatttgctgaactttcctggatattgccaggcccccagaaatggggtgaaggaggaggtaattaaattaatctatattgaatgttactatcctcttttcctgctaagtcagtgaccaccttctgctgtcattaaaccctttaagatggtggaaccagtcctataaaggacatctgattactctggttgagaaaactgagcttctttaaaaacagagctgtgga

SEQ ID NO: 118750 - DNA, 118 bp, Homo sapiens
actccagatacttggttgtgtcaagcctttgggtttctttgtgtccttggggatcaaaatccacttagacttaggaaacttttcagcagttccatccattggccaacccatcagccct

SEQ ID NO: 118751 - DNA, 631 bp, Homo sapiens
gaactcctcaaaggctggggtttgttcaacacacccaaggggccaccagtgctctgaagcaactgaaaatgaatgacgtggcccaagaaagaatgtgactgttggccacaaaatggggagtggtgttgagcaaagaaatttaaactctaatacccataatcccagcacctggctaggtccaagtgggaggatcgcttgagctcagaaatcaagaccatcctggctaacatggagaaaccccgtctctactaaaaatacaaaaataaaataaaataaaattagccgggcatggtggcgggcgcctgtagtcccagctacttgggaggctgaggcaggagaatggcgcgaacccgggaggcagagcttgtagtgagccgagattgcaccactgcactccagcctggtgagactctgtctcaaataaaaaaaaaaaaaaaaaggacaacacgtgggggtggggtatggggtagagggtatttgcaaacttttcagatgaatgaacggcgagcacacgtaccttattttagatttgccacaagggaaccagtgaaaagggtgagccttttcttttgtttttgagatggggtttcgctcttcttgcccaagctagagtgcaatggtatgatcccgg

SEQ ID NO: 118752 - DNA, 388 bp, Homo sapiens
gaactcctcaaaggctggggtttgttcaacacacccaaggggccaccagtgctctgaagcaactgaaaatgaatgacgtggcccaagaaagaatgtgactgttggccacaaaatggggagtggtgttgagcaaagaaatttaaactctaatacccataatcccagcacctggctaggtccaagtgggaggatcgcttgagctcagaagtttaagaccagcttgggtgacaagacaagaccccatctctacaaaaaataaaaaaattagctgggtgtggtgggacacccctgtggtcccagctacttgggagactgaggcaggaggatcacttgagcccagggggtccaggctgcagtgagctatgacgacaccactgcattccagcct

SEQ ID NO: 118753 - DNA, 108 bp, Homo sapiens
aagggctctgcctttatgaatgagattagtgcctttacaataataactctggggaactagctagcccccttccactatgtgaggatacagtgggaagtcatgaactat

SEQ ID NO: 118754 - DNA, 341 bp, Homo sapiens
tgaaaactccaatatgtatgacaaaggcctgtctaatatcttgcctgtctcatttccaatgttatccatctctactttatcagcagaaaattcatcaaacagagatgttgcacctccaagattacaaacctaaaaatgttctttctctgcttctctgtttctctctcttattctgcacctggacttgcaaccccttggtgggtttccagtgttcccagtgtgttaccacactttatttctcccccttagccaacatggttctttattaaaataaaatttattattctgtattatcaatgcaatacacattacatagaaactttctaatataaaaagtaaaa

SEQ ID NO: 118755 - DNA, 472 bp, Homo sapiens
tgactccctgaaacacacttctctactcccactgctaagactattaatacctacttattcttctcatcctctatattctgtaaaatgccaccttctgtccccaagttttgtaacctcctcttactgcccacctggccctggcactcgctgcctgctctctgattcaccatcacaaaacaagaagagcctgtctaacaaagcaagatgttccttagaaaagaataagaagaaaagatcatcttctttggagaactggaggaaaagaaaggcaggaaacatgtctatataaatattcttgtccttccaataaactgttaacgttttcacctcatagtaagctcaacagatcaacaatatgtgtgattacaaaacaaagctatctagttttagatttcacaaaaaaaaaatactgtatcaggaaagatcagagtaaatctgacatgaggtatgaggagcacatttcaaaagtatt

SEQ ID NO: 118756 - DNA, 156 bp, Homo sapiens
cttcatgccccatagccaattcaaagtcaagtcctgttagcgctgtctttggaatggatctagaatcagaccgtatctcacctcactgctcccaccctggtctgagccgcactgtcccatgtttgcacttcacagtagcctgctggctggtcttcc

SEQ ID NO: 118757 - DNA, 176 bp, Homo sapiens
gaaattctcatttaagttttcctttcttagagtaagtttaggaattttctcagatgtattttttgtgaatatatatataatcaaatatatatgtatttatatttatatttaatatggactcttgctcttgttgcccaggctggagtgcaatggcacaatcttggctcactgcaacc

SEQ ID NO: 118758 - DNA, 299 bp, Homo sapiens
catcaatctatctttcagtgaggaagtagcaatgtcccttaactactttataaagagctaattgtactcaattgtttccgggaaagggtatcctacagtcttttagagtttaccacttcattctgtttcttcaggcgttgataattgccagagtaatttcacaaaatatgttttttttttctaatatgtggaagtggcataaagaagtgtatacaagactcaaatttcctggggaagcccaggcgcagtgtctcatgcctgtaatcccagcactttgggaggctgaggcaggcacatca

SEQ ID NO: 118759 - DNA, 323 bp, Homo sapiens
cattttagtaaatatggatacagtaaacaaatctgtatgagaaaccaggcctaacaacactgcatttttctgctaaagatcatattaacataggtccccactcccctgtttttcatggaataggggataaattacctggtctttttccccaccaagttttttaaagctaaaacttacctgagcattaaatgagtttggaagtgcctgctagctgaggggtaaagctgaaatttcagccgtttgtcactcactgcagagtttgcttgggtttgggggagagggatgagatgacattggataggcaaagcagtgacatcagtctc

SEQ ID NO: 118760 - DNA, 901 bp, Homo sapiens
gagacagagtttctccatgttagccaggctggtcacgaactcctgacctcaggtgatccgcccacctcggcctcccaaagtactgggattacaggtgtgagccaccgtgcctgaccaatttgcagaggtttttaaagagcactttggattttattagaattagcatgtccagtttaggatttacaaaaacaagtcgattatactttctttcagaagtattttttttaaagactaactaaatgctgcagaaaattattagtagaatgcaggcttctttaattctgctcttatttcagtaagtctttttaagtgggttgttgtgttctaattattattgaaagctgtttttaaatgtgctggctccacgggcaggaaggcacggacgagctggtgagtttctgccacctactgacaagtgatggtaacagcacatgcttcttttttaagcatccggggaccttttttgctgtcagcttacccacgcaacgtttataagtcaggtgaaagtagaagcgttcatttaagactctcaacttactgggttttttgctttgttttgttttttgagtcgagggtctcgctctgtcacacaggctggagttcagtggctcacggccgcctgaaactcctaacctcaagcaatcctcctgcctcaacctcctgagtaactgggaccacgggcgcacgccaccatgactggctaatttttaaatttttcgtagagatagggtctcactgtgttgcccaggttggtctcaaactcctgggctcaagtgatcctactgccttggcctcccagagcacaggatcacaggtgtgagccaccatgcctggccaagagtctccagcgtactaacagggctatttgtagaaggcaaaacacattgtgtgataccatcca

SEQ ID NO: 118761 - DNA, 799 bp, Homo sapiens
ctctttcactattatgaacagtgctgctatgaacattcctttccaagtttttgtgtagacatagtttcatttctctgtgcagcctacttttaggtagttacaaattaagattgtaagtgatttttttttcattttacacatttgttcgcttcacgatggcctcctctctcttcttacctatctcactctcccaaaaatgatttttcttgagaacatagttgtagaagggtaagaatatcaaccaacttttgctaagtatgaatgcccaggcgctctgctaagcatcatgtatgtgttacaatgtttctcactttatagacgggggctgaggtttagagaggctgctaagcctggaggtcattcagctgaaaaggtagaagagctgggatttggacccacatcctgtttactcagcaaggtccatgctgtctgttgactccctcataatatgatcccagatcatacacctgttgaaatcttagagaattctctttctattcgtgagcttctcccaattgtatcctaaaaagtaaggaatataaatcagatgctccgtcctaagcccttggacctggagcgggcatttgtgttccccgttgacaaaaagatgatgaaatacttcctctgtgtctagtgcagcggcgtcatggaccggtgttaagtttaacctgacccttctctctgccctgcagttgcttcatctcctcaccttaagacttcacctttccttcatttcagcttcccagagatactgccacaccccggacctgtgtatcaacttgaaccctcacacccccca

SEQ ID NO: 118762 - DNA, 464 bp, Homo sapiens
agctgagaagccatgagggtttcctgtcagccagagtagtctggaaactttatataggaggtaggagttgatctagtgtccagtgggtctcactatagaaccccatactgggatgggcttgcaatcagctctgcctgagtttgttgaggcttggaaatgggacagaggtgaagcctggggaagctacaacctagtactcttttaactacagtcctcctatggttctattccccagtttggccttctatacctctacctacccctccacgcgtcatcttgagttttgaattttcaccaagcagcagctggaagccaggcattggctgctggaacaatattgactgcatttcaagttactttcagaccttcagaaggggaaatttgcttttctcttgcacattctaattaagaccatgtgctctgggacccatggaaacatagttctctaatagttcatcttgggg

SEQ ID NO: 118763 - DNA, 172 bp, Homo sapiens
caaagtgctgggattacaggttccagccagccgcagtcagtctcctctttatttaaatgtttgctatgatgatgcatttctcttaagaaaacttcataattgacatatgtggatttaggactaccttccagtttttaatgttgtctatttctgaactagaagatggtatttt

SEQ ID NO: 118764 - DNA, 883 bp, Homo sapiens
tccagaaagggcaaatgacttctgaaagtcacacagcaaatcagtggccccagtagaattgacccctagagagctggtctgggaacttgctgagaagagggcctgagtgctaaaggcctcggtttattatctgtaaaatgggaccgagattggagggagtgtcctgggacgagcctagaaagtaagttcctcaagggctggaatcttcattttgttcactgatatatccaaagtaacacatgatcagtgctcaataaatatttgttgaatgaatagcagggaaaagggttctctaggagtctcttggctgctctgcctcagccctgctccttagcctagtgagcttgaggtctggaaatggcttcttctggaggttggacaaccccaaattcattttccctgagggttctatggctgggcagtccctactgaggccagtgcattgtcccccactgacctgcaccttgatcccagcacccagtagcctgacccaggtccatgtctccatctcttctgactgcctcattttcccgcccccaaaagctgtgtccagggatgtggggcacagacaccacagacttttatagacatccagcccccttcttttatagttggtgagttgaaaagagcactgatggattgagagtcagggaaccaacttttctgttcccaggtcccataacagaagtgtggtttgctacaacagcatctgagctagaaaaatctttagctggaacctgacagttacagaattgtaattataatttttagaatgcatactatatattgagaacgatgccaagattattctatacgtttttatgttctccctttttactagaagaaaatgaagctccttaacctcttcaatggaagaatttct

SEQ ID NO: 118765 - DNA, 436 bp, Homo sapiens
gttccacttacgatttttctactttacgatggtgcaaaagtgatacatattcaagagaaaccatacctggagtactcaaataggcattgttttttcactttcactacagtatttgatatgttacatgagatattcaacactttactataaaataggcttcatgttaagatgattttgcccaattgtaggctaatgctacatgttctgaacacgtttaaggtaggctaggctaagctatgatgtttgacagattaggtgtattaaatgcattttcaacttaatgatattttcaactcacgatgtctttatcaggttaagttgaagagcatccatactgtgatggatgattacctcgtggtttccacctggccactgatttcatttcattaacataatgatgcaactccagtacacccaagagatatatctgcactcc

SEQ ID NO: 118766 - DNA, 901 bp, Homo sapiens
gtattattcctactttaataaccccaaaactagtgtgatatactataaaaaatgtatttaaagtcattatttctggctcatacaccactcagaatgtaaactggtatgatatttttacaggttgatttggaaatatctattaaagtgtcaaataataagcctctctttttcctcagcaattccatgtttaggaatttaccctaggaaggaaaggatatgtacaagaacgttaactgaaaattatgataaaatggattaatacgcgacttaagaacaaatagaagggtgggattacaggcaagagccactgcccccggccttatttatatttttcaaatgactagaagtatacataccaaactattaaagagtgactaatttgggggagtgggatgaagacaaatattgaaaaaggtgcctgtaatttttattttgttcatttttctgtactgaaaaaaaaattagccatgtgtacttattccttttaagacaaaagaaaagcctaataaaatagtagttcctgagactaactggttaatgaggctacctccatgccactgttccccaaaacacctcaccatattccatgagccaaagggaattcatttggtgagtttcttggaccttgggaactgctgcctgatgttttgcctagtttctgctactaaattaaccttagccagttgtagattatcatggctgctgactcatgagctgatggtcacagagctatttatgtttttaaaagtacaatgtttgatagagatgaaaggtaatagcagtcttacccaactactaaatgatgaggcaaggtgctttaacattaagagtttctttgaactccccaacacaaatgattcacacgtttcttatcctgttcatctttccagaagaaagatta

SEQ ID NO: 118767 - DNA, 199 bp, Homo sapiens
aacagggaaacattgacttggacagcccccgtccaggctgggactggggaggtggccaaggtgagagcctggccagctctcgaggcataagggccaggcctctcactgcagaaccatccccctgtccctgtctgctccttttctctgtccaccctgccctgtagcctgcccagtttccccagccctggagcttccccct

SEQ ID NO: 118768 - DNA, 221 bp, Homo sapiens
cataagcaggtggttcacaagttcagaggaagaaaagtccttttcaactgggattattagcgaatacttgaagaagatggaatagatctaaagggaattaactgctgcttcagtttcttctctttctcatctctttttactctgtactgtttcgttatagtaaaaaatattataaggtaatttttttggggaggagacggagtctcgctgtcacccaggct

SEQ ID NO: 118769 - DNA, 818 bp, Homo sapiens
tgtggcagcgcgtgcagctactcgggaggctgaggcaggagaatcgcttgaacctaggaggtggaggtaggttgcagtgagccaagatcacgccactgcactccagcctgagtgacagaatgagactccgtctcaaaaaacagaaagaaaaaaaaaccatttggaagcaagaaagcagagagacaagagatgtgcggcctggcacagtggagagtggggaaaagaaacacttaggcttggagcagacaaccaggaaaccagcaattctggagactgaatccagagaccctagtacctgtaaagccagggatcacggaaaagctgaggacaagagagttggtttcaccacagaagcactgacccctctgtttactagggaaagatggaaccactgagggtatgcattctcaggactagggtgtggaccaaagggaaaacaggaatcagagtgcgaatcatcaaccttaacatgcacactcagctcttgggacaggaacagcctggcttcaacgtcaacagacaagaaaccgctgaattcttgcctgtgagatatacaaggtcaacaaggaaagatctttttacagagggcattcaagaagctcctcaatggccaacaagccccacccttacatctgaatcccatctgctttttcttaaagggggcacctgagaatgattatcagcaggtgcccacgggaagtctccaaggtgaaagagaaagagaaaaaagactcagagaaaacaaagacaatgcatgaaagaagaaaacgccaggggaaaaaaatacaattaatatcctagtaatgggaattaatgta

SEQ ID NO: 118770 - DNA, 319 bp, Homo sapiens
ttttgttaatgtttctgagttgatattcttaagttgttctatgacttaacctataacattttttcatagaaacagattcggatgtatttggagagtctgaatctgagtcatcttttgcacaactcagtcctagtgttggatttagcagtaagcgatttatttatttatgtatttatttatttttaaagacagggtcttgtcctgtcatccccaggctggagtgcaatagcatgatcatagttcactgcagccttgacctcctaggctcaagcaatcctcctgcctcagcttcccaagtagctaggactacagacacaca

SEQ ID NO: 118771 - DNA, 456 bp, Homo sapiens
caaggtgctgggattacaggcgtgaaccaccacgcctggcccactaccttttatttaaaatgatacgtcttttttgctgattattaaactattcagttaaaaaaaaaaagctaggaaaattcagaaatataaagaaggaaaatttgtgattcactaccccgaggaagaccaaagtgttaactggttattttcttcctttgaatgtatactttcataccttcctttaatgagattgaactcttggccaggcatggtggtcagtactttgggaggagtaatcccagcactttgggagggtaaggcaggaggattgcttgagcccaggagttcaagaccaccttcagcaacaaagtaagactccatctctacaaagaaaagaaaaaattaggtgggtgtggtggtacacttgtggttccagatggtgggaggctgagacgggaggatcacttgattcca

SEQ ID NO: 118772 - DNA, 409 bp, Homo sapiens
cctccctctgtcttcctcccctttcccttccagcccctcttttccaggaaccttgccacacccgcacgtgcaccctttactccttggccctcccacagctgctgtggcacacctgtgctctgcacttgcctcaccagctctctgctcgctttttttttattattattattatactttaagttttagggtacatgtgacaatgtgcaggttagttacatatgtatacatgtgccatgctggtgcgctgcacccactaaatcgtcatctagcattgggtatatctcccaatgctatccctcccccctccccccaccccacaacagtccccagagtgtgatgttccccttcctgtgtccatgtgctctcattgttcaattcccacctatgagtgagaatatgcggtgtttgg

SEQ ID NO: 118773 - DNA, 680 bp, Homo sapiens
aacggaggcgctcggggcctgctgcggtgcccgcgggtctgtgccgctgaagtgggcacccctcctccagcctcgtgaggacagcggccgtccctcggcgcggggctggtctgccacgggcgcctccccgtgtcccctgggccgccgcacggcctctgccacggtcggccctttcagtccctcagaagcacttgggtttaaagtctccatgtcattaaaacaacgagcaggtagacgaggcggccggagcgtgtccgccgcagtctgggctgtgaacgggcccctcgcccgcccctcctgagccggagctgctccggaggacgagaagctctcctcgtggaaagtcttactaacctggcccggcgcccaggtctgaggccttccccccggctgaggatgattgaaagagcctgtgtgccgccatccaacgtcgttactgtcgcagacggcggctaccgcgtgatggatggagcagcggactcagccgtgcaaatcattcatcggggtcagtgcctggtgccgtgggaccgcggcgtgggggtttcaacgcgtaaaaatcgcaccgcacgccacccggagacggagcctgctgtcggcagggcgggccgggctgcggggccgggtgctccggaggccgctgaagaggcagctccccaacgccaagagcccgtccagcccca

SEQ ID NO: 118774 - DNA, 506 bp, Homo sapiens
ggcaacttcaatgaacaaacatcttccaaaacttttgaatttttcttctgcttgctaaatactattttgtaaagtttcaattactagttcgaatccacacctcaataaatagatatgtattagagaaggaatggaaaaatatttactcattaagaataccaacacatgaaagtgatttcagagtatggagtcttgagtcaaaaacaaaggacccttcccggaagcttccttttttgcttcagtttttgaatttgactgaaggaaggtggaaatgatcactcgagcccctaatgaattctccttatcttcagatgttaattcccacttggccctactcttctcctttagaacgtttttcttgcaaaatataatttaatgcatttcagattccccttcctacctaaatagggccatagaataataattatctttcttatgggtcttggtatctaaattagtagcaaggacttatgagctggtttactgcacttctttgcaccaaaaat

SEQ ID NO: 118775 - DNA, 560 bp, Homo sapiens
ggcaacttcaatgaacaaacatcttccaaaacttttgaatttttcttctgcttgctaaatactattttgtaaagtttcaattactagttcgaatccacacctcaataaatagatatgtattagagaaggaatggaaaaatatttactcattaagaataccaacacatgaaagtgatttcagagtatggagtcttgagtcaaaaacaaaggacccttcccggaagcttccttttttgcttcagtttttgaatttgactgaaggaaggtggaaatgatcactcgagcccctaatgaattctccttagtaaaatactggcgaggaagaatcaatcccagcaacaggatgatctgggaccagtcttcagatgttaattcccacttggccctactcttctcctttagaacgtttttcttgcaaaatataatttaatgcatttcagattccccttcctacctaaatagggccatagaataataattatctttcttatgggtcttggtatctaaattagtagcaaggacttatgagctggtttactgcacttctttgcaccaaaaat

SEQ ID NO: 118776 - DNA, 418 bp, Homo sapiens
gagcataaatattgcggtgccctttcctggcagcgccggctcagttttctggaatgtttctccttgtctgttagacttcgtgtccacatctaggaggacactggagaggaaccttcttggaggctgcgtagtttcttctatgggatcaaatgcctcctggcttttgtagggattactttaggagctgaattgtcagagggtttgacaaactagattgtagtttctttggtgatacgatttctccacattttcagtagtgacattctagcttcataacatgagttgggaaggtttctgcctcctgtttcctgaaatgtttatgtaggattagtattatttcttccttaaatgtttgctagaattcaccagtaaggcaatctggatctggagttttctttgtggaaagggcaccgcaaaa

SEQ ID NO: 118777 - DNA, 1109 bp, Homo sapiens
gcctcagtctcctaagtaactgggattacaagtgcctgccaccacacctggctaatttttgtatttttagtagagacggggtttcaccatgttggccaggctgatcttgaactcgtgacctccagtgatccacccgcctcggcctcccaaagtgctgggattacaagcgtgagccactatgcccagcccctgaatgttttttaatgattgcttctgagcttggggtctccaggagcacacaggtcatggaccccagcaagcaagtgtgcatttctgaagtatttgtttttcacccagagcccagggtaagacagctatgcttcctgagtcaggacttggagggcgtccaggtcaccatctcctacctgaggttgtaggccacagaggaacctagggttctttgggagcattcagcaggggtggacgtaggtccagttcttgccttgacttggcccaaggccttgatctgattggtacattggttccccaggcagcaagctctggcacagggtggctacagacgcagcatctgaccaaggtcttgctgctttacttactatttcccttatcattggggatcccgaagagcaccctggggctcagtgctgtgccgggagggctcggaactcagaaaagctgtcacactcccagttccggtttattacaaggaaaggacacaggttaccgtgagcgaaggctcagggcgcacagggcgggctccaggagagaccaggcgtgagcttcagcggctcctcgcccaggggagttgtgcagacggcacctgtttctttcggcaacagtgtgggacagcgagcacggagtcacaaccgggaagctcatcccagccatggcggccagggtttccgtgggaggtggtgggctgcatgggcatggagcgcctgcgtggccaaccctggtcacttgggctgcagccaccagagatctggcttgggactctgtggcccaaggccctcaccataaatgatgtggttagcacagaccgcctggcagtccagtaaaccaagacgctcacacggggcaggattttctaggggcctagaggttatcctccaggagccaggcagaggccagacctgcctttggaaggt

SEQ ID NO: 118778 - DNA, 751 bp, Homo sapiens
cacagtagctcacgcccgtaatcccagcactttgggaggccgaggcgggcagatcaagaggtcaggagttcaagaccatcctgatcaacatggcgaaactgtctctactaaaaatataaaaattatcgcgccactgcactccagcttgggcgacagagactccctctcaaaaataataaaataaaataaaataaataaaaatataaaaattagccagacatggtggcacgtgtctgtagtcccagctactcgggaggctgaggcaggagaattgcttgaacccgggaggtggaggttgtggtgagctgagatcacgctagtgcactacagcctgggcaacagaggtagactccatctctaaacaaaaacagttcacagttcattgattgcaatggtgaaaaataaagtacaacagagacttgggctgaaaagggaggtatgtggtgctactgaaataacctctcacaaaggatttgagcagcgctattgacccagctgaaacccaaaggaaggacttgatcactaggtgtgtatgttgttgtaaattgtttttgcttttagacctcaggtttagagaactaaggtcatcatgaccctgggttcatggcacattgtatcatcaaaggcccacttgggcactttcttattaacctttcatctccatttttccttcccattccctgtttccccatacgtggttaatgatgaacttatgagagaacctgttctgtctggctttctcagagaaagc

SEQ ID NO: 118779 - DNA, 152 bp, Homo sapiens
tcgctattcatcggcacctcgctattcatcggcacctcgctattaatcgacacctcgctatccaccggcaccacatcaagattttctctttgatccgatcaggaatagtaagaactgaaaagggcagtttgaatcacggtgcgatgaaggag

SEQ ID NO: 118780 - DNA, 398 bp, Homo sapiens
ctgcttctgaaagggacaggtcccctggaaagtctagttcctcagttaatgccatgtctctgatatacataacttcatacacagtgactggattcacacacccccatcctcagcatgccacagcccaccagatggacagtcattcataaacacctatgcccacacagcatcctcatccttatcctgtctggtggtatccccaaagatgccaagctccccgcaagtgactgaaaaactgaaacagtctcagaaagggcaaccaaccatgtgcccagtaccacagagcatgctcaagcctaagctgggatgcaccctcaagtcttactaaccacaaaatcccaaatcccaaagggtgccgccctttctgctaaactatactgccttctcagtcttcccac

SEQ ID NO: 118781 - DNA, 694 bp, Homo sapiens
  misc_feature (647)..(647): n is a, c, g, or t
gagacagagtctcactgtgttgcccaggctggagtgcaaatggcttgatcttggttcactgcaacctctgcctcccaggttcaagcaattctctagtcccagctactcgggaggccaagacagaaggatcaccttgaggccaggagtttaaggccagcctgggcaacatagcaaaacctagtccctaaaattaaaaaaaaaaaaaaaaaaaaaaggaaaataaaggagacttgaaatttttgaactaaatagtggtgatggctacacattgtgaatgtaattaacaccactgagttaaacacttaaaatggttaaaatggcaaattgtatgttatacctattttactacaataaaaagtataaaaaagagaagatatttaggtgacttacagcaaccaattgcaacaaaacaaaatgttaagaaatgatctttttatgaggcaattggaaatttgaacactgatcaactataggatgattggaattattaatttttaaaggtgtgataagatactgcacttggctgggcacagtggcacatgcctgtaatcccagctacttggcaggctgaggtgggagaatcgcttgagctcaggagttcgagaccagcctgggcaacgtggcgaaatccccgtcttttccaacanccaacagatggaaattaggattatatagccttggggattgtgtgacc

SEQ ID NO: 118782 - DNA, 863 bp, Homo sapiens
aagatactgcacttggctgggcacagtggcacatgcctgtaatcccagctacttggcaggctgaggtgggagaatcgcttgagctcaggagttcgagaccagcctgggcaacgtggcgaaatccccgtctttacaaaaacaaacaaacaaacaaaaaagatattgcagttgtgttgtaagcgtccttatctttcagagctacatagtggaatgtttatggaatatttaggataaatgatataggcatttgggatttgctgcaaaatgacccagaggcaggggtcagggggagaggtagagatgagacaagaggtagaggggagaggtagaggtagccacgagctgataattacagacaagagatgcggagtatgtgggggctcattatcctgcatagtctatctttgtatatctttgaacttttcaagaataaaaaagcttagtatacatggcctggtcctaccagagactcacccaatgccagcctccagccagggagagccaagtttgcattttcacacgcatctcacactcctctgcactctcaacttggagagctccaaacagggaaaccccaagccttgctggcttctgccaaccccctgagcagaagcatgggtccccctgatcaccacctcaccaccctcatcctgatctcactgtacactccctttcctggtctgctaagtagcgggtgtttttccttgacactaacgctacagctagaccacggtgggcttggcaacaggtgtcttcccagatgctggcgttaccgctagaccaaggagccctctggtggccccgtccgggcataacaggctcgcactcttgtcttctggtcatcctcattgtcccctcagctc

SEQ ID NO: 118783 - DNA, 609 bp, Homo sapiens
aattcgcggccgcgtcgacgaagacgacagaagggggggggagaggtagagatgagacaagaggtagaggggagaggtagaggtagccacgagctgataattacagacaagagatgcggagtatgtgggggctcattatcctgcatagtctatctttgtatatctttgaacttttcaagaataaaaaagcttagtatacatggcctggtcctaccagagactcacccaatgccagcctccagccagggagagccaagtttgcattttcacacgcatctcacactcctctgcactctcaacttggagagctccaaacagggaaaccccaagccttgctggcttctgccaaccccctgagcagaagcatgggtccccctgatcaccacctcaccaccctcatcctgatctcactgtacactccctttcctggtctgctaagtagcgggtgtttttccttgacactaacgctacagctagaccacggtgggcttggcaacaggtgtcttcccagatgctggcgttaccgctagaccaaggagccctctggtggccccgtccgggcataacaggctcgcactcttgtcttctggtcatcctcattgtcccctc

SEQ ID NO: 118784 - DNA, 183 bp, Homo sapiens
gtctcttgacaccagccacctagcattgtgtccccagtgcccatattccccagcaaaatcatgccatttattgcctccgtgctttttgtgactggcagtgtccctaccccaccttcatctggctacttctttttctttctttctttcttttttttttttttttttgagacagaatctcactct

SEQ ID NO: 118785 - DNA, 881 bp, Homo sapiens
tctaggacagtactacctaaaatattcatctctgtgaaggaaaaaaattcacaaagaagcgcctttctttagcccactgattctcctaggccactctttcatttaatttctttaaaaaaaggaattaaacatagaaatcagatagtacatagacaaagcctagaacctgagttttaatttgtgagctgagtaggaggccagaggatccgtattaaatttcagaacccattgtcaaatctaaggtcaaagatttgctctaatgttttcttctaggagttttaaaattttagcccttaaattaagtctttgacctattttgagttaattattaaatatggtgtaaagattcaacttcatttttttgaatatggatatccagttttcccagcaacatttgtcgtcaaacactgttctttcccccattgaatggtcttggcactctagttaaaaatcaattgatcgtagatgggaaagcatattactaggctctcatattccactggtctgtgtatctgtctttatgccagtactgcactgttttgatttctgctactttgtagtaagttttaaaatcaacaactgtgagttctccaactctggtcttctttttcatgattgttttaatcagggtcactggaaattccgtacgaattttgggataggtttttttatttctgcaaaaaacaccatctgggtattaatagagattgcattgaacctgtatgttcctttgggtgtcatcttaacaatctaattcttgcaatccatgagcatgggatgttgtgtttccatttattggtgtcttctttaatgtctttcagcaatgttttgtagttttcagttgcatgagttttgtaccttcatggttaaatttattccta

SEQ ID NO: 118786 - DNA, 502 bp, Homo sapiens
ttgtaatagctttattgagtcataattcatattccatacagttcacccttttgaaaactgcacaattcatttgtttttaatatattcacaaagttgtttaactaccatcacaaacaattttagaacactttattcacctcaaatagaaacccctttaactgtcaccccctaatccttcatcctcctcacccagccctaggcaaccactaatttctgtctctaaagatttgcttcttctggacattttatataatggagtcatacaatatgtgtcattggtgactggcttcttttacttagtgtaatggttttgaagtttgatgtcatacgtatcatttcattacattactttttattgccaaataattcattatatggatatgtcacattttatttattcataagttgatggaaatttggattgtcccacttcttggttatgaatgttgctacactaaacatttgtggacacatttttgtgtggacatatgtttttattttt

SEQ ID NO: 118787 - DNA, 416 bp, Homo sapiens
tcgctattcatcggcacctcgctattcatcggcacctcgcaattcatcggcacttcgctattcatcggcagtcatgggcatgctagatcagcctggtttcagtggagaggtggagacaaaagcctggttggaattgattcaaaagagagaggaaggggaagaaatggagacagacaattttttttgagtttttccttaaagatatatgcagacatggagtggtcactagggagggatataggatcagggaacataattttttaaggtagttttgacagcatatttgaagattcttatgaataatccagcagagaaaaaataaattgatgatgtaggagagtgaagaagtggagtgtacaggcataggtgccgatgaatagcgaagtgccgatgaattgcgaggtgccgatgaatag

SEQ ID NO: 118788 - DNA, 358 bp, Homo sapiens
agactaaccaagaaaaaaaaaagacccaaataaataaaatcagaaacaaaaaaggagacattacaactaataccacaggaatacaaaggatcattagaggttatcatgaataactgtgtatccaattagaaaacttaccagaaatggataaacttctggatagatataacctatcaagattgaaccaagaagaaacagaaaacctgaacagaccaattacaagtagcaagactgaatgtgcaataaaacgtctcctataaaattaaagcccaggacccaatggcttcattgcagaattctaccaaacatataaagaagaactatcaattcttttccaattctctcagaaaactgaaga

SEQ ID NO: 118789 - DNA, 242 bp, Homo sapiens
tcttgttcttactggatctttcctcttggctctgcaggtttctgttaacatgatacagccttcacaaaattgtaaggtataaagtaacagatttttagagctaacagtgacttttcggatcacctagtcaaacacctccattctacatttaacccaaatgccgctcaagccttctatccatcctgtcgcctctttagtattcttcatgtcctcagggattatatgctcatggttattcccag

SEQ ID NO: 118790 - DNA, 536 bp, Homo sapiens
tcaggagttcgagaccagcctggccaacatggcaaaaccctgtctctactaaaaatacaaaaattagccaggcatggtggcacgcgcctgtagtcccagctactcaggaggctgaggcaggagaatggtttgcacctgggaggtgaagtttgcagtgagtcaggatcgcggcactgcactccagcctgggcgacagagtgagactccatctcaaaaaaaaaaattttttttaaacatggagaattgcaaaagggaatagcctggagaatccccacatccccatggccttgctccatcatgatattgaagtcactcttttggttgtgtttctctaaattctatgaggacagcaactctcttcattatcctctatatcattgctatgccctggtgttgtgcccggggtacaacacgtagtaggtgttcgataaacttgggttggataaatggaagaatgaatgaatgatgagctggtgcacttagatgtgatttataagacttctagggggatcaccggctattacttagaactatat

SEQ ID NO: 118791 - DNA, 413 bp, Homo sapiens
ttgtctggctgctgatagggttgagccattggtaggtaccaacagaaactctgaaaagtgagaggagggtgaattcaggcagggggtgtattccctagctctttccctgtcacgaagtagctgtgtccctgcattgaaggctacacagtttctcttgggatacccttacattttctttctgggttccaggaatcactggctcccttttgtcttcagatcttgggaatcatggttctctgctattgctagtccatgttctgcatcatttcctgttggctgttcttgatgctaactactctaactacactactataaaaatctcttttaaaaatgaagcaattgtcctatatgagggcattgcctgttttctgctgggactctgacagataaaatatcttttactgaaatagatt

SEQ ID NO: 118792 - DNA, 292 bp, Homo sapiens
gaattccaatctctaaaggttattttcttggtggaaagcagcaggaagcaccacaggtggggtaaagaaaagctacagcaatctcttttctcaggctaatgccttgggaaccctgaggggtttctttttctttctaaccagtccctcgcctctcctttcgctgttttcttctcatatacaactggtgaggaaagtcattggaatgatgactggggatagtagggctaggttggacaccttttaataagccctggagggtatgaatgttccaccaatatttatgtctccaatt

SEQ ID NO: 118793 - DNA, 716 bp, Homo sapiens
tcctgagatggccccagatctgcaagagacatttgagagaagctatttattagcagacgtgaagaaatggattctgcacttgattatttagccatgacttatcaatgatgatggattggaaagcagtagctgcccagaagttaaatctgtcttctaaaaagaagaaacatcggccttccacttcttccgctgccgaaccaccgctctttgcaaccagcttcagtgggattctgcagacctcccctcccccagccccaccctgcctgctgagggctgtcaacaaggtgaaggacaccccggggctgggcaaggtgaaagtcatgcttcgcatctgttccaccttggctcgagatacttcagaatccagctctttcttaaaggtggacccacggaagaagcagatcaccttgtacgatcccctgacttgtggaggtcaaaatgccttccaaaagagaggcaaccaggttcctccaaagatgtttgccttcgatgcagtttttccacaagacgcttctcaggctgaagtgtgtgcaggcaccgtggcagaggtgatccagtctgtggtcaacggggcagatggctgcgtgttctgtttcggccacgccaaactgggaaaatcctacaccatgatcggaaaggatgattccatgcagaacctgggcatcattccctgtgccatctcttggctcttcaagctcataaacgaacgcaaggaa

SEQ ID NO: 118794 - DNA, 498 bp, Homo sapiens
ccagttgggaatctcctgcctcacagacctggtggtctagaggtactgtggtataagtagaaacgagcagctggacttagagacaggcgtcctgagtgttgatgccagccttaccctgaccctgtgtgtggcagcagtgggtcggtcaaacctttccaagcctccgcgtcctcatctgaaaatgggaatgaggatgcctatccgaggtgacttagcagaggatgaagcactcccgtgagtgagctgcgcacagtctccttgtacaagcaggacatttctccgtttctccttttctctgcccgtaggattgactttcatcttgcctggtaataagccctcctaggaaaacaaattactctgaaaatttgtcattttggtgtggtgaattcgttcttttattcatcatccaaaaagttccattgtttgagatgattcaacatgatttggaaaccatggggtaagtctctgaggaacaagaagacagaagaaagaacgcac

SEQ ID NO: 118795 - DNA, 263 bp, Homo sapiens
gtacattcaaactgtagcactctacccagcttccacagctgtcatagtcacagccaatcgagtgttcttaatacaccacccattcacccttggtatatttcaaggcaaattccaggcatgccgtttttttctgtaactacatcagtatgtatatgaaaaagaaaagactctctttgaataaacctagccacaataccattatctcactttaagaggtgattaacaattccttaatatccaatattctgttgttgttcacattt

SEQ ID NO: 118796 - DNA, 590 bp, Homo sapiens
ggccaatctttgttttatcagctttcctgtgggaacaataaagttaatgacacagggagcataggttagggccagttgttactttggcacaaacacctgtgattcgttttctgagactagttttaaactggtcgtgctgaaggccagcccactttctgctgtaattattctgccttctgatgttattctcgaaaaatggccagattccaggcgtgactaatggttggtgtaaactaggcatgagaaggtttgattacaccttcaattgtatgattctatcatgatggtataggtttgcagtgagtcttaaaccacatagcactgacacgtagtgagtgctcaaacaaatgttagctttcattattaattatagactgttcagacaaggttatgcagaattttcttagtttgcactgactaaacctaatctttcaagttaataatgttgctaaaccacctacatagcagagacactctgctcctacgatttcatatgctttagatacccggacgacactgtttagactacttcatttaaagaccccagagaagtgacgtgctggtgttacagtaatgcaaacagaatcttt

SEQ ID NO: 118797 - DNA, 490 bp, Homo sapiens
tctattaattgcacgtcacttattttggggataattagaaaaagggggaatgagaggttgggaatagaaaaagggagagaagcaaagggcagaaaagaaatggaagcttttgctttgaggtcttgtgggggtgggggtggaaaaaaaagtgtaggagaagcctgagcccaaaagcttgcctcctccctctacagggaaagggagttgagcggagtgtaagagggtggatggcatgcgcttctgacctaccaaagcatctggaaatttcagactgctctttgtctctgagactgtgttgggcacagcattgaataaagtgtggatcaataagtatgtgaagtgctggatatgttaattcactggatttaatcattcctcagtgtatacatgtatcataacatgtacgatgtaccctgtaaatatatacaactattgtaatttgcccattaaaataaaacaaaatataaataaaacatgagcagtgatgatt

SEQ ID NO: 118798 - DNA, 234 bp, Homo sapiens
gctaaaccagcccctggagccactggagggtgacaaggagactcattcacatgtgatcagaccagaagtagcccagcagggcatggcgttgctgcccctaggaacagcctactttttggatgtttgggtctctgcttccagcttcgaactccccaggagcccacacatgtccaatcccaaccttccttccatctaagcttccccgtcgggctagtcgggggggtaccgagctcg

SEQ ID NO: 118799 - DNA, 397 bp, Homo sapiens
aattctatctactaaccttgatcaggaggctagtgatactggctgtgtaaaacaaaacaagacaaaataaacaagggaaaaccacagcgcatgtggccactttgttcagaaggtgacaccactgaatttagtctgtgaaggtcttgtcacatgaaagcctagaaatagctatgacctaaacatgagagtagaagacaatccggttagaaatgaatgaacacattccattgtgcttgtatagtgtttaaaatctattttggggcaaaaggggtattgtaaatactttcccttgttcataactatcataacccaaactttctggctctcaacattttccagtgaccctgcatgcctataattttttacacaccacctgacctggcaagaattatgctac

SEQ ID NO: 118800 - DNA, 427 bp, Homo sapiens
gcacgagatgagacattatgtattgatttgaatgttattagacctgtaacataattcttatctgatgaatatatgatgaatatattccttgttcaaaatgagtcataaattcaacacatctctacatctatattatgcccatttaatttctttcagcaatgttttgtagtttttggtgaacaggtactttatgcatatgtactttatatttatctctaagttttatatttctgatgcccttttaagtgacatttttatttcaatttacaattgtttattcttagcttatgggcacataatagatctttgtttgacattatatcctgtaaacttgcaaaacttattagttccatcagttttttataggttatgtaggattttctttatagatgattatgttgtcagtgaataaagacatttgctttta

SEQ ID NO: 118801 - DNA, 117 bp, Homo sapiens
gcacatgagggagagaagaatcattcttttcttttgcagatgttggagatttcttctttttgatgtctttaaagtcttcttttcctcacggttgcttcctagctcctcaccgggctt

SEQ ID NO: 118802 - DNA, 400 bp, Homo sapiens
tcctaagtccccaatgtgttggtatttggatgtggggtctttgagaggtaattaggactaggtgaggtcataaggatggacccctgatgatgggaatcaatgcccttataaaaagaagaagaggccaggcgtggaggctcatgcctgtaatcccagcactttgggaggccgagccaggtggatcacctgaggtcaggagttcaagaccagcctggccaacatggtgaaaccctgtctctactaaaaatacaaaattagccaggcatggtggcacatgcctgtaatcccagctactcggaaggctaaggcaggagaattgcttgaacccaggaggcagaggttgcagtgagctgagattcacgccattgcactccagcctgggcaacaagagcgaaactcc

SEQ ID NO: 118803 - DNA, 414 bp, Homo sapiens
tcctaagtccccaatgtgttggtatttggatgtggggtctttgagaggtaattaggactaggtgaggtcataaggatggacccctgatgatgggaatcaatgcccttataaaaagaagaagaggccaggcgtggaggctcatgcctgtaatcccagcactttgggaggccgagccaggtggatcacctgaggtcaggagttcaagacctgagcaccacctgatgtgacgagaacctgattaacctttataaagcaggttaactttaacctcttccgaactcaccttactcatctttgaaacggaaaaaaaaaacaaataaactgctgtccgcccatcccaggaccataaatttgtggccttgaacttgcttacctcgactgccctttccttctccctcacatagggatcgtcta

SEQ ID NO: 118804 - DNA, 436 bp, Homo sapiens
gtattacttttgtcattatgcaacattaatggcagaaataatttatgcagggggttatttggcatttattttagagtatataaaatacattttgtcaatcaaggaagactttagttctcttttatgttatacaatctactttgattttttctttctttgaaacagggtctcactctgtgagactctagcgccaggctagagtgcagtggcacaatcatggttcactgtagccttgacctcccaggctcaattgatcttcccacctgagcctcctgagtagctgggactacaggcatgtgccaccatgcctggctaattttcatattttttggagaggtggggtttcaccttgttgcccaggctggtcttgaattcctgggctcaagtgatccacctgcctcagcctcccaaattgctgggattacaggcatgagcc

SEQ ID NO: 118805 - DNA, 217 bp, Homo sapiens
gttctttctggtgccctaccacctgtttccccaaacaaagacatcaggacccacatacaataaatcactgaagagaggagagggggcagagccttgtttgcacactctccttagctctgaatattctactgcaggcctccaggaggctccaaggaacccagcttgaaggtcattggtatgatccagtgcttttatttacatacgctttttttttttc

SEQ ID NO: 118806 - DNA, 278 bp, Homo sapiens
tgggatggaatgggggtttgataatacctccctcccacctcagcctcccgagtagctgaaattacaggtgcacgccaccatgcccagctaattttcatattttttgtagagacagggtttcaccatgttgcccaggctggtctccaactccggggctcaagcaatcctcctgccttggcctcccaaagtgctgggattatagatgtgaaccaccatgcccagcctaattttttcaaaaaggccaggtggaaactaaaaatctgaacttttggtgtaag

SEQ ID NO: 118807 - DNA, 557 bp, Homo sapiens
tttcagtaacatggtcttgggatgacagggctcaccctgcagagacccaaatggaggtattcagggcccattgaaaaaccatctgctgccaaggctctgctgctgatctcatgcaacagaaaccagagtctgtcgcagctctgctactcactgggtgactctgggcgagtggcaggctctctggtcctgtcttttctgatgtggagaatgactagctggtgcccgaggttttcctaaagctatggaattccatcattttataaatgactccaatgacgaatcctactggcataacatctatggtttcaccaactcttagcagtgatctttggttccagattcatgtgaaaagccaagaaccgctttccacaatttgtcttgtcatgactctccggctccatattttaagaagcagtctacactagcccttgaatctagactctaattttttaagatacaaaggaaatcattaagccccagaatattagtagaatatacggcaatatggatcaagtaatccaaagtattagcaatgttgcaagaggctgtcacctagc

SEQ ID NO: 118808 - DNA, 200 bp, Homo sapiens
ttgtgcctggcttttcacaggtctgggtttatggcattcattggggctttttcatttaagaggcagcattcaaaagatgccataataaaagatgctataaacacaagaaaatgaagtcatctatctttctagtatttgttgatgtagagacctgagcaagccggagacctgaggaagccaggagacctgagcaagccagg

SEQ ID NO: 118809 - DNA, 468 bp, Homo sapiens
tcctaacctagtcttgggtggaattctggaagcactttcctgaggaagtcacatataagctgaaaactggaatatgagaaaagtaccccaagcaaaaagggaggcatgggggtgggattcagagcaaacaccctgcatttggaaggaccagtgtcaggaactactgtgttttactgattaattataagatgcattttccatcacattaaaaatccctgaaatgaagacatgtcctacaattgatgacatctgaaattcacggaatttaaaaaaaaaaaaaaaaaaaaagaccagaaacattggagagcagaaagcgagggggaaaatgacgggggtgatgcacaggggcccaccgtgcagagctgcatagggcagatatgaatatcggactttgtcctataagcaatggacagtttcagaaaagtttttgcaaatgagtgcaatgaatagataagtttattaaaattt

SEQ ID NO: 118810 - DNA, 1088 bp, Homo sapiens
gaacacttttgttttcttaataaagaaatggaagtttgagtaacttacacaaggttactcatcaataactgattcaggatttgaacccaggctacttaattcagaagagcccatacctaccactcaaatggattgccatccaacattcattccaaactctaagcctttacttttgaaatccatttgtcctgacatttttataaagaagtctttaagactagaaggaaaaaatactctgaacataaatttatttactagcaggaagataggaattagatgaaatactttcattttgcttcaccctcttagaggtctacaacaggaaattggagagatattgccgatgttttagtagattccatagaaagttcatatacatccaattttcaatttagaaagaggtaaggaattggattgttttcatgacatttttctaagggaagataagagaggaaataaaggggtgaaccaaaagacatcagatataaagtgcctgtttactccctctgagtgactcacattattctactttaaaaacatgttaggaattcatctaatcttctttagggcacacccacttccctctaagcttagtatagttcacagataaattggtctttctcagctcaccacttctgctatgtagttaccttgccagtggtgatttgatgtcccgtggctggccatgctcttcctcttctgtctcaatttcttccttatatgtataaataaatacctgactcacaagtgttttgcctaaccctgtgctttccattgccttggcaatatttcttgagttgaaaaagccatctaaggtgctaagttaaaagaaaaaaaaaaggccttataaggtactcaggatctacacgaggttgttaattcatgttttgctttaattggttactctgtttcctatttcctcggtttccaatacttgtttgtagaaaacatcagttttgtgtgtatttgctcttggtcctaaagttaaggacactatacgcagagttaattgaccttcatttgtgtgccagcattctggggtgacataatgcctgcaagtgtcatattcttaatatgtgagggggttc

SEQ ID NO: 118811 - DNA, 287 bp, Homo sapiens
cttccccccagcctggcagcagcgtcccagcgcctccacattgcccctctcacctcccagctctccacgccacttggctctgcagcgacccctcctagacgctccctggcccctcggcacccagaatgccacattcttgtgtttttttcctccttctttcccaatccctctcaaccatgtatttatttatatatgtatgtatttttttatttattatttatttattgaaacccctactttgattgacaaaggaatcaaggtagatctgaccagtattcccctctctt

SEQ ID NO: 118812 - DNA, 434 bp, Homo sapiens
tttttaaaatccctaataaaaacttgctgattttgcggctcggggtcgccatcatggtcctaccaatatgtgatgacacccctggaggcccagctgtaaaatttctctgtttgtactctttctctttatttctcagaccagctgacacttagggaaaatagaatgtatgttgaaatattgggggctggttcccccgataaaagtgaaaaggtgagtgaatactatgtatctgaacagttaaattttggctctgctcaggtcatatcacattagttttataaaagattttagctaaatactggttttccagcacatgtaaatgaatatgtagctgtctactccttttcctctactcatccacactcctttcaactttaatttctttattcctgcctgtatctttccagcaagccctaattcagaagtgggaagcc

SEQ ID NO: 118813 - DNA, 343 bp, Homo sapiens
aggttcctgccacatttgtgtccagcacaacagtgagtaaagaactgggaacatgttctccctcccaattcctcccgttttccttcccaaggcaggcaggacacattgtctcacggcgagctggccttaccctgaactcagagcatcagcaccccaaagctgcagtgaggaggaagagactgcccacccgcgaaaaggcccctcagtcttcagccaacaccacaggcacagcttcagccctctgactcttgctgaccacgggttaccttggatcttctctcctttgagggcaactgagccacatttggctcctttcagaacatagaatcttggctttgtcttt

SEQ ID NO: 118814 - DNA, 416 bp, Homo sapiens
ccccgtactagtcccgacagtgctgagtgcgagctgagacgggcgcagagcgaatggtgggaggctttgccctggggcggacatgctgtgtggggtctgctgtcgggctagtcgggggataacacgttcgcgagctgtcgggctagtcgggggctgtcgagctagtcggggctgtcgggctagtcgggggctgtcgggctagtcggggctgtcgggctagtcgggggctgtcgggctagtcggggactgtcgggctagtcggggccccgactagcccgacagcgcgacccgcccggggcgcactggggacatgtccgccccgccccttgacagtttagataggattttcaagtacatccacgattgtatttgctcttcttagcccctgtgcggaaggaggggggcattgcagttac

SEQ ID NO: 118815 - DNA, 481 bp, Homo sapiens
catgatgcatttcagtagctttcaatcaccaatggaataaagccccacccttcgcctgtcattcctacttgccacggctttcgtaagccatgtggagggaatgggacttttcatatattaagggggtcttatgtgccaggctttgcagggagcactgctccaaagaagtagccaccctgactaaaagcatggatgctggagccagactgcctgggttcaaatcccagctctgccacttaccaaccatgtgactttgaacaaattatataatttctctgcatttctcattttcgaaacagggatgagtactgctataaacatttgtgtccacccccacctccaaattcatactgaaacctaacccctagtatgatggtatttggaggtgagttctttggaaggtaattatgtcataagcgtagagccctcacaaacagtattgcccttataaggaagccccagccaggtgtggtggctcacg

SEQ ID NO: 118816 - DNA, 414 bp, Homo sapiens
cttatgggaaacaccgtataaagttggatctaaatccaactttagattggttccttttttttaaagattgaattctctagaagtttatttttttttttctattagtcactctctggtctctgaaaattatttttctgttttgtccagagtttatagttaggcagataaatctgatataatattctgccattacccaaattggaacttcagtaattgagaaatgagcaaataaagtctaaaaataaaagaacaaattatctttagtggaccaggttgaaagagagattgtatacagttggaggagggtaggatatgaaagacttcatggaataggttggtattcaaagtgaagcatgagggattatttggatggacttccatgtgcagagagtaggagagcatttcaagaggaag

SEQ ID NO: 118817 - DNA, 219 bp, Homo sapiens
aactaaattcattgtacctccactaccttctaccagcacacacactaagtcttcctctgtttcatgattatcctctgggcccctggtttatacatagtctaattcactttaatttccccctttcctcacaccttatatccattcagtagcacagtcctacttgttctaatgtcattttctctcgtatctattccttcctttcaatcagcacggaagtat

SEQ ID NO: 118818 - DNA, 237 bp, Homo sapiens
cctctctctcccgggttcaagcgattctcctgcctcagcctcctgagtagctgggactacaggcgtgcgccaccacccccagctaatttttgtatttttagtagagacgggatatcaccatgttggccaggatggtcttgatctcctggccttgtgatgtgcctggccggaattctttacctaaacaatcatatctgtgaacaaagacagttttttttggagactgagtttcgcctt

SEQ ID NO: 118819 - DNA, 251 bp, Homo sapiens
ctactcaacagggcttcccgcacacactccttccaggccagtgacaatgtggaggacaggaacaaagcctgccttctccacttcccttcctagaaagccatcatcacccaggaatcaaacgtatcattcagttgctgcgtctcatcaaatctctctctgggatctttaccctgtggcgcccccatttcaaatgctacgtcacccaggtcgagagacaactcactgtagctgctttgatctgctgctgcagg

SEQ ID NO: 118820 - DNA, 815 bp, Homo sapiens
agaaattaataacagaaagaaatccacaaaattcctaatacttagaaattaaacatcacacttctaaataatcactgtatcaatgaagacattacacagggaaattataaagtattttgaacaggctaaaaatgaaaacatgacatattaaaacttatgaggcagctaagatagtttcttcaaggaaaatattagaaaagaaagtactcaaaccaattatctaggttcccatgttaagaaactagaaaaataagagctaattagacacaagtaagcaaaacaaaggtaataaagttaagagctgaaatcaataaggtagaaaactggaaaacaatacagaaaatccatgaaaccaaaacctgggtctttcaaaatgattaataaaattaataagcctccagccagtgatcaggtggaaaaaaagagagaagataaaaatgatcaatattatatgcagaagagtagacatcactgcaaatcctgtggtcattgaacggctcataatattataaagaattttataaattctgcaataaattctgtaatttgagtgaaatggagaaattctttgaaagacacaatctaccaaatctgaagaagaaatagataacctgaatagtcctgtatctattttaaaaagtgaatttgcatttaaaatcctttgaacaaaggaatctccagtcccaagtagtgaattctaccaaacattttaggaataaacaatatcaactctatgctaattagaaaatagaagaaaaattcagaggaaaaaaagaaaagaaatgctttccagctcatgttaacaggctagaaac

SEQ ID NO: 118821 - DNA, 803 bp, Homo sapiens
cccatgatgttctgcccaacagccaacaacagtctgccctcccatgatgctcttccctagaaccaacaacaatctcccctcccatgatgaaggaagcatcccgtgatgctctgctctacaatctgataacagccctctttcctgtgatgctatgctgtacagcctgacaacagtcttccttcccatgatgacctgccctacagcctgacaagagcctcccttctcatgatgccctgcccaacagctgacaacagttcgccctcccatgatgctgtttcccagaaccaacaacagtctgccctcccatgatgctctgccccacagccaacaacagtcttccttcccatgatgctctgccctacaaccgacagccacacctcccttggcaccaggatttgcctccagtctgacagccttccttcccagcatgccttgccctggcctgggcagtgttgtccacacccacatgagggtggtgtcggtgctgcccacgtcccagctgtgaggtcagccagccacagaagcagcagctgtggggacaagcttctgtgcgcagctctgtcgttcagcagctgtgtccttcagaaagccctggagctctctgggcctcaggtggcctttcggagtgtagacaacgccaacagctctgaccacagacagccatggcaggcaggtctgtcagtgactaaggaatatgcccagcagagacacggcaagaccacaaaccatcttgggaccctgagaaagaagacacggtgggcggattcaacagtcttatggggtcacaatgcacagggcttggt

SEQ ID NO: 118822 - DNA, 426 bp, Homo sapiens
gaaatcttgcactgaaaacaatcctataattagaacgttatcttgaagcctctgaaattgttttcaactgagttaggaaaatcaaccatcgcagtattcagttccaattatccacctcctcaactttttttggagacagattttcactctgttgcccaggctggagtgcagtggcactatcatagctcactatggtttccaacccccgcgctcaagtgatccttctgcctcagcctgctgaatagatgtgactacaagcatgtgccaccatgcctggctaattttttgttttattttttgtaaagaggggtctaattatattgcccaggctggtctcaaacttctagcctcaagcgatcctcccaccttggactctcaaagggttgtgattataggcatgagccaccatgcctgacccactttatt

SEQ ID NO: 118823 - DNA, 256 bp, Homo sapiens
cctgcccccatcagtttacaaaggtccagaaatctttcacaatttaatgagactgaggaaaacatgcacctgctcagagttctgccaggcattagatgaccaaaaagctcaagtgggtaggttaagcttttactttttattttgaatttttgttccactggaccaaaatacctaagtagcttaataatctacatctacaaggaatattggtttgcctgccaaaggcactaagtgtctgctaccctgctttcttcac

SEQ ID NO: 118824 - DNA, 140 bp, Homo sapiens
tttttgtagacttccacacatagcctcacagtggtggttgctgggtcgcgttacctagttggctttatggcaccagctgtaaattacagccctccctgttccatcctaagagacctgtcgggtagacagcaggtgaaggc

SEQ ID NO: 118825 - DNA, 139 bp, Homo sapiens
ctggaatgaggaccaacatcaggttgaggttcaggataggggaagcccgggatgagtgaaaatatgttaggcacatttgttaattttcaaaaagctaaaagtgggcagggcatggtggctcacatctgtaattccagca

SEQ ID NO: 118826 - DNA, 172 bp, Homo sapiens
ttcagctaaggcagtttaattccactaaaaatctctgacactttgtatgtgtctccacttagagcaaaatcatcttgggcataatcaaaagtagatcagttttgtggaaagaatgagaaagtgtttactcagggagaagggaaagacttggagcagtattggcagctacgta

SEQ ID NO: 118827 - DNA, 380 bp, Homo sapiens
aaagtactattagcctctcataaaatactgatagattttacagttgtggtcagtgtttacttttgaccatcagttaccagtaacttctttcatggttcaataaaatcatagctttagtttatggcaccttttcaaaacttcctttggcttttctttgtgcttaatttaggtagttttgcttttagctcacttcctaattctcttttttacacaattcattttggtcctaatttctttactttactatataaacaaggtgctgaaatgtgtgtgtatgtatttaacttcctctacccatttgctcttggttatttcttcagttatgatattctggatttgccagtcattgtccgtcctcctgcctctattactggcataat

SEQ ID NO: 118828 - DNA, 446 bp, Homo sapiens
ggtcagaaagggcattgttaaaggaaggagatggtagattttgggttctgggttctaggttctaggctaataatttactactttggtatgttgccttgaggctgacatttgctgctctgctaagactaaagctggccctttccaatcaaaagtgttaaaagctggctgggagccatggctcatgcctgtagtccagcactttgggaggctgaggtgggtggatggatcccttaaacccaggaattcaagaccagtgtagacaacatggcgaaaccccatctctatccaaaaatatacagaaattagccaggtgtggtggtgtgtgcctgtggtctcagctactcaggaggctgagatgggaggattgcttgagcctgggagttagaggatgcagtgagctgaggtcgcaccactgcactccagcctggacgacagagtgaggccct

SEQ ID NO: 118829 - DNA, 297 bp, Homo sapiens
gatgagttaatgggtgcagcacaccagcatggcacatgtatacatatagtaactaacctgcacattgtgcacatgtaccctaaaacttaaagtataataataaaaaagaaaagcaacatttgtacccttgtagttttcttaaaccacaaatccaaattccaatcctagaatgtaactccaggatatgaaagatgggaaagaataatattacagtgtaaaatttgaagaaaactaagagaggaattttcatacttcactaaattctcacatctagtagttctgggtcagtgcccttat

SEQ ID NO: 118830 - DNA, 457 bp, Homo sapiens
ccagattggagtgcaatgatgtgatctcggttcactgcaacctccgcctcctgggttcaagtgattcttctctctcaggctcctgagtagctgaaattacaggcatgcaccaccacaccctgctagtttttgtatttttagaagagacggggtttcaccatgttggtcaggctggtctcaaactcctaaccttaggtgatccacctgccttggcctcccaaagtgctgggattacaggtgtgagccaccgtgcccggcccaaatttcttcttgaaataacattttaaatgaataaaataaaagatgtatactcaacaaattaggaacagaaagaaacttcctcaacctaaatgaagagcatctattaacaactcacagctaatactttatgtgtgtgtgtgtgtgtgtgtgtgtgtgtgtattttatatacctatataacatctctccctatggctt

SEQ ID NO: 118831 - DNA, 771 bp, Homo sapiens
tttgtaggtgatttgaatgtaaaatcctgaaaaagattgctaattttttgagtgttgagagttttacaattagaggtattacagttagatatttgaggcatttggagtgaatttttgtgtttattctaacctaaaattcttaattcttttcatgggaaaatccagttttcataccaccctctttggaagacactacaatttagccatgttatattgatggttctcatgctaaaaatcagcttgtcatcaatatgtgggtttatatctaagctctatataggtatttaagccaaaactttctatgttttaataaatgttgaggcctggaagtgaaatgcctaaagctttcttcttgccttgttacagatattgtaccaaaatattctaaccttttactattgagtgtaataatagctgtggcctttcttaacggcttttattatgttcaagttgttttcttgtcttcctactttgttcatagttttaataatgaaactgattttttttcaaagtctttttctgtgtctgatgaaatgttactgagatattttttctttagttttttaatgtgtaccaaactgattgatttgagaatgttgaatcaagtatgcatctcaggaagaaatttgagttggtcatggtgtatgtcttctaaaacactttggagcttagtttactattgttggggattacattcatgtctactaatgatattggtctgtagtttcctttattgtggtgcctttgtctattactggtaatactatcatg

SEQ ID NO: 118832 - DNA, 322 bp, Homo sapiens
aaaaaatgactaatacagggccattattaccaaaccccaaaattttcaggcctcacttttgacaagtacagaccataaatatgtgatcatttgcctctctgaaacactctatacaccctattttaagaaagaccattgcacttcctatgcaaaatatatcttagggagcagcaccagaaggggcattatactttacgtccaatatcccgtaggctccattttatctgcccccgtaggcctccactgaacatactgctgtctctacctcaaacccaacatctaaacttgaactaagcaaccgcttcataaaactagctccctt

SEQ ID NO: 118833 - DNA, 349 bp, Homo sapiens
gggcatggtggcgggcacctgtaatcccagctactcgggagtctgaggcacaagaatcacttgaacctgagaggcgtaggttgcagtgagcgccaagatcacatgattgcactccagcctgggcgacaagagcgaaactccatctcaaaaaagaaaaaaagaaactttgtaagagaaaatctgaaatattctagaaatttttttttgtaacattggagtatactaaagcacactgaagtcgtaaaaaatcccatctactttatgctgaattccatcaaactcaattagtgattattcacagcctaattatcctcttaaggtttagtttactcctgtctcttttaaactt

SEQ ID NO: 118834 - DNA, 599 bp, Homo sapiens
tgaagacagggctgcctgctagaggggctggaggtgagcagggcatggcactgggaggtgggtccatgggctccaggagagaagggtcgctgggaccattttctaccgacggggtcacgaccccagccccagccctttatggagatctgaagccacgggaaggaagggtaggcaatgggatgagaaacagcaccttcctgatcctaagtcaccacccgctccatctgagctacatcaggaaagcaagtaattggccgggcatggtagctcaggcctgtaatcccagtactttttaaggctgaggcgggtggatcacctgaggtcaggagtttgagactagcctggccaacatggcgaaaccccgtctctactaaaaatacaaaaaattagcagggtgtggtggtgcacgcctgtaatcccagctactcgggaggctgagtcaggagaatcgcttgaacctgggaggcggaggttgcagtgagcccagatcgtgccactgcactccagcctgggcgacagtgagactccatctcaaaaacaacaccaaacaaacaaacaaaaataatactgcgatttcctagcattgcccagtgacttac

SEQ ID NO: 118835 - DNA, 320 bp, Homo sapiens
aaaaaaaccagtacaacaataaaaaaaaaacaaaatttaaaaacacaatataacaactatttacatagcatttacattgtactaggtattttaagtaatctagagatgattcaaagtatacaggaggatgtaggtaggttatatgcagttactatgccaatttatatagaagatgggaacatatgcagattttggtatcaagggaggtcctggaaccagtctcccacagttgccaagagacagctgtatgctgagaactttactgcactaccacagttcagactgttcaacttaggcctaggcttctgcccttcatggtg

SEQ ID NO: 118836 - DNA, 357 bp, Homo sapiens
acatggagagggggcacaaagactgagcttctcttcagtgcgacctccatgcctcacccgtgccttttcttccctccagccacaggcctctgggagggagaattcgcattgtatctgcctttctcaaacctacttatgcctcagctaccacgatctgtctccctctaacacccgacctcgtctcagtgccagagcccctctcaccccacaatgccccacttctggcttatgtgatataaccgggtggtgactgtctccttaccttcctcagtctgcttctagctcctccggcacctgccctatcagtcttcccgggggtcagcctatggtgagaggggaagggctcttctgtacctt

SEQ ID NO: 118837 - DNA, 277 bp, Homo sapiens
aggaatatgaaataaccttatggctgaatcagggtgaaggggaagcttgtaagcatggaagacgctctactcaaactaaaaagttcaagttctgatccagcagatgaagagggaggcctgagaggctgctgttctaactcgctcccaggtgacttccatgctgctgatccgcagaccacattttgagtgcccagattgtagtagatgaggttgagtggacaggctggggccagattccatggagcctcgtgggccgtgttaaggatttttatttttt

SEQ ID NO: 118838 - DNA, 397 bp, Homo sapiens
gcaatctcggctcactgcaggctccgcctcctgggttcacgccattctcctgcctcagcctcccgagtagctgggactacaggcacctgccaccatgcctggctatttttttttgtatttttagtagagatggggtttcaccgtgttaaccaggatggtctcgatctcctgacctcgtgatccgcccgcctcggcctcccaaagtgctgggattacaggcgtgagccaccgtgccccgcccatctcttcatgttaagtgccttaatttaatcaaatctgtaaagtcccttttgccacataagagaacatgtgcacagattgtggggattcagggccattattctgcccctacgtgtggtcattggctgcctggcagatgacctgcagcctggtttgg

SEQ ID NO: 118839 - DNA, 317 bp, Homo sapiens
ggaacttgtccgggtgaggccagtaaccacccaaagaaggcctttgtctagaagcctccttttaatatgatagaaaaaaaggatttgaaacaaagatttaatgaaagaaagaaaagaaggaaaaaagaagtagtatctcagctaagacaaaacatcactcagatgaaacaattactttgatctcaatacatttgggttttccttctgttgttaatcatagctcttgaacattatccatttcattctaatgaattatttaacattccattccttcaacatacatgcattgagagatagtataaataaaatacatgtta

SEQ ID NO: 118840 - DNA, 347 bp, Homo sapiens
ctcagcctcccgagtagctgggactgcaggcacatgccatcacacctggctcattttttatttttagtagagaccaggtttcaccatattggccaggctggtctcaaactacagacctcagatgatctgcccaactcggcctcccaaagtgctgggattgcaggcgtgagccacagctcccagctgttactgattaattttgaattgagcttcagccaatcacagacacccagctagctgattgattatataacaagagacctcccattgaactgtacggaaatacatagctatagttaatcaagtaattttttttactttgtttccatgttcagactataaaagcc

SEQ ID NO: 118841 - DNA, 315 bp, Homo sapiens
ggaaagaggcgacgaagctgctggagaaaccccagctccgccaccgatagccctcaagtcctcctctctccaggaggggcccacactcaccgagcagctggtctgcccacagtcgcctggagaagcagctgagaacctctgcagggccctgatccccaagacctagccacgcacattcagaggcctgctccctccgtcacccagagcaggggggttaatgttttggagacacgaagccccctgagaacacgaggaaagcagaatccccgagatacacagactttgcaaagctgcacacagcacaggagactcctg

SEQ ID NO: 118842 - DNA, 411 bp, Homo sapiens
ctgtggtcgatctagaggtccccctcggttctaccttgtcagcaaatcaaaaccacgaatgaaataccatctcacaccagtcagaatggtgattattaaaaactcaaggtacaacagctgctggcttttgtataggttagacaggaatgggggttttggtagattattgtggggcttagaagcttggtgggatgtgctgatctctcgagtcttagtaggaaagctgagatgtcggttgagacatggatagagaatctgaaaataatccctcaatctgaaaataataatccctcaaatatcactttttagtttataacaaaagggctttcacatgtgttggctcatctgtcctccatagcaactgtgtcaggtagacattttctagataagaaaccttaggccgaattgtgt

SEQ ID NO: 118843 - DNA, 1008 bp, Homo sapiens
gaaaaaaaaaaatcttaaaacacacatgaaagtacaaaagaccctgaatagtcaaagcattcctgagcaaaaagagtaatgctggaggtatccatactacctgacttcaaaagatactataaaactatagaaaccccaatagcatggtactggcataataacagacacacagaccaatggaacggtaaagagaacccagaaataaattcacatatttacagtcaactgattttcaacaaagtgccaagaacattcagtaaggaaaggacagtctcttcaataaatagtgctgggaaaactggatatccatatgcagaagaatgaaattaaacccctatctcttaccatatacaaaaagcaaatcaaaatggagtaaagacttaaatgtacgacttgaaactatgaaactactaaaagaaaacattggggaaacacttcaggacgctgttttggtcaaagattttttgtgtaggacttcaaaagcaccagaaacaaaaacaaaaatagacaaatggaattacatcaagctaaaaagcttctgcacagcaaaggaaacaatcaattgaatgaggagacaacacacagaatgggagaaaataatgtacaatctctccatctgacaagggatgaatatccagaatacacaaggaattcaattcaatagcaaaacaaaacaaataatctcaggtcttacgggacaatacagaaaaaaaaaaacaacaaaaatatcaatatcctaaatacaaaaaactcttaaataagagcaaaaacagaaaaataaaagacatcaagacatatttcacagaacaggaatgactaataaacatgaaaatgtttttaacttattaatcagaaaaatgcatgttttcttttatagtgaagtgagtgctgtcacattcataaggaaaatgcaatttaaagccacaataaaataccattttacacctaacagattggaaagaattgggtcttatgatagcaagtaaataagaaaccatactgtaaagc

SEQ ID NO: 118844 - DNA, 1232 bp, Homo sapiens
gaaaaaaaaaaatcttaaaacacacatgaaagtacaaaagaccctgaatagtcaaagcattcctgagcaaaaagagtaatgctggaggtatccatactacctgacttcaaaagatactataaaactatagaaaccccaatagcatggtactggcataataacagacacacagaccaatggaacggtaaagagaacccagaaataaattcacatatttacagtcaactgattttcaacaaagtgccaagaacattcagtaaggaaaggacagtctcttcaataaatagtgctgggaaaactggatatccatatgcagaagaatgaaattaaacccctatctcttaccatatacaaaaagcaaatcaaaatggagtaaagacttaaatgtacgacttgaaactatgaaactactaaaagaaaacattggggaaacacttcaggacgctgttttggtcaaagattttttgtgtaggacttcaaaagcaccagaaacaaaaacaaaaatagacaaatggaattacatcaagctaaaaagcttctgcacagcaaaggaaacaatcaattgaatgaggagacaacacacagaatgggagaaaataatgtacaatctctccatctgacaagggatgaatatccagaatacacaaggaattcaattcaatagcaaaacaaaacaaataatctcaggtcttacgggacaatacagaaaaaaaaaacacaaataatccactttaaaaatgggcaaatgatctgaatagacatttctcgaaagacacacaaattgccagcaggtatatgaaaaaatgctctacatcaccaatcatcagagaaatataaatcaaaaccacaacaatatcttaccccagtcagaatggctattaagattaaaaataacagatattggcaaggatgcagagaaaaagaaactcttatatattgttggtgggaatgtaaactagtacagtcactatggagatttctcaaaaactaaaaccagaattaccattcgatcaagcaatctcattactaggtatctacccaaaggaaaagaaatcaatacatcagagggatacctgcacttgcatgtttattgcagcactattcacgatagcaaagatatgaaatcaacctaagtgttcaccagtgcatgaatggataaagaaaacgtggcatatgcacacaatggaacgctattcagccataagaaaaagaatgaaatcatgccatttgca

SEQ ID NO: 118845 - DNA, 556 bp, Homo sapiens
cactctacaagcgtaatggaggtggaagggttgacgggaagaggcctgatcatttgaaaggtatcttgatagatggatttacattcttccctggaacagttttacaagagctggtaagatatgccagtgagaatgaggcatattcaatctcattaacaactgaactagaaaaacctaatcaagcctcaggtaggtgacttctggagggtatcacataatctttgataccaggttaagatttggtttaaacatctcattttctgaagaattttagatgccaaaaattatcaaaataagatccctcccttcatcaggtaattttatcatgactcacctagtttatatgaatcctgtgttaggaactaaggacagagagacaaaagacatcagcactggcctcaagatgagaaacactacagaaaagcagacaacaatgcagtgtgataatgacgtatacccaggcagctctgggaccacagaagacatccaacaggataccaagaacagggaaaggctctgcacattgcagaggctcagtagctattaatgtgatctc

SEQ ID NO: 118846 - DNA, 290 bp, Homo sapiens
agaaacggggtttcaccatgttggccagactggtctcaaactcctgaccttaagtgatccacccgcctcagcctcccaaagtgctgggattacaggcgtgagccactgcgcccggcctgtaattaccactttaaagaccctacctccaaatacagtcacattctaaggtactagggggttaggacttcaacatacgaattttgggaagtacacagtccaacccatagcaacctgactgccagcatactaattcaaactaaagtgagattttgttttgttctgtcaaagta

SEQ ID NO: 118847 - DNA, 413 bp, Homo sapiens
tgctgggattacaggcatgagctactgtgcccggccttcttgctgctttctctatgcatactgaaaaagctccctgtcagcaaccccaagcctatgacctgatggctgtcttttagcgttgtaaattaaccattgctgacaaggaaatagggagaccacaattggagaggtctacatcataggctcactcttgggatgaggaagtaaactgcccgtccataaccttatgggatggggaagttcagaggtcctaggcaggcagaaacagcacatgactactgcaggggtgtgtgtatgcacacatgtgtgcttacatgtgtgctcttatctcacttctttggggtccttctagagccttccaactggaatgaatccagtgggttgtgtttgtccatcaaactttgactcccact

SEQ ID NO: 118848 - DNA, 339 bp, Homo sapiens
ttcttttcccaggcatgccccttggtaaaagggataaatgtgggcacctcctgtaacgtctccaagcttccctttcctctctaattgagcaaggatgttataaggctctaaccacaaccttcttgggaagattcagtgagataaagcatgcaaagttcttagtcccatgccaggcatgtgattagctcgttggatttagacccgagtttttttctcttggctgtgattctctttgtgccacccacacagccccctggtgctttggggaccttgaagagcccagagggtagtgttagacccagataacccatcccgatgctgatacccggatgcctgggt

SEQ ID NO: 118849 - DNA, 121 bp, Homo sapiens
tcccggtatcccacccatataggcgtgaggtagaggtctaacttgattcttttgaatgtgcatacccagttttttcagcataatttgttgaaaagactatttctatcccccttgaattgtc

SEQ ID NO: 118850 - DNA, 190 bp, Homo sapiens
ttgcctcccactgggtccctcccacaacatgtaggaattcaatgtgagatttgggtggggacacagccaaaccatatcagcacctgtattcccatttacttgggacactgaggcaagaggattaatttagcttaaagtttgaggctgtaggcagggcatggtggctcatgcttataatcccagcactttg

SEQ ID NO: 118851 - DNA, 311 bp, Homo sapiens
tgctggaattacaggtgtgagccaccgcgcctggcctactttttcctttcttatttgcgtacgttttatctcctttctcttggactagaatctccagtacggtgcgttggcccaacgttgggccaacgcaccgtgttgggccaacgcaccgtacaccaggggtggtttggcttgtgcctgggcctggaggcctgagagagcaggacctgttcagggtaaaccggctttctcagcatgcgctgcattcacaggggaggagcaggaggtgacagggagggcctcgtgtgccgggccacggtgcgttggcccaa

SEQ ID NO: 118852 - DNA, 889 bp, Homo sapiens
gtgcacccaggtgaaataaacagccatgttgctcacacaaagcctgtttggtggtctcttcacagggacacggatgaaatttggtgccgtgactcggatcgggggacctcccttaggagatcaatcccctgtactccttttctttgccctgtgagaaagatccacctatgacctcagtcaggtcctcagaccgaccagcccaaggaacatctcaccaattttaaatcaggagtttgctacaagtgccagaaatctggccactgagccaaggaatgcccacagcccaggattcctcctaagccgcgtcccatctgtgtgggaccccactgaaaatcggactgttcaactcacctgacagccactcccagagctcctggaactctggcccaaggctctctgactgactccttcccagatcttctcagcttaacagctgaagactgacactgcccgatcgcctcggaagccctgtagaccatcacggacgccgagctttagagaccttgaagatcggtggtcaaggagaaactgaagagcaagaaggaaagtgagagccagcgaataccagcagagccagatctgaagctgggagaaggggagaaagtctgtgaagaggagatcggtgactgggctccttatgtgcctgaaagagttgagtttcctggtaactccaaatcaacagtattttcaagcaagaaatgtgcaattgaaatcaagtgctggttaagtgcagctaggaattccaaggaagacacttggcgtgaacagagtatggagcaggaagaaagggatctattggaacaagagaacatttgacgtggattgggtcattataaatacactctaaagggggtcaatacagggcttgattcaggtgatatggtaagat

SEQ ID NO: 118853 - DNA, 161 bp, Homo sapiens
ataggtactgctgctttcattctgactgtaaaactgtagccggccccttctcctcatatgactggatctgttcttatgggaagatcacattgacaaaagagagcacaatgtgcaagaatgggacggttctgataatggcaaaatctgtttttcattgtgat

SEQ ID NO: 118854 - DNA, 430 bp, Homo sapiens
ctcctccctcgtcccaccctctcccacacgctttcatgaattcctactcatccttcagccccaggcttggctgtcacctcctctgacagctgcacccttcctgatgcaaccaggttgggtgaccctcctctgtgtttccaaagtaccctgtgctccctccagcacagcttctctatcctgcctattcacctgcctgttacctgctcctaggcgtgagctccataaggacaaaggaacttggtctgccctgtggggctgtggccttagcacctagcacactgtttgggtccatcagtatttgttaagtgaaatatccgtggaaagggccagtctccaagaagagacttcactaataaagagtatgacacagatttctaattcctggcatctccacatgttcacacacactgatcctgacatctatctactc

SEQ ID NO: 118855 - DNA, 556 bp, Homo sapiens
tgcatcacgcgtgggagctcccatatgtcgactgcaggcggcggaatcactagtgattagagactgcgagaaggagaatctcttgaacccaggagacagaggttgccataagccaagatcatgccactgcactccagcctgggtgactgagcaagactctgtctcaaaagaaagaaaaaaaaaaagaagaagaaagaaaagactacattccttcccacagatttttcacatggaaaattaacagtgatgttgttgggagcagtattggaagaatggttgagaggaccaattgcattgagttaaggattgaataggacatgagtaggtgttgacagtgtttagaagaatctttgtagagagggagggatagagagagagtgaaggtcacatgaggttggaggaaggcgtctgccctcgccaccccctcgaaagtgcctttgttcttttccttctggcttaagatgttcttcctgtcctcctgcggactacttgatgtcctagtcccaggctgcgacatttaaattacttgtagcagccacccatagtgttcccccac

SEQ ID NO: 118856 - DNA, 304 bp, Homo sapiens
tggtccttaactttgcctgcatatcagatttaactggtaagctttacaaaatactgatgcctccccctgaacctcataagatttggatttaattggtccaagtcgtgccctgtgcattggacagttctaaaaactttccagatgtttccaatatgcatcaagtttgaggacctctgatttaagctgtgtgaagtgttttcaactgtcccgattcagagaacagagtcatgtaatggctcagaggattcctccacccacttacacacacacacacacacacacacacacacacacacacacaaaa

SEQ ID NO: 118857 - DNA, 195 bp, Homo sapiens
acctccctgaatgggatgctcttcaagggccaacaaaatactcttggcaaactgacccaaagagaaatcagggtgattttagctttcaacagcagtcagaaacccagcccaaattatccgtaagtttaaatttaactatcagccgccattggcaggactctgaaaggtcctggctggagttggttcctcagttta

SEQ ID NO: 118858 - DNA, 500 bp, Homo sapiens
gatcggggactcagcaatgtcctgcggggatggggagaggagagtggaagaggagtggggataaggtcacctgagagcacgtcatttggcacctgagccctgcggctgcccctgcctatctccctgtcttggaggtctggtatgttccttctctgtgccccacaccagtggctgggccaggctactgtcagcactcgcaccatctcacttcaccacttctgagcctggcagatgacactccttggtcagagtggcctgcctggcctgaagccccataggggctggctcaccagtgggagccagtcacacacctttccggaaagtcacacacctttccagaaatgcacgacaggaattctggctcattttcggatgggttaacaggcttggagagggcacgtgacgccccaggtctcttggttgagtgccagccctgggattagcatccagaactgtcagcctactatgccgagtgcacctcaaggctgcaggggcaggat

SEQ ID NO: 118859 - DNA, 177 bp, Homo sapiens
gaattctttctctgcctcaaaaccatcctcacgcttatgaaaggtggggttgtttttcctcttgctattaatgaactacttatcagtccatctttgctggtggtcaagagactgttagtaagtattggttggcttttcagtgttcttcctgtacctggcacttttttgtttgttttt

SEQ ID NO: 118860 - DNA, 238 bp, Homo sapiens
cccgattgctagaggtcccatcacatggacttcaccccagatgtgatggtccatgcaggagaggacaggtgtaagggcagaaagagtgttccctcccgctctgaagattcaagtctgctgaaataaactgacaataaatagattaacaaaataaaaggctacaaatatattaatgtgcatgaacacaggagccatgcaaaatataagactttttatacagggtcagatggttgaggct

SEQ ID NO: 118861 - DNA, 392 bp, Homo sapiens
catgttgaaaccctgatgcttacaagtagagaaaagaacttttaccctaactaaccaagtcagagacctaaaaatgtaccagtaataaagctacttaacctttcccctccccaccatgctaaaacaatgccttaggaacaaatgactggacaccgatatacagaaccaggaactccaaatatctgtatttttactgaaataagtacctctggaaagactttcaattaacagagaaattagcaaagactaatttctcctagtatgataccatatgatcgattctgataacaatattcaaaagatccttcctatttatacagcaatctttagtctaataaaaaccactttttagtcctgctgatggtaaatttctggaaaacttataaagaata

SEQ ID NO: 118862 - DNA, 685 bp, Homo sapiens
cagaaagcgtaaacataaaactgtgatactctatattaatcaacctgctgataagatctgacacagtaactcaaactacagctccccagagaggagatttagattctattcctggttctgtgtctttatctactacgtttttgtgaaccttaattttctcacctgtaaacagagggaaatgaaatgaaatgatctcttccagctctaatgagttgtgactctagatctggatgagaaacactgcaaatgaccagatttgttgcagagaagtcatacaactgcatcatgtaaatactgtagcctcttgtagaacctaccctccctcttgggggtttctttcacctctctcctcctgggagccccattacctggctgtctagtcttcctctttcttggcttgctccttcattttcctggggtctatcttttgttagctttgcaagaaaccatgtgtaaaagctgtcacttcatgtttgaaaatatctttacaggacaatttgggtgtgtatagtttaggttattaatccttttctcccttgttttttttttcttgagacggagtctggctctgttgccacggtggagtgcagtggcacgatctcggctcactgcaacctccgactccctggttcaagcaattctccagcctcagcctcccgagtagctgggattacaggcacatgcc

SEQ ID NO: 118863 - DNA, 547 bp, Homo sapiens
agtacctaccaacgtttcagctttcaaaacgaacttaccttcccaagcactgaattcaagtccagcgcattggtggttaaagtcgtgggctcatccgcttggattatgttggttacatccaagtctgcatctggtgtttgaatcatcttggagaggccatcaactgcagctttcaactcatacagacgttgtaaaatatcatcttggcgggactcaagagcttgcagagacaggttagactcttcctaaacaaaccaacagccaaatgttcatttcctctcccatcagaccagagttggttaaatttgatcacttgtcttactttgccatgcactcaccaaacctcccaccctttaaaagaagacattatgggctgtgcgcggtggctcacgcctgtaatcccagcactttgggaggccgaggggggcagatcacgaggtcaggagatcgagaccatcttggctaacacggtgaaaccccatctctactaaaaatacaaaaaattagccgggcgtggtggcgggcgcctgtagtcccagctactcgg

SEQ ID NO: 118864 - DNA, 509 bp, Homo sapiens
acactgtaaatgcataacagaaatataactagaaaaattccaaatgttggaaaattaagcaacatgtttctacaacctgtggtttaaagaagaaattacagtggaaattacaaaaaatgatatagaaaatataaagcaaaggttaagaaagatggtgtacaacatgagaatgtttaatacgtgtctaatctgagtccttaagtagaaaacaagaatgaagaatagatagcattcaaaaaataattgctgaaaattttccaaaactttttgaaatatacaaatcctatatccatcataatagagctaaagagtagcaaaggaaaggacaaaatcttttttttttattattatactttaagttctagggtacatgtgcacaacgtgcaggtttgttacatatgtatacatgtgccatgttggtgtgctgcacccattaactcatcatttacattaggtatatctcctaatgctatccctcccccctcccccgaccccatgacaggccccag

SEQ ID NO: 118865 - DNA, 430 bp, Homo sapiens
aggccctggatcttagataggggaagagatgagggtaagaaatcttttttaaaaattaagaaagaatacaagaccttgtcactggactaaaagggaatctaggatgagatctgagggtttctcccccaccggcaggaccaaaattgggggaaaaaatctggagaaaaagagccctgagagagaggcctagggagaaaggaagaaggacagggaggggagtcgaccaaaggcagaggaaatggcaaggggaggtggccgggctcagtgatgaggcctcaccgggcgctgggcctgggggctggaagggaggagacaggtttctggtctcccttctggagtggcttctttcctcgatgggagcccggggcagtactgaggaccagtcgaggaaggagcagacatgggtggacccacagaaaagcaagagggc

SEQ ID NO: 118866 - DNA, 397 bp, Homo sapiens
atattacaaacattactttgcgcctactgtttcaccaaaactactcgtcaaggttagcaatgactttaatgttcctaaatccaatggtcaattcgtagtcctctcacttgacctaggcagtgaccattctctcccactttcacacatgttcacttgacttccaggccatactcttagtttccattttacctcactgcctcactcgttatcatcttccttgcctcgttcctcaactctctatgctagagtacttcagggatcagtccttgatcctctccttttctctatacttactcctttgagggtttatctagtctcacagatttaaatatctttgatatgctgacaactctctaattatctaattcaccctgcccccaatccaagtccagacctg

SEQ ID NO: 118867 - DNA, 620 bp, Homo sapiens
taaattcagctgtctgggctcagttcacagttctgtcagttgtgtgactttgggcaactctgtaacttctgtttctcagtgtcttcatctggaaagtgagcatgacaataaaaagcacttatcttgaagtgggaggagggctgactgagataacacatagagctgagagtaacacaggcacatggtgtgcatttgatgagtgtggttctgatcacttattcaacaagtgtgtaatgcctactatgtaaaaggcactgtgatggcggtgggggatcagttgaataatacagacatgattcctaccccacgatgcatccagcttgaggagacaaacaacaaacaagtaatcacacaccacctgccagtctctttaaaatagagactgtgatgagcgtcctaaaggaaaccactagaagctgtaataaagacgtctatttagaattctgcataaagatgaataatttgacaaatatatatcattttgcattcatctctaaaccacagtaatgaatatttttaaaaagatagaacccacaaggaagtggaaagagaggagataagagcaaacaaaatttgaagctagtaagcagatgggtgaatggcacctgtgaagggaaagc

SEQ ID NO: 118868 - DNA, 585 bp, Homo sapiens
ccctttgcattgcctggcttggcctcattaatgtccccaaatctgtgttcttctctccagctcttctggcaacccctgacccccttcattcctcacagccagtcctaactctcctccatcccaaccccaatccctcttccacagctgtcggaacatcccctaagctaaaaatcagattgctccttgtcaccttggctcgagtcctctctcccactcccctcactgtccttagaatccccatggcccacacggcctgtcctggcccagccactgcctggggctctggccctgtgactcaccgcgccctgtttccctctgcaccctgcatcctgtagtcctttccaggggctgtgctcttggcctggggtggtcttttctctccttacctggctgacagttacttgtccctccgcagaggatcatgttcggacctccaggccagcccactgctgctccttggcactttcacggccctggcgtgtccccgtcatagcccttatcagtcccttgtatttacctggtcactctccatctctgagggtatgggggccagatggctcttgctgccctgatgttttggggggt

SEQ ID NO: 118869 - DNA, 325 bp, Homo sapiens
aaaaaaaattaaaacagataatagactaaaatgtaaaactataaaactttcagaaaaaaaaaaaagaatctttggaatcaagggctacacaaaaagttctttacttgataccaaaaataaaatccatgaaaggaaaaaatggataaattgggctccatcaaaatttaacactttcgctctgtaaaagactgttaaggcccggtgcggtggctcacgcctgtaatcccagcactttgggaggccagggtgggtggatcacaaggtcaggagttcatgaccagcctggccaagatggtgaaaccccgtctctactaaaaatacaata

SEQ ID NO: 118870 - DNA, 291 bp, Homo sapiens
ccagactggagagggatgggtggctgtttgagaaggttctgggagggccgatgagtctggagttgttctctctgagagtccctgaatgggaggtggctctagggtaggagcctgagtgcatggtccagaggaggcctggggaacacccacctggggatcagagctctggttcaggacctggggaagaaaggacagtgagctcagccttcagactgacctgacctcagcttcatgctgaccccatgaccctaccttccacttcttgaggtgatgctgctgcttatgggaggg

SEQ ID NO: 118871 - DNA, 469 bp, Homo sapiens
ggcttggctgcacatggtggctcatgcctgtaatcccagaactttgggaagccgagggaggtggatcacttgaggtcaggagttcaagaccacctggccaacatggtgaaacaccgtctctactaaaaaataaataaataaataaatattagccaggcatggtgccagttacttgggaggctgagacaggagaatagcttgaatccaggagtcggaggctacagtgagccaagatcacgccactacactctagcctgggcaacagagcaagactctgtcaaacaacaacaacaacaaaaaaccaccagagaaaatcagtaaagatcctccacacatgcccagccacaatgtaccatctacttgctattgtagccacacatattattctgtcttccttctattatcttggctttatttttacgtttttttgactatgctgtttagcttttccaataggaacagctagctg

SEQ ID NO: 118872 - DNA, 239 bp, Homo sapiens
ccatctgggccatggctcttctggggacagtgcaggactcgaagagaagctaatggccttgcttgggtggggatgactagttttttcttttgtgttggtcacttgctggcaagcgggttttcccacctcactggctggttgtccagcagcgtgaatccgctgcctgagaagtgagtctccaaacaatcacagcgggactgaccacgcaggtttccccattactgcgctatgaagctccc

SEQ ID NO: 118873 - DNA, 372 bp, Homo sapiens
gctacatagcatctgtattcatattcactttaacaaatattacattaaacaaaatgactcatgaagaattagacatacattaacacatgaatccaatagttttattataatgtgaaatacagtaattgaattcctatacaataaacttgttagtaggaatgtagagaaaatactataatttgatttattatcagcacatttgaattaaaaacatctaatactttgacccagtaaaaattttcaagcaaataattttcattgcctgctgttatgcaatatccacttctgttagtgttagtgcataagcaatggctaagcaacatattggcaccatcatgtaatcctcataagttacaaagtattttgttctca

SEQ ID NO: 118874 - DNA, 417 bp, Homo sapiens
  misc_feature (399)..(399): n is a, c, g, or t
gccaccctccctcctgcaccaagaaccagtttttgccccttttaagtgcaacattacctctgctaaaatgcatgaagtagaggacagagagggagtgaagaagtagctggtaagataggagaaaggccagtacagagtggtagaatgaagtcaagagagggtgaagattgttagaagaaaggagaaagggtattgaatactggagaatactctctttatgacttggcagtgtggttattgtgaccttcatcaaaccgtgtcactgcagtgatgagatggaaatggagtggtgagttgaagagtatctgggaggcaaggaaatggagcctcaagggcagaaaacttttgagaagtttgggtacaaatgggtatgggaagtgggtaaggagtaggatacantagggagagggtaccgag

SEQ ID NO: 118875 - DNA, 247 bp, Homo sapiens
taatacatatcttgggaaagatactttgaagctatgcaaatatcctgtttctcctcaaaccttcaccactgattttagcattcaatggtggaatttgcctgcaacaattattactgtggcatctgtctaatagtagctcacacatctgaacctagagggaagcagctaatgagccatcccttcgcttcacaaccccaacctaaccaataatgagatgtgaactagtgcaaaggggtaagaaatgtcc

SEQ ID NO: 118876 - DNA, 319 bp, Homo sapiens
ggcaaattttattagatcttaaggtctgagaatagtcctttttagtttgatatcccaccttcttagcctgctggggtggcagttctgcccccatgactctgccaagtcaggttttcaattgattaagtctcagccacgttagggagggcaatctattttttctcagtccactaattcaaatgttaagctcacagatacactcaggataatgtttgatcaactatctgggcctcctatggcccagtcaagttgacatgaattaaccatcacaaggggctttaggaatcatctgatccagccatctctccaaagcatgaat

SEQ ID NO: 118877 - DNA, 187 bp, Homo sapiens
attacctgaggagctcgacgttcaaaaggcagacccccctgccgccgcatcccttcccggttccagctcacggggcctgggtggagccaagcatatgcgttttgatgcgttttgaacaagcatcccaagtggttctgaggggctggtctccaggccacactgaaaaaccgagttctggaggtcgacg

SEQ ID NO: 118878 - DNA, 215 bp, Homo sapiens
ttcatttatctttcctacaagtcatctgttttcccttaagtgcccttcatctccctttacttcctctattatgatggtatataaagtccaaattcttacagccttttctctcactaatctgtcttttattaatttaatttgcccccaactacttaacgtaaggcagagaaaaagcttttcttccctgacatcatcaactactaaattttctactt

SEQ ID NO: 118879 - DNA, 774 bp, Homo sapiens
cactgattggtgtgtttacaatcctttagctagacagaaaagttctccaagtctccaccaacccagaagcccagtggcttcacctctcacttccatgtttgaaacttgacctcctgaacttgaaagtagcagtaacatattttgattttctgatgagaaataccatgatttgaccacagtcatagaagacctaaataatgtgaagagagtggtagaacaaataagaataatatatagtgaaaatgagaaaaacgtaatccacctggatgtaatataaattagttcagttgatacactctcatgaaaaatagtttaaaggtcacctgttgcacttaaaaccccacttactcgaaactactatgttttaggggatatttttctcaaagaaaagttaatttttttccttttccttctataacatcacatgtcattcctttgacttctcattttctttagttttttaagaaaatttttaaaactcttgatttattaagattttagaactcttggtaggctctcaaaccataatttcatttttaccaatacctactccagcttgtatcttgccccacaaaacaaagtactattaatgtaatttacattaatgtctgttaatttgtctctagaatatacttaaccatttacagatagattttatttaatacagaaatctgcagaaagtacaacagctatagactgtaggttgcttttctgaatctgaaggaggatttcgaatttagaactttgtgaactggaaagaatcttgcttattgg

SEQ ID NO: 118880 - DNA, 627 bp, Homo sapiens
ctggtggctcatgcctgtaatcccagcactttgggaggccaaggaaggtggatcacctgaggtcaggagttcgagaccagcctggccaacatggtggaattacacaactttgtttctttaacaacagcagcaataacaaaaaaaaaacaccagagaaaaaaagaactgatgggcgtggtggctcatgcctgtaatcctatcactttgggaggtcagggtgggagaatcacttgagcccaggagttcaagaccagcctgggcaacacagtggaaccccatctctatttaaaaatacaataccattaacaataattcaaaataaaaagggagaaatacatagttttaaatctagcaaaacatttacaggactggcatgctgaaaactataaaatgctaatggaagaaaggaaaacaagatggaaatagagagctatttcatgatcagagatttgaagacataacatagtaacaatgtcaatggctgggcatggtggcacatccctatagtcccagcactttggaaggcagaggctggaggaatacttgagcccaggaactccaggctgcagtgagctatgatggtgctactgcactccagcctgggtaacatagagagagcctgtcccc

SEQ ID NO: 118881 - DNA, 642 bp, Homo sapiens
gagattcagacacacagaaagattgttatgtggtggcagaggcagatattgtagtgatgcatttccatgccgggaaatgctaaggatggctgttaataaccagaagctgggagacaggcatggagcagattcccactctggatgcccaagaaggaatcaaccctgctatcctcctgactttagacttctagactcctgaactgtgaaagaacatctttgtattgccttaaatcacccagtttgtggtagtttgttatggtaacaataggaaataatatagtaactaatatagatgcttagtaaccattttcccatcccaaaattgactaaggaagctaataagaaggggtagaaaagtggatttcgaaatagcctttaatgttcaataggtgttccacttcagcacaaatggaaatttccttcctggttcttgtgactgctctagtatttatttacaaattgatatgagaacttttgcttttgatggatggaaggatccaatcaaggcaaagatatgcagggagaaaggagaggtggacaatagaagggaatgacatggaaattctcctcatctcctggtctgctggattgtcctttaaaagcagaactcaagttattgtttaataagcaatttcatgaaac

SEQ ID NO: 118882 - DNA, 323 bp, Homo sapiens
attgtaatagttgatactaaaatatttttcagcaggttggacagcaccagtttttcttagatcacagactacaggcagaatttcccttcaatccagaaaaaaggacactaatttccttttctatttaattttcctggcccttgtgcaaaaaattgtggactctatcttagttacaacatgcatgtcccttattttgtggagagctgtgtgaaagatgcgttttttttctttttttcttttttttttttttgagacggagtctggctctgtcacccaggctggagtgcaatggcacgatctcctctcactgcaagctccgcctc

SEQ ID NO: 118883 - DNA, 621 bp, Homo sapiens
aggatttttcaccttctgcactattattgtcagctaagtcttcattgtggaaggctgtcctgtatgctatagggtgttaagcagcattcctggcttctaccctctgcatagcaatagcacatctataccgccacttctaccctagttacaataaccaaaaatatctctagatattgcttaatatcctggtgaatgaggaagaatcgcccccagttgagagccacttgagtagagcagtctgggactgaaccctggggcacaccaacatttagaaaaatgacgaaccaacaaaggagcccaagaaggagtaactgaagtgagagttgaacaaagaacgtggcatcccagaagctaagggaaatgtttcaaggaggaggagagtgaaaacctgtcagtgttgcatttaagccaggcaagatgagaaacgaaaattggcctttggatcatggaggtcattgatgacctggtcaggaattactgcagtagtcgtacaaaagcctcagtggagtgggttcaagagggaaagggaggagaggaattgtgagtatagaatagcccttccaaggtgtattgctataagggaagcagagaaatcacatggtaaccagagagcaagggagg

SEQ ID NO: 118884 - DNA, 354 bp, Homo sapiens
atctgatgtatgatttgcaaatattttctcccaatctgtgagttgtctcttcattctgttgtttcccttgctgtgcagaagttttctagtttgttgcagtcccatttgtctatttttgctttcattggctatgagactcaaaaatttaagtaagatattaccaacgaaatagattaagatcacaaaaaccatctgtatcttggagagataatacaagcttacaaagacaaagctacatattagacagttactgggagacaccgggccaaggattccatggatatgtaaaacaaaaagtcataattgaactttgcttcccacagggcccatcatatctcattaactatgaaagaa

SEQ ID NO: 118885 - DNA, 700 bp, Homo sapiens
ataagattatttctggcaagggattcttgaaagctgtaaagaaaacatacctgctgtctttaccgataatgtggaaaacttcatgggaaattctagccccttcgatgtcaagtctatttaatctcattcctttactattaataaatttaaatagatgaatttcaaatctcattaaatgttacaacagtatgtctaattagtttttttctttctttgattggattccacaaagtagaataaagctcttctcagaaacctgtttggacttagtaattatttttctctagattgttattttttctctagtttgtcaagagtgagtaaactttgaatgattgagagtctgttatgacataggtcaaatcaattgagcaggaccaaagagttgggctaccctggtcacattaactatatacatttactgcgattatttccattgtttcttcatacacagctgtgtgacacagcgtgccttttgcatcggtaaaggagttaaatctgtagttaatttgtgtggcattctctaggctgagccaggctttcttagccctttggaagatcccacatggaagcattagacataatgaaaactcagcatatttctttgcttctgagttgttggaaatgattagattgaaactcaatgtgttgttttcttttcccacccccaccctttagaaaggtatctgtatgtacagaa

SEQ ID NO: 118886 - DNA, 303 bp, Homo sapiens
acagcatagactatctaattcgaaagtacaaatgttaaagtacaaaatttcctatgtatgattatcatccttctgataattatacgttgaacttcctatcacctggttacaaccaagcttctacatttcaatgtttgatgctataatatgcaacaacaccttggttatctgttttgagagtgaaatgctacctattaatacagtaattttttggctgctgtaatttctcagtaatgtagatatggtataaaattaacaagctgtctttcagcctgtccttatcacatgctttttgtctttttt

SEQ ID NO: 118887 - DNA, 704 bp, Homo sapiens
cctgcaaatgttaggagagaacctaggatgggggctggtttggctataaacagctttagattacatcatcacaattcaataatcaaaacaaaaaaatcctctgtctcctagcatccaagtacaaaatctgagctgggtttagactaatgctctgagattggtccagtgctaggaccaatagctatagccagaggtaggaaccactgtggctaatcagtcatgtagcatactcccagccatctggcctggaccagtggggccatgtgataggcagccctaccagaattggaattgaggagggaggttttcctcaagtgaaaagggtactgtcactagaagagaggggaagtaatgctgtgtgaacaaacaataaaatccacccacaccagattaacattttattctcagaccctaccattaaatctgtcatgtgattattggtcaataaatgcttagtgaatgaatgaacttaggaaatgcattttgaggccaatatattccctgtattaatatttggggtattggaactcatgagtgaggatgaaaagaaacatagctatttcttatagcaagtaaaagagaacaacgtgttttcatggccaaaaagctaatcctatgcttaataaagattgcaaatgcaatatacttaaaattgtgtcacagaatgtccactgaaagatcaatatatttgattgaagattgtg

SEQ ID NO: 118888 - DNA, 846 bp, Homo sapiens
aaaaagagcaggagagggatgggatagggaattttcttattctgttttatttttccaagtgtttctttagattttctagacatttatatcacctacattagatatcattttgccttttccgttccaattattatatttccaattgtttattcatttcagtagctaatatttccaacatgatattcagtcagatggggacaactgatatctttttgttcctgatttgagcaggaaatttcctttcatttctccatcaagtaagatgttggctttgagatggaaattgtgtgtgtgtgtgtacatgtatcattatataatatatattgcatattgataggaaatatctattcctattgggaaatttttaaaaatataaacaagtgctaaattgttttcagatgcattttccctatcttatttcctctacttctttcctctatcttatttcctctgcttatttaatgggttatatgaatagattttataatattggcccagtaagcattcctggaataaactccacctggtcatgatgaattagtttttaatatgctcttgtgctttctttgctaattttggggttttttgttttttagtttgtgtaatcaatattcatagtgaaactgatgtgtttttttgattgtaatattatactcaaattagaaaatatatatttctaatataacaaggaaaataagttttccttagttttctgtgcactgggatattttaagtagcatttggatctggtctttaaaaatttgatagaaaatttggtagaaattcccaagggagtctattcttctattttttttaaattattaattgttaattctaattatgtat

SEQ ID NO: 118889 - DNA, 736 bp, Homo sapiens
tcaggttccatctcttatattggcctttcagtgtccctgctttcttgagagcccagtaaagcatttttaaaagtatattgtttataattgaactaggaactaatagtaatgggagagccctttggatgatcttgtcttttataaccccataaaccactaccattctagaagccaaagaaaagacatagttttgtcttaatattcactaatttttctcttgtgtaccactagcctcctctgaaatttatgtgttgaagacgttccatagaccagggggcccccgtccgcgggcctcaaatcaatactggtccgtgggctgttgggaacggagctgcacagcaggaggtgagcggcaggccagtgagcattactgcctgagctccgcctcctgtcagaccaatgacagcattggattctcataggggagcaaactttattgtgaactgcgcatgtgagggatctaggttgcaatctccttatgagaatctaatgcctgatgagctgaggtggaatagtttcatctccaaaccacctgtccccacccctgccctgtccgtggcaaaattgtcttctgcaaaactggtccctggtgccaaaaaagttggagactgctgcttatagaccttaacagagctttcttttttttgagacagggtcttgctttgctgcccaggttggagtgcaatgacgtgaacatgactcactgcagccttgacctcccgggctcaagtggttc

SEQ ID NO: 118890 - DNA, 852 bp, Homo sapiens
caattaatccaggataatctccccattctaccatcagttgatccactctagcaatgcaggtaaaggtgccatcacatagatatcaattataaaaataatattaacaggcataattgtagttaaatttcaattcagacatactttcttttgaatgtctggtaggtctgctgtgttggttgtatgtgggttttcctccatatccacttttttggacttaatctcaccattttttacatgtaaacatatcacaatattaataacattaattaattgaaggttaattatataaactaagtgaaataaatctttaaccagaaataagaaaatttatttgtatttgagttacagaacaatatctgcactccagcctgggcaacacagcaagactccatctcaagaaaaacaaagaaaagaaaaaaggagagagccttaatgggcactcaattttcacccagactttgaaaaggaggggtgacgaatttcctttaccaatctccattaaagaacacttctgggtgtgagacgagattatgtggggccacgggctggcactctcacggacgggaccaattaccttctaccctgacgcaccagggacaaagaacggtttccaaacccttgcaggcaagatattttatcccaggaatattattggcacaaactaatgaccaacagaaagctccaccggggacgatgcgtaacatttgggttgcacacagatatacggtccccaggattataaggtcgagctggtatacacagattacacaaaaacacatcttgggacatggcgagatacggatagctctgcacatttttgtgcaaaaggtaacatacgaataaccggaatcg

SEQ ID NO: 118891 - DNA, 216 bp, Homo sapiens
ggttgatctaaggatccccatcaggcgaagaggtgtggggcttcctttggaggtgataaaaatgttctaaaactgactgtggtgataggtgcacatatctgtgaacatgccaaaaagctgaagtgtacattttaaatggcatctaaaggcatgaggccgaggggaatcaccagacactgggagcaaagagacaagcggaggcagaaccaagccctg

SEQ ID NO: 118892 - DNA, 363 bp, Homo sapiens
gcgtgttctgcctgctgccgcctacctgcagggagacgcctgagctgggaaggttctgagggttggcagggtgctctgctgtgctctttgggaggatccccttggctgttctgcatgcccagggccgtgctctccgtggaaatctatgttggagacgacaggctccggttccggctacaccagcctgacttccgctggacagtgccattttctgcctctgttaacaccgtggtgaagcgccttacgtaaagcaacagattttttgttttaagatgcactataattactcttttcagaaccaataatattaacccagtgaagtcaaaactgaattgttttataaactgactatggagctggtgt

SEQ ID NO: 118893 - DNA, 637 bp, Homo sapiens
atgctgtcatccagactgtatttctccatttgccttatttgcctgcaagagtctttttgtgagagtgactcatgataattgtggcttattacctgaagcctcatgagaaacggtattgaatgctttctgaaatcagaatgtactacttgtttgtactactagtttgtttaaaaaggaaatgagattactttggcctggctttttccatgcttttcatgtcctatgtagctcaaaaatttgaaatgacaggttatagtgctactgagaattcacgtttaagatgtagttcctagaatttgatttttctctctttgggtcaacattactttgttttaatctcccactgacatctggttcttcatcttctttcaaagattactgatgatagctccccattcattcatttgaaatatatcattacttttgttttatggcccagcataccgttcatttttataaatgtttcactggtccatgaaaagaatgtaaattctgtagttgatgagtgcagggctctgtgtgtttttggtcaagtttatgtgttgtgttgcttacatcttttagagctttaccgagtttttgcctatgagatctgttagagacagagaggttaaaatctcctcgtataatttttgga

SEQ ID NO: 118894 - DNA, 363 bp, Homo sapiens
tttttttttactgagaaatgctggtaaatgtaaaatcagtgtagtaaacgcataatacatagtccagtgaagatgcagagttcaatcagggaacattatcaataagaatacacaacatttttaaaacattcttttccctccaagttagtttatataaaattaaaattttaatgtgatattttgaagcatgagataatatttcatgctcatctgccaaccaaaaatacctccaaagtcttgccattaatgtattcatctccccacaatcctgcaagttaacctggcccatggtcaacactgccatcctcattttacctgtgagcccctccacaggtagtctgtggaagagtcagaactgcagtc

SEQ ID NO: 118895 - DNA, 821 bp, Homo sapiens
aacctcgtgatccacccgcctcggcctcccaaagtactgggattacaggcatgagccagtagctttttacatttaaagtagggtccagctgaagtgaattcattttacaaacgctaaaagcagtgagaactagctgagagcattttgagaagaaaagtgaaaggtatgaaggttttcctgaagttagtatccacttttgtaaaatctaggccagtggttctgggccaggggtggttttcccacccagggaacatttggtaatatctggagacatttttggttgtcatgatgtgggggaggtgatatggtttggctgtgtccccacccaaatcttatcttgaattgtagctcccataattcccatgtgttgtgggagggacccagtgggaaataattgaatcatgagggcagtttcccccatactgttctcgtggcagtgagtaagtctcaggagatctgatggttttacaagggaaaacccctttggcttggttcctatttctctcttgtctgctaccatgtaagacatgtcttctgccttccaccatgattgtgaggcttccctagccacatggaactgtgagtccattgaatctcattttgtttataattacctagtttctggcatgtgtttatcagcagtgtgaaaacggactaatactgtatgtaactaatactggcatctaggtagagggtagggatgcatctcagtatcctgttatgccccacaccaaaggattattgagccccaaatgtcaatagtgctgatattgagaaaccccagtccgggcttcatgtacttatctggcctctctagaaca

SEQ ID NO: 118896 - DNA, 551 bp, Homo sapiens
tgctgttcctctctcttggaaaaaccttctcctgcttttttcctaaattgtatgtattctttaagaccagctcaaacgccacctttttcacaaagacttccctgatcccagaattaagggtgagcttccctgtgctcacagtgcaatatttgtacctctccttcacatttaccacactgtgtttgctgctatgattattggtgtaaacaatttctgcttctatgctataaatcgactaccacaatcatttgcaacatccacagagcataacagcattttgctttataaatgtttgttgagttgaaatgaacccccctacaagctcaaatattggactgaaaccaacaagataaaatttcatagggagatatttttattttttattttttgagatggagttttgctcttgttgcccaggctggagtgcagtggcaccatcttggctcattgcaacctccacctcccgggttcaagcaattcccctgcctcagtctccagagtagctgggattacaggcgtctgccaccacgcccggctaattttttgtattt

SEQ ID NO: 118897 - DNA, 272 bp, Homo sapiens
aacatttatgaggaactgaaagaaatgcattatacttttctaaatcaagaaagagttccttactgtgcagtgggaagttggcattacctgctcagactgtgcagacagtggagtgggggtcagagtctggaaaacaatgatgaccactgtttattagggaataattaagacaactcctccattgagtcatggtttgtgactagcttggctcacacttgggcaagattcgttgggtgttttgtttcagactttgaatgcctcagtgctttttg

SEQ ID NO: 118898 - DNA, 132 bp, Homo sapiens
tgttcattaggattgacaagattcagtaacttagaggaaatggaagaaagggtagaactttgcctaaactcttgggctatttaaaaatagttgctgctggccgggcacggtggctcatgcctgtaatcccag

SEQ ID NO: 118899 - DNA, 295 bp, Homo sapiens
ccccgactagcccgacagccccgactagcccgacagccccgactagcccgacagccccgactagcccgacaggggcgtatctgtgagccaaggaattgatgtttctattcacaaagcctcttcagtctcaacgtacagctgatcaaagacagacagatcttcagataaaagaagcaatgtgtaaattatgtatcagtttttgaaaatcctaaccaaatgggtctggagagctatcaggttagtgaacaagaatgcatctatgtgctgggatgtatgaagtgttacatccatgggg

SEQ ID NO: 118900 - DNA, 277 bp, Homo sapiens
tccgtgcagactgatagatcgtatttctgaacttccatatttagttgtctacagtgcctctgtattttctattaccaacattttttgaatgctaagaagtttgtcgatttttttaacatttaaaaaatgactctaatgtatccatttccacatacgctttttctggcattcatcttttgaggatttgaactgcagtaattacatacaatgaacagtggtggcatttgagataaggtgaggctagaaacgtcagttacactgttgatagagaaagttg

SEQ ID NO: 118901 - DNA, 676 bp, Homo sapiens
aggaaaccaaaaattatagttaatgatataaaagatttaaactatacaattagcaacttgatcagaactcttccatatatggacatataaagaacgctgcaatgaaaatgtacttaacatgtttacaaaatttactgggtttataatatctataaatttcaaagaactggttttatattgcattctcaagcaatggaatcaagttaccatcaataataaaaaatgaccttagtgaacatgttggtgtgagtgtccacaagcctttgaagattttttcctgttctgaaagttgtccaaagtgtgtaagtcttccttgtgacttagaatcccatgaggaaaaaaaatggaatgatactttcaggaaaatctgctgacctaggacaaagagtcagcaaaaatatcctttaaaatagaaggcacaattaagatgtttccagacaaacataagctgaaagaattcctcatgattcaaagcatggaagtagttcttcaggctgaaagaaaatgattccaggcagaggcatcgagattttggcaggaaagaagactgctggaaaggcaaatatatgagtaattgtataacagcaatggctgtaagtctcaaacaataatgtcttgtgaaactaccaacttaaatagaaggcattacaacaatagggcaaaagcagagggaaga

SEQ ID NO: 118902 - DNA, 884 bp, Homo sapiens
agcgggggcggggcctcgcgctaacggtcgcgcggccgtcgcacctgcacgaggctgtggcccgagcgtcctgtggagaagccgcgaagcgcgggcgacccgggggtcgggcgggccaggtccgcgaggccgcggcggcagctgtgcaggcccggggagcagccggccgggcgagcctcggattaaaaaaatggcaaactcctttgcagcgaggattttcactaccctttcagatctgcagccaaatatggctaatctgaaagttatcggtatagttattgggaaaacagatgtcaaaggctttccagacagaaaaaatattggatcagaaaggtacactttcagcttcaccattcgggattcaccagcacattttgtaaatgcagcttcctggggcaatgaagattacatcaagtctctttctgacagctttagggttggtgactgtgtgataattgaaaatcctctgatccaaagaaaggaaatagaaagagaagaaaaattcagccctgcaactcctagcaactgtaaactgttgctcagtgagaatcactcaacagtaaaagtttgttccagttatgaagtggacacaaagttactttctttgatacatttacctgttaaagagtctcatgattattattcactgggtgacattgttgcaaatggacacagtcttaatgggaggattattaacgtgcttgcagctgtgaaatcggttggagagccaaaatactttacaacttcagaccggagaaaaggccagaggtgtgaagttagactctatgatgaacaggagtcgctttgcgatgacatgttggggatacatgaacccattctattgcacagagctggattcccgagaaacagtaatatttgcctca

SEQ ID NO: 118903 - DNA, 351 bp, Homo sapiens
gattgagcttcacagttctatttaatgagcagaatacaaaagtataatgcataatcgctgaccatatagattttctagtcctaaaaggagataatatatggacatattaaatgactcaaacttcctgttttaggggcactattcctgggcatgctgctaccagtgcagtaaccagggcactacctaccatcattagcaccattttcagattacagacaagatacgaagtgtaatgtcaaatcaccaaattcaagcaggattagataagaagctgaggttcagagaaaatgtgtgagaacccaggggccatgatttgtaggctcatcacagacagacggaaatcaaaccaga

SEQ ID NO: 118904 - DNA, 884 bp, Homo sapiens
gatctcaactcagcgcaacctccgcctcctggtttcaggcaattctcctgcctctgcctcccgagtagatgggattacaggcatgcaccaccacacccaactaattttgtgtttttagtgaagacgggctttctccatgttggtcaggctggtcttgaactctcgacctcaggtgatccacctgtctcggcccaccaaagtgctgtgattacaggcgtgagccaccactcctggccgaactaaaagttttgaaataagtttagaaaagtcattaatttttggaggctaatcttgtttgttatactttagtcattaattcaaagtaaaggagttgttaatgaactggaaactccttttgaattatggtagcaatcagaatatttttatattagccagttttaccttgaagacctatttttaaaaactacctgtgtctctggacttagttgcaaatgcatattaaaacaaaaatcccccaatttctgtgctttcttatttgaaaggccatttctagggggaaaacagttcccaaacacattatacatgttggaaaagtttatctctaaccttttgaattaaacaatttcagaattgaaaacagtaaggtgaattttaggccaataactcttttctataatcttgactcttttaagattaggcagttcagatagtcttatactactgaaaacctagctagatatcagaagtaattattagtggcaagaataccaaagttaataccaaagtttttttgttttgttttgtttttagacagggtctcactcagtcacccaggctggagtgcagtggtgcaatcttggctcactgcaacctctgcctcccaggctccagagatccttcctgctcagcctctcaagtaactg

SEQ ID NO: 118905 - DNA, 333 bp, Homo sapiens
actgtgatagattcacgcaacgaagtccttacacagcagtgtgaaatgagtgactgagctggagcgacacatggcaacagggataaatcgcaaaaccatgctgggcaaaaagcacaagttgcaggagaacgacagtaaataccacttctgtgaagtttgaaaatatgcacaccattactctagattgtttacagctgtacacatacatagaaaatatagaaatgcataaatgagaatttcaggaaataatttaataatgattgtaggaaagaggtgaccctggggacctgggggaggtgtgatcagggcgggatacacaggaggctccacgtg

SEQ ID NO: 118906 - DNA, 274 bp, Homo sapiens
tccttttggcagtgacatctgactcttgagttatagccactgagatctctctaagtgctcttgactcttgacttgtgtcattatgttttgttgcccctaagtcaagggtacaagtaattatacatggaattggtgtgaagtactcacagcaaagactgcaggtgggctctgggaggcctgactgggttggggacagtgaatgcagaggtggggacgggacccagcccgtggcaggagagggcggctgtggttttggaggaatgagttttcaggg

SEQ ID NO: 118907 - DNA, 616 bp, Homo sapiens
atagtaaaatataatccgagcacagtggcacgtgcctgtactcccagctactctgggcagctgaggcaggtttgctcaattccaagattttgaggctccagtgcactatgatttcacctgtgaagagcaactgcactccagcatgggtaacatagcaagactgtcttttaaatacacaaagtattttgaaaggccaggtgcagtggctcacacctgtaatcccagcactttgggaggccaagacggacagatcacctgatgtcaggagttccagaccagcctggccaacatggtgaaaacccatttctagcaaaaatacaaacgttagccgggtgtggccagacatggtggctcacacctataattccagcactttgggaggccaaggtgggcggatcacctgacatcaggagttggagaccagcctggccaacatggtgaaaccccgtttctattaaaaatacaaaaataagctaggcgtggtggcgggtgtctgtaatcccagctactcaggaggctgaggcaggagaatcgcttgaacccgggaagcagaggttgcagtgagcagagattgcgtcattgcactccagtaagactccatctccgaaaaaaaaaa

SEQ ID NO: 118908 - DNA, 121 bp, Homo sapiens
gctggtggtccaggggtgttactccttggaggctatgtgggccatgaggtccaccaccctgttgctgtagccaaattcgttgtcataccaggaaatgagcttgacaaaatggtctttgagg

SEQ ID NO: 118909 - DNA, 265 bp, Homo sapiens
gctggtggtccaggggtgttactccttggaggctatgtgggccatgaggtccaccaccctgttgctgtagccaaattcgttgtcataccaggaaatgagagaccctcactgctggggagtcccctccacactcagtcccccccccactgaatctccctctcacaggtgccatgtagcccccttaaaaggggaagggcctaaggaaccgcccccttttcatggtccctccattaaagtcccttggtggtccacccaaaaaaaaaaa

SEQ ID NO: 118910 - DNA, 751 bp, Homo sapiens
tgtacttgatatcgatctcttgttcatttcttgataatatgtttggttatttttgttttcattgcttttggtgtcagagatggctttggattccctgttctgtgtgctcctgtctggctcctgaacccagctggagaggtgtgtcaatcccaactggtgaagtactgagaggaagctacacaaaaggcagcaaggtgttaataagtgtacctctgacattttaaccacctctgacttttccatggaatggacaagtagtagtctctgtcagagcaatgttttaaaggaaaaaaagaaacttgaggtcgtaaactgtttattaatttatgctgttattttgtgtttactcaactcatttatattgacttgtaaattagtaatttatgaactactattcatcaattcattgcctacatgtcagcaaacaagttttcttcttaataaagaatccggtggctgggcacggtggttcacacctgtaatctcagcatgttgggagggcaaggcaggaggattccttgaggccaagagttcaagacccgcctgggcaacatagcaagatttcatctctacaaaaaaatgaaaatattggctgggcatggtggctcattcctatagttcaggctactcaggagcctgaggtaggaggatcacttgaacccaggagtttgaggctgcagtgagctatgatcctaacactgctctccagcctgggtgacacaccaagagaccacctcttcaaaaaaggaat

SEQ ID NO: 118911 - DNA, 691 bp, Homo sapiens
aaaatagtccagaaaatggtgtgagagacgaaactcctaattgcctttgaactttagaacatactcgattggaaattcagcatatgtaatggctgaatccaaagctaggctctctttatggatctattattttgtagttccatgttattttgatagctgaactgaatgtgagggtggtttatctttcttcttcagagtctagaggaatgtttctctgactttaatgtgcacattagtcacctggaaatctgttaaagtacagattctgattcattgggtttggggtggagcctgagaccctgcctgtctagtgagctcccagtgctgatgctgctgctgtgcctgggctacactgaccagggtgttgcccactactgatgtgcctatattgttgaagtctgaagaaacactatgaagcttattggcaaatttttctaatatttaagataattgaagtttttaagattcctcatccatgtgtatccttaaaaaaaggctatggggtaataaatagtacttggcttttcttaccttctttaactcttaaaaaacaaagatttccagccgggcctggtggctcacgcctgtggtcccagcactttgggaggccgaggcgggcagatcacgaggtcaggagatcaagaccatcctggctaacacggtgaaaccccgtctctactaaaaatacaaa

SEQ ID NO: 118912 - DNA, 653 bp, Homo sapiens
ggttttatcagtggtttccgcttttccgtcttcctgattctctctttgccagctgccatccaaatcaaccctgaggattgggaaggaactatacataccaggaggcaaggagcactgggggccctcctggaactgcctgtcacagcgtcctcaaaggttttcactctcctaggatgacccaggtatagaatctgcccctatggttcggctccaccctctcacctgtctcttgagagcattgtgaaattctgagacacagcaaggacagaaacagagggcatggaagatgctttcagagatcagatccagagcctgacaagtttatttacttggagaagcagattctaggttctagaaaagaaggctgaaaatacaactttaagggaaaggataatctgatgactaattctcatttatcaaaaagccactttgccttagatctatctgtataaactccatgcttcacagtaaaatccttctaactttattgaaaaaagggggccacctagcaaataacaccaagagtattatttctggggttcagttaacccaaagacaattatttatcttactaaaatccatttctaggtctataaacctattgtgtagtacataaatacataggctttagtcctagatagttggagcagatc

SEQ ID NO: 118913 - DNA, 420 bp, Homo sapiens
attctttagcttaaaaacttatagttttcatcaccggattgagataggagaagctagtataatactgcaaaccaacgccagccctccccacgtacacatagtcaatagagttatttataagatacattttcatctgcgtaggctgaaaaatgacctctccacaaaaaatccatttcaagtccatagaacctgtgaatactaccttatttggaagaaggatagttatgttgaatcatcgtggatatctggttgggcactaaatccaaagacaagtgtccctgtaagtgacatatggagaatacgatgtgatgacagagggagaaagtggagtaatgtggccacaagccaaggaagccaagcaacgccaacaaccactggaagtagaaaggattccctcctaaagccccagagaaagcttgg

SEQ ID NO: 118914 - DNA, 666 bp, Homo sapiens
ctccatacacaaaggttttgtatcctgcaagtgctgtattttctatctgtgtttggttgaaaaaacaaaaacctacatataagtagacccaggcagttcaagtccatgttgttcaagggtcaaatgtattcctataaagcaaaacaaagaagcatattgcttaggaatgtgtctgtcgtgctcaaaatggagtgaatatcaatggtctggtggcatcaaaatggccagttctgtgacagtaaaagaggtttgtgtcttatttaatcttttgataataataacagctatggtgtatcacagctttaccaagtaccagacactgttctaagggctttgcatggttcactcactccttacgtcatccctcggtggcaggtgctgtaattatccttatattgcagacaaggacattgagacagaggtcaagccaccttcccaagggcacacatggcatctgcactgctcctgaccgaccgacagagagagctgctgtcacgatcctcaaatgagctatgcatgtcaaaagtttaaaaataaaaaagataaaaacatgcacaaaatttaaaaagtaaaccatttcaggctggacagactgaaactgagagatggccagagaagagtatgaaagataaatctatggacagagtaaaccctgactggcttgaa

SEQ ID NO: 118915 - DNA, 373 bp, Homo sapiens
cctcggctcactgcaacctccgcctcctgggctcaagcgattctcttgcctgagcctcccaagtagctggaactatagacatccaccactatgcccaggctaatttttgtattttgttttttttagagacaggatttcaccatgttgcccatactggcttcaaactcctgggctcaagcgatccacccaccttggcctcccacagtgctgggattacaggtgagtgacactgtgcccggccagatggcatgaatttgacaggcatcgttatgacctgaaggtccttctgtagacagaatcttatgttttagggaataagaacattataaaattagaagggttttttttttgagacagtctcaccctgtcgccc

SEQ ID NO: 118916 - DNA, 134 bp, Homo sapiens
aagctcaccaaaatggtcaaggaaggctgcatggaggaggtgaggcttgaaagaaatgcaacatttgaattgggagggaagaagagagagtgtgtgtaaggagaatgtttgcgtcagctcaagtgtggaggcag

SEQ ID NO: 118917 - DNA, 399 bp, Homo sapiens
acctctgaatggagggtgtttgatgattgagtgagtgttcaggtttagataaaactgcaagggagattttagcagagcatggcaatttattttctaggcagtcaggaactttgtaagcttttgagagctgcaagggtgcagtgatgagctctgtattttaaaaagtcatctttgtcagcaatgtgaggcgttgattggagccaagaagcacaatcaggaaaaaagctcaggcaatggttcaggcaattaggagtcaccacacttgtacctcttttgccttcttacagctgtatgtcatgcctgaaggtcagctcccaacccatcaaatcccacatttccagtgctcaaatagtattgaagtcctatctcccttggacataactcctcacttcagaaagg

SEQ ID NO: 118918 - DNA, 591 bp, Homo sapiens
gagaggcacagtttaagttaggagggtaagggatagtatatttctagtagttgcttttcactgagaatatgtggcattgcacgggttgttggaaattccctctccattttagctgctaaatttggcccgttgttactcagcacggtactcagagatggtgatgcaagtgctgtattaacctgataacattgtgtccaaagggaggcctgggcattttgaagtgattcaccaagcccattacattggcaggtctcactttactcgggctcctcttatttttcagatatgctattaattttaaaagggcctttgttcagggtgagtgtcagaattttttcttaattttattgctactgtgtccataaccagatttatgtgacttaggtgtgttgaatgtataactttaatagttaattcgtatgccataagtggccataaatgtcctttggagaaagggagagaatattgatcatctaaaatcaaagatgtgctgtgtcctcagatgaaagctttgtatcctgcataccttctagtacaatgccttgaagacagtgggtaatatttgttgaatgaaggtgaaaggacaacttc

SEQ ID NO: 118919 - DNA, 281 bp, Homo sapiens
acaggatactagcactttgggaggcccaggttgtaagatcacttaagttctggagtttgagaccagcctgggcaacaaggcgagagggctgtctttgtttaaacagaaaaaaagaatcccgtgtctgaatacagtcacattctggggggtaaggaattcaacatgagtacttgagggacatgtccagccgcctgtaacagcagtgaaaatgacatgtgctcaagtgggtttattttactttttaatttttgtgggtacacagtaggtatatatatttgtgg

SEQ ID NO: 118920 - DNA, 578 bp, Homo sapiens
aagaagcacaatctgaaaagacaaagcaaatatcagtatcagatttatatatagcagatatttggaattatcagaccaggaatttaaaataacattaatatgctaagggctccaatggaaaaagtgcacagcatttaaagtaacgtaagcagaggcagagaaattcttagaacaaaccaaaagcaaatgctcaaaatcaaaaatagtgtaacagaaatgaagaatgcctttgaaattagccaggtgtggtggcacacacctgtagtcctagctacttcagaggctgaggatcacttgagcccaggagtttgagactacagtggactatgattgcaccactgcactccagactaggtgacagagtaagaccctgactcaaaaaaaaaaaaaatgtgtttgttgggcccatcagtgtaacggacctggctgagaaaagaatcagtgagcttgaagatatgtcaatagaaacttcccaacttgaaaagcaaagaggaacaaaaagactgagaaaaacagaatattcaaaaactgtgagtcagttataaaaggtgtaacatataaggaacaggaacaccagg

SEQ ID NO: 118921 - DNA, 472 bp, Homo sapiens
ggttatggagccttcatgatgggattagtggccttatgagaagaaaggttcccccacccctccctccaaggagcacagagaaaaggccatgttaggataaagtgagagggtggctatctgcaagccagcaagagagcccttacccaaaactaaactctgcctgatcttgtcatggacttctagaatacatttctgttgtttaggtgcccagtctgatattttgttatggccaacacacatacttgtagataaatgctagggcaatactgtctagcaccttgtcctcagagaatggggcaaggcccagttttggtttggcccagggtacaatagtttgaacaacttatctttgctacagatcatttccaaagatctatccagtaggctacattctccttgcctgagactgacattaacctgtgggccatcctcagaaataatctttttccaagggttcaggagaagacaggat

SEQ ID NO: 118922 - DNA, 717 bp, Homo sapiens
cgtctcaccttcctctttcactacatatgtaatctaccagactaccttctcctggtcctcgtgggctgagatgctattttctcagattatggttgcctcctgttttttattcaagattcactggaagttccatctcctcttagcagcttcctgcctattgactatgaaatgagcaccctcatcgttcttaaacagagctttacattttcttctcttcataaagaatattatatattaagaatagataatagtaatagtatctattaatagatactatcaatatctataacagataatcaaaagattgttaatattaataccatctattaatagataatattactgataattaataattgtttatcatatatttcctcattagcatgtaaactctatgaaaagtagagaaaatacctggactcttgttcactttcttctcagaacctagaaatgtccttatcacatagtagacactaaatatttactaaatgaaaaaatatatccttgaagatttactagtataaatggtgtaaacagaatttcttggtgaagaaaaatttttaggtttttgccttataatttaccatctccatccttccaagataccaattttctttcccgtcgtccattgtacgggagggccaaggttgctgcacctgctggccaaccttgcatacgtaaattttgttttgacggttcaggatacaatgtttgaca

SEQ ID NO: 118923 - DNA, 316 bp, Homo sapiens
tcagaggcagcttaaaaaaaaaaagcaaaactattttgaaaacatatgttaagtctgtagggtgaacgcacgcccattatgggcaacctgatctgggccatcccctgtgctctgcctccaattctcaacggttccctccagtgtcagtgacatttagtaacctgtccaagaccagacagaagactcagtccagcccagggctgcctaggattgtcctccaccagtggacagaccagtggtctctgtgtcccggtgtgccctcacaggagtgcctggagaggttctcttaccctgaacacggtgtcactagctctcc

SEQ ID NO: 118924 - DNA, 357 bp, Homo sapiens
actgagacaatatcaatacacatgaatagctaatatgcattacttaggaaatactaatgttccatgactattccaattcaaaaaccttgactttttatataacttgaaatcattactaatgaaattggcaatgttaaacaagattgtctttttattttttcttttgagaaagagtctcgctctgtcccccaggctagagtgcagtggctagatcacagcttactgcaacctcaacctcctcgggttcaggtgatcgtcctacctcctcagcctcccaccgagcagctgggactacacgtatgtgccaccatgcccaactaactcttgtattttttgcagaaacagggttttgccatg

SEQ ID NO: 118925 - DNA, 382 bp, Homo sapiens
tcaccatgaggccatgacccttgccccctataccagagacctgaaaggcagctccacacagaagtgaccctgacaccctgaaaaatactcctacaggttgaatttcagctggaatatttttcccacctccctctgcatccggctccaaaaatagtcaaatctccaggcaggcaaaatagctggtcacccaaagacctgtgaccatctgcctgctctgccatccttagcactggtttctttcctccacattgtcttatggcttcatgaaggctgttggagctccagccatcacgtctgcattccagacagggggaaggagagaattcaggtgcaaaatgctaagcctattacatgtcagtctcctttagagagcttttctaga

SEQ ID NO: 118926 - DNA, 163 bp, Homo sapiens
gaaaaaaacatgcagagaagaagcattgaatggtcttacttgtgcaaactagtgtccaggcaaggtggtgaggagggaggatgggggaagcattaggaaaaactcaggggcggggctgctgctcttctccgccaggtcaatggccatctgcaaggaacccacg

SEQ ID NO: 118927 - DNA, 300 bp, Homo sapiens
gggctgcactcagagctggttcacaggcacttccacccacgtgccttggaccaaagcaagtcacatggtgtattaatctactagggctgccactacaaggtaccacacactgggtgacttaaatgacagaaatttatttcctcacagttctgcaagctccaagtccaaaatcaaggtgtcagcaggtttggtttcttctgagacctctctccctggcttgtaaatgtctgcctactacagaaagacctggtctttcctctgtaagagtctgtgtccaaatttcctctacttgtaaggaca

SEQ ID NO: 118928 - DNA, 256 bp, Homo sapiens
cgactcgagccggtaccctagtttagaagttcatagcagcaactctatttcttagacatggaggcattgggttgccagctagaaccaactgccctgatactcttcatccagttaagtggaaaccttagcaactataataaactatgagatgggtaatcagtgggcattattatctcatgtcttcatttgtcactttatgtagcaattcagggatccttattttttcacatatgctatggaaacttctaaaactagg

SEQ ID NO: 118929 - DNA, 922 bp, Homo sapiens
tcctcacagacatcagctcgggtcaaccgcgggcctcgagcccgagtggctgagggctgttaccttcaaacctttgaatcccacgttttccccttgacttcctgtcaccgttagagaaaagtggacagcgtctcggtcacagagttggagaaatagtgcagggactcttcagggagagcgttttcctcatcaaagcaaactgcaaaatcgcttctgccggcgtggacctgatgagagtcggtcgtcgtgagggacaccctctgttccctaacgtcccccgctgcttatttttaaacgctcggttggcgggaacccctgtgccagctgaaactccttcagtttggccgcctaggaaacaccgagagtcacctacatgggctggctgggcaataaaaacgggaaaaaatgtaaaagacacagtctccgccttcgaagcttacacccccggggcaagacctacaggaaaatagataatcccattattctctgataaaagccgagctgcttgccatgagctctgggagcagacggggaggccttgttgagaaagccttcacctgggagtgacaattgcgctgaatcttaagcataagtaagttctccagtttagggaagagagggaagggcattgcaaggagaggaagcaaagaggaagaggacctggtttgagtaattgggtatgaaaacagatattgcagcaagaactttgttgaaaaacctttaaccactgtttagttcggatgagaacattcccaggctcctacgtgtgatacgcaaagtattttccaaatcagtgtttatgctaagaagatgagcagttgagctggacaattataagataacttcatctttctcctgtaaggacacttaaatatcagaaacctaagagaaacgggttattgtcgtaattcactaagttatt

SEQ ID NO: 118930 - DNA, 650 bp, Homo sapiens
gtggctcactctgtgtgagaaggaaaattaaataccaaagccatctataaagtagcaaaattgccctaaaagctgcaaattaggtcgtaatcatacatcaatgacagagaagtacatggaagacctggaaggatattctagaaatagctaccatcttgatggttcatctcttcttaattacttaagggaatttcgacaccttattaaaacagaggaagtccaaggtgaactctaaaaccctccttaagtatccaattctatgattcggtgtgaagcattatcacacttgtcccaagggaacttaaccagtaatttcaacgcttcagtggggagtcacacgtcagatggactcttgcgggccatgctctcaggtagtggcttgagtccccctgctcctccaacaaggccaccgtccagctattaatattactcccaattccctggacttgctatgtcctctggcgtgtggagtgcctggctgccgccttcattctctatctgactgtctcctgctcatgctcaaagcccacacccaatgtcaccttctgggggacgctggtcccaaacacctgccttcccaagccaagtcacagctgagccctgtgtccttagcaccctccaaagccactgtcttccctctccatccccca

SEQ ID NO: 118931 - DNA, 227 bp, Homo sapiens
tgctgggattacaggcgtgagccacagtgcttggcccatattttaaatcttaaacattgcttaaacattatgacatatctatatacagagatgccttgtttctcttaatagttttgttgtatctcattgtattgacttacatcattggctgtctccagtcttgctagtactaacactgaagtgaatatcctagtaagcacagcattttgtacctattaatgtgtctg

SEQ ID NO: 118932 - DNA, 217 bp, Homo sapiens
agtagccctttcccaatgtcatgatattctagtttgagaagagtggtctttgatcaagaaaggtggatcaaatttgtgtctatcccattgttgggagggaagctaaccaactggatgtcagacatcaggatagaaaaaaaaaaaggctgcaaaaagttgaaggcaatcaacatgaacaaatacacaattaagctctactgaatgcagcttcctagag

SEQ ID NO: 118933 - DNA, 250 bp, Homo sapiens
taccatccaaattctatctgacttaacagtatctgaccaactgtataaaaaacaagctaaaagttcctaatttaaaaatcaggccgggcaccgtggctcatgcctgtaatcccaacactttgggaggtcaaggtgggtggatcacttgaggtcaagagttcaagaccagcctggccaacatggtgaaaccccatctcttctaaaaatagaaaaactagccaggtgtgtgtggaggaaaagttaaatatta

SEQ ID NO: 118934 - DNA, 458 bp, Homo sapiens
gcaaaggcaccggggggccagccaagcatatttggggacttcgcagaagttcagtctgtgtagacaatgtttttggggaaaaagacggaaaatagagatgaggctgataagtgagttttgggactcctgtatcaggctaaggagattggactttgtgctttcaaagaggtttctgtgtgaaagcattgcatcccagttaggaaggtcactttggagagtgccctgaggatgggttttggtgggatgagaccagaaggcccagagagtctgactgaagtaaggagagacagagacaagggcgtgtcgccagtgatgatcatatccaggggcaggaacctccagttcttcataacccaccgaatgtttcgggaggaagaggagtgggattctttgaggatgagtcccaggttgcactcccaggctggctccgcagttagatccagatgatgcggctcccc

SEQ ID NO: 118935 - DNA, 828 bp, Homo sapiens
ggagcgcccagtggactcgatagcgctgtcctgggaacagaaccttcccggactgtgcacttttaaccctgcaggttctcagctgtctgccgtcagaaggaaagcattcacactccagttcccaggagactgcagccaggacgcttgggtttccaccacggattcctctgctgaggggctgctccgcggtaactttcctcccgagaagcacaggaatgaaacggcgatgagccccgtaggtgaagatgatcgtctgttcacctgcagttcacagaacctttgatgttactctatcgtctggatctcttttgcctgtgagggaggcagagaggtatttaggcatgaggcagcagaggtttagcaagaggtgctcctggagggccttgaacacccatcctaaaggggtcctggtgttgtcggtggtgagaccaggggtcaaggctgcactcaagcactaactctgtgaacctgactgctcagtagtttccatagctaggtaccacaccagcaatctgaaaagccttggacctccactccccaagcagctgcttcctggaatgaaaaagaaaggttcatagattcacaaactccctgcattggaagggaatttagaagtcacctctggcctgcccatatttcctgtgctttctgcctcaacaacatccgcccaaacactccagcctgcaagaaccttcttcacacctagccctcggggcccagccctctggaggtgcgctcccacctgctccagtgaaataggaccatcacctccttcattctagacatcatgctcctattaatgccccttagaattcatagggtgatttg

SEQ ID NO: 118936 - DNA, 699 bp, Homo sapiens
tgtacatggtgtgggacattccttattcctttggccctgatagccttgttaagcctggtatcaatgcacacatctggagtgcccatcttcatggcaaatttctgaatctctttgaatgcccacagagcatgcttcttgaagcccactccatggatgtgagctagtgacccaagtgtgttcttgggtcactaccttgttgatggcagaacagctcatcttcttgccacccttctttgcaggagccattctgccaggcccaagatggaaaggaagaacatgagggacggtgggagaaagaaggcctaaacttttaaaaagtggctgcaccattttacatttaagacattttgacacattgtatttttgttgttatttgactctctagataatttctgccatgactttttctgtaatgcacaaattgttttttgaagagttttaaatttcccaactaaaaaggcttttctagttatttttcttttataatgtctaacttggctgggcgtggtggctcatatctgtaatcccagtgctttgggaggccaaagcaggcggatcacctgaggtcaggattttaagaccagcctggtcaacatggtgaaaccctgccctctactaaaaatacaacatttgctaggcgtgttggcaggcacctgtagtcccagctattcgggaggttgaggcaggagaatcgcttga

SEQ ID NO: 118937 - DNA, 123 bp, Homo sapiens
ccaagagtctacatttgatctcccattcagaagtacttcttccccttttctaggtctctgggtcatgcctcctttcttttgagatatataaagccccatatgaattcatctgccattttgcct

SEQ ID NO: 118938 - DNA, 610 bp, Homo sapiens
ttttagtagagacgcagtttcaccatgttagcctggatggtctcaatctcctgacctcaagtgatccgcctgcttccgcctcccaaaatgctgggattatgggtgtgagccactgcgcctggcctgagagtagatcttaagtggtgagtggaagaccagaattcacagaattttaaagctggaagagacttcaagaaccagttcatttctcttatttcagagatcaggaaatagagccacaggcttgtcagtggtagaactgtaacaaggcctaacaatttcctcagtctgtgtgcctcctaccccattattctacccatcctataatttgggagaaaggagagagaggaggaaggcaagaacaactaaagagtaaagcttcaacttataataaatgcttcgaataggtgctcagttacacaggtaatgttagagggattttaacaagttcacaattcggttatgcttagttgtgtggctaactatgtacactggtaggaataatgatggaaatttatattaggaaatgtgtgattgcacctatagttggcctgataaccaggaagctgaaataatgcagcttttgttccctattgacactggcctagct

SEQ ID NO: 118939 - DNA, 263 bp, Homo sapiens
aaatgctagcagttatcaccacagtgggagccacagggagctctgaggataagcagggatgtcgagggatgggacagaacttgattgaaggcagacagacctccaaattcttgactcagacagaatgatcactgatccagcgagacgtcaggatcgagaggagtgtagcaaggagtcaggagggtgggcctgcgccagtgtcgccccgactctgttcagtaacatgaaggcaaacacagaagggcatgtgcggagacacacgt

SEQ ID NO: 118940 - DNA, 183 bp, Homo sapiens
tgggagatacttacctcatctttgaaactggtcttcatcaagttcataagttctgaagagaatcttggttcatagatcaaagaaagtaaggtcattgcttaattatgctagtttgtagttcctaaaataagtgccttagctttataaagtattgctggagtcatttaaagctatataaagtat

SEQ ID NO: 118941 - DNA, 125 bp, Homo sapiens
gtatttcttcttaaaaaattatacaatggctatatgactgtttatgtccacaaagtccagccagattacttttcaaagaaattttagcagtttgattgccaaattcctgtgatctccatattaag

SEQ ID NO: 118942 - DNA, 339 bp, Homo sapiens
tgacatgattaattgccagtagccttgaacagaaaattttcgggagtgtttgccttatgagttgccttctctaagcctagtgtggcatttctgaaactatttctagtggccactctataatttctccttaaagtatctcaaaatctgaaatctccttaaagtatcttacatctgaaggtctatctagcttgaaatgattttgcattaattctattggaagaaaatgaaatacctcaacttcctaacctattagaagttaatatataacatttttgggaatgttatactttcatttaaaaatatgaaatcgtatctgaactgttccttaagtttagggac

SEQ ID NO: 118943 - DNA, 534 bp, Homo sapiens
ggtgatggaagctgttttattgtcagcaagacttagactatgtccctgagctcactggggctgactgtgaccctgtgtacaaggtagccacatgggagaagcagatctacacatgctgtcgagacggtcttgtacgacgctaccagctttctgacctctgacttcttggaaagagcagtcccggttagtgaaaaggtttgaccctgatcaacaatgagcagaaacatcatcagtccttcccaaggaccatggcgtttaatgtcttgggcaccccttggaaatcacagaaagtcagctgtactggccgtgtggaactctcatcccaagacctactttgaactgagtaagaaggtcattgtgcccactgcatttgttccaacttctccttgtataaactcaccccagcaacacagggcaaggatatagatgcttttagtttgttcttaaaccagttttgttaaatgtttacaaggacctcagtactaaagcctgttctctggaggaaataaagaaaatatgtttggaggtgcctga

SEQ ID NO: 118944 - DNA, 906 bp, Homo sapiens
ggtgatggaagctgttttattgtcagcaagacttagactatgtccctgagctcactggggctgactgtgaccctgtgtacaaggtagccacatgggagaagcagatctacacatgctgtcgagacggtcttgtacgacgctaccagctttctgacctctgacttcttggaaagagcagtcccggttagtgaaaaggtttgaccctgatcaacaatgagcagaaacatcatcagtccttcccaaggaccatggcgtttaatgtcttgggcaccccttggaaatcacagaaagtcagctgtactggccgtgtggaactctcatcccaagacctactttgaactgagtaagaaggtcattgtgcccactgcatttgttccaacttctccttgtataaactcaccccagcaacacagggcaaggatatagatgcttttagtttgttcttaaaccagttttgttaaatgtttacaaggacctcagtactaaagcctgttctctggaggaaataaagaaaatatgtttggaggtgcctgaatatgaagaactttgttaaatactcttactccagcaaaaagttggtcaggacgatggaattccttcctcagcactccctgttgcctggccatagagaaggcctgcttggcagtagcaataaatgtcctgtaagctgccacctgggagagattcttatgcaggtggtaaccaactgtcccagtttgcttggaactaaggggttttctgtgacttgaaactttcaatgccaaaactggggcagtctcaaaccaacatgattggtcagcctatatgtaggtgaggaaactgaatcataagcattgtaaaggcattggctgtcaaagtgtggttcttagaacagcagcatcagtatcacctgggaacttgacagga

SEQ ID NO: 118945 - DNA, 354 bp, Homo sapiens
  misc_feature (1)..(1): n is a, c, g, or t
  misc_feature (7)..(7): n is a, c, g, or t
  misc_feature (12)..(12): n is a, c, g, or t
  misc_feature (21)..(21): n is a, c, g, or t
  misc_feature (29)..(30): n is a, c, g, or t
  misc_feature (38)..(38): n is a, c, g, or t
  misc_feature (47)..(48): n is a, c, g, or t
  misc_feature (51)..(51): n is a, c, g, or t
nggaganggttnggcgcgcgnggggcggnngagtgggnggggggcgnngtnagtccttcccaaggaccatggcgtttaatgtcttgggcaccccttggaaatcacagaaagtcagctgtactggccgtgtggaactctcatcccaagacctactttgaactgagtaagaaggtcattgtgcccactgcatttgttccaacttctccttgtataaactcaccccagcaacacagggcaaggatatagatgcttttagtttgttcttaaaccagttttgttaaatgtttacaaggacctcagtactaaagcctgttctctggaggaaataaagaaaatatgtttggaggtgcctga

SEQ ID NO: 118946 - DNA, 901 bp, Homo sapiens
gatcaagaaacagaaccccagctgggcgtggtggctcacacctgtaatcctagcactctaggaggttgaggtgggagggtcgcttgagcccaggagttcgagaccagcctgggcaacatggagagaccctgttgctacaaaaaaattttaaaaattagctgggcatggtggtgtgtgcctgtagtcccagctactgggtggagatggaaagattgcttgagcccaggaagttgaagctgcagtgagccatgtgtgcgccagtgcattgcagcctgggtgacagagtaagaccctgtctaaaaaaaaaaataaaggaaaataaaggaaaaaagaaaggaaacagaaccccatctctaccccagaagtccgtcatgtgtgctagtcgttgctgaaaagtgtttttatttctattcatgctcatgcctcttcagcaggagtaatattccaccccttctagaaggcatcttctggggaagcctgagttcactggtcttcctatttagtctcctgagatcctgctgccccttacgggtggtgtcccaggcggcctggctgtcggctcctctggttacttctacaaccagtgcatcctggagatgctggaggggcctgctgtagcagggaggtgggggaaaatggtcctccctggctcaggcatggagggtaacaacccctgctccctggtgtggccaacctgcagagccgagcttgggcacgatgctcacaaagtcaccgtctcctctctgccgaggtgaccaccttctgtcctcctagtcagcaggtgtcaggatggggtcattgcctcagaagggcatgaggggaaagaggaagggttggccaacttcggtggtagcaactgtccccttcttacatggatcatgcggccctaatggccactgtg

SEQ ID NO: 118947 - DNA, 909 bp, Homo sapiens
taggattataggcatgagccacggcacctggcctcggccaacaatcttaacaaagaagaataaagttgaaggattaactcttcttaattttaaaatttactacaaagctactgttatcaaaacagcgtggtactcacacaagacagacataaagatcaatggaatagaatcgaggtccagaaataaacctatacatattgtcaattggttttcaacaagggtggtcaatacaattcattgcaggaaagaatagcttcttcaacaaatggtgctgggccaaatagatacctatatgcaaaggagtgaagttgcactccttcacgataaaagacaaaaattaactcagaaggaatcaaatgcccaaatgtaaaagctaaaagtattaaactcttagaagaaaacataggcataatcttggattggttgatgttttcttagatatgacatcaaaactgtaagcaatgaagggaaaatagataaattggagtttgtcaaaatcaaaagctttggccgggtgtggtggctcacacctataatcccagcactttagggggccaaggtgggtggatcacctgaggttgggagttcgagaccagattgaccaacatggagaaaccccatccctactaaaaatacaaaattagccgggtgtggtggcacatgcctgtaatcccagctactcgggaggctgaggcaggagaatagcttgaacctgggaggcagagactgcagtgagctgagatcatgccattgcactccagcctggccaacagagcgaaagtccatctcaaaaaataataataataaaataaaaataaaagctgtctttcttcaaagcacatcaagatagtgaagtgacaatctacagaatggcagaaaatatctgcaagtcatatatctgataaggga

SEQ ID NO: 118948 - DNA, 1412 bp, Homo sapiens
agtagaaacgaggttttgccatgttggccaggctggtcttgaagtcccaacctcaagtgatccgcctgccttggcctcccaaagtgctgggattacaggcatgagccactgtgcccaaccaccctgtcacatttctaatgatcaaaagtttttactccctgttctgggaaattggagaggcatttcttatagagtccattgcacagtgccatgcttatgctcagtgattagtaatctgctgctgcaaatcaaatgactccaaagttaggagtttaaaacaacaaacatatactgtctctggggcaggaatttgtgtgtgacttagctgggtgcctgcagctcagggtctctctcggggctgcagtcatctcagggccccacgtggggagaatctgcttccaggtttgctcatgttgctgttggcaggccccaggtcctccttggctgttggccagagacatcagttctttgccacatgggtctctccctagggcagctaacaacacggcagttggcttctctcagagtgaatgagcgagagagagagagattgagattgagagagggcgtccaagactcaagccacattctttttgtaacctaatcttagaagtgacactaggtccagcccacactcaagggaggcacatcatagaggccattcgcctcatgcagccttgaaagatgatgggcaggaagtaggcattgaagagggtaagagtgggattggcaagcccagcaaaagaaactgcccgggcaaagccctcaaggcatggaatggcagggagtgtttctgaagggcaggagcctgtcttgtgacctgtgttttcttcctgggccccaggtggggcagggaatcagaaggggctggcatcagcagctgtacctcacccaatcccttaacttagacaaggaagaactgagcaggagctgaccagccaaggccacggtgactggcaagttgctgttgggttttagcatctgcttttcccaggtggaaaagaattccatgtgggaatttgcattcaagcctggttgtcccttgcacatctcctaactgatctctaagctcccttctgttctctcctcaccctgctccagtctttacttttcatagactgcactagaaggattgttctgaagcctggagtaaccaggccatgcccctgcctgaaacttgtcttggctcccagtgcctgagagtacaagctgggcctagcttcttgatgtggacattcaataccccactccccctgcctattgcccctgcctgtgtgctgaggaaacagcctggaaaggctgcctttccctgaactcctgctgggtcatgcctccagccacactgtccaggctgccccctgccttgaggccgctcctccagccgggcacagtggctcacgcctgcaacccta

SEQ ID NO: 118949 - DNA, 2716 bp, Homo sapiens
gaaggagctctcttcttgcttggcagctggaccaagggagccagtcttgggcgctggagggcctgtcctgaccatggtccctgcctggctgtggctgctttgtgtctccgtcccccaggctctccccaaggcccagcctgcagagctgtctgtggaagttccagaaaactatggtggaaatttccctttatacctgaccaagttgccgctgccccgtgagggggctgaaggccagatcgtgctgtcaggggactcaggcaaggcaactgagggcccatttgctatggatccagattctggcttcctgctggtgaccagggccctggaccgagaggagcaggcagagtaccagctacaggtcaccctggagatgcaggatggacatgtcttgtggggtccacagcctgtgcttgtgcacgtgaaggatgagaatgaccaggtgccccatttctctcaagccatctacagagctcggctgagccggggtaccaggcctggcatccccttcctcttccttgaggcttcagaccgggatgagccaggcacagccaactcggatcttcgattccacatcctgagccaggctccagcccagccttccccagacatgttccagctggagcctcggctgggggctctggccctcagccccaaggggagcaccagccttgaccacgccctggagaggacctaccagctgttggtacaggtcaaggacatgggtgaccaggcctcaggccaccaggccactgccaccgtggaagtctccatcatagagagcacctgggtgtccctagagcctatccacctggcagagaatctcaaagtcctatacccgcaccacatggcccagtacctgctccaggtgcgggctcagaattcccatggcgaggactatgcggcccctctggagctgcacgtgctggtgatggatgagaatgacaacgtgcctatctgccctccccgtgaccccacagtcagcatccctgagctcagtccaccaggtactgaagtgactagactgtcagcagaggatgcagatgcccccggctcccccaattcccacgttgtgtatcagctcctgagccctgagcctgaggatggggtagaggggagagccttccaggtggaccccacttcaggcagtgtgacgctgggggtgctcccactccgagcaggccagaacatcctgcttctggtgctggccatggacctggcaggcgcagagggtggcttcagcagcacgtgtgaagtcgaagtcgcagtcacagatatcaatgatcacgcccctgagttcatcacttcccagattgggcctataagcctccctgaggatgtggagcccgggactctggtggccatgctaacagccattgatgctgacctcgagcccgccttccgcctcatggattttgccattgagaggggagacacagaagggacttttggcctggattgggagccagactctgggcatgttagactcagactctgcaagaacctcagttatgaggcagctccaagtcatgaggtggtggtggtggtgcagagtgtggcgaagctggtggggccaggcccaggccctggagccaccgccacggtgactgtgctagtggagagagtgatgccaccccccaagttggaccaggagagctacgaggccagtgtccccatcagtgccccagccggctctttcctgctgaccatccagccctccgaccccatcagccgaaccctcaggttctccctagtcaatgactcagagggctggctctgcattgagaaattctccggggaggtgcacaccgcccagtccctgcagggcgcccagcctggggacacctacacggtgcttgtggaggcccaggatacagatgagccgagactgagcgcttctgcacccctggtgatccacttcctaaaggcccctcctgccccagccctgactcttgcccctgtgccctcccaatacctctgcacaccccgccaagaccatggcttgatcgtgagtggacccagcaaggaccccgatctggccagtgggcacggtccctacagcttcacccttggtcccaaccccacggtgcaacgggattggcgcctccagactctcaatggttcccatgcctacctcaccttggccctgcattgggtggagccacgtgaacacataatccccgtggtggtcagccacaatgcccagatgtggcagctcctggttcgagtgatcgtgtgtcgctgcaacgtggaggggcagtgcatgcgcaaggtgggccgcatgaagggcatgcccacgaagctgtcggcagtgggcatccttgtaggcaccctggtagcaataggaatcttcctcatcctcattttcacccactggaccatgtcaaggaagaaggacccggatcaaccagcagacagcgtgcccctgaaggcgactgtctgaatggcccaggcagctctagctgggagcttggcctctggctccatctgagtcccctgggagagagcccagcacccaagatccagcaggggacaggacagagtagaagcccctccatctgccctggggtggaggcaccatcaccatcaccaggcatgtctgcagagcctggacaccaactttatggactgcccatgggagtgctccaaatgtcagggtgtttgcccaataataaagccccagagaactgggctgggccctatgggattggtaaaactg

SEQ ID NO: 118950 - DNA, 1945 bp, Homo sapiens
gaaggagctctcttcttgcttggcagctggaccaagggagccagtcttgggcgctggagggcctgtcctgaccatggtccctgcctggctgtggctgctttgtgtctccgtcccccaggctctccccaaggcccagcctgcagagctgtctgtggaagttccagaaaactatggtggaaatttccctttatacctgaccaagttgccgctgccccgtgagggggctgaaggccagatcgtgctgtcaggggactcaggcaaggcaactgagggcccatttgctatggatccagattctggcttcctgctggtgaccagggccctggaccgagaggagcaggcagagtaccagctacaggtcaccctggagatgcaggatggacatgtcttgtggggtccacagcctgtgcttgtgcacgtgaaggatgagaatgaccaggtgccccatttctctcaagccatctacagagctcggctgagccggggtaccaggcctggcatccccttcctcttccttgaggcttcagaccgggatgagccaggcacagccaactcggatcttcgattccacatcctgagccaggctccagcccagccttccccagacatgttccagctggagcctcggctgggggctctggccctcagccccaaggggagcaccagccttgaccacgccctggagaggacctaccagctgttggtacaggtcaaggacatgggtgaccaggcctcaggccaccaggccactgccaccgtggaagtctccatcatagagagcacctgggtgtccctagagcctatccacctggcagagaatctcaaagtcctatacccgcaccacatggcccagtacctgctccaggtgcgggctcagaattcccatggcgaggactatgcggcccctctggagctgcacgtgctggtgatggatgagaatgacaacgtgcctatctgccctccccgtgaccccacagtcagcatccctgagctcagtccaccaggtactgaagtgactagactgtcagcagaggatgcagatgcccccggctcccccaattcccacgttgtgtatcagctcctgagccctgagcctgaggatggggtagaggggagagccttccaggtggaccccacttcaggcagtgtgacgctgggggtgctcccactccgagcaggccagaacatcctgcttctggtgctggccatggacctggcaggcgcagagggtggcttcagcagcacgtgtgaagtcgaagtcgcagtcacagatatcaatgatcacgcccctgagttcatcacttcccagattgggcctataagcctccctgaggatgtggagcccgggactctggtggccatgctaacagccattgatgctgacctcgagcccgccttccgcctcatggattttgccattgagaggggagacacagaagggacttttggcctggattgggagccagactctgggcatgttagactcagactctgcaagaacctcagttatgaggcagctccaagtcatgaggtggtggtggtggtgcagagtgtggcgaagctggtggggccaggcccaggccctggagccaccgccacggtgactgtgctagtggagagagtgatgccaccccccaagttggaccaggagagctacgaggccagtgtccccatcagtgccccagccggctctttcctgctgaccatccagccctccgaccccatcagccgaaccctcaggttctccctagtcaatgactcagagggctggctctgcattgagaaattctccggggaggtgcacaccgcccagtccctgcagggcgcccagcctggggacaccaactttatggactgcccatgggagtgctccaaatgtcagggtgtttgcccaataataaagccccagagaactgggctgggccctatgggattggtaaaactg

SEQ ID NO: 118951 - DNA, 1129 bp, Homo sapiens
gaaggagctctcttcttgcttggcagctggaccaagggagccagtcttgggcgctggagggcctgtcctgaccatggtccctgcctggctgtggctgctttgtgtctccgtcccccaggctctccccaaggcccagcctgcagagctgtctgtggaagttccagaaaactatggtggaaatttccctttatacctgaccaagttgccgctgccccgtgagggggctgaaggccagatcgtgctgtcaggggactcaggcaaggcaactgagggcccatttgctatggatccagattctggcttcctgctggtgaccagggccctggaccgagaggagcaggcagagtaccagctacaggtcaccctggagatgcaggatggacatgtcttgtggggtccacagcctgtgcttgtgcacgtgaaggatgagaatgaccaggtgccccatttctctcaagccatctacagagctcggctgagccggggtaccaggcctggcatccccttcctcttccttgaggcttcagaccgggatgagccaggcacagccaactcggatcttcgattccacatcctgagccaggctccagcccagccttccccagacatgttccagctggagcctcggctgggggctctggccctcagccccaaggggagcaccagccttgaccacgccctggagaggacctaccagctgttggtacaggtcaaggacatgggtgaccaggcctcaggccaccaggccactgccaccgtggaagtctccatcatagagagcacctgggtgtccctagagcctatccacctggcagagaatctcaaagtcctatacccgcaccacatggcccaggtacactggagtgggggtgatgtgcactatcacctggagagccatcccccgggaccctttgaagtgaatgcagagggaaacctctacgtgaccagagagctggacagagaagcccaggctgagtacctgctccaggtgcgggctcagaattcccatggcgaggactatgcggcccctctggagctgcacgtgctggtgatggatgagaatgacaacgtgcctatctgccctaaatcgaaggaccggtacttcgaagggtaaaccacatatcccgga

SEQ ID NO: 118952 - DNA, 2839 bp, Homo sapiens
gaaggagctctcttcttgcttggcagctggaccaagggagccagtcttgggcgctggagggcctgtcctgaccatggtccctgcctggctgtggctgctttgtgtctccgtcccccaggctctccccaaggcccagcctgcagagctgtctgtggaagttccagaaaactatggtggaaatttccctttatacctgaccaagttgccgctgccccgtgagggggctgaaggccagatcgtgctgtcaggggactcaggcaaggcaactgagggcccatttgctatggatccagattctggcttcctgctggtgaccagggccctggaccgagaggagcaggcagagtaccagctacaggtcaccctggagatgcaggatggacatgtcttgtggggtccacagcctgtgcttgtgcacgtgaaggatgagaatgaccaggtgccccatttctctcaagccatctacagagctcggctgagccggggtaccaggcctggcatccccttcctcttccttgaggcttcagaccgggatgagccaggcacagccaactcggatcttcgattccacatcctgagccaggctccagcccagccttccccagacatgttccagctggagcctcggctgggggctctggccctcagccccaaggggagcaccagccttgaccacgccctggagaggacctaccagctgttggtacaggtcaaggacatgggtgaccaggcctcaggccaccaggccactgccaccgtggaagtctccatcatagagagcacctgggtgtccctagagcctatccacctggcagagaatctcaaagtcctatacccgcaccacatggcccaggtacactggagtgggggtgatgtgcactatcacctggagagccatcccccgggaccctttgaagtgaatgcagagggaaacctctacgtgaccagagagctggacagagaagcccaggctgagtacctgctccaggtgcgggctcagaattcccatggcgaggactatgcggcccctctggagctgcacgtgctggtgatggatgagaatgacaacgtgcctatctgccctccccgtgaccccacagtcagcatccctgagctcagtccaccaggtactgaagtgactagactgtcagcagaggatgcagatgcccccggctcccccaattcccacgttgtgtatcagctcctgagccctgagcctgaggatggggtagaggggagagccttccaggtggaccccacttcaggcagtgtgacgctgggggtgctcccactccgagcaggccagaacatcctgcttctggtgctggccatggacctggcaggcgcagagggtggcttcagcagcacgtgtgaagtcgaagtcgcagtcacagatatcaatgatcacgcccctgagttcatcacttcccagattgggcctataagcctccctgaggatgtggagcccgggactctggtggccatgctaacagccattgatgctgacctcgagcccgccttccgcctcatggattttgccattgagaggggagacacagaagggacttttggcctggattgggagccagactctgggcatgttagactcagactctgcaagaacctcagttatgaggcagctccaagtcatgaggtggtggtggtggtgcagagtgtggcgaagctggtggggccaggcccaggccctggagccaccgccacggtgactgtgctagtggagagagtgatgccaccccccaagttggaccaggagagctacgaggccagtgtccccatcagtgccccagccggctctttcctgctgaccatccagccctccgaccccatcagccgaaccctcaggttctccctagtcaatgactcagagggctggctctgcattgagaaattctccggggaggtgcacaccgcccagtccctgcagggcgcccagcctggggacacctacacggtgcttgtggaggcccaggatacagatgagccgagactgagcgcttctgcacccctggtgatccacttcctaaaggcccctcctgccccagccctgactcttgcccctgtgccctcccaatacctctgcacaccccgccaagaccatggcttgatcgtgagtggacccagcaaggaccccgatctggccagtgggcacggtccctacagcttcacccttggtcccaaccccacggtgcaacgggattggcgcctccagactctcaatggttcccatgcctacctcaccttggccctgcattgggtggagccacgtgaacacataatccccgtggtggtcagccacaatgcccagatgtggcagctcctggttcgagtgatcgtgtgtcgctgcaacgtggaggggcagtgcatgcgcaaggtgggccgcatgaagggcatgcccacgaagctgtcggcagtgggcatccttgtaggcaccctggtagcaataggaatcttcctcatcctcattttcacccactggaccatgtcaaggaagaaggacccggatcaaccagcagacagcgtgcccctgaaggcgactgtctgaatggcccaggcagctctagctgggagcttggcctctggctccatctgagtcccctgggagagagcccagcacccaagatccagcaggggacaggacagagtagaagcccctccatctgccctggggtggaggcaccatcaccatcaccaggcatgtctgcagagcctggacaccaactttatggactgcccatgggagtgctccaaatgtcagggtgtttgcccaataataaagccccagagaactgggctgggccctatgggattggtaaaactg

SEQ ID NO: 118953 - DNA, 2423 bp, Homo sapiens
gaaggagctctcttcttgcttggcagctggaccaagggagccagtcttgggcgctggagggcctgtcctgaccatggtccctgcctggctgtggctgctttgtgtctccgtcccccaggctctccccaaggcccagcctgcagagctgtctgtggaagttccagaaaactatggtggaaatttccctttatacctgaccaagttgccgctgccccgtgagggggctgaaggccagatcgtgctgtcaggggactcaggcaaggcaactgagggcccatttgctatggatccagattctggcttcctgctggtgaccagggccctggaccgagaggagcaggcagagtaccagctacaggtcaccctggagatgcaggatggacatgtcttgtggggtccacagcctgtgcttgtgcacgtgaaggatgagaatgaccaggtgccccatttctctcaagccatctacagagctcggctgagccggggtaccaggcctggcatccccttcctcttccttgaggcttcagaccgggatgagccaggcacagccaactcggatcttcgattccacatcctgagccaggctccagcccagccttccccagacatgttccagctggagcctcggctgggggctctggccctcagccccaaggggagcaccagccttgaccacgccctggagaggacctaccagctgttggtacaggtcaaggacatgggtgaccaggcctcaggccaccaggccactgccaccgtggaagtctccatcatagagagcacctgggtgtccctagagcctatccacctggcagagaatctcaaagtcctatacccgcaccacatggcccagtacctgctccaggtgcgggctcagaattcccatggcgaggactatgcggcccctctggagctgcacgtgctggtgatggatgagaatgacaacgtgcctatctgccctccccgtgaccccacagtcagcatccctgagctcagtccaccaggtactgaagtgactagactgtcagcagaggatgcagatgcccccggctcccccaattcccacgttgtgtatcagctcctgagccctgagcctgaggatggggtagaggggagagccttccaggtggaccccacttcaggcagtgtgacgctgggggtgctcccactccgagcaggccagaacatcctgcttctggtgctggccatggacctggcaggcgcagagggtggcttcagcagcacgtgtgaagtcgaagtcgcagtcacagatatcaatgatcacgccccctggagccaccgccacggtgactgtgctagtggagagagtgatgccaccccccaagttggaccaggagagctacgaggccagtgtccccatcagtgccccagccggctctttcctgctgaccatccagccctccgaccccatcagccgaaccctcaggttctccctagtcaatgactcagagggctggctctgcattgagaaattctccggggaggtgcacaccgcccagtccctgcagggcgcccagcctggggacacctacacggtgcttgtggaggcccaggatacagatgagccgagactgagcgcttctgcacccctggtgatccacttcctaaaggcccctcctgccccagccctgactcttgcccctgtgccctcccaatacctctgcacaccccgccaagaccatggcttgatcgtgagtggacccagcaaggaccccgatctggccagtgggcacggtccctacagcttcacccttggtcccaaccccacggtgcaacgggattggcgcctccagactctcaatggttcccatgcctacctcaccttggccctgcattgggtggagccacgtgaacacataatccccgtggtggtcagccacaatgcccagatgtggcagctcctggttcgagtgatcgtgtgtcgctgcaacgtggaggggcagtgcatgcgcaaggtgggccgcatgaagggcatgcccacgaagctgtcggcagtgggcatccttgtaggcaccctggtagcaataggaatcttcctcatcctcattttcacccactggaccatgtcaaggaagaaggacccggatcaaccagcagacagcgtgcccctgaaggcgactgtctgaatggcccaggcagctctagctgggagcttggcctctggctccatctgagtcccctgggagagagcccagcacccaagatccagcaggggacaggacagagtagaagcccctccatctgccctggggtggaggcaccatcaccatcaccaggcatgtctgcagagcctggacaccaactttatggactgcccatgggagtgctccaaatgtcagggtgtttgcccaataataaagccccagagaactgggctgggccctatgggattggtaaaactg

SEQ ID NO: 118954 - DNA, 336 bp, Homo sapiens
gccagggctctgagcccacctatcattctgtactgcgaagtccaggcgactccccgctgagatctgaggacatgccctctcccagcttggcaaaggaggccctatcatttggatgaagggagaagctgggcacggaagatcctagtagctgtggctagggtctagggccttggactcaggacactgatctcctgggcttgacagggtggaggagcagagggtggctgagggagaacctggtgatttgctttcctggggtctcctctttcctgggcacaagatccctgtgtccctgtcttgccagaccctcactgatggtacggtctctagcctttg

SEQ ID NO: 118955 - DNA, 553 bp, Homo sapiens
gctctgagaggtcccctttcttgcccacgatcgcacctccttgggtcaagcgattctccctcctcggcctcccgaagtgctgggcttacaggcgggagccactgtgccctgcctgtgttgtctttctttaagcttagagtcttgggttttattctcgcaggtaggtaatgagcttgtgcgtcagcttggtctgtttgaagcttgtttctaagctttgtttgggcagctctccagcacctctagagaagctccagggatagagcagcccaaggcgtgtggcctctccagggcttcagttggagttttgtgtctttgtgtcttcggtaaggtcttgccacactggctttttggaagtccagtatcttttagcattcctctagaatttgggttcagctcatagttttgtttttttttttttgaggcagagtctcactttgtctcccaggctggagtgcagtggcgcactctcggctcactgcagcctccacttcccatgttcaagcaattctcctgcctcagcctcccgagtagctgggattacaggtgcccgcca

SEQ ID NO: 118956 - DNA, 698 bp, Homo sapiens
accgtgccaacgccggcggggctgcaagcagggccactctgagcaagcaagggagcccagagccgctgttggccctgcccaccaactggccagagggaaggtgagctccagaagggaagggagttctttcacagctttctgtctctgtatctcctgtgacttgaatggactcagcacacagcaggcctgagtgaaggatgcttgtggttgctatggcttacatgacaacgaattgtctgtaatcctacaggactatggcacatgaaagctggaagcgcttctttccgactgcatcgcccagcaccagagcccgagttctgtaaagctctgttaaaggcacatgagctgtgctggcttcaactgccctgaacttggataagctgggccgctgatggacccttcccaaccggttgttgctgccttggtttcccgacagtccactgtgctgaccctgcagcagggactcccagctttgcatcaactccattcaacacctactgtgtgcagggaccagagggtgtggaggtggcattccctgctttatcttgataagtaaacgtttgtctcctgcccactcatcagtgaagcagaacaactacctagcagtctcctgggagccacccctccagaacctctggatgtcaacagacaccatctacttataggattcagccagcacatgtgtagactggagctgc

SEQ ID NO: 118957 - DNA, 316 bp, Homo sapiens
cctgattctcagaaactgagtgagctgggattacaggtgtgagccattgtgcccagtctgggtctgcttgttataactaattaactgtagtggtaatttgtggtggtgttttgttctgtttttttagtgtgtgtgtgttttactggtaaaagtaatacattaataatttcattttacacagtttaggaggtggggagaaaacacttctgattccatggccccacctcaagcaccaccatttgaatcattttggggctaatttttaatgtgcaatccaaggtgaatgaagatctctcagacacatgcaccttaattt

SEQ ID NO: 118958 - DNA, 339 bp, Homo sapiens
taatggtttgcctgaaggttttgagaaacacgaatgatgtgttacatgctttgtcttttttggagaccatttttgtgttggtaatctcctaaatgagaaggatgttagataatatattgtctgtttacctaagttaaagggcctttttattgctcctagagaatctaaggatgttaagaacatgcttctggctgagtgcagtgattcacgcctgtaatcccagcgcttgggaggccaaagcaggaggattgcttgaggccaggagtttgcgatcagcctgggcaatatagcaagacccccatctctacaaaaaataatttttaaaaattagctgggtgt

SEQ ID NO: 118959 - DNA, 343 bp, Homo sapiens
gcacgagtcaatagccaggtacgatcactcccttcattcaccctgggacttgtgcataggccagactcccgggatgtcagccgcatgtgatgtggagataactgtgatcttattatctgaaatgtttgaatacggagagggtcccagtcttcattagaaagaaacttaaccaggacagtaaatatgttcaattcctcttaaaatgtccaatttactgataagtggggcacattttttttcatttaaaaaaaattggaatggccaccttaaggcaaacatttgagaagaagaaaaataatacaaatatattacttacaaaacaatacaaaagtgtctcagacca

SEQ ID NO: 118960 - DNA, 193 bp, Homo sapiens
attggggtgctttaaattctcatcaaggaactcatcttttggagtaagatactgtgtctccgggaggcctttgctggaaagaaaatacatttgctgtgaaagttcataaaggtatttgtctccactctcaggagtggcttgattggtttattagaagtatttgctaatgtttcagaaagccgtgttctgagaa

SEQ ID NO: 118961 - DNA, 192 bp, Homo sapiens
gacgggttactgcgtgttggagagtctggtggagttttatatactgaaatctacattgacgtgatgtagacaggcaagatggcgagagaaaggacaagaattccactgtggtgaacgagagctgacacccatctgccaagtgtgtcacatcccccagaaaaatgctcatttctcccaccctctgaacccacc

SEQ ID NO: 118962 - DNA, 286 bp, Homo sapiens
cgtcgactttttagtaagactttgaccccgacgcaggcttcagtgattgccgcggatcagaagcctcagcttcccgccaggccctggccgtagcggtcaggaagagctgagcagtttttttgggagaattgagggagcgtcgccaggatgcactgagggtcggaggtggagccggcgcggctcagtgcaggcagtgccaggctggatgctggaaagccagcagcacctctcccggtggctcctgggaagttccacgtccttgcctggtcacagaggcccgggaatc

SEQ ID NO: 118963 - DNA, 435 bp, Homo sapiens
gccggctcctgtcctggtcagcctgatgtcagctgcacgttggggtcagcctcggtgctgtgtcttcatgccagagcaggggccaggtgtgggcagctcagtgacaccctcccgagggctgggcgatcgtgtgcactctcaagcctctactggaaggcttggccctctcaggggccccctgcccctgtgcattcagccactggggttcgtgccctcagcttcccgccaggccctggccgtagcggtcaggaagagctgagcagtttttttgggagaattgagggagcgtcgccaggatgcactgagggtcggaggtggagccggcgcggctcagtgcaggcagtgccaggctggatgctggaaagccagcagcacctctcccggtggctcctgggaagttccacgtccttgcctggtcacagaggcccgggaatc

SEQ ID NO: 118964 - DNA, 527 bp, Homo sapiens
aaacagtgaggatcgaggaaaacaatctggactttgagtggttgtttaccacttgtagggttgttctaacatggtgtttcagcgcagggctttagttctgttcctccaaccatgcccttattgccaagtatttttccccatttccctttccaacatgttttaccagttccaagaggatttgcatttagtgaggaagggggaagatcctaaatcattgcagaatttaatttttgtacacttttcaaataacactgtattgattatcttaatggtcattctgcattcctattcctatttctcctctcaaagatctcactccaagcaactgatctgcttcatcgttagtaagaggtctttggatatataaggatgtttgctagtccttgccaggtagatgtgagacctgaagcatacctgctcattgcatgccctgccacactcttggtttcctacttttgacacagtaggacttgttaggatacaaaactgtggggagttggcattttatatgcatgttaatttttgcc

SEQ ID NO: 118965 - DNA, 289 bp, Homo sapiens
gggaacgtggctgggaggcagctgttcctgtatcctaacatctagacgctcattcataaactttgaccctcacaatagcccagagagaggcgttcctagccccatttaaagagtgggaaaaccgaggctcaggaagtaactccttgagcacttaggctgtcccatgtgctgtcccagcccctgcatcgcaacatgacaagtgtatcaccctcattttgtacacaaacaaaggtccagggagattaatgtccaaggctatagcaccgaagctgggattcaaaaccaggac

SEQ ID NO: 118966 - DNA, 661 bp, Homo sapiens
gctcgacatctaaaggatcccctttaccacctctagtatcaccctccactgggctccagtgcacttaggatacagaacatggtctcgaagacattcgtctgtaaaggaatgctgcctcattttgggacagcccccgatataaatcaggatgggccttctttcaacatcttggactagcctagctttcccactgctgggccctcacacacgctgtcctcttgtcaggagcattcttccctccagtcctcagctgcccacctacttttccatcctttagatcctgactcaaacatcgcttctttacaggcaccttccttaaatcttaattatattaggtctctccgttagactctcaggtagtttttttcctcactgcatttgccaagtttataatcatgtatctgtagacaacaagagggaaggctcgtgtacagggtggcatttgaggggatagggtaagggcaaacactggagggccactgaggtttctatgtaagaggtatacgtaaggcaggattctgttacttcaattaatcctccttggaaaggcaacatgagcaaaattaagtcttttattccaggcagttcattttcttttgtaaatctctaaaataagcctttagaaatgaaaccaagttttttattccaggcagttcatttt

SEQ ID NO: 118967 - DNA, 465 bp, Homo sapiens
cagtgaccttctattccattccacttcatgctccccaggacataccctgacctttgtcattccctccacaattacatatttacctccacaatcacaaatttagacatctcctatcctaccaatcccctgtccttgccaaaagcttcccaccccaggaatcattaattctttcacctgttaactgtaatccacagattctcccattttcttcccaactaccagccctcttatcttcactggcttcttactcagcttaagatttaagagccatcaccatcctcactctcaagcaatcctctgcaaatcccctgtcctctcccctccaaaatgcccatctagcaaagctaccacaggaagcatcattcacatttgctcaacttggacttgagggtaccagtaggtaggcattcattcactcacacgaatattcttctgcagaaagggcactgtatcaggccctgagta

SEQ ID NO: 118968 - DNA, 405 bp, Homo sapiens
gttcaaagtttattttttgtattttttccctaaaatcaaatccaagattgtgtcatttctgtgtaatggaccgttggctatctgatgcaactggaagttcttgactcacttgccacatggctcaaataattacccgctcccttcccggtgctattttgattgacattttgtcgtatatatggcccttacagaggcagttaatcctcgttttttgacccatatcctcaggattttgatcttctttcagttaatctctttatgttaattctttcttttttctctttatgttaattcttaatgcaacatcaatgaaacttatagttataaatcttttgggaaaagtggtttgcacttccactgaattacagatctgagatatgggtgaatctttaaagtactggttca

SEQ ID NO: 118969 - DNA, 586 bp, Homo sapiens
  misc_feature (522)..(522): n is a, c, g, or t
  misc_feature (524)..(524): n is a, c, g, or t
ctcctgcctctttgtctgccccttgcttctgtgggggcaagtgagtcagtgtgagctcagcagagagtgcaattaaacatcagcaagtatgatcccaccagtgtggaatttctaataattcagtcgtggctctcctactgtgactccaggaaacaaagtctgaatctctttttccacgagagtttgaagaactgttgcctgaaattagtgggtttcttcaaagccaggcttttgatgtgctttcaacttttgcatccagcatgaacttgttagggtagaaaatttgcttatttgggatcaaacagtatagagggtgggctcgctgcaaattgtcacttaacgtgttcatctatgtaattattcctgctcagccggactcaggcatttcaatatctgagccaatagcctgtgccttctagtgaatttggggtttggtattgggctctttgttcatctctctgagatactattcagcatgctacattctgacacatggacatgtttctccccatccctttcttngnagactctcttaaacttttaagggcattatatctgaaataagagcaattagtgacaatagctt

SEQ ID NO: 118970 - DNA, 364 bp, Homo sapiens
tgcatgccacacatgcacactgtccaggagcccaaggacaggtccaccttgcctaccactgattcctgtgtgcatctcccagaggcccaggcactggcccacccagcctgctgctgccagtcagtaccagcacgccacccaggggcctggggactggcccaaacagattgctgttaccaccaccctgtccaaaaaaaaaaaagacccaattgtatgctgcctatcagaaattcacttcacccgtaaagacacacatagactgaaaatgaatagatgaaaaaaaaattccatgcaattccataaaattggggaaaaaatgactgttataagtgactgatatcctgcatgcttttatttatttatt

SEQ ID NO: 118971 - DNA, 538 bp, Homo sapiens
tctcagaggtggcagacgtgtccaaccagaggcatatagtccagctagactcagggctggcagtgaacgatttcaggacttagactaaaatgactgtggaaggttctgatgtctctgtcgaaaatcagaagaacagaagcacagctatctgccttctaaacacatgcttctctgtaagataaacatcaaaatatcagattgcttgggacacatctagatgtgtcctaaaattgccaatgcccagcccagtacagcccagtgaagcagattctaagggcaggctccgctgcctaggtggttctcacgatcgctaaacagaacaagctcctgcttccattagtaagctcaattcacaagcaaaacaaaacaaaacaaaacaaacaaacaaaaaacaatgaaaagctccagctgagaacagtggttctgcatttcagctgcaggttaggatcacacagagtgctcttttcccagccctaacactcagaatctctcccttgtaaagctctctagagagcttagcatacagccagatagagaa

SEQ ID NO: 118972 - DNA, 279 bp, Homo sapiens
acaagtctcagaaaattttttaaaattaaaatcatatcaagtgttcttcaaccacaatgcaataaaacaagaaattatgacaagaatttaagaaacctttcaaatacattgaaattaaacaacattcttctgaagaactgatggatcagtgaataaattaaggaggaaaatttttaaattcttgagataagtgataacgaatacaacatatcaaaacctgtaagagatagcaaaggctgttctaagaatgcagtttatagcaattaattcctacatgga

SEQ ID NO: 118973 - DNA, 344 bp, Homo sapiens
actcagtgaaggggaaacgtctccaggctcggaggtggactcagcgcggggggagcgtctccacgctcggaggtgggctcagcgcggggggaacgtctccaggctcggaggtggactcagcgaagggggaacgtctccaggctcggaggtgggctcagggcgggcggaacgtctccaggctcggaggtggactcagcgaggggggaacgtctccacgctcggaggtgggctcagcgcggggggagcgtctccaggctcgcaagtggactcagcgaagggggaacgtctccaggctcggaggtggactcagcgaggggggaacgtctccaggctcggaggtggac

SEQ ID NO: 118974 - DNA, 466 bp, Homo sapiens
gtgccagtgatagtcttggtggaaacagaagaagaaaagacttttgagcaaaatctggatatgattaaatgctggatttgcccaggaattgtttaggttttacagctaaatgttattgttatttattaaattcctgtagaaaataacttctattgtaaatttgaaattttatagaccctaaaccccttttccctatgagagcagttatattttataaaagttgtggattacacaagatatcttagaaatgcaaatattgtgtaatagcagaagagattgtgcttgctaaattttcctggatcctgtcaaacaaacacttaataacttatattaattttggttgtgctcaaatatgttcttattgaccttgtttatttttcacattttttaaaattatactttaagttctgggatacatgtgcgggacatgcaggtttgttacataggtatatacgtgccatggtgg

SEQ ID NO: 118975 - DNA, 878 bp, Homo sapiens
gtggaactaaactgtaaacaaagtttgtgttattattcagataaagcctctcaggtaataaaagttgttttggagcagcctccagaagaataggtagtagccagtctgggtgtggtgttgacttttaatatcttctgcagtgattaatcttccctggttgtttgatgagcttcctaaagaggtggatcaagacaattgcaatccttctggaaaatcttcccttggtcagatacatgaacctccctgcatttcaaaaaggaaagaggtggtggcgggctggatcaggagaagatcagagagagactttgattctgaggcttttaaatcacatttgttcaaagcgctcagcatgccaaagggccatattttgaggatttttttctgaaccccaacagaggatacagcaataaggcgtgatggctgcctgaaaaatcaggatgtgttttctccccaggaatcaaatcaaccagcaccttgatcttggacttctcagcctccaaactgtgggaaataaatttctattgtctaagccacctagactggtattttgttaggagtattttactttggtaccaaggatggtgtgctgccataagcaaatatctaaaaatgtggaagtggctttgaaactggataatgggtagagcatggaagagttttgaggtgtgtgctagaaatatggatgttaaaggcaattttggtgagggcttagaaagaaaggggagagctggagagaaaaccaccatctttgtagagaatacttaagtaatcatgaatgcaatgctggtagaaatatggacattaaaagcggttctggtgaggtctcagaaggaaatgagaaacaggttattagaaactggaggaaactgctactttat

SEQ ID NO: 118976 - DNA, 332 bp, Homo sapiens
cctgagtatctagcgctgggctcagggctgggagaagcacctggcttgctgggcagctctttggaggcaggaacagttggtgcaggtttggggctggtgggggatgatggagagggacagggagagaggaagagcagtttgagttgggtccaaagaggttagcgtactccatgggtgcatgggtgtctttagtttgtcttcatggagccctaaaacagactttcatatgatttaaccacagttctttctctgagggtacaacgctgcttggtcatggatttatttttctgaacaagctattattcctcattttgttcaaatcttgtaagctc

SEQ ID NO: 118977 - DNA, 440 bp, Homo sapiens
gcacgaggtggtgatggttgcacaactctgtgaatatactagaaaccattgaattaggccaggctcagtggcttatgcctgtagtcccagcactttgggaggccaaggtgggtggctcacttgagcccaggagttcaagaccagcttgggcaacatggcaaaactttatctctacaaaaaatacaaaaattacctgggcatggtggcatgagtctgtagtcccagctactcaggaggctgaggtgggaggatcacctgagcctgggaggtggaggctgcagtgagatgtgatcgcgccactgtacttcagcctgggtgccagagtaagactgtctcaaaagaaaaaaagaaagaaaagaaaccattgaagtatacactttaaatcactggattatatggtatgtacgttatttcacaataaagctgttttatttttaaag

SEQ ID NO: 118978 - DNA, 719 bp, Homo sapiens
gagggaaagttaagggaaaaggcatgggaacagtggtctctgggaaggtggcagggtccagcaatcactagtaaaggaggaagaaagggggatggggcatctgagggatcttcatctgtgtcatgattctgcttgagaccaggcctgcttccacttgcccaccatggagccaagaagctttagaggaaaaatgttccatcctggatgattttcctcggcccctgtgctgccaacaatggagacatccagagctggcagaggttggcaccagctacctgaagcctaataagtgcagcccttcaggccctaatccccagtgtttagccctctgtctcctggccctagctctaacaataggtgctacacacacagctatacttgaaggaagaggccactcaccatctagcaaaaaagaggatggttaggaaaggacatagatgatgccaggcgcggtggctcatgcctgtaatcccagcactttgggaggccaaggcaggtggatcatgaggtcaggagttcgagaccagcctgaccttgatgaaaccccatctctactaaaaatacaaaaattagccaggtgtggtgatgtgtgcctgtaatcccagctactcaggaggctgtggcaggagaatcgcttgaaccagggaggcggaggttgcagtgagctgagatcgcgctaatgcactccagcctgggcgacagtgagactctatctcaaa

SEQ ID NO: 118979 - DNA, 1554 bp, Homo sapiens
aaaaattttatcttttagtggtaagaaactgatctgatttattttcttctccaatgagttgactcattggatgattaagtgaagtatagacatagcaatatgtgctttaattttacaaagtcattttaccatatcacagagaattggcctccatgttaggtaacaatatttgttcatagtgttgtttatagtttcacttacagttgatcatagattaaaagctgatatttttcagtatttctatagtactggcaattttatcagttggcaatattaaattgtactgacacagtattcctagataggacgtgtaaagctggctggtgtaatgaagagaggcgctgaccttggagttagaagactaggtttctgcatcataatctgccactaaatagctttgggcatgtatctctttgtcatgctgtgacatattgtctgactgtgacaacatctgtgactctggttagaccttgacaactgatccaagaaaatctgaccaacatacctggttactaatggaaaatatgcttttgctaacaagcagagattttgagtacaataattttgtcagttgtgcattgcttatgatgaatgccatgaagaatacatattttttggctatcccacatcatatataactgtcaatcatacctgttcaaattctgattgtccattctgtataagatccttgcagattaaaggaagctttccaactactggaaagagagctgtggagctcatttctaccaatatattactatattaactggaacattatgttactgtattaaattagaaccattcatagctgtctatttagtgacagagttccttcctttttttttctttttttttttttaagaattaggtgaagtaatgatttgtttctcttgctagattgtaagctccatgatggcaaagactatgtctgccttgcttccatttgtaactaaaatctagcagaatgcctaggctaacaaaaaatttttggttaagtgaaaaaagataataaattaattccctcatctgttaatctattggcatgtcacagaattatcatctggtaccagtgaaagaattacttaaagtttgtatgacaactgttatttcaatttatacagatgattcaggattgagtaaaggttgaattaagacatttggtcaggtgtaatgctcaataaattgagcattcgctgagattagtaaatgctgttatttcagtggattgcaattatttaaagtctggtgtatgtaatctttattgtagtccactttaatcaggcataccagtgatctgtaatagaatcatgccacaaagagatttatttttacactcagaaaaattctcatatgtttggttgtttgcttctagacagtttgtggattaggccaggtgcagtgcctcacacctgtaatcccaacactttgggagagtgaggtgggagagtcgcttgaacccaggagtttgagacttgcctgggcaacatagtaagaactcgtctccattaaaaaaacaaaaacaaaaacaacctttttaaacctttttttaaatgt

SEQ ID NO: 118980 - DNA, 750 bp, Homo sapiens
agtacgtataatagacccatacgtctattatgacagattcctcctatcctgttttaagaattaggtgaagtaatgatttgtttctcttgctagattgtaagctccatgatggcaaagactatgtctgccttgcttccatttgtaactaaaatctagcagaatgcctaggctaacaaaaaatttttggttaagtgaaaaaagataataaattaattccctcatctgttaatctattggcatgtcacagaattatcatctggtaccagtgaaagaattacttaaagtttgtatgacaactgttatttcaatttatacagatgattcaggattgagtaaaggttgaattaagacatttggtcaggtgtaatgctcaataaattgagcattcgctgagattagtaaatgctgttatttcagtggattgcaattatttaaagtctggtgtatgtaatctttattgtagtccactttaatcaggcataccagtgatctgtaatagaatcatgccacaaagagatttatttttacactcagaaaaattctcatatgtttggttgtttgcttctagacagtttgtggattaggccaggtgcagtgcctcacacctgtaatcccaacactttgggagagtgaggtgggagagtcgcttgaacccaggagtttgagacttgcctgggcaacatagtaagaactcgtctccattaaaaaaacaaaaacaaaaacaacctttttaaacctttttttaaatgt

SEQ ID NO: 118981 - DNA, 276 bp, Homo sapiens
ggtaagcaataaaagtcagacagagatcacgcaagactttgttgaacatggcaaggagttatttttttcccagctgcaatggggagccactggaggaatttaagcaggagagtaacatgatctgatttacatttttaaaatatcactctggctgctgtgtggagaatggattatcagagggaaggacagaaacagggagaccatttaagaggctagcacacaaatccagcaagaaataaaactactttgaactacgatactaatagtgaagagggg

SEQ ID NO: 118982 - DNA, 193 bp, Homo sapiens
agactccaaccaaaaaaaacaaaaacacaccagttgactctgtatttacaaacatgtgaattagccagccccctaaagaaattcactatatccaggggagtactaaataaacaccattcctaaaaacaaaaacaaacaaaaccgtgcagctagttagttatatgccactaccattctaggcaagtagatgaga

SEQ ID NO: 118983 - DNA, 437 bp, Homo sapiens
agacagtccccactaccatcctgaagcgtggcagccccacagggcagctagacccagaagagcagcattcacagtagtctggccttcagggactcctgcggctaggggaagagggagtgcacaacattaaggaggcatcctgtgggacagaagaatccagatggcaggtcttgagtaccaaactttccacatgtgggaagtttctttcagcagaggcactggtgcagtgctgagctcagcaagaaaagtctgcagctctcccccaacagtcaggcagcccgggtgctcatgaaagatctttgagatggaaacttctcccccttgctcgccactgcagacacagttgaggcttctcccatgggagcttagcatgagtgtacctgtagacaccctttctggaacatttcagggtgactgcttttccacagaaggagcat

SEQ ID NO: 118984 - DNA, 317 bp, Homo sapiens
gagtttgttcctgggcagccctactgtggtcctacggtaccttccttcactgaagcacccttgcagggcccagtgaccaaggaagaatcagagaaaaagcaaattgccatggaaacaaagaagcagctgtgcccctttgctgcagtgggagagtgctgatatggggagaactgtgtgtatctccacggagattcatgtgacatgtatgggccacaggtcctgcatccgatggatactgcccagagatcacagcgtataaaatcgtgcattgagtcccatgagaaggacatagagctctcatttgctgtgcagcgcgg

SEQ ID NO: 118985 - DNA, 547 bp, Homo sapiens
tgcattgcagaacaggcagaggtggcgcacaatgattcccatggaatcattatggatttgtcccctaaggagatgtttagcttgaattgcacctctcagtctgtgtgccatggccacactatgttcaggtggtctaaacaaaacagtcagatggtagaaatgctaagaaatacagcaagagttcctgttatctggaaacatggcagtatagtggcacctcaacctcaactgatatggcctgctctaggagctaaacataaggatttgtggaaactgttaatagctcttaataagataaaatttgggaaagaataaaaaagcatctagaagaacactctacaaacttgtctttggatattgcaaaattaaaagaacaaatatttaaacatcccaggcacagctgaccttaatgccaggaactggagtgcttaaaggagctgcagatggattagcagctagtaacccattaaaatagataaaaatacttggaggctctgtgatttcaatgatgattgtgttattaatctgtgttgtttgtctttgtgtg

SEQ ID NO: 118986 - DNA, 247 bp, Homo sapiens
tacattgactggaaacctgaactgaacaggcacaggggaaaatccctgatttttcaaatcataatcctgactttatgtaggcttgcagacaaaatgtatactttaggtgttcacaaaaacctcaagccaaaaagttgattgaagatttaaagtgcatttgggttggtaattctcccagacacccaacagaaatcctccttttttttcttttcttttcttttttttttggggggggggggaggggggg

SEQ ID NO: 118987 - DNA, 371 bp, Homo sapiens
agggtcggcccgcattaaggcgcacatctaggttttgctgtgttgcccaggctagtctcaaactcctgagctcaagcaatcctccggcctcagcctcccaatgtcctgggattataggtgtgagccactgtgcttggcctgctggctgtttatcagtcctcaaatagaagttccagcttcagagggccaaggtcatgtgatgggagccaggggcttggagttctgagggaagaggagtgaagtattgggggatgtggcagtatcactgacagtgaggttttttggaggcttttttggtctgatttgtgagattgatattgtccttaatgataaggaaacaaagaaaatggcagaagtgaaaactgaaaatg

SEQ ID NO: 118988 - DNA, 864 bp, Homo sapiens
cactcctgcatcctctctcacctctctcctgcgtcctctctcagccattcagcactctcacgggatggacagagcagtgttcatgcagtgggtaggggagaatttatgtgaaccaacgttgagagacagtgccccattgagatgaatgccagtatgctgttgtgagatccctcttaggaagctaaagataatcaattaacattaacctatgtagccagtatggtaccttgtcttgcccgcaagaaaaagaggaatggatttttttcatcatttgtttttaatcaagtggtggacatcatgctaagtagtttatatgcagtagctcatgtaatacttgaaaaaggtaggtctaattactgtactcattttataaatgaaaaatacagagacttagtcaggtgaaataacttgcataatactatagtataaatgatagcagcgcatacattattctaggttctcctaccttggtcattctctgcttaatctcacaatcatggcggaaggcaaggaggagcaagtcatgtcttaatctctatgctatattatcctatattataaaatctttattaccataaagggatccatagagaagtgacattcagagctggatctttagggattgtgcctaggtccccacagtaccattaagataggatcagtctacatctagatgtactgaacactccttgtttaagaattgatcccctctgtaggtcactcaggacagttggtaagtaacctctttgggtaaaatgaaggtattaaataaaacactgccatccttctcactgtctaggatattccactatcctaaaaacacacttaaataccctctgaattaaagcactgaataaattactg

SEQ ID NO: 118989 - DNA, 152 bp, Homo sapiens
ttgctgcgtcatctagaggaccgatcacgtgcattgtgatccagtgcattgtggatccacgtgaattgtgcatttaaagtgtatatttgggtggtggtgggagtggagagaactcaattcagaaagattacaattagagaagtgagacatgg

SEQ ID NO: 118990 - DNA, 170 bp, Homo sapiens
tcgttacactgctgctctgacaaaatacttgaaaggtgaccagatagaaaaacaagagccttggaaagtttctgagtggatctgtagtaagagattatgttgagtgctgtatcattttgaatttaccccgacaaccctgaccttccctagttaatcattttcattgccag

SEQ ID NO: 118991 - DNA, 4036 bp, Homo sapiens
agcgggagagccaagcctgcgggcggtggcggctgcactcgcagggccctggcagccgaccctggccccaaggtccgatcgcccaggggaggagcagcaccgggaccccgcgtcggctgggcgccccacaagggaagccagtcttaatatgatggaaacatctctgaacttctaaaagaccaaggttggcgttttagctctattaattttacttcgtcttggccagaattcacaatgacaacagtgacagtgaccacagaaattcccccaagggataagatggaagataattctgccttgtatgagtctacgtccgctcacattattgaagaaaccgagtatgtgaaaaagattcgaactactctgcaaaagatcaggacccagatgtttaaagatgaaataagacatgacagtacaaatcacaaactagatgcaaagcactgtggaaaccttcaacagggctctgattctgaaatggatccttcttgttgcagtttggatttgcttatgaaaaagataaaaggaaaagacctacagctcttagaaatgaacaaagagaatgaagtattgaaaatcaagctgcaagcctccagagaagcaggagcagcagctctgagaaacgtggcccagagattatttgaaaactaccaaacgcaatctgaagaagtgagaaagaagcaggaggacagtaaacaattactccaggttaacaagcttgaaaaagaacagaaattgaaacaacatgttgaaaatctgaatcaagttgctgaaaaacttgaagaaaaacacagtcaaattacagaattggagaaccttgtacagagaatggaaaaggaaaagagaacactactagaaagaaaactgtctttggaaaacaagctactgcaactcaaatccagtgctacatatggaaaaagttgccaggatcttcagagggagatttccattctccaggagcagatctctcatctgcagtttgtgattcactcccaacatcagaacctgcgcagtgtcatccaggagatggaaggattaaaaaataatttaaaagaacaagacaaaagaattgaaaatctcagagaaaaggttaacatacttgaagcccagaataaagaactaaaaacccaggtagcactttcatctgaaactcctaggacaaaggtatctaaggctgtctctacaagtgaattgaagaccgaaggtgtttccccttatttaatgttgattaggttacggaaatgaactggctggatgaagatctgatttagaaagactgcgtgagtcttatttattctctgaaacacagcccaagtttcatgttaaaatggcaaaatgccattatttaaatggaacttattacataccaatggctttgcaagaagatgacatttcagaagatcaaacaaatctatatttaatggatggactcttcaaaacttaccaaatagttgaagaaaccaggtgccttctcatgatggaagacagattctgctttaaattaaaaaaaaaaaaaatctgaatcttgttttcagatttttttttctactgggattgttttaagattgtcaattctgacttttttatagtggtttttaagagtataaatagaagggagagtgtatatgtgtatgaatgaacatacatttcctgcatatatatgtatgaagggcatgtatatgtatgaatgagcaaacatatttgaaagttaacttttggatgataggaaagatcgtacagtgacataagttcatctcctgatccattgtttgtgggagaattatacttgactgaattatgggcaggagaaagagcagattccttttagctaattccccaacccatatgcccctctgaagttgagaatcatggctgcctcaccacacatcagagaatgactgttcttcttagttctgggattaaaaattggtttctagaggtaacctgtacacacaaacgcacagggatgcacatggtttcctctgcctttgtgactaattttcttcttgatagttattaatagtatctaaataaaatattggggggatagaaaaataatgctgttagctcatacttccatgaaaatgtatatattataggctcaaaggaataatgactgctgtctgcagccagaaagaatctgaatttatgaattggaaagatatatatagtgtatttgtgaaagtttgcttaaattctgatacatgccttctttgtaggtggagtttgtgattgcagtgaatagaacaaattctgacttgcagaaatgcagacatacagtcaggaaagaacaaacttcaattaaatgtataatgagagaccttggtccccctaaaggatgaatttcctttaggcctttgatcttcctctctagtgtataactttaaatatttgctcagaaaagatgctgactctttcattatggaatgtgaaatatcagtgttgtctataaatatttgaaggtatataaaaatgagatgatgtaatgtatttataaatttatccaagtactgtaatccttgaattgttgtgtaactgtgtgtgagttttatgcttcatggtatttttggaaacatttttattgcttgcttattttgaaggtatatttatctgttaacatttagggcatagttaccttataccagcaacaagtctaagcactttacttgtattaatttattttatcttccccaaggccctcagaagcagattattcctgttttacagagaaagatactgagagtggttgagtaatttgcccagctgctaactgtgaagcaaaaatttgaaccttttgacttggctattgatattcattctacttgctcacatggtggtctaagaaatttcccagctatagaaatctctctatttttgccactttaatcaacacatagcttcctggatgactgcctgtgttattttgtggatgacagtaagaaacaacaaatactgataaaatcaatattttgctgaaatgagttgatctttcaccagctggactaccattgtgagaactcagttcagacaaacttccctgctaaaaatctgtttatcatacatttattatttatgactttatgtcacattgaagaatttcttcatgatacattttcaggcacacttgtaggaaaattaggatcatgagtcctgctttaagtatttgcagtgtagtaagagaatccatcttttactaggagaccagattccttttatacctcattcatcatgctggattgtaataaatttcagattttggaatgggcttatttaactgacctaacaatcttgatgatttccattagaataacttattctaaggtcaaaagtggaaagacactgttggtttttattttgatttcactatactcatttttgaacatggaaatacagtggtgaaaccacctatgcaaaaatgataacagtgaggaaattatgacagtgaaagagatctgacctaactatctatcttgcctcgaaactgcccttggtcgttcctgagtgtgggccaagctaactttgggagaaatttactttataggttaaattataatagcccttcccaaaactaaacgattctcctgcctcagcctcccgagtagctgtctttataataccatcagccttatcatttattcgtcatgtatggattgtttcctatatccactatcataaaattatcatttgaaatatttttttatgaaaaaaaaaacacttctcagtgaaaaaacaagattacaagggggaataatatttattcagctaaaatagtacttcacaggaaatataggaaaagaaacactagttcagttttattccaaataatgtacttctaattatactcttgaatttattggataagaaggtctgaggtgggtctgaaattcatacatgaagtcaggaaaagaaaagaaacttagttctaccttgattacatatgttgttacaaattatcattataaaatgtttaaacaattagtatagtatatcttttgaataattgcttataatatgccttaccataaagaaaattgatgct

SEQ ID NO: 118992 - DNA, 4054 bp, Homo sapiens
gtgtgtgggtgtccaggtgcctttccagcggcttccccagtggagttcctggcatcaaggacatttcctgtaaaagggtccttgttgaagagggaagccagtcttaatatgatggaaacatctctgaacttctaaaagaccaaggttggcgttttagctctattaattttacttcgtcttggccagaattcacaatgacaacagtgacagtgaccacagaaattcccccaagggataagatggaagataattctgccttgtatgagtctacgtccgctcacattattgaagaaaccgagtatgtgaaaaagattcgaactactctgcaaaagatcaggacccagatgtttaaagatgaaataagacatgacagtacaaatcacaaactagatgcaaagcactgtggaaaccttcaacagggctctgattctgaaatggatccttcttgttgcagtttggatttgcttatgaaaaagataaaaggaaaagacctacagctcttagaaatgaacaaagagaatgaagtattgaaaatcaagctgcaagcctccagagaagcaggagcagcagctctgagaaacgtggcccagagattatttgaaaactaccaaacgcaatctgaagaagtgagaaagaagcaggaggacagtaaacaattactccaggttaacaagcttgaaaaagaacagaaattgaaacaacatgttgaaaatctgaatcaagttgctgaaaaacttgaagaaaaacacagtcaaattacagaattggagaaccttgtacagagaatggaaaaggaaaagagaacactactagaaagaaaactgtctttggaaaacaagctactgcaactcaaatccagtgctacatatggaaaaagttgccaggatcttcagagggagatttccattctccaggagcagatctctcatctgcagtttgtgattcactcccaacatcagaacctgcgcagtgtcatccaggagatggaaggattaaaaaataatttaaaagaacaagacaaaagaattgaaaatctcagagaaaaggttaacatacttgaagcccagaataaagaactaaaaacccaggtagcactttcatctgaaactcctaggacaaaggtatctaaggctgtctctacaagtgaattgaagaccgaaggtgtttccccttatttaatgttgattaggttacggaaatgaactggctggatgaagatctgatttagaaagactgcgtgagtcttatttattctctgaaacacagcccaagtttcatgttaaaatggcaaaatgccattatttaaatggaacttattacataccaatggctttgcaagaagatgacatttcagaagatcaaacaaatctatatttaatggatggactcttcaaaacttaccaaatagttgaagaaaccaggtgccttctcatgatggaagacagattctgctttaaattaaaaaaaaaaaaaatctgaatcttgttttcagatttttttttctactgggattgttttaagattgtcaattctgacttttttatagtggtttttaagagtataaatagaagggagagtgtatatgtgtatgaatgaacatacatttcctgcatatatatgtatgaagggcatgtatatgtatgaatgagcaaacatatttgaaagttaacttttggatgataggaaagatcgtacagtgacataagttcatctcctgatccattgtttgtgggagaattatacttgactgaattatgggcaggagaaagagcagattccttttagctaattccccaacccatatgcccctctgaagttgagaatcatggctgcctcaccacacatcagagaatgactgttcttcttagttctgggattaaaaattggtttctagaggtaacctgtacacacaaacgcacagggatgcacatggtttcctctgcctttgtgactaattttcttcttgatagttattaatagtatctaaataaaatattggggggatagaaaaataatgctgttagctcatacttccatgaaaatgtatatattataggctcaaaggaataatgactgctgtctgcagccagaaagaatctgaatttatgaattggaaagatatatatagtgtatttgtgaaagtttgcttaaattctgatacatgccttctttgtaggtggagtttgtgattgcagtgaatagaacaaattctgacttgcagaaatgcagacatacagtcaggaaagaacaaacttcaattaaatgtataatgagagaccttggtccccctaaaggatgaatttcctttaggcctttgatcttcctctctagtgtataactttaaatatttgctcagaaaagatgctgactctttcattatggaatgtgaaatatcagtgttgtctataaatatttgaaggtatataaaaatgagatgatgtaatgtatttataaatttatccaagtactgtaatccttgaattgttgtgtaactgtgtgtgagttttatgcttcatggtatttttggaaacatttttattgcttgcttattttgaaggtatatttatctgttaacatttagggcatagttaccttataccagcaacaagtctaagcactttacttgtattaatttattttatcttccccaaggccctcagaagcagattattcctgttttacagagaaagatactgagagtggttgagtaatttgcccagctgctaactgtgaagcaaaaatttgaaccttttgacttggctattgatattcattctacttgctcacatggtggtctaagaaatttcccagctatagaaatctctctatttttgccactttaatcaacacatagcttcctggatgactgcctgtgttattttgtggatgacagtaagaaacaacaaatactgataaaatcaatattttgctgaaatgagttgatctttcaccagctggactaccattgtgagaactcagttcagacaaacttccctgctaaaaatctgtttatcatacatttattatttatgactttatgtcacattgaagaatttcttcatgatacattttcaggcacacttgtaggaaaattaggatcatgagtcctgctttaagtatttgcagtgtagtaagagaatccatcttttactaggagaccagattccttttatacctcattcatcatgctggattgtaataaatttcagattttggaatgggcttatttaactgacctaacaatcttgatgatttccattagaataacttattctaaggtcaaaagtggaaagacactgttggtttttattttgatttcactatactcatttttgaacatggaaatacagtggtgaaaccacctatgcaaaaatgataacagtgaggaaattatgacagtgaaagagatctgacctaactatctatcttgcctcgaaactgcccttggtcgttcctgagtgtgggccaagctaactttgggagaaatttactttataggttaaattataatagcccttcccaaaactaaacgattctcctgcctcagcctcccgagtagctgtctttataataccatcagccttatcatttattcgtcatgtatggattgtttcctatatccactatcataaaattatcatttgaaatatttttttatgaaaaaaaaaacacttctcagtgaaaaaacaagattacaagggggaataatatttattcagctaaaatagtacttcacaggaaatataggaaaagaaacactagttcagttttattccaaataatgtacttctaattatactcttgaatttattggataagaaggtctgaggtgggtctgaaattcatacatgaagtcaggaaaagaaaagaaacttagttctaccttgattacatatgttgttacaaattatcattataaaatgtttaaacaattagtatagtatatcttttgaataattgcttataatatgccttaccataaagaaaattgatgctacattgtgtgaattgtttggttttctttttatattaaaattatgcataaatgaattaa

SEQ ID NO: 118993 - DNA, 4094 bp, Homo sapiens
agcgggagagccaagcctgcgggcggtggcggctgcactcgcagggccctggcagccgaccctggccccaaggtccgatcgcccaggggaggagcagcaccgggaccccgcgtcggctgggcgccccacaagggaagccagtcttaatatgatggaaacatctctgaacttctaaaagaccaaggttggcgttttagctctattaattttacttcgtcttggccagaattcacaatgacaacagtgacagtgaccacagaaattcccccaagggataagatggaagataattctgccttgtatgagtctacgtccgctcacattattgaagaaaccgagtatgtgaaaaagattcgaactactctgcaaaagatcaggacccagatgtttaaagatgaaataagacatgacagtacaaatcacaaactagatgcaaagcactgtggaaaccttcaacagggctctgattctgaaatggatccttcttgttgcagtttggatttgcttatgaaaaagataaaaggaaaagacctacagctcttagaaatgaacaaagagaatgaagtattgaaaatcaagctgcaagcctccagagaagcaggagcagcagctctgagaaacgtggcccagagattatttgaaaactaccaaacgcaatctgaagaagtgagaaagaagcaggaggacagtaaacaattactccaggttaacaagcttgaaaaagaacagaaattgaaacaacatgttgaaaatctgaatcaagttgctgaaaaacttgaagaaaaacacagtcaaattacagaattggagaaccttgtacagagaatggaaaaggaaaagagaacactactagaaagaaaactgtctttggaaaacaagctactgcaactcaaatccagtgctacatatggaaaaagttgccaggatcttcagagggagatttccattctccaggagcagatctctcatctgcagtttgtgattcactcccaacatcagaacctgcgcagtgtcatccaggagatggaaggattaaaaaataatttaaaagaacaagacaaaagaattgaaaatctcagagaaaaggttaacatacttgaagcccagaataaagaactaaaaacccaggtagcactttcatctgaaactcctaggacaaaggtatctaaggctgtctctacaagtgaattgaagaccgaaggtgtttccccttatttaatgttgattaggttacggaaatgaactggctggatgaagatctgatttagaaagactgcgtgagtcttatttattctctgaaacacagcccaagtttcatgttaaaatggcaaaatgccattatttaaatggaacttattacataccaatggctttgcaagaagatgacatttcagaagatcaaacaaatctatatttaatggatggactcttcaaaacttaccaaatagttgaagaaaccaggtgccttctcatgatggaagacagattctgctttaaattaaaaaaaaaaaaaatctgaatcttgttttcagatttttttttctactgggattgttttaagattgtcaattctgacttttttatagtggtttttaagagtataaatagaagggagagtgtatatgtgtatgaatgaacatacatttcctgcatatatatgtatgaagggcatgtatatgtatgaatgagcaaacatatttgaaagttaacttttggatgataggaaagatcgtacagtgacataagttcatctcctgatccattgtttgtgggagaattatacttgactgaattatgggcaggagaaagagcagattccttttagctaattccccaacccatatgcccctctgaagttgagaatcatggctgcctcaccacacatcagagaatgactgttcttcttagttctgggattaaaaattggtttctagaggtaacctgtacacacaaacgcacagggatgcacatggtttcctctgcctttgtgactaattttcttcttgatagttattaatagtatctaaataaaatattggggggatagaaaaataatgctgttagctcatacttccatgaaaatgtatatattataggctcaaaggaataatgactgctgtctgcagccagaaagaatctgaatttatgaattggaaagatatatatagtgtatttgtgaaagtttgcttaaattctgatacatgccttctttgtaggtggagtttgtgattgcagtgaatagaacaaattctgacttgcagaaatgcagacatacagtcaggaaagaacaaacttcaattaaatgtataatgagagaccttggtccccctaaaggatgaatttcctttaggcctttgatcttcctctctagtgtataactttaaatatttgctcagaaaagatgctgactctttcattatggaatgtgaaatatcagtgttgtctataaatatttgaaggtatataaaaatgagatgatgtaatgtatttataaatttatccaagtactgtaatccttgaattgttgtgtaactgtgtgtgagttttatgcttcatggtatttttggaaacatttttattgcttgcttattttgaaggtatatttatctgttaacatttagggcatagttaccttataccagcaacaagtctaagcactttacttgtattaatttattttatcttccccaaggccctcagaagcagattattcctgttttacagagaaagatactgagagtggttgagtaatttgcccagctgctaactgtgaagcaaaaatttgaaccttttgacttggctattgatattcattctacttgctcacatggtggtctaagaaatttcccagctatagaaatctctctatttttgccactttaatcaacacatagcttcctggatgactgcctgtgttattttgtggatgacagtaagaaacaacaaatactgataaaatcaatattttgctgaaatgagttgatctttcaccagctggactaccattgtgagaactcagttcagacaaacttccctgctaaaaatctgtttatcatacatttattatttatgactttatgtcacattgaagaatttcttcatgatacattttcaggcacacttgtaggaaaattaggatcatgagtcctgctttaagtatttgcagtgtagtaagagaatccatcttttactaggagaccagattccttttatacctcattcatcatgctggattgtaataaatttcagattttggaatgggcttatttaactgacctaacaatcttgatgatttccattagaataacttattctaaggtcaaaagtggaaagacactgttggtttttattttgatttcactatactcatttttgaacatggaaatacagtggtgaaaccacctatgcaaaaatgataacagtgaggaaattatgacagtgaaagagatctgacctaactatctatcttgcctcgaaactgcccttggtcgttcctgagtgtgggccaagctaactttgggagaaatttactttataggttaaattataatagcccttcccaaaactaaacgattctcctgcctcagcctcccgagtagctgtctttataataccatcagccttatcatttattcgtcatgtatggattgtttcctatatccactatcataaaattatcatttgaaatatttttttatgaaaaaaaaaacacttctcagtgaaaaaacaagattacaagggggaataatatttattcagctaaaatagtacttcacaggaaatataggaaaagaaacactagttcagttttattccaaataatgtacttctaattatactcttgaatttattggataagaaggtctgaggtgggtctgaaattcatacatgaagtcaggaaaagaaaagaaacttagttctaccttgattacatatgttgttacaaattatcattataaaatgtttaaacaattagtatagtatatcttttgaataattgcttataatatgccttaccataaagaaaattgatgctacattgtgtgaattgtttggttttctttttatattaaaattatgcataaatgaattaa

SEQ ID NO: 118994 - DNA, 1116 bp, Homo sapiens
gcagagcagctacataaatattttcttcctctcgtcctgtccccttccctctcttcttcctccttctccatccctttctgtttttctccctaattatcccatcacctttctcttggtgttctaaaattaatctcttgcctctccttcccctcaacacaatatttcactgattcccatgatatttttgaaaggtgtctgggttgcatgtatttctgtgtcattctcatggccctttctttgcagagtttcacctgccacctggatcatttcctatttttctgcagccacttcagggcggggacccagtatcacgaagctgcaaggtaaaaaggatcaaaccttaactgcctacatgtgctcacaggaacataagtgagtgaggctcaccagcaaccaggaagtgagctgagcctaacatatgggagagatcctgtctcatctgcagggaagagctgctatataggaaagtatctgctcattgctgccatgtgggaatgctggtattgctggactttctgatgttttaggagaaactgctgatctgtgcatgaagtctgatatataaagatgatactatatttatgtgtctatggataaataaataatgtcaactggttccagaaaaaaaaaaaaaaaacaaacaacaacaacaacaacaaaaaaccactgtgtgggctaaacaagcctgctgattagatttggcacattgacagtgaggttaaggtgcctaagtgcctgaaaaacttatgtgtttttgtttatgagaacaacttcagcaaagtttcaagatacaaaatcaatttacaaaaatcagtagcatttctatacatcaacaacgtctaagatgagacccaaatcaagaatgaggtcccattcacaacagtcacacacacaaaatatctaggaatacagctagccaagaaggtgaaagatctctacaacaagattataaaacactgctcaaagaaatcagagatgacataaacaaatggaaaaatattacatgctcatagatagtaagaatcaatattgttaaaatgtccatattgcccaaagcaacttatagattcagtgctattcctagcaaactaccagtgatatttttcacagaattag

SEQ ID NO: 118995 - DNA, 180 bp, Homo sapiens
ctaagtaaatgccgctgctctcctttacagaattagtgaaacaacaatgtcccttctgaatttttcttgccatgaacatctcccaatccttgtgtgttgctcattaccctttaggccaaaggtgtgcagcactttctcggtctctgtcaccttcaactcctcatcaatagcctcacacct

SEQ ID NO: 118996 - DNA, 317 bp, Homo sapiens
tggtttccacgtcaccaactgacccatgccatatccaactgaaagcactctggtggctcctcacaccaccagaaataaaacccaaactgctcaccatgcatctgaggcccatgcgacctggaccccaccaacatgccaatctcatctcccttactctcccctccagccaccctggcctcttactgttcctcaaacaagcctggcacagtcctgcctcagggcctttgcatctgctgctcccactgcctggaacacacttttctccactctttccaccagggctccttctcctccttcaggacttggtcaaatgtcat

SEQ ID NO: 118997 - DNA, 656 bp, Homo sapiens
gttatggcatgagaagggagaagtgcgtgtgaggtgaggagctgaaggcagcgtgcgtggcctgttcacaagctgggctgtgtgttttaatctcttttggaacaaatccaagtatactgttgcatgcaacttgaattcagtatatagcttgagcttttatattatttctctgacttataatgagaattttgagaagataaacatttatgtaatttcagttattctaaagatacttgtttcttttttaaccgcttacagtcttaacttcttgccgtcattgaaccctgtaaataagagatgtggagagttgaggaaacagactgtgaaatgataccgatcaaacaggattcaatctgcataaaagcacacatacatgctttgagtggattttgctatttctaaactttttacttctagttttatccatagaataagaagctgtgaaaggaaaggaagttgtcatgcagttagaaaaggatattgacaaaagatggaaggaaggggaaaaatacagaactggggtaaaaattaaaagaaaataggcaagttgtgtggtgctttggtctaagttgcataatcctttatagatatttgtctgtgttgatcctttttccttgcctgcccaggtgttttccaggattaagagtgcaggcttt

SEQ ID NO: 118998 - DNA, 485 bp, Homo sapiens
gctggagaactgcacagctttggaggcttttcctggatatatttagaaacactagaacgggtctacatattaaacagtcatgaattattaccagccagtccttgagtaatctcaggcttaacagacatctttcttatttgctttctgtcgattccaaatatgagtaaacacagtatatcttattctagaggaaatgtccgcagaaaagaagtcactccctctcagggccttcagataagacttcatcaggtgtactaccagactgccattacagttcccaaaggtgattcatttccagtgggatttgtagagtaaatctcagttaagcaatcacaaaagagactaagtgtcccagaggatgtcaagtagcttgaaaggcataatgtaaaaatattatatctaccatggcagaaaaccagattgagaccagaggaaaggacttcacttataaatcaatgaccttgacagtagttgtcttcgaaaaa

SEQ ID NO: 118999 - DNA, 614 bp, Homo sapiens
tgcagtggaacaatcatggcttactgtagccttgaccttgagggcttaagcaatcctgccacctcagcctgcctagtactgggactacaggtacgcgccaccacgcccagaaattgccacagtcacctcaaccttcagcaaccaccaacttgatcaatcagcagccaataacgtgaagtcatgaccattcaccagcaaaaagtttatgattcaccaaaatattagatgatcattaacatttttagcaataatgtatttgtcattaaggtgttagtgcattggaaaatcatttaaagaatgtatcagctaattgaaggcttatgtgtaaacaagattcctgccaggctttgactactacccttggccttcctatacagggttgtaaagaatcatcatgatgtatgtttgaaattatgtttaacagtattacagtcaatatagactaaattttgatgcagtaacaacctcagaacttttacaatcattgctggactgagagagaaagagagagtgaacagggaatgtcacatgagcagagaatgtcactatctcaactgtaaaaaacaaacattacttctactcacatttcattgcccagaactagtcctatacct

SEQ ID NO: 119000 - DNA, 441 bp, Homo sapiens
aataacgtatggctgttggctcatcatttgtagcaaacgtatggaaacagagatgaaaggggtgagagaagatgggaactctctgtactttcccttcaatttttctctaaacctataactgctcaaaaaataaaagtcttaattaaaaaaaattagagcagaagagaagcacattatttctcagcatcatagcatctctgtagatgatggtctccttgtcatgggggaaagatcctctcaacacattataacaactcattgctcttattgtgacaaccaaggaatatatgagaggccaatttaaacatctcagtgggttggaaggacaaagcagactttgtgtcacaatagaattcatctcttggaacgtggagatggcaggagataaaacaatactctttatcaccggcagattaaccggcaaggacatgttctttctgt

SEQ ID NO: 119001 - DNA, 725 bp, Homo sapiens
aaccgaaattcagtcttttcttcaactgtgaatgtaggcagcaagccacagtggaacttgcagaacctataaatttgtcactgtgattgatgttataatgttacacctagatcttctttcagaaatgaggacttaccccagctactatgaaagctgttggcagagtgccctcagctggcagccccagggaaatggcctcagttgcagagagccacctcagctgggtaataaacacctggccctctttgattcagggcacttctgaagggtcatataatcttcagaccttctgtaaggttggctgaagcttcctctcagacttcatcacagctcaatgtcatccttctctgaccagttccaccttgccttcccctcatgttgatgtcaagagcgttccctagcaaactccccaaatgccaatctccagcttagattctgctttctggggaaactgaactgtgacagttactaatacaaagaatcaatatttttatgtcacattatacttagatagcttgaaatatatatgcatctagttacttaatacattattaaaaaactttttactatatcgaaaattactttttaaacattttagtaactgtatttcaagataattttctgtgttatcctatgccttttattttatgcatcttaaaacatcattctgagaaggagcctataggctttatcactgccaaaggagtccatggcaaaaaaaaaaa

SEQ ID NO: 119002 - DNA, 323 bp, Homo sapiens
  misc_feature (31)..(31): n is a, c, g, or t
  misc_feature (41)..(43): n is a, c, g, or t
  misc_feature (48)..(48): n is a, c, g, or t
  misc_feature (74)..(74): n is a, c, g, or t
  misc_feature (111)..(111): n is a, c, g, or t
gaggatcccggagtgccgcttagactcatanccatgtcacnnncgagnatgctaatacaccagctgcccgtctncacagattcaagaacaagggaaaagacagtacagaantgaggcagcaggaggtcaggagaaaatctgagaaaggagaaggccagaaaaggggagccccaacttctgaatataaactatccaaagctttgtctggtccctataccatgcatgtatagggcagacttcatgtagcccagctaaaataattaaattgagatttcagttatcatcaagcacagtgaagacaaagggaaacaacaaaacatatt

SEQ ID NO: 119003 - DNA, 632 bp, Homo sapiens
gtgcgtagagtttaagcagtgtggagatatttcttcacttttccttagggtgtccacatcaagaccctgaggccatcttaccacccttctggatcagaagaggccttcagagccctccgctgccgagacgcggcagactcccagagcggctcacccactcatcgaagcggattctgggcggtttcgggctgacccgcgctgtcagggcgcggactccattccgggcgcattgttaggagaaggggcccctcggggcggcgcgcctcgaccctgggctcccggtgcccgcagagggcggagatccgcggcgccctaggccacctatccgcatcttctcgagccaaacccccagcgcttacccggacccgacggcccaagcactgactcccaggcaagagtcgcccttcctggtccccagggaactgacactaccgcgggacgttccctctaggacagtcagcaggtcccaggagcgcagcacgcaacagcgcagagcagacccagacttttcccggggtgagacccggaggcccgcgctctggaccgtcctccctacccagcctggaggccggcgttccccggcccaacccggagacctccccgcctccctcctgggccgccgcgcgccccag

SEQ ID NO: 119004 - DNA, 332 bp, Homo sapiens
atttcatttccttgtggttgggggactgaggctctagctttttccttggccggaggctgctctcagctcctagagtctgctgcctgtattttcttggaggacacctatggttcttagagaccacccatacttagaaagcactcatacttctaaaccatgtgggctttcccaacacggctgcttccttcatgaatccagcaaggagagcctctaggataaatctgctaataatacagagtattttataacataccataatcatgggaatgacatcccattacatttgctatattccattgctcagaagcaagccattggtcctacccacaccc

SEQ ID NO: 119005 - DNA, 423 bp, Homo sapiens
tgccttctctttctcctggttcaggctcttcctgattagtttttgttgttgtctttcgtgattcagaacagttattattaacaagtctccgaacaacctggaaagtagatggtattattcacattttatgggtgaaaaaactgaggcgcagagagatagagtaacatagagctcacagaactggaaagtcgcagagtcaggattgaaacctacatgtatctacctccaaagcctgagcaactctaactgcacagtgttgccttcctatcttgctttgttttgaaaacaaaaagtctgtgttgccttatctttttgcaaggtagcaccccccacaccagtggccccaaaatggaaagatggaaggaagaattaaaataagggttgaagaggaaatggaaataggagtacatggagtttggaaat

SEQ ID NO: 119006 - DNA, 106 bp, Homo sapiens
ccaaggaactcggcccacaatgtctaattctaatgcttcctcttttacttgaaagtggaggggaaggctgggagcagtggctcacacctgaaatcccagctactca

SEQ ID NO: 119007 - DNA, 165 bp, Homo sapiens
tatgcccctagtttaaatccattgccccctaccttttcttagagaaactcaaaacctagctgtctttcatttccagaactcttcttctagatttctttttaccattaaccaccccctattcttcggggttttctcgagtgtggaataggagagaaaaacacacaa

SEQ ID NO: 119008 - DNA, 722 bp, Homo sapiens
ggtctaagttgctgctgaaattttggacacatgagcccaggtctgggacttggcaagcgaataggccagatgggaactgttgcttgacaaattgaaagttctttgtttcagagtgaaccaaacctggtctcagctaatctaccaaaacaaaaaagctgggggagggtatattgtagagcccattttgataattatttttttggcacaaactactgcttacaccaaaaagcattgtggatttatcatataaataatgacatccccaaagctgaacactgcaaatgtagctattagggacttgttggagtgcttgctgaaagtatgtttttgtagtattgaatatctctgtggcgtgctgcttcatcccaaggcaaactatgggtttaaaaatagatcagtccaactggatcttacagtcgctaaacagctaactgctttagaggagcaaactcaaattcgtttagaaaaatgaaaaaatgaagagttgatttccaccagacaatcaatacatattattaataccttgtatttacaaaatacttttatattaagacctaaaactctgattataaccttcataggggaatacaaaatggtgattttcctcaatttataaagcaaggtaattcagagtaagaaaatgcctccagaaggcctggtttttatttccctactagacttccaggccacatttgatttcttgtatgcattttgaaacattt

SEQ ID NO: 119009 - DNA, 232 bp, Homo sapiens
tttctgtttcttctctcattgtcagctgcagatgtatttcagcaggatcaagtacaatttgacttgagttaacccttcataccaattctagcaccttaattgtaccctgactgttagcagcaaacagtaacatctggagcctggagatatcctcaggaagcacatctgtagtgcactcccagcaggccatggactagtcactaaccccacactcaaaggggcatgggtggtg

SEQ ID NO: 119010 - DNA, 211 bp, Homo sapiens
tcaaaatagtgtgataacctgccgactggggtgatgtcagacagaattcattgattcatgaaagacatagccctaggaggtgccagggcctgtgttcagttctgtgggttctgttaattgttttgtttgtttggttttaacaactgctgtgtgccaggctctgggataagtaccttaagtaggtgatctcatttatccctcccagcagact

SEQ ID NO: 119011 - DNA, 725 bp, Homo sapiens
cagtcactgaaggctttgaaccacagattcaataaattgcctactctcatttgccacatggactatatactccttggcaattatttaattattcattattctgatcctttaggagcagaaaaatatagtaaatgcacatagaaagtgcctaagtatgctaagcataggatttcttctaagctctgctttgcacacaaaatattttgatcacatttgggaagacaacggaaaaaaattcacatcctaggggatactttgcacacataaaaccagatatatttatcacttttgaaaataaaatctgatatggcacatatacacacatattgtacatatacacaaataaccccaagttataactttacaaatttgtttcaagaaacacacacacacacacacaaatgttctaatgaaaatgtgtgtgaaagacacactgtaattaaggtctttcccccttccctagggaaatgaatgtctccattataatatcccaatattaacttattggccttggacaagtgccacatcccagccacttggttttggttctgggggggtgggtgtgtaaaaagcacgcaaacggctttatgagggagcctcaaatctctctgcttccttcgatgttgcctgtggcagaaatttacattatcccttcagcccgcttaaaaaattctgtacttcccaagcggctaaatttttaaagtccctcaaccacaaaaatctac

SEQ ID NO: 119012 - DNA, 116 bp, Homo sapiens
aaacaagaaaaacatgatttgccctgcatctacagtttgcaacactgctttatctttatggcctcctttaattctatgatctctatccccatttcgcagatgaagagatagaggct

SEQ ID NO: 119013 - DNA, 654 bp, Homo sapiens
aacggtgcagctggccgcggtgtccctgaggttgaggggaccgggaataggctggggggaggacgggacgggctgagactggacgggacccccggtctgcagcagcaggtgacagcagcagggacaatgataaggagattggcctgaaggagggaccgtccctcccgcgcgtggtataaccagaagaattcacattcccagacttgtcaacttgcatcagtggagacagtggcattcatataatacacatgtgtatgctacacttgacacaatgtgaatactcatctttcctttaggaaaccttattgtcctgttcatgtatacttgaggaatgcgatgttaattctggggcattgatgttttacaatgcctgatcaagataaaaaggtgaagaccacagaaaaatcaactgataaacagcaagaaatcaccatcagggactattcagatcttaaaagacttcggtgccttttgaacgtccaatcaagcaaacaacagcttccagccattaacttcgatagtgcccaaaatagcatgacgaagtctgagcccgccatcagggcgggtggacacagagctcggggtcagtggcatgaatccacagaagctgttgaacttgaaaattttagtataaactacaagaatgagagaacc

SEQ ID NO: 119014 - DNA, 280 bp, Homo sapiens
caggctggtctcgaactcctgaccttgtgatccacccacctcggcctcccaaagtgttgggattactggcgtgagccactgtgcccagcggttatatatttttaatctgcttataatcattgtctattctatcctggaagactgaaaggtgtttagctttttttcacataagtatctgtttcttcagaataaccaaaggaagtatctatcactgtttcctggggctcatgactgagttccaagcatgtggcattttatcttctacaaaatgtgtcctcct

SEQ ID NO: 119015 - DNA, 656 bp, Homo sapiens
atgaaatgtgtctgtagaggaggagctggatggaatgtccctgtagaggaggagctggatgaaatgtgtctgtagaggaggagctggatggaatgtgtctgtagaggaggagctggatgaaatgtgtctgtagaggaggagctggatgcaatgtgtctgtagagcaggagctggatgaaatgtgtctgtagagaaggatctggatggagtgtccctgtagaggaggagctggatgaaatgtgtctgtagaggaggagctggatggaatgtgtctatagaggaggagctggatgaaatgtgtctgtagacaaggagctggaagaaaactgtctgtagaggaggagctggatgaagtgtgtctgtagaggaggagctggatgaaatctgtctgtagaggaggagctggatgaaatgtgtccgtagaggaggagctggatgaaatgtgtctgcagaggaggagctggatgaaatgtgtctgtagaggaggagctggatggaatgtgtctgcagaggaggagctggatgaaatgtgtctgtagaggaggagctggatggaatgtgtctgtagaggaggagctggaagaaatgtccctgtagaggaggagctggatgaaatgtgtccgtagaggagtagctggatgaaatgtatcctgtag

SEQ ID NO: 119016 - DNA, 277 bp, Homo sapiens
ttagaattgggcattgactccgtagaattcacctttgtacaaggtgagcaaatgtatattttgttaaaaataagtatctgactgccaaaacggacagaaagctctttgccagatgtgttttcaggccatttcctttcctgggaaacagccatttcccccgcattatagttgtgttttcatttgcgggtagatagagtaagcgcaggagttaaaggacgcgggcctccacagccaaggccttatctgggacaattatctttctccttgcagctgtgta

SEQ ID NO: 119017 - DNA, 218 bp, Homo sapiens
taaacaactacagcgaggccacagtatataagatcaatatacaaaaaccaattgtatttccataagcaagcaatagtctatcaaaagataaaaccggaacataattctatttgtaatagcatcaaaaatatatccagttaggaataaatttaacagaagcagtgcaagacctgcacaccaaaattacaaaggaaaatggtgctaggacaactagaaat

SEQ ID NO: 119018 - DNA, 386 bp, Homo sapiens
ctgggcatatatgtgttacgtatgttgtatgattcatttcataataaaatttaaaatcagtaatagtgtccttggtagttggaacagtataaaagggagtatggggagaagtgagtcttccttctacaacagacccctgtccattgtgcgagcagcagctgcttgcgaaaccatccagagactttctgtcctttcttgtggctcttggcacagatgggctcatgatccctgctttgctctgagccttcctttgctccatctgatatgaggtggaggcttggctgtagcagcatgctgagctgtccccgttgccagtggtcttgaggtcagtgcgataatgtaccataaatgaccttcctggtcttctgttgatggactttcatgtg

SEQ ID NO: 119019 - DNA, 335 bp, Homo sapiens
agaggttgcagtgagctgagatctcaccactgcactccagcctgggctggactgagactccatctcaaaaacaaaaacaaaaacaaaaaacaaaaaacaaacaaacaaaaaaactgattatcttacaatgctttgtaatagaaatgtgatcctgagatgctaagagttaaataaatttctggattgagtttccaatgattattaacaatgtatcaaaacaaatataaaatttgataaattagtaataatacatgcaaagtaaagcatgcttatttggaatgaatttcttgatctgttgatgaggctctttctttttaaaatgagtttgtgtattt

SEQ ID NO: 119020 - DNA, 688 bp, Homo sapiens
cacacagtatacatggcagatgtccactagacatatgctattagacagaaacgggaaaagaactgtaggatgggttggtggtatacagtagtaagtagacaagcattttctaatcagaaaagccttgtagaactaactctgccatttaggaccttagaaaagctactcaacctctccagacctcagtttcatcatctccttaacataatggttcttaactccatgaagttccctcctccagggacatctgataagtctggagacattctgattgtcacaaactagagtgaaggggttcctaccggcatctagtgagtagaggacagggaaactgataaacatcctatagtgcacaagacagcccccataacgattattcttaacccaaaatgtcagtagtgccaacactaaaaaattctgtcttaatggaatactaataattgtacctgtctgaaaaaaagcctttgtagctctcagtaatatttgctattgtagttatgatcattgccattacgttatcacatcctgaaaaagaactcacattaaaattacaatatatttctagggattgaatattaaattctccaagaaacatgtttgtattttaataagggtttgggctgggcgcagactcatgtctgtaatcccaacactttgggaggccgaggcaggcagatcacttgagccc

SEQ ID NO: 119021 - DNA, 429 bp, Homo sapiens
gaccttgacttcttaatcctctgcttgattggctctccagcatcttttagcagatctccccgctgccccattatttggactgctttcctggctgtttgcagtgggaggattggtctgagtggccccacctgccattaccgaagcagctgtcccagctcgttctgttcctgtgtgagcttggccacctttctgtcctccttgcttgagtttcattggctgtaaaatgggtaattagagaaaaactcataataatataagctggcatttagtatgtttttcctaagatccaggcattgggctgagtacttacattgtttcaattaatcctcccaatagccctgtgagctggggacagttgtatctattttgtgtccaagaaaactgaggtgaaggacacagttgcacagctgggagttgggactggaaccc

SEQ ID NO: 119022 - DNA, 285 bp, Homo sapiens
cgctaatgagaacgcaaacaaactccctccatgcagccccatcgtgttgtgggaactgtctgctctggtctccacactgcactgcgggcctcacaggtcctgccccaccatgtcctgaagagcacagggcacccagcctgtgccacaccccataggtgacgctggccaggtaccatgccctctgtgcctcagtttcccattgaggaaaacagtttccccactcacatcgtctcctcccaggagtttcataaagtcagcagtgagcactgtgcaaagggcagcttt

SEQ ID NO: 119023 - DNA, 216 bp, Homo sapiens
ggagtgcagacacgccactgccagggcggggagctagaggggtccggccgcgtttctggaaacggagcctggaagggaggcagtacttccatgaacaccaacactgctatcaggaagagggacagacctgatcaggagtgggagcagggaaggaaatggcaggtttcaccaagggtcattgaaattctggacgcacactcaaacgtgtcactcaca

SEQ ID NO: 119024 - DNA, 463 bp, Homo sapiens
aatttaaagtatcaagactaaatgggggagaggggacaatgataagaaacaatacaaactgtcagaaatgatcatcagtatttgtatgtgtgatggaatgtgccattgcctttggtgtcatacagagatgattttagatgcctgttcactcactgtctgtgtaactctgtgcaagtaagttaagctttcatttatttatgtatttatttattttgagatgaggtcttgttatgttttccaggagttcgagaccagcctggccaacatgacgaaacccctgtctctacaaaaaaatacaaaaattagttgggcatgatagcgcacgcctgtaatcccagtactcaggaggctgaggcacaagagttgcttgaacctgggaggtggaggttacagtgaactgagatcctgcctctgcactccagcctgggtgacaaaagctgagaaccctgtcttaaaaaaaaaa

SEQ ID NO: 119025 - DNA, 437 bp, Homo sapiens
tacgtagatgaaataaaattctgtgaagggattagaagacatcttaaagtcatcttataaataggaaaactgaagtccagaaagaataacccagtgataacactagagaatcatgcaagtttagaaagttaatctgcttatggtcaggcactgtggcccatacctgtaatcccagcactttggaaggccaagacaggcagataacttgaggccaggagttcgagaccagcctggccaacatgacgaaacccctgtctctacaaaaaaatacaaaaattagttgggcatgatagcgcacgcctgtaatcccagtactcaggaggctgaggcacaagagttgcttgaacctgggaggtggaggttacagtgaactgagatcctgcctctgcactccagcctgggtgacaaaagctgagaaccctgtcttaaaaaaaaaa

SEQ ID NO: 119026 - DNA, 612 bp, Homo sapiens
aacgtgattacattgtaggagctggaggattgttactaaatcattcaaaacagcaaaagttaaaaataaaatagcgaccagttaaaaatattccactggtctaacaaggaggatataaataaattatgatgccttatagatataatattaggaatatttttcagccattaaaaactacgttttaggagagtatttaataatggggatattatagataaatacagatagatttaggtataaaatggagactatttctttctttaaagtactttcttgatttttttaagtcagtatatccatctctctttccctagcaaatattctccagagaaacagacaaacatttttcattggccatctctggatataaggtaattttagttttctttctttctttcattttattttttaaaaaagagatggagtctcactatattgctcaggctggcatcaaacttgtgagctcatgcgatctgccctctcagcctaccaatgtgctaggattacaggcacgagccaccacgcctggcctgattttaattttcctatttacatctttctgattaactttttcccttataatcacatattgtctttgcaaccataaaaaaa

SEQ ID NO: 119027 - DNA, 837 bp, Homo sapiens
gcacatcttctcactgatatttaaatgctgagcttacactttccatggacatgcttaatgactaaacaatagttgaattctaaattaatcaactgaccaaccagtaagaatttattgagcaactcctttgaagccgtctatctgttaggtgctgtgggagcacaaaagaaataggacatcatctctgcctcagggaatttagtgttttggggaaaacctgagtggtatacacaaagcaattgaggaacaacctaggaccttgtagtccattaggatttccaaaaatagaaagagaatggaaagtcacctggctaggagaagccagtggaaacttgacacgatgaaaaaagagcagctaatttcattcctgtccaccagttatttatgtgtttatctttaattacatttgtttgatttcccttattaaagtctgatgtcttaaaaaagcagaaaagtgaggcaggtcagcaggggatgtaagttgggaagaaagacaggtgagggcaagaatttaggcaggagccacagtgttggttgtgcaggtgaaggtcaggtgacggagggtaaccagtcatggatgacccaggcaggagccataaccaaaatgttagaaaaagttggtaagaaattgttccaggccaggcgcagtggctcatgcttgtaattccagcactttgggaggccaaggtaggcggatcacttgaggtcaggagtttgaaaccagcctggccaacatggagataccctgtctctactaaaaatacaaaaactatctgggcatggtggcacgtgcctgtaatcccagctactcaggaggctgaggcaggagaatcactt

SEQ ID NO: 119028 - DNA, 222 bp, Homo sapiens
ggaggaatatacccaagggtaaataggaattaaggatttcaagacattgtatttctgaaactgtcttgattgatagtttggacatgtacaggattctagggatagagaagtaattctctcttagaatttggaaggcattgctgcacgggttttggcatctaatgttgcttttcttgagaagtctgatgccatcctgattcctgatcttgccttgcctccccc

SEQ ID NO: 119029 - DNA, 683 bp, Homo sapiens
gatttaatcacagaataatcaggactagaattttaaataggacatcattagcatgttaatgaattttcccaccttatgccagctgcctgagtagaaaagatactgcagatgtagctcaaaaatctggctggttccctggcccagtgagctgtcaggaatctgtgtagggtgatccataagctaagtgaagggattctaagtgagaataccaagcagcaagattttgtttttctgagaacgatggctaactgtgcccagcctaaactcatttgtctttcggtgagtaagaggggaatgggaggcagagaaggggcagttgaagggcaatgaggttggagtagaggcacctttccaattatggtttgggattaggaccttttgctttagatagaaaagttgtaagttcgcaatgacaagatcctgccctaattcttggcacagtctcacaatttttgagcttgaaatagctaatgaaaggaagcatgagtgtcttagtccatctgcgttgctatagaggaatacctgaggctgggtcatttataaagaaaagggaattctttggctcacagttttgcaggctgtctaagaagcatagtgccaacatctgcttctggtgagggcctcaggctgcttccactcatggcagaagatgaaggggagctggcctaggcagatcactggtg

SEQ ID NO: 119030 - DNA, 336 bp, Homo sapiens
atgaggtattttctcattctttatctcatggagtctgctaaatacccccatagaacacgtattatcaagcccagtgcacgggaggaaatgagactcctcagaaggtaaaatgatttggccaggcacggtggctcacgcctgtaatcccagcactttggaaggccaaggcgggtggatcacctgaggtcaggagttcaagaacagcctggccaacatggtgaaaccctgtctctaataaaaatacacacaaaaaaattagccaggcgtggtggtgcacatctgtagacccagctaccaggaggctgaggcaggagaatcgcttgaacctgggagatg

SEQ ID NO: 119031 - DNA, 576 bp, Homo sapiens
cttgaagatatgtctatgatacatggctaagcaaaatttttaaaaggcaagtgagaaaaatacatatggtataatcatatttatatgaatataaacaactatattaatatatgtcagtgtgtacaccagaaagaaaaagtttaaagcaatatacactaaatagaaaagaaattatggaatgggagatttatattttttatattaatgtatttctgtaggtttgagttttgtaaccttggattacatatgtcattagaaaaaaactttaaagaataaaaactgaattaaaattttaaaaaataactgtcatgttaggaaaaattctttggacatttattttatggtaacgagggttaaaatttaagaggagctttgaagggcagatggaggttagggcaggagacaggcagtgtaattaaggaaattaaaataagtggtcgataagctggactcttacttggccagtagtaaaccaatcaacactaagttgaggggtaacaggaatgagaaaatcacctgaacataaacataagagaaggtatttcatagagtacaacagatcactgttcatccata

SEQ ID NO: 119032 - DNA, 178 bp, Homo sapiens
aagcccaggtgccgaggtaactatcctctctctcctacaaggagcagccagttaaaatcccaccctgtgggcaatgaggttcaagccaccctggttctgctccggttatcaatgctggggaaagcacactccacataatgccagtgctccggagcagcgtcgttcatgcccaagcacg

SEQ ID NO: 119033 - DNA, 696 bp, Homo sapiens
caacccacagcctacaacccatacctaccatttacagctataacctacagcatataactacaaactaaaacctacaccctgtacctccaacttataccctgcaacctacaactgcaatctataccatatatacctacaacctataacccataatctacaacctatatctacaaccacacctacaaactacagggatgctataagggtcgtggagattcaccaagtgccaatctttacatgaatatgttatatgaaggtggcgcatgaattataatttcttaaattctacacacatgcacacactccagtagcaaccacacatcagttactaagcacatcttaattccagaaggacgctctaacatcccaaaatactccaaccagggctcaaaagtcaaaaggtcccaccattgactcctgttcatctaccccacatatctcaggactcatcagatttggtccaagaagtttattcccctccttccgaaaaatacggatggaagtagttataattcagttttttaaaagacagctattatccaaaagtctgaaaataacaaatgctggcaaggaagtggagaacacgggaacattcatacactgttggtgggaatgtaaattggtacagccactatggaaaacgtatgaaggttcctccaaaaactaaaatagaattaccctggcacacctccactg

SEQ ID NO: 119034 - DNA, 301 bp, Homo sapiens
aagtttctcactgtggaatggaaattcacggaagatcagcaaggggaggaggctagaataatccatgtggtaatgcagtagagatgaagaatcagaactcatgtttaatttaatataatacagagggttacatagagaagtatttatagatatgtatatacacaagagttaatatacacacacaaatttctttgctgtcagccgaaatggcctaaaagaaaccacaccctaatgcccagaatgcccagatcttggtctgtaaaaccaataaaggaaccagggacctttaaataaatggttg

SEQ ID NO: 119035 - DNA, 695 bp, Homo sapiens
agcggggttgccagggaaacagcggtcccacaggcaggagggatctggaccggcggcttcttccactaccagagaggctgaggtggcgggagagacccctctcctctgggggtaagtggctggcgcggcgagtgtctgcggcgcgcttctgcggccatctgcgccctgactgacggcggccagttcctcgaggaggcccggcgggaaggatttcaatggatattataaagggaaacctagatggaatttcaaaaccagcttcaaattcaagaatacgccctgggagcagaagttcaaatgcttctttggaggtgctctcaacagaaccaggatccttcaaggtcgatactgcaagcaacttgaactctggtaaagaggaccactccgaaagcagtaatacagagaacagaagaactagtaatgatgataagcaggaaagctgctctgagaaaataaaattggctgaagagggatcagatgaagatctggatttggttcaacatcagataatctctgagtgttcagatgaacccaaattaaaagaattagattctcaacttcaagatgctattcagaagatgaaaaaacttgataaaatattggcaaagaaacaacgcagagaaaaagaaattaagaagcaaggtctagaaatgagaataaagctgtgggaagaaattaaggtaagaattatctaa

SEQ ID NO: 119036 - DNA, 598 bp, Homo sapiens
agcggggttgccagggaaacagcggtcccacaggcaggagggatctggaccggcggcttcttccactaccagagaggctgaggtggcgggagagacccctctcctctgggggatttcaatggatattataaagggaaacctagatggaatttcaaaaccagcttcaaattcaagaatacgccctgggagcagaagttcaaatgcttctttggaggtgctctcaacagaaccaggatccttcaaggtcgatactgcaagcaacttgaactctggtaaagaggaccactccgaaagcagtaatacagagaacagaagaactagtaatgatgataagcaggaaagctgctctgagaaaataaaattggctgaagagggatcagatgaagatctggatttggttcaacatcagataatctctgagtgttcagatgaacccaaattaaaagaattagattctcaacttcaagatgctattcagaagatgaaaaaacttgataaaatattggcaaagaaacaacgcagagaaaaagaaattaagaagcaaggtctagaaatgagaataaagctgtgggaagaaattaaggtaagaattatctaa

SEQ ID NO: 119037 - DNA, 314 bp, Homo sapiens
agtaagacagccatggtttctgccctgacagtactcacaggctagcaatttcattcattcattccacagatatttccagagtgctgtgtgccagaccctgtcccagggatacagcaagaaaaaaaaaatcttacattcctggctctcccattcgtgctgtgccccatctcactccctttcatttcttcattcatttgttcattcttccatttggtatttaccaggccagatcatgtgctaagcaaaggcatcagcagtggagaaggccagcatgtccccggccctcacgtcactcacagttaagccccaaaatg

SEQ ID NO: 119038 - DNA, 460 bp, Homo sapiens
agatgacagattttctgtattgtagatgctctagcattaggggttttatagacctgggtaaagacatcccctcccagttctagcccgttcttagagatagcaaagggctcaaccaggagcaagcctctcacatgcaaaccaacaaacccagagtctataccccctcagccatcaccatatctaactctcacacaccaagccaattttcccccgccctaaaccaacctggggccaggtagcaggcaggtagagaccccgtctagagcccaaagccctcctgaaattattcaagccggtcaatcccaaactgtttgccctgccttgcctcacctttcctgtgggaaccccagtaaaggttctgggctagattttctccttactcctgtcttctgcctccaaaccaaaaaaccagggcctcctgctgtggccctgcaagcatgctgtgcctcttctttctagg

SEQ ID NO: 119039 - DNA, 287 bp, Homo sapiens
gcacgagattacattcctaatttactgttaaggttgattagaattcaagcctctcaaaagcatgcaccaaaggtcttgggctgtggaaaacatttttataaaataatccattaatgcagaggagtgcaactaaattagttagcaatttgctgagcatgaattaatgaacagagcttcttccagctcccagagttgtaattttcataataacctcagacctttatttggcaggttgtttagttttttcgtttgaaggttttcattagtctaatgaggactgtgcaagg

SEQ ID NO: 119040 - DNA, 229 bp, Homo sapiens
gcaacatgtggcagagcaacaagagaaaatgtcccctcctggccagcaacctgcatcagggcatagttctgggtggacatccccagcagcttggagttgatggagggtcccagattcacctgatcagagcgtgatggtgaatgacatggcagcattctggacgttaggactttgggcacaatttttggtgcaatggtcctaaactgactcttattctgcaaacctttcc

SEQ ID NO: 119041 - DNA, 725 bp, Homo sapiens
atattagtatagctgctgcagctttcttatagttgctcttttcatgatatatgtttttctgtttacttttaaatatgtcattaaatctaaagtgtatctcttgtagatagcacatcattggatcttatttttatccaatttgagaacctatgccttttgattgtttattcatatttaatgttattatttacatagttggattcacatctgctgtttttcttgtgttctatgtctcatttctttcttcctttttttttttgctcctctattccttttttactgctgcttttgcattaagcaaatattttctggtgtaatattttaattagtgattttttgggaatttagaaaaaagttagttcttagtggttgctctcagaatctacttcagaattagtctaatttccagtaaggtatagaaatgttactcttatatagctatattccttctttccctttttttgtgttattacaataatacattactataattgttactttttataattttttgtcttttaaagaagcagaaagaagaacagagaccaatatgtatttttaaagtttgttatattaagtttcttatttactgtttctgattcttttcatttgttgctgggtttttagttgtcatcttgtgtcattttcttactccagaatggctttgctcccacatacatcctttgtgttgtgattgtccattgtattacatatattctatatat

SEQ ID NO: 119042 - DNA, 359 bp, Homo sapiens
gcaagccacagagtgggagcaaatatttgcaattaatgcgctgaactagtaaaagactggtatccataaaattataaagaactaccaatcaataaaaaccacaacccaatagaaaaatgggcataaaatacaaacaggcaattctcagaacatgaaaacagagtagtcaataattacataaagagaagttcaaacttactcaaagtagggaaatgaaaatcaaagttataatgaatattacattccacacccatcaggttggcacgctcaaactgtatgtttaagatgctatatttaatgttattacaatcaaactatgttcaagttttttaatatgctattacaatcattataacagc

SEQ ID NO: 119043 - DNA, 376 bp, Homo sapiens
aagcagtgagaccagcattaatccaagacagggtgatgctggcttgagccaaaggtataacagtggaaatgatgggaagtggcccgctatatttcgtttgccctcctctgctccacttaccattgactgatgtcattgtctttgtctgtgtggtacctagttaagaggggctgagtgcgggcaggttaaagaagagaggcctgggtccctttgtgaaggcgcccggggctttgcagttggagttctgttaagtgtttctggaacgatttgattctgtggaggggcctgggtcaggtctggcaaatgccaaactctgtgggtagagggcaaattgggccccagccatttttacagtagaggtacatgttcctcccca

SEQ ID NO: 119044 - DNA, 442 bp, Homo sapiens
ttactcggaacacagaaagaaggcaatggtgttttatgaaactaacaatgaaggaaccctattatatcctttatttctcctattacttgcctatattaatcaaccacttatgctggatataataacataaaagtaaaggtagagatagggccacccataattccttttcttctcagtccttccctactcatcagtaagcagaaggtagaatgttggtagaatatgtattcatcaagaagtgaaatacaaaccactgagttcgtttgtacagagtttctactgttctagcaaaaacaaactacacatgcaagtgcaactacaaaatgactgtataatttcagtttccacaaatgaggtaaatattcttatatttgcattttaaatggacactacacaacatatagggatgaacagtaaaatacaggctaatgatttaaaattc

SEQ ID NO: 119045 - DNA, 333 bp, Homo sapiens
acttttgtttttcatccaatttttcttttctttaaacttccataatactgacagctataatatcatatactgccatgatggttccacatacatggatcttttttcttccgtatagtcataggtgtgcactctgatttcatagcacctggcctcatgctgactctagtaaagacttaatacagcggacccttgaacattgcaagggttagggatgctggtcctccgtgcagctgaaaatccacatgtaactttggacttccctaaaacttaactgctaatagcctcccgttgactagtagtcttaccaataacatagtcgattaacacatattt

SEQ ID NO: 119046 - DNA, 297 bp, Homo sapiens
cttacatttattccttaccataactctgtgagggagatgatgatattctcattttatagttgaagaaatttaggcatggagaaggaaagtaacttgctgcaagactagtaaagtggcagagccaggattagaacctagtctaactccaggacatgtttttgaccactgtgcatactgcctgcctctcaagaatttgcccgatgtagtcaaattgatgacaaagattaatctaccttctgctaacctgaaaactcaaaggtagggaaaaatagttgtcattattgctttttcctctaa

SEQ ID NO: 119047 - DNA, 902 bp, Homo sapiens
agataaggaaataaaagcaggccacccccgagccagctggggcaatctgcttgggtgcccttccgccctgtggaagctttgttcttttgctcttcatagtaagttttggtgctgcttgcaacttgggtccgtgccacctttatgagctgtaacactcactgcaaaggtctacagcttcattcctgaagcccgcgagattacaaacccaccaacccaccaacccaccagcaggaaagaacaactccagatgggaggaactaacaactccagacgcaccacctttatgaactgtaacactcaccgtgaaggtctgcagcttcactcctggagtcagcgagaccacgaacccaccagaaggaagaaactgcggagacaccatctttaagaactgtaaccctcactgcaaggggccgtggcttcattcttgaagtcagtgagaccaagaccccgagcatccttaacatcccagcaccccctctcctgctgcaattcagtccaattagcccctggcccaaaatctaattgtgtgcaaagcacaaattaacactaaaccggatcagtgttgtttctttttaatgctgaaacagttcagggctcactcatcctacttcatcagctagattgcaagctccatgtagggattttctcccttttatttaaaccaccaggctgccccttttagtggacctgatgcgccctaaacactcctgggccatgagctaagactcaaagaatattggtcacatgagtgtctgaagatgacttctgtgagtgcctgcagatttcctcatacatcccgcaaggaagagcaatgccccatgtccatgaacggggaccatgactccccactctggctgcgaccttcttttttattctcaccttgctgaaaataatcaactcat

SEQ ID NO: 119048 - DNA, 427 bp, Homo sapiens
ttaagacatggtcttgtagacttgtaaaagggtattatccctggaaaatatgctgttcaaaataagggcagctggaagcctacagatgactgtttgtgccagagcagtcaattgattaccgcagggagctttcccttctttttaaggactctggagagttcattatgaaatcttttgaaagatacatgagcaggaccaggctagacctggattccattagctttgtctattcacaaatagtggttagtattagaagagtcataaatctcttatttattttgctatcagagaccttcataaaactcagctctttaataaacaggttgagatactcagcaaactaaatggaaaaaatgataaactaatgtaaacacagcatttgccttgtttatcattgagtgcctgtctgtgcttgttgctttctgaa

SEQ ID NO: 119049 - DNA, 388 bp, Homo sapiens
tcaactgagcatgcttgcaggttgcagccctttatgagaaataaagctctgctttccaaatttatgaacctcatcattcttcagttgccatttttatgaagctgagtaactagaagtcaggtttttggcctttctagtcgttgctcctgtgcaaatttatagatatattgcccattaaagcattattattatctgagatctaaggccatatttgttttctagaagtagttatatttttactctttttcttcactattacatttttatttattaatactatttcatgaaatagcttctagtaggtatggttatgtaagttagtaaatacagaccattcactcatttgtaatctttttaccttccaaatgacaattagaaaactatatat

SEQ ID NO: 119050 - DNA, 172 bp, Homo sapiens
attgattatcttgatgcttcccatccttccagccccttatgagggaaggcaccttcgcgcctaatcccggaaatgggatgttgaccttcaagagctgacgcctgcgtttatcttgaaaggaagagtggcattagtgatgtggaaaagggggttttaactgtcaaggctggaa

SEQ ID NO: 119051 - DNA, 603 bp, Homo sapiens
ccattggtccttctcttctatgtccttgggctgttaaacaagcgcaaggcattgcatgtgtagatggtgtactttccaccctctaagcagtctctggatagggaaggctcccagtcctgagcggcactctgctgtgtgtgtctttgtgtctgcgtggtcaaggagagctgtgtgtgccacaacagggagcctgtggtcttcctgagatgaatgggttttccatgggaaggctgcaagtcgttgtgacatcttccagcgaggatttgggagtgtgacttgtgcgtaacagaaggtggtttgggaaagtagcactgtcaagtcctcagcagccggccaaccttctgagctgcagtgacagctcacgggggactatcagaataggaacacaccaaattcctaaggcttgagggatctgcctgaggctgcacagccttcaagtggcatagcgggctattcctaagaaggaaagtgttcctctcttacaggttaatgcccgtagtagcagtaggtagtagtaggtagtagtttcatcaaaccccacatcaaaactgctatgtctaaagcaatcgttgacaggcaaggctggttctgtgctgaggaacg

SEQ ID NO: 119052 - DNA, 288 bp, Homo sapiens
tccacaacaatgtgaatatacttaacaagactgaactgtacacttgaaaaattaagatggtgaattttatgttagcgtattttaccacaattaaaaacatttttaagggagactacctaaataaattatatctatgcaatggaatattatgcaaacatagcacttatgtactaagatgaaatgatatactttaagtaataaaagcaaagtgtagaataggatgatggatgccactagttgtgttttttgtttgtttggtttttttgtttttgagacggagtttcgctc

SEQ ID NO: 119053 - DNA, 587 bp, Homo sapiens
tactcatcaccctttccatctgctgctcaaacatcaatcacagtatttggtacagagtagcagcacaataagtggctgatgaatcagtgagcaagtgaaataaaaactaacgctttcaaataggtttttattaaagaggcagatgctgccttcagatgggactgacttagattgttctttaataagctgaataactaatatcaaattataatccattaaaatatgcttagacagctgaggtaatatagtcaaattacatttttcagagtaactaaagagatggataattaacatgattctcagatttactgattaatattagatgtgccaaataaccctgtgatcttaaggtacaattttgacaagcattgagtgcctgtgctactgattaaagaggaattcaggcactctagatgacagatgtgcaggatggcaaagttaaggttgataactgaaagtttagaaacatacttgtactttacttaagcagaaatacaattatcttatgcctgggaaagacgttctgagagatgcaccagtattccagcctgggaaagacgttctgtgagatgcaccagtattccatc

SEQ ID NO: 119054 - DNA, 209 bp, Homo sapiens
ttgtacccctacctcccaccatcgaaaaatgcttgaaactaaaaatcaagatgagaaattaaaataatcattagcatctttgtaaatgtacaaaaaaaagtcagcctacctacagatatacacaaatatgtacaggtcaactttccctagaaaattcataaagaataaaagtataattattgactaatttttttttttttttttgagat

SEQ ID NO: 119055 - DNA, 550 bp, Homo sapiens
ttggaggaaagacagccctgataacagaaggcagagacgtgtagaaacttttcctccctcagagatgatttgtcagaggctttgcagctccacaggaagggtctgcagagatcatgtttctagactacagtaggtgagcccaccctccagtttttgtttttaataacatttgttatttctctcactatgaaatcaatgtttattttagaaaataatagaaaggcaaagaaaaccctactcagagacaaccattggctgttagctttttaggtgttttcttaatatccagtaatttacatatatgtttattttcaaagtgtgtaaagtatagaaattatagaaaacagtaacagctcccatttattatggtttgcactgtaatcttactactcaaaggaaacactgtaaaccatttgatgcatttccttccagtcaaccaactttgctaggcttctctttttctttttctttgtagtttatttatgaatttatgctgtaattctttagcaggcactcccattgtgcctgggactgagctgtgagctttatg

SEQ ID NO: 119056 - DNA, 565 bp, Homo sapiens
tcattttttccttgtttctttggggagccaggcatttaaggtctacaacattaaaaagcaaccacatttatgggtgaatttagaatgtcactgtgcattagcagggaaaggtataggctaagaaaagacctcatttttatacctcagggtgactcctgacacagataaaacctacaatgatcaaaaaccaaaaatcagcaaactctggcaaagggggagaatctgatttccagttaccatattattaaatgtccagttttcaaaaaacatcacaagacatacaaagtagtaggaaagggtggcccattcaaagaaaatataagccaacaatagaaactatccctgagaaaggtcaaatggcagacctaaaagacaaagactaaatcaaacatcctaaagatgctcaaagaactagagtaagacgtgtaaaaagaaaaaaaaaatgtatgaacaaaacggaaatatcaatcaaaaagaaaaactaaaaaaaaagtttgggccgggcgcggtggctcacgcctgtaatcccagcactttgggaggccgaggcgggcagatcacgagg

SEQ ID NO: 119057 - DNA, 323 bp, Homo sapiens
ctaagaggccattgtagggttattaattggattaatttcaataggcaggcccaaggagagaaaaatggggaagggccagttggtggagcaatcagaacacatgcaacattcattaagttcgccataagggtgcaggtcatggcaccctaaaaagacttacaataggaacatcagagattatagatcaccataacagttataataataatgaaaaagcttgaaatattgtgagaagtatcgaaatgtgaaagagacaagacttgagcatatgttgttagaaaaatgatgctgacagacttgctttactcagggttttcacaaat

SEQ ID NO: 119058 - DNA, 173 bp, Homo sapiens
tgacagggggtggtctttttgtaggcgtaggaaatctctctgatgggagacctaaaggaagtaagggaacaagtcatggaagtgtttagtggaagtgtgttccagatgcaggaaacacaaatgcaagacccgaaggtgagaacgtctgcctgtgcaagggcagcactgtgtgt

SEQ ID NO: 119059 - DNA, 601 bp, Homo sapiens
cttgttctcatacattactagtgtaatgaaaactgatacaacctttctggaaagcattttgtcaatacacagaagagctctaaatgttcatatatattgacccagcaatgctagaattctatactaaggacatagaaatgtgggtaaggattcatatttttaaatgtttgtcataaaattattgataacatacaataattataaaccaaatttattggttataatgaagtagttaaaaatatgagtttatagagctacatagacctatcactatttacttcatgcattatattggaactccaaacatgtaaataacagaaaccaatttagattattttaagaagaaaaaaaggagatgcattaaaaggatagacagcgtctcacagaaccctaaggtggaatgaggctaagcttggagaagaaaccacaactataaacagaacagtcacaggatcatcttttctttctatatttccgcttcatttttctttttctacagaccagcttctctgcctttcagtccacatgacagacaaaggcttctgaatttacttcctcattgagaaaaccagcccagactctgtacctgttctcaaatcct

SEQ ID NO: 119060 - DNA, 336 bp, Homo sapiens
cttactacagtctttgaaaaagagaagaaacctaaatttgagattttattagctcttttaaatgattccacaaagcaagtaaggatgagtatcaacaacttaacaacagactttgattttgcatctcagtccaattggagatattttactgaattaattctaagaccaatagaaatgtcagatgaaattcctaatcagtttcaaaatatttggcttcatttaataacactggggaaggaatttcagaagcttgtaaaaggtatttactttaacatcctggaaaataattcctcttctaaaactgaaaacttgttaaacatatttgccaccagtcca

SEQ ID NO: 119061 - DNA, 433 bp, Homo sapiens
ccttgtatcttttttctccacatcctctaatgactaataaaatgtggctttcattgcgaagtctttacactgattctcctggccaggtctgtcctcaaccaaatcacttccttattcaagtgcgtgtaaacagcctcctcctggctgcatacttctgtctaccctctggctcctgacattgtggttcacatgaagtttttggtcttttaaatacccattggaagacgctcaaaaaggctcagaaaactgttccttgattttggtctgcttcattttttgggaaagcaaaacaagtcccagcaccacatgcttctctactgctgcctttatttatttattaaaaaacatccaacacactacccaaagaattttcaagtgtctccttccacttttaccatctaccactgccaaaatctaaccactagcagagtaa

SEQ ID NO: 119062 - DNA, 181 bp, Homo sapiens
agcagtcaatccttccctctaaccactccctcctcctaagatttcagcatttaatgcctgtaccatgtatctaatacttagtacacaatgcctaattcttgttttttaatttttatttaaaatactaaaacgaaacagagacggggtctcgctatgatgcctattctggtctagaactccc

SEQ ID NO: 119063 - DNA, 194 bp, Homo sapiens
ccgctttgactttccaaagtgctgggattatgggtgtgaggcaccatgccttgccaaatttgtttcaaggagtaggagtgatcagctctttcaaatgctgctggataggtaagtaagaggagaactgagactttgcccattagattttggcaatatagaagtcactggtggccttctcaagagtagttgcagtg

SEQ ID NO: 119064 - DNA, 492 bp, Homo sapiens
ccaaacaaaacaaaacacacttccgggccaagccctaaaggtagtaaccagccaggctaatagaaaagaaggcatggagccaagaatatctcagctgtagaacctgctagggccatcttggaaaaatcagtcattaacctctgcttcaggtgggtacctatattctgtgcctgtcatgagctgaaatagcatgaccatgaaatctgggatagctgtcatgataacgtattaatagaaggggcattggatggggagaggcaggatccacacgtggaaacaaccatgtcattctggacccaaatttccttctttgtaaaaagttgatttggaattacgtggtctgtaaggaacattgttcctttaacattctattattataggatgtcttatgcggcctatcaggcatgagacattgttgagattcccttgtctcaaaggtaatcacagcatatcatataccaaggatgggttctttggttttccgcaccacca

SEQ ID NO: 119065 - DNA, 835 bp, Homo sapiens
agaaactgtccaatcaggcatgcagctggaaagaacaggctacttccgtaattttgcgggtcctttgtgtttttctgcgtccagagctgcagttcttctcttcactgctctgtgtcctctgctcctagaggccaagcctatgtgtccttgtgtcctgcaggtatctgcagatttatggctaaaagaccgggaccccctggaagccgggaaatgggactgttgacattcagagacatagctatagaattctctctggaggaatggcaatgcctggattgtgctcagcggaatttatatagagatgtgatgttagagaactacagaaacttggtctccctgggtattgctgtctctaagccagacttgatcacctgtctggagcaaaataaagagtcccagaatataaagagaaatgagatggtagccaaacgcccagatgtccagttttcaacatcatctgttgaagggattatattttctccattgtctgctcatggcaaccttgaggcagattatttggtcatacacagaagagttcattgctgggctttctattttgttctatcatgtctttatctgtctttttgtgaataccacatagttattgttattgcagctttttattatgttttgaaattatgaagtatagtgcctctgtgtttttcatgtgtgtttctctagatttggttcataataaaatttaaaaattttaaacaatatttcaggaataaatatacttttggaattttgatacagattatattaaatttgttcaccactgtgggtcttaacaaattaagtcatcacttaaatatgttggcccttgagaaaaaat

SEQ ID NO: 119066 - DNA, 242 bp, Homo sapiens
agcctcagctggaccacatactagttgtgtgcgtggcacatacgtgcttattagaagtgagttgctctttccctcaaaatcactcaacgtaaacagctctatattctgtgtatgtctggtaccagccttggagtgattttttttctgtggtgtaatacctcgtactcgagccactgtttgaagtctgtgtaggtctcgtctctaggggaggtggccggctggattctagggcactgtggcgt

SEQ ID NO: 119067 - DNA, 684 bp, Homo sapiens
catggtggtgggcgcctgtaatcccagctactcgggaggctgaggcaggagaatcactggaacctgggggggcagatgttgcagtgaatgaagatcacgccattgcactccagcctgggtgacagagcgagactccatctcgaaaaacaaaaaagataaaagaatatttgagggccgatgcagaaggttcaccatccaagtaataaagtttcagaaagaaagaacacagaaaatggaaggggggaggggaatcaaagaacaaagtcaatgaaaagatctgagtcgcttcacagaaaaggcctaaccaagtatctgtcacgagaaacgaaaacagccccactccaagccacatcattgtgaaacttcagaactcaaggaaaaagttcagatcccattaggtccaggaagaacagcacagcctgcacacacagaagccggtgctggcagggcctccatcttcaacagcaacactggaagctaaaacacagtggagaaacacctttaaaattctggaggaaatgaatgtccaccctgcaattttacaccatgctaaaatatcaactgagggagaagaaaaaaaatttttgaaaagcctgtctcccacgctgctattcacagaaaatgggcactatatgcccaaccaacatcatggcataaaccaagaaagaaaatgacagcagagac

SEQ ID NO: 119068 - DNA, 829 bp, Homo sapiens
gaatcgcttgaacccagaaggtggaggttgcagtgagcccagatcatgccactgcactccagcctgctgacagagggagattccgtctcaaagaaaaaagtaccacagatcaggtggcttaaacaaccgacacttattgtctcacagttctggaggctggaagtccaagatcaaggtgtgaacaggggtggtttctcctgagacctctctccttggcttgcagatggtgcctccctgtgtctacacatgattttcctctgtgcctgtccactccccaccttctcacctgtagaactcagggcttatttatgcttatttgttgactctctctcctcataataaggtgtgcagcagtgtggggtcaggaaccacatcactttgctcaccatggtgttcattctttcattcattgattccacaaacatttcctggatgcctgctagatccagtccgcccaggtcctgcagccgtggctgcatacaggtcagatgaggctcttgctcttgtagaatgtacctcctcccggggggcaacatgacataaacaggtaaacaaagaagtcaacaggatggccatggagagtaagtgccatggagacgaccgaacgtgcggtgtgctgaggagtaaagtgaaagctttttaggaaagggtctgggggtctgggaaggcatcctgagggagagacctttcacctggggctgaatactgagaaggggtggccatgaggaagtcttggggaacagaattctgtgcaaaggaaaagtaaatgcaaagtgtctggagtgggaaagaccttgatctgtgtcttacctatgtctataacattctg

SEQ ID NO: 119069 - DNA, 123 bp, Homo sapiens
ttaatcatggaggtctctgaggcagagagggaatcatacttggtaagagtttctaactagggtagtgaagacctggctatttccttattctcccacattcagagatttctgctttaattttgg

SEQ ID NO: 119070 - DNA, 248 bp, Homo sapiens
aatgtgcgtatactatagataaaggatgaaggagaaggaccagaggaggtgggaggaggaggaggagagagaggtctgggtgaatgtgcgtatactgtagacacattaaaggatgaaggaggagggcagaggaggcgggagaaggaggaggaggagagagaggtctgggtggattcccagcacagggattcccagatctgccatccatgacctcaagagggccatgcgaggccctgggagctgcatac

SEQ ID NO: 119071 - DNA, 515 bp, Homo sapiens
cacacacacacactcctagccctattcctccttgaagagaaaggctttcttgctcttatccccacctcacattgtaagaaggggccaggagctaaagaagataacatatgaaaaatgcaactacccccaggattttaagattcaaagaagtggaaatccttgggagtggtgcatccatacttgggaaagaaggaaatcccttcatctctgcattcatagtcccctgagacagaaagactttttctttcttaggcttccagttgatgtgggaagaatcatccaggtggacctggcaggatgacaggttgggtaatggaagccaggggagtactgtttaatcaagtattcactgttctccagctgggcttaccagtggagtgaagtaggagtggcatgtgtgggaaggggaaagaccaaaaaagcaaaagtgacatccatattctcgggccccagccatcttaactagtctcactttaattacttttagtaggtcctaccatactgtgagagaagac

SEQ ID NO: 119072 - DNA, 817 bp, Homo sapiens
  misc_feature (622)..(622): n is a, c, g, or t
gaataaatgttgatttagtgactcataaacttgttttggccaactagaatctaacaactactgaacagttgtgttagccacagtcctgagcactttgtttattagcttatttaaactttacaacaaccccataaagtaggcattattgttattctgatactcttttaaaattgtaaccaacttctgtgcctaaaatcttaactcttatgccaatagctttcaaactttattgaccacatcttatagtgagaaatatatttaacattttacatacatagcgacctagagtagatacatagatacatgtaagtgacagaaaacttcataaaatagcatttcctgtgaataatgcactgtaatattttctatttagttttattaaaaaagctgttttgggccaactaaattggtatcagaactcactaatgtgttgtgacttacagtttgaaaaaacacagcattgagccatagtgcttaccatctgtattttatatagacacaagatgactttcctcatgtgtgcaaaggcaagatggggcatgagacaaagtacaaaccaaaccaagacacatgctcagatttacagacatgagtcattgggcgccttggccaaggtttgttngggggatacatttttgaaaaaacacaaaagcatgatacgaaaagagagaaagaacttttgtgatgagagagttaatgggcccttgagaaagaggttattaaagaaccagtgtagtttgagggacgcagaggggcacccagatagagtgagagagagaaagtgggacaaaagagtgtattgcacaaaggaaaagag

SEQ ID NO: 119073 - DNA, 367 bp, Homo sapiens
aaaaagtgtgtctgtcctgactgtcattcaggcctaaccattatcctcggtaaaggggcatccaccaaacatcagcaaagcagggctcacggtgaaaggaaaactctccattcctggttcacacagttttcaaccaggaagtaccctgcaccaatcacctgggagaaatgcctgatctctcaccgtaaattgttcacagcttcttcttctccaaacccctgttcccacctgcaagtgcacacacagctcacagcatcagcaaggtatgcatgaagaggcagcgaaacctttggaaggggacgatgcagacagacctggtgtcggatagcagttctagccgcgcaaccctcagcaagtcacttagtct

SEQ ID NO: 119074 - DNA, 654 bp, Homo sapiens
cgcccggctgcttttttgtatttttagtagggaccgggtttctccatgttggtcagggtggtctcgaactcctaacctcaggtgatctgcctgtcttggcctcccaaagtgctgggatgacaggcgtgagtcactgtgcccagcttcagtcccttctcatcacccgaaaaggaaacccagtccccatcctgcatcaccctgatccatcccccaccccagcccccgagacccagttgtctctgtggatctgcctgtcctggacattcatagaaacaggatcacacactgcgtagccttctgtgtctggcatctcttactgagcgtgatgtcctcaaggtgcatccccgctgtggcctgagtcagagcctcgctttttaaaataaccaaatacattttttttgagacagagtcttgttctgtcaaccgggctggagtgcagtggtgcgatctcggctcacttgaaccggggaggcagaggttgcagtataagcccgagatcatggctactgacactctagcctgagcgaccaaagtgagacatctggtctcagaaaaaaagaggcagctgggcagaattgggctgcagggtatagatggatgagcttaatctagaagataggagtgggcgtaaaaactgggaatatttaggtagaa

SEQ ID NO: 119075 - DNA, 234 bp, Homo sapiens
cttgaagataagaacccagaacggggttatggagttaaaaggctggggatgttttgaaaggcttttgattaaaaattgttgaattgctctccagaaaggctgttccagtttacattttcagcaaaagtagatgagagagtgcctatttctctgcattcttgccagcactgggtattactgttttccttacttcttgccaattttatggggaggaaaagaggtggctcactgtgt

SEQ ID NO: 119076 - DNA, 588 bp, Homo sapiens
ttacacttgtctcccaacattttgttttctcctgtgaggaaaccttgctaattttcaatcaaacaacacttatttttaaccaagctatgaaaatattttccaaggtatgcaaattcagggtttcaaaacaaaattacaaagttaatttttattgctttacttaactgaaacaaagtaacaatgataacaaacatgactacattttgaggaaatgtagtaacagtcagccctccctatccacaggttctacatctgtggattcaagaccgcagatcaaaaatattcagaaaaaaaaaaatttaaaaaatacaaactttaaaaaccagtccagtatagcaactatttatatagcatttacattgtattaggtattataagtaatctagagatgatttaaagtatatggatgactgtgcataggttatatgcaaatattatattttacaccactttatattaaaggggagcatccaaggattttgttatatccaaggacctgcaatcaattccctgtggataccagggacttgtcacaagttcccaagatcctgttttctatttctgaaggagctcagtgagcccaatgct

SEQ ID NO: 119077 - DNA, 460 bp, Homo sapiens
agtatgcctggctcgctctgaacttaggagaattcttataaagaatacttgtagttcatcaaaactgtgacattcaggacctgttctctttattgtctttaagttaaatcctatcttttcttggctttcatcataaaattaggtttccaatgggagtagagggaaaaaaatctgttcttaggttctcttcttatcctgccttttcctagaccacagatttctttaaagccattccttggacctccaggtttcagttaagatttagggcagaggaaccaaaacttctatgctactaaaataaaaatcatgtgcggtcagggacctttttgttctactttgtaggcccggtacctgccacatagtaatcattgaatattccttgaataaattttattctcaatgagtgtgtaacacaaaaaagttctagagcactactatcctaagatttctgcctactctc

SEQ ID NO: 119078 - DNA, 736 bp, Homo sapiens
atactgcaatatgacattacactagcattgttggtaagattcaactatcttatgtagagaagttatataatgcttatattgataatcaaatgtattaagatattgagttaaagcctcttcagaatgtaatctgggtgaataataaatggcctgagaaaacagaattcagctaaccattatctaatttcaatgctaaatagttctgcacagatttatcaaaaagtaaaaataaaagcagattgagaggaggaatgaataattttgtttgtacaaaatattaaagtgtatgtaatgggcttgtaggatgcattagtaatttttaaaaatcaatctttaccctacactgtgtccataaaatgctaggcatattcatgttaatattactgttgttactgtcatataaatgccatattcaatgtagatgctcagaaaaatatgattgttttgctacaggagagattagaccagggacaataaatatggattaggcaagaatgtgttaactcagcagcccagggttttttcaaccctgcacattcaaaggtaaggtttgtttttaggactagctagcctctgagttctggaaatagtcttaccgtgaagagtgtttttgtatatctgaggccttgggtttatggtgaatgactgacttatatgcctgaggccctgagccatgctgtatttatttgaaccatgtggtatcaatttaaccagatacgtttattctaagatatga

SEQ ID NO: 119079 - DNA, 993 bp, Homo sapiens
tatgggccaggctggtttcgaacttctgacctcgtgatctgcctgcgtcggccttccaaagtgctaggattacaggcatgtgccaccgcgtctggcataaaaccctattattttgatatatgggcccagattctggccctgcatcagtatgcttttaatatttaatttatggaaaaaattaaataataccctttcgattttagccagcttgctcacacacagagttgttcacaaagttaatttttcacaaacctacaatttgcttaaactttcagttttattttgtctttcaaccaaaaataatctttaaactctctaaattagagaagattttctcttttaaaaaaacccatattcccatgtctttaagcagttttaattacataccaagtgcagagcctagaatacaggacagaactgcagataaagtctgactctctctggcctagctaggagtcatggctacctccatatgtccccaggccttatctggaatctaatggctctaaagtaggtaaattgaacaattacaaaagtcacagaagccacttatgaccttaaagcatccagcagaaacagtatctgatctgcctaattcagaccaaatgaagacagttttatttcatcaataatctttaaaactatctttatttaccaaagattactaacgtcatgtgaactaaaatgcattagagttgctatttctttgaaaaaatatttaagtgcttattttttaagccaattaattacagctcttaaacatcacacacacaacattataaatatatagaccgaagaagatgcattagttaagatttttcatttgctgattttttaggggttttttttccccattttacaaatcttgtcacgactcacagagaccatctatgccatgcttggactgtctgacttgtcctatgtgtccctctttcgtgaataatcagtcgttctattttaggacaagaatttaccatacaagatcttttctca

SEQ ID NO: 119080 - DNA, 514 bp, Homo sapiens
agctctggaaaggcaatgcctttgtctgtgaaagaccatgaggcacaaaggtagcattttcctctcaaagtgatgcaagctttttcttggccccttcgccagacctgtggagtactgggcctaccgtgctcaaccccttgtgggagggagcacatgaatgagtgagtgcgggatccagccagctgctccaggcactgacacaggagcaagctccttgaggggaatgcagcagcacccaggtaagggtgtccatgaccctgaagccccagaggggctgttacagtgctcctttatttccaccgtctgcagatggtggcatgttagcagctcagttggccccttgcctcgctgcacggggcatgccactggtgaggggcaaagggccagtttgacagccttttctgggtacctgtacttggtgggccctgagctcttgtccagtgtccaagaagaatgaggtcacgcagatgattgaaggatggtgaaggtggagaattttactgagcaatgaaaa

SEQ ID NO: 119081 - DNA, 599 bp, Homo sapiens
gaggttgggagtttgagaccagcctggccaaaatagtgaaaccctgtctctactaaaaatacaaaaattagctggatgtaatggtggtgcatgcctgtaattccagttgctcaagaggctgagacacaagaatctcttgaactcaggaggtggaagttgcagtgagcagaaatcacaacactgcattccagcttgggcaacaagagtgaaactccatctcaacataataataataataaaataaataaaaagagaaaaaactaaatatgaatactatttgaagtgctaatataacaataataaaacatatcataacacatatctatattagcacaacatgtaacatagtatgaactctatgtaagcacataaaacaaattgtagatacttatgagacttctgcttcaagatgacaatatcagttatgtatttaatttccatctttccaaattcctatgcaaataacaaaataaatataatactacaaataaaaaagtgtttaaaaagctagaaactgaggtatttccataaggtacaatgcccaggttagaatgtatttagtggatggacatgcaaaacatgattcacagcatgcacag

SEQ ID NO: 119082 - DNA, 305 bp, Homo sapiens
gcaatggccaattctgatgcaaaaccaactgtgtcagtcacccctggagtatgtgtgggctcaaggcatggcaggggcaaagccctccagcagatggcaaagttagttccaaccactaactttggagcccatcccctgacacgagacaaaggacctgcttaaagcactttccaggccccagggcagccccagcaggcccggcgcacagaggagcatctggtggcgaccttccttgagcacagtgatggtgagacagacacgcggcaggtatggagctgaggcccagcatgatgcagtgcctgagg

SEQ ID NO: 119083 - DNA, 163 bp, Homo sapiens
gagcgcccggacttcaagtggaagtttatctgagcccagatctcagtagccagaccccgtccctgccccctgaagggagagcatttgggggtgagtcctttcaaagaagagccaatgcattagtaatttgttcttcaggcctgacagaagcttagcttccaaa

SEQ ID NO: 119084 - DNA, 514 bp, Homo sapiens
ttcacaatatctcttaaattcattaatacctctaaatttaacttagttgcatgaaaagaaaggggtttctgaagacaatggaacacatattttccatggccctttaagttatctaaaacctttacatattttatggcagtagccacagctttaaacatacgctaatacacacacaaactctatcaacagcatgagcatgagcactggacctatgtccaaatgacttagaaaaattcagtaaagaacaactttgttctggactgaaaagggttataagcatcttccctaaattgagtaaattaccagctatttggaaagtacaatatattggcttttattcaaaagagcaacatttaattctggcaacactgccaaattcctcctttcctctattctccttttcttagagaaagtgattaagagaccaattcccatgccagctgaatgcttataagagcatcaaaggtcctctgtcagaattcagaacctgatatggcttagaaaccactacacc

SEQ ID NO: 119085 - DNA, 351 bp, Homo sapiens
ccaggagagaaaagaactgaaacaggaacccggcaccttcccaggggctgaggcccaccgctgactgcactcaagggaaggattaggtctggcttagctcagacaatgtggtagaatgggggcctcagcactgcacctgcattcccttcccccacctcaccatgaggtttgtggggagagccaggtagagctgggaagctggaggcaggtggagagaggggagcagctgcctgggacccagtgggctgtggggtggatccagctcttcttccctctcgccagtaccccccttcctcaggcccttgggccctgccacccaccctgagctgaaagtcagtcccactcaggaga

SEQ ID NO: 119086 - DNA, 307 bp, Homo sapiens
  misc_feature (18)..(18): n is a, c, g, or t
  misc_feature (24)..(24): n is a, c, g, or t
  misc_feature (28)..(28): n is a, c, g, or t
  misc_feature (52)..(52): n is a, c, g, or t
  misc_feature (55)..(55): n is a, c, g, or t
  misc_feature (62)..(62): n is a, c, g, or t
  misc_feature (67)..(67): n is a, c, g, or t
  misc_feature (78)..(78): n is a, c, g, or t
  misc_feature (84)..(85): n is a, c, g, or t
cctagttttagaagttcnatagcnggcnttgggtctcaatctcagctgcccncgnataaccngagangcttgtagccnggtgcnntggtgtgtgagggaggctgaggtggggggtggggagttgcggggagctctcccgtggacagagggcttggggaatggccagcaaagcaatgcctgatgacccgtccttagaaaaagaagtgtgtagtgttacagctctgttagaatttgtctagccccgttaaaaaaaaaaagaaacaggaatacgtgtgtgtgaaatagtggttaacagtggctttcctgg

SEQ ID NO: 119087 - DNA, 439 bp, Homo sapiens
atgcacagctgcctgtcataaaattaaccacaatttgctgtccaagtctttccctggaagttacaagccttcaatagaacccagagttacaaaaaattatatgagactgatttttccagtgtaattattgttcagatatggagacagatttttggtgcttcctactgtgccatcttcccagctccacaatatacatttacttctcaaaacaattagatgagagacagatatggaaattgaggaaaagaagtgctcaatagattgaccaagatttcatatttggctgtagagctgggatttaaatctagcaggtctgattcctgaacccacactcttaaccaccatgctatacaacctctctctgtgactcttcatgtcctctgtggccctctatgatgatatactttacactgtattaataagtactagaaaactgaag

SEQ ID NO: 119088 - DNA, 687 bp, Homo sapiens
atgtacacactgaagaagttccctaaaaatgtggccaagggaccaccactgaagacattccctaagcatgtggctaagggaccaccgccctgtacacaaaccgtgtacacactgaagatattccctaagaatgtggccaaggaacagcactgaagacgttccctaagcttgtggctaagggaccaccgccctgtacacaaaccgtgtacacactgaagatattccctaagaatgtggccaaggaacaccactgaagacgttccctaagcatgcagccaagggactgccaccgtgtacacactgaagacattcactaagaatgtggctaagggactgctgccatgtacacactgaagatgttcccaagcatgtgaccaagggaccaacgccgtatacacactgaagatgtttccaaagaatatgaccaagggaccgccaccttgtacacagtaaagacattccccaaggttcagtcatgggcctgtgaaacatcacaggaaagaatgatgtgcaggatccagttattccaccataaggtgtgtacccaaaggaaaggaaatcagcccatcaacgggatacctgcaccccctgtgcactgcagcactactcacagtttccaagatatagaatcaacccatgtgtcaatcaacacatgagtgcctcaagcaaatgtggcatagacacaca

SEQ ID NO: 119089 - DNA, 475 bp, Homo sapiens
cagtatacggtagcctgtgtgaagggttctggattttatgtgcagggctcagagcagccacagaagagttttaagtagctcagacatgatcagatttgtactaaaagttattactctggctgcagacgatgaggtaggagcacagctagtggggtgaccaagcagaaaccacagcggtttcctgtctgagagacggatgaggtttggaccagagagatgatggagatggaggcagtggatggatcggagaggcatggcaagacacggtgatttagaataggaagggagcagtctgcccatgagagaggaattaaggaggacaaagaagtgtttagcttgagcaccccgatcatgccatctgctaaagtagggatctacagggaaatatatttgctggataagatcatcgtgtcatcataaagatcattctcctcccatatgcgtaagaaattcaatttcagaagtcttttgagaa

SEQ ID NO: 119090 - DNA, 469 bp, Homo sapiens
tttcctggacgttgcaagcttgttctgacctcggaacctccgtacgtgcagttcctgctaccaagtcttctctcccccaagacactcacaggctcagctcctctccttattctggtctctgtccgaatattgcaaatgtccccatgttgcagcccctccctggtgctccttcatcctcttccttcggctccatctttccttgtggccctcagcatcatattttgtattcactgtctctctccctctaacgtcagcttcctggaggcagagacctcttctgtcttgcttatctttgtgctgccaaaactgtgaggtatccccaaatgttagtcagctccctcatttcaccaatgggaagggacctccctcaatgtttttggtaaacttacatataaactttgggtgggggcgtatgcatagtccaaagttcacttgcacatttatattagtggtagagttacacatgcct

SEQ ID NO: 119091 - DNA, 445 bp, Homo sapiens
acatgttggaagtgggcactcaagatggcgaggggtctggaaatgctgtctaatgagaaacacaggaaaatgaaaggatggtcttcctgtgcataggggaagtagaccagtttcatgggctccagagggcagaacttgggagctgtagaacaaccggtttcagttccattccatgcaggggagtcatttcaacggagtctccccatccagcaataaatacctccgtgcaggtcatgagcttcctaccgctaaaggtgtgcgagcagggcctggatgccccttggtcagggaagcagaggggaaaagattgattgaggtgctcttgaaggtctcttctagtgatcagcttctgatttttattatgattatgatattactctaattatagaaccatagcggctatgactctacgtgtctgcatacatttttaaaaccagacctcccc

SEQ ID NO: 119092 - DNA, 678 bp, Homo sapiens
ggaaaacattttttttttgtattatttacattaacaacagctaaaatgtatttcatatttttctacattctgatattccctaataataaattactctggacagaaaatcatcaccatgtatagacctgggcctgttgattggttgtaataacatcgattggtccaggcaattgcagctgtgtctactataaagaaaaatttaaaatcccaggacccccaaacttaagcctggaggctgaatcatgcaacagtatactttagcgaggtcctcctggaaaggaaaaaagccttaggcatgtgggaagggctaccccacagactattcataagtaaattctttgctagcctcccataaacaaggacatgccaattataactttaggtatacagtctaagtctagctcctaaaactaaagtgtgttaaattctacactgataatgtgaattacaaatgtatctcccaggggaagtacaaagagaaaaggactactccctttctctccactcaccttatcttctgtaaaatgtagattcacttggcactaacggaagtctcacaggaatgtaaccattcgccttacccctacctgcccctcttcctacatgccctccctcattttaaggaaatgtataaatactaaaactcctgaaaacctccagaaaaacagccacagatac

SEQ ID NO: 119093 - DNA, 324 bp, Homo sapiens
cagaatactaatgattttaatgaagatgcagcatcttgcaaacaaataattagtttttcgcatgaaaggataaatagaatcctaactaacaaatcggtaatttttcttagagcttttaggttttgatcataacaagtggcagtttttatgtgtagtttgaagaatttattttgttattctatagtcaccgagagtgattataactccaaagtttgtgtaatacagtgtatgtttattttgagttaacagagttgtaagcctgagacaatcaaggctctttgattcttcttttgaacaccacacctaaacacctggaatagtgct

SEQ ID NO: 119094 - DNA, 329 bp, Homo sapiens
ctggagcttctgagagtatgtgtctccaaatttctgtatcacgttcctgtgccacgttttacctactccctggcacacagtctatttggctccaggtcagtctgtctagaacacatttgttcatgcctctctatagatgcaggcctgtagaggcaaatatgggtgtacaaatgcagatataggtctctctatagagatcagcagagctgcctagatacagaactacagatggagttcatgcgaaaagatggtcacttaacctacttcatttcataacacaagttaatactgaattggtaacgatcatatcaggtgccgatgaatagcga

SEQ ID NO: 119095 - DNA, 381 bp, Homo sapiens
tccagaactctgaaagttaaccaaagaattacagtagcacggggagcatttattcaagaaaaacagctgaatcttagtaagaacagtgggctttgtgaactttttttttttctgagacaaggtcttgctcaggctggagtgcaccagcaccaacatggctcactgcagcctctgcatcccagttcaagcgattctcgtgcctcagcctcccagttcaagcgattctcgtgcctcagcctcccgagttcaagcgattctcctgcctcagcctcccgagtagctgactataggcgccaccacgcccggctcatttctgtatttttaggagagatggggtttcaccatgttgcccagactggtctcgaattcctgacctcaatc

SEQ ID NO: 119096 - DNA, 468 bp, Homo sapiens
tggacaacgatgaacttgaatgactttatgtatgcatgagcattaattttaaataaaccagaaagctacttttatatttcgaaaaataattcatttgggttttcctgttcaaactttgccatgttactcctaagtgataccttacttactgagatggatcagccttagggagaggtttgtcatactttgttacacactgaatagcctataattatcaagattatatccagttagcataaagtgctgtttagtttctgttatgtcgttgttaccatagctggagtcgggtgggtgtttaaacctttgtgaactcaaaattctttaatgatgatggaatatttcatgttttagtattctcttgatctagagtatatgttcaaatgttttaccaggtatgtgttttttacaggttcatataatatataaaatgcatttctgttccaagaaaaatacaagtggtaaacagtt

SEQ ID NO: 119097 - DNA, 366 bp, Homo sapiens
taagggttattcctttattctctctataagttcttttgaagtgtggtgttagggaaccatgcctcagtttccttattaactcttccggtgtttatcagatcattttttccctacgctatgtcatcttaaacatcttaagcaattcattgacattttctgtttcttttgtattttcattgactatatttccagttctagattagctgattaatgtacaaattgaattattttgcatatccttggtgatataggctgttgatgccaaaggaggaaaaacaaatagacttgaaaactggtcgaatgcgtcagaaagccatttttggagatgattctgtgcgaacgtcttctctcctttcttgatctctt

SEQ ID NO: 119098 - DNA, 651 bp, Homo sapiens
atctttgtcaggctaaatttatcatataacttttcagtgtctgccagaatacaagggagtgggatggttggtggaagcataaatgcagtgggtcttgattagaggagaagcaaggatgggagaagaggaagagtaataatggaaagttataggtgaggagaaattccagaagaattgaggaatgctaaagacaagatttattcacctcacgattttgctatgagcaagctccctgacccctaacattttcacaacaaagttggacatgcatatgatatcaacagaaccctttcaaaatggaagctatgtcacatagccagattagccaccatttgtacactgttccctccaatggactctggtgcttgtataacataatgtattttcagatacaaacaggtttatttcccttgtgcttgtccttgtattctttgcccttcagttggtggcatccattgccttagagaagagttactacagaagaaagagagggaaaaacagaacccatatgagtttcaaggatcaagacattttaaaacagctttattgacataaagtaaataatatgtattgaaaatatgtaatattatgagtttgaacatatgtaaacactcatgaaaccatcatcacaattagcacaataaacatgat

SEQ ID NO: 119099 - DNA, 150 bp, Homo sapiens
ccccagtcagcccttggaaaggtagcactaagctacattctcttggttccccactcctcaataccagtgaattttattaatttttagctaccagatgggccaaaaaatgctgcttttcttaggatagtagggcagttgagtattttctaa

SEQ ID NO: 119100 - DNA, 117 bp, Homo sapiens
aacataaactttatgagctttttgttattttggctctcttagcatgcactataggtatcaaaccagcctagctatgtcatcaactgttcaaatttccacaactaaaaaagagccctc

SEQ ID NO: 119101 - DNA, 306 bp, Homo sapiens
tccctcaaggtgatgtaaggatgagatgagttgtaggtaggttggtgcccactggaactggcacatggaaggcccctgaaaacagtcaatgaacatcatccctgcttatcagcattgagttgatgccaagggcctgccctttgtgagtgtcatgggatggaaaaggagaaacagagggaagaggcatgatgcgagaggaaggagggactaaaaggcacaggagcagggtgaggtgcaggcacctctgggacaatgtatgagttggtgccgcccagtgtgtcaagcctgcagaaaatggtgccacca

SEQ ID NO: 119102 - DNA, 320 bp, Homo sapiens
catatctcagttatgtaccaatggagatgaataacagtgcaagatggtgaggactgtgtctgaggagaagggtaaaaaagggaaagtggaagggatcttcactttataatttttctttaggattaactctggtgtgaagattatataaagtaagggaagggatctaacattcatttctatgtgcccacactttgtactggacacattatctttattatctctcttaattttcatagcaactgtggaataagttatcaccatgatacagtacaggatgaacaaattctgagattaacaaatctgcctatggctgctcaact

SEQ ID NO: 119103 - DNA, 122 bp, Homo sapiens
tattctttttgagcttacacagaacattcataaaaactgaccatataatagcccaaagagacacttcaattaccttcccaaatcaatgaaatacagactctgtacacaaagtatagagcaat

SEQ ID NO: 119104 - DNA, 166 bp, Homo sapiens
tggtattaacacagtgaataattctttttgttcaggttttcaaaataatggcccctagctataacgattctgaaataacagacctaaaaatcatcagcagttaccccggcaggaagtgtgctttgcgatgcctgggtcagcacccagacatccccactcggcctga

SEQ ID NO: 119105 - DNA, 729 bp, Homo sapiens
ctagtatattgcccaggctgctcttgacctcctgcgctcaattcatccatctgcttcagcctcccaaagtgctgggattataggcatgagccttcatgcccagccagattattatttttcaattccactgactaaaatatttgcaaatgaacttgcaacatagttaataagaaagtgttcctaaagataatcgttgtcagtaattcaatcatttcaagttaattatgatcaatgtttcatatgatcaacttgtagcatcacatctcactgtttatattaacctgaccaccggaggttgccatctcccatccaagtgttctgtgaaggtggtattccaccatcagatgtggtaattctcatgtttgctaccaaaatagaaaaagagttataccctttaaagttattttagggaaaaagaattttcagggtttgatttattgatggttgcttttatttgtgtaaaagtcccaaaattaactcaaaggatttttagtaagataaaaggaaaaaggtaacacttttagaaatttgtgtttttccaactgtttaaagctatgtgcatgactaattagaaattttgtttaaagttcacgtcagtgagccagaaggtatttttttaaaataactgttatgtggcccagcattgcactgtatatgttgagttttgcatggtgtatagtagcacatcaaagtacaatcctatagactgatagtgataggtatggctgc

SEQ ID NO: 119106 - DNA, 626 bp, Homo sapiens
agcgggggacacgtggatatttacagtgcaagctggggccctaatgatgatgggaaaactgtggaggggcctggccggctagcccagaaggcttttgaatatggtgtcaaacaggggagacaggggaaggggtccatcttcgtctgggcttcgggaaacggggggcgtcagggagataattgtgactgtgatggctacacagacagcatctacaccatctccatcagcagtgcctcccagcaaggcctatccccctggtacgctgagaagtgctcctccacactggccacctcttacagcagcggagattacaccgaccagagaatcacgagcgctgacctgcacaatgactgcacggagacgcacacaggcacctcggcctctgcacctctggctgctggcatcttcgctctggccctggaagcaaagccaaatctcacctggcgagatatgcagcacctggttgtctggacctctgagtatgacccgctggccaataaccctggatggaaaaagaatggagcaggcttgatggtgaatagtcgattcggatctggcttgctaaatgccaaagctctggtggcatttagctgaacccaggacctggaggagcgtgcctgagtact

SEQ ID NO: 119107 - DNA, 545 bp, Homo sapiens
actctcggacactgggtaaggggtggggggcgggcacggcggactacatttcccatcatgcctagcactgcggtcctcactaaacaaaaaaggaagtcaattccttcacctggatccccggcggccccgggggagggaggggccgggaccgccgactgcgttggagactttgcactaagttcctggtcagctgtggtgtttgtgtgtgtgcttctaagttgcactgccttggttcagccttcggttgcatttcatgaaaccagcattgttcgagcctgtgagaaccccgtcctgtgtcttcagctcgatagatttgtttaatttaaaagccttttgttgtaaaaaggtggggttcgtctgcagcccctctggttctctgccatcagcaccgtgtggactccaaaacgagttgccaatccttcctttctcggcccttttccctcattaccctgtatttttgtgcatactgaattgtatatcaccgggtaaaactgttcagattgtttaaatttataatcttaataaaaagtcgattacagaagaaa

SEQ ID NO: 119108 - DNA, 2212 bp, Homo sapiens
gagcgcgagcccgcgggtggcgcgcggcgcatggtggcggctcctttcggagcgcagccgaacctctgacccggactccgttacccctgcccggcgcgccccggcggccggctggaggcagaaacagcagaagcgttaacagcagcagcggcggcggctgctccgccgccgtctccgcgggagcatggagtgcgccctggacgcccagagcctgatcagcatctccctgcgcaagatccacagctcccgaacccagcgcggcggcatcaagctgcacaagaacctcctggtgtcctacgtgctccgcaacgcgcgccagctctacctgagcgagcgctacgccgagctctaccggcgccagcagcagcagcaacagcagcagccgccccaccaccagcaccagcacctagcgtacgcggcgccgggcatgccggccagcgcggccgacttcggcccgctccaacttggcggcggcggggacgcggaggcgcgcgagtcggccgcccggcaccagctgcaccagctccaccagctccaccagctgcacctccagcagcagctgcaccagcaccagcacccggcgcccaggggctgcgcggcggcggcggcggccggagcgcccgcgggcgtgcgcggggggcgctctcggagctgcccgggtgcgccgcgctccagccgccgcacgggcgcgccccaccgcgggcagcccttggagcctctgcagccgggtcctgcgccgctgccgctgccgctgccgccgcccgcgcccgctgcgctctgcccgcgggaccctcgcgccccggccgcctgctccgcgcccccaggggccgcccctccggccgccgccgcttctccgcccgcctccccggcccccgcctcctcccccggcttctaccggggcgcataccctaccccttcggacttcggcttgcactgcagcagccagaccaccgtgctggacctagacactcacgtggtgaccacggtggagaacggctacttgcaccaggactgctgcgcctccgcccactgcccctgctgtggccagggcgctccgggaccgggcctggcgtccgccgccggctgcaagcgcaagtattaccctggccaggaggaggaggaagacgacgaggaggatgcgggcgggctgggggccgagccccccgggggcgccccgttcgccccctgcaagcgcgcccgcttcgaggacttctgcccggactcgtccccggacgcgtccaacatctcaaacttgatctccatctttggctccggcttctcggggctggtgagccgacagccggactcctcggagcagccgccgccgctcaacgggcagctgtgcgccaagcaggcgctcgccagcctcggcgcctggactcgagccattgtcgccttgccactcggggctgagctgggggcgagcgggggcaggcggctgatgttttataaattgtaaaataaaaaaaaaagaaatctaaaatcttggactttatttttgcagagagaaaaagcgcctatttaagtatgctttgtgtttctcctactcctttttttctttttattgtagtgattgcagtggtgtttagcgaggagcctaccacgtgagggagggctgctgcccggaggaggtgccgggcagccgggggcgaggcagggcgccctggccgccggggcgcgccgggggcgcagctcaggagggcgccggacctgggaagccgattccaatcagttgtcagacccgggaagcccgacgttccgctctcccgagtccctctggatccccggcggccccgggggagggaggggccgggaccgccgactgcgttggagactttgcactaagttcctggtcagctgtggtgtttgtgtgtgtgcttctaagttgcactgccttggttcagccttcggttgcatttcatgaaaccagcattgttcgagcctgtgagaaccccgtcctgtgtcttcagctcgatagatttgtttaatttaaaagccttttgttgtaaaaaggtggggttcgtctgcagcccctctggttctctgccatcagcaccgtgtggactccaaaacgagttgccaatccttcctttctcggcccttttccctcattaccctgtatttttgtgcatactgaattgtatatcaccgggtaaaactgttcagattgtttaaatttataatcttaataaaaagtcgattacagaagaaa

SEQ ID NO: 119109 - DNA, 2311 bp, Homo sapiens
gagcgcgagcccgcgggtggcgcgcggcgcatggtggcggctcctttcggagcgcagccgaacctctgacccggactccgttacccctgcccggcgcgccccggcggccggctggaggcagaaacagcagaagcgttaacagcagcagcggcggcggctgctccgccgccgtctccgcgggagcatggagtgcgccctggacgcccagagcctgatcagcatctccctgcgcaagatccacagctcccgaacccagcgcggcggcatcaagctgcacaagaacctcctggtgtcctacgtgctccgcaacgcgcgccagctctacctgagcgagcgctacgccgagctctaccggcgccagcagcagcagcaacagcagcagccgccccaccaccagcaccagcacctagcgtacgcggcgccgggcatgccggccagcgcggccgacttcggcccgctccaacttggcggcggcggggacgcggaggcgcgcgagtcggccgcccggcaccagctgcaccagctccaccagctccaccagctgcacctccagcagcagctgcaccagcaccagcacccggcgcccaggggctgcgcggcggcggcggcggccggagcgcccgcgggcgtgcgcggggggcgctctcggagctgcccgggtgcgccgcgctccagccgccgcacgggcgcgccccaccgcgggcagcccttggagcctctgcagccgggtcctgcgccgctgccgctgccgctgccgccgcccgcgcccgctgcgctctgcccgcgggaccctcgcgccccggccgcctgctccgcgcccccaggggccgcccctccggccgccgccgcttctccgcccgcctccccggcccccgcctcctcccccggcttctaccggggcgcataccctaccccttcggacttcggcttgcactgcagcagccagaccaccgtgctggacctagacactcacgtggtgaccacggtggagaacggctacttgcaccaggactgctgcgcctccgcccactgcccctgctgtggccagggcgctccgggaccgggcctggcgtccgccgccggctgcaagcgcaagtattaccctggccaggaggaggaggaagacgacgaggaggatgcgggcgggctgggggccgagccccccgggggcgccccgttcgccccctgcaagcgcgcccgcttcgaggacttctgcccggactcgtccccggacgcgtccaacatctcaaacttgatctccatctttggctccggcttctcggggctggtgagccgacagccggactcctcggagcagccgccgccgctcaacgggcagctgtgcgccaagcaggcgctcgccagcctcggcgcctggactcgagccattgtcgccttctagggacccccgagggcacagggacccggggccccgcggggctggggccagacaaagactcggcaaaggggcgagaggagggaacgagcgggcgccgggccactcggggctgagctgggggcgagcgggggcaggcggctgatgttttataaattgtaaaataaaaaaaaaagaaatctaaaatcttggactttatttttgcagagagaaaaagcgcctatttaagtatgctttgtgtttctcctactcctttttttctttttattgtagtgattgcagtggtgtttagcgaggagcctaccacgtgagggagggctgctgcccggaggaggtgccgggcagccgggggcgaggcagggcgccctggccgccggggcgcgccgggggcgcagctcaggagggcgccggacctgggaagccgattccaatcagttgtcagacccgggaagcccgacgttccgctctcccgagtccctctggatccccggcggccccgggggagggaggggccgggaccgccgactgcgttggagactttgcactaagttcctggtcagctgtggtgtttgtgtgtgtgcttctaagttgcactgccttggttcagccttcggttgcatttcatgaaaccagcattgttcgagcctgtgagaaccccgtcctgtgtcttcagctcgatagatttgtttaatttaaaagccttttgttgtaaaaaggtggggttcgtctgcagcccctctggttctctgccatcagcaccgtgtggactccaaaacgagttgccaatccttcctttctcggcccttttccctcattaccctgtatttttgtgcatactgaattgtatatcaccgggtaaaactgttcagattgtttaaatttataatcttaataaaaagtcgattacagaagaaa

SEQ ID NO: 119110 - DNA, 2007 bp, Homo sapiens
gagcgcgagcccgcgggtggcgcgcggcgcatggtggcggctcctttcggagcgcagccgaacctctgacccggactccgttacccctgcccggcgcgccccggcggccggctggaggcagaaacagcagaagcgttaacagcagcagcggcggcggctgctccgccgccgtctccgcgggagcatggagtgcgccctggacgcccagagcctgatcagcatctccctgcgcaagatccacagctcccgaacccagcgcggcggcatcaagctgcacaagaacctcctggtgtcctacgtgctccgcaacgcgcgccagctctacctgagcgagcgctacgccgagctctaccggcgccagcagcagcagcaacagcagcagccgccccaccaccagcaccagcacctagcgtacgcggcgccgggcatgccggccagcgcggccgacttcggcccgctccaacttggcggcggcggggacgcggaggcgcgcgagtcggccgcccggcaccagctgcaccagctccaccagctccaccagctgcacctccagcagcagctgcaccagcaccagcacccggcgcccaggggctgcgcggcggcggcggcggccggagcgcccgcgggcgtgcgcggggggcgctctcggagctgcccgggtgcgccgcgctccagccgccgcacgggcgcgccccaccgcgggcagcccttggagcctctgcagccgggtcctgcgccgctgccgctgccgctgccgccgcccgcgcccgctgcgctctgcccgcgggaccctcgcgccccggccgcctgctccgcgcccccaggggccgcccctccggccgccgccgcttctccgcccgcctccccggcccccgcctcctcccccggcttctaccggggcgcataccctaccccttcggacttcggcttgcactgcagcagccagaccaccgtgctggacctagacactcacgtggtgaccacggtggagaacggctacttgcaccaggactgctgcgcctccgcccactgcccctgctgtggccagggcgctccgggaccgggcctggcgtccgccgccggctgcaagcgcaagtattaccctggccaggaggaggaggaagacgacgaggaggatgcgggcgggctgggggccgagccccccgggggcgccccgttcgccccctgcaagcgccactcggggctgagctgggggcgagcgggggcaggcggctgatgttttataaattgtaaaataaaaaaaaaagaaatctaaaatcttggactttatttttgcagagagaaaaagcgcctatttaagtatgctttgtgtttctcctactcctttttttctttttattgtagtgattgcagtggtgtttagcgaggagcctaccacgtgagggagggctgctgcccggaggaggtgccgggcagccgggggcgaggcagggcgccctggccgccggggcgcgccgggggcgcagctcaggagggcgccggacctgggaagccgattccaatcagttgtcagacccgggaagcccgacgttccgctctcccgagtccctctggatccccggcggccccgggggagggaggggccgggaccgccgactgcgttggagactttgcactaagttcctggtcagctgtggtgtttgtgtgtgtgcttctaagttgcactgccttggttcagccttcggttgcatttcatgaaaccagcattgttcgagcctgtgagaaccccgtcctgtgtcttcagctcgatagatttgtttaatttaaaagccttttgttgtaaaaaggtggggttcgtctgcagcccctctggttctctgccatcagcaccgtgtggactccaaaacgagttgccaatccttcctttctcggcccttttccctcattaccctgtatttttgtgcatactgaattgtatatcaccgggtaaaactgttcagattgtttaaatttataatcttaataaaaagtcgattacagaagaaa

SEQ ID NO: 119111 - DNA, 634 bp, Homo sapiens
aaattgatcttgataaagacctagcatctctcaatgtggatcacttgagaaagaatagccaataaattggtttattttctaaattaggagcagacaggattgcacctaatttaggtgctttctgcctctgttttcctaagattaaagcatgtttcaaatagaatatctaaatacaggtactattttatctgccaatttagaaacctctggattcaattatagaaaatactatattttccattgtgtataagacacaatggatatggttgtaatagcttgagtactttcatataaagtaaaatcaaacatacttttaccattctttcatgagttcaagtcataaaagaaggtataccatttatttctgaatagtatctgtactagtgatgatttcttgactccataatgaaagaactaaatttatcagatatcaatatcaatactataaaatccttcatgccacttgttttagaaaagaactcacattgatgttataatagaacaatgtcatgtcagatttttactatctgtgattaacattgcagaggacctaatttgttatattatagttaaatgtatagcaaaaaaaaaagataatgaaattccaatgtccttagaagggtcttgcctatta

SEQ ID NO: 119112 - DNA, 761 bp, Homo sapiens
gggaccacgaagaaaccacacctactgattgatgccttgatcttgaactttcggtcttcagagctgtgagaaaataaatttcagttaagtcactcaatctatggttttctgttatggcagccctaggaaactgatgtaggtatatacccagaggtgagattgctggatcatatggtaattctattttaattttttgggaaactgtcatactcttttccacagtaggtgcaccattttacattgccatcagtagatcacaagggttccaatttctccacaatctcattgacacttgtgtgctgtttgttcgtttgtttatagtagccatcctactctctgtgatgtggcatctcatcgtggttttgatttgcatttccgtaatgcaatgtagtgatgttgagcaccttttaaagtgcttgttggccatttgtgtatcttctttgggtaaatgtctattcaggtcctttgcccatttttaaataaagtgtttgcttttttgttgttgagttgtaggtttcttatcctttaaaaaccctcttgttggacctaaaccctgggagaactgatgaccatagaagttttcaaggaacctaattttagaaagagagggggctacagatatgtagattaattgtgtgacttactgtccaaaccggacacttttgagaagggggtgctaaacatcattataattttatattttaaaaaatatttattgaccaacaaattcatgttattatattggtggacttataacaatt

SEQ ID NO: 119113 - DNA, 495 bp, Homo sapiens
aagaaaaaaaaatcccaagtcaaaataactagaaatttactggagacctacttatcaaactttaaataacttaaaggaaaaaaggcactgtcaatctgattactgcacagtaattaagaactcaagctcttggacaaggtctctcaacgctgacactcatatattttggcgagaagtctttgtttggggaagggggctgcatcctatgcactgcaggatgtgtagcagtattcctagcctctacttgttagatgccattagcagcctgtccactcccataccccagttgtgacaaccaaatctctccagacattgctaagtgtcccttgagaggcaaaatcaccctagtgaaggctttaaaaccgcctgtgtttaaattcttaccccacaatatttaactgtgtgacaagctttttaacctctctgtctcagtttcctgtttgcaaaatggcacataacagtacttacctcagagttttgctgtgatgattatgg

SEQ ID NO: 119114 - DNA, 410 bp, Homo sapiens
atgagtcttttcccttggcttactttaaattgtattcattccctgtaataaaccataatcatcagtgtaacagcttaaagtgagttctgtgagtcattcctgtgaatcactgaacctaagagtggttttcggaacccactgaactagtatattggtgccaaaactgaggcagtcctgggcagtgttccctgtaatttatagttcactgaactttattttttgtctgctgttctgaaggtacatcatgactaaacttttgaagatggtgtcagaggtgagaacagtgttagggactgtgccttctaactctcgcaaaatcctttttaattacaaaagtaaaccacattataaagaatttggaaggttttctatgaccaccctattaaaaaaaaaagagtctcttgaattca

SEQ ID NO: 119115 - DNA, 418 bp, Homo sapiens
atatcacttgtgctgttctctgacagtgttaagggcaacacatatagacctggagccaagtggattttgccttttcaatgggttttctgactatgattaataatactatattgtatactagaaatttgctaagagaatttcaggttctcttaccacacacacccaaagaagggcaactatgtgagatgatgtatatgtgcataagaatatcataacatcattttgtacaccttaattatagatcattttaaataaataaatcagtttcctaagatgaggtcagaggtcaatgacttcctgagcctccttttaacttcatcctggagagtcagggtaaaaggtggtgtcatcctagtctaaacatcatcttttcttctcctatagatcatatattaacaacaacaacaacaacaacaac

SEQ ID NO: 119116 - DNA, 1063 bp, Homo sapiens
agttctttcttatctcaggacattgcattcacaacacattctgcaatcattcttgagaactctaagtgagaaaatggggagaaacgggttggtctaaggtcacccagagaattattctccagtcaacatatttcagtatatctgcagcaagatcatatttcaagtgtgctggtagagcttctcctttgatggaaacatttgttatacagttctgcttccttcacttgcagagagttgttgttatgatgagtctccaatgaacctgctgcatccctgctgcatatctattatctggggtaatcttcctaaaaagcagagtgtcaagcagcatgcctggttattccaacttatgcagaaatagaagtgtcctaagcttggggcaagatggccgactagacacagcaagtggaattaccgccagcaagggactgagacaactggcgcactcctaacaaatcatccgatggaaggcaccaggagtggccgagggaagacacagaaggaagctgggctgaaacaggaggaacattgcactgggctaccatgcgctgggacttgttcctggcccccaaggactctcagggaatggatctaacggtgggaacctaagtcacacaactacaaaatttaaatacaatgggaataattggatgctgaggtggtaggcaccaagtgacagcactcaactatcaacctcaaggtcaatcctaaattgggcaaaggaataaacggaagaatgacccgcgctccaatggactggctatctctgacttattctggatttcctaacgtgccaggtgttagattcccttttgcttagtcattcaaaccaaaggagctttaagtatggaactccgcgagatcctaactcaatccagccattcataattccaggcgtataaaaactcatactggcgcccgaaacaacagaacgcaacaaaaatctcccagggggaggacgcgcaaaggggggaagcccaagagggggcggagacaccgttggccctcaagggggagacaccgacgcggggcgacaagggccacacacggcccgcggaaaggc

SEQ ID NO: 119117 - DNA, 251 bp, Homo sapiens
ctgctttttggaagtctctgcttagggcagatctctgattcctccctggctgagcggggagccaggctggcattccagtttgtgctgaggactgggcaggtctggggatcatagaggagggtggctaggggccacatagagggctgcccctccctgtgagcctctgggtgtgactgaggctgtggtcaaaggagtggccgggaaacagccaagatggcttcgtgccaggggcaagaggcacaggtgtgggg

SEQ ID NO: 119118 - DNA, 250 bp, Homo sapiens
taatcagagttgacttctggataaaggtttttccacattcactgcattcatagggcttctcccctgtgtgagttctctggtgtgctatgagggttgacttctggctgaaggcttttgcacattcgcagcattcataaggtttctctccggtgtgagttctttgatgtacaactaagtttgctttctggataaacacttttccacattcagtacatttgtagagtttctccccagtttgacttctctgact

SEQ ID NO: 119119 - DNA, 383 bp, Homo sapiens
ctactactactaaattcgcggccgcgtcgacgtaagaatgtctgggatacttttgtctaagtgaaaaaaaccaaagttcagaaaagcatagtaggagcagccgggcatggtgactcacacctgtaatcccagcactttgggaggccgaggtgggtggatcacctgagatcaggagttcaagaccagcctggccaacatggtgaaaccctgtctctgctggaggtacaaaaaattggccgggcatggtggcgcatgcctgtaatcccacctactcatgaggctgaagcgggagaattgcttgggcctggggggcggaggttgcagtgagccaagatagtgccacggcactccagcctgggcaacagagcgagactgtctcaaaa

SEQ ID NO: 119120 - DNA, 761 bp, Homo sapiens
gtcattatccatcgagtccttgagaaacaggaagttgaagtgttctacccagactttggaaatattggaattgttcagaagtcctccctgaggttcctcaagtgctgctacacaaagcttccagctcaggctatcccttgttctttggcttgggtgagaccagtagaggaacactggacatcgaaagctattttgcagttccagaagttgtgcggtttgaagccattagtgggggtagtggatgaatatgtagatggaatccttaacatttttttgtgtgacacatcctcaaacgaagatgtctatttccatcatgtcttgagaacagagggccatgctattgtatgccgagaaaatatctcttctaagggtttcagtgagctcaaccctttagctttatacacgacatccagtggagggccagaggacattgtcttgacagaactgggttatccttcccagcagcactattttaatgaagaccgaaagataagtccacagtcaaaagagagtgagttacgtatcttgcaagatattaatgatgaaaagtctttaagtcatcttaaatctgagtcaaaggagccattaaaggattctgaatttgagtctttgaaaacctgtaataagagctttgaagaagatccaaagtggtccaacccagaaccaaacgatctgaaggaagaaaatgaggatgagatccccactggaatgccatgcctggagtcagtgaccataggtgatgatatttgggatgagaactg

SEQ ID NO: 119121 - DNA, 184 bp, Homo sapiens
ggaggcaggactgtcactcagctttttgtacagactggaaactagattcagagacaggtagcagcgtgtaaaggaatggttcagggagcggaggccccagagggactccatggaatgtattccgaccgaatttcgtcaaagtgctcgtccttgtgtatcttggaatgaataacatttaataatc

SEQ ID NO: 119122 - DNA, 451 bp, Homo sapiens
caatttcttactacagagttagacaaactttttctttaatgggggagtgggagactgggagactgatcatacatattttagaccttgtgggaaccacatgtgatctctgttgcatagtcttctttgtgtccccgcccccacctttaacaattttaaagtgtgaagaactcagcactttgacccagggccatagcttatataaccttggggcagtgggaagggaaggaaggatggtggaagggcaggtaatggtggaatccaaacattttaccatgttattaaaggcctttcaagatttggatatctctctggtcttactgtcttaatcttctatcctgttgatgagaagagtgaaactctataaaatatttgaagagatttatttggagccaaatatgagtagccagtggctaatgacacaacctaggagaccctgagaacatgtgcccaa

SEQ ID NO: 119123 - DNA, 432 bp, Homo sapiens
tcactctagagtatcccctgcggaccctatcatgtgatatactctacaaaaagcctgctgagtattttgattgggattatgttgaatctagatcaatttagggtgaaaaacttttgttagattaatcccttagtatttcacatttttaaatgctaaatggcatttttcaaaaattttcttttttcttttttttgagacagagtcttgctctgttgcccaggctggagtgcaatggcgaaatcttggttcactgcaacctccgcctcctgggttcaagcgattctcaaactgcctcagcctcccaagtagctgggattacaggcatgtgccaccatgcccggctaattttttaaactatttatagtagagagggtgtttcaccatgttggccaggctggtcttgaactcctgacctcaggtgatctgcccacc

SEQ ID NO: 119124 - DNA, 415 bp, Homo sapiens
ttacaagatattcatagattactcaagtattccttgttaaatgtagaacagagtaattcatgatatcaaataattagaaacaatgtatttgtccaacagtagtggaatggttaggttctctgtggcctatcttctggatggaataaaatgcagccattaaaaatgctgtctgtgaagactatgtgatgacatcaaagtactcctgataacaatgtaaagtgaaacaatcaggatgtgaagtgtataaaaatatgcttataactatgtaaaaactatatattatccaaagtacttcagtccctggattttggtgtagtaatttttttccatttctcatatgtttcataatgtgcttattattgcttttatcattagaagtgaattgttaatatgctaaagtaaagtgattggaatg

SEQ ID NO: 119125 - DNA, 608 bp, Homo sapiens
cattataacatggtggttaaaatcatgggctctggatccagtctttttgggtttgaatcacaattttgccacttaccaggtttgcgatcttaggaaagttcacttttcaatgccttgttttcttcacccataaaatggggattataaaagtacctatttcaaggggtgttgtgagcattaaatgtaaagcactattctgagtagtccctgaaacataataaatgttctataaaattagtgattatatattatataatgtatgtatagacctacatagaaaaaaattgttcatatatatacacatatatatacacatacatatatatacacacacacacactgtggtcatatgtaggctagatttttttcattgctttcataaaaatcagttttattgaagtataatttacatgtgatatgatgtacccattttaagcaaacagtttaatgagtttgaaaaatatatacactcctgtaactactgcagtcacaatcaggatataaggcatttctgtcatcctcccaaattccctcctacatagtgtcccagtcaacatctatctacccttaacccctggccctaggcaaccactgatctcctttctgtg

SEQ ID NO: 119126 - DNA, 259 bp, Homo sapiens
gctaggttggagttagcctggaggccttatataccaagagtttgaatttcagactgaaggcttctgaatgggattaaaatgacaggaaagtaagcagcagtgcacatatacagagatcagagactgatgttcaggacggaatggggaggaagagcctggaggttagttctcaggggatgtttactttagcaatcataaagagtccaggcctggcgcggtggctattctttcttttttaaagcaagaatttcatttaatg

SEQ ID NO: 119127 - DNA, 274 bp, Homo sapiens
tggggaagggttggtggtcaagacttttgacccagggatgggagctcatggcaacactgtgctgtaggtgtcccgagctcatacctcagagctttgatctagaattctcccctggctttcttctccgacagggccaattagaagcagggtaggcccgatcgtgaggtctcagtagaaaatgtaaggggaggctgctttaccccagagtgccctccatcacccttggtgcttcacggtgtgcccagcactgtgcgaggccctgagatcagtcaga

SEQ ID NO: 119128 - DNA, 481 bp, Homo sapiens
attactgtactcagggttttcctgtgcccctttccccagaaagatgagtgctacatgcttttggccgacctcatgcttcagtgcttgacagctgcatccaggtcctggcaggccggcactgtggtgagatccagctccgaggtgacttcatatagcatgtgcttgaagcccgcctacccagacttggatatttatagcaggggagcagctagaaaaaaaaaattaaatatgctacacccttctttatacgatgtgggacagagacaggcattgtgaggaatttcaaaggcagagctgtataatccagcaggatatttttaaatgctgtttgttgccattggcagggccggtgtttcaaagaggagggaaaatgagagtaactgaggatgacaggctgccaggaatgctgaaggccgagacatggagctccatgctccgaggtatacaggctctgaaccctgatgtacttcacagtcacata

SEQ ID NO: 119129 - DNA, 487 bp, Homo sapiens
caacaggtttgtaaaataggaattcttagtttcattttataggtgaacaaatgaagcattgaagggttatgtagtgaataaggtcatagagtgaataagtggtagagccaggattcaaattcaagtctgcctgactccttgcttgtaccactaggccatgcagcctccccagcaggaaatttctaagactgcttctcccaggaatttagctgtctaggagatactactataccgaatccaaataggacttagaaattccaataattggggtgttgcttctgccacaatctatgagcactcagagttgatctattgtttttgtattgttttgttttgttttgtttttttggagacaggatcttgctctgttgcccagcctggagagcagcggcatgatcttggcttactgcaacctctgccctgcctcccctgctcaagcaatcctgccacctcagcctcctgagtaggtgggactacagacatgcac

SEQ ID NO: 119130 - DNA, 605 bp, Homo sapiens
actcgcatagacactgctcagcaatagtggggatcaaaagaagaaaaaggtcgctgcagtggaagaagaaaattccaagctgtactttttccccaccccacgtgtgggggcgctgccctctccccagctgagcctgtgaaggggtggcaggacaaaaagggcagccacaagggtctgcgaagtccactcgatgaccacggaggccgcctgaacatgctaatgaggggatggcggtgctgccagcgagttgggagcctcaggcaggtgggctccttggtggtgatagatcccaatctgaatcagggctcccgcctcacctagaagctcagccttagcctggcaaaccccacccccagcaagtgttgagacaaaggtgggcagagcagagaaggcagaggaagggaggctgcaaatcctgggcagcttgggggctgcagggggtgctgggaaagggagggagaagcaggaaaagaggaacgggcccagtccctgaggttcagcgggcctctcctgacagactggatgtttctctcccagtgacctctgtttagcagacaataactcagtggattaatgaccaatcagcgaaaggccttccgaattgc

SEQ ID NO: 119131 - DNA, 760 bp, Homo sapiens
gtctcaaagtcctgacctcatgatccgcctgccttggtctcccagagtgctgagatttacaggtgtgagccaccatgcccaactgcttcatagactcttagccttataaaatgctagagaacattagctagtttcaaacttcgtgttttccactgtactctttagagatccacttctataagttgaaagggagagggggacaagtatgtcctccctacttgtgctttaaccagagctctccttttatttatcaaaaaaacatgcacgcgtgcacacacacacacccccctcagtgtaagatttcagttaaaagggttttattgctaaaacaaaaaaggttgaaaaccatgagtctggtctctctcttttacttatggatgaagacatttagattacagggctcatacctgtaatcccaacactttgggaggttgaggtgggaggatagcttgaggctagggttggagaccaacctgagcaatatagcaagatcccatctctacagaaaattttaaaattagccaggtgcggtggcttacacctgtaatcccaacactttgggaggctgaggcgggcagattgcttgagcccaggagttgaagaccagcctgggaaacatggtgaagccccatctctacaaaagttagttgggtgtggtggcacgcacctgtagtcccagctcctcaggagactgaggtgggaggatcctgagcctgggaagttaaggctacagtgagctgtgattatgcgactgcactat

SEQ ID NO: 119132 - DNA, 811 bp, Homo sapiens
acagaagtagagatgcattaaagagggtaggaaggacagtttcacatgatgtctcccaagctcagtgtcaagaaagatactcctcctgggggaaggagagtgaagtgagcaccaacttcactgtggaccccagcaccaggctcatgccactgaaccctcgtgcaaggctggcctcccaagctccagccccaggctctttgaccaatggatcaaagaagaaatcaaaaggaaaattttaaaaatcttaagacagaaatggcaacacaacatacctaatttatgggactcagcaagagcattcctaagagggaagttaccatgataaatgtctatgttaaggaaaaagaaatacttcagataaataacctcaacctcacttcacacttcaaggaactaaaaaagaacaaactaagcccaaagttagcagatggaaggaaataataaagatcagagcagaaataaatgacactgagactagaaaaacaatagaaaagatcaatggatctaagagttagcttttgaaaagttaagcaaaattgacaaacgtttagttgactaacaaaaaagagcacactcaaataagcaaaatcataaatgaaagaggagacactacatccgatactacagaactacaaaggatcgtaaaaactactattaaaattatatgtcaataaatggcataacctgaaacaatagataagtttctagaaacataccacttgtcaaggctgaatcatgaagaaatagaaaatctgaaaagatcagtgagtaaggagatacaatcagtaatcaaaagtctcccaaccaagaa

SEQ ID NO: 119133 - DNA, 611 bp, Homo sapiens
ggaaggaacactgtatagtggattttgtatggctagtacacagattctattgtagtttcagttaagtaagagttgtttacaaagtctctgcgctatacattctgctttagttaacacgaaagagtgaataaatgtatgcctttgatgatttattatttccatagtatctgaggagccgtcatcattctgaatagccaagattttaggcacaacagacagaaatgaattataaactaacctcaaaatagaatatcttatcatttataatacagaaattattcatgctgcagttctttagtaaacagcttgctttcttgtcgtctgacactttcaaaaatggagaagaagagaaaacttgaattcagagttctgggtagtaatgtcttgtgaatgagcttacactatgtttcgcttcacttttttccaattagatttcagttctctctcctttggcaccccctcattctgcaacatattttattgcctattttttttattagtcaactattgaaacaggtgaattggctacaaagaagagcttagtcactcagagtcaactaagcagcaaacactggccaccaagacttggactcttgtgaatcagcttcaga

SEQ ID NO: 119134 - DNA, 163 bp, Homo sapiens
cttcgaatcacatcttcacaggcagtggaggttttattggcagctctggcagatgaagtttgaaatatatcaacagtcagatagattagaaatgggtagtggcatcaccagctttctctcctccgcctttgtcttggtgtctcaaccctgtcgtaaaatgccc

SEQ ID NO: 119135 - DNA, 412 bp, Homo sapiens
acagttttgcacaagctacaaagagtaatcatattggtttttgatgatttgcaaggcatttaatataatatttacatctcagatcctgtggttataatgcgctgccatctttgctgaatctaaaaccctttgatttagagtcatgatacgataaaatttttcatatatgaaagctcattttttgaacttataaaaaaggaactaaggcaatgacttcagcccttagtgctgttgagcttaatattattgagaatataaccacggtgtatcaaaagtagaaatgataaatatatctcattttaatggtaccctctttatagatgtaagtgttgtattggcagaatgaattgtgccagaaattgaattttaattttattataaatgaagtagactgcttagatttttggatttc

SEQ ID NO: 119136 - DNA, 499 bp, Homo sapiens
taatgtttttccttttccaggatatcatataaatggaataatcctctgggtaacttttggagtctgtcttcttttacttcacatgtgcatttgagatttatccatgttgtgtatatcagtagtccattcctttttgattgctgaatggtaatctattgtatagatcaacttattttttaacttcagaaacaaaatcatagaacttcattataagatttttattacatatcacatttatatgtattcttaacattttaagttatatataattaaagtctgagatacaatggttaatttttaattcttgtattcctcttttaaacattgttatatagggttttgttttgttttactgttattttcagtttatcttattcactacaatatgaagtctagaaggccagtggggctcaggactgtctgcaagacaatctataggtcaatctgtataataggcctctactccaatcatattaaagtaagattttctaatttttta

SEQ ID NO: 119137 - DNA, 286 bp, Homo sapiens
atttttagtagagacagggtttcaccatattggccaggctggtctcaaactcctgaccttgtgatcctcctgcctcggcctcccaaagtgctgggattacaaatgtgagccactgtgcccagccccactcaagtagtttttatgatagaatgattagaataaagccattccttttccagtgaattctccttttgcctctcccacccatgcaaagatacatcctagtccaaaatagggggatagtcaccaaacattttgttaaatatgagagaaaaacaagtgacct

SEQ ID NO: 119138 - DNA, 249 bp, Homo sapiens
gatgagctgggcattgtggcacatgcctgtaatcccagctactcgggaggctgaggcaggagaatcacttgagcccaggaggcggaggttgcggtgagccgagattgcgccattccactccagcctgggcaacaaaagtgaaactccatctcaaaaaaaaaaagcagcagcattgtgtaatattatgtagatgttgtgtctcatgatctatcctgagaaagcttttgggaggaactgcatcatagtcat

SEQ ID NO: 119139 - DNA, 573 bp, Homo sapiens
cctgacagactactgtggccaccatgggcatgtcagttaatcactaaacattgcttttcccatcccatctgtgaaaagattggacaacatcatcttgttttcctctttagatgaagatacttggatatggacagaactcgggtgtggtgatagaagagaattacatagtttaaatcataacctagaacttgggaactaaacgatagaagagctgaactatggtagtctagtgtatttccctcttgaggcttccataactggcctggttgatttttctaggtcatttgggagcctgaattctcttgataaacatgcttttgataatatggtacaacctcactgtacaggcagtcctttgaacggcagttggcagaggtaaaaatggccatgcaaaaaactacccaaagtgctgggattacaggcgtgagccaccgcgcccggcccacatgaaacgttttacatttatcacttaggtaatattaatggtatagtgaagctctagtctctgactgtagatgcctggaaaatgtctttgaggtaatggagaactcagaaaaaattgatgaaagaata

SEQ ID NO: 119140 - DNA, 230 bp, Homo sapiens
aatggcatacacgatgatcccagtgctgcacttcttttgctgtgaaacaagttccttagttagaaccaaggttgtgtgggaagccatcaatatggtattcgcaaagtccatgaatggtggtcctgacagatgcattgctgtcaggcaagtcaagttcctatttagaaaagtgtctttttcagagaagatagatcactgccccctccatgatggaaatattttattaccag

SEQ ID NO: 119141 - DNA, 3267 bp, Homo sapiens
ccacgcgatcgcggacggcgtgggctggagatgagcaaccaacaaatgcacagaaagacagcttctctgaacagtcctgtgtcctgcaaagagaaaccagacagagttgaggagcccccggactacagtctgcactggccagaaggcttgaagggtgaagagataaagaagtgtggccgagaagggataacactgaataaatacaaccagcaataccacaagctgtttaaggatgttcccttggaggaagtggttctcaaagtgtgttcctgtgccctccagagggacttcctcctccagggccggctctacatctcccccaactggctctgcttccatgccagcctctttggcaaggatatcaaggtggtcattcctgtggtgtctgtgcaaatgatcaaaaaacacaagatggcacggctccttcccaatggactggccatcaccaccaacaccagccagaagtatatctttgtgtcactgctctcccgggacagtgtatatgacctgctgaggagagtctgcacccacctacagccttccagcaagaagagtctgagtgtaagagaattttcaggggaacctgagtctctggaagtcctcatccctgagatgaagtggagaaaggtatgcccttcctccaggtccctgtctctcccagacaacatcccttgtatccctccatcatccgtggactccacagacagtttcttcccctccaggaagcctccaatgtctgaaaagtcaagagcccaagtagcttcagaaaatggtgggaggtgggcatggcccatgccaggctggggtcctgcctgccctaagaagatgccgaactgctctcccactgcaaagaatgctgtctatgaggaggatgagctggaggaggagcccaggagcactggggagctgaggctctgggattaccggctcctcaaggtcttctttgtgctgatctgcttcctggtcatgtcctcatcctacctggcgttccgtatttctcggctagagcagcagttatgctccttgagttgggatgacccagtccctgggcacaggtaacagccacttggcctttgtccccattccttctccaagaagaatgttctgggtgctaagtctccaccaatgatccctgtggtttatgctgctgctgtgctaagactgcctatgaaggaaaatattccagatccctcctcctccccgcagctcttctcttccctctatgagagatctgaagtacgtgtttacaaagtaactggcttctacaatttttggactcaagcaaaaagccagattttttggaaccaactgaggaattctgtacacaaagcttcagcaaacacttagagaaaacaaacaaacaaacaaactgggtccttggaaacagttctggcacacaggcagaacactggaggccacctcaaaggacagaggccatgctttcgcatttggaatgtggctctgccacacagctcactcctatggtggggtcagaggtcagaacacaaaccacccatgtgggctctgctccctcccaacactctgtgttcccacagggcttctctgcgggcagccaggcacctgtcaggcttgggcaggggcctgctgagaatctgtgaatgcagaggggagggctcatggccaggattccagccagagatgaatttccatgctctgggccagggctctgtgccggcccctcatgaggtggctggctgcattatggggagatgctgcccacggcggagatggtggcagtggctgtgaagaacagaggtacctgaattctgtgtcctcagctgtcactttccggtgagacaagtggagcagggcctttgatcactgtggtcacagacctggtactgggttttgcccttgtgtgctcaaacatttctaaggtgtcccaagccctggaaatagggaagggaagggtggaggcttggatctgaggtcttgctgtccactccctgcctgcctgcccgcatctcaggcatgggcaacagcagcccgttgaggggggcttgtctggacagttgcgtgtgatggtgttgagccatcacagggcagaggtcacttgtgtcacccccatagtcattgggttgcaggccatggaggagggacctccactccatggggcctattctccattaaggtggaagtgtccactgtgggcctagcacagtgcaggaaccaggccagggggtctatctcatacctctggggacaggaaaggtagaggatgaggaggttggacgtggtggtggctttgccttggatattcctcttcctctatcaaggccttctcttcttctctgtgtcccacaactctggcctcatcgccctgggactcccatctgctaagatagtggctttggaggttctggaagggcttagtgaggaggccagaagtatcagggaaagttgctggtgatggggtgggcggtgtcagaagcagccactgttttcccctcttcagacactgagagattaatcagggaatgaaatccaggtggaaattatttattgtgaagcagacgactgtctgtcctgtttatgacaaacccaaatgagaattggagggactaccagtaagtggtctcttcatgctctccccatcccagtttttaggatgaaatttagagcctggccttttgtgttgcttgcaccaaatctgtatgtctcaggtgaaactcactgttccatgaatggtcatcctttttttttttttttttttggaaccagcccctttcaccctttcatccgtcttttttttttaggaaaataacccttcttgcttcagcacttctccctggtccttgctgaaagacagagataaaaatccattctctgagccttgcttggttgtcagaggccatgagaggtgccagttataggtggatgtgccaagatgctggtgaacttggtcttcagctatacccaggctcagaaagggcaagagccatgctgcagcgtaggtgactttggaggtgcacttggggcccagggctttgagtgttgcgggtgtgcctgtccctccagatagtgctctgtttctctctgttgtccccctgcctggtcctctggggccactgtgctttctgctgtgtgcatttataaatgatgtgtattttatatagacctgcttgcattggctgatgctcctctaattccctgagtttgattcaaccacccttgggttgttttgctatggccttagcctttgaaaatattttaaaataaaaaacttgatttttctagtgtattatg

SEQ ID NO: 119142 - DNA, 469 bp, Homo sapiens
tgcaggacaaagggctctttaattcttccaactgcaggggtagcttggtccccactatttccggtgaacttccagaaatgctctttctgtggaagaaatatttaactccgtattgccgctttcttcaggatctgcttcctggtcatgtcctcatcctacctggcgttccgtatttctcggctagagcagcagttatgctccttgagttgggatgacccagtccctgggcacaggtgaggccttttctctttctaatgcctttgatattgagggttgaggacaggagccaagaacctcaggccaggctgcctggctggacttggtcctgttttgagctggcttctgaccctaagcaaggttgggcagcgtgcagggtacaccagtcccaccctggcccactcttgggggaagtaaagttatcactggcccttctgcccacgtccgtctgcattctgggccctttccctga

SEQ ID NO: 119143 - DNA, 3271 bp, Homo sapiens
gaccgctttaagccggagcgaggccaccgaggagggcggcaaccaacaaatgcacagaaagacagcttctctgaacagtcctgtgtcctgcaaagagaaaccagacagagttgaggagcccccggactacagtctgcactggccagaaggcttgaagggtgaagagataaagaagtgtggccgagaagggataacactgaataaatacaaccagcaataccacaagctgtttaaggatgttcccttggaggaagtggttctcaaagtgtgttcctgtgccctccagagggacttcctcctccagggccggctctacatctcccccaactggctctgcttccatgccagcctctttggcaaggatatcaaggtggtcattcctgtggtgtctgtgcaaatgatcaaaaaacacaagatggcacggctccttcccaatggactggccatcaccaccaacaccagccagaagtatatctttgtgtcactgctctcccgggacagtgtatatgacctgctgaggagagtctgcacccacctacagccttccagcaagaagagtctgagtgtaagagaattttcaggggaacctgagtctctggaagtcctcatccctgagatgaagtggagaaaggtatgcccttcctccaggtccctgtctctcccagacaacatcccttgtatccctccatcatccgtggactccacagacagtttcttcccctccaggaagcctccaatgtctgaaaagtcaagagcccaagtagcttcagaaaatggtgggaggtgggcatggcccatgccaggctggggtcctgcctgccctaagaagatgccgaactgctctcccactgcaaagaatgctgtctatgaggaggatgagctggaggaggagcccaggagcactggggagctgaggctctgggattaccggctcctcaaggtcttctttgtgctgatctgcttcctggtcatgtcctcatcctacctggcgttccgtatttctcggctagagcagcagttatgctccttgagttgggatgacccagtccctgggcacaggtaacagccacttggcctttgtccccattccttctccaagaagaatgttctgggtgctaagtctccaccaatgatccctgtggtttatgctgctgctgtgctaagactgcctatgaaggaaaatattccagatccctcctcctccccgcagctcttctcttccctctatgagagatctgaagtacgtgtttacaaagtaactggcttctacaatttttggactcaagcaaaaagccagattttttggaaccaactgaggaattctgtacacaaagcttcagcaaacacttagagaaaacaaacaaacaaacaaactgggtccttggaaacagttctggcacacaggcagaacactggaggccacctcaaaggacagaggccatgctttcgcatttggaatgtggctctgccacacagctcactcctatggtggggtcagaggtcagaacacaaaccacccatgtgggctctgctccctcccaacactctgtgttcccacagggcttctctgcgggcagccaggcacctgtcaggcttgggcaggggcctgctgagaatctgtgaatgcagaggggagggctcatggccaggattccagccagagatgaatttccatgctctgggccagggctctgtgccggcccctcatgaggtggctggctgcattatggggagatgctgcccacggcggagatggtggcagtggctgtgaagaacagaggtacctgaattctgtgtcctcagctgtcactttccggtgagacaagtggagcagggcctttgatcactgtggtcacagacctggtactgggttttgcccttgtgtgctcaaacatttctaaggtgtcccaagccctggaaatagggaagggaagggtggaggcttggatctgaggtcttgctgtccactccctgcctgcctgcccgcatctcaggcatgggcaacagcagcccgttgaggggggcttgtctggacagttgcgtgtgatggtgttgagccatcacagggcagaggtcacttgtgtcacccccatagtcattgggttgcaggccatggaggagggacctccactccatggggcctattctccattaaggtggaagtgtccactgtgggcctagcacagtgcaggaaccaggccagggggtctatctcatacctctggggacaggaaaggtagaggatgaggaggttggacgtggtggtggctttgccttggatattcctcttcctctatcaaggccttctcttcttctctgtgtcccacaactctggcctcatcgccctgggactcccatctgctaagatagtggctttggaggttctggaagggcttagtgaggaggccagaagtatcagggaaagttgctggtgatggggtgggcggtgtcagaagcagccactgttttcccctcttcagacactgagagattaatcagggaatgaaatccaggtggaaattatttattgtgaagcagacgactgtctgtcctgtttatgacaaacccaaatgagaattggagggactaccagtaagtggtctcttcatgctctccccatcccagtttttaggatgaaatttagagcctggccttttgtgttgcttgcaccaaatctgtatgtctcaggtgaaactcactgttccatgaatggtcatcctttttttttttttttttttggaaccagcccctttcaccctttcatccgtcttttttttttaggaaaataacccttcttgcttcagcacttctccctggtccttgctgaaagacagagataaaaatccattctctgagccttgcttggttgtcagaggccatgagaggtgccagttataggtggatgtgccaagatgctggtgaacttggtcttcagctatacccaggctcagaaagggcaagagccatgctgcagcgtaggtgactttggaggtgcacttggggcccagggctttgagtgttgcgggtgtgcctgtccctccagatagtgctctgtttctctctgttgtccccctgcctggtcctctggggccactgtgctttctgctgtgtgcatttataaatgatgtgtattttatatagacctgcttgcattggctgatgctcctctaattccctgagtttgattcaaccacccttgggttgttttgctatggccttagcctttgaaaatattttaaaataaaaaacttgatttttctagtgtattatg

SEQ ID NO: 119144 - DNA, 461 bp, Homo sapiens
gtggtcattcctgtggtgtctgtgcaaatgatcaaaaaacacaagatggcacggctccttcccaatggactggccatcaccaccaacaccagccagaaggtcagtgcactgggcccatgctcccttgtcagtctcccgctcccagccctgacagcccacagtctgactcgggcacattcccaggtctttatttcaccccaccctgcagctctccagtaggtatttcaggccgtacaacaagctggaagagaagttcctaggcagagcttctgttggctctcatggcctgatacccctgtgggcctgtgcccaatccacaagggggctggctggcacagcaaggagtctcatctcaccctacccctgtctgttttctttccatgtcccagtatatctttgtgtcactgctctcccgggacagtgtatatgacctgctgaggagagtctgcacccacctacag

SEQ ID NO: 119145 - DNA, 411 bp, Homo sapiens
aaacaaaacaaaacaaaaaaaaccccaaatcccaaaaaactggttaggatttcctgtataggcctaactagaagcagtactaacacacatttttatcttgtttctgattttaaagagaatgctttaaaattttactattaaatatcaggttaagagaattttcttgtattcttagtttgctaaaagtttcttaatataatatatggatgttgaattttttttcctgtgtcttttgaaatgatcttatggtttttctcctaaatctgttaatatggcagattacattactaaatttagcaatgtcagtctatccttgaattcctgggataaatcttacttgattatgacacagttaagtagatatgtgtatgtagacatagacatttagatgatatagatggacacactttg

SEQ ID NO: 119146 - DNA, 300 bp, Homo sapiens
tcgcaagttccacccacacagctgattatgtcctttccagaagcaggcgtctcttccctggccacagccgcttttgtggcttcagtctctccatcagtttcatcccctctgcagagtatgccccccacccaagctaatccagcgttgccctctcttccgactctcctctctcccttggccacacctcctctgtcagccatgtctcctctacaaggccctgtttctccggcaacatctctggggaattcggcttttcccctggccgcactccctcagccaggcctttctgctctgaccacg

SEQ ID NO: 119147 - DNA, 395 bp, Homo sapiens
caaataccctatcaacaacaatttcattaaagacttccaaaacaaaacactcgttaagactaatctcttcacaataaatgacaaacatcaactttggtcatattttgagggccactggcttttggactcaaaaataatggctgctccttacatttaagtcatctactgtttcaattaaaatgtaaaactaatctatttaaggcatttaaatggatgagttttcatatcagtctaaaacgtttctgtgtattatcatcatagcaaaatagcaagcaagttaaaacaaatatacaaaatgaggttttttttttaaaagaggatattttgacatttttccaaaatgcattcaaaagaaaggtttcacagttttatttctatggatattaactcacgta

SEQ ID NO: 119148 - DNA, 731 bp, Homo sapiens
tgttgaaaagattattatttgccctaatttattagcttagcaactttccagaaattcagttgcccatatgtataggtctgtttctggaattccttctgttccattgttctatatgtctgtctttatgccagtatcacactgtctttattattggtgctttattaatctttttttttttttttcttgaggcagggtctcactttgtgctccacctcgaggctgtggagttgccaggggttcgccagctcagtgggcttccacttgccgacgcctttgaacccctctttaggcctcagagcgagctcctctcccgccttcagcctctcccaagttggctgggcactataaagggttggcacacacaaccaacaaccccaggtataactttatagggtgagataagggggaataatggtcatgatagtgtggtgcctctcaaagcacttccccaaaggtgcgcctgggactataccagtgtttgcatttgccccaccaaattacccccaagctataaaataataagagctgatttgttgcgcgagaggcgcctgattgatgtggaagaacatcagtgagtagtcgctcagtagaagaaccttcaacaataaatcgttatttgtaaaacgaattgccgtataaagcagcacaaacattattgccccggagactaggttatctcaaaaacccccaataggaccttaaaacgcacacttaattattcccaattgttg

SEQ ID NO: 119149 - DNA, 354 bp, Homo sapiens
gctgggtgactctagcaggatcctcatccacgtgcattgtggatccacgtgcatagtgtgaaatgcctatggacaactactctgtctaccacagagccttcccatgccaagtatcttgctcagcaccgaagctgtctaggaaaggaggtttggaacctttttcaggcccaaaggaaacaacgctggagaggaagttgtggggagctgactccctctgtgaacccccagccccatccatatatgcaaggagaaggacttgcaggaaacggtggctggctgagtttctctgtcaggctggttggaaggactgggagccttctccacaaggagtaaccgctgcacaagggcactggt

SEQ ID NO: 119150 - DNA, 484 bp, Homo sapiens
aaaaacaatagaaaaacaaccctgtaagctgatcatgcttgagaaactatataagctagtatattttaaaagattaattttatgctaatcttttaatttacattagtgaccaaaaatagaagatagataaagagtatttaacgttttgacttcatccagtgttccattcacctttatccttggcctggaaacactgactccggtatgagggaagaaaaatggagagtcacagagtctgtggtcatattctgagaggtagcatcttggggggtagatctgataaaaattcaagcatatcatcaaggaatatataaatcctcagtggcagagagtgagaggcattccagagagatcctgatgataccagataagaagagttagaatatagacaggaaggtccttagaatagttgctggttagacaggatgttaggggattttatataggcatttatggtctgggatttgacaaggaaggagtagat

SEQ ID NO: 119151 - DNA, 685 bp, Homo sapiens
ggatctctgacctctggggacctgtttgctacttttaagcattactcaccagttaataattgaaaagccaatcctacaaagtgctttccaggcctctggaaaaggtctgctccatccaggctccaccggtcttattggacccacatcgtgacctgcaagtagagttggtttttaaagggggggaccagtctccttctatctaactcatactgtgaagcaatgtttaatcctgtgagagatcagctgggtatcattctaaaggagaattattttagggttagaaagatttatgacttcagcttgtaaaagtggcaaatagcactgcaagagaagaaacaaatcacttgtgaaaagttgtatttgccatgttaggtaggattttaggtaggattaagtaatgaatatgttttgtggagctttctgaatctgagattgaacaaggtggagagatacaaatcatccctatttacctttttaaaaattgatctgtttattgatgtttttgttattattcaccaccgtatttggaataggactgttattaaaccaaagcctgaaaacaaaaccagtcagtatttgctgctgatattcctaagaagttcagcatctgagcacttacagtcttttcataaaatatgtgtcactttacttttcgagaatgttcaaaatgtatcatttgtagtgg

SEQ ID NO: 119152 - DNA, 361 bp, Homo sapiens
agtaaaaggtagtacaagaattaggaagtgatgagttttgaagatttactgtattacctttgttcgtttttacaaaattttatttttttaaatttatttatttagagacagagtctccctatgttgcccaggctggactcttactgggctcaagcaatcatcttgcctcgtcctcctgagtagctgggattataggtgtacaccaccatgcccagtttacctttttaaaaaaatataattaactgaattgtaagtttctttaatttgatttttaataatggttgtgtttaacaactggcttgcacaatttttgacagtttgaccaactgctcttgtgagctggtataagcccagtacgagc

SEQ ID NO: 119153 - DNA, 457 bp, Homo sapiens
aatatcatgccgggagcatgcatgtgggagcagatgtttggcatgtgtcaggctacttctgggaatagtctgtattgaagaaaggaaagtatgcttcagatctttacacataatttatgcaagtgaataaggatttctcacaaaggaagaatgccagacagactattatatttagcaagataaagtgtgctgtgtgcaaattcccaaagtcggccagtatagcagaggacaaagaaatattaataaattcctgttttataggagattagttctctaacgagcaaacaagcaagaaaataggggagtctcttagggttttctgaagattggttcacctcccttaggctaaccatttgttttcattgtctttatgagagaaagtcttttgtaaggatttaatgtgcaccacaggaaaatgtttacatattggaatcttaaggtttggagggactttcaa

SEQ ID NO: 119154 - DNA, 196 bp, Homo sapiens
acttccctacaaactgtgttcacctaggaggctggcataatgactttgctgagctgaaagatcctccaacatcacacttttaaatactttaaaatacagaagaaagtaaactaatagacatagttaatagattctatagcaccttcactagtgcagagcagagtagaaattaccagtttatctttcttcagctcag

SEQ ID NO: 119155 - DNA, 402 bp, Homo sapiens
gatggttgtgaggcgggtcgagttcagtctgtggccctataaagaataggcctgtgtgaagttcaaatccaaaatgaagttccaaaaaatactacgttctagctgcttaaacagtctgtattttccacattatgatggattcaaagcaaataagagtcacacttcaaagtcagaagttgcattcctcttaaaggatatttgtactcggctgctactataagacaaaggttaacttgacaggctcaatgtctctgttatatattgtggaaaaattacctaaaatagctatcatttattaaatttctattttctgttaggtgctttacaaatgccatgtaaagggccgggcgcagtggctcacgcctgtaatcccagcactttgggaggccgaggcaggtagat

SEQ ID NO: 119156 - DNA, 201 bp, Homo sapiens
tagtgtgaactctgctaagaagaaaaaaaaatcactataagaaagtatactacttaatagctaaaataaaaaccacacttactaagattttagttcccacgctataacctccaccttgcacatgattagaataaaagtacggtttgcaaatcagatcaaagacaagattccgtcttcatgctggctcagaattctgacttc

SEQ ID NO: 119157 - DNA, 405 bp, Homo sapiens
tcagaggaacagaaaatcaaaaaaggctccaggagacctaatagagaagagagaagtttaatggggaatctagatttgtataggtagagagatgagaggaagatgtttactaacaaggtttaaaaaaaaaaaaggtaagaatagaggcaaggcaaagtgtttctccaaaaatggttcgtaagatattaataggtattattaaatgttataaaaatgcttattagcatgttaaagtttctgagaaatcctgtgggaaataaacctatttaaggaaaggaagcagcatttttttcttttttagattatacatctgtattgattagtatttcattgggttacttgtgaggaactactttgggaaatgctgttatagcatgaatagaaatctgggcagtttggtgactg

SEQ ID NO: 119158 - DNA, 431 bp, Homo sapiens
ctcttgaactcctgacctcaggggatccgcctaccttggcctcccaaagtgctgggattacaggcatgagccaccacctggccagcatctcaatttttaataaataactaaaaaataacttgtttgaacaggtatatcttggccagcaatgctggactgggttcctttgaggtgagggaaactcttggacatgggacctagtgggggcctctgcttgcctccctgctgggttaacagtacagctggcccagccagtcttgaaaccttaccctgcaacaaaaacttgacacctccaggctggtaattctggaggtgtcttctctgccaagtcggtgactccccaacccgctattatggctggactctgctcttgcagtcttagtgtacaccctggttcttcaagggcagcaagcaggactattccggtagca

SEQ ID NO: 119159 - DNA, 391 bp, Homo sapiens
ctattgagtatgatgttagctgtgagtttgtcatatatggcctttctcatgttgaagtatttttttatatctaatgtgttgacaattattataatgagaggatatttaattttgtcagatgtttttttctgtgtctttagagatgatcatagtgttttgtccttcattctgttatgtgccatgttttgtttatagatttgcatatgctgaaccatccctggtatgaatctgactttatcatcatgagtgatccttttaatgtgctgtttaatttggtttcctagtattttgttgaggaattttgcatatgtgttcattatggatattgtcctctaattttttttttcttgtagtgtcctagtgtggctttggaatccgggtcatggttgtt

SEQ ID NO: 119160 - DNA, 604 bp, Homo sapiens
catttatattcatcagtgctgccctcactttggatctattgtattcttacagtttaatcaactggcaaagtgctttcatgctttggagattaactataaaagcaagattaagaaaaatatgttaattaccatatccctggaactccttctcaggctggtgggggcagccttgcaagagaaacagcagcctttgtctcttccctcttgtggggagcaaggaggggatgagcggtaccttgggagacccggtaaaagtctaaagaattgagaatttgactatcttgggggtaaaatgctgtcataggggcagcagtctcagggggtgtaaactctggaatccactatggtttaccttgagtggcctgcacgaacatgacagccctgatctgtatttcctttccattcagaaaaccttaaaaaaaaaaaacttgttttatgataatattataacaatcataactaacatttactgtgcccggcagcaaattaagtatttgacaaacattatttcattaaacgagactgtcaatcattactcaaagaatgatgaaggtatttggtgtatgccaaagaataaaggcgttttatttcacagtgacatctt

SEQ ID NO: 119161 - DNA, 809 bp, Homo sapiens
ggcaacctgctggggtccccttccacactgtggaagctttgttctttcactctttgcaataaatcttgctactgctcactctttgggtccacgctgcttttatgagctgtaacactcacagcgaagatctgcagcttcactcctgagcccagcgagaccacgagcccaccaggaggaacgagcaactccagacgcgctaccttaagagctgtaacactcaccacgaaggtctgcagcttcactcctgagccagcgagaccacgaacccaccagaaggaagaaactccgaacagatctgaacatcagaagggagagactccagacgcgccaccttaagagctgtaacgctcaccgcgagggtccgaggcttcattcttgaagtcagtgagaccaagaacccaccaattccggacacaaaaccaaacgctccaacaattttaagtggcgactggcaaccaatggtgataggacatacgtgtgattgtttcatttctgcctatagctacaccattattctctctgggtcttagtttatggctttgtaaaacaattagatgaccactgcaattatttctagcttaataattctaaaatttatgatctataaataatctattcctacccctgatgattttcccttttttggcatttagcaggcttgataattgcttctttatttaagctctctcttgtgagagattctgcttttaaggggacaaacttacctgtttgttacttattttatctccaacagttagcacagtgcctgacatgtagtagtctcttaaaaactacctgcagaactgtaa

SEQ ID NO: 119162 - DNA, 357 bp, Homo sapiens
gattgcatcatatagtatgaatgcacaggatgatgtcagcatcccaacatctctatcccaaatattcacttgatgtgtactttggacatcacttttcctgctgagaacagtgtgtccctgcattctgatatcatggatcggttataagcaacacagctcctttacatcccatcagagcagctgagaatctatctaacatggttcctctaatgaaagagctttggtgggttatgttcagaggcttccttgatgctaactggatactcttcaatggtgcacatgaaaatacatcctgcctcttgcagaacgacagaccaggctagggatgttttcccatttgttaggaggtggcagtgt

SEQ ID NO: 119163 - DNA, 196 bp, Homo sapiens
tttgagaccagcctgggcaacatggtgaaatcccatctctacaaaaaatacaaaaattaggccgggcacatgctgggattacaggcctgagccaccgtgcccggccaaatacccatattattaagagaaatgtttacaaaaggttaggacgaagccaccttggctgcgggagagaggaattgacagccatgattgt

SEQ ID NO: 119164 - DNA, 115 bp, Homo sapiens
ctgccgccctgggggttgggggcccctgatatagtctatctcctgttttcaggcatggagtatttgaaatattaaaagtaaatcatttttccatgattttaaatagagaaaagga

SEQ ID NO: 119165 - DNA, 181 bp, Homo sapiens
cccgaccagcccgacagccgactagcccgacaggcatttgtgacataaacagcagctgaaagaccataaacccatagcccttagatgtgttcagggcccaggcagcagccccttgggatgtcccaagcccaattcaaatggagggaatgggcgagcatcttgtacgccctgccggtcccgc

SEQ ID NO: 119166 - DNA, 330 bp, Homo sapiens
gcactccagcctggcgacagagcaagactctgtctcaaaaagaaaaaaaaagaaaaaactcagcaaatggctgacacatgatgggcattcagtagccgatggttattacggtcaaatccaaccacagcaacttactagctgcgtggccttgggcaagtgacttgatcttctgagactcagtttaccccctgtgaagtgaagggattggactagatgatctctgcgtttcctcccccatgtgatatttcaaagtactttttttcgaacagctggttgtggcctgtcaataggttttaaaatccgtttatagagaattgtgatcaacattta

SEQ ID NO: 119167 - DNA, 102 bp, Homo sapiens
tgatagattgttatgggaacttgaggtggaatttccaactctgtctggggtagggaagtaagagtaacaatagccaacattcaatgagctctcactgtagac

SEQ ID NO: 119168 - DNA, 114 bp, Homo sapiens
gcaaggcccgagctgagtagatgaggctgggagccagaccagtctcaggctgaccagtgctctgtcttgagaggagctgctggtcagctttttgtcttgggattcagaacgagg

SEQ ID NO: 119169 - DNA, 314 bp, Homo sapiens
accatctggcacacttttcattttattttttgttcatctgtctccactccctggaatgtaagctccacgaaagcagggacttgtgtctgatcaattcatattatatacctggcacataacagtcactctttgctgaaatgaatgaagaaatgtgtgaatgttatcttctagatgtaactgaattgtggctgggagaaatcttctagtttgagagattcactaccagagccatatttataacccattttgtattaaaactgagagacctataagaataattcccaaatgaacgcaaaatgccttcatgtaaaaca

SEQ ID NO: 119170 - DNA, 426 bp, Homo sapiens
atttccagaaacaggtggtaggcctgccggtgataattttccaactcttggcttagagaaatgttcccattacagggtgacgctcttgctctccccagaaccttgtccacattctgtatgtgtctaagtttaggatgcatctgacgaccccattgtaacaactgcctgactgacagaaaggtctgcccagaacaagcctcctgaaggtcttcagtggagggcgtgcctgggtgaggcacatgttcccctgaagaccaggatgtgatggattgcagacaagagggtccatggtgcatgtaagatgtctaataattgggtgatcagcttcacatgtattagaaaaaaatagaactagcttatcaatttaaagaaaatgatttaattatcacctgagctcaggagttcgagaccagcctggccaacatg

SEQ ID NO: 119171 - DNA, 589 bp, Homo sapiens
ttattccactaccaccctgtttggattactatagatgtgtaataagttttaaaatcaggcagtatgagacttccaactttgttcttcttattcaagattgtttgggctatttgcatctcttgatatttcatatacattttaggataggtttttctacttctgaaaaaatatcactgggattttggagggaatgtattgaatctgtaagtcactttaggtagtattgacaacctaacactattacgccttccaatctatgaacaagaaatgtctttctgtttactggtgtattctttcctttcttttgtgttttgtagttttcagcatacaaatctttggcctcctttgttatgtttatccctaagtatttcattatttttgatgctattgtaaatgcaatctttttcttaatttcctttttggaaattcattgttagaaatgcaactaatttgtgttgttgattttctgtcctgcaactttgcagaattttttagttgtgtgtgtgtgtatgtgtaatttttacagttttctgcatatagatcacatcagagagaactttacttcttcctttccgatctgggtgccttt

SEQ ID NO: 119172 - DNA, 199 bp, Homo sapiens
caaacaccatagtctggccttcaatgtgctcaaaaagcttacactagcttacattagcttacagttaggtgaaatcacctagcaacacagtacaccgtagagtactggttgtttacccctgtgattgggcaggtgactgggagctgtgggttcctgctgagtattgcaacagagtattgtaccacacattgctagcttg

SEQ ID NO: 119173 - DNA, 171 bp, Homo sapiens
ccagggaatgagcccttcagagttctgattgggtttggtggcttcccttatctcattcctgatcccagaacagcacatggatttctcagcgccttccagtttgaagaggctgttctctgttacgttgattctgtcagctttaggtgcttggtgttgcatttttcggacttg

SEQ ID NO: 119174 - DNA, 1174 bp, Homo sapiens
ggaggccgagcgcggtggctcatacctgtaatcccagcactttgggagacccaggcgggcagatcaccctaaggtcaggagtttgagagcagcgtggccaacatggcaaaatcctgtctctactaaaaatataaaaattagctgggtgtggtggcgcgtgcctgtaatcccagctactcggaaggctgaggcaggagaatcactttaacgcaggagacaaaggttgcagtgagccaagattgtgccattgtacttcagcctgggcaacagagcaagactccatctcaaaaaaaaaaaaaaaaaagattttggaaaagagttatttttgacaaaggcattgggaaataaagagtaaatgatggatgatgctagtagttaccatttaaagaatacctactaagtgccaaacactaagttgtaagtttataatcacattgtaagcatgttttcattgaaaccaatataacaatcctaagagatagataccattttcattattttactgctgaggaaactgaaccatggagaagttagctaacttatccaagttcacatacctggtacacagtagaagccagatttgaagccagatatgtctaattatatcaaaacttgacctacctctgaaggatacatagctagaaggattttttaaagacgttattatgcctttgtgttcatgctgattacaagagagaagagagtaaatgatggaattcaggacatgctaccccaaaatatggcacgttggcattggatacaacaacagaagcaggaaggtctctctgaccttctcctcacccttcttgcctgaagcaagctataaagaattttctgacctgcctctaaagtaagtcataaaaccttcattgcagaggtacccaccccatagctgaaggaaaagaatgtccttatctctgaagacagaggaacacaaagaacaacaggccttgttaattcctcccagtttattactgttattagattagacccaattgtcctcaaatcaatttctccatgactgtctcctcttcatcatacacagatttccttcttttctgaagtcttcattttctttctttctttctttctttctctttctttctttctttctttctttctttctttctttctttctttctttctttctctctctctctctctctctttcttt

SEQ ID NO: 119175 - DNA, 667 bp, Homo sapiens
ctgagctaagcagctcagaactgtcatgtgtagagtgactggtacaatacaacatcagtggtggtaaaagatttgtatggacaatgacatgtggcaaagaagaatgtcaacagctgccactgctatgacatcgtccctcaaggagtctttctgcatctctgccatgtaactgtctcagccaaagagaaggcactaacatgaacttcttccccagaatgctactcccaactagcgaccacgtaagactcgcttgagtcttttttgagggtgcaagtcctgggtgccatttgtcaccggaaagaacatttaagtttggagttttatgtatagagggagggattattctttgatttatttcgaaagaacatgttcttaatgtccttttgcagataatacacacaccctatcagtttttggactccagactgtctccatccatatgtcattatgaagcaggtttttatcttattatgatttaggtaattgtactagcctctaaaattttataatgtacctttcagaagctcatagatgccaagatcagaggctcctttggagttccatctaatatatcttccttagccaactggtacagataattttatctttcctctagatagttacacatatagctctagaaataaaatgtagttatcctaaatcagct

SEQ ID NO: 119176 - DNA, 134 bp, Homo sapiens
ggctacagaatgcaatcaaatggctatattttaatttcattcgcttccttacactaacatgatgggatgacaggtagctggaatcagtgagctggctcctttagtgcataaagagtcggctgcagctgcatctg

SEQ ID NO: 119177 - DNA, 489 bp, Homo sapiens
taaagaaatgaaaatgaaaacagtatcttgtgctctgtaacgattgttattaaatatatcatagaaatgagaagagtaggctcaggagctgaactgcctagttcaaaaggccaaatttactactttttgttccgtgaatttgttgtgctcctgtttccttagttgtaaaacagagataacaataggacgtgcccataagcttttcatgaggattaaatgagttaatgtgtttggtggggaccaggtggacatggtactggtagggccctatttgacattggctttaagtatcactggttttaagtgcatcagtagatatatgatgacaataattgtattatcatggtgatatggatttcttataaatacttgtattatgttagtcacttctagaaaagaatacatctatacagtagaatataattcaaaaaataatgtcatatttttgtaaagaaattttttgtaaaacttttcagtcttcaaagagtt

SEQ ID NO: 119178 - DNA, 431 bp, Homo sapiens
atatctgtagtaccattggtggaaaggagaaaaatgtagtaccgttggtggaaaggactattggtgagaaagtcctcaaaggctgatttaactccagtgacccacttctgttcttacatgagtgatcctgaatcagtttctgcaccctgttgttgatcagatagtactagataaactcaccttgggttcacacatagaaaaacaaatgtaacctttgctacatgtacaaaagtttaaaggttgtagtaaataccattaagatctacgtagcctgattgttaacctaacagaagcatgagaccatcagaagacttgggctctggcatagctgaagggtgttggccaatctaagaaatccacctagttccaaaagctgtttattgacattgtcatctcagagataagagatggttgcatacacaatctggatt

SEQ ID NO: 119179 - DNA, 105 bp, Homo sapiens
cacaaagtatatctaacgtaaatagtgaatggctctagttagaatgcagaccaaggaagaaatggccacaaaggtagtttgagggccaaatggtagaaggctgaa

SEQ ID NO: 119180 - DNA, 265 bp, Homo sapiens
  misc_feature (10)..(10): n is a, c, g, or t
ccccatctgnaggtcagactcagagactctgcctctagctgctgctgagcccccccacagaggggtgctgtgggcagtctctccggtccttccccccttttctcaccaactgtcctgtacttgctctcccttcttgcagtcactgtgtccccagttatatccactgccctgacctctctaaaggctttgtcacttcattaagcaatatgaccttcctcttctaaagttggttccctgcctctctgcctgatccgtcctcccctcc

SEQ ID NO: 119181 - DNA, 382 bp, Homo sapiens
ttatgcctccatcgtatctgtaaagtggggataaaaatagtaccactcctttcgagttcatgtaaggagtaaatgaatgagtaggtgaaagtgttagcatagtgactgccatattgtaatgtttattaagtgttagttactagccaggcaaggagaatcatctcttgacataggcaggctcaggacctttgtaaatacttgtggtctgaccattcagtcagatcaacccagaggccaagctgcatatgcgtcccatggactgactgcatccctaggaggtactcctctgctgggttgaaggcatctctcagttggtgaggactggctccatgacctccacctgaccctggtgtactctgattctcttgcccacctccctcta

SEQ ID NO: 119182 - DNA, 305 bp, Homo sapiens
acttgaaccagggagtcggaggttgcagtgagccgagatcgtgccactgcactccagcctggcgacagagctggactccgtctcaaaaagaagttttttctctttaaaaataaaaaagcggggaggggggcattaaaattagaaagattgtgttcaagtttcttttgtttttttttaagtattaacctaagaatattaaggccggtcgcggtggctcacgcctgtaatcccagcactttgggaggccgaggcgggtgaatcacctgaggtcaggagtttgagaacagcctcaccaacatggtgaa

SEQ ID NO: 119183 - DNA, 403 bp, Homo sapiens
ctatcctatgcagaggcattccatggctgattttattcacttcgatccctcttccctaaatccatcatatttgtcatttcgactcattttgatacctagtcatatatttccatatgtgcatgtttgtcttgttgtatcctgttttccactaaagtttgtttctttgataataacttagtagtagatggcagtgaaagaggaaggaatttactgggcagagaattttggagcaagacaaagaaatgtgttgtaactttcagatggtatttcagagaaaagcttgtagctctcctgagacctcactgtacgaacacactgaccagtcctttttgctagtttatttgctcacccttcttgaggaaagtcagctttattatttcttattctgcgtaagtgttacact

SEQ ID NO: 119184 - DNA, 329 bp, Homo sapiens
atttgacatacaaggggagtacaacgatctgggttttttttttttctttttttggtgctatagagttactggtctaatctttcaagcacgggaatctaaaagaaaacattaattcagtcatttattaaataagtatttgtagccttccatgtgccagacactgtctgggtgcagcagcaaaacagacaagaacctgtcttggtagagtttattttccagttagagaagacagattgtaaaaagatacaggatggtagatgactttatgcgctatagaaaaaaaaatgatgaagcaggaataggattgtcgttgttacacattctggagg

SEQ ID NO: 119185 - DNA, 451 bp, Homo sapiens
aagcccccactgcttcttttctgtgtatttatttctcctagccactttcttgttcttccatgttttgacatttaaaaatggcttattatctcagtgttatttgtatagcaccttcaagaaacaggtactatatcaatggaataaaaatactgcaataatgatacttcttttttatgtcatgtaatctcattagctctcctatgtcaataatcattgtgtccctcccataaccatctgtctaccatttaattggaaatgttatatgatcctgaaagaactgaaactgagtcatcactgtaccatctagcataatccccaatgcctggagacagatgcacacacagaaacttactcactcaggcacaataagcctttgaaggtgaaggatgttggtatctaaagacaattatgaataccaggtcccacccacacactctccagcccatgcttg

SEQ ID NO: 119186 - DNA, 552 bp, Homo sapiens
  misc_feature (78)..(78): n is a, c, g, or t
attcgatcctcacgctcccagacctgtccgggcctcactgccgactctgccttcccaggtgtatgacgtgctacgcgngccccgtgtcctgaaggagccagagaagcagcagttatatgacataccagccagccccaagaaggcaggactccatcacacctaggagggctcctgacttactgcgcctcaccacactagtctaaattaggtgaccacccctaccaccagtgctccaactgcaccttgtttatcttgatcatagcacttagatattgtaacataatctctgtttacctgtctataaactgtattagactataatatgggtgggctgaagtcttttatttctttttctttttgtggtttttgagatggagtctcgctctttgcccaggccagagtgcagtggtgctatcttggctcactgcaagctctgcctcccgggttcatgccgttctcctgcctcagcctcccaagcagctggaactacaggcgcccgccactgtgcctggctaattttttgtatttttagtagagacgaggtttcactgt

SEQ ID NO: 119187 - DNA, 513 bp, Homo sapiens
gtcgagtccgcgtggttcttgcagagacggggtctgaagtggagtggtggctgcgtgtggtgcctggccttggatctgcacctggaccgggatgggttgctcagtaggctggtgaacggtgagttgtggggagagctgagccgagacctgttgcggagactgctgtacctgcacctggacctgaacctgctgcggctgctgaacctggatctgctgttcttgctgggtttgtggctgaacactggtggtgactggacaggcaagttcaagcaaagacccagccacttcagtgctgtctgtgtatatgcagttcccaccctgttggtacaccatggtagtggtggttgtctgcaaggaacccacgctcatggggttctgggtagcaggggcattgtctaatattgtattaggctgttcctgtgttgctaaaagaagtgcctaagactaggtaatttaacaaggaaagaggcttaattggctcactgttctgcaggctgtacaagcatggcactg

SEQ ID NO: 119188 - DNA, 290 bp, Homo sapiens
atcacaaggacaatttcttctccaccacatctatcccaccccatctattcctcttcacagtcctatccagttggcccactcctacttgctctccaggggagaccacattcaacccttacctgtgtcacttcctccagggcagaaattaatgtctctctttctgcagacttatacctcctacaaccaggtccacatgttcacttctgcaggactgaattcagtaccctcctctccagatttactcctcttactctacttcctttttcagtttcatttagcctatgttcttt

SEQ ID NO: 119189 - DNA, 898 bp, Homo sapiens
gtcctcgattgccttagaatttggagtaaggtgatggacataactatgtggggcccagctcagccctggagagatgctgatcagaaaattaggaaagtcacttgatgcctttttctgccaagcaaagaattggaattaccaccaccctcccctccccacccattacagttgtgcccttgcccttgttagcaattctctgaatatcattgacatcattagagctacattaacagagcgaggcagactcaggtctcctttgtacctgtacttgtgttctgattcaggtctaccacgggctttgctgtcccctcttggagctgggattaatagaggtcacaccaaacacgggatggcagaaagcacttcggacagggaatgaggagacccagattctccttccctggatgacattccttttcctctctggacttcagtgttctcatctgtaaaatggaacagggtcagggaacagcctaatcgtagagaatggtttgctttgttctaaacttttgctgtcttaggagcttatctagttattagttccaaattctagccttttggttttctgtgagagtttgtatctgactaggagttccctgaagaacctgactgagcttcacgaggaggctccttcacagtaaaatggatcagagtgttaccactggagggtgtccaggttcttggcgttttgagcaatgaattggacaaaatgcacaaagcaaggaaagaatgaagcaacaaaagcagatatttactgaaaatgaaagtacactccacagggtgagagtgggctgagcagccgctcaagggcccagatacagattcttctcgggtctaaatatccccttgaggtttcccattggcaattggtgttcaccccatgtaaatgaagtggtgg

SEQ ID NO: 119190 - DNA, 262 bp, Homo sapiens
ctaatcttgaaagaaatagttaagaagtgaccatttgttctctaaaaagattagctgcttcacaaaaggattagctatggtcttctgaaaggtattaagcttacccagtgtatataaagcacaattccaattaacataacttttcaggagtatgttaatactgtaataccaggtatacttgtagtcaaaaatgacacttgagctcagtatagacagggtaaccttttgtcctttgtgggctggtgaggtgccctttacctat

SEQ ID NO: 119191 - DNA, 429 bp, Homo sapiens
gcaccatcccatagggggcactgaaacaccactaatcaattagaaatacagcgccggttaactcaggtttctaccctcaaactccttactcattggtaaaatgtaaacaagagccattcccataaaagcacacaatataccctgagcaaagagatcaagtgccggtatccacggaaatgacctctatccgtggtgcgtatgactaatcatatccaattatgagtgctttttaaaaaatgaaagacaagtccaaataggttaaaatgtcatgttgcattcccagcatataacagacatcttattttgaaaataaagaaagaactatttgggtatacctattttattaatagaaaaccattctttcctttactcttccactagaaaatgtcaaatatttaaggagtcaaatgattagctcatcaggggcac

SEQ ID NO: 119192 - DNA, 650 bp, Homo sapiens
ctattatcaggacagagggagtgggctcctctacagttggggccatccacagaaaaacatgtgggtctgcagtcaggggatctgcagcaagatgtgggcttccctacttggaagcagcctagcaaagcccaagcggctctcccatctggggcttgggttttccatccagtatccttacagccatggtctctagttgggagggggcctcctctcagagacccgagagagacagctccttagggtaaaagcaatgctgggatgaggggatatgaagggatgacacgtttcccttcacagcctccatcccctcttcccacaaccctcagctttccctctgatccttgaactcatgtccccagctctgaagtgggtaggagtcactcccatcaatgaagaaatatcctagaaagggccaggtcaggtaatcacctggcctcggggaagtaaactgcccccatgagactaagggatcacttgctgtttttggcagaggagggcccttggctgggtacagtggctcacgcctgtaaccccagaactttgggaggccaaggcgggtggatcacttgcagtctggagttcgagaccagcctggccaacatggtgaaatcccatttctactaaaaatacaaattagctgggtgtgttgg

SEQ ID NO: 119193 - DNA, 201 bp, Homo sapiens
ttaggcccactgtgtttatactacccatctatcaggacacagcatatagagaaggcaatgaataggcaatctccaactacagaaaaaaagagatatgctaaaacaaaagatggaagaaatgttataacaccaacaacactcaagattaactttaagaaaataaagcaaattcattatcagcattacgtggttaaacatgct

SEQ ID NO: 119194 - DNA, 318 bp, Homo sapiens
ttttgtatttttagtagagatggggtttcaccctattagtcaggatggtctcaatctcctgacctcgtgatctgcccgcctcggcctcccaaagtgctgggattataggcgtgagccaccgcgcccagcaaaagagggcaattctaattcacatagagttcttaacctctgggggcttaacctctgtaatcccctgcaaaacctttcttaaggttctgtaacatgcattttaatagagtaagttttgatgattagatgactttccttttatttttcttcttgaaatttttttttaacacagtttctagcggagtgggc

SEQ ID NO: 119195 - DNA, 388 bp, Homo sapiens
catcacctgtgcaggccaccaagctcatgatcctagactctgcccgacagcccagcctctatgaagtcttctggggcaactcctcactccttaacacccaatgcttatcttttgttagtaaagagtaacttgactcggatttgtaccccttgcccattgtaaggaataacaataaatagttaatgaatgaataaattggtgatttgggaggtggtacaaggaaaggaatatgagggaagtactatttatttagcacatttgaacaaccctgctgagtaggcatgatctctctcacttcacaattgaggaaactgagggtcagagaggattaataacttatccaaagtcacatagccaggaaggggcagagcaaggtttagaatccagg

SEQ ID NO: 119196 - DNA, 303 bp, Homo sapiens
tctacaaaaaatacaaaaatgagctgggcgtggtggtgcgtgcctgtggtcccaactactcaggaggctgaggtgggaggatggcttgagcttgggaggttgaggctgcagtgagccctgataatgccactgccctccagcctgggcaacagtgccagatccattctcaaaaaaaaaagaaaagaaatgcagatgaaatcagctttgagatcattattttacagttattgcggtaggagaaattttaatgaaagagctgctagtgtcggcaaggtgacagtgaagcaggggcaggggacgtgg

SEQ ID NO: 119197 - DNA, 462 bp, Homo sapiens
ccgtcggctcccaaagtgctgggatttacaggcgtacatttataaggcccgcatgatctagcatcagcttgcctgtccagccgtctatgaaccatcctgaccattttcttgttttcagctgtgccatgctccctttaacctttttgcctttgcctgctctgttcctgcgctgttcctaccccctttcatccacactggttaactcttactcattctttaggtcccagctttagatatcccttcctcaggacacctatcctgattttccattaatggggtacgtttgatgcctcctctataatcctgttttccctgctctagcactagcacactgtttgtaattgtcttcttactctctggattgtgaacactaagaagggagacacttagttgtgtggtcttatttatcatcgtatctttagtacttatttaggcctacacctggcagaataggtgtttgat

SEQ ID NO: 119198 - DNA, 831 bp, Homo sapiens
cagactcttctatgggaggacctttctccagaattatgttagggcaactccctggtaaacctttcaaagcaattcaacaaacatttattgagtgcccagtatgtgccagtgttaggtactattcttggcaatgggatgtaaagatgagtaacacatagtccttaacaccctgaggggacccagtctagtatgagaaacacagactataaaatacaataggaaaacgccacagcagagataagacaccatgggaacacaggtgaaggaacaggtaattatgcagggggtgagggaaaaaggtgaggttggagaatccacagaaatgcaattccagccccctcctaacacacatgctcacactccctctaaaacaatacagaagccccccttatctgcagtttcactttccatggtttcagttacccacagtcatccaaggtctaaaaatattaaatggaaaattccacaaataagcaattcataagttttaaattgcacacaattctaagtagtgtgatgaaatttctcgctgtcctctccgtcccacctgggacgtgaatcatccctttgtccagtatatctacactacagatactactcacctgtaagtcactcagtagctgtttcagttatgagattgaaaatacatactatatagtgtatagggtgcagtactatctgtgacttcaggactcactgggggtcttagaatgtatctgtctcatatggggggactacttactgtatttgaaaaacagaaacatgatcaagttattccactgcaaataggccttcatggatttccaacaggtcaaagattatttccatgca

SEQ ID NO: 119199 - DNA, 334 bp, Homo sapiens
atgtggacgggtgtcatgcgtcctggacccaaatgtcctctccgtcccacctgggacgtgaatcatccctttgtccagtatatctacactacagatactactcacctgtaagtcactcagtagctgtttcagttatgagattgaaaatacatactatatagtgtatagggtgcagtactatctgtgacttcaggactcactgggggtcttagaatgtatctgtctcatatggggggactacttactgtatttgaaaaacagaaacatgatcaagttattccactgcaaataggccttcatggatttccaacaggtcaaagattatttccatgca

SEQ ID NO: 119200 - DNA, 222 bp, Homo sapiens
actgtaaagagaagaaaatgattcaaggctcctaagacttcaaattaagtaaatattccatatttgctttctaggtattacaacatcagtgttttttttttaagttcaattacttcattctatgctcacatttctagctatcattttaaatgacttttacaacatatggttataaaattgactactttttcagtacatcaaaagttagaaagtttctaatag

SEQ ID NO: 119201 - DNA, 285 bp, Homo sapiens
attttcctggatctgatgtgagagacgacttagccgggtgttgtggcacacgcctgtagttccagatacttgagaggctgaggcaggagaactgctttaacccgggaggcgtaggttgcagtgagcagagattgcatcactgcactccagcctgggggacagagcaagaccttgtctcaaaaacaacaacaacaaattttctggcttgtattatgtgctacttcagaaaatcctttgataagccataaaaatactttgtgtacagcaattctttacaaaggggta

SEQ ID NO: 119202 - DNA, 338 bp, Homo sapiens
aggcaaatgcaaagtttttatttacagacaaacagtatttgaaaagtgccttatcaaccttgacaagtgtgataagcatttttagtaagttagggctgctctgctgaacatactactactgctacagctattcctacttctcaggagttctcaatgcaggcagaacagaagctctctaggtcactaactctcatactgtctcaatatgctaatgttccctagaagatgctaaaaatgtaatgagtctgcaaagtacgcaggtaaataccttggcttcctgtccctggccaactcttctatttatctcctaagcattgatgaggctttaaagtagctga

SEQ ID NO: 119203 - DNA, 254 bp, Homo sapiens
caagtgatccttccgcctcagcctctcaaactgctggtattacaggtgtaagccacagtgctgggccctccaataaaacagtaatggatttcggaaagctatcctctcaagtcagccagaattgcaaggaaactgaaatctgactttgaaaaatgacctaacaaacctgaatttatatactcataaagagcttagggcattgcaggctttttaaagagaatgtccaaatacaagaacattgacatttattgaag

SEQ ID NO: 119204 - DNA, 505 bp, Homo sapiens
tacactctctgcaattcatacacaagggttcttgacatggtgacaggacaggacagatcaagacagaggctctccaaggcagtgaaaagacccttcctatctcctctggcttaacctgggtttatgctcctttcctggccctgttggtataatcggcaacatctgtgttgttagagggtggagagcgcatggatcatcttagctcaaaggtaggttctaacagcatagaagatggagtagagaaaaataaatagtgtttttttttctctctgctacttactagagccatgctatctaatatggcagacactaaccacatgtgacttttgagcacttgaatgtggttagttcaaattaagacggactgtaaaacatacaccccctgcccccagacatcatatttcattaaggcaacataaaaatgccaattatctcatttataacttttataattattgcattttgaagtaatattttttaaaacattagcttaaataaaatgtat

SEQ ID NO: 119205 - DNA, 193 bp, Homo sapiens
ctcttattgcggttgatatggagagattaatctctcaccaaaaggcaaaatctggagaagatgaaatagcaaaactaaggaccaatgggaagggggaggcaaagtcaatcgacaaccgtacctaacaggagagattccaaggcttccatcagataaacaaaggaagctgatttttctacggaggctgcatgtg

SEQ ID NO: 119206 - DNA, 454 bp, Homo sapiens
atttgacttgctaatactgtgttaagaaatttgttttttgtgtgtgtttttgttttttttgtgtgtggttttttttgggtaatgtctttgtctggttttggtatcagggtaatgctggcctcatagaatgagttgggaagtgttcttgtctcctgtattttccaagagtttgtataggattattttatctggttcagtgaattttatcagtgaagctcatgtagatgtagttttctttgtgggaaattttaaataatgaattcagttatttaatacatgtagtgctattaacattttctgtttcttgtgtcagggttagtaatctgtgtctttcaaagaatttttccatttcatctgagttaagtttattggcaaagttttttgtaacattcccttgtatccttttatccttgtgtctgtagggtctgtactgatgtcgttgttacacattcat

SEQ ID NO: 119207 - DNA, 461 bp, Homo sapiens
tgaagatgttgagagcaggccaggcccaaagtaggctggtggtcctgggcactcgggctgcttggagcctcactgaaatcattaggggttctttcatggtcacccacaaaagactctccctcttcatatgctgagggtttagcgccaactttgggctcagcatccccacctctattaccttcccggggaaggctccgagatcttgtgcggctgctcactgcaggagtaaacatggtgtcacctttgtctgctagggcagaaatgttgccagcagaatgagaaagggaagctgcaatgctttgacccctttgagctctgattctccttctggatggggcagcaatcagaatatcctcggtttggcactcagagtccctggttccggatatcctattgacagtgttggaggggtctgggtttgtgtgcacaatcacattcctttccctggccactggtgattc

SEQ ID NO: 119208 - DNA, 459 bp, Homo sapiens
ttagaaaacatagtcccacagaattttgcacttaatttgtgatttcccagccttcccctaattgagtcaagctcatcttatggacttctacattaattcagttttaaggaagagcaggctgacctgtgaaatgctaaacacttctgtcttaaatcagttttaaatactttcaacaaagacttctttgtggctgttctttgtattgggggtatacatgcagtggtgaaggatcaagacatcttctctgacttgtgccaatgtcgaaaagaaaaagaactggccaggcgtggtggcctgcacctgtagtcccagctacttgagaggcagaggcaggaggatcacttgagcctgggaagttgaggctgcaatgagacatagtaaacatagtagtgtcattgcactccagcctgggtgacagagcaagtctccgttcccccccccccccgccccacccacaaa

SEQ ID NO: 119209 - DNA, 876 bp, Homo sapiens
tgccaggctcatggaaggcccttcctatacagggagtgtctgtctggagtagctccctgcaggactgggcagccaggtaaattctcctcttcctgaagaatgaaggtatgtgctggtcgtggtggctcatgcctgtaatcccagcactttgggaggccgaggtgggcggatcacctggagttgggagttccagaccaccccgacaaacatggagaaaccccgtctctactaaaaatacaaaattagttgggtgtggtgcctgtaatcccagctgcttaggaggctgagatgggagaatcgcttgaacccaggaggctgaggttgcggtgagccggagatcgcgccattgcactccaacctgggcaacaagagtgaaactcagtctcaaaaaaaacaaaaacaaaaacaaaagaagaagaaggaaggtatggtagaggaaatctggtcgaatgtgatttgaggacaatataggagaaagtaaaatcaaggtggactcctcatgaaaatagcttcattttttttcctcataaatataatgtatgcagattataaaaacttcaaataatacataaaagtacaaagaagaagccaggcggggtggctcatgcctgtaatcccagcactttggggggctgaggcgggaggatcacgaggtcaggagatcgagaccatcctggccgacatggtgaaaccctctctactaaaaatacaaaaattagccgggagtggtgctatgcacctgcagtcccagcttctcaggaggctgaggcaggagaatcacttgaatctgggagtcggatgttgcagtgagccaacatcacaccattgcactccagcctgggcgacagagcaagactccgtctcaaaaaagaaaaa

SEQ ID NO: 119210 - DNA, 325 bp, Homo sapiens
gacatgatacgaaccgagctgggtacccctagttttagaaagtttcaagtagcaactacattagcaaatgctgcctttacatgaagtgaaaattactaaaacaacaatttcagaacaaaggtaattaatattaagagacagcgaccacaaactaccaaagactcttaagagatttggtaacgctattttgaaacttcagccaataccttaatactgtttagtaagtcatgcatttggaaggcatatttcaagttagtagagattaacacaataaaatgaactttctatgcaatacttaaactagaaaatttcagagtaattcatg

SEQ ID NO: 119211 - DNA, 479 bp, Homo sapiens
cacaggttttctaattccctttatctaaaggagacattttccagaattcagactttatgcaaggtcacagtttcaaatgtatgatatatctcttatcctcaggtgagcattaaaactccagttttgagttattacggtttatttagttcatatatattagcactagcttataagttgattgatctgccttcaggtgtctgctacatttctttcacccagagatttccaattcttgtgtttgcgctcagctatgtatttaaaatatttatttccacattttgtgcctaatttttatacattggtagtaagacggtcagtcatttatagaagtccatatagtccatattcctgtgttcagtcaacaataaccatttactgagcatctacttcacaaaggtactgaaggtacaatgatgaataaaacagaacaatttcctgtcttaacaaagtttacattcaagtgagagtagacagacaat

SEQ ID NO: 119212 - DNA, 196 bp, Homo sapiens
cattgtgctaccagggacgttgtagcagggcaggtggatgcatcccaagagtggatgttggtgaaatgaagaaaatggctatgacagctgtagtgaccaagaccaggggaacacttgctttggagacaaaagctgagaacaaacagaagcaagagagtggaagaaaactgaacacaggtgccgatgatagcgaggt

SEQ ID NO: 119213 - DNA, 451 bp, Homo sapiens
agatatctttgcataaatcactattaaaacatggtgggggccgggcacggtggctcacgcctcggcttcccaaagtgttgggattacaggtgtgagactccaggcctgaccaaacattgtggctagagtagtatttacatcttctgcatttagcagtgggaatttgtgactgtccaggaaacaaaacttcaatagaaactggtacccctctccaaaacagcattttgcctactcatcattttgtaaaggctaaataggcaactgtgtaacctgcggttaatagagtattaagttaaattcttttgagctaatgaagtcatgttcttcatgtttgttgttatcaatggctataacccagctgattctacatctatatacccattgtttgttgtttaaaaaagaaagagttgtttcatctgattttttttgagcccagacttgggcatttatt

SEQ ID NO: 119214 - DNA, 425 bp, Homo sapiens
gaatcaggaaagccctgaaggcaggcagctccggagtcgggtttagacgaggaggctgcagttctccaggaagggaagcaggaccagataacggatgagattgtgtcaaacaatgaggaggcctgcatagtcacacaggcgcatgaggtctgctcgtaaaggaccaggagggccaggctcaggggtgtggactggattctctgggccgtagggagccactggacagctgtgctcaggagggtcatgtgatcacaaatgcttattagaaatgtcactggctatggaggaccatgtctgtggttgtaagttacgcctttccgtttagtctggacttcctggtcaaggtacttttggtattagagtggggaagagaggcccagagagttggacaggttttctgaccattggcttatagtcagtgagca

SEQ ID NO: 119215 - DNA, 313 bp, Homo sapiens
ctgtctctagaggatccactctccctactgtatcctacaataagggaaaaagtcaatctatatggagcaaaattgaagacagcaatagaaactatccaaaatgcactagaaagatgaataagatcaaataaaatgaacaaaactattcatcaatgacctaaagaacaacttcaactagcctaagagatatgtaactggaattcccaaagtggaagaggggacataaaaatatttgaagaaataatggctgaaaattttctaaatctgaagcaaactataaatctacagatctaaaaaattcaaagaacccaat

SEQ ID NO: 119216 - DNA, 222 bp, Homo sapiens
aattgggatacacaaataagccagttgagagagatgacttttaagaatatttctagctctcaactgaggatcctaagaagacagaggcataaacaaacatacttgttcaatcagagaatgaatgatcaagagcattagctttggagttgacagatctacttacagaccccagctttgccccttgatagctgtaaactataatccacattccttctctgagtt

SEQ ID NO: 119217 - DNA, 652 bp, Homo sapiens
attccttaaaaactttttgccagcaatttgttttgtgtacttaacaaatgcttattcaaggtacatgttatgaaaatgagttgcctctggttctgtatggaatgggttggaagagcaacattcgtatcttatcctggagatgagggggatgtcagcaggtccttcccaggtgagggagcaagagaacaaggttaagagaggtgcaggaaacctgaacacacagttgagttacgaccgagagccctcactctagaggaactcaagtcttgagccagtagcactcccattccttctcctctgggcccctaggatggctcatagccttgggccatcttccagccagcccgtaggctttcctcagcgttgacttcctccaccagttgaacagttgctgtatcactgagaacctttgtcctgttggttttcttcatgactccatattagctgaagcttttgcacacaagacaagcacatttattgagcatcattttcctaatattaactgaattatgcacaaacaggcaatcagaagtttgattcacacaaatgtgatgctagcacaaagagggctagctggaacacagggccctagcacttgggccctgccccacagggatgatttcagggactgagaccaaaagaactgttcaaa

SEQ ID NO: 119218 - DNA, 405 bp, Homo sapiens
cttgcttccaccatgccacttttttgctcttctcacaagagcatctgtcccttatagcatcatgtctgaattcctctttctcacttctaactccccaaaacatgcctctgctatttaaaatattccactcctgcaaacatttttttttttttactagaacctgatctgtccagtaaatagacttggaatccaggtcctagacccttcccactgccatgactttgttcacttttgcacaaattttgaatgtgcttcatgtctaggaaccctatctatccttcaaggttatgtggaattactacctcttctctgaaaccttcaaccttctctgactcatccagcccttcctgaatgttcttttccatatacacagttgagcctcaaaggtttggtttgtgcacttca

SEQ ID NO: 119219 - DNA, 218 bp, Homo sapiens
ttatagttattaaatttgtgcaaaaacttgcattatttgtaaaattcaaaatcactgaaaaacaggctatcaaaaatataccagtctaaactaagaaccatgctctttttgcacattcctttatagtctgttttatttttatgttttttacatagatgtgatcatactgtacaacttaacattaggttgtaagcattttttatgtggctatgtagact

SEQ ID NO: 119220 - DNA, 614 bp, Homo sapiens
actctgaattagtacctttgtttcctagattttggtttatatttctcaatccaataccaaaaccaaagcatgaaataagaggagtgactgcagtagtgcattttcagtaagttagaatccagatagtgttatatatgattaacagtgaatacacatgggtttttacagatattttaaacataaactttgcagattcttttagtaatttaacaagactcctatcttttgtcctattcacttttataaccattataaatataaactacttcactaattcctaaccattttattccaaagagcaacaaggccaaacttctgaccactggtgaaaggaatggtatgctttttttggttactatgaattaggcatattttctaaactgattttgaattctgtagaaataacttctctctccaccttcctgttcacaaatctacatataccctcttaaagtgtcaaggtattgagttctaaactgtggccaagaataatgaaagtagctctagagaggcttgtgacttttcaaatagaatggaaatttgtacacatggtgtacgtgtgaaaggcaacttcatttatggattttattgaaactaatacattgatgtatgta

SEQ ID NO: 119221 - DNA, 785 bp, Homo sapiens
ttaagagcaaggactgggtcttatttttcattttgttccctagtgtcttcgatccttattgcattcagtggtttgatttgaacagaactttggaagcatgagacagactctgtacattaaaatgcttccatagcactcaccatggtgtccaaagtgtcactaaatctctgcttgcttgagatttctctatcttaattaatcttgatttgtgctgtttttttgtgaaagagtaaatgcctgtgggagggctgggccccacctacggagaactctggtagtgtgccaagagcaggactgcataattggtgcatgtgacaaggaacagaggagggtggaggggtccctggatgatgggggtgccttccccttggctgtctttattgtgtccccattggcattactgttactgatcactaaatcagggaacagacggaggcgtgaggtaggatcctacgacagacagcctttagtgagttaccaatgacgccagagttgaccatcaagtaaatctgttgccttttgaaagacatgtctgtctgtacaatgctagggcctgagttgcttaaccttctagtaaaccatgaatttctctcacatgtccttggggtgatgaaaatcttcccgagttgtgcggagcacaaagtagaacctgacagggaatgttctgaaataattgtgtggatggtgacaggtaaaaaaatacactgtagagatatcgatcctgtacgaatgcaacctaagttgttgctctgttaagaaatgtttttggagttctctatacacta

SEQ ID NO: 119222 - DNA, 620 bp, Homo sapiens
gtgttcctctaggaaggcataatatgtggcctgatggatttgatgagtagattgtaaaagggttgggattctggcagaacaagaagagataactaattagtggaattaactgagaaaagagttcattagcatgttggctattagactctaataaaaatgggtgtgaaaagatgggatttggacctagaggcagtcttagagccataatcctttttttctccttttgtgaaagtgacaggtacttctggtctgagtccataaatcagctatatctaaatggaaaactatatcccactgggatggtaatcacccttttgatagaaaggttagaagccagattcttcaacagaaatggaacttatcaatttaattaagattcctcaacagtagatttttaggtcagtggaacccctgtgtaaagcgatgtgctactgccatgcctagaatcctatatcactgatagctgaaaaagaggcagagcacttacattttcattagtactgtatccccttgaatgtaagccttctgaaggggaattctacttaggatggaaattttgttcgtgagaaaggggaacaataaaaaaaggatgtggagtagttacatttagctgtttgccc

SEQ ID NO: 119223 - DNA, 401 bp, Homo sapiens
ttttaatactcaggctaacattcttcgttattgctgttaagataaaagattgttctggtatatatggcattcattgaaaatgcactttagacttagaatgtagggaacattctcatactaaatcatatttagacaaatacaccgattataattctctatatggtgacacattctcaaaaatcagaatttcaaaatagtgtaaattatgcttgtgaaataaatttgcctgtgcttttacttcattgtgtagttatttgtccagttgtacatgtttgtgtcagaaaagctactctctgtagaggtactttacatgcctaagacaaagtgacggaatgaattattctgtgctttgtgggagacagcagctctgggctcgagcctaaccctgcagacttctagtt

SEQ ID NO: 119224 - DNA, 419 bp, Homo sapiens
  misc_feature (405)..(405): n is a, c, g, or t
atccttccctttctcacgatccttcctctctcacgatccttccctctctctcgaaagtgtcttggacaaaagtctttctaacacccagcaccctggcaggccctgccccagccatgtgatgtggcaacggtgaccaggacaagcttctttctcacagggtttagaggtcatgactcttttggaggatttccctctctgagtaactttgctttttgctgatcctatgtattcatcaaatacaactgattacatttcattttggaacagttgttattaatgaataacagttgttattatagtttatgtggaggctccaggttcctcacacatggtctcttgacttaagctccttcctttctgctctgaaaatagcacagttccccgtgagagagggaaggatgggtnccgagctaagattc

SEQ ID NO: 119225 - DNA, 308 bp, Homo sapiens
cacttatttggagtgactaactcagtatgtaagtagatgagatttgttgattttgcccctaaaacgggctttagtcattttaggagtgagttgcacaaaaggacctaaaatgcattgttttttgccatctctactaaaaatacaaaaattagccaggcatggtggcgcatgcctgtaatcccagctactcgagaggctgaggcaggagaatcgcttgaacccgggagcgcggaggttgcagttagccgagatcgtgccattgcactccagcctgggcaacaagagtaaaactctgtctcaaaaaaaaa

SEQ ID NO: 119226 - DNA, 1514 bp, Homo sapiens
cacttatttggagtgactaactcagtatgtaagtagatgagatttgttgattttgcccctaaaacgggctttagtcattttaggagtgagttgcacaaaaggacctaaaatgcattgttttttgccttcttttaagagatggggtctcgctcttattgcccaggctggagtgcagtgtgctatcatacatagctcactgcagtctccaactcctcataccagaggcatgtgtcaccatgtcttactcctaaaatgcatttttaaaaagcgaatttttagattaaagtgcctagtttctgattaataaatagaagatgaaaaaagtgggcgggaaaagcataatcttttaagatttgtaattttctgtatgtgccacatttatgtaaattaactataaaatatggaattcaggatcatgctgttttgcatgtactttataggttatatagcatgaaacatacaaattatcactgttctttagtatatagctccttgccttttcttacatagatgcttaatttaacaattacctatttatagttcttattattgacgggaatatgattagaagtaccaaaactaaaaattccattatgtactgtttactttttatttaatattacatgtttttaccttgttgcggtatctttggccttcacacacacatgtgtgcgtgcacgtgcatttcattaccatgtagacaagacagttattgcttatagtaatttacccatttgagggctaagtgttttaagctgtggttttataagcaaagctgtaagtaaatgtaatttattttagaaagatattatttgaaatcaattttgaagaattgcactatttgataatgctgctactacatgagatactctggggaattaattttatgagataagatgaatggctttctagaaggtgttgctttttgttttttctttttcttttttacatttcatcttagaaaaagttgcttatattcagcaggttggtttgtcaaattcagtgtttgagtttgtttctggtcagttcagtagctgctactttagcaagatgtggcctttcacaaaagaggtaagagtgaccaaatagaattttaggacaataagtataggaaatatctctttatcgtaagataagaaacttgaactttttaaaggaaatgtcctcttgaaaagaacatttctgactgcatgcagaagggtacttaagacatatataacaggccaggagcagtggctcacgcctgtaatcccagcactttgggaggcccaagtgggcagataacctgaggtcaggagtttgagaccagcctgaccaacatggtgaaaccccatctctactaaaaatacaaaaattagccaggcatggtggcgcatgcctgtaatcccagctactcgagaggctgaggcaggagaatcgcttgaacccgggagcgcggaggttgcagttagccgagatcgtgccattgcactccagcctgggcaacaagagtaaaactctgtctcaaaaaaaaa

SEQ ID NO: 119227 - DNA, 772 bp, Homo sapiens
cactggagcaagctggacttcactctgactgcaaaggttaccttgacttccagcctgcccctctactgcttttttctttcttctacactagcgccttcttttgccaaagatattggtgtattttgtgcctaggtccttccattaggagaaaagcaaccagtaagccatctacactttggtgtgaatccattcccatgactcccaagttctgtttgcttctaagaaaataatactgtgctggatgttacttaatatgcaaggaattctaagttaaaggaacatgataaattagtttttaactggagaatcccaaagtcccccatagtgggaacaaaattggatgtcaaaaagcccttctccagtcatcccagagacgtgccaagtaagaatgcctccacttcagctgattggagtccactcctcacgtaagagtgcccgacccgacgcagagcaggcaccccaggagtgctttgtgtgcgagtgctggccagggtcccacacagaccaaagcctcctggcctgaaggctgggaaggtgcatgtgggcatcacagaggccacctgagtgtggcaggtggacagggcatgggacctatggtcctgacacggggcccacccggtgggtgcaacatggctgctccaaaggagtctctctccacgtggctccagcactgtcccctgggattcacacctgcagcatgggagccaatccctggaaccctccacagcaacactcagcatcaccgggcttccccatcctgccacagccaagg

SEQ ID NO: 119228 - DNA, 451 bp, Homo sapiens
ctggtggcctgtcctgaatttggctaaatcgagttgccagttgaagccaagcctcccccgggccaggctgcagggaaacaaaaagagagggagcctcagggcagactcctgagctgtgtcctggctctgaagtcaccggctgtatgaggctgtgggcacagcacctgggacacagcacggaggacagtgactgatgcagagctggagaaatagggagattcacccctagggctctgcatggcaggaaaggggcagtgccaaaaagtgtgtaattatagagagggtaagactactggacactttatatatatctaatataagacttaccattaactatttctaagtgtgcaatttagtgttgtgtaaccatcacactatccatttccagaactttttcctcttaccatattaaacctctgtagccaataaacagtaactctcactccttctc

SEQ ID NO: 119229 - DNA, 491 bp, Homo sapiens
gaggggcccttctcctcctgcaagcagccacaccatttcacagaagagaaaaaactgggtccaaaaaggggagacagcttgcccaaggcctctcagaaatgtctcagtttccaggtgtggaaggcagaataatggctgcacaaagacacccacatccaaacccccagagcctgtgaatatgtcagcttatggcaaagggaaatgagggtgcagatggagtgaaggtgtctcaccgctgactttaagacaggggagatcaccctggatgatctgggtgggccaatggaatacaaggacctttaaaagtggaaaagggaggcagaagattcagtgtctgtgaatcaaggaaataggcagcctctagaagatggaaaaggcccagagacagattcttctcccccgcagcctccagaaggaatgtggctctgcctcgatttcagcccggtagagctgtgtcagacttctgactacagaactgtcagctgatcaat

SEQ ID NO: 119230 - DNA, 256 bp, Homo sapiens
gaggggtcaaagactctcccatatgttagaagggtcctgcacagaacaggctcacccccgcccacgtcccccagtgtttgaaatgcatagtgtttgctctggtttattggttagggcaggactttctcatttgttttagatctaacagcagtttagaaattggcctgtaacttttttttggcctgatttccttctgtttgtgccgatattctcacctcagtaggaatcaggagcttcttttgctgttcttctgttt

SEQ ID NO: 119231 - DNA, 479 bp, Homo sapiens
ggaaagcagcagagatgcattgtggtgttcttacatcttacattgtggtattcttacatctgttgacaattcaaccagtgttttaatcactgtagaagcttcttcctttctaatttgtttctgcagggaaatcatatgtcttctgtttctaaagtatggctgattactagattatggttgtcctttaatatattcttcccagttgttctattcctagagtttgtctctttaaaaatagtgtttccctgggctgggtgcagtggctcacgcctgtaatcccagcactttgggaggccaaggtggcagatcatgaggtcaagagatcgagaccatcctggccaatatggtgaaaccctgtctctactaaaaatacaaaataattagctgggtgtagtggtgcacctgtagtcccggctactcaggaggctgaggcaggacaattgcttaaacttgggaggcggaggttgcagtgagccgag

SEQ ID NO: 119232 - DNA, 390 bp, Homo sapiens
tgtggcagcaacaagagtagtcagctcagcttaagcctctgttcctaaaggaacttggtctaaacttgtaggtctaaagacctacaagtggctctgatggggacctgcagtgatgcaccagcgagcgacaaatggagacatttctttaacaaggaaagcgatacaatttctacatgggaaggatgcattggaagcaacctggttagaagggggctggggactcattttgaaggtctggctgcacaacaggcatcatgttcttacttagatttaagtttctttggaattaataaaaattatgagcaaactgactcctttcctgaggtacaagtttgctctgcggctgctctttctcttctgtgaaaacgtgaagctccagttttggtgcta

SEQ ID NO: 119233 - DNA, 390 bp, Homo sapiens
tcattaagagatggctgagggaaagtgaaggagtttgttctgttttaacttaacaagcatttgaggtagggtacatgaagcagaggtacctgtggaagatgttaatgacatgagcctgaatataggacaccacatcatcagcatttccatcaaaaacaagaagagctgctatggaaaaggtaccaccctaggcgatagggatagtgtggtataatacactatccatgattttcagggagaacagaattcatacacaagaatatcaatgaatctgtaatacttaacttgccaagtaagtgtcaaatttgggcatctattctccataggagattgattagaaagtccttcagacaaaattggacttcagatgagcctttaaggaaagtggaa

SEQ ID NO: 119234 - DNA, 754 bp, Homo sapiens
gcaggtggatcaactaggatgaggagtgcgagaccaggcgtgtcgctagacaatgggacatcaccctagtctcttcatagagaatcactagagatacattgagctggggcattgtggtcatgcacctgttagtccacggcctgagctgtgcagacacggcatgcagtgcatggaagcaatatgcctatgatgtgctgggcatggccgagacggttagctaggtgacgtcctgcaagatggtgctattgcactccagcctggaccacagagtgagactctgtgtccaaaaaacaaagagaaatggaagttaaatattagcaaaccatctatcaaggtaaaaggttaatatccaaaatatggtaactcgtataactcaatagcaaaataacaaatttaacctaattttaaaacaagcaaaagactaatagacatttctccaaagaagacatacaaatggcctccaggcatatggcaagatgctgagtttcattaatcatggaaatgcagatcaaaaccacagtgagatatcaactcacatcttagcatgtctattatcaaaaataaatttaaggtcaggcatggtggctcacgcctgtaattccaacactttgggaggctgagatgggcagattggttgagtccaggagttcaagaccagcctggccaacatgctgaaaccctgtctctactaaaaaatacaaaaaaagttagccaggcatggtggcgcacacctgtagtcccagctgctcaggag

SEQ ID NO: 119235 - DNA, 170 bp, Homo sapiens
cccagatccatgaaatcagagtatgtggaaatgatgcctaggcatcattattatttaatgtgcacctgaggttatgaaccactgatgtaggctcacctctccacctgggaaacacatacacacacgtatgcatgtacccacatgcctgtggatgtgtacacgtgcacaca

SEQ ID NO: 119236 - DNA, 358 bp, Homo sapiens
gtcgcaccattgttatttgcagagtggtctctgcctgctcagcatcccacgttggcctggcaccaagcagggactctggccacttgatgcactaggcctgtgtgcctgtgctacgtggagcctactaacaacttcattcaacgccccaccaacctctgcgtaagaaaacgcgagtcctacacccaaagtcctcagcctgagtcagggcaaaaacctctggggacacagcagagcccaggtgtcctgatgacctgggggtctgaacacattcagggtcccacagtgccacgaaggactcccagatcccctagtacagctatagccctaaccctagcctgccacagggaggggaggcagg

SEQ ID NO: 119237 - DNA, 356 bp, Homo sapiens
aggagccagaggtggcccgcatgtgctttgcagaggaacttgcacccacgcttttatcggtgatggctggaatgcttttcttaactggagctttgttgaagagcctggtgcttttgtggcagtgctaacctggggagcccatggtaaaacccaagcaacaaaaccaccacccaatcacctgtgctgttgcagagaatggtcctttgccctttcttcttgccttgttcctttccctgttttctctgccctttttcggggctggtcttcctaccacctttcctgctagggctcccaaagtgtggcccttctggggtttacatggtgtgcccagggaatagcttggcttttttattcag

SEQ ID NO: 119238 - DNA, 497 bp, Homo sapiens
actgctcttaggagattatatatccctacacagatgaacattcgagtaatgacagaaatgtaaataccagcctattgttttataacaattttgaatgactacaaaaatgagtttattttacgggtatttgctgatgttttaataattatttcagtggtttgttaatatgtatcagttatatttcatacatttcctaggtttcattgtccatcttcttatataaggtacttataaatatatataaattatgaaattagactacagcatttaataggttgatataaaatgatacaagggcctgaaaatgtgcttttaacgtactttttaggaaaaggcatcttattctaaattttgaaggcctctatttggctctccccccagcctctgataccattgcctccgttttatatagatatgggaccagaattttagcctgctgctgcttatatctaaaaataatatttgtaaaattatccaaagcagtagatatattttta

SEQ ID NO: 119239 - DNA, 397 bp, Homo sapiens
tggccatgctggtcttgaactcctgacctcatgatccaccctcctcggcctcccagtgctgggattacaggtgtgagccactgtgcccagcttctctcacccttttcatcctcaagcagctatgaaaacctgtcctttcaggacgtacctaaaatcccatagcttctctccacttccgccaccaacacttgagccaagggcccatcacctttcacctcctgcagcagcctcctgacctgtctccctgctgccactctcaatcccctgtgtggtctgttcctatagggcagctgggtgtgtctttccaacataggaatatgtctccctgcaccatgtctttagcatcaagttcacccaacccatgcccctgccaaccccagtattggggcattcctca

SEQ ID NO: 119240 - DNA, 272 bp, Homo sapiens
attgataaagaaacaaattatatggattggaaattctgttaaagacaagttgaaagcagacaatggtaaaacataaaaaatataggaaataagatgtttagtggatgaaagtgaattggtaacttcagaagtaaatcagttctggatggcaaggaaccaaatgtgggctataagactgagtgttaaaatggagaaaaggcaatcactagagatgagatcaataaaattcaaggccaaggctatagatgaattaatcacataagtaacctagg

SEQ ID NO: 119241 - DNA, 638 bp, Homo sapiens
acatagctagagccgaaaggtctggaatcatggtggccttgggggaaccgatgcggtcttcgctcttcgtggccgtcagtgtctaactgacctccaagaggacaagtggtcaggaaggtggagatagtattagaactgttattattgttgttgtttttaacaagcagacctgtcatgaaacttgccatagaggtccccttttccatatatcaccaaagcctcataggtaagaaaaggtaaacatccaagattgtttctttaaagattgctgttgggcagaccaagatttagccacaaaaataaacataatctctgatgctgagaagagatcagaatgagttgaaacacaggggaaaaaagaagtaagcagaaaaaaattttacaatagtagatatggggattagatagatagacggctatatagatatataggactctgaatagacccattacaggcaggcatgtaagtggaaatgattaatatatagatgtagacacaggtaattctatataaatgtggaagagcagcaggaagtttctacagctgggaaggaaaaggtaattttttaaaaatgaggtcattacaggttgtttgggtccaggcagattcccattgtcctccctaaacactgcttgta

SEQ ID NO: 119242 - DNA, 316 bp, Homo sapiens
tcatctcaattgccacagaaaaagcatttgacaagattgaacatcctttcatgataaaagcactctaccaactagaagtggtaggaaatgaccaatgtaataaaggccatttataaaaagtccatggctaatatcactcaacaatgaaagactgatagctaagatcagaaatagcaaagatgggccaggtgcggtggctcacccctgtaatcccagcactttgggaggcggaggcaggcagatcacttgaggtcaggagtttgagaccatgctggccaatgtggtgaaaccccacctctactaaaaaaatacaaaa

SEQ ID NO: 119243 - DNA, 169 bp, Homo sapiens
acccgtcgcatagtcgggggcgcgcccggtctccgccccgaatccaagtcggaacttgaccgagttgtttgggccgcgatgaccgcacggcgtgaaccgtcctgagcagggcccacgcccggcccaagcggcccagccaccgggctggggcggtgtctccctttgcccc

SEQ ID NO: 119244 - DNA, 811 bp, Homo sapiens
gccgctttggtgggaaggacctcccttcccccttatagaaacactttctccaggccgggccgggcttggtaaacctcagccgtgcctgggtagaggacgccgggctgggccgagcgggggtggaatgagggcgtctagagacagagaaaactaagtaggatggggtcgtccccccagtaatctggaaaacagttacagcaacaggctcctctcatcagacggcagtgctggtcgtttcctcactggtttgcggggaaggctgggcagaaacaaggatgcaaccttgttctcaaccacttgctatctcgatagggtcttgctgtgtcacccagattggagtgcagtggtgtgatcacagctcactgcagccttgacctctaggctcaagtgagcccctaccaagcagctgggactacaagtgcgcaccaccatacccagctaattttttcattttttgtagagacagggtctcactgtattgctcaggctggtcttgaactcctgagatcaagcgatcctcccactgtggcctcccaaagtgctgggattatagatgtgagctaccatgcctggcctcaaaacatttttgtaatctggctgttttccagttggatggactctgagtgcaatctcaatgtctttcctgatcagtaagaggaagaaaggagctgttgtataatctttggtccacttgctatataggaatagatctttactgctacatatacataattctgtacggaacagtcatgttccttggattctgacagcatcgccaatatgtgctttgaaacctcctacctggcacaga

SEQ ID NO: 119245 - DNA, 426 bp, Homo sapiens
atcctaagcttctctcctccactttctttctctccaccatccaatctgtacaactagttgagtcttcctctggggtggttcttcagtatacgtctatatcctgaccctaaggccactttcaagtccccattggatctcatttgggtttctgcaatacagtcgcctaactagtctccctgtctttcatttcccaccagtctctaaaatgaggagtataaggggagattctgctgtgtacatagcggaaggagcaaggctgggatccatctaaaatgccatataacttttttcaagatcaagcaacagacaatgccagtatgtgtgcttgtttctgtcccctcttaccaacttcctccccaccttattctcatcacatttccttcaaagaaaccacactgttgaacaacagttgggcattctaaagca

SEQ ID NO: 119246 - DNA, 275 bp, Homo sapiens
ccttaagcaagttctctaactctctgaaccttggtgttcctcacctgtaaaatggggacgataataaacccacctttccagatggccccaagccctgagtttggcccacattttatgatcaatgtgtgaccgccattattacggatcattagtcttggtccatgtggttcagaacatagaactgctgcctgcctgacctcagtaattcatgcagagaaacagcatttggacctcccagtacagttcattttgtagaatttttacactgtgtggat

SEQ ID NO: 119247 - DNA, 851 bp, Homo sapiens
acaagggaaagtgactcatcactggacccagcacacaggtgatgtaattcttctgccttgtttttgtacccaggagccattgtaatccatctctgggcccatcatttaaatgatgtgactatccttttcttcctgagccctattcacagggaaaatagtgacacatctgtgggcttctcaccgaaatgatgtgactttccttcctgggctcacctctcaagggaattttgacatattactggaccaagcacctaggtgatgtggctctgacaaacgagaaattgtgatgtaccactgttccacacctaagagatctgactctcttttcatgagccctgcatttattgtgtattgtgacatatggcttggtccaacgcctaggtgatgtgactctctacttcttcctcggccatgccaaagaagaggattgtgacatatcactggatccagcacttaggtgatgtaaatcttttcttttgctgagccatgcatatttttggtattgtgacatgtagctggaccgaacacctacaggactggatcagaggctacttaataagccctgcccataggcggccttgtgacatatgtctgcatctatcaccaaagtgatgtgactctttttctgcctgcatcctgcacatagagaagattgtgacatatcgctgggcccagtaaccaggtgatgtgtcttttctggcaggtcttttcccacagggagcattgtaaaatatcactgggctcggccaccaggttatgtgacccttctgcctgtgccctgcttcctggaaatgtgacattcctcatacagcacccaggtgatgtgactcttctgctcattttctacttat

SEQ ID NO: 119248 - DNA, 445 bp, Homo sapiens
caaatatatctgctgggatttatcattattattattaattataatcagcctttgcttggtagttatcttatttataacttttgatatagagtttttaagatatattcttgacctctataccacatatcaaaagagtagtaagttacttgtttcttttcaagtaaattattgatttgctactgactatgctcagaatgatgaatgaagtaagatttcaagctgtgaagaatctggagcccagtacctttctgacccgcaactttgacctaaaaaatggcatgtgtctaacttggaaagtaatttttagttgctatttatttagaaattatactacatttgtgatgcctttctccattttctccatgaatggttcaaaatttaattcctagaaatcactagtttataatcattccctttgatgttcagcagttcataaaactaacag

SEQ ID NO: 119249 - DNA, 322 bp, Homo sapiens
tgagtgtaatacgaattccaaagacctttttgaatattaaacaagataatacgcatgaatgaactttggaaaaactgtcatatgctgtgtaataattttcacaacttttcctgtcaaacagtaggcttttttcgccaaaacttctttcagtacagaatttaaaagagaaaagtagaagcgagaagggagcatgtaaagttatgctgataaggccaggcgaggtggctcatgcctgtaatcccagcacttcaggaggctgaggtgggaggatggcttgaacccaggagttcaagaccagtctgtgcaacatagtgagagcctg

SEQ ID NO: 119250 - DNA, 232 bp, Homo sapiens
tcacaatatccaatatcttgtagagagacttctataagccatgacattggggaaggcgtaatcactctgacatcaggattacatttgtaattgacaaatgtgggctgggtgcggtggctcacgcctgtaatcccagcactttgggaggccaaggctggcggatcacttgaggtcaggagttcgagaccagcctggccaacatggtaaaaccccgtctctagtaaaaaactac

SEQ ID NO: 119251 - DNA, 161 bp, Homo sapiens
ggaatcctggaagctcgtgagcctcaaaactggaattcttcgctaccactccacagtgatgcccccacctattggcatcctgaccttccagatgggcagctgagaatccatctaaggcagagatgctgctgagacgatccggagcactcaccacccaccct

SEQ ID NO: 119252 - DNA, 369 bp, Homo sapiens
taaatagatgggtgggcttgaactcctgggcttaagtgatccacttgccttggcctcccaaagtgctgagatcacaggcgtgagccaccatgcctggccctgatttttttttttaaaggggttgtttccatttcattacaattctgagtgcctttagtgtccaaggcattttctaggtgctgaaaataccaaaaaagtatgatataatcttgccctcaatgggtttataatctgtgtgtgtgtgtgtgtgtgtgtgtgtgtgtgttcacagctaaactgagggatatagtcggcccttcgtatccctgggttccacatctgtggattcaaccaaccacaaatcaaaaatatttgaaaaaaatggatggt

SEQ ID NO: 119253 - DNA, 355 bp, Homo sapiens
caccctgctaacagggcagtggctgccactgccttgaaacagggaggccatcccatagccaccaagtctagtcgctgggacaaacatgccacgggccaataccatgaccctagtgtttgtaccaagactcttatagatattccttttctttcatagatatacacgtaaaaaggctttgtcatgtctggcagtcctaatgccagggcgtggatcaaagccttcttgatttccttgaaggccatgtcctgctcttttccccacaggaggggttgttttccgccactttggtagcctcatacagtggttttgctaagagcaagtaacatggaatccaaatgcgacagaaaccagctgc

SEQ ID NO: 119254 - DNA, 403 bp, Homo sapiens
tagaaggagcggcaggtctctaagaagtggagattctgcagctggcaagcagcttcatggcatttggtaggcaatttataaacaatgaacattatcctaatttcacttttcttatagagcagctgtgtgctatagtaagaagtaatgggcctcagctctgccactgttcatgcacccttagataagtcacttacaggtgtgagccactgcacccggccattgaaaatttttaaatgattatatattatttttataattaaaaattttgtttttcccaaataaagatcccattgtcccttgagtgggaaccagactggaagcaggacctctggattaagtgactttaatcttgtagctctcctaagcctcaaacttttagtacagtgggaccccatttataaat

SEQ ID NO: 119255 - DNA, 470 bp, Homo sapiens
gtggtaatttaatttagtacaactcttgggtagtagttattactgtgtaatgttttactgttagccccaacaatttcacttctaaaactagattaaaaaaaaattccacagatatgcgaagatagctatatgagaatgtttattgccaaaaatttggtaacatcaaaacactgtaaacaaactaaacatctgtccatacgggattgttaaatcagttacggcactgattcaacggacttgtatataaccattaaaaattacaggtgtgagccactgcacccggccattgaaaatttttaaatgattatatattatttttataattaaaaattttgtttttcccaaataaagatcccattgtcccttgagtgggaaccagactggaagcaggacctctggattaagtgactttaatcttgtagctctcctaagcctcaaacttttagtacagtgggaccccatttataaat

SEQ ID NO: 119256 - DNA, 1505 bp, Homo sapiens
aaagggagttcggagggggccaggcctcctgcatgaaaagtgagggtcctcacgagcagtaggagctttggggtcagcctgcacaggatgggctgggcctcagtccttctagcgaaagccctcaagactttgcttatctggggccacccagtgagtcaggggacagaggttctcactctttctgttacaccaatcccaggctggggcttaataacttggtgtgccgcgctgtgcttttctgttgctttggaagtgcctggcatctcgtatggtgggctgtggagccacactgcctgcatttgaatcccggcttcacgctgtctttacttgacttctcttacctcatttttcccatctgtaaatggggtataatcatagtaactatcttacgagttttttgtttgtttgttttaaatttcagattcaggagatacatgtgtagttatattacataggtatattgggtgatgatgggatttgagcctcggtgaactcatcacctaaactgtgagtgtagtacccggtaaatagttttgcaagccttgcttctctccccgcctcccacttttggagtcgccagtgtccatcgtttccatctttatgaccatgtgtgcccattgtttagcttccacttatgaatgagaatacgtggtgttcacctttctgtgtcagttatttcacttagggtgttggcttccagttccatctatgtggctgcaaaggacatgatttcattatgaggttaagtttaagattaagccttagaattcacattaaggttttgtgctcggcaagaataaggtcccaggaaatgttaattgtggttgccgttgtcggccaccatcaccaccaccaccaccattgtcaaattaggctcttcattcttttaataactgcttctgaggttttattttgttttgttttgtttttcttcgagacaggcccttgctctgtcaccgaggctggagtgcagtgatgcaatctctgcaacctctgtctcctgggctcccacctcagccgcctgagtagcttggactgcagatgtgcatcaccatgcctggctttttgtttgtttgcttatttaagatgggtcttggtctgtcacccaggctggagtgcagtgacgtgatcctagctcagtgcagcctccaacacccgggctcaaatgagcctcctgcctcagcctcccaaaagtgcttagattacaggtgtgagtcactgcacctggcctgaggatttaaaaacaagcgagcaaacaaaccaggctatcctagatatttgtgttatgaaatgagtttctgtaggtaatcagtttcacttatttttttatttctatgaatttatagagagcatggtatatacttggcacccagagatagttgtaagaaatacattgtttattttctgtgtgttagaatttgaggattctcaatacattattaaggcaacctccacctcccgggttcaagcagttcttctgccccagcctcctgagtagctgggat

SEQ ID NO: 119257 - DNA, 416 bp, Homo sapiens
atgaccgagcctgggataaggaacactttgtctcagtatttatgaagagcacacttggcaacagaggaagagaatcttttgaattccagatcagaagggaatacacgcctgtaatcaagattctggaatcgtacaaaataatgtatgcttagactctgcgtgtgagtggaaaccgttatattggccagtgtagatattagtcataacgtaggaagcagtttttaatgtgcagttcttagttttcaatcttgggagcttcttgataattaagtgatgtttttgacagtgaggaaattaaattatgcgcggaattcactccctgaagtatatttttgagtagctttccttggatagtttaactgtagtcttgtcttcccaggatgaattaggtgacttattgaggtctcttcagtagc

SEQ ID NO: 119258 - DNA, 516 bp, Homo sapiens
gcatctcccattctttgcctctgtcttcacatggccttctctgtgtgtttctgtgtcctttcctctttggattcagggcccaggctaaatccaggataattttacctcaagatccttaattcattacatccgcaaagaccctatttccaaataaggccatattctgaggttccagataatcatgaatgtttgggagacagtattcaattcactacacaggcctaagtgttaatttctactgttcttctttccattggatacagaaaactgttaatacactctgcttttccttttttttttttttttggacacactgtctcactcttttgcctgggctggagtgcagtgatgtgatctcagctcactgcagcctccgcctcctggattcaagtgattctcttgccttagcctcccaagtagctgtgattacaggcatgcactaccatgccagctaatttttgtatttttattagagacggggcttcactgtgttggccaggctggtcttgaactcct

SEQ ID NO: 119259 - DNA, 145 bp, Homo sapiens
gggtgctgcctgggtgagggtggctctttcatgtttacaattagcatcctaaaggttggaacaagcaggggctatgactcccagagagagtggcagctgactgatgctggtaaaagagatttccaaatgtatgcatttcatgcag

SEQ ID NO: 119260 - DNA, 891 bp, Homo sapiens
atcataaagtattgtttgatctgaaagaagacagtgaacatttttggtaatttttagtaagctccctgataagattcatctattcattttattgtggaatttagcttactaaaattcctttagccagattttcccagtgcatctaatagctgaattaactattttatgttccttgataactatttagtacattattctttaaatatacatcattttaagcaatcatcgtgtgaaaactggtaaaattcagcatgattatttacttgacaaaagatgtattgtttcttaaaaataagccactaatactacattttataatactacattttaaatatgattaaagttataaaacatgcatccaaacacttgttcagaatacatggattatttatgttttgaggaacgagactgttaaagatttggtgatgtgacagatgatacagtttgtaaacataactaagaagttactcaactattatatataattaattaaatcattgtagaaatgattattcagcaattatgtcatttggtaaattcaaaggttaataggtccctgcactcaaaattcttccagtttagtaaaatgtagtcattatttgttttaaaggaaaaagtatcttaaactatttattaatgagttataaagccaatataatacactggggctcagtgagttataaagccaatacgatacactggggctctctttccagtatacctcttgcaagctacaggcaagtcagttacattctctgaacatcagtttcttcatctgaaaatgtggaacaaaatatctgccctgcctacctcgagcagtttttttgaaccttaaaaaagatgttgcttgtcaaagtgccttaaactgcacatagagatgaagtatgacaa

SEQ ID NO: 119261 - DNA, 410 bp, Homo sapiens
tgtgctccctggggtggggatttctagttactagaccatctccatttttagcagttggcatcctcatgatacttttataaatacgacattaacaggagagcagcagtacgattttgccgatggaataacagatttgccggcaatcactgaaagagtgcaaatatcgggtccttgtgacttcaacggactcttccaaattgtatgaatgtatcaatgtattagataaacccagtttcagaatgataaagaaaaaatgttagaccaaataatgcggctagttaacagtggtacgatttctagcccgtgggtttaaaatgcacttaaagtcctgtccttgccttttattttctgaacttgatgtttttgcattctttgagttcagtttaaagacaactacgagcatctgcaac

SEQ ID NO: 119262 - DNA, 147 bp, Homo sapiens
ccaccattaccaccctaaccccactctgccctgaactgcaggtaactgcatgcatgtcagcctctagcccctgaagtggaaaaagccctgttcacctcaccctccagaaggctaatagtctcaactacagctgactgtcaatacagg

SEQ ID NO: 119263 - DNA, 508 bp, Homo sapiens
cacaaatgaatgaacgaatgaatgaatgggttctaggcctgaagtcaggcctcctgagttttagtccagcttctgtgctgtgtgttcttgagtataccccctcccctctctggaccttttttttacaggaggacaaggaactggataggtagattctagagcctcttatttctgccatacattctgggaagaattaaaaccagccttttaaaagacagggcctagaaaaatcacaatttgctgacagggcctactgtgtgccaagtcccttgttagggaggtactgttaggtgccttcttgtcaaatcctcggaatgactcaggcagttggtattaccaaccccctttacagttgaggaaacggaggctcagaaagataaagccctcctcaatgtcataagcttggggtaagaggctgcagagcctgtatttgaactcaggtcttcctcctgcaaagctctgactccatcagaaataccttctctcccatcggaagttccagtgctgt

SEQ ID NO: 119264 - DNA, 427 bp, Homo sapiens
tacaaagggtaaggaaacaaattctcccctggagattaatgaagaatcacagaactatggacccatattagatatgtgacttacagaattataaaagaataaatttttcttgttttaagccaatcactgtgtatagcaataggaaactgatgaaatgattttatgtagaaaattccaaaaaaatctacaaaaatctctagaacaagaaaaatgtaaaggtagcaaagtataaggtcaacctacaaaaatatcgtatatttcatcagccaggcatggtggctcgtgcctgtaatcccagcactttgggaggccaaggcaggcagatcactcaagctcaggagtttgagaccaggctgggtaacatggtgaaaccccatctctacaaaacacaaaaatttaacaggccatggtggcacatgcctgcagt

SEQ ID NO: 119265 - DNA, 262 bp, Homo sapiens
aatttctgccacccccactcatgctaactggtggttacaaaaaaaactgacagcctgtttcaacgttgccagagtctgagggaccccaaaatgatcaatgtcaccattttgcttcatgactaggagcttattgtgcgaaaagcagctactccctatagtcaattaatagttccatgaaagaagccagagacgtgagcaatcaaaactaaatcaggcagcgtattttttttgagtcctccgtatttcttttttctagaatgct

SEQ ID NO: 119266 - DNA, 239 bp, Homo sapiens
ccatgattcttgctattctttgtaaatctaataccttccatccagagagagagtatacatgtggagtcaattgggagtaccttttgtatcctctagtctgagccttacaggttaaaggagaatgttggatttgcttttgaaagtatgggcttgcggagattaaaaaaaaaaaaaaagaaaccttgaataatcatgtacaaatataaatactgtatgtagaataagtgtaatggatcaca

SEQ ID NO: 119267 - DNA, 201 bp, Homo sapiens
ctgggtgacttagaggatccctgatccgtgcattgagtacaagcctttctgtggacacatacttccatttctcttggacatcacataggggtgcatagctgtctggaaactgtctcaaggcagaaagctgctgcgatcgtgggtgtcccctcatctgtttctctcagggatccttgtctttctttgcctgatgtctagtgt

SEQ ID NO: 119268 - DNA, 676 bp, Homo sapiens
gagggtggtgccgccgttggctcctgcctccccggctccgcgctgccgccaccgcggcccatgggcagagtcggcgggcgggccggcattaaaccgaagaaaagatgtccctgtacgatcagaggaaaccagtgactcaaaaacagaaggctggtccaaaaacttcaaacttctacagtctcagcttcaggtgaagaaggcagctctcactcaggcaaagagccaaaggacgaaacaaggtacagttcttgccccagtcattgacctacaacgaggtggctcctcagatgaccgggcaaattgtggacacaccaccgcatgtgccagctgggctgaaggatcctgttcccagtgggttttctgcaggggaagttctgattcccttagctgacgaatatgatcctatgtttcctaacgattgtaagaaagtagtgaaacgccagagaggaaggacaaagacagcgggagctggaaagacagaagaaatagaagaaagagaagaaaggcataaatacagacatgatgcacgtgagttttcaaggagttcagatccggattctgatgaagatgaagattaggagcgagagaagaggaaaacaagtatgggcggagctgccattgcctcacccacttctctggcagtaaaagacagttaccccgagattttccttatgaa

SEQ ID NO: 119269 - DNA, 266 bp, Homo sapiens
acaatcatggcggaaggtgaaaggcacttctcacatggcagcagacaagagaagagagcttgtgcaggaaaattcccttttataaaaccatcaggtcttgtgagacctactcactattaccagaacagcacaggagagatctacctccataattcaatcacctcccactgaattcctgcccatgacacatgggaattgtgggagttacaatccaagatgagagtcacagccaaaccacatcattcctcccctggcccctccccagt

SEQ ID NO: 119270 - DNA, 282 bp, Homo sapiens
tatacatttaaagcatggttctataaaaattttattttagttaaacagaggtgtgcattgaatcatgacatacaataatgtatttcttactgtgagttatagtcaaagaagtttacggtcaaaaatgctgctgcactggcaatcccatgagaactgataccttgcacacagttacaagattcccaacaagagccatgtgcattggcagtaaatattcattcagtgaatggaagaataccgtcttgccagcctttaactcatttttctttttatttcttctat

SEQ ID NO: 119271 - DNA, 319 bp, Homo sapiens
ttggagttcctgttctgtacaagatggtggaaaggatgaacaacctaacttcatttttaaaaaattaatcacatttatttagtattttccattaagtgctgatattcagctgggatgtagcagtctgtctctgtggccgtttccacatctccttttagattgctgccaacagtggttataatatttctgaaatcatccttgattctactaaatgtcaaacctgaactgggaattttcacataccttttttctttgaaccatttcagcaatcctctaaggtggatattattatttctattttatctaaaaagaatagagc

SEQ ID NO: 119272 - DNA, 155 bp, Homo sapiens
ccgttgctctccttgggctccagggccgtagggtttccaccacatgtctggaaagaaaagacacaggccttggagtcatgcagacctgtgtttgaatctcgcctctagcacttcctggctgtgtgatctaaagccggtgtcttcacctctctgag

SEQ ID NO: 119273 - DNA, 778 bp, Homo sapiens
agagctagcagccctggactaagcccaccgggcctgctgactggccaagggcacacacagagtacccaggatgcccgcaaaggggaaaatcccaggggtgccagagtggcaggggtgccaagaggggctgctgaagcacagggaggggtgctgagcctagggctggaggctgctagagtttaggtgggtggaaaggggcctggctggccagagacccagcccagagaccccgccagaacctaaggagttcatgctcccaggtgacgccaccatcccagaaaccaaacgccaggtcaaggccagagcccgccccacctcccacatgaacattccgagctctgagtggcattgatgagtgtcttggtcgcaggaatgccagggaaaggcagcacggaggtgagacaggtgccctggctgcctcctggagagcagcctgctcacaggtgcccttcccaggccccgggttggcctccgccacggctcctccaccccctcttcctgctgcagccagtccccagggctgcccaaggccaggttccgcctggtgcccaaacctacttcctgtccagctgcccactccccgcctgcctcagccccggtccagcaggctccccaggcagcagccatgccccgccccacctcccacagcatcaggtccctagacagctccttccctcgcgtctgcacacctagccactcgcccctgccgcacccccaaccccagcagcccctagctccctcaacctgcccaggccctggctgcctctgaatgcccccc

SEQ ID NO: 119274 - DNA, 422 bp, Homo sapiens
tgatgtccctatctcaccaccatgtaccctgaggtctattagatggaagtgccagttagaaatgcttggggtgcaagtaaccacactgtcaaataactggactgaacaaacgggagattatttccctccaacaagactgttggtgcgagttcagcagctcagcaatgctgggccaagctggagtctctaccacgctgtggactgaccctaaggtcccaagatgtcagtcgcagttccagtcaacgcatatatggcaacaaatggagctgagaaggaagggaggggccggagcaagagcctctttgctgcttcaggtaactttgacattttctggtgacgcaggccactgataagtgattttggttatttacccccatcaatactcaaagctttttctcctctcttggggctcccctcaaata

SEQ ID NO: 119275 - DNA, 648 bp, Homo sapiens
cacaggaagttgttctcaccgctgcagcagtgacacaggaagttgttctcaccactgcaggtgcagaaaacaagcctgatactcatgacagcctatgaggggccaggcactgactgagctaacaacctgcggagctgagagctgggagctccaaaaacgccagcagggaagaagcagtgggaccaaagcaaccccttcctgcatgtgcctccaaaagagacctttccttttctaatagatggtgtctcgctctgttgcccggctggagtgcagtggcaccatctcagctcactgcaagctccgcctcctgggttcacgccattctcctgcctcagcctcctgagtagctgggactacaggcgcccgccaccatgcccggctaatttttgtatttttagtagagatggggtttcagaatgtttgccaggatggtcttggtctcttgaccttgtgatccgcgtgcctcccaaagtgctgggattacaggcatgagccactgcacctggcctatctcccctttctagtacttaaatgcttttttcactttctcaaccaagggagtcactttggttttcctgcctttggaagacgtaaaaatgagaattccatacctatggcataaagtgtatggcataaatttgaagagtg

SEQ ID NO: 119276 - DNA, 705 bp, Homo sapiens
agtagaaacaaggtttgcagtagccctctggacaggcagaccaacgcactcgttccaagttcggatgcagaaacctgcttacactaccagactggccaagtatcctctgctgcatccccatccacccccaccgtggcagccaaatgggggtcttggccacaaggtggccgtaagcatctacttgggcctgtagaacgacgtctcattgaacttgaagtggtttatgttgagtgaggaaaaatgtcagaaggcaacagggttgtagcaaaaggtagtttagtgattgtctagttcagcttcttggtgttgacatagttgagtaacagccattttaaaaacaaaggaatatctcgccctttgttgtgtcgagagaaacaggggaaagactgtctgttgagaagccgttggtgggactcggccatttgccccgtccatagccagtgagtgtttcccatacactggccttctatacttttatctcaaaacagaaagttcaagatcgatgatgtctatagaaatcatatacctcaagcctttcctctgataggtgggaaactgaggcagagagcagctgggtttacccagcaaggttttggcacggtcaggcctaggaactttatttccaggcttctggcttagttctgtttccatttcattctggtacctttgcataaatatcttccatttgtccacaggaaacctccc

SEQ ID NO: 119277 - DNA, 1064 bp, Homo sapiens
agctcgaagcggtcctggaagactcgggccctacccctgactttaccgatgagagactgaggcccagacggtgtggggtcagggcccaggcttctgggggatgctgccaaggcgggagccagcgtccccagtgcccggtggattcgtgatggcttgcagagggtttcagtttccactgtccagccctccctgcagaccaatgcctaggtgtgacagtttggtaggaaaggggccggatatttgtctccaggctgggtttgcctagcgagtcgctgcatttactaagattgttggttaatttgggtggctgggggagggaggctgatggagataccccccaaccccaacaaacccttggcgtcaggagaggaggggcttttcctgaagcaaaactaatctctggagctaaaaataggagtgggcctggcgcggtggctcacacctgtaatcccagcactttaggaggccgaggtgggcggattgcctgagctcaggacttcgagaccagcctgggcaacacggtgaaaccccgtctctactaaaatacaaaaaactagccgggcgtggtggcgcgcgcctgtagtcccagctactcgagaggctaaggcaggagaattacttgaacccgggaggcgaaagtgcagtgagccaagatcgctccactgcactccagcatgggcaacagagcacgactccgtcttaataatagtaataataagaagaagaagaagaagaagaagaggagtggctgcctatgccggagttgttgactggaacaagaggaggaaccttctgggctgctggtaatgttctatgcctggatttgggtagtagttacatgggagcacgcataagtaaacattcttcaaactgtcttcttaagatgagtgcatgtcactgtgtgtatgtatatataataccttcatttcttaaaggcaggtgagaacaatctggcgttagaggtgagagtactggttgcctttggggtatcaactggaaggaggcacaaggagaggcctctagggggctgggaacattctgtatcttcagcacagccgttttgt

SEQ ID NO: 119278 - DNA, 625 bp, Homo sapiens
cttttcttgctgttgggtgccatttgcttctcagacctccacattcctgactgtaagcccttccattttggatgccatgttttgcatgagactctggagttgtaattctaggcaatgaaacccagagggaaagggtaaggaacagaacttgggggtagacacatcaggacctggggcaaagatgtttgcggcaaaatggctacagtgctgacacagctggctgctgagctatggatttaggaaaaagaaaacccaaatcaaaacctcccccaaacaacaaatgagaatcagtcccactatgggaagaaaaatggccgttacatttttacaccacaattcatttgcttataaaaagatatcttaggccaggccttgtggctcatgcctgtaatcccagcactttgggaggctgaggcaggtggatcacctgaggtcaggagttcaagaccagcctgacgaacttggtgaaatcctatctctacaaaaaatacaaaaattagccaggcatggtggtgggcgcctgtaatcccagctactcaggaggctgaggcaggagaatcacttgaaactgggaggcagaagttgcagtgagctgagatcacgccactgcactccagcctgggtg

SEQ ID NO: 119279 - DNA, 696 bp, Homo sapiens
tacatatagtaatcactggtaaaaaggtagtcacttaaaaatatttaataagtaatatccattcaacaaatatttattgagtgcatatcttttaggtaccgttttaagttctcacaatatggtagtgaacaaactgatgaaacaaacaatagaaacacaaaactaccttcacgtactgtttcaaaatagttgtattttggagcatttgggaggtttgagaaaatacaggagaatttcgagttaaagcctcatcatagacttttgctgacacgttgagctgctcagcccccagacttttttcctcttgagaggagtgcccagtgtgtgggtctttgcaggagacctactatgaagtttggatgtttctatatattcctcctttctcctctctggcagctgaagcactgtttctctcagtatgatgctctcaccaggaataaaaagccatacatttgaagattatttactcagcaggcagtgcagttaagagtccagtggtgcccgcagtagcggtagttcaatgttagcagggctggtggcagcaccgtgtgcatgacaagacaagacactgattgttttattagctggttgccgctccctttcctgtctttcagatggaatcagtttcattttctccaaatgttaacatacaaacaagcaaataagtatataaaaattgaggctacactttagcta

SEQ ID NO: 119280 - DNA, 877 bp, Homo sapiens
caccatgggtttgcaaccagtattgcacctgcagcccaggatttttagtccagcaggtagttgtggggcccacccagcttgtggtcccccaactcagcaggtctgtctccagtgtcttccctgggagcaggctgaattggctaggcttgtcccaagccatctgcattgaaattgctgagttcttccagatgttctatgctgctaggcttcctgggatggaaaccatgactggtcatctggccacacccttcccagtttattcatgtgaatgaaggggaactcagctcccatgctggctcatgatcccatgacttctctgtgtgctgacagtgtgggcttctaccccacttaagctcagaccacatatatcagcttgatattatcaggcagtgtgctgaagacctgggcagttggcactgggcccatggatttgtcctctggccctttggggtcaagcaccatctgtgatataagtggatgccatgctgtgggcacccttctgcaggaccagccaggtaggtcatcttggacggtgccagcaggcaaagtggtgcatggatcagattcacctcagtcccatgatagctacaaccttgctctctctcagcctggcagacagcagcagatggatcccctcagtgcaagatgcagagcctcggaggatgggcacctatggtcagctacagctgcacagcacagtgaaaactgcagatttccacaagagtttaagctgtgcctctgcctattctccaggtggctccccctgccagttcacagatgtatagggatcatatgagagtctataatcaggagctcagactagatttagctgggaaatgcctttcaaggagaaggaaccaaagtgagaatctcagag

SEQ ID NO: 119281 - DNA, 785 bp, Homo sapiens
ggaataaacgatttctgaggtctctaagatattataaaactttattgaaagatctaagaaaatttaatgaaacacattgtccttattaatctataaatatagttttaattaaaattccaatagggggccaggtacggtgggtatgccagtatttccagcacattgggaggccaaggtgggaggattgcttgagcctgggagttctgaccaacatggtgaaaccctattgctaaaaaaagacaaaaaaattagccaggcgtagaggtgtgtgactgtagtcccagctactcaagaggctcagttgggagaatcgcttgagcccagaagtcgaggctgcagtgaactgtgatctcaccactgtactccagcctgggcaacagaattagaacctgtctcaaaaaacaaataaaataaaattccaatagggtatagtataacacttgataagtcgatattaagatttatatggaagaataagtgactaagaaaaaccaatagaattttaaagaaaaataaagcagaaattgccctacttcctataaaactgtaacagttataccacatggcttcaggtgcaggaacaggcagattaatgaagcagagtctagaaacgagccacatatgtgtttatggaaactgtaaatatctgatgtagtgtttcagatcagtagggaaagagtagaatatttaataaattgtgtttacacagtttaactttaaaaaaattagatccatcttacattagacacaaaatttatttctaggtgaattatatcccaaatatg

SEQ ID NO: 119282 - DNA, 609 bp, Homo sapiens
ggggtttccccatgttggccaagctggtctcaaactcctgacctcaagtgatccacctgccttggcctcccaaagtggtgggattataggcgtgagccaccgtgcctcgcctattatctccttattctctttttaaagatgaaaaatggaagcttacagaagttaacgtcttattacactagacagcagtgggtaaaactaaggtctcacctaaaatcgatagttgtgaaggtttagtgatactgataatagcagaatgtactgggagctgattgtatgccaggcacctttctcagcactttgtgtacattaattcatttaatcctcacaataactttatgaggtgtaggttttcaaagtaaaggttttcttattatcaccatttttaagtaaggaaattgaggcacagagaggtgaagtaacttgaccaaagtcatataactaataagtgatatctccgtattttttcctcttttgaatttgtcattaaaatctaataaataagttgatattcataagattctttattgtccaaggagttttaatgcatgtagagacgatcacttaactacttttattttaaaggtgagatataaattcagaaaccaa

SEQ ID NO: 119283 - DNA, 439 bp, Homo sapiens
tgatgtatgactacaggcagactatttgaatgctctatgctgattcatgctgctatttttcacttgtcttactagctgagattatttttaaggcagtgttggatcctggagagggtgctgggagacaggtactctcctttgctgctggttgaaatgcaaattaatatacccttttaggtaagcaatttggcagtaactgtcagtagacttcggaacacttattccgtttagtccagtattctgattctaggaatctagccaaagaaaataatcagagatgggcagagaaaatttaagaataaaaatgttcattgcagtgttatttataaaagagaggaaaaaggtaaacaattgggtggaataagtaaaatgtggccaagcctagcagcggaatattattcaaagattacgtattgttttgaaaatgtgttttgtgaca

SEQ ID NO: 119284 - DNA, 592 bp, Homo sapiens
gcacgagattttgcagatgtaattaaggttgcagaccttaggagatgatcgtgattcatgcagtgggctccatgtaatcacatgagcacttaagagatttaactctggttggaggcagaagagacacagaagagaggtgtgggtgaggggaagccagagaaactagaagcaggagaatgtctctctgcaccattgctggtttagaaaataaactgggcactatgaagagcaacgcaggcagcctgacattgctgagaggccccaactaccagccagtgatgaattgggacctcactcctacaactacaagaagttgaattctgctctaacctgtatgtgcttggacacacattctgccctagggccttcataaggagcccaagagcaccttgattttgtccttgtaagactataagcagagtcatcagtccagccctcccacacttctaaagtgagagataataaagagaatgttttagtaatttgttacagtgatgattaaaagctgatacacattccaacctccatcagatccatttacagacattcccattcagttctaaacccttggacaatggccaaaaaaaaaaaa

SEQ ID NO: 119285 - DNA, 807 bp, Homo sapiens
agcggagtatgtataaagtgcttagaagagggcctggaacataggacatggatgaagctggaaaccatcattctcagcagactaacacaggaacagaaaaccaaacaccagtgttccagatttgcattaagctgtcacccggtggctgtgtaactagctgcttttgtgactgttacagccgcaaaagccttaacagacctgcagttacagactcagggaaaagcttgtactgttgtttgtggatcgcagggaagccagagttgcagctgactttctgtccacgagatggcggtagaggagcacagaaaaaagaaaccatcttgggctgttaatcatgttgactgttgagaagctaagagggaagccgatctgtcattagggtgaaacaaaaaagtcactgtaacaggagtcaagaacggggcttagaacctagtcatgtgaactatttccaagttttctcttgaccttgtgtttctttcatcaaatgagcgttcagtgaattcgggcactcagtaacctccattagctgactgcacccaccatagaaccttctctctaaaagtctccacattcgtccacgctcgtttcctccttggtccaatgccaacgctcgtccatgctattgccacccccattctgcctcttcccaaaagcctgcatcagtccatggagtcctcttcacctgaaataagcacttagtataaaccgatgcaactggtttcgtgctggcaagacaggctttagcaagacatttccaaaagagcaagtcttctctcactttggaagccttgaactctttctgaaccg

SEQ ID NO: 119286 - DNA, 298 bp, Homo sapiens
ctgatgctctgagcagacagttgtcaggaccgaaagagcagaaggtgccagcccttcctgttgtgaaaaggaaagacatgacctccaaccccacgacactgagagagctgtctctttctcagatggtttgcatatttcttccaagcaggctaccatggccattttcccctcagcgaggtcaagttcattacatcatgtatcttactatggtacctttaccatcttttgaagagctctcaggaaagatgtttgggaaaaacgatgttggaagaatcaaagggttatgtagaatattcat

SEQ ID NO: 119287 - DNA, 720 bp, Homo sapiens
accgtataaagtagaagtacattttatttattccaatgctatctctttcacactttaaaatttaaactagtcctaggatcttgttaacagtttccagactcctgtttttttcatagagctttttacatttttgtgcctctggattcaaagggttctaatggtcttggtttatcttcatatagcattcactcacccactctgacaggtcagaatgactcaatctcatcatgcgtggtacccagaaggcccaacagagaagagagcaatctagttgtccctgaggatacttggctcaaagcctcctaccatcctctctgagccaggctatgcatccagtccctgcacagaggagctggctgtgaggaactatagggaaaccctggtcttgactacacaagcttcagttttacataatgcaacttcacaactaattttttcccaatggtcagatcggcaggtagactgaagccattaaggtagccaaaagcaccagtcaactgggatatacagtttttctatcatgtggacatagccttgccatcattcagcaatatgtaagcctgtgacttttctgaaaaacagaatgaggggatctctggttcagttccttgagtttcaatctgggtaagtgggtcacttgttgcatactcttgtaatatccttccacttaatattctagagggatggatttgttagggaaaacagaagcacctattcctg

SEQ ID NO: 119288 - DNA, 958 bp, Homo sapiens
tgagacggggtctttcactgtcgcccgagctggagtgcacagtggcacgatctcggctcactgcaacctccgcctcctgggttcaagagattctcctgcctgagcctcctgagtagctgggattacaggcgcctgccaaaatgaccagctaattttttgtatttttagtagagatggggtttcaccatgttggccgggctggtctcaaactcctgacctcgtgatccgcccacctcagcctcccaaagtgctgggattacaggcatgagctaccgtgcctggcctctccttagattttttaagtcctctcaaatttgtacactcagaactaagtatattcaaatgtagtctgatttgcatagagaatgacattttcttcattcagactttgtttttaatgaaacctgataccagtgattttggcagctgtaacaggctgtatgtctctttgaaatagacttttttaaaagcctagttgtttctcactgtcctgtgccattttgttgttattgttgatttttttgttctaagcttatgactttatatttatccttattaaatatgatccccttaaatttagcctcctgttccagccacttagaattacttaaaaagttgattatgtcatacagggtatttacttttcccatcccagatacctgtcatttgcacatttgatcgtcctcctttccatattctcatccaagtcatttataaaaaaatgttacaaaggacaggttgctctgggcccctgttgcatactactgagccttcttccagatttatctgcactctttaggtacagttgtatagttgtctgtgaagccacttaacttttaagttaaaaaattcatattttttcaccttgcacagtgatatcaagagagactttattttatgccttgctgaaatccagatactatatttatgcctctagcatttgctggcctaaccatat

SEQ ID NO: 119289 - DNA, 466 bp, Homo sapiens
aaagaggcaggagcctgagtgaatcaaggatcggggaggggtcaggacccaggtagcacctgggccagggctgctctggcatcagacggaggccacatcctactctgccacttgggtccacctctcccagccactggtgccccagtcattggagcagaccagcaaggaagacaatgaacaccttgtaggtttgcagggcagattagctttaccacagataaggaggcctccttactagagataacaaggcaggtagagagagggtgccagggagctgtcattcaatcccattagtgactgttgacagcagaaggaagtcagcctccacctgggctaccaaccatgggaacagaaaacaaggggccaatcagagggtgagagatggtgagaggctgttctgtattattcctcagatgtggctccaccatcaactcgacaagtgtgttttgaaaatcaagctgtctcc

SEQ ID NO: 119290 - DNA, 366 bp, Homo sapiens
agctccttaccagcaagccgtctaggctgcgaacgcgagccgccgggccgcagctctctagaggtccctgtccccaccgcctggccccatctcatgtcacattcccccaaggtctcattccactcggctaatctccaagaacaccggccagggcattggctttcgggtccttttaaagaccaaaaagtaaagcactcccccgtgggtgctggacagcttgggagggatttggggctgtgggtggtgaaatcacagccctgggcacacacctgccagcccgatgtcactgacaggctgctcggaggcttggggctccagtgagagcatatagatattttttaaaaaacatattcgcgataaaataaa

SEQ ID NO: 119291 - DNA, 411 bp, Homo sapiens
cacacacacacacacaaccctttcaaatcacaggctggctttccaggattgtttgcagatcaggtggaagccacagtgcctggctaatcaaactgaccaaggaagtgcagggagccaggacaggcaccatctggggtaatgaagtaagaatatgtgttgtgatccagctctgccccagagccctgggcactcctgccccctgtgctaccagctgccctctcctaactacacatctttggacttggctattcagaaacctaaggctattcttgccttaggagagtccaggtttattcagggtctctatcccaatgcgctggggctggaggcagtgagtagctggagcctgcctccaggtcacctgcaccaagcagctgacagggtcttggaagagacagcagcgactacagt

SEQ ID NO: 119292 - DNA, 166 bp, Homo sapiens
gggcagctgttcccgccgttggataaattagaaaactaaggcatggagaggcaaagtgagttgccatggtcacggagtaggagtctggatcaatgggcttgaaccccattcccacccttgcccccacagcagtgtttcactgggctgttccccgagtgaacaaagg

SEQ ID NO: 119293 - DNA, 414 bp, Homo sapiens
ggaggagggtggctgggctccggctgccctctcgtggaatcttggcatgctgctcaaccttcagcctcagtttcctcttccacgaaaggggaaaacagtggctcaggggctggcagttggactaaggagctgacgcctacatggtggcatcgataaacaccgtgttatcgatgccacacaaataattaggctatgtagtgacagtgcacaaatagaaacacacatactgtgcttgagaacatgataaatgccggttttacctttccttccctcacctgaccaagcttagcgagacgtgtggcatcttcctcatctttgctcttcagtgccaggtatggaatcggtccatcatggacaggtgccttattgaactgcgcagagccatgaatgtcaggctgagagttgtgtgcgatg

SEQ ID NO: 119294 - DNA, 325 bp, Homo sapiens
agggacatctcactttcatataactgtgtgttggtggagaagactgagaatagagcaagctataagagggagcttgagcactcatgttaaatttaagatgcctatgagacatccaaatggagatgttgagaaagtggtgggtgtaggagtatggagcatgggatagaggtcaggcagagctgtagatgtaaatttgggggtcataaaatatgcgtgttatttaaaagctacagaactggactataatacctagctaattgatagagaagagaaggccaagaattgagccctggggactccaaagtctagagtccgggaaaaaagg

SEQ ID NO: 119295 - DNA, 256 bp, Homo sapiens
tctgaaattcacataaatgagcaatgtcaatagtttagaaagagtttacttagagaacaaagggcccttatgaggcactagtgagaagaaatggggaaaaaatgagtcctcacaatgtaagccttttcttaaagcgacttgttatcaagcagttcaggatagtccctcaaatctgcattaaaatgcatttcattccattgactcatttgcattaatttctcccattatatctgaaaatggctgaatgtctacccaa

SEQ ID NO: 119296 - DNA, 440 bp, Homo sapiens
agaatgggcaccccttaatgttacaggtgaggaaatggatcagaaagggtaaaagatctgactgaggttgcagagtgaggaagtggggggacctgaaaccacaggactctgtgatgccaaagcccacccagtctccatggagatgcgagggcatctcctctgaagagtgtccgacttctcatgctgacttcagctgggaagagctctaatgacttggtggcaacattatcctacctgcttccttcaggtgtcagtctcagaacaggctcaatgagtccaggagggcagcatgctggctaggcagacctgagtttgaatctttccctactgcttactaatgatgtgtccctggggaagtcatcgagcccctctgtgactcaatttcctcatcagttcagtgagggattcagtctagggcatcagtttttagaccgagagac

SEQ ID NO: 119297 - DNA, 669 bp, Homo sapiens
tgccgttggtcctaagtgccactgtgtgtgctgagtttttcaaaggtcagagcagattgaacctttgtggtttcattttccctgattttgatttttcttatggggaacctgtcttgctgcattcaaggtgactcgaagaagccttcccaaaggcgtgtgaaaaggcagccctactctactaccaaggtgacgtcagggagcacattcaatgagaatacaagaagatatgctgtgcacaccaaccagtgtaggagacctcatggctcccgggtaaagaagaagaggtacccacaagaagatgacttccatcatacagtcttcagcaaccttgaaagattggacaagcttcagccccactcttgaagcctctgaggagtctctagttcaacaaggacagaggagatggagagaggcagtcaacgtgagggtggtgcacggtggacacctctgaggcagtgaatctactccccatgaggacaccgtacacaaatcactaacgaggatgccctcaacacgatatcactaacgaggacgcgacaaggggcatggccaaagaggacgccgccaaggcatgcccaaagaggacgccgcccacggatcgccagagaggacgcgccagggaatcgcccaggggaggtcaccgccaagaggtgaacaagagcagcgcca

SEQ ID NO: 119298 - DNA, 803 bp, Homo sapiens
acatatctccttctaagggttttagcccagttcatttcaaataacctcgactgcaaacgtagtgcatcaaaaacgttcttccagctgggcgcagtggctcacgcctgtaatcccagcactctgggaggctgaggtgggtggtcaggagttcgagaccaccctggccaacatggagaaaccccgtctgtactaaaaatacaaaaagtagctaggcatggtggtgggtgcctgtaatcccagctactctggaggctgaggtaaggagaatcgcttgaacctgggaggcagagggtgcagtgagccgagattacgccactgcaccccagcctaagtgacggagtgagactcggtctcaaaaaaaaaaaaaaaaaaaaaaaaaatccctctggggggggccccttaacgcgggggaaactttatggccaaaccaggggccccggggtccacaagggggggtctcaccacagccgggagttccggaaaaagggggttcctacagattggcggccacacaggggacaggagcagcgatcctccacgttgggggccacacaacacggagaaactcaagcgagaaggggcggaaatacccttcaacaacaaggtgcaacaaaaagtcaaatagcaagcgcgaaaccatcgagggagaacatccggggggggtcacaccccaagtcggagggggaccacagatcattcacccggcggagtccacctaagaggtccctatatccaacgacggcgggcactccagcaccactttgtaggaaaaccacaagtgggtgcgacccccaaacgagcgg

SEQ ID NO: 119299 - DNA, 473 bp, Homo sapiens
caccgtctagatcgtggcttttcttttacttggcttttttttttttttgagttggagtttcactcttgttgcccaggctggagtgcaatggttcgatcttggctcaccacaaactctgcctcccaggttcaagcaattctcctgcctcagcctcccaagtagctgggattataggcacacaccaccacacctggctgattttgtattttagtagagacagtgtttctccatgttggtcaggctggtctcgaactcctgacctcaggtgatcctcccacctcggcctcccaaagtgctgggataacaggcatgagccaccgtgcctggcccagtgtcacccattcttacaccaaataagggtgtcctggaactgtcatggtgttggtggtgtgtgattgagtgcgtcagtgagcagataatgaggtccgaggtgagacctagctcaaatccagctctgcactgggtccggtcag

SEQ ID NO: 119300 - DNA, 213 bp, Homo sapiens
tgtgatttgtgtaaggctttgacatgtcttataatagtaatgctgttctttatagaatttattcaatgtaagggaatacactagtaaagagtaaaacaccaggcacagtggctcacacctgtaatccccacactttaggaggccaaggcagaaagactgctagagccaagcacgttgagatcagcctgggcaacagagcaaaaccctgtccct

SEQ ID NO: 119301 - DNA, 563 bp, Homo sapiens
agagtgctgggattacaggtgtgagttagccaggatggtctcaatctcctgaccttgtgatccgcccacctcggcctcccagagtgctgggattacaggtgtgagccaccgtgcccagcctataacttgctttttattacttaattatatgtccattattctatgctgtctttcaatgtatccttctaagagctgcatggtattctattgatgagtttactataatttaatttaacagttttatattactggacattcaggtgtttccagttttgtgattttgtatttttatgaatacatttatagctaaagttttgctcccaaagatgggaagaaattagaatacatttgtaaaagtggaattgctaagtcatagggtgtgggaattatgaggctttgggtgtgttctaatgcattgccgcttaactgatgtagacagtcaattgttgctcttcatttcctctgtaaaacataccgttaggttgaaagtttatcaagagtcaattgtaatgccagttatattatttttgaaattatataaattaattaaatcttatgttaaa

SEQ ID NO: 119302 - DNA, 257 bp, Homo sapiens
gcggccgcctactactactactgctcgaattcaagcttctaacgatgtacggggcatggcattgggtactttctgcattgggaccaggcagccgggcctgccatttgaggcagcgagcctccgtgacctgtcctccctcatttgtaaagtggggtaacagctatgtcactggccagttgtggggattaaagtgctgagcttagtgcccagcccaaaatgctcaataaagctattcagtgaaaaaaaaaaaccacatc

SEQ ID NO: 119303 - DNA, 4717 bp, Homo sapiens
gaagctggtgctggacagctggcgccggcagcagcggaccggcgggagacggcggcttgcgagctggctgtgctgcaggagctgcggcagccgccgtccttgcacctaaggaacctctgctgccagcccttcctcacttttggaaatggcgggtgaaattacagagaccggggaactctactcttcctacgttgggctggtgtacatgtttaacctcatcgtgggcacgggcgcactcaccatgcccaaggcattcgccactgccgggtggcttgtcagcctcgtcctgctggtgttcctgggcttcatgagcttcatgaccaccacctttgtgatagaggccatggctgcagccaacgcgcagctccactggaagaggatggagaacctcaaggaggaggaagatgacgactcctccacagcctcagacagcgatgttctcatccgggacaactacgagcgggcagagaagcggcccatcctgtctgtgcagagacgtggatctcccaacccgtttgaaatcacagaccgggtggaaatgggacaaatggcctccatgttcttcaataaagtgggggtcaacttgttctatttctgcatcatcgtttacctgtatggagacctcgccatctatgctgctgccgtgcccttctccctcatgcaggtgacctgcagcgccactggcaatgactcctgcggtgtggaagcagacaccaaatacaatgacactgaccggtgctgggggcccctgcgccgagtggacgcctaccgcatctacttggcgatcttcactctcctcctcggaccgttcaccttctttgacgtccagaagaccaagtacctgcagatcctgacctctctgatgagatggatcgctttcgccgtcatgattgtgctggccctgatccgcatcgggcacggacaaggggaggggcacccgcccctggctgacttctcgggggtccggaacctgtttggggtgtgcgtctactccttcatgtgccagcactctctgccatccctcattacccccgtctcctccaagcgccacctcacaaggctggtgttcctggactacgtgctgatcctggccttctacggcctcctctccttcaccgccatcttctgcttccgcggcgacagcctcatggacatgtacaccctcaacttcgcgcgctgtgacgtcgtgggcctggccgctgtgcgctttttcctgggcctcttccccgtcttcaccatcagcaccaacttccccatcattgccgtgaccctgcgcaacaactggaagacactcttccaccgcgagggcggcacgtacccgtgggtggtggaccgcgtcgtgtttcccaccatcaccctggtgccgcctgtgctggtggccttctgcacccacgacctggagtccctggtgggcatcacaggggcctacgcgggcaccggcatccagtacgtcatccccgccttcctggtgtaccactgccgcagggacacccagctggcctttggctgtggggtcagcaacaagcacaggtcccctttccgccacaccttctgggtgggcttcgtgctgctctgggctttctcctgcttcattttcgtcacggccaatatcatcctcagcgagaccaagctctgatggcaggacaggcaggtctagtgacaggaggcataggggccccagccccacccctcgcccgcagagcccagatttagttgctcccaggtcttcatggggcaggtgggactgtggctctaggggaaaccccctgtccagctggggttgttctccccacccaccttccacccagtctgcacctgtcctcactcccccgggcagctctcccaccaggtccttctgcctgggtgacgcgtggctgctcccaagttctaagactcattactggaatcacacctctcccacatcttccaacacgcttcacccccaaccctacttccagggcgggctactccctgcacaatgggagatgcagtgctggcactgccatcatttgtcccagacccatgcccctcccctctcctgccccatcctgcgtccttgtctaagaaacctccactagcagctgctgcctcttcagaggcgaatcccaggctggaagtatcctagccaggtctgcctgtgacggcagggcccaccctcccaccaggcctgggaggcggtaggtgccacctcagagagggcctggctggccccatgacaagaacaagaagtgctaactggtaccagagtccccagatagagctgcgagggccctcgctgtgggcgcgagctccggagtagcaggctggatggagcatcccttctacagggacacagccgcctgccagctgggcctaaagtctggagcttgtctctgaaagggaccgtctgctgccctcgctgccccactggagccctcagggcctcctacagtgcaggtggtcctactagagggaagccatccccacctggcacctcagcggcttggcagtgacatggcagtgggagggctctgaggttcccaccctgacaatggtcaggctgcccgtgctcccactccaacactaaaagcggctcccttaggggctgagcgtgggtgctcagtgttcacgctatatcccttgggcaatgtggggttggatggggcccccacttccattcccatggaaggaggccaggtccccagccacctcccactcagccatgcacgcacttgctgggctggcctcctgggaaacacaggtgactcgaatgaactctgcattttcaacgtgccttctactgcttcaggacctgggggtccccctgaccctcactggcttgcccccagccctgggcctggccccacctgtcctggagcccagagcccctggcctggagctgcctctctggggtgggtctcaggccccacccctccctcttttgagttcagtgccttgctcagcccctcccctgtatctcagcgtcttcagacctctgacagagcgacgatgtagggtctcccggggcccaaggtggtctcagggtcaggggtgggatttgcagggaactcggggagcccacgggctgcgccacctctgccctggcagctgaagcctgggagagtccctgcgtggtgtaattggcctcagcccgctttctctgtgccgtcgcacctcagtgtttctcatagcttgtccccacgtgtcactttccatccacgggaaaaacaaatgccccttctccatctatcattgcgacttcctcccaggaggcctctcaggttgggtagagcaggggcctgcagtggtcaggccaagagcaaggaagacctggctgccccactgtggctgaaaactcaaaacatctggaactacccttctccaattacgttccctcttgcttaaagacaaagctaattaaatcatcctgccacccgaggctccaaaccaaatcttggacgcaaattcattagcttcataaagcccaggttgatttatgtgacagtctggaaccgcccagccatggagtcggtggccgtgttccctgccctggagggaactggccagcagtgaccacatcgctgatgccaagtggggaccctcaccactgccgttgtctagctgctttgctcctcagtgtcctcctgctgtaagtcagatgaggtcaccttcctctccatcgatgccaggcttctgccgctgacggccaatggggcttggggccaggggcagagaaccccaacagcaagagagccccaggtgatgctggctctccacgtgcatccggcacgtttcactgcagccatcatcaacttggcaaagtaggcaagctcagcttgtggtttccattttgcagatgggcccccggggtcagtgatgggaagagcagaagaggatgccagcccagcctggcccaggagcaggtgtcgttgtggaggaaagcttaaactcaacagcctctacccaacatctgccacctgcatggccccagatgcccccggtgcaggccaggtcaaggtgggagtaaactttctttgcctccctccccacagaagcaccagacccacctgagccccagagcctcatgccagcagctcctggctgttcctcacctgaggctagagcagcagctgccagcttatagatggggcggatggcaggtgatagactgggaagcactgctgggtggtggaggtgggcagtggcaccatgacgggcccctagccacacagctgtcctcactacggggcagggagcagcctcggcaacaggcaaaggccagagtcagagtggtggggaggacaggggctgctgccccgctcctggaaagccactgcagaggggcagtggctggcagtgccaggcctgggggaagtggaagcgtcctgtctgggggcagattcccaagcaagggtgacccatggttaagggccactggaaagctggagagagcttgggatcccttccacctggggccaatggtgttgattgcagactggaggggtaacctccgctgagggtcattatgtgccaggcatggcattgggtactttctgcattgggaccaggcagccgggcctgccatttgaggcagcgagcctccgtgacctgtcctccctcatttgtaaagtggggtaacagctatgtcactggccagttgtggggattaaagtgctgagcttagtgcccagcccaaaatgctcaataaagctattcagtgaaaaaaaaaaaccacatc

SEQ ID NO: 119304 - DNA, 4692 bp, Homo sapiens
gaagctggtgctggacagctggcgccggcagcagcggaccggcgggagacggcggcttgcgagctggctgtgctgcaggagctgcggcagccgccgtccttgcacctaaggaacctctgctgccagcccttcctcacttttggaaatggcgggtgaaattacagagaccggggaactctactcttcctacgttgggctggtgtacatgtttaacctcatcgtgggcacgggcgcactcaccatgcccaaggcattcgccactgccgggtggcttgtcagcctcgtcctgctggtgttcctgggcttcatgagcttcatgaccaccacctttgtgatagaggccatggctgcagccaacgcgcagctccactggaagaggatggagaacctcaaggaggaggaagatgacgactcctccacagcctcagacagcgatgttctcatccgggacaactacgagcgggcagagaagcggcccatcctgtctgtgcagagacgtggatctcccaacccgtttgaaatcacagaccgggtggaaatgggacaaatggcctccatgttcttcaataaagtgggggtcaacttgttctatttctgcatcatcgtttacctgtatggagacctcgccatctatgctgctgccgtgcccttctccctcatgcaggtgacctgcagcgccactggcaatgactcctgcggtgtggaagcagacaccaaatacaatgacactgaccggtgctgggggcccctgcgccgagtggacgcctaccgcatctacttggcgatcttcactctcctcctcggaccgttcaccttctttgacgtccagaagaccaagtacctgcagatcctgacctctctgatgagatggatcgctttcgccgtcatgattgtgctggccctgatccgcatcgggcacggacaaggggaggggcacccgcccctggctgacttctcgggggtccggaacctgtttggggtgtgcgtctactccttcatgtgccagcactctctgccatccctcattacccccgtctcctccaagcgccacctcacaaggctggtgttcctggactacgtgctgatcctggccttctacggcctcctctccttcaccgccatcttctgcttccgcggcgacagcctcatggacatgtacaccctcaacttcgcgcgctgtgacgtcgtgggcctggccgctgtgcgctttttcctgggcctcttccccgtcttcaccatcagcaccaacttccccatcattgccgtgaccctgcgcaacaactggaagacactcttccaccgcgagggcggcacgtacccgtgggtggtggaccgcgtcgtgtttcccaccatcaccctggtgccgcctgtgctggtggccttctgcacccacgacctggagtccctggtgggcatcacaggggcctacgcgggcaccggcatccagtacgtcatccccgccttcctggtgtaccactgccgcagggacacccagctggcctttggctgtggggtcagcaacaagcacaggtcccctttccgccacaccttctgggtgggcttcgtgctgctctgggctttctcctgcttcattttcgtcacggccaatatcatcctcagcgagaccaagctctgatggcaggacaggcaggtctagtgacaggaggcataggggccccagccccacccctcgcccgcagagcccagatttagttgctcccaggtcttcatggggcaggtgggactgtggctctaggggaaaccccctgtccagctggggttgttctccccacccaccttccacccagtctgcacctgtcctcactcccccgggcagctctcccaccaggtccttctgcctgggtgacgcgtggctgctcccaagttctaagactcattactggaatcacacctctcccacatcttccaacacgcttcacccccaaccctacttccagggcgggctactccctgcacaatgggagatgcagtgctggcactgccatcatttgtcccagacccatgcccctcccctctcctgccccatcctgcgtccttgtctaagaaacctccactagcagctgctgcctcttcagaggcgaatcccaggctggaagtatcctagccaggtctgcctgtgacggcagggcccaccctcccaccaggcctgggaggcggtaggtgccacctcagagagggcctggctggccccatgacaagaacaagaagtgctaactggtaccagagtccccagatagagctgcgagggccctcgctgtgggcgcgagctccggagtagcaggctggatggagcatcccttctacagggacacagccgcctgccagctgggcctaaagtctggagcttgtctctgaaagggaccgtctgctgccctcgctgccccactggagccgtcctactagagggaagccatccccacctggcacctcagcggcttggcagtgacatggcagtgggagggctctgaggttcccaccctgacaatggtcaggctgcccgtgctcccactccaacactaaaagcggctcccttaggggctgagcgtgggtgctcagtgttcacgctatatcccttgggcaatgtggggttggatggggcccccacttccattcccatggaaggaggccaggtccccagccacctcccactcagccatgcacgcacttgctgggctggcctcctgggaaacacaggtgactcgaatgaactctgcattttcaacgtgccttctactgcttcaggacctgggggtccccctgaccctcactggcttgcccccagccctgggcctggccccacctgtcctggagcccagagcccctggcctggagctgcctctctggggtgggtctcaggccccacccctccctcttttgagttcagtgccttgctcagcccctcccctgtatctcagcgtcttcagacctctgacagagcgacgatgtagggtctcccggggcccaaggtggtctcagggtcaggggtgggatttgcagggaactcggggagcccacgggctgcgccacctctgccctggcagctgaagcctgggagagtccctgcgtggtgtaattggcctcagcccgctttctctgtgccgtcgcacctcagtgtttctcatagcttgtccccacgtgtcactttccatccacgggaaaaacaaatgccccttctccatctatcattgcgacttcctcccaggaggcctctcaggttgggtagagcaggggcctgcagtggtcaggccaagagcaaggaagacctggctgccccactgtggctgaaaactcaaaacatctggaactacccttctccaattacgttccctcttgcttaaagacaaagctaattaaatcatcctgccacccgaggctccaaaccaaatcttggacgcaaattcattagcttcataaagcccaggttgatttatgtgacagtctggaaccgcccagccatggagtcggtggccgtgttccctgccctggagggaactggccagcagtgaccacatcgctgatgccaagtggggaccctcaccactgccgttgtctagctgctttgctcctcagtgtcctcctgctgtaagtcagatgaggtcaccttcctctccatcgatgccaggcttctgccgctgacggccaatggggcttggggccaggggcagagaaccccaacagcaagagagccccaggtgatgctggctctccacgtgcatccggcacgtttcactgcagccatcatcaacttggcaaagtaggcaagctcagcttgtggtttccattttgcagatgggcccccggggtcagtgatgggaagagcagaagaggatgccagcccagcctggcccaggagcaggtgtcgttgtggaggaaagcttaaactcaacagcctctacccaacatctgccacctgcatggccccagatgcccccggtgcaggccaggtcaaggtgggagtaaactttctttgcctccctccccacagaagcaccagacccacctgagccccagagcctcatgccagcagctcctggctgttcctcacctgaggctagagcagcagctgccagcttatagatggggcggatggcaggtgatagactgggaagcactgctgggtggtggaggtgggcagtggcaccatgacgggcccctagccacacagctgtcctcactacggggcagggagcagcctcggcaacaggcaaaggccagagtcagagtggtggggaggacaggggctgctgccccgctcctggaaagccactgcagaggggcagtggctggcagtgccaggcctgggggaagtggaagcgtcctgtctgggggcagattcccaagcaagggtgacccatggttaagggccactggaaagctggagagagcttgggatcccttccacctggggccaatggtgttgattgcagactggaggggtaacctccgctgagggtcattatgtgccaggcatggcattgggtactttctgcattgggaccaggcagccgggcctgccatttgaggcagcgagcctccgtgacctgtcctccctcatttgtaaagtggggtaacagctatgtcactggccagttgtggggattaaagtgctgagcttagtgcccagcccaaaatgctcaataaagctattcagtgaaaaaaaaaaaccacatc

SEQ ID NO: 119305 - DNA, 1225 bp, Homo sapiens
gaagctggtgctggacagctggcgccggcagcagcggaccggcgggagacggcggcttgcgagctggctgtgctgcaggagctgcggcagccgccgtccttgcacctaaggaacctctgctgccagcccttcctcacttttggaaatggcgggtgaaattacagagaccggggaactctactcttcctacgttgggctggtgtacatgtttaacctcatcgtgggcacgggcgcactcaccatgcccaaggcattcgccactgccgggtggcttgtcagcctcgtcctgctggtgttcctgggcttcatgagcttcatgaccaccacctttgtgatagaggccatggctgcagccaacgcgcagctccactggaagaggatggagaacctcaaggaggaggaagatgacgactcctccacagcctcagacagcgatgttctcatccgggacaactacgagcgggcagagaagcggcccatcctgtctgtgcagagacgtggatctcccaacccgtttgaaatcacagaccgggtggaaatgggacaaatggcctccatgttcttcaataaagtgggggtcaacttgttctatttctgcatcatcgtttacctgtatggagacctcgccatctatgctgctgccgtgcccttctccctcatgcaggtgacctgcagcgccactggcaatgactcctgcggtgtggaagcagacaccaaatacaatgacactgaccggtgctgggggcccctgcgccgagtggacgcctaccgcatctacttggcgatcttcactctcctcctcggaccgttcaccttctttgacgtccagaagaccaagtacctgcagatcctgacctctctgatgagatggatcgctttcgccgtcatgattgtgctggccctgatccgcatcgggcactggcatcgtctccgcacctgtgcctaagaagctgctcatgatggctggtatcgatgactgctacacctcagcccggggctgcactgccaccctgggcaacttcgccaaggccacctttgatgccatttctaagacctacagctacctgacccccgacctctggaaggagactgtattcaccaagtctccctatcaggagttcactgaccacctcgtcaagacccacaccagggtctccgtgcagcggactcaggctccagctgtggctacaacatagggtttttatacaagaaaaataaagactga

SEQ ID NO: 119306 - DNA, 548 bp, Homo sapiens
gaagctggtgctggacagctggcgccggcagcagcggaccggcgggagacggcggcttgcgagctggctgtgctgcaggagctgcggcagccgccgtccttgcacctaaggaacctctgctgccagcccttcctcacttttggaaatggcgggtgaaattacagagaccggggaactctactcttcctacgttgggctggtgtacatgtttaacctcatcgtgggcacgggcgcactcaccatgcccaaggcattcgccactgccgggtggcttgtcagcctcgtcctgctggtgttcctgggcttcatgagcttcatgaccaccacctttgtgatagaggccatggctgcagccaacgcgcagctccactggaagaggatggagaacctcaaggaggaggaagatgacgactcctccacagcctcagacagcgatgttctcatccgggacaactacgagcgggcagagaagcggcccatcctgtctgtgcgtaagtcttggggttctcgcgggcccgcacttccctccgggccacagggttcccttt

SEQ ID NO: 119307 - DNA, 450 bp, Homo sapiens
gttgggctggtgtacatgtttaacctcatcgtgggcacgggcgcactcaccatgcccaaggcattcgccactgccgggtggcttgtcagcctcgtcctgctggtgttcctgggcttcatgaggtgagaggcagcggggacttccccacaggggccaggagtggagcaggagggagtcagcccaggaagcccgaacatgagggcactgagggggtgggaagacacctgtctaccccgtatcgagctcagtgagtccttgccagggtattcagagaggggaaagtggtcacagaggcctcctggtggcttgtctttgtggagcggttgcacagccctgatcagataaaaacctggacatccactaggctttggaatgtttcacgtgatgctggcctatttcttccctggcaggtttacctccctgctattaaatgtatgctttattaacatt

SEQ ID NO: 119308 - DNA, 1757 bp, Homo sapiens
gaagctggtgctggacagctggcgccggcagcagcggaccggcgggagacggcggcttgcgagctggctgtgctgcaggagctgcggcagccgccgtccttgcacctaaggaacctctgctgccagcccttcctcacttttggaaatggcgggtgaaattacagagaccggggaactctactcttcctacgttgggctggtgtacatgtttaacctcatcgtgggcacgggcgcactcaccatgcccaaggcattcgccactgccgggtggcttgtcagcctcgtcctgctggtgttcctgggcttcatgagcttcatgaccaccacctttgtgatagaggccatggctgcagccaacgcgcagctccactggaagaggatggagaacctcaaggaggaggaagatgacgactcctccacagcctcagacagcgatgttctcatccgggacaactacgagcgggcagagaagcggcccatcctgtctgtgcagagacgtggatctcccaacccgtttgaaatcacagaccgggtggaaatgggacaaatggcctccatgttcttcaataaagtgggggtcaacttgttctatttctgcatcatcgtttacctgtatggagacctcgccatctatgctgctgccgtgcccttctccctcatgcaggtgacctgcagcgccactggcaatgactcctgcggtgtggaagcagacaccaaatacaatgacactgaccggtgctgggggcccctgcgccgagtggacgcctaccgcatctacttggcgatcttcactctcctcctcggaccgttcaccttctttgacgtccagaagaccaagtacctgcagatcctgacctctctgatgagatggatcgatgggcccccggggtcagtgatgggaagagcagaagaggatgccagcccagcctggcccaggagcaggtgtcgttgtggaggaaagcttaaactcaacagcctctacccaacatctgccacctgcatggccccagatgcccccggtgcaggccaggtcaaggtgggagtaaactttctttgcctccctccccacagaagcaccagacccacctgagccccagagcctcatgccagcagctcctggctgttcctcacctgaggctagagcagcagctgccagcttatagatggggcggatggcaggtgatagactgggaagcactgctgggtggtggaggtgggcagtggcaccatgacgggcccctagccacacagctgtcctcactacggggcagggagcagcctcggcaacaggcaaaggccagagtcagagtggtggggaggacaggggctgctgccccgctcctggaaagccactgcagaggggcagtggctggcagtgccaggcctgggggaagtggaagcgtcctgtctgggggcagattcccaagcaagggtgacccatggttaagggccactggaaagctggagagagcttgggatcccttccacctggggccaatggtgttgattgcagactggaggggtaacctccgctgagggtcattatgtgccaggcatggcattgggtactttctgcattgggaccaggcagccgggcctgccatttgaggcagcgagcctccgtgacctgtcctccctcatttgtaaagtggggtaacagctatgtcactggccagttgtggggattaaagtgctgagcttagtgcccagcccaaaatgctcaataaagctattcagtgaaaaaaaaaaaccacatc

SEQ ID NO: 119309 - DNA, 4481 bp, Homo sapiens
gaagctggtgctggacagctggcgccggcagcagcggaccggcgggagacggcggcttgcgagctggctgtgctgcaggagctgcggcagccgccgtccttgcacctaaggaacctctgctgccagcccttcctcacttttggaaatggcgggtgaaattacagagaccggggaactctactcttcctacgttgggctggtgtacatgtttaacctcatcgtgggcacgggcgcactcaccatgcccaaggcattcgccactgccgggtggcttgtcagcctcgtcctgctggtgttcctgggcttcatgagcttcatgaccaccacctttgtgatagaggccatggctgcagccaacgcgcagctccactggaagaggatggagaacctcaaggaggaggaagatgacgactcctccacagcctcagacagcgatgttctcatccgggacaactacgagcgggcagagaagcggcccatcctgtctgtgcagagacgtggatctcccaacccgtttgaaatcacagaccgggtggaaatgggacaaatggcctccatgttcttcaataaagtgggggtcaacttgttctatttctgcatcatcgtttacctgtatggagacctcgccatctatgctgctgccgtgcccttctccctcatgcaggtgacctgcagcgccactggcaatgactcctgcggtgtggaagcagacaccaaatacaatgacactgaccggtgctgggggcccctgcgccgagtggacgcctaccgcatctacttggcgatcttcactctcctcctcggaccgttcaccttctttgacgtccagaagaccaagtacctgcagatcctgacctctctgatgagatggatcgctttcgccgtcatgattgtgctggccctgatccgcatcgggcacggacaaggggaggggcacccgcccctggctgacttctcgggggtccggaacctgtttggggtgtgcgtctactccttcatgtgccagcactctctgccatccctcattacccccgtctcctccaagcgccacctcacaaggctggtgttcctggactacgtgctgatcctggccttctacggcctcctctccttcaccgccatcttctgcttccgcggcgacagcctcatggacatgtacaccctcaacttcgcgcgctgtgacgtcgtgggcctggccgctgtgcgctttttcctgggcctcttccccgtcttcaccatcagcaccaacttccccatcattgccgtgaccctgcgcaacaactggaagacactcttccaccgcgagggcggcacgtacccgtgggtggtggaccgcgtcgtgtttcccaccatcaccctggtgccgcctgtgctggtggccttctgcacccacgacctggagtccctggtgggcatcacaggggcctacgcgggcaccggcatccagtacgtcatccccgccttcctggtgtaccactgccgcagggacacccagctggcctttggctgtggggtcagcaacaagcacaggtcccctttccgccacaccttctgggtgggcttcgtgctgctctgggctttctcctgcttcattttcgtcacggccaatatcatcctcagcgagaccaagctctgatggcaggacaggcaggtctagtgacaggaggcataggggccccagccccacccctcgcccgcagagcccagatttagttgctcccaggtcttcatggggcaggtgggactgtggctctaggggaaaccccctgtccagctggggttgttctccccacccaccttccacccagtctgcacctgtcctcactcccccgggcagctctcccaccaggtccttctgcctgggtgacgcgtggctgctcccaagttctaagactcattactggaatcacacctctcccacatcttccaacacgcttcacccccaaccctacttccagggcgggctactccctgcacaatgggagatgcagtgctggcactgccatcatttgtcccagacccatgcccctcccctctcctgccccatcctgcgtccttgtctaagaaacctccactagcagctgctgcctcttcagaggcgaatcccaggctggaagtatcctagccaggtctgcctgtgacggcagggcccaccctcccaccaggcctgggaggcggtaggtgccacctcagagagggcctggctggccccatgacaagaacaagaagtgctaactggtaccagagtccccagatagagctgcgagggccctcgctgtgggcgcgagctccggagtagcaggctgcccgtgctcccactccaacactaaaagcggctcccttaggggctgagcgtgggtgctcagtgttcacgctatatcccttgggcaatgtggggttggatggggcccccacttccattcccatggaaggaggccaggtccccagccacctcccactcagccatgcacgcacttgctgggctggcctcctgggaaacacaggtgactcgaatgaactctgcattttcaacgtgccttctactgcttcaggacctgggggtccccctgaccctcactggcttgcccccagccctgggcctggccccacctgtcctggagcccagagcccctggcctggagctgcctctctggggtgggtctcaggccccacccctccctcttttgagttcagtgccttgctcagcccctcccctgtatctcagcgtcttcagacctctgacagagcgacgatgtagggtctcccggggcccaaggtggtctcagggtcaggggtgggatttgcagggaactcggggagcccacgggctgcgccacctctgccctggcagctgaagcctgggagagtccctgcgtggtgtaattggcctcagcccgctttctctgtgccgtcgcacctcagtgtttctcatagcttgtccccacgtgtcactttccatccacgggaaaaacaaatgccccttctccatctatcattgcgacttcctcccaggaggcctctcaggttgggtagagcaggggcctgcagtggtcaggccaagagcaaggaagacctggctgccccactgtggctgaaaactcaaaacatctggaactacccttctccaattacgttccctcttgcttaaagacaaagctaattaaatcatcctgccacccgaggctccaaaccaaatcttggacgcaaattcattagcttcataaagcccaggttgatttatgtgacagtctggaaccgcccagccatggagtcggtggccgtgttccctgccctggagggaactggccagcagtgaccacatcgctgatgccaagtggggaccctcaccactgccgttgtctagctgctttgctcctcagtgtcctcctgctgtaagtcagatgaggtcaccttcctctccatcgatgccaggcttctgccgctgacggccaatggggcttggggccaggggcagagaaccccaacagcaagagagccccaggtgatgctggctctccacgtgcatccggcacgtttcactgcagccatcatcaacttggcaaagtaggcaagctcagcttgtggtttccattttgcagatgggcccccggggtcagtgatgggaagagcagaagaggatgccagcccagcctggcccaggagcaggtgtcgttgtggaggaaagcttaaactcaacagcctctacccaacatctgccacctgcatggccccagatgcccccggtgcaggccaggtcaaggtgggagtaaactttctttgcctccctccccacagaagcaccagacccacctgagccccagagcctcatgccagcagctcctggctgttcctcacctgaggctagagcagcagctgccagcttatagatggggcggatggcaggtgatagactgggaagcactgctgggtggtggaggtgggcagtggcaccatgacgggcccctagccacacagctgtcctcactacggggcagggagcagcctcggcaacaggcaaaggccagagtcagagtggtggggaggacaggggctgctgccccgctcctggaaagccactgcagaggggcagtggctggcagtgccaggcctgggggaagtggaagcgtcctgtctgggggcagattcccaagcaagggtgacccatggttaagggccactggaaagctggagagagcttgggatcccttccacctggggccaatggtgttgattgcagactggaggggtaacctccgctgagggtcattatgtgccaggcatggcattgggtactttctgcattgggaccaggcagccgggcctgccatttgaggcagcgagcctccgtgacctgtcctccctcatttgtaaagtggggtaacagctatgtcactggccagttgtggggattaaagtgctgagcttagtgcccagcccaaaatgctcaataaagctattcagtgaaaaaaaaaaaccacatc

SEQ ID NO: 119310 - DNA, 4658 bp, Homo sapiens
gaagctggtgctggacagctggcgccggcagcagcggaccggcgggagacggcggcttgcgagctggctgtgctgcaggagctgcggcagccgccgtccttgcacctaaggaacctctgctgccagcccttcctcacttttggaaatggcgggtgaaattacagagaccggggaactctactcttcctacgttgggctggtgtacatgtttaacctcatcgtgggcacgggcgcactcaccatgcccaaggcattcgccactgccgggtggcttgtcagcctcgtcctgctggtgttcctgggcttcatgagcttcatgaccaccacctttgtgatagaggccatggctgcagccaacgcgcagctccactggaagaggatggagaacctcaaggaggaggaagatgacgactcctccacagcctcagacagcgatgttctcatccgggacaactacgagcgggcagagaagcggcccatcctgtctgtgcagagacgtggatctcccaacccgtttgaaatcacagaccgggtggaaatgggacaaatggcctccatgttcttcaataaagtgggggtcaacttgttctatttctgcatcatcgtttacctgtatggagacctcgccatctatgctgctgccgtgcccttctccctcatgcaggtgacctgcagcgccactggcaatgactcctgcggtgtggaagcagacaccaaatacaatgacactgaccggtgctgggggcccctgcgccgagtggacgcctaccgcatctacttggcgatcttcactctcctcctcggaccgttcaccttctttgacgtccagaagaccaagtacctgcagatcctgacctctctgatgagatggatcgctttcgccgtcatgattgtgctggccctgatccgcatcgggcacggacaaggggaggggcacccgcccctggctgacttctcgggggtccggaacctgtttggggtgtgcgtctactccttcatgtgccagcactctctgccatccctcattacccccgtctcctccaagcgccacctcacaaggctggtgttcctggactacgtgctgatcctggccttctacggcctcctctccttcaccgccatcttctgcttccgcggcgacagcctcatggacatgtacaccctcaacttcgcgcgctgtgacgtcgtgggcctggccgctgtgcgctttttcctgggcctcttccccgtcttcaccatcagcaccaacttccccatcattgccgtgaccctgcgcaacaactggaagacactcttccaccgcgagggcggcacgtacccgtgggtggtggaccgcgtcgtgtttcccaccatcaccctggtgccgcctgtgctggtggccttctgcacccacgacctggagtccctggtgggcatcacaggggcctacgcgggcaccggcatccagtacgtcatccccgccttcctggtgtaccactgccgcagggacacccagctggcctttggctgtggggtcagcaacaagcacaggtcccctttccgccacaccttctgggtgggcttcgtgctgctctgggctttctcctgcttcattttcgtcacggccaatatcatcctcagcgagaccaagctctgatggcaggacaggcaggtctagtgacaggaggcataggggccccagccccacccctcgcccgcagagcccagatttagttgctcccaggtcttcatggggcaggtgggactgtggctctaggggaaaccccctgtccagctggggttgttctccccacccaccttccacccagtctgcacctgtcctcactcccccgggcagctctcccaccaggtccttctgcctgggtgacgcgtggctgctcccaagttctaagactcattactggaatcacacctctcccacatcttccaacacgcttcacccccaaccctacttccagggcgggctactccctgcacaatgggagatgcagtgctggcactgccatcatttgtcccagacccatgcccctcccctctcctgccccatcctgcgtccttgtctaagaaacctccactagcagctgctgcctcttcagaggcgaatcccaggctggaagtatcctagccaggtctgcctgtgacggcagggcccaccctcccaccaggcctgggaggcggtaggtgccacctcagagagggcctggctggccccatgacaagaacaagaagtgctaactggtaccagagtccccagatagagctgcgagggccctcgctgtgggcgcgagctccggagtagcaggctggatggagcatcccttctacagggacacagccgcctgccagctgggcctaaagtctggagcttgtctctgaaagggaccgtctgctgccctcgctgccccactggagccctcagggcctcctacagtgcaggtggtcctactagagggaagccatccccacctggcacctcagcggcttggcagtgacatggcagtgggagggctctgaggttcccaccctgacaatggtcaggctgcccgtgctcccactccaacactaaaagcggctcccttaggggctgagcgtgggtgctcagtgttcacgctatatcccttgggcaatgtggggttggatggggcccccacttccattcccatggaaggaggccaggtccccagccacctcccactcagccatgcacgcacttgctgggctggcctcctgggaaacacaggtgactcgaatgaactctgcattttcaacgtgccttctactgcttcaggacctgggggtccccctgaccctcactggcttgcccccagccctgggcctggccccacctgtcctggagcccagagcccctggcctggagctgcctctctggggtgggtctcaggccccacccctccctcttttgagttcagtgccttgctcagcccctcccctgtatctcagcgtcttcagacctctgacagagcgacgatgtagggtctcccggggcccaaggtggtctcagggtcaggggtgggatttgcagggaactcggggagcccacgggctgcgccacctctgccctggcagctgaagcctgggagagtccctgcgtggtgtaattggcctcagcccgctttctctgtgccgtcgcacctcagtgtttctcatagcttgtccccacgtgtcactttccatccacgggaaaaacaaatgccccttctccatctatcattgcgacttcctcccaggaggcctctcaggttgggtagagcaggggcctgcagtggtcaggccaagagcaaggaagacctggctgccccactgtggctgaaaataattaaatcatcctgccacccgaggctccaaaccaaatcttggacgcaaattcattagcttcataaagcccaggttgatttatgtgacagtctggaaccgcccagccatggagtcggtggccgtgttccctgccctggagggaactggccagcagtgaccacatcgctgatgccaagtggggaccctcaccactgccgttgtctagctgctttgctcctcagtgtcctcctgctgtaagtcagatgaggtcaccttcctctccatcgatgccaggcttctgccgctgacggccaatggggcttggggccaggggcagagaaccccaacagcaagagagccccaggtgatgctggctctccacgtgcatccggcacgtttcactgcagccatcatcaacttggcaaagtaggcaagctcagcttgtggtttccattttgcagatgggcccccggggtcagtgatgggaagagcagaagaggatgccagcccagcctggcccaggagcaggtgtcgttgtggaggaaagcttaaactcaacagcctctacccaacatctgccacctgcatggccccagatgcccccggtgcaggccaggtcaaggtgggagtaaactttctttgcctccctccccacagaagcaccagacccacctgagccccagagcctcatgccagcagctcctggctgttcctcacctgaggctagagcagcagctgccagcttatagatggggcggatggcaggtgatagactgggaagcactgctgggtggtggaggtgggcagtggcaccatgacgggcccctagccacacagctgtcctcactacggggcagggagcagcctcggcaacaggcaaaggccagagtcagagtggtggggaggacaggggctgctgccccgctcctggaaagccactgcagaggggcagtggctggcagtgccaggcctgggggaagtggaagcgtcctgtctgggggcagattcccaagcaagggtgacccatggttaagggccactggaaagctggagagagcttgggatcccttccacctggggccaatggtgttgattgcagactggaggggtaacctccgctgagggtcattatgtgccaggcatggcattgggtactttctgcattgggaccaggcagccgggcctgccatttgaggcagcgagcctccgtgacctgtcctccctcatttgtaaagtggggtaacagctatgtcactggccagttgtggggattaaagtgctgagcttagtgcccagcccaaaatgctcaataaagctattcagtgaaaaaaaaaaaccacatc

SEQ ID NO: 119311 - DNA, 507 bp, Homo sapiens
ggagctggaggcagccctggctcttctccatgggcaccaggcccagtgcccctgcagctcctccctgggccccacctgaccccgaagctgagtctctggcaaagggacatgaattggtgtaaaccgtcgtaattcttccctggggctgggaatgattttcaccctgaaggacatccaggttccactggcagcgggggagtgtggatagaggctgggaggtcatcacaggatgccggctatggctggtccacagcacctcagagagccccagccccatcctccggctgagcggcactcacgcgctgccttctcagaggctccgatgtccctggagcaggcaggagtgctgagggtcccattcagcatcctgagagagggacagcgcacagtcaggccctaaggaggacagggcagagccccgggattccagccccatcccctggggcaagtgattgaaccccatctgtcaaatggggccatccccacttcatagcacccagaattttg

SEQ ID NO: 119312 - DNA, 328 bp, Homo sapiens
agcaccggaggcccccaagagaattctcacactcctgagatgagcagaaggattcgggggtcaccaacaccgggctggctccccagatgctgtgggtgcacacctggcctaaggccctggaatgcgatcttatcgggttctaggtgagacccagatggccccagatcggcttttatccgtccactcctgctaatggacacgggtgctgtctctctgctacgagccaggctgctgccttctgttcctggccgcctcacacggtagcgtccaggtcacccgagggccatttctaggcaaaaaccccagctgtgttttcactccccactgc

SEQ ID NO: 119313 - DNA, 683 bp, Homo sapiens
gctccattttgacagaattaaccattcctttctctgtgtcacagcagccctttagcgttattggtaatagagcacataccacatttgcactttttatttaattatttgcttctatctgtacctcctcttgagtttcttagtaacaaagactgtattctttttgtccttacaatctcggtgctatcatagcacctcagtcggaggggctcaatctatggccataccaacctgaatgcacctgatattggaagctaaacagggtcctgcctggtcagttcttggaagggaggtagaagtgcttaataaatgcttattaaattaattgcatatcattttagtacagcagtcatatttcaaaataagacattgtggggaagttgacaaatagagagtaacagtctgaaaattactgttcactgtaaatttgagaggagaaacaaggtaaattagaataaggaggacaccggtatttaacaatatttcccagtccacactttgcttcttcaagggaaatggtgaaattggaaacaatttgttaataatggagaggacctaaacttatggacgccaccaaaccacaaaggtttatggtgaacagtaaggaccaagtcataggacctaatgggagtgactgtctcaatgtgaaatgtaactaactgctgaaacatctatgtttaatacct

SEQ ID NO: 119314 - DNA, 498 bp, Homo sapiens
ccctttgcttccccacctctgaacactggcttgggggcccctgtgcctgggacacccctttcttcctcccaggccctggcccatctcctccaggaagcttgagtgctcactgcagccaccggcctccctgtaagacagtgagttgtctgcgagctctgctctgagccctggcacatggagcgactcagttacacttaatcagctcttagaggcactggctgggcatggtggctcaacgcctgtaatcccagcactttgggaggccgaggcgggaggattgcttgagcctaggagttggagacaagcctgggcaacatagttgagaccccaccactagaaaaaaaaaaaatagcggagtgcagtggcatggacttgtaatcccagctactcaggaggctgaagcaggaggatcaattgggcttggaagtttgaggctgcagtgactgtgattgtgccactgtcctccagcctgggcaacagagtgagaccctgtttcgg

SEQ ID NO: 119315 - DNA, 548 bp, Homo sapiens
ggaaactcaggctcacagtgattaaatcattttccgaatgtcacacgagaacgtaggaggcaggcagaatccggagccagggatccgcccctgtgcctgggacacccctttcttcctcccaggccctggcccatctcctccaggaagcttgagtgctcactgcagccaccggcctccctgtaagacagtgagttgtctgcgagctctgctctgagccctggcacatggagcgactcagttacacttaatcagctcttagaggcactggctgggcatggtggctcaacgcctgtaatcccagcactttgggaggccgaggcgggaggattgcttgagcctaggagttggagacaagcctgggcaacatagttgagaccccaccactagaaaaaaaaaaaatagcggagtgcagtggcatggacttgtaatcccagctactcaggaggctgaagcaggaggatcaattgggcttggaagtttgaggctgcagtgactgtgattgtgccactgtcctccagcctgggcaacagagtgagaccctgtttcgg

SEQ ID NO: 119316 - DNA, 424 bp, Homo sapiens
ggggctgggatgagcagctcgagctgtattctgtggggagaacccatggagggctttaagaactaaagagaccttgtgatttttgcttaaaacgacaaggctgcattgcaggtaaggtctagagtgggagcagtgaagaggctggtgtagatgccccggtgagagatgaagctacagtctgggaattaagggtcagttcttggcaggggtcagaggaagcagagtttagtgggaacagctggaagcatccctgcagactttcagaggtggaccagggaacattcttggccaagtcaaaccaagaatggtgttgggacaagaggcaggagggatatttttgcccctgtggcttcctttgaagttctaagctctacctctcccagatgagcctttccccagggaaaggaagacaaactgtgtctcc

SEQ ID NO: 119317 - DNA, 517 bp, Homo sapiens
agtacagaattccttttcaaattcgggcttatgaggcatgttttgatccaggctgtcgtagcaagggatttgatgctggagtctgtgactgctgtgcgtgtggaggcttccggaaggcagccagtgctggttactgcttggagtttggggagctgccattttggattgtcctagcctcatgccttctgagaagcatctgtcagggtccctgatgcacctacagagaccctgagcttggtggtgggggttgcacagagagagctgcaggttgttcctcaggcataacgaggcccggagctggtggtcccctccctctgtgagtgtgtgcagagcatggatcgggtctgggagtgttcgtgctggcaggccggaggaggactgctgggcacacttgcagaattgcggttctgtacagcagtgtgtatcgactgcagcgctctttttctctagcagcaaaatgctcagctctctgccttctttctgtgcatttaacagacgtttccagaaagcagaattg

SEQ ID NO: 119318 - DNA, 938 bp, Homo sapiens
atgcacatttcacagatggcacagagtggggaagtcagtgacccaaggtggcaagccagctcttgctgatggtgaggagcctcattatcttaagacaacacacagtggagatgtgctttacgtaattggcctgccctgtgaaaacccctggctgttttttcagataaggagactgaagcatctagagttggagtaatttccacaagatcacagagctgaaaccacaggaagaggccaatatggacttctctactactttatttcccctgagcctggtcagcttcttccaaggagattactgggaggaagcttctaggatttctggacattggattccctgctggtttccccacctgattattgaaattgatttctggagttcaggaaaaagcaagtcatcatatatcaacctattatgtgtgttaggctgtttgcattatcacatttaatccatttgacgctgtgaaggagcaggtagtgttatctgactcaagtctgtccttcaattaatctcaccacctccaggattcctttatgctctttgtcaagaactctggtagagcaaagaaaatggggatagtttgtcacgttcaaaaatcgtattgaccaagactatcctctctctctctctcttttttttgagacagagtctcactctgtcaccaggctggagtgcagtggtgtaatctcagctcactgcaacctccgcctcctgggttcaagtgattctcctgcctcagccttccgagtagctgggactacaggtgcatgccaccatgcccagctaatttttgtatttttagtagaatcagggtttcaccatgttggccaggatggtctcgatctcctgacctcgtgatctgcccgccttggcctcccaaagtgctgggactacaggcatgagccactgtgcctggctgataatcctcttttaagaa

SEQ ID NO: 119319 - DNA, 738 bp, Homo sapiens
tggaccccttccttacaccttatacaaaaattaactcaagatggattaaagatttaaacataagacctaaaaccataaaaaccctagaagaaaacctaggcaataccattcaggacataggcatgggcaaggacttcatgactaaaacaccaaaagcaatggcaacaaaagccaaaattgacaaatgggatctgattaaactaaagagcttctgcacagcaaaagaaactaccatcagagtgaacaggcaacctacagaatggaagaaaatttttgcaatctatccatcttacaaagagctaatatccagaatttaaaggaacttaaacaaatttaccaaaaaaaaaaatcaaacaaccccatcaaaaagtgggcgaaggatatgaacacacacttctcaaaaaaaataagatatttatgcttccatttctttagaggtgagtgaccaaggtttggaaaagaggagatgagtgtctgctggagcttagccatctgtggcaccagcgctggtccacataagcagctggccagcggtgcagtgtgaggtagaggggtgtctgtgagtggtgctggaaagagggaagacaaggggtccgggttccagggtccaggtaaggtgaccttggataagcgattcagaccagcctgtctcctacggggcctctgccatcctgctgcccctaaaggcagctgccgtctcccctctggatagggttcacccaggtacccaggtcactc

SEQ ID NO: 119320 - DNA, 463 bp, Homo sapiens
ttggtaaaccctatcttttcactacaagtaaaacacagctgggtgtgttttccatattctgaggccctgggcagttctgtggcctcagctctctccaacttcccttgatcagccactttccagccactggacctccaggtcctccaccaccagcacttgctctcgtgcccggtcattgcactcgcttttccttccatgtggacacttggtccatggatttttacatggctgcctccttctcatgaggcaccttcctattcagctgccagctcctcaaagatacctttcagagccacctgagctaaagcaaattaccccaccacagtcactctcgagtccattatcttgtttatcttcttcagagcattcatcagcactcaaattctcttacttatttgttctcctgtcattgtctatctcctctcactagattgtaagctctctgaggacagaactttgttgg

SEQ ID NO: 119321 - DNA, 318 bp, Homo sapiens
ctatgagcctggacctgtgtgcaaagtgctttgcatggattattccatccagttcttacaacttccctctgagtaggcttcgcatcctcaatctcaaatgagaaaatgagactcagagaaatgaaaacacttacccaaagtcacacagctcataaaaaacagagctaggacatacccagcctccatgcaactgcctggaacatggtgggtgcacaaaacatgttgcctgccttcccttcaggaagcagagagggtgagaaagaactcccaggaaacaggtaaatgctgaactgggggctgttgattctctgcccagca

SEQ ID NO: 119322 - DNA, 963 bp, Homo sapiens
ccctgtctcaaataaacatgaataaataaataaataaataaataaataaataaataaataaataagaagagccttccagagcagtatggaatggccaatgcccctcctccctgctgctcctcctcctgtagctgtttccttctcccctctctccttgcttggaacagccacagcgactctccaaatcatgacactcaaaatgccacttctaaaaagaacatcagggttggtgcctctgcttcttctgaattgacctcccttctctgccctcttctgactcgtcctcccttctcttttggatgtaattctttccagcctccacactcctttgacagaagatgaaaaatttgtatctctgaatcctatatctgcttgtctatgatctaaatactttttgagtcaacaaggtgaacatattcctcatatttcgttatggaatgtttaaaacgtctaaaatacacactgccactgagaaagtaaattcatgcacctacaaagagaaaggaaaggacagccatccaccatttgactactgagtttccacctgcacccttcgacacttattagaactttcatgaaacagtgtgacaactcttattcctatcaaacaaaacagaactttcttccttgtatgtaaagaagtttgcaccctctacaccgaataaggagatgcacagttccaacagttattgtatacatcactgaccatattagtcactcctcaaaatccatcataggtccaccaaatattctgttaccttaagactacattgtaagattaaactccaacaacatgtatatacaacaaatgaatggagagaaaaataaaagtggtgagcgtataatattaatgtgtacatattacaaatatgcaaagctactaccacacttgattttgtaatttatcatgaggccacgacaccttttaaaaaatatatttaaaaaatataaaaatttatttta

SEQ ID NO: 119323 - DNA, 410 bp, Homo sapiens
gacctcgggaccgttttagcaccgtggtacggcaggaggtaaagaagtagaaaacgggccgggggcggtggctcacacctgtaatcccggctttgggaggccaaggcgggcggatcacctgaggtcaggggttcgagaccagcctgatcaacatggagaaaccctgtctctactataaatacaaaaattagccgagcatggtgtcacatgtctgtaatcccagctactcgggaggctgaggcaggagaattgcttgaacccgggaggcggaggttgcagagatcgcaccattgtactccagcctgggcaacaagagcgaaattctgtcttaaaaaaaaaatcccatcaagagctttattgtctacttggcctgagctgctgtagaaaaaactgatatcacgggtgtaccc

SEQ ID NO: 119324 - DNA, 344 bp, Homo sapiens
cccataggctgcttgcagaggccataggctgcttggagaatggccgggagtggttgcccagcatgcttggggcccacgggcctgagaggatgccctgcctggaagccaccctgcaggctcggcctccctgcctcccttggagctgactgactggctaattagggtggctggcctgagtgttgtggggtcagcagagcatgaactagaaaaacctgtgaccagcaggcagcagccacacacaggggccatcagcccccagggggcaagggtggcagctctcctgagtgacaggtttggacagggaggggccgtgggcagtaggggagccacagagctggagggca

SEQ ID NO: 119325 - DNA, 333 bp, Homo sapiens
ctggcagcgtgattgtcctccagggcaccagagggtccaggccttggcatgccccaggtggcacatgctggggcctgctgttggctcactcagtgcagtcttggcctgtgggtggatggggacatggcaaggcagaaggcaggcagtgggtaactaagaacccccttggacatcattcaagttctctccaagtatagcagagtcttagagacctgcgttcaaattctagctctactattcttcagctgtgtgaccttgacaagttacttaacctgtctgaacctcagttttcattaaaaagtgtttatgcctataattccagcactttgggag

SEQ ID NO: 119326 - DNA, 190 bp, Homo sapiens
ctgctaaacctgcacttctggagtcttgtcacattgcacagctccctgccactggataactgtatatggtacaatacttaaccacacaacaacaaagaaactgctccccaggtgacaccagctgttccaggagctttttttagtatcacagggatgatgctttactttcaggcaaacaagtattcaacat

SEQ ID NO: 119327 - DNA, 694 bp, Homo sapiens
ttccagcctgggtgacagagtgagactccatctcaaaataaaattgtacacataaacattgtacgcgcgcacacacacacacacacacacacacacagatgatttgtgtgacatcacattttgtcaactttttagattcacctactaactgtcctgtaagaaagaaatattttcaaatacctccacttccaaacattaaaactatggctggtgtggtaggtagagccatatgagtttctgttactgcaagagggtgaatcacagtatatttcttaaaggccgaaccatagaggatggatagtggttcacagtatggtacacaaaagatagattgtggatgccagcatggtatgtggaggactaatcgtggctcacagagtagatttctttttattccacataatcaactctgttcttctttccagagcaacaggatgtggtagaaagaatcctagattctaatcagaaacagcctttctctatgtcagtgtgttcttggtaactaacctaacctcactgtgttcttgggaactaacctaaccttggcctagtttatttgaagttggcaatttcagtaatgtttttagatctaacatagccctcaatgaatattagttaaatggacctgaaaacactttggaaatcacaaaatattaaatcccatattttcatactatgaatatattgtttgctc

SEQ ID NO: 119328 - DNA, 432 bp, Homo sapiens
acccggaggtggactgtaaagttttacttccctgagaagcatcctgctatttactcttaccttggggaaagaagactttgaaagctatctcctctatcattcatcagagaactaagattaaacaggttgcctcagttcctatcattatgctgccatgacacctgagattcaatttgctctctccatccctgtataacagaaaaggctttttcaggtgcatattttatagcttgggcttaggtgcctgtagaattgacttaagtatctttcgccacagagagcaggggctttgggaaaggctgctggcagagtatgagcaaacccagtggaggagggtggagactggggggtgccaggacacgtgtacaaagaactccagggcctggaactggcaacatagccatcagggttctctcagtcctgatgcacacg

SEQ ID NO: 119329 - DNA, 430 bp, Homo sapiens
agtgctgggattacaggcatgagccaccacacccagcctactattcctacttttgtaaatgaggaaactgagactcagagatggaaggggatccggcatctctgtgtaggtgagcagcacctgtccagactaaccagcccctttggccaagaacaaagtgttttctgggccaaaagccattctgcccaagggagatggatctcataaaccaatttagtgctaaagttgtgactaaaaaattcttgataagatttttagataactttataaaacatatatgtaatatttttcaagctgttttaaggtattttgtaaattggtctgatctatttctgttcctttttagcatgcttttcttaaatgacatgattatctagaaccccttatcagcaagaactaacattgtttagcacattcctagtaactttcc

SEQ ID NO: 119330 - DNA, 899 bp, Homo sapiens
atgcggcagcagcgtggcgtgtacttgagccgcacgccccagtagcccagctcctccaggaagcggcgcggacacagcccgtcgagcaccagcagcaccccggacaggtagaaattgtagaccagctggaagacggccgggtcgcggtcgaagaagtattcgtctgtctgctcctcgtagtcgtcgcacaggcttagctggcggctgcggctggtggaggtggccaggcgacctaggcgcgtcttggggaagccggccagctcgcagtagtccagctggtagctgtggccacccacgttcacattcagcgtggacagcagggccggagggtcgctggggccctcgggcttggcggtggtgacctcccctgcctgctggtcctcttctgccaggtcgtccttccactggtcctcctcctcgccgtcttcgtcttcctcgatgtagtagttatagttgccctctgtccagccgtggatgctggcctgggagccggaacgggcacccagggagcaaatgctcctgcggtgttggctgccctcattctccgtcgtgttccagggcctgtagctccaggaccgtctcctctcactctgtttgagcatggctgcggaaagtggacgcctagctttttcctcctggctgtggtaggggtccctcacctgctcactgcctctaggaggatggatcacgtggcctgcactgtcttagagaggccagcccggaccagcacagctaggggctcagacattgccaccggagctgccccttctcaggtcctgggcaggccagcccagcctgcagggtctgaacgcagtcagctgttgactgctctaatcttgctgatttggaagaagcaagtgttaggagggatttagaacctcttagcccatttcctcccc

SEQ ID NO: 119331 - DNA, 452 bp, Homo sapiens
cccaaataatctatttgcatttggatgcttgtctcagagtggtttctgcaggaaaaaacccaagatagagagacaacactatataggcatcgatgtatttctggggtgactctctttcctccagacctctcctgcaaacaacgcaggggagccacgcaaaggaagaggtttccacacctgggattgatactgctgggactccagggcaggtgctctaaaggactcttagaatttcatttttaatgtttaatatttggtccatctagaatttatggtggaaggtgtgaggtagacgttgcacttttttttccttccaaattgctccaatatcacttactggaaattgtgctttgtctgttaccactctcttctaatctgcctgtggcctgttccttagagtgtatcacaaacatacaagtgatcaatttccaataaattgattaaagaattca

SEQ ID NO: 119332 - DNA, 361 bp, Homo sapiens
gcacgagcacatggtgggtaacaacacacactgggcacctgtagggttggggaagagcatcaggaagaacagctgatggatgccgggcttgatacctgggtgatgggataatctgcgcagtaaaccacgatggcacatgtttatttatgtaacaatcctgcacatgtacccctaaacttaaaataaaagtcaaattaaaaataagaaaattgaagagtatgaccatgaggtgggatgagggagagttctgggcacccaggttcagaacagcttttccacagtttcagagctaaaccttcatggtgtctctgaatgtcttcatttgaatcaaatgctccaaatcagcaaacacccaagatca

SEQ ID NO: 119333 - DNA, 197 bp, Homo sapiens
ccagcacatcaaatgaccagctcattctcactcttcaggcttcagctaaaatgtcagatgccttcccctaccactcctatttaagtcagttctccccagttattctggcatgacttacttccttcatagcatctattatggtctgtaattatcttgcctttttttttttttttttttttttttttttgagacagcgt

SEQ ID NO: 119334 - DNA, 755 bp, Homo sapiens
ggagaggctgaggcaggagaattgcctgaacccgggaggcggaggttgcagtgagccgagattgcaccattgcactccagcctgggtgacaagagtgaaacttcatctcaaaaaaaattataaagaaataatatcagtgactagttagtatgtttctgtagggcttagtacagacatgtattaattcttctaacaacttcttgaggttagtacctttactccttcttatcgttaagaaacctgatgcttagggatgggcacagtggctcacgcctgtaatcccagcactttgggaggccaaggcggcaggactgcttgagcacaggagttcaagaccagcctgggcaatatggtgaaaccccgtctctaccaaaaatataaaaaattaggcatgatggcacatgtctgtggctccatttgttagggaggagggtgaggtaggaggattgtttgagtcagggaggcagaggttgcagtgagccgagatcgcaccactgcactctggtctgggtaacagagtaaaaccctgtctcacacaaacaaaaaaaagatataaaagaaacctgatgcttagaaaggtaaaaagggccaggtgtggtggctcatgcctgtaatcccagcactttgggaggccaacattgctcaagtcccagagttcgaggctgtgatgagctatgatcacaccactgcactccaacctgtgtaacagagcaagaccctgtctcaaaaaaaagacttggactggttcaggtcaa

SEQ ID NO: 119335 - DNA, 301 bp, Homo sapiens
actaaaaatacaaaaaattagccaggcatggtggcacttgcctgtaatcgtaggtgctggggaggctgaggcacaagaatctcttgaaccctggaggcggaggttgcagtgagccgagatcactccactgtactccagcttgggtgacagagcaagaatccgtatcaaaaaaaaaaaaaaaaaggaaaggagaatatggatggtatatatggggcagtattttgaatgactgaagagaaagatatatttagggcctgattttatggtgggctttacaagctatattaagaaatttggcata

SEQ ID NO: 119336 - DNA, 380 bp, Homo sapiens
gaattctttgtgcattgtacacgactgaggaagagacggcagtaatatattttgaaaagaggaaagtgtaagataataatggagattctcccaggaaaagtgggatacttaggaactttaataatggtaaacaatcgaaacatattttcctgaaaacctatttacaatgagatacataaattatacaacacaggaaaatactccagagttttcctgaaactctcttcaagtcacactcagctgggagcccctcaggaagcagttgggaggatgaagagaacagcaagaagaccgtggggaatgtggatagtctggataagctggagtgtagattcaagctgaattcctacaagatggtgtatgtgatcgtggggttgtaa

SEQ ID NO: 119337 - DNA, 315 bp, Homo sapiens
gaattctttgtgcattgtacacgactgaggaagagacggcagtaatatattttgaaaagaggaaagtgtaagataataatggagattctcccaggaaaagtgggatacttaggaactttaataatggtaaacaatcgaaacatattttcctgaaaacctatttacaatgagatacataaattatacaacacaggaaaatactccagagttttcctgaaactctcttcaagtcacactcagctgggagcccctcaggaagcagttgggaggatgaagagaacggaaagcaggggctggtgcggagcatggggagat

SEQ ID NO: 119338 - DNA, 187 bp, Homo sapiens
ctatacaacttatctgattttttaaaaatcagatgcctcttttcttagattatggttttgaaaagccaacccagaccaaattactttttccatactccagcacaacttggctaaattttaaagcacaggttgttttttatgtaacaagaatagggaaactttactcccatttcacatgaaatgacaa

SEQ ID NO: 119339 - DNA, 683 bp, Homo sapiens
ctctcatatataaatcaaccaccaattcctgctaaattctacctccacgtagttttcactttgtcgccgattccttgtcaaccctcatcatttgtgatctacctgctattgcaatagcccccaattggcccctcctaaatccatgttgtacatgatagccccagtgatcaatatgtaaatgtggtcacactactccctgccttgaacacttttcaatggtaccccacggcctagataaattcatcaaaaccgctcagctgtactgaaaactggcagacactattaggtggttcacttagtacccactcctgctcccttctagcttgactatcttacagctacatttcccagactccctagcagctcagcaatccacgagacctagcttcttcctagcagatgctcccacacaagacttggggtagaaatgagcaacatgagataacgactgtgctagaaatctggtctttgggcaagcacggtagtagaagcatccagttcttctgcagcactgtgcagaggtttcactatgacagtcacatgctgcatagatctatagctgctctgctctttgctgagcagcatctgagcttggctcactggctcttccccaggttttgttaaggtacccagtatcttataataaacccctttctgcttaaaagagtggatgaaaagtacac

SEQ ID NO: 119340 - DNA, 504 bp, Homo sapiens
  misc_feature (1)..(1): n is a, c, g, or t
ntgactctagcaggatctccacactgggttcgagttcatgtcattgatgggaagtgattatcattgatttatcttaagagagcagggagtgttctgcatgaaaaattaaaattacatgagagaaacagttgtaaaatgcaagatacgaaagcctattaatactgactagataggccaggcatggtggctcatgcctgtaatctcagcattttgggaggccgaggcgggcggatcaccaggtgaggagttttgagaccaccctggccaacatggtgacacctcgtctctactaaaagtacaaaattagctgggcgtggcggcacgcacctgtcatcccaactactttgggaggccgaggtgggtggatcacgaggacaggaaggagttcaaggccagcctgggcaatatggtgaaatcctgtctcttctaagggtgtaaaaattagccgggcatggtggcgcacctgtggccgcagctactcaggaggctgaggcgggagaattg

SEQ ID NO: 119341 - DNA, 303 bp, Homo sapiens
tttgaatcatgtccaggggctgggtagggtggttcatgcctataatcccaacagtttgggaagctgggcagagaggatcatgagcccaggagtccaagaccagcctaggcaatatagcaaggccttgtctctactaaaaaataaaaataaaaaatttagccaggcattgtgatgcacacgtatagtaccagctaccgaggaggccgaggagggaggactgcttgatcccaggaattctagattatagtgggctatgatcattccactgctctccagcctgggtaatgaacaagaccctgtttc

SEQ ID NO: 119342 - DNA, 245 bp, Homo sapiens
gagagagagagagagagagagagaaaagaaagaaagaaagaagaaagaaagaaagaaagaaagaaagaaagaaagaaagaaagaaagaaagaagctacaacaaaaaccccagaaccatcttttttcaaatagtcccttgaaaagaaaactataaaaaatttatgttaagattctgggtctttgaattactcatcatgagcacttttcctgggcagtatctcccatgttcacccttactcgtcaca

SEQ ID NO: 119343 - DNA, 269 bp, Homo sapiens
ctgcttgtcctgcctctgaagaccaaccacacgcgcgcgcgcgcgcgcgcacatatacacaaacacacacacttaggaatttgttttacaaaaatgtgatcatattataagtattttctccatcttacttttttcaatagtatctcatcaaaatccttctaaggcaactagtatagctctaatggacttctttaatgggctacatatgacatgatatggatgtatcatgattcaatcagccattcagtcccccagtggcagtcctttac

SEQ ID NO: 119344 - DNA, 261 bp, Homo sapiens
ctttggcctctgagctttggcaggtccttgcccaggcttgcttggctgcccccaggggtggcacttccacaccctcccagtcaccatagccctgacctgtcgatttgccagacagttttctttaagtccatttaaaaatgactcacctctttgatcttggcctcccaaagtgctgggattacaggcatgagccaccgcgcccaccagccttggcccatttttactgggctgtttgtctttgcccctaagttcagagccagg

SEQ ID NO: 119345 - DNA, 310 bp, Homo sapiens
ccccaggagcagtggcaggtactctgtccaaagcaagccacctgccaatacagaaccccaggttatggctcctcttgggcgcaagttgttaacagctacagcctctaaaggccagtttctctttgcttcagtgcccaatgcagacctcgagccttccagaggccttggactcttggacttagacccttggtagggaggaccctagcaatgggcagtgggacacaatctcagaggtggctctgccctgacaggtcctcatgtctgcatcatgggacacacttctgaaagcactctgccttctaagagctcc

SEQ ID NO: 119346 - DNA, 177 bp, Homo sapiens
ctctggagacatacatactactgcctagtaggacttctaagagaaagccagctcgatgccattgggaacagcacaggaattagaaggaggaagccccagcttcagtgatggtcttcttgctgtctcatttttatcagagtgattcactgccctctctggccttcatcatactcattt

SEQ ID NO: 119347 - DNA, 778 bp, Homo sapiens
cgcagtggctcacgtctgtaatcccggcactttgggacgccgaggcaggcaggtcacgaggtcaagagatccagaccatcctggccaacatggtgaaaccctgtctctactaaaaatacaaaaattagccgggcatgttggcgcatgcctgcagtcccagctactcaggaggctgaggcaggagaatcacttgaacctgggagacggaggtcacagtgacccgagatcacgccactgcactccagcctgatgacagagcgagactccatctcaaaaaaaataaataaaataaaattgtaagtgtacatactccttaacccagaaatccaacttttaagactatcctataaaaaaaagggcaacaataagaaagaacatatgtttattacaggatggtttataatgacaaaccagaaaactagaaccacctaaatgcccatcaatacgggaatggttgaataaatagcagcacatccacgccatggaaaattaagcaggaattggagccagtgtattaatttagaacaatattcatggtatactgatatgtaagaaagcaaggtgctaggtgatgatcacattatgactttttaatttttaaaggaaaaactctacgtattataagcacttatgtttgtcactgtaaaggcacagaagacctttctcatacagcaaactaataacaataacttcttcagatgggggaaggataaatttttcctctatattatttgacttattactgtttgctcattgtaattttaaaattcccatagat

SEQ ID NO: 119348 - DNA, 220 bp, Homo sapiens
tgaactttctcccttcccaggctcctcttctaccaggccacccatccagtcctgtcaaatgtctccatcagctctcacctatcctctcctctccatgtcttctgtggctaccctcgtgaagactattattgcctggattctagtgctagttttccaattattctttctgcttcctttctcagtctctcttacacactgctgccaagttaatctctgaagc

SEQ ID NO: 119349 - DNA, 158 bp, Homo sapiens
tttttctggttaatagactcaagcctggggcagaatctttcatcagctactaaaggtttttttatgctttactgcacccagttttagaaacgaaggtgttctattatgtattacgaatggaatcaagggtttgctcttcatgtgacatcagctactca

SEQ ID NO: 119350 - DNA, 295 bp, Homo sapiens
cagtctggctgcccggcccccacactcagcccagactgagcccccactggacttgcccggtcaggtagaaaggcctggtgcacacacatgtccacacctgctgctcagcacccctcacaccctgccccacaaggcctccactgtctaaaacggccctggaaccgtgaccaaaaaaacagttagatggaagccccctcggctgggaggggatatctgaaggtcccatatccgtctctgcctcatcctaaaggctgggcagtcagtgaggccccagagcctccgatgcctgacagag

SEQ ID NO: 119351 - DNA, 195 bp, Homo sapiens
agcagaagtgtcattaccttgcagctcatgtcgacaaaaagctacactgcacatttctcttaggctgctaagaggaaggaaacacaaaacacacacacacacacacacacacacacacacacacacacacacacacacacacagaggcctcgttttctgcatgtaaaatgtgtgtgttctttaaaagccagtggt

SEQ ID NO: 119352 - DNA, 192 bp, Homo sapiens
atgaggggactgtagttccaggcataggcaagagaatatgagtttcgagcaaaaaggagcttggcatgttctgggaatggccagaagccagttgactagaacactgtgatgaaggcagagtcatgaaggatgggagtagaaggataggaatgagccactttggctgggcgcagtggctcatgcctgtaatcc

SEQ ID NO: 119353 - DNA, 698 bp, Homo sapiens
ggtgtaccattctacattcccaccagctgtgcatgtctgctccacatccttgctaataattgggagggttggtcatttttaaattcagacattctaataggtgagtagtgatatctcattgcattttaaatttgtatttccctaatgactaatgatgtgcctttttatgtgcttatttgccatctgtatatcttctttgatgaattgtttttgaaaacctgttgcacatcttttaaattgggttgtcttcttattattgaatttttgagttttttttttaaactatatattgtggatacaactcctttatcagatatgtgatttgcaaatacgttctccaagacagtggcttgttattttggtgtctttcaaagagcagatgttcttaatttcagcgtagtccactgtatcagtttttgattttatagattgtgcattttgtgttgtctctaagaaatatttgcttaactcaaggtcacaaagattctctcctatattttattctagatgttctataatttcaggttttacatttatctctatgatatcttttgagttaattttatagagtaaaaggtatgaatcagtttatttttgcatatggatatccaattgttctagtatcttttgttcaaaagactatcttttctccaatcgtctttgtgcctctgttgaaaatcaattgaccatatacacat

SEQ ID NO: 119354 - DNA, 455 bp, Homo sapiens
tcatactcatcttgatattccccacagtgtctagcacagttacttgcacctaacaaacactcaataaataatagttaattgctaaactggacggtgccgacttgtcggttttgcatataatccgtgactagctaggaggcagaaggggagacagataccggtggagaacacctcagtgtgctagttgatccatataagtaacttatacaaagtgttatacttgttgagccccgatcaaagttctaaagctgattaacttggaatagtaaatcctattcattacacattctaggttccaacaaccagattttacagccttaacaaagatgtccagagtggatccattctgggggtaggtggtgatgggatggctggggtcacagagaatagaaagatgactaataataagaccgttgttttaccagtccagaaaaaaatgggaacttagaccaata

SEQ ID NO: 119355 - DNA, 112 bp, Homo sapiens
gcacagggtctgagcagagatgtgtgcatagctgggaactcgagactgaggcctggctttgtggaagacaggcaggaagcaggaagcagagccacagttttattagagttcg

SEQ ID NO: 119356 - DNA, 732 bp, Homo sapiens
cttgtgtttttagtagagacagagtttcaccatgttggccaggctggtctcaacctcctgacctcaggtaatccaccccccttggcctcccaaagtgctgagattgcaggcatgagccacctcgcccagcctaggttcttttattacagcttttttgcagggaagtttgtgtatactagcaaccttaaagatatttacccacattagtacagtaagttcataatgtaagtaatcaaagatatgcaaaaagatttctcttaaaaagtagtttagcctctaacaggtaaagcacttggacgttgtgaattcctgttagattcatcagagaattgaggtcacacttgagctggaaactgaaggcaagcagatccatagagtcagcttactaccaacagaaacctctaagaacccaccactggagccagcttcaggtaggaatatttaaagggtaattaattgctggaatctgagtgtgaactagcttgagagataacaactcctgaagagccagccacggagaagcccatacgcttttgtgagttttaccttgaggaactctgccaggttctcacagtgaagatctaagaaaaatgttctcccctcttcctcattgggagggaaaagtagccatttttagatactcccagagcatttcattctccttaacaaaggcctgcacagaaaggaaacttttttactggagcccagccaccctagggggatggtcgattc

SEQ ID NO: 119357 - DNA, 243 bp, Homo sapiens
tcacacccacatgccacacaccaacaaatccatggtcttatccacttatgtctaggaaggcctagagctacttctgggatgaggttggtcctgggaagggaaagccaggaagtgaggctgggagtctgagggcaagtctctctctccctctcgtgccaaaccccacgttcagccctttcaaatagttctacccttggaggaggttaagaaagaggaaaacggggacgggcgcagtggctaacg

SEQ ID NO: 119358 - DNA, 638 bp, Homo sapiens
aggagacctaagtctatatatttaaaggacatattctgttaacactactggacttgaaatataataaaggactcctcaagcaggcaaaaggttaaagacccttctaggggaagaaaaataaggtcatccttattagctctacattaatataaaatgctagagtgttttgaagcaataaccacaacctgtaaagaatatgatccctaaattttctacccagataaactgtaaatcaagtaaaaagcagttgaaactgtaagggaatactacttttgcttttcagattggcaaagatcaacaagtttgataatacactatgttggcaagaatatggggacacaggccaggtgcagtggctcatgcctgaaatcccagcacttttggagctgaggcaggcagatcacctgaggtcaggagtttgagaccagcctgaccaacatggtgaaaccctgtgtctactaaaaatacgaaatttggccggtcgtggtggcaggtgcctgtaatccagctactggggaggctgaggcaggacaatcacttgattctcttgattctctgcctgggaggtggaggttgtagtgagccaagatcgtgccactgcactctagcctgggtgacaagaacaagacttcgtctca

SEQ ID NO: 119359 - DNA, 392 bp, Homo sapiens
tttttgtatttttagtagagacagggtttcaccatgttggccaggctggtctcgaacttctgatctcaagtaatccacccgcctcggcctcccaaagtgctgggattataggtatgagccaccaagcctgacctgtttggcattttctaagttccgggaagatgttattcacaactgtcaaagtactatcataggaaggaaaaaaattggaaagagagattggattcagatcctagaagaccttacttttttggctaagaagtttggtctctattcagcagacagggaaaatcaataaagaatttgtaagatgccatttagctttgaattcttcagaggaaaaacttgagtggtacactcaagttagtttccatgtaaactttgtgatataa

SEQ ID NO: 119360 - DNA, 183 bp, Homo sapiens
gcttttaggtgaatagtattgtcatgattgccatcgctactcaagtcacctgccgatagccaggatgtcccacctcagttaagctgcccggagaggccaagggaatggaagctcctactcctatggagacactctaattgtggaagcaaaaggggatataaaggcaatgtcttaggtctcaat

SEQ ID NO: 119361 - DNA, 516 bp, Homo sapiens
tacagtagtcccccttatcatcatcccgtgtgtatacagtagtcccccttatcctcatctggtgcgtatacagtagtccccccttatcctcatccggtgtgtatacagtagtccccccttatcctcatctggtgtgtatacagtagtccccccttatcctcatctggtgtgtatacaatagtccccccttatcctcatccaatgtgtatacagtagtccccccttatcctcatcccgtgtgtgtatacagtagtccccccttatcctcatctggtgtgtatacagtagtccccccttatcctcatctggtgtgtatacaatagtccctcatcctcatcccgtgtgtatacagtagtctccccttatcctcatccggtgtgtatacagtagtccccccttatctggtgtgtatacagtagtccccccttatccggtgtgtctacagtagtccccccttatcctcatccggtgtgtatacagtagtccccgcccgacggtcggggggttccataaggg

SEQ ID NO: 119362 - DNA, 323 bp, Homo sapiens
ctggccggcactgtgtgtccagacccagcgtcccagacgtgttggggccaccagaggaatgtctgaaaccagagccattccaaaaacccgaagcctggggttttccctgccccaggtcgggctgagctcatggctgtgagcaggagctgtgggtcctgagggaggaggcggtgctcagcccctggggaggcagcagggaccaccactgcgaagcctgcctgggcaggcatcccccatgagaggcaggcagaaagcccagactccagagggccacattcctgacttggcttcgatttggagctggtggtggtggtctctctctg

SEQ ID NO: 119363 - DNA, 692 bp, Homo sapiens
taaataaataaataaataataaaagtgttttacgcaagtttaaattagttgctaacacttaaaaatggagagatttcaaacagtaacctagatttccagcttctcttgaaaataagtatctggcaagattgggttaatcatcgaataaagcagaaacaggctggagccaagcaatagctgactccttcggacagggctctccacttggccacagcacaaatccctccaactccctaaagattcctggctcactgttctgttttctcggtaataatttagggtgtcctccctgccgatctcagcacctttactcccagatacatatacagtcttggagtcttctgtctgaactgtgtacgtatctttccggggtgctagaaacattctgtctcttgatctattagtcacattaagtatatatatatatatatatatatatatatgtaaaattcattaagctatacattttaagatttgtacactttactgcatgttaaacctcaactttagaaaattagaaggaatgaatgggcaatctcctgccagacattctctgtatgtgtctgcaatggctggaactgcagcaatcttgtgaccatgaggtaaactacccaacttagtcccatttgttaaaaatggcagaacagtgagatttatgatgtcaccaagggtattaaattaaccaaacacga

SEQ ID NO: 119364 - DNA, 465 bp, Homo sapiens
aaggaggcaacatcgacggaggggtggactctgggctgaaagaagagcatgggggaacacagcattgtttgggaaataaacaaatcggtgggtggagctctgaggtccctgtgggatgatggggatggaggcaggagaggcaggcagagaccgtgaaacctaccacccaggcccaacttcaccttaaaggtcatggagagccacggaggatttgaagcaagggagtgataaagagccactcagctagggtccaaagaccaaaacactgggatttagggaaaaggcacagataagatcaggtaccacaagagagggccagtccagcaggttggggaatgcacaggcctagggcttcagggaactatcccgggtgcagatacagatcagagctgccctgctcagggtccatgctggagttctgctgtcatgagctgtactgtcccctcaaagctccagcgttgaagc

SEQ ID NO: 119365 - DNA, 635 bp, Homo sapiens
attcatatgaatactatttgaatgctaacttggctaggtattgaggatatagtagtgaacaacataccaatataatggataatatattctaatagaaaacaaatgaatagctagctaacttaaacaatgatatttatgatattgggagagaaaaactataggatgctgacctgacctggtcatgagaatggacaagatgtcactgtggttaagatggtttaatttgatatcttaataatgtgtaggagtatggtggacaaaagaggagaaatttggggtgggaaaccatcatgtcaaggccttgaagcaagaaggagtagagggtagtccagaaactaaaggtccagtgtgactaatatatagagacagcagtatgtaaattatttttaaggaaaattccaatggggagaaacttgataaattccttgcagaattgataaattgctctgtagatataataaacctatatgttaatagtgaaaaaatatccgtcctgttgcagtctcaaaatcaaacaggttattatttttaatgtcactactttgattgcaaaaatatctttacttcacatatatttgattactagtgaagttaagcattactacgggattaaccaatagcatatactttttggg

SEQ ID NO: 119366 - DNA, 1553 bp, Homo sapiens
gaggacagatgggagaggagcacggctgggggctgaggcccagccggcaaggagagcgtggagtcactgtgaaggaggggctgcggctgcagagacgctcaggatccagggatgggtctttgagcagtgaagaggagattacacatgctgtgacttggttgtaaaaataaaggaatgtaagaagagtgaggaccccaccacacctgagccctccccagcagcaccctcgccagcaccccgcgatggagcagggagccctggcctgtccgaagactgttctgagtctcagcaaacgcctgcaagatctttgaccttgcaagaagcactggaagttcgtaagcctcagttcatttctcgctcacaagaacggctgaagaagcttgaacacatggtccagcagaggaaagcccagcggaaggaggacctgaggcagaagcagagcctccttcccatccgcaccagcaagaagcagttcacgattccccatcctctgagtgataacttgttcaaacccaaagaacggtgcatttcagagaaggagatgcatatgcgatctaagagaatctatgataacttgccggaagttaaaaagaaaaaagaagaacaaaggaaaagggtgatcttacaaagtaacagactccgtgccgaagtcttcaaaaagcaattactggaccagctccttcaaaggaatgcggtctaaccacaggctgccctgctgaccacactacctggacctgggaggacttcgaatgctggataagccattaaacttagcattatcttcatcatgggaaaacacttattttactttcgattttttttttccataaaggaaaacatcacttcctgaattactgacccaagccaaacagaaacaataaccctcgagaaaataggtcaacaatctgttgtggggaaaccacctccatgtaacccactggatacagtccccttaatgtttttgcttctaaattgtaccttttgcttctgatttcttctcccctgctgtttcctgcccatcagagaggcctgatacaagcaagtttgtttacatccctggggaatcttttacatcaaacttttgggatccaaatccatctccttttaaatttcaatctcagcacctgccagttatgcaaatgccaaaatgtgggtcatcatatagtatatttgaaacctttctgaacatgtacaccacccaatgctagaggctgacttggaaaccggtgggtgcaatgcccgaggctgtggaacaatcagcccatctctttgtgacctggagcagtcagagggccctcagtcaccccgccccattcctcaccagagaaaagaatccatttctatggaagctctgacgtaacttcagtgttttctacaatactcctcctgccccgccccattaaaacagttcttttgttaagaaatagcctaatggtccaactttgctgtctgttcttccaaatgtttataatacacattatttataaatatgtctgtttgggaagctaagaacaagctagtttttacaacacaaatggaaataaatgcaatta

SEQ ID NO: 119367 - DNA, 1581 bp, Homo sapiens
cttggagtggttcttttccattggaaaacacagaattggcaaatgtgggagctaaccaagtcactgtaagaaaaggggaaaaggaccatacaactcattgtcacgccagcgatcatgccaaccaactgtccattcacattcctggctggagttacagggcaggagattacacatgctgtgacttggttgtaaaaataaaggaatgtaagaagagtgaggaccccaccacacctgagccctccccagcagcaccctcgccagcaccccgcgatggagcagggagccctggcctgtccgaagactgttctgagtctcagcaaacgcctgcaagatctttgaccttgcaagaagcactggaagttcgtaagcctcagttcatttctcgctcacaagaacggctgaagaagcttgaacacatggtccagcagaggaaagcccagcggaaggaggacctgaggcagaagcagagcctccttcccatccgcaccagcaagaagcagttcacgattccccatcctctgagtgataacttgttcaaacccaaagaacggtgcatttcagagaaggagatgcatatgcgatctaagagaatctatgataacttgccggaagttaaaaagaaaaaagaagaacaaaggaaaagggtgatcttacaaagtaacagactccgtgccgaagtcttcaaaaagcaattactggaccagctccttcaaaggaatgcggtctaaccacaggctgccctgctgaccacactacctggacctgggaggacttcgaatgctggataagccattaaacttagcattatcttcatcatgggaaaacacttattttactttcgattttttttttccataaaggaaaacatcacttcctgaattactgacccaagccaaacagaaacaataaccctcgagaaaataggtcaacaatctgttgtggggaaaccacctccatgtaacccactggatacagtccccttaatgtttttgcttctaaattgtaccttttgcttctgatttcttctcccctgctgtttcctgcccatcagagaggcctgatacaagcaagtttgtttacatccctggggaatcttttacatcaaacttttgggatccaaatccatctccttttaaatttcaatctcagcacctgccagttatgcaaatgccaaaatgtgggtcatcatatagtatatttgaaacctttctgaacatgtacaccacccaatgctagaggctgacttggaaaccggtgggtgcaatgcccgaggctgtggaacaatcagcccatctctttgtgacctggagcagtcagagggccctcagtcaccccgccccattcctcaccagagaaaagaatccatttctatggaagctctgacgtaacttcagtgttttctacaatactcctcctgccccgccccattaaaacagttcttttgttaagaaatagcctaatggtccaactttgctgtctgttcttccaaatgtttataatacacattatttataaatatgtctgtttgggaagctaagaacaagctagtttttacaacacaaatggaaataaatgcaatta

SEQ ID NO: 119368 - DNA, 383 bp, Homo sapiens
aaagtttcttttcattttgagcaaagccatcctaaccatcagaagcctacggaatacctccctggcataattagctggtcctgaagtctggctgaatgcaaacgctcttccttgtgaccagggcggccgggggctctgtgatgaggcatgatcttgtcagcttaacgaggcccattaatagtccactggcgtttctattttcaaaattgtcttctgtgtctaatggtattgaggagccacgtgaaaatcacttggtgccctctaaatgggattctaaatcttctctcctaggagattacacatgctgtgacttggttgtaaaaataaaggaatgtaagaagagtgaggaccccaccacacctgagccctccccagcagcaccc

SEQ ID NO: 119369 - DNA, 944 bp, Homo sapiens
tgagcgaggacctgaggcagagctgccgcccaaagaggagagaccctgtgggggcccccgcagagggtttgcatccatcaccatcacggccagacgcgtgggccccccagcccgcgccctggtgtgggggactgctggggactctctgtgccccaagtgcagggctgaggacacactgttccaggcgcccccggctctggccaatggcgcccatccaggtcggcatcagagatcttttgcctgcacagagttctccagaaacagctccgtggtgcggctgaaggttcccgaggcccacactgggttgtgtgagagacgcaagtactgggtcacccatgcagacgacaaagagaccagtttttctccagacaccccactgtcaggaaagagcccgctggtgttcagttcctgtgtccacctcagggtgtctcagcagtgtccagattcaatctattacgtagacaagtctctctccgtccccattgagccacctcaaattgccagccccaaaatgcacagatccgtcctgtcgctcaacctcaattgtagttcccacagattaacagcagatggagtagatggcctagtgaacagagagccaataagcgaagccctgaagcaggagctcctggagggagaccaggacctcgtaggccagcgctggaacccaggtttacaagaaagtcacttgaaggaaacccccattcctcaccagagaaaagaatccatttctatggaagctctgacgtaacttcagtgttttctacaatactcctcctgccccgccccattaaaacagttcttttgttaagaaatagcctaatggtccaactttgctgtctgttcttccaaatgtttataatacacattatttataaatatgtctgtttgggaagctaagaacaagctagtttttacaacacaaatggaaataaatgcaatta

SEQ ID NO: 119370 - DNA, 1589 bp, Homo sapiens
tccaagcgatgactgtctgtctagagacctttctgagcccacagagagacgacatcaaagcttcctgaaacccagaatcctttttcctgggtttctttgccccttacaagatgtatgtgcatctctgcaggaagacaatggtgttcagatagaaagcaagttccccaaaggagattacacatgctgtgacttggttgtaaaaataaaggaatgtaagaagagtgaggaccccaccacacctgagccctccccagcagcaccctcgccagcaccccgcgatggagcagggagccctggcctgtccgaagactgttctgagtctcagcaaacgcctgcaagatctttgaccttgcaagaagcactggaagttcgtaagcctcagttcatttctcgctcacaagaacggctgaagaagcttgaacacatggtccagcagaggaaagcccagcggaaggaggacctgaggcagaagcagagcctccttcccatccgcaccagcaagaagcagttcacgattccccatcctctgagtgataacttgttcaaacccaaagaacggtgcatttcagagaaggagatgcatatgcgatctaagagaatctatgataacttgccggaagttaaaaagaaaaaagaagaacaaaggaaaagggtgatcttacaaagtaacagactccgtgccgaagtcttcaaaaagcaattactggaccagctccttcaaaggaatgcggtctaaccacaggctgccctgctgaccacactacctggacctgggaggacttcgaatgctggataagccattaaacttagcattatcttcatcatgggaaaacacttattttactttcgattttttttttccataaaggaaaacatcacttcctgaattactgacccaagccaaacagaaacaataaccctcgagaaaataggtcaacaatctgttgtggggaaaccacctccatgtaacccactggatacagtccccttaatgtttttgcttctaaattgtaccttttgcttctgatttcttctcccctgctgtttcctgcccatcagagaggcctgatacaagcaagtttgtttacatccctggggaatcttttacatcaaacttttgggatccaaatccatctccttttaaatttcaatctcagcacctgccagttatgcaaatgccaaaatgtgggtcatcatatagtatatttgaaacctttctgaacatgtacaccacccaatgctagaggctgacttggaaaccggtgggtgcaatgcccgaggctgtggaacaatcagcccatctctttgtgacctggagcagtcagagggccctcagtcaccccgccccattcctcaccagagaaaagaatccatttctatggaagctctgacgtaacttcagtgttttctacaatactcctcctgccccgccccattaaaacagttcttttgttaagaaatagcctaatggtccaactttgctgtctgttcttccaaatgtttataatacacattatttataaatatgtctgtttgggaagctaagaacaagctagtttttacaacacaaatggaaataaatgcaatta

SEQ ID NO: 119371 - DNA, 605 bp, Homo sapiens
gagaagactagataagttatggtgtatttatacaaagaaatggtttatagctgagtaagaatggttttgagaagattaccaaaatatgtacatgcaaaaaggaaggtgtagagaagcatatatattgtgccactttttatatagaataaaaggagaggggataattatttgtatatgcagaaagacatcttggaaagttatatataagtaaatgattcctaaaaatagttgtgatagaactgggcagatgaaagagagcgggaaggagactttcactattaattttaatgttttaacattttatgttttctactatttttgagccatgaaaatgtattaagtattcaaaaaagaaaaatgtgagttcctatgtttaagaacatcgtggtgaaatactagtttatacatcataagatcttcaaattatttttatacaatatcttatgtaagtactgatattgccacacacatactttttgataaaattcacaaagtaattcaaagagaaaaatcactccgtttcatttattttccttctaacatttgtgttgggagtctcatgtaggaagaaataatcccacccaaggtgaagtatgtaatattaa

SEQ ID NO: 119372 - DNA, 716 bp, Homo sapiens
gggagataaaaggttgattgttgcctccagtagaataaaggcttaatggaatgttatattaatcagaatttgtgtccttcagtgcatattactcatttcttgtcataaatttgttgaattaaggttaataagttcccagaaattaagctttggtagatttggtatgctgagattgataaatcttcagtactttttcaagtgcagtgtttaataatgggcaccttgatagcagttaggaaataatgtagaaattcatgagagtgggcttgtcaaagtctacgtaagaaagatacttttccctcatatttccaaattgttctttggttgttatgaagattgttcccttagccttcaaaataacttcaagccaattagaatgatggtttaatattttcaaatgtcattgctattgagttccttcatacactgtgtgctttacgcatagatgtttcaaaggtaaatttctaaatgtatttgcaaaactaatgtagttggcccctgatagtgtggtgtaggaatggttttcataaacatttcagtagactgttttaaagcctggctaaaaattagtcagaaaaagaagtgggaaaagggtgttcatggagagaaaaaatatacaaagaacagagttaggaaagaaaatgatgtattgtaggaagtatgagtagttatgtggctgggcacagggggtgactgttacgaaataatgggaatgt

SEQ ID NO: 119373 - DNA, 360 bp, Homo sapiens
ttgcagctaaatgcagctgactgagtgatccaagacactaaggagcactaagacgctaagaactgtccagcgggacctgccaaaattcctgggtcacaaaattataagcaaataaaatggaatacagcatgaccaatgccagaatcataaagaaaaagatcaacaaattaatttcataagatgtttagcaggccgggtgcggtggcttacacctgtaatcccaatactttggaaggctgaggcaggcagttcacttgaggtcaggagtttgagaccagcctggccaacatggtgaaaccccgtctctactaaatatacaaaaactggccgggcatggtgacacgcacctgtagtcccagc

SEQ ID NO: 119374 - DNA, 780 bp, Homo sapiens
ttcaaatggcttcaatctgggatattcctactttcctgtgttactattctgtatgctaccaatcaatgtattctgaagatataaccactctgtttctcctcccctcatggccagctctgtaactcactcattttagaatgttcttactgcctcacctatttctagtataagtgccatttttaatagcattcacattcctcctctacgaaacagctccttttgcttcagacttaagtttctcttgctagtggcaataatagttgcggttgaaatttccattgtaaactatacttttagttcatggtgccatttaagaaccgttagctcattctgttgaaataaccagtggctgagctggggggaaaagttttataaaaagactatctgctcagcccagagcaaattctaggtttggcaacttgtcaattatttgaaagccaaactgatcccgatgggaattttaaaaacactaaaacattctcttcttctgggtgggtcctctccagcaccttcagtcttctcttcccagctgcgtttttttctatcactaaccagagtggtaactgagggcaaggtctcttgcttttaagaaaagtcattttcttgcccattctgtcttctatctcagccccatttcttctcccctttgttggcaagctcttcaaacacatgatatcaacgtttgctcttcctgcttctagctacccattcccttcagaactctggcaaaacaaactggcttcttttgaaactgccttcttaaagggcaacgggataaaa

SEQ ID NO: 119375 - DNA, 473 bp, Homo sapiens
aaactatacacaccacataagccaatgaaattaatgtttgtagagaaagtaatattaacaagaggggaaaacactttacattaaaactttcagaaaatgaaaattctacctaatcttttccaaattatactgcttgttctgcaacattagattatctaaatagttttactgggtatactacaagagtagacataaagataataatttagagaaaagaggcaagcaaaataaaaagcttagcaggcagggatggtgaaaaaatataaaacacaagaaaaagaacaaagctgggaataaaggaaagaacaggtaaaatagattgttacacggaataaaaattgtaatataaatacagttcatttgtcactaaggtaaattctcaaattttcagttaacaaagtatttcaaatgtatacattatttaaaaaatttaaaatatggtttacttcatggcaacttttaaaatgagatac

SEQ ID NO: 119376 - DNA, 330 bp, Homo sapiens
tttttttccacgaactaaaatacctctttttggtatctattgactctttctctctctctttctgtctctctttcaccttgcacctctccctaatgctctctaaatttgtccagagctttctttttcctagaaatccagagagcaaagtcagagcctggcacctgcagataggataacactggtgtctgatggtgaggctgcccagtcccatcaggagcctcagccaaggaggggcctgggcacactcaggtccccatggttgtccattgaatggagtgaggatcaaggtgggaatgactgggtggtggctgccactagcccaggaacatg

SEQ ID NO: 119377 - DNA, 767 bp, Homo sapiens
aattgaggggtattaatatttttagtctgtctatagattacctaagtaatcgatttcttgttctaccaaatatcaacagtatctcttaatcctgcactgtataagataaggatattaaaattattcctactctgcagttccccctccagcctatcgcttctgtcatccatgcgttgacttttaaaatgacaaggccgataacatttgtattctatttgtaaccataccaagccctttttgaagctttttctagagattaactctaaaatttgaagaataacaaatagtgttttccattattgggatgatgtagatattgttcactgaaggccagggaggcaccaggactccatcaactttcttgtacatgtttctttctttttctggagcttctagccatctttttccccttgtttcctctattatagctgtatctatttccctgcctctccatcggtcaggcattccctttagggtttctcttcatcatcttgctccagtctggctgccctcttgctgggtcatgtggctgttgttttggggcttcttttctctgccttctgaggttggattcacctttgcttagaacctatagcttcttttgtgtttacttcttccttttacttccacccattctcaagtaaataccaagaagtgacaggtgggaggtaaggttttgagtccttttgtgtctaaatgactggattcttcccttttacctgattgttggtgtgacgggttgttggattgttgtttggactgttggc

SEQ ID NO: 119378 - DNA, 342 bp, Homo sapiens
ggagactgaggcaggagaatcacttgaacctgggaggtggaggctgcagtgagcctaggcagattattttgtacctctttaagactcagtttcctcatctgtaaaatgtgggaaatagtctcctgggaaggttggtttaaggattaaatgagataaagaaaataaaactgattttggtacatagtattaaatgaaattatcacatgatgataatgtgttgctgagttgaaaaatttggttgcggaatagttctcatttgtaaaaaagtgtgatacgtatacacacatgtatacaggagttctgaaagggtatataccaaaatgtcaatagcagttacccttg

SEQ ID NO: 119379 - DNA, 465 bp, Homo sapiens
tttttttttaaagacccacgcgaagagctgagggaaaactgtcagggcaaaaggaacatactggtgaattaaaggaacagaatgaagacatgtatggctggaagaaaaggagaaagagtgaagcgtgatgggtgggaagggaaacaagagtcaaattgtgtaaggtttgtaggccacataatgactttacattttatactggtatgagaatgggaagctgggtttggagcaagggtggaacttggtatgatttatatttttatcagatcactctggctgtgctgtagagaactgattgtaggagaccaatagtgaaaggagggagactagtttagaggcttattacagttagcaggtagaggttgcagtggcttggtctagactattaaatatggaagtagaagaaaaggtcacatttaggacattttagaagtacagctgacaggacgtcttgatgaactaggt

SEQ ID NO: 119380 - DNA, 352 bp, Homo sapiens
ttttttttgtagagatgaggtccgaccatgttgaccaaactggtcttgaattcctggcctcaagtgatcctctttcctcagcctcccaaagtgctgggactacaggcatgatgagccacagtgcctgacctccactgacttttattcaaatactagagactcgttttctgtatctctagtaactcttaaaggcagctagtgatgcttaatgctgactcttcctcagcctttcccctggccaaatagctaatggcttgtgatctattctagcagagaatttaatgatgagattacattcagagaaggcatggggttagggaatccaacagaggctctgcacccaggggtttgt

SEQ ID NO: 119381 - DNA, 536 bp, Homo sapiens
ttccattccaagctccacggggctccggcaggccccatgtcatgtgcagatgagggattagggttcctgcctagcctcgctgctctcaggccctcatgggctcctctccccaccccccatgcagccggcagaccctgctcccacccagctgttctcagtgtttctcatccttcctggatgacgccctacctggggcacccattcctgtggcaccccagcccttcactgcagcacgcatcctgtcacctccacagtgagaccatcctggaaccatgatcagcccatcagtttcatccaccctcctcctagcccattttctgtgcttatttattgttccccaaactcctgcctatgatttaaaactaagtgtgagtctagtctgttacaatgatatggattccagatcttcggaatcaaaatgctccaaggtttaactcacaaacttgtcttctttattttgcattttatgtgaatgcctttggtaataccatcatcggttgcgccgatggagggagcaaagatctcatggtgttggt

SEQ ID NO: 119382 - DNA, 368 bp, Homo sapiens
atgattgtggcttttgctgagcatatttcttttcgacgagttgaagatgacaatctctcaataccttactccatagactggatgtaagcgtcaaaagaggatgaaaaggtactttctgaacggacaggtactctggggtgatgggttgggagattctctaagcctcaagaacagcgtttcatgaaacgggcttataaaatacagcccatctcaaacggattttaaaaggcacccagttactttaaaatacccaatacaaacaccaagacgggctattttaccaggtcccctgcagaatgtgaaggggcttccagcgctccaagccggctttctaatttaagccaagaaccgaaaaggagcgaaggcgg

SEQ ID NO: 119383 - DNA, 511 bp, Homo sapiens
caaggatcaaacaaaacaacatgttcagaaaaatagtgctcaaaaccatgcttgattcaaccaggtggacagtaatggagctatacttggtttgttgtttttgttgttgttgttatatgtgtacaaagatttaagggcccttattgcaaaatgaacagcaaaatattgggaattgtttaaatgtctaataatagcatttggtggaaattatgcaatgtgtataagatatagtatctatatagccattagttttaacttatgaagaatattgaatggcataggaaaaatttcatactaaattaggttaaaagggcggcctacataaacagcagcgtgatccgaggtaggtaaggaaaatctgtatctgtaaacgtgcagaggaaaaaagcccgaaaaactacctaccagtggttctctagctggtggaattgtcagtgattttaactttagctgctgagtctttttgtacatatccaaatttttaaaataatgaactcccacaactttaatc

SEQ ID NO: 119384 - DNA, 416 bp, Homo sapiens
ctgtctcccccacttctatctctgtctctccatttctctctgtctctgtctctcccccacttctctctgtctctcctccacttcctctatctctgtctctcccccatttctctgtctctgtctctcccccacttctctctgtctctcccccacttctatctctgtctctcctctacttctctctgtctctgcctctcccccacttctatctctgtctcttccccatttctatctctgactgtcccccacttctctctgcctctctcccaccatttctctctgtctctgtctctacccccatttctgtctctgtctctccccccatttctctccatctctgtctgtctctcctgtctctgactcctcctctctccccagctccctggacgaagccctccggggcctctgcggtccct

SEQ ID NO: 119385 - DNA, 782 bp, Homo sapiens
agagcttaccaacgagctctgtcctgtccttattccatccctaataacatagcccccagtggaacaactacaaaggcattacaaggccttacctcttgcaattgttataggtgtactcattcttgtaggatgctgcatcataccctgtattcatggattggtgcagagacttatagaaacagctctcaccaaaacctttaattctcccccaccttactcagataaactcctacttttagaaaaccaagcagaacagcagagtcaagacatgttaaagagtttgaagaggaagaattatgaaaatcaagagggggaagtagtaggaaacattgagttcctcttcaaagatccattgtcctctattttcaaagcctatcttccttgcctccttgcccctagttatggtaaaaaatttccagccattcccaatctgtaatccacatccattcccaatctgtaacccacatccgttcccaatctgtaacaatccacatctgtgcattacttggcacccttagttccgaaactgctcttcccaccgctgtagctcccacccctgctccatttttatgtggccaatcagaatcagcttaggttgtgcagtctgaccccagccaatggggactggacacagtagtagggactgactgtgttagggataaaaacccattcccttctttgttcagtgtgctcttgcagtgacaagaatgagcagcacccttctgcagaagcacatttgccttgctgagaaatcctttatttgaatgctcattttctttaca

SEQ ID NO: 119386 - DNA, 253 bp, Homo sapiens
tcactgaaggttccctgtgtggacagcaacctttgcagaatccaggagatcatacagtctggcacttagcacagttcctggctgtggtaagcaatcaatgaatgccatttcttgttattgttccctgaatagcaagatgatccagacttagagagctgagaagcttgagactgtgtgttacatgaagaaagaaagagccaaagaattagtggaaaattaagatgagagcatttggctattgtgtcacctatgg

SEQ ID NO: 119387 - DNA, 356 bp, Homo sapiens
tgaagccatcctcctgcctcacctcccaaagtcctgggattacagatgtgagcaattgcagccagctgacaaactattttgaaatgactgtggtttgcttatgcaataatcctgtggtgtcaattaaaacctcaaaacactagtgagtttcccttttttaaagaaatcttggcatttactctggtttttttcaactaaaagatgaaattttaatagagagtatccgaaatgaaagggattatgggtgatttttattttctttttatctgcgtttttaaaattttaaatgacagatgcatatttctactgaaataacaatttggcttttattttaatgaaatgacagcaaaatgaga

SEQ ID NO: 119388 - DNA, 200 bp, Homo sapiens
cttgggaggctgaggtgggaggatcactggagcccaggaagtagaggctgcagtgatctgtgattgtgccactgcacaccagcctgggtaacagagcgagacctggtctcaaataaaaattttttgaaagaaaattatttttttaaaaaaggtatgtgtctacctcagtaactggtgtattattagatgttgaagtgaag

SEQ ID NO: 119389 - DNA, 127 bp, Homo sapiens
caactttccccacattaggaagagcttcttgaaaatacagcaagggcaaggtgcaggaaagcaaaaggttacatcatatcaggcgcagagagagcctagatcttcctggaatctaaactgatcatcc

SEQ ID NO: 119390 - DNA, 935 bp, Homo sapiens
atagcacagtggtaacagtagtcatgatatcagcatttgtttgtttgcaccagttcttcaagccctgattctcacagagcgacttgcagaaggccagttgtgcacacacagtgggttgcattgcaggaaaggaaccctgaatataaggtacccgaatctcttatactggactgcaagcatgcctgctttttgttcttaagggagatgctgtctctgtcttccaagtctgtaagcatacctgccctttgctctggaggaagacactattctctaagtctattcactataaaaatatccttgtaatgatagtccagaacaaagatagtcattgcctctgcttaaatcatgtacagaattgcaagagacccacggagaattatctaccaacaatatgcatcatagaaatttagaaaacagaagaaaagtcactacagtcctaccacggtcttactgttaaggtttttgaaatatatagagttttagccataaatataaatgatttcatatagcatgtattttataaaaattggtttatactgtacattctatcttgtgatgtgatgtttttcacctgccactgtatcatgcccatttccctctctctgctgtctgtattcttcttgatgtggtgaagcatctttgcccaatcttctgttcccttgtgccctgctctctgcctaacatttaattgtactaagtatacaatcagagttttagaggttgaagagcagagatttcagatcatctggtccaaccttttcatttaacatgtgtgttaactttctcatttaacataattacatttcactgagaccttctggaaccaacaagaaaaccttaatatggaactgcaatgatgggaatttggggcattgaaagaagttgggttggcaacattgcttgggtgatttccttgctaacattgtactgtaagg

SEQ ID NO: 119391 - DNA, 3037 bp, Homo sapiens
  misc_feature (900)..(900): n is a, c, g, or t
  misc_feature (968)..(968): n is a, c, g, or t
  misc_feature (974)..(974): n is a, c, g, or t
  misc_feature (1064)..(1064): n is a, c, g, or t
  misc_feature (2365)..(2365): n is a, c, g, or t
  misc_feature (2384)..(2384): n is a, c, g, or t
  misc_feature (2406)..(2406): n is a, c, g, or t
  misc_feature (2412)..(2412): n is a, c, g, or t
  misc_feature (2513)..(2513): n is a, c, g, or t
  misc_feature (3027)..(3029): n is a, c, g, or t
  misc_feature (3031)..(3032): n is a, c, g, or t
  misc_feature (3034)..(3037): n is a, c, g, or t
atcacagcactgggcaggaacagcacggccagggcaggaggacaacaacctccagggaaggggcaaggaagcctggacagggcaagagcgtgtcaagaagctgccgacaatgtcaaccaggcagataaggccgaggagtccctcgtggcatttcacaacaaggtgacatttgccagatcagtttagccgagctggggcggctgccagggttaaagaggaacaaggcgggagggtggggaggatgtggaaggagagagtgcagacagctcttttaagaggtttggctgtggtgggccaagatgaccgccaagctcagctgagaggccagggtgtgggtggcgggagaggcctgggaggcatctgctggaggatggtgggagaagatgggagaagttgggagggggccgtaaggagagagtggggtgaagggcaggggcaaatgcagaaccgtggagctggagctggcctagagtggggcaggagcaggtgccaggcacctccttgaaacagccaccctcactccgtaggccggaaacatgatgcaatcacatgtcatttaatcatcataacacctttgagaacacattattacaggcatgtttcagatgagggtactgaggctcagagaggatcagtgacttgtacagagtcacccagatggaatggcctggactgccactccaaggatcaaaggccaaagtgttccctgctgacccaccagcactccccagctcctctcatgcgtcccccatcacctgggctcccatccagactttgccgctccaccagctgtgtgcctccgggcaagacacaacccttctttgagccttggtttccccatctgtcaaataatagcagctgggcacagtggcttacacctgtaatcccagcactttgganggccgagatgggtggatcacctgaggtcaggagttcaagaccagcctggccaacatggtgaaacctcntctctnctaaaaatacaaaaattagccaggcgtggtggcgggcgcctgtaatcccagctactcaggaggctgtggcaggagaattgcttgaacccnggaggtggaggttgtggtgcgctgagattgcgccactgcactccagcctgggtgacagagtgagactccgtctcaaaaaaataataatagcaaccacaagctgcaaagatcacagtgttccgaagctggggtgcaaggctgtgcggggggaggccatggggaccgggaagtaaatgtcttcgtgccaggcaggagaggccattagcacccttggagggggcagagcccatggcagggggctgagtgggtaactggagaggcagcaggcaagggaggggtttttcccagctcagaatggcttgagctcatttggatcagcagggagagaggcggtggagggcgaggaactgttttgccagagtacagaggcaggccctcatgattctgccactgcctcctcagtgcagggccccacatggccttggtacacacataaggtacacacaccatcctcagactctccaggtggccctgccacaggaagggagctgaggccctgggctaaagggctggccacaggtcgccctttgaacttgagactgcctaaatccaaagctgaccctgagactggaagaagaacccctcccaacggaggccttaaaggaaggaggggaggggaccagggttccgggggtcatggtggaacaagaacaagctcgctgactgacagcctgggggaactcaggacaccagcaccagccacttgggagattgtgcggggggagccacttctgagccagtgaggaccccaggaccagcctgggccctcccgctcaggtttttggagtactggaagatcaactgagatttcacccaagtttcttgccactgacaaaatgaccactacttgggtacgaggcagattaggtaggcctctcagctgcaattcaagctagtgtaagcaaaaacggggataattgaactgaaaaagtgaatggcttcagacctggctggatccaggtacccatggcggctaccgggaccctctctcatgctctccacctctcggctctgctgtcctcaatgctggcttcattctcagaaggctctccccactgttggcaaggatggcccccagcagctccaggcccatacctggccagctcagcagccccagcggacagagggagcctttcttttcttttttcttttattttttatttatttatttattttgagatggcgtctcgccctgtggcccaggctggagtgcagtggtgtgatctcagcccactgcaacctccgcctcccggattcaagcgtttctcctgcctcagcctcctgagtagctgggactacangcatgcaacaccaggcccngctaatttttgtatttttagtngagacngggtttcaccatgttggccaggatgatcttgagctcttgacctcgtgatctgctcgcctcggcctcccaaagtgctgggattgcaggcgtgagccaccgcncccggcaagggaggctttcttaatggcgccagcgaaagtccgagggccaacgcccattggactaacttgggtcatgtgtctgtctctgaagtagtcactgggtctgacccttcctggcttggacgacatactcctgtttagagctgaaagtggaaagtctgccagaaaacgggaggcggagcaggcctggcagggaggtccatggcacttcctcccctcatgcccagggccccgcccccgactccactcccagacctcagagctggagcatctgcaacttctgatcagactccagcccacctcacccctgcatgcagaaataggggtgctacaaggggaagcggggagggtgtgtggggtaccgaaatgacctgggacagacctgggttcccattcagactttgtgtctgaatgggacacaaagctgtgtgtctccgggcaagtcactgactctctctgggcctcagtattcccatctgtaaactaataataacaatcaacacattgacagcannnannannnn

SEQ ID NO: 119392 - DNA, 371 bp, Homo sapiens
acagaaacaagtccagagatacacccataaaaatatggtaaactgatacttgacatgtccaaaaacaatgaatgcaaaaaggataatcttttcaacaaatgggattggaacaattggacattcacatactctccccccaccaaaatctacttataccttatactttatagaaaaattaactcaaaagggatcatagttttaaatgtaaaatgtaaaactataaaacaagaagacaaaacatttgcgatcttgggttaggaaaagagttcttagatgtgataccaaaagcatgaaccatgaaagaaaaaaactggtaaactagactgaatcaaaatgaaaaagatttgctctggaaaaaaaaacacagttaa

SEQ ID NO: 119393 - DNA, 815 bp, Homo sapiens
agacagggttttactctgttgcccaggctggggtgcaggggcatgaacatggctcactgcacccttgaccttctgggctcaagcgatcctcttgcctcaggcttctgtttagctggggccacaggcgggcaccaaaatgcctggctaatttttttgtttttattttggtagagacgaggtctcactttgttgcccatgctgttctcaaacttctcggctcaagtgatcctcccacctcggcctcccaaagtgctgtgttacaggcataagccactgcacctggtctctacttcgttcttactcttcttcccgactctgtgatcagctctttttcctcactgacatctcttatcaccagcagaggcctaccactagacaccagtggttctacttccctggttgagccctggtagatacggttcctgagaacttcatggagcagtttctgcaccaaacctgccctctctacctctggacctctacgtggaaaagagaagtccgtattggaagccttgactctggcccagacatttctgctgtacctcatgtagggtgagcccaggacctgccacactgtgccagcctcgcccaagccaccccccagccaggacgcggtctttcctgactcagcaggctgaggcacctgaggctttcattttaattatgaaccacttcaaagcctttctggaagcagtctctgcaataaccaacctgggttctctcctaatgtggggattgtcctggagcccaggccttccaaggctcctccgcccgccaacatcacctacctcatcttcctcttcagcacatcccca

SEQ ID NO: 119394 - DNA, 592 bp, Homo sapiens
aaaatcactatatacagattataaaataattacattaatctctttgaacaaaccaaaaaagatggagtcaaaagcatgaaaaaggcacaaatgactgtaaaaattggccatttatatttgaaagagaagaaaaatgaatttctggcaaggaaaatcataccaatcaaatttttttttaaaagaatggtttcattaagctgaaaaaatgaacagtaggaacaattaaaaaggcatggtgagatttgagtcaatagttacaaagttttggttagtaaggatgaataaagcatgggatctattgtacctcattttggctacaattaataatgatgtattatatactagaaatttgctagcagggtagatcttatgagttctcactacaaaataatggtaactatatgagatgatggatatgttaattatcttgattgtagtaatcgtttcacaatgtatacatatatgaaagcatcacaatgcacaccttaaatatttaacatttttgtttgttaattatttctcaaagagctagggaaaaagacttttgcagtagaggagggtacatctaaaaattagattgtagcacagagag

SEQ ID NO: 119395 - DNA, 193 bp, Homo sapiens
agtattaagaggcaaggaccaaatgaagtggagctgtggaaaacattcttacctgaggaatgagaagaggagcttccaaaaagggagctgaagaagatgatcagagaggtggtgtgagaggcacccatacagaacaggtgttttcctcgcctctgcaaactccatcttgtccattaccctgaatggagtgtca

SEQ ID NO: 119396 - DNA, 393 bp, Homo sapiens
cagggtctatcaagacaggtgaagggaaatgaagttaaggcctgcaaactccctgtgtgttcttggagaaggaaagcaagcaaaatatgcaaggtgtgtaacaagcaccagcaactcagtggtggaggagggattccagtgtatttggagaggagaccttaggtggccagggagccccttccttctgtctgtctgttcatctgttcacccatcattcactcttccattcaggtagtccttggccacctgctgtatccaagatctctggctcctagtgcggtgacggtagactggataatgcagactagtggatgatttgacaagttaacttacatggttttggaaagaggcatcacttttatgactctgcaaacccaactcccttatttctaa

SEQ ID NO: 119397 - DNA, 304 bp, Homo sapiens
tagatgggattacaggcacctgccaccactcccggctaattttttgtatttttagtagagacggggtttcaccatgttggccaggctggtctctaactcctgaccttgtgatccacctgcctctgcctccaaaagtgctgggattacaggcataagccgccgcgcccagcctggatttcttactgtgtattagccttgccctcaaagagctttccatctgggtagaagacggccaaggacaccttgttttatttaaccccctcaccaacaactctgtcagataagaaatccaaggaggaacttg

SEQ ID NO: 119398 - DNA, 795 bp, Homo sapiens
tatatattttttaatgttgggagaactgttcagcctgggaagaaacatttggggtggtgggtttggcgggggtgcagggttagaatccacataatgctgatggattgctgagctggagtcctgggtcttgacacaggaatgggactggagagcaggtgtgtaggtgaacttatttaaggctccgtcctccaatacacacacctgagtgatcacccttgagttctcagggacgcagtttaaggcccactcttgtgaaggtgacctgggttggatttagttggtctgttgggatctttagagtggctgtctcttccagcctctaaaggaagagtgtttttcaaaccacaggactcagtatattaggtaattatacgattacctaattgattatgaaataattattttttattttttatattattattattattatttttgagacagagttgtgctcttgttgcctaggctggagtgcagtggcacgatctcagcccactgcaaccttcacctcccaacttcaagcgattcttctgcctcagcctcctgagtagctgggattacaggcacctgccaccatgcctggctaattttttttgtatttttagtagagacggggtttcaccatgttggccaggctggtcttgaactcctgacttcaggtgatctactcacctcggcctcccaaagtgctgagattacaggtgtgagccaccgcatgcagccataaaatcagtttactggactaaaccactgttaagaaagctcacagtgaaataacagacatggtgagatatt

SEQ ID NO: 119399 - DNA, 504 bp, Homo sapiens
tgctttctacaaactgttgaagtaccagagtgaccaacttgtcccagtttgcctgagactttcctagatttagcaccaaaagtcctgcatccagggaaaaacccctctgtccaagggagactgggacattgggtcaccctatgaagcacccataatgttttggccctctttctaggtgctgggatgcagattttagtgtcagttcctgctcttatggggtctatgaccagataggaagacagacaagtgaagaaaactgctttatgacaaatacagcaaacaaacatgagttaataacagctgacacataccgagtgcttatgtgttccaagttgctctggtccttttttgcaaatggattcatttcatcctctcaagagccttatgaggaagaaactatcagtgtacccattttacggatgggaaaactgaggcactaaagtcatgccctggggcatggggcgcctggaggaacccagggggtctagctccagagtctgtgcc

SEQ ID NO: 119400 - DNA, 548 bp, Homo sapiens
tctgttgcccaggcttgagtgcagtggcgcaatctcggctcactgcaacctctgcctcctgggttcaagtgattctcctgcctcagcctccccagtagctgggattacaggtgcgtgccaccacgcccagctaactttttaagtagagatgggtttctgccatgtttgccaggctggtctcgaactcctgacctcaagtgatctgcccacctaggcttcccaaagtgctgggattacaggcatgagccactgagccatgcctaaggtactcttaagtgtcaattttgttaattatcaaatggggatagtaagacctatacctcattgtaatttgtgcaaatcagtaataaatgtatagaagcctatagcagtgtctgctatataaaaggaactccataaatgacattattgtcatttaaaaggcagggataagtcttgcccatctctgtatcctcatgtccactaacttaagtactcagcaaatagtttttgaatatatgaatgaatgaaatgaatggaatgaaagaaaaaaatagtaaatgaacaga

SEQ ID NO: 119401 - DNA, 545 bp, Homo sapiens
tacatagcacagacactgacaggcaaagtgaagtttgtaatcacttcccaatcaattgttcaactgaatgtgagaagaaatcattttctctcctgttttgagtcagaatatcacataaagcacaactcttcctgcatacattgtatcatattccacagtaatttacttttttgcaagaagtatccaaaatttggtttttcctgctgagcagttatccagataattgcaaatcagtggaatcatttacatgaataaagatttttattctaattaacgtgctaaatcaagcacaccaaatgtctctaattcttatattactcaaatggcaatatttttgtcagtgactatcatatgaaatttcaggtgcctaatgcattttcaaatggcactcataagcatactaacgttttataaataaatgtctccatatttttaagatgaatggacaatttttgatttttaatgtagtccccaattttcaatttttcaattttcatttaccgaatggagaaacagcattcatcagagcaaaagagcaagtttca

SEQ ID NO: 119402 - DNA, 297 bp, Homo sapiens
gcagagctggaatgtagcaacagctggaatccagaatgacattctaagggggagggttgttaaggcacaaatgatttttctgggatttaagaccttacttaggtaagttatttaactgtgtctttcaatttacagttaggtgaaatatgattgatagtaatgcctccctgataggtttagctaccttttaaatttgaatgtctgttacatagtgaatactgtcaactattaaaagcagtaaagaaacaggatatagagcgagactggatagcacttgttgggataattatttcccag

SEQ ID NO: 119403 - DNA, 408 bp, Homo sapiens
tgtttctactaaaaatacaaaaaattagctgggcatggtggcgggcacctgtaatcctagctacttgggaggcaggagaattgcttgaacctgggaggtggaggttgcagtgagccaagattgcactatagcactccagcctgggcaacgagaaagactccgtctcaaaaaagaaaaacccattagaacaaatccggcaccagctgagcaccatgcattgtttgttgctgaaattgttgccaatctccaggacgttttgtgccgtaaaatcctcttccacccacacgctggtacccaaatgcagcaactgcaagtatcacctaataggctgcaacatttcgaagaatcggaagcgaatttcctgaagcccttgattaaccaagcgcctccccatcctctagtcactgc

SEQ ID NO: 119404 - DNA, 325 bp, Homo sapiens
gtttcctccggatggaaaacctatttgggaaatcttgttgctgggggcgggaaaataaggacagagagctctgtgattataaaggatattgaaggctgatgtggtggtcttccctaccaagtaggaatctacccaccaagcaaactgtaatactcaccacatctatcctctgccagtgccatgatatactcatcacttctttttattgtggcaaaatacacatcacataaaatgtgccattttaacatcttgaagcacacagtttattggcatgttgtgcaaccctcaccactgtgtatttccaaaattttttcatcaccccaag

SEQ ID NO: 119405 - DNA, 379 bp, Homo sapiens
aaaaaaataaaatccacaatgtgggacagttcatgggagctaggcctatacaataatgctcccaaatatgtaaatgaaagaaaaaagcgaaacaacattcactgtgaaagacactgtacgtgatccaacccagtatccattctctccttcttactatcaaaaccccgattgtattcagggcagtcaaagagccttgtttcccagcctttcttgcaacgagacacttctagctcaggatgatcagggcaatgtgtagggagggacactcagaaaagttcctttggtcattggaggaggggaatagtctcagctagctcttagccttctgcctattcacccctttcttcctcccactgcatgaaacagtgacgtgatggca

SEQ ID NO: 119406 - DNA, 376 bp, Homo sapiens
aaagaaagtacagtattccataaattaacttatataagaagttacttatcgacactctaaggtcaaataaagttaagccaatgacatgtcacgtaatctgggttctagttccaactcaactactttgtaatgtaatactgaataagctgcttaatttccctgtctcaggttcatcattttataaaatgaggaggtttgactagatgatccctcgggtatgctgcagctcaaaaaatggaaaggaagaaatacattttaaattcatcttattaatagaggaaattaaactatcagcagaaactgataattttttccacttatttacaaagctgatatattctgaaactgtccctaaaatgtttaaaagttggctttt

SEQ ID NO: 119407 - DNA, 1920 bp, Homo sapiens
  misc_feature (2)..(4): n is a, c, g, or t
  misc_feature (15)..(16): n is a, c, g, or t
  misc_feature (19)..(19): n is a, c, g, or t
  misc_feature (28)..(28): n is a, c, g, or t
  misc_feature (31)..(31): n is a, c, g, or t
  misc_feature (33)..(33): n is a, c, g, or t
  misc_feature (35)..(36): n is a, c, g, or t
  misc_feature (237)..(237): n is a, c, g, or t
  misc_feature (702)..(702): n is a, c, g, or t
gnnnctgctgcctcnnacnctctgcctnccntncnngaccaggatcgacttgcgcttggcaccgaggaggggctctttgtcatccatctgcgcagcaacgacatcttccaggtgggggagtgccggcgcgtgcagcagctgaccttgagccccagtgcaggcctgctggtcgtgctgtgtggccgcggccccagcgtgcgtctctttgccctggcggagctggagaacatagaggtngcaggtgccaagatccccgagtctcgaggctgccaggtgctggcagctggaagcatcctgcaggcccgcaccccggtgctctgtgtagccgtcaagcgccaggtgctctgctaccagctgggcccgggccctgggccctggcagcgccgcatccgtgagctgcaggcacctgccactgtgcagagcctggggctgctgggcgaccggctatgtgtgggcgccgccggtggctttgcactctacccgctgctcaacgaggctgcgccgttggcgctgggggccggtttggtgcctgaggagctgccaccatcccgcgggggcctgggtgaggcactgggtgccgtggagcttagcctcagcgagttcctgctactcttcaccactgctggcatctacgtggatggcgcaggccgcaagtctcgtggccacgagctgttgtggccagcagcgcccatgggctggggntatgcggccccctacctgacagtgttcagcgagaactccatcgatgtgtttgacgtgaggagggcagaatgggtgcagaccgtgccgctcaagaaggtgcggcccctcaatccagagggctccctgttcctctacggcaccgagaaggtccgcctgacctacctcaggaaccagctggcagagaaggacgagttcgacatcccggacctcaccgacaacagccggcgccagctgttccgcaccaagagcaagcgccgcttctttttccgcgtgtcggaggagcagcagaagcagcagcgcagggagatgctgaaggacccttttgtgcgctccaagctcatctcgccgcctaccaacttcaaccacctagtacacgtgggccctgccaacgggcggcccggcgccagggacaagtccccggctcccgaagagaagggccgagttgcccgcggctccggcccacagcggccccacagcttctccgaggcgttgcggcgcccagcctccatgggcagcgaaggcctcggtggagacgcagaccccatgaagaggaaaccctggacatccctgtccagcgagtctgtgtcctgcccccagggatcgctgagccctgcaacctccctaatgcaggtctcagaacggccccgaagcctccccctatcccctgaattggagagctctccttgatgccctctgttagggcccaccccaatcccagggcagaaggacatgagggagcaaagagcttgaggaatgccatactccggctggtccgggacatggaaattcggactcagggaggacccgggctgggcaatgactgggagacttgcctgggttcccaggacttgggggtcctgactcccagccctcatcctgccttacccctctgttcccagccccagcctttctaagccattgggaatagaatggccccttttgttctggtgtctaggggtgattgtgccaaagctcttatttccagtgccaagcccccagaggcttgtaagagttgggatgagggatggagagggactgggtctctgggaacaggttggaggtcttatctgtggactgtctgactcccagctgaggccaagatggggcatcatgtccccgtctctgcttagcgtctgggtgagaaaaacaggctgtgatccagaagaagggaagatagagaaggagggaaaggatgtaggcgaaggaggtgagagacag

SEQ ID NO: 119408 - DNA, 384 bp, Homo sapiens
caaagtgctggaaatacaggcgtgagccaccacgcccggctccaattctgcctttgatctatttgatgtaccaagaaatttgtttaaattgcctctttggggttggatatgacatattttggatggggttggtggggcattgaggtcaccttaactgaaaccagtaatgcagctgaaatgtatgatagaagattctaggtctggatgtagaaaagacacattggagctgtttcttattgtcagagctgtgcactgatgtaaatacttttgtgagctggaggttgccagggcaacagtcctattaatgaagaataaacctcatttattatcagtgccagaataattattttttaaataaatgtacccagtggtctaacactgaca

SEQ ID NO: 119409 - DNA, 346 bp, Homo sapiens
gagtaactctagagtctaacagctttccccggcccccgaaggtgccactccatttcaagccaacacagtattaacacataaaaaggcttttctgttcaacaagcccaggtgtgatgcgctgggaaaaaaataataaatgctcacttactgatatgggacctcagctgtcaaccttgttagtgggcataaaacaattagagaattcaagacagaataaactgctaacttgataactatttgctccctccctagatggcactgagagacagatatagggaaagcatctgagcaggaaccttcacggctggtcttacaggagaggcagctgcagagtagcatccagtgg

SEQ ID NO: 119410 - DNA, 331 bp, Homo sapiens
tttctgcatatttgcactaaaaatccttacacttgcaattatttatagcagtactggaagtggcagatatgtactgtaagttattttcattttgttaattaacttagggtctcattttcactgtatacaagggcttcctcaaattcctaagacaattctactgataactgagaactctccttctccaaggttattttagggtctctaatttgggctttgcttttataccatttaactttgttgtagctgaggagccctaagatgacaagaaatcagcatcatatttaaactctcccaggggaggaaaaaaggggactcctcaaaacaaggc

SEQ ID NO: 119411 - DNA, 862 bp, Homo sapiens
aggaggaggaagaggcagaatatatggctgtgtctggtccacacaggactttagattaaaagcctttttttaagtctgtcacaggagtagagtaaaaataaataggtttttttaaagccattttagtgatacattaagcaagctttcaacagtggtattcttggtatctaagtgaccttgatccataataagaatactgcttttgcagttaatctaaaccttgctgtttcaaacattttaaacatgcttacagcttaagtgacacactactatactatggctaacatccacttgtataacaactatgctgaactacagacgggcagcatttattctaagccgacacaacttagcaccagctactctagtcactacatcacgtccttctcgcactgtctgcggcggcactactctccaggtggcttgccgtgcatgcgtcgcctcaacattccgaagctcgttctgtcatatctcactttaactgtcgctctctcccacgctggctcgcgcgacttcttctcccctctccctctcttcagcgccacacatcttctgccgcctctccttcataggtcaacacttctccatcctaatcaaccccccagcatgtaaaacacaacgtaagaaagcaaggtgaaagttcattgcaaaccaactacccagtggactgaaacgacattacccattagattttccataagcccttcataatcggccctacagtcacacattgctggatcttttgcgcacctccgtggttgcgacatttctgctcaccgccagtagctcaaccttaccacatgcatggaatctgttttactcataaaacagcagttacacgcaaggtagtaataattacccc

SEQ ID NO: 119412 - DNA, 289 bp, Homo sapiens
ctgaaaacagggtgggtctggtagttctcagaagaagccacagatgtaggaagaagtggagttaggaggaacatatttacatgtcatctagaggcaaaatatttctatatccttacagataactggaatattcagggcttcgaagacccgcttttgtaaaaagaaggaccctgcaagccagagagggcaccaggctttttcaaggccacacaggcaggtaacagccaccttgatcacctggcctaggggcagtgacctagctttctcctgcatcttcagctttctcctg

SEQ ID NO: 119413 - DNA, 490 bp, Homo sapiens
gttccagagaactctttaaacgtgtgtcctgtgcatgtgggggattgaccacaccccatagctgatagcaaacttgtttggagtctacaaaaattaaaggggaaactttgcgttctttagcatatcaaacctaacctcagtttgaaagtactattaacaagttgttttctattagatgagcatattggattccaatttctcaaaagtatttttctcttctctcctttcctcccttctcttatctctctttccctttttttaaaaaacctaatgttgaactatgcctagagaatgttggctgtcacatatcaggaattctgtctggttactttggatgagtttacaagctgctaattgcaagcagagaaagagccttgagaagagaaagagtaatttgttttgactttctctttttgtcttttccttggtttgaaattggcttgggcttgctgtatccatggtccaacagttggatgttttattaatcttt

SEQ ID NO: 119414 - DNA, 594 bp, Homo sapiens
cagttagctctttttgcttactgaggttgtacattggttttggagaatacggaataatcaggctcagagttactttcacattgtactgctaagatactgttgaattaaagtcacagtgttcatggaaaataatgtgtcagaaattactaagaagaatgtctgaaatgtgcacaggttgtgaagtgctggagagaaaaaaatgggtcagtgcattgattctcttggggtaagggtgaggaccacattctttaaggggtgataacaggagctctagttaaaacgtttctaaatatacacgacccacctcctgaggttctgctgtagctgtcacccctagggtttgttgttttcctttattctgcatgcatcactctgtgtactcactactagtagttacttttagggttattgtgaatattgttagatataagatgaattggtgcatatcctctgacgctgggagaccattgtaattgattggtcaggtattttatagcgaacttctatgtagaatataggattagataaagcctttgtatacggtaagctttcagaatttaaattaaaaatgaaaaagtcaatggagatttatgg

SEQ ID NO: 119415 - DNA, 440 bp, Homo sapiens
caaagctccaagacagacctgtagcagcatggcccaaaaagttcctctgctgccccagtcccatacctgcctgaggtacgggggttcaggctgagtcggctgacctggagtcatctggaagccttgtcagaaatgcagattctgcagtgctgttcccagaggatgagattcagcagaactgggtgttggatattatatgaagagatttgcaagtgttattttacgtaattcgcactttacaaaggaggaaactgcagcgcaggtaccaaggttgccccatctcggtccaggcctgctcccggcgagccactcgcccttgaccacgcctcctctctcctgattggctgtcaggcatgagtcgacagagaaagatgaccactgccctcaccccactaaagaagccccagcacttagcaagcacttatggcccagagcagact

SEQ ID NO: 119416 - DNA, 642 bp, Homo sapiens
ctagctcggtacccccttccctctctcacgtaattctagtttccaacgaaattaggcgtgtcactgaccacctccgtaaaccagcatgaccaatactcctactgaaatgcctaggaaataaatatttggacgccttcctagacaagcacaggatggtgtaaatctccatttctctcaggaaacaagtcctgctgctcacaaccaccaaccaactcagcagcttggtaaaaacagacccaatacactcgtttcttctaagcgcacagctagctgcctagcatctattcagctcctcccgaaggaagcataaacatcttcaccaaactgtagcaaagaagacagaggcaagtcgggttaacgcttcaaagagagaaaagacgctggagtcagaagagtagagaggcttttattcgtattacctttactaagggacaggtggctctctagttccttttttcccccgattcactgtttcttgactctagttctttatgtctactcatgctgcctcacagctcctgccgggccctcagcgttcacgcagaggcccaagcactgctccccccgcttgccttgtggtctctgaagtatctcaggcagcattcccgatgcctgctttgaagtgtcagcagttggcacagg

SEQ ID NO: 119417 - DNA, 443 bp, Homo sapiens
ggctcctgaacttactgtgtgaactgtaaacaaaaggctttgggacaaatttgtctcaaaccacgtggcactgatctgcagagtgtgggaaatggtcaggaatagagctgacaagtgttcccagtcttcccccagaggtaagatgtccgtccaatccacccagcccctgcctattcatgaggacctgagaagacaatttcttccccttctcttctagagcatcttttttacgtttctgtggttaccggatctctgggcccctgtgagtgattatctgtgtcctcacatttcccctcagaccagatgcttaagagcaagaaccatatctttccccacggagcctgagacatctccacccccaccccactcccagcaccagccccaagggagctgcgtgaacaacaccgaccctcattcccattcctttggcttattaatcactg

SEQ ID NO: 119418 - DNA, 237 bp, Homo sapiens
accacatattatgtgattcatttcaagtgaaatttacagaacaggccagtctataaagatagaaagtatgttagtggttgcttagggaatggtcagtgaggagataggatggtgataactaaagagtacaaggatgcttcttgaggttatgatgttttaaaacttaactgtggtgatggttgcacgtatctgtgactataataaaagccactgaattgcatatagtaagtaaatgtg

SEQ ID NO: 119419 - DNA, 361 bp, Homo sapiens
atttgctgtatttgtacctggtcctttgctcaaatgcctgttttaaaaaaagtcctagacctataatcacacattagattttaaaatatgccctttcagctgtctaacctacatctacacagaattagtacgtgtattttttttttaagacagggtttgctctgttgcccaggatggagtacagtggcacaatcacagctcacttcagtctcaaccgcccaggctcaagcaatccccctgcctcagcctcccaaatagctgagactataagctacgcaagcattttgacaagatacaggagggttggcacagagatttaaagaagccaagttctaacacaggacagcaaagacaccaaaac

SEQ ID NO: 119420 - DNA, 130 bp, Homo sapiens
tagtagttcaagatcagcctgggcaacacagcaagatcccatcttaaaataaaaaagatctcatggtaactaatatttgatatgtatgatatatgactttaagcaatattacgtgacatcacctttctca

SEQ ID NO: 119421 - DNA, 333 bp, Homo sapiens
cagctcttcaaagtggcaaatgtcaggtttctcatctgctcacaactgttccaccattccactcggcgctaaaataagtgagtatcacactcagagggaggggcacaattcatatttttgttgttgttcacgcctaacctagactggagatgtaacgctttgtccaaaatacgatttcgttattgctattcatgcgaaagggctcaacaagttaaaacaaaaaaagctgtacacaaacccatgcggacgacctgcaacctgagcctggctcagacggcctggggacctgctcacagggatccttactcagtgtcacatgatgcacccaggggt

SEQ ID NO: 119422 - DNA, 410 bp, Homo sapiens
caaggtatcctctaacaggtaagtgaataaatacactggtacatccatataatggaatactattcagtgattaaaaaaaagaatgagctatcaagcctcaaaacaaacacaaacaaacaaaaaaccccatggtgaaaacttaaatgcatattgctaagtcaaagaagccaatctgaaaaggctgcatactgtataattccaactatatgacattctgaaatggcaacagtacagacaataaaaagatcaatggctgctagaagttgttagggaggagggggaagggacagagggaagaataaaacatgagattttcaggtcagtgaagctactctgtatgatactgtactggtggatatatatcattatatatttgccaaaatcaatggaatgtacaacatgaagagcga

SEQ ID NO: 119423 - DNA, 389 bp, Homo sapiens
ttgagataatcaaataatgcaatgttttaagtactattgtaattattcaatatcagatgttaggatatctcagttgtctgaattgtgcctacaagctagcaatgacaaaaggtgaggaaaagaaaagaagtgttaaataaagagggaaaacatgaaaagcagatggtaagaagaaggcagcatctcagaaaacagcagctccatcctcccatgccctcaggaccaaaacctcagtgccatccctgactgactttctttctttcatgcctaagatctaaaactgcagcacattttgggtgctcgagaccatcatggccaacatggtgaaactccgtctctactaaaaatacaaaaatattggctggccttggtggcacgtgcctgtagta

SEQ ID NO: 119424 - DNA, 440 bp, Homo sapiens
ccaagatcaggttataaaaaaagagttagtgtataatgtacttaaaaacattgcctctgtcaatgaataaaaagaataacatattagcgaagtgcattaaggaaggcaacagacgaataggaaaaataatgtgcaagatttagtaaataaatataggaaaactaaaatggccaggcacagttgctcactcctgtaatctcaatgttttgggagggcaagctgggcggatcacttgaggtcaggagtttgagactaggctgtccaacatggtgaaaccctgtctctacaaaaaattagcggacttggtggtgcatgcctataatcccagtgaatctggaggctgaggcatgagaatcacttgaaccaggaggcgggggttgtagtgagccgagattgcgccactccactccaccatgggtgacaaagtgagactctccctg

SEQ ID NO: 119425 - DNA, 495 bp, Homo sapiens
agctccacgatgcacactggaagagaggaggttgtgttaaggtggcggtaaaaggagaaatacaccaatggtgctgggctgtggcaaagcagcaggaaaactctgtgcacacctagcccctcaaacaggaaccactcagcccagcaatacttaattctacacccaagattgtttcctttagttcttttgggttcaagatataatatattaagtacctcttgcccccttccttgttatttatgtgatggtcggttttatgtgttaacttggctaggctgtagtgatcaactatccaatgacacattactctaggtgttgctgtaaaagtattttgtaggtatgcttgatgtctacaatcagttggctttatgtaaaggagttgatcctggatgatctgggtgagcctgttctaatcagttcaaaagtcttaagaacagaactgatgtttccctgaggaagaaaaaatctcccctgtggattgtggcatcagctcct

SEQ ID NO: 119426 - DNA, 188 bp, Homo sapiens
agagggttgctgaagtggccagagtcacagcgcggctggtgacagagcagagtctggccccagcctcccctgcacagccgccatttattagctcagatgcttccaaattcaaaatgcagtgtcaccagaaaccgctgacacaggctgatggttcagcaactcacagccatcccctggggatgggctcc

SEQ ID NO: 119427 - DNA, 423 bp, Homo sapiens
ataactgttgaaattcagtgagaagcttatgaggcatcattatacccttctctctactttttttgcatacttgaaattttttgagaataaaaaataaacaatgtagtgttttctgggactcaacaccttcgctgatggtcatgtctatctagagcacagaaaatctgtttccttcacaaagcccttccacactggccatctagaggtcaaaggacaaggacttgggaagaggccaggagaggccagttggaaagaaaataaaaggaagcatctttgcagaatctcctatctgtgatacttaaaatgtcagccaatgtgtggtgttaagtacgttttgttttcagacctgagtttcatactcaactttgccactcaatgcctaagtgaccttagactaagtcactttctaacacaaagttacag

SEQ ID NO: 119428 - DNA, 612 bp, Homo sapiens
tggttccccgagtgtttatcgatgccacccaatgctgggcggacacagcattgagtggcattgaatctcgtcatgagaagtttctttcctttcagttctctttcactccacattgggtcaaggggagaatctccatttggggctcctgtgctgttaacatctgtcagacgctggctgatgtcatttgtttgtttgaccaagagcaaatctgacccaggcttagaatcttgctagaacttgccttgctctcttgttgaacttcatggcattgtttcattgtatgtgtttttccggaatctcccgtctatacctaggaatgctggttttccatccactgtagcataggaaaatgtctttttgaaatacatgtttaagttttaaaaaaataaagtcaacttaaataaacacactaagatgacactagtgtaggtgttactcaggttcattggttcacctggccggagggcttggggaatgcagagttaaacgaccccaagtgggactctgtctcttaggcacctagggtgccctctgcctcttgtctcctagggtgacaccagtggcatcgataaacacggggtcctctagatcgaccgccagcagcaactgcct

SEQ ID NO: 119429 - DNA, 524 bp, Homo sapiens
ccgtacccggtgtttatcgatgccacactatgttctgaaagacatgaggaggggatcctgtgctgttaacatctgtcagacgctggctgatgtcatttgtttgtttgaccaagagcaaatctgacccaggcttagaatcttgctagaacttgccttgctctcttgttgaacttcatggcattgtttcattgtatgtgtttttccggaatctcccgtctatacctaggaatgctggttttccatccactgtagcataggaaaatgtctttttgaaatacatgtttaagttttaaaaaaataaagtcaacttaaataaacacactaagatgacactagtgtaggtgttactcaggttcattggttcacctggccggagggcttggggaatgcagagttaaacgaccccaagtgggactctgtctcttaggcacctagggtgccctctgcctcttgtctcctagggtgacaccagtggcatcgataaacacggggtcctctagatcgaccgccagcagcaactgcct

SEQ ID NO: 119430 - DNA, 475 bp, Homo sapiens
tgcaataactggagttccatgagaacgaaaattactttgaaaaaatagaaaattggggaaagctctcaaaaagcagaaattaatttcactagaagacagaagacaatgtacatgttaaaacattacatacaaaagtacattaaagggccacacattttctggagtgtacaaccaagtttttgttgttattctaaaagtttttctcacaatgtttggcatacaatagatgctcaatatttgctgaacgaatgacccaaatgtgtgtgtgtgtgtgtgtgtgtgtagtaaaggggctggagtatagagaatattgtgaggtttgggattcttcagaaaaatcacctctcactgcaacagagtactgttgttaaagaatcccatttgctattatctagaatacttttaagaaattgtttacttattacattgtatctgaagttctgagaactaagtacaatcaattaccattctaaag

SEQ ID NO: 119431 - DNA, 604 bp, Homo sapiens
ccagtctcagggtatgtctttatcaacagcatgaaaatggattaatacgcaacctctctgctcagttgtcctgtctcccactgtgctcaaggcacactggccttttctgtttctggaacatgccaagctcctcctgtctttgggccttaacactaacctgtctggaatgctcttcctcctgctctgtgcctgtcctactccttcttgtcattttaaaatgtcagtttaaatgtcatctccttggcaaggccttctctgatgtcccaagctaaagaagccacacagactttctctatcacatcactcttgttctccacacagcacatgtccataagtgctatttttctgtctgtctttcttctccactccccctccctcgttctcttccaggaaagcacggccttcattctcttgctcacggatgtttcccagagtctaaaatagtccctggcatagggtagtaggtgttcaataaacatctgacaagcaaagtgcctcatccaacaaggcaggagtgggcatatttttcacaagattacacttaacatatttagcagacgtggcaacacaaacacatacacacattctcacacaatgatgattt

SEQ ID NO: 119432 - DNA, 808 bp, Homo sapiens
agagagtttttgtgaggtagtatttgaaaatggatgagaaatttctagaattgatgcacaacataaatcctcagtaagatgaagtagaccaagtgttgagtgggataaataaaaataaaacctctacctagaataccaaagaaaagacaaaaatcttacaagcaatcataaagaaaaggtggattagccaaaaggatttgcaaagagataatagacttttcagcagcaaaatgagagggtaaaagataatgcaatattatctgtgaagtgttaaaggaaaataaagcctatgtggaattctataccaaactattattcaggagtaagggtgaagataaatatttttagggacagtttcactgaaagaactattaagaatgtacttcaagaaggaggaaattgaattcaaaaaggaagaaggattcaagaagcagtggtgaacaaagaaaatgttgaatgtgtaattatattttagtaagcatttagtgtaaagtgaaaagttaatgactaacagaaggaagtggttaaaagcaaggtggaactaaatttaaggagattgacaaatatgttaaaataaattgcctccagcacctctgtatcagtctgtttgtgttgctataagggaatacctgaggctgggtaattcataaagaaaagaggtttaattggctcaccattctgcaggctgtgcaagcatgacaccagcatctgctccacttctgatgaggcctcatgaaagaagatgaagagggagccggcttatcacagggcaagagcaggagcaacagagatggggagacgtgccaag

SEQ ID NO: 119433 - DNA, 579 bp, Homo sapiens
gagcagatgaaaggatgcagttaccatgaaggctgcagatgaggtaggttagaaaagtaagatctggaattctctatgagatctattcagtttgagatacccagtagatattcgagtggagatgttgactagatagttagatatgtgagtcaggagttcaagagagaggcttgagttggagaaatacatttatgagttttcagattagaggtggcatttatggcccaggaaacagatgagatttttaagaaagtgagtgtggagagagaagaaaaacaggctcaggacagagcctgggcattccaacactgagaggttagacagtaaaggccaaatcagccagatactgagaagaaacagaagaaaaccaagagggtatgctgtcctggcaaccaagtgtagagggtgcaaccaggaggagggaatgatccgtgtcataaaatgctgctggtcaggctgtgcaagcatgacaccagcatctgctccacttctgatgaggcctcatgaaagaagatgaagagggagccggcttatcacagggcaagagcaggagcaacagagatggggagacgtgccaag

SEQ ID NO: 119434 - DNA, 415 bp, Homo sapiens
taagcaagtcctctccactaagggaagacccttggaagcttgtgcctggtttcctgcagacttcgctctgaatgccagtttgttttgctgatttggctttgtatcttttcactaataaattatatccatgaagggcctggtacggtggctcacacctgtaatcctagcactttgggggctgaggtgggcgaatcacctgagctcaggagttcaagaccagcctgggcaacatggtgaaaccccgtctctactaaaaatacaaaaattagccagacgtggtggcacacacctgtaatcccagctacttgagaggccgaggcaggagaattgcatgaacctgggaggtggagattgcagtgagctgagagtgcatcactgcactccagcctgggcaacagagcaagatgccgtctta

SEQ ID NO: 119435 - DNA, 445 bp, Homo sapiens
tcatgtggtcatttggaggtaagatgacactctctggctttttgaattgccagagttttgcactggttctttctcatctgtgtgagatgatgtttctttaatctttaaagttgctgtccttcatatagggctttttgctttttatattctttgatgcccttgagggtttgacagtggtataagctgggtataaattgattggcttcatgtctggatgattgcagggggccaaggctcagcttagcattcctaggctgtgtgctctaaccctggggacctgggaccaggcccacagccttttttctctggccccttgaggttaagctcctgctgtgctgaaggggctgaggtgttcccagtctgctggtaacactccaatgcagtctgccagcaaaagggcttcggcaaggcagcaggggtccctgcacatgtgtgcaccagtgac

SEQ ID NO: 119436 - DNA, 115 bp, Homo sapiens
actatgcaggtgtgcatttagatgaaattattttctgctgtattgcattgatgggactaaaggttctttttggccacatatttagcttgctcaaatgaaactttttttttttttc

SEQ ID NO: 119437 - DNA, 427 bp, Homo sapiens
gaacaagacatagataaaaagcctgggaaagacactacagaagggacatcatcaataagagataaatatattaaagaagctcatacaatgagtatgagacgcaaagtacaattaatctttcccttaggtacggtaaattgccctaaaattgggtttttcctcattttgcaatagaccttaatgctgatctctagtttttcttttatatgatgctatcaaattggttttatctattttctttcttgatttcttgactaatttgacttgttgatatggtatctgaggataaacctatgtgcctttttttaagtgtcctttaaattctcttacatggaaaggcttaaatagaagatgattttttcaattccgtgttttcgattttgttgtgctcagattccatgaatttacaagattgctgtggagtact

SEQ ID NO: 119438 - DNA, 629 bp, Homo sapiens
ggttgggaggcatgggagttgattgcaacattaaatagagtggtcagagaaggcctcgctggcatttgagcacagactttaaagcacagtcatgtcgatatggtagaacagagattacccagggagagggaagaataaatgcaaatccctgaggcagcagtgtgcttggtgtgtccaaggggtaacagggaggccagtatggctcaagaggagcaagcaagagagaagagcaaggaggaagaacagtagaagaggaggtcagagggtaaatgagaggcaggagtagggcagatttgggggcattgtgtaggccattagaaggattttgactcttacatgaataaaattagggaaccattttcggctggatttcagcacagaagtgactgcatctaatgtatcattttaaaagcatcactctggctgctgtgttgagaatgggaaagggtggagacagggaaaccaggtaggaagctgttggagtagttccagtgaggggtgttgacagcccagaccggggagtagcagtacaggtagtcctaagtggtcaaactcagaatatattttgaagtacaatcagtaggacttctcgacaggtggagactacctaagtaataggtataattatg

SEQ ID NO: 119439 - DNA, 306 bp, Homo sapiens
tggactgggtgcgggcaaggaggaagtggtgggattctagacacattttgaaggtagagcattaggatttgctgacaaattggatatggagtatcagagaaaaaggagtcaaggatgactccaagatctttagtctgagcagctgaaaggatggagttaccattaactgggtaagaagacagggaggagcgtttggggcaggaagtcagaggttccgatctggatatgttgagtttagggggcatttcagaccaccaagtagagttgagtaagcatttggaaagtagagttcctagaagtggggct

SEQ ID NO: 119440 - DNA, 446 bp, Homo sapiens
tccatctcctcctctggactgtaaatcattggaagcagggaccacgtctaatttaacttagcactcaccccatttagcagtcacatattaggactcaacaactaatcatgctgctactgagaagttcaaaatgctgaacacaagatggaggacagaggggaacacaaaggtactataagccaaagatgtgaaaaactacagaagaacatagtgtccgcctcccagatattgggtattattgtgccctgcctgtgtatataagaagtctctagtgacatggcttgagcttcagactggaagagggctaagcctgataggccacaggggaatgcaactagaacatcagggccctgggtacctcaaaatgccaacatagatcctgactaagtacttccatcaattcagaaggaatgaagcccgttggagtgacactgggaatagtaata

SEQ ID NO: 119441 - DNA, 397 bp, Homo sapiens
aaacaatgtagcttgcttggacaaagaatgagaagttaaaagaatgaggagactggccccactgggcagcggactcagttcagagaaccctgagaaatagagcaagatggctgggcacagtggctcacgcctgtaatcccagcactttgggatgccgaagcaggcagatcacttgagcccaggagttcgagaccaacctggccaacatgacaaaaccctatctctactaaaaatacaaaaaattagccaggcctggtggtggttcgcacctgtagtcccagctacttgggaggctgaggcaagaaaatcgcttgaacccagaaggtagaggttgcagtgagccaagattgcaccactacactgcactccagcctgggcgatggagcaagactccgtc

SEQ ID NO: 119442 - DNA, 224 bp, Homo sapiens
ctccacagcatccaggcttccagtgtaaaagcctcttacaacatcaggcgggagaaaacaagcctgccgcttgtggtgccttagcaccaatttgtcacccacttcactcagccctggccccctgcttctcctctgtatggtatctttttttcccatggctgctccagctgggctctggcctgacactggaatcacatgttttggctctagcctttggtattatt

SEQ ID NO: 119443 - DNA, 321 bp, Homo sapiens
ctagggtgcatggcaactgctgaaaaaacttcacggaggaagtgagaaatttttatcagggttttgaaatacaaatacgatttaaagcaggtaaagtgaggatgttgggagtagagactaaaagtaaaaggagagtgatgtgtgaagtagcacagtggccatgctcccatatgtcctacttcccaaggacacagccctactgtggatgagcataccatggccttatctgcctctgtgcttttcatcagatatgtccatctcctacaatgctcttccccaacattcacccatctggccagactgctaccacctaccacccaa

SEQ ID NO: 119444 - DNA, 282 bp, Homo sapiens
aagtcactgacacaaggttacatggctggaaaatggcaaggccaggcctggaaccctgagccgtggtactgaattgctcttacctgcagtggaagccaggctaggcctctgggcctgctaagtataatcccccatcattaaaaagattagtaagtgatgatggggcccaggcacagtggctcacacctgtgatcccagtgctttgggagggtgaggcacgagcatcacctgaggccaggagtttgagaccaacctgagcaacatagtgagactcctttctct

SEQ ID NO: 119445 - DNA, 154 bp, Homo sapiens
ggccccgggatagctccggagcggcgcgcgttggggcggcggggccccgtccacccccggccccgcgcggcctcctcccggcggcctcagtcccagcttcccgggcccagcgcccggtccctgggaaaggcggggttctcctctcgccccgccg

SEQ ID NO: 119446 - DNA, 397 bp, Homo sapiens
tgttcaacaataaaagaaatgaagtactgatacatgctacaagagtataccttgaaagcattattctaagtgaaggaaatcaggcacaaaggccacatgttgtaccgttccatttttataaaatatccagaataggcaaatcagtagagatagaaagtagactaatggttgccagtggctgtgggggtctgggagtgactgctaatgggtatgagttttcttattggtgtgatgaaaatgttctggaattagaaataatgatgatgtttgtttacataatttgtgaatgtactaaaagctatttaattgtatattttaaagagtgaattttatggtatgtaaattatctcagtaaaagggttataaaaggagaaataaaaagaatttaaacaatgaa

SEQ ID NO: 119447 - DNA, 188 bp, Homo sapiens
tgtgtgtttgtcttgcttctctggacaggcctagcttctccactcatgggtgcacccaggtcctcatcactgtcaccttagagcattagagcctctataggtgctccccaatctctgacctccccacccatggtggtcctggggatgcagacagaggaggggcactgcataatgctgagagggctggc

SEQ ID NO: 119448 - DNA, 574 bp, Homo sapiens
tttttttgtgagacggagtctcactctgtcacccaggctggagtgcagtggcgcaatctcagctcactccaacctctgcctccctggttcaagtgattctcctgcttcagcctcccaagtagctgggactacagacgtgcgccaccatgcccagctaatttttgtatttttttttagtagagatggggtttcaccatgttgaccaggccagtctcgcactcctgacctcaggtgatccacccaccttggcctctcgaagtgctgagattacaggcatgagccaccgtgcctagccttatatacatacttctcgatatgctttcttattctcatttctctgtagaatgtttcaggctttctgagcagttaaaggatctgtgaatatcctttgcagaagaaatagttgttttttctttcccacttcttattctttttccccatgtttttttggctgggacctccggtactgtgttgaatagactggttgtagctggaatccttgtcttcttttcctgactttaacaggaatgtttctaacatttaaacacagaatgaagattgctttggggttttg

SEQ ID NO: 119449 - DNA, 406 bp, Homo sapiens
gggctcagtgacccagttagaatgtgaatgcaagtcttactgcaacctttgttgacagatctttccattttctaagtgagtcaaaaatccaggtttttatccagaatgtacaaatgtttaagtattagaaaatgttaacactctgggaaggtcaaacaaaacagatacccacaggccagctgtggtccaaggactacctaactgattcttcctgttaattaacagatctcccaaatagagccaggaggaagtgccagctggtaaatgagaaatctcattattaaatgaaataatccaatgaaaacaccatccagggcctggcacaaaataaatgttcaataaaactacactcattactaacaaaacttcattcttacagccagataaatataaaatgcgccacaac

SEQ ID NO: 119450 - DNA, 461 bp, Homo sapiens
taggggtcttcctcacatttcaggcgatactttgctggaagttataagtattggggaggaaaagggaagagaacgagatgagaggaggagcagaaagaaggaaggaaaacaaaggacccatgtggaactagaatgttaacacacgttgctctggccacgttcctgggcatctgtccctggtctgcagtctttctagtacaggaaggaattccaatgtatagctctgggaatgactctgccagagccatttcctgggtgtgccagagcttgcattaacttttctaaccataggcacttctttcttcctttgttcactaagaagtctttgttcagcagcttctatgacctgctgagctctgctgggttggggggctaacagacagggacaaagataagtaacatcttgaggttcctccctcccaagagcttccagcctccagtctgatgttggagccagccat

SEQ ID NO: 119451 - DNA, 375 bp, Homo sapiens
gcacgagtctaggtgaacaggtttcattttctttcattactataaagatgtcactccatagtcttctgcctttcatagtctaataagaagtctgggccgggtgcagtggctcatgcctgtaatcccagcactttgggaggccgacatgggaggatcacgaggtcaggagtttgagaccagcctgaccaacatgatgaaaccccgtctctactaaaaatacaaaaattagctgggtgtcatggcacacgcctgtaatcccagctactcaggaggctgaggcaggagaatctcttcaacctgggaggtggaggttgtggtgagccaagatcgtgccactgcactccagcctaggcgacagagtaagactccatctca

SEQ ID NO: 119452 - DNA, 431 bp, Homo sapiens
gaatctgtctcaaaaaaattctattaaaatttacttaacgaatcccacaaatgagaaggtctgaaagtacatgctcaagttcagggctctttgctgtttagccacaggatatctgtttgttttcttcttagtttattttgcaacctaaatatatttgtagttgcagccagttacaactcaagttaatgaaacccctaactaaggattaccattccacatcggatgcagtgatacgttgcctgggatttgttctcaagcagtttgtgcgtaggcagagatgaagcaagctcagctcaagctgctcactgtcagccgactacggtggcttgcctgtaatcccagcaacttggtgaggctgaggtgggcggatcacctgaggtggagtttgagattagcctggccaacacggtgaaaccccatctctactaaaa

SEQ ID NO: 119453 - DNA, 397 bp, Homo sapiens
ccatattgtaccagggttggtctgtgcaaatgacatacagcaaatggcagtgtgaagctctgtcacttctgagatcaggctataaacgagtgtgacttctgcgatggagtcttctctctccccccgtcaccacttgctttggggaaagacagctgccatattctgagggcactcaagcagcttatgcagatatcgtggcaaggaagccagggaggaacccaggcttcctgcccccagccagggaggaactgaagcctcctgccttcagacacaggagggggtcttccagcccaggtgtgccttctgatggcggcatccctggtcatcagcttgagtgcaaactcatgagagaccttgagtctgaaccaccagctaagctgctcccagaaagtgtgtg

SEQ ID NO: 119454 - DNA, 265 bp, Homo sapiens
agaacctccaccctctgacgccatggtcagctcctgctgtggctctgtctgctctgaccagagctgtggtcaaggtctcggccaggagagctgctgccgccccagctgctgccagaccacctgctgcaggaccacctgctgccgccccagctgctgcatttccagttgctgcaggccttcctgctgtatctccagctgctgcaaacccagctgctgcaggaccacctgctgccgccccagctgctgcatttccagttgctgcagg

SEQ ID NO: 119455 - DNA, 684 bp, Homo sapiens
tcagctgttctgtgagggtaaaataatgaagctggttttgtacttaccaagtttgtaaggcattcagatgaaaatatctaatggatagctggaaacgtaggctgtcatagggaatagaggagttggaatgacttccaaattaactaacattcatttaataattgaatataaactgaaagcctagtttgttcagaatattataggagcagcattaccatgactaagctatagacactgattctttaagacttttgcaaaccagtagcaaaaataatgttcaataaaccgattacagcacaagaaaaaaagagtgtcaggtaccacagagtgagaaaaaaacaacaacaataaccaaaaaaaatagcaaaatgttgtagaaatttaaaaaaggaaatgaccccttctcaattaatctatcaagacagtgttccagaagaggttgcttatcagttggttcttgaaaagtggtatttggaaagcttaagaaacatagtacactagcctacagagaatctaagcagaagttgaacttttcactccaactaaaaatctatgttaaaaaaaatgagtgaggccccctctgcagtgaaagttactattttgacatttgtgagatcaaattttaagatcctctgggtatgtcaaagtcttttcgtaattgataggattcagaacaccgtcgaa

SEQ ID NO: 119456 - DNA, 746 bp, Homo sapiens
aagcagatatgacttctcaagttaacgtttttttaagtgatttccattcatcactaattccaaacaaaacaattacaaactatcataaaattattagaaagtgaaaatgggaggcattggttaaatatgtatttagtatgcttcatcatgtcctcaaacatatttaaaaagttaatctacacttctttaagtgtcctgggggacttgctttagattaagaaatatgttaactatttcaggacccttctttaagtatattgggagacttgctttagattaagaaatatgttaactatttcaggacactaaggactttacaaatctgaattagctcatattggctgctatctcctcaatattttctgataaataagaaacaaacagtaaatagcaacttccacaaaatctaccagtagtacacaagggcagccaaacttcaaaattcttgccactcgacgaactctagatggttactgtttactaaaatgtaaataataaaaagacttttctcaatcttgtcctccagaaagaaaagccataaagttcaaacactaaccaaaaaaaaagggtaaggagaaacatttaaatattggtgttccttttattagtgtcttcacatacaacacttctcaattttaaacaggactttgtttcagaagacaaaaccaagacaaaatggtagaaatcaaagggttatagactttgatttaaaaggcataaccttttcaaacatgagagctatcaat

SEQ ID NO: 119457 - DNA, 639 bp, Homo sapiens
tcttcctcctttcttttatttttttttgagacatggtgtccatctgttgcccagactggagtgcaatagcacgatcgtggctcactgcaacctccacttcctgagttcaagcaattctcctgcctcagcctcctgagtagctgggattacaggtgtccaccaccatgcctggctaatttttgtatttttagtagagacagggtttcaccatgttggtgaggctggtcttgaactcctgacctcaggtgatcagcccacctctgcctcccaaagtgctggaattataggcatgagccactgtgcctggcctgttccttctttctaatggtggattaccttcctgtaaacacactggaatttacagaaagacaagaaggtaatgaacaattacataatatatgctaggtggtgataagtgctgggaagaaaataaagcagtgtaaagggataaagattgatggttgggttggggattggtgtctcatgtagaacggtcatggaaggctcctgacaaagtgacattggattaaaggcctgaagaagtgaggaagtgagcccaccgagatctggtgggagaatgtttcaagcagagggagtggtgactgcagaggctcagaatggagcatgaccagcatgcct

SEQ ID NO: 119458 - DNA, 837 bp, Homo sapiens
aggctgagctaatgcatcctgaccagggcccgtctgcggagatgtgcagccctgagctggaaccacctgtcctttgagaggatcgcgtgctccccactttggtctgtctgtgtcttccagctttgtcctgagatgttctctcttctcttctgacttgactatctatttgctgggtctgtggcctttctctttcttcctgaacacaaccttttctagaatctccctaccctgttgttccaggaaaggcatctcccctttctactctaaccagagggtatcttgtacataccctatagatggggttgccttgtgccaagagcctggtgtccatgggttgaggaagccctccctacctgggacttcctactgagatgggccttccctcctttgtactgtgatggcccctcttgcccttgcaccaagagggacccttttctcaggatccacttgcccagggctgttgctgtccatgctgaggttgaggcctcctaggggctggtggcatgcaatctgtctctcttgcccagtgctatgagctgggctctccctgaagaagaaacctgggttccccaagatgtgaccagagctggggccccgccagcaggcgagggaatcccaaggcaggtgctgggcgtggaggccacgggggcataggctaccaaggagacagagaactgaccccctcgggggcgctgcctctccctcactcacacactgcacgtcaccctgtttggccccggtggatggctggttagccagagacgggtaagattcctcagggaaggaacaacctaagacaggcacagtcgcagaggggccatcaggagagaacttggg

SEQ ID NO: 119459 - DNA, 619 bp, Homo sapiens
tgccgctaggggtagcggcggcggcggcggctgcggctcgggagcgcggctgctttgagggctcgggaaccttacagagtggggacgtggggaggctagagggtgagaaagctggcgggagagaggcggcgtggaggagggcggtgcgtggctgactcatcctctggaagatcagactgacagagacacacactagcccgcccaggccgcccgcgcggatgcctcctcaggagggaggcagcgcgcgcgcaccgaagcgcccgagcgtctccgggcgctgatacgggcccgggcgtctcagagaaagttttcccatcggaggggcgggagccgcgcgggactttggaaaggaagtggggacggaacaggaggcgagagccggcgggcccgacggagtgcatggtgcccggagcctcggctgactggcaggaggacctcggggcggggtcgagctgagccagctacctatctcgacctacagccgcgccagaaaccgcttcccggacggcagacgggggtcccaggtcctcagctcgacatgtcccggctgcatgcaggtgatgaggagcagggaccgcgcgcagactgagagcgggcccggccgacgacgacgagccaa

SEQ ID NO: 119460 - DNA, 230 bp, Homo sapiens
gtcacgcatgatcctatgtgattaaacagattttctaatattataatcaagattcttaaaatttaagtacagttaatcctccatttttaaacaacatgcaaatcagaaatttaaaaagacataaatatatgatatcaaaggtgtgcttgtatgtgtacatattatctgcatacttgttatgaaagacgtaaaggtattttttgaagtccctgcttctaccttgtatttta

SEQ ID NO: 119461 - DNA, 388 bp, Homo sapiens
ctgggagatagaaacttaaactatatggttgctgtcctcatgtaatttatggcctaatgagaaatgaacagggacacaaataatgattacaagtgacagaatgtggtgagtttgtaaaggtattaacaacgaataggggtcaggcatggtggctcacccctgtaatcccagcactttgggaggcagaggcaagtggatcacctaaggttacgagtacgagaccagtctggccaacatggtgaaaccctgtctctactaaaaatacaaaaattagccgggcgtggtggtgctcacctgtaatcccagctactcaggaggctgaggcgggagaatcgcttgaacccaggagggggaggttgcgatgagctgagatcgcaccactgcactc

SEQ ID NO: 119462 - DNA, 212 bp, Homo sapiens
caaattacaggcaccaatcgagactgctctaagagcaaacccatttttatgtactggcctggtgcaacaattggagtagcctcaggcaccagtcagaggggctagggtttggctctaaacatgaccttctctgcctcacccctgctcacatggacacaggggagggcagggggctcacatttttgtttgatgaactgtcaagcagagcctga

SEQ ID NO: 119463 - DNA, 608 bp, Homo sapiens
gggctcaccacccccccaccacattccctttgtgccacccacggtggccatgatgacatctgggaagtgggcagcacagcctgcaggctgtgtgggcagttggcactgagggtacttgggctctcatatttttaaacccagctctggccacctctgcagttggctcagacagagctgaggggttttcctttgggccccgctgactctgagtgggagggcccaggcaccactgtgtcagaaggcactgtgcccacggcagccagggggatgctcacagctggggtgggatctgtgtccttcagaccctgggagccccaggcagcttgagcaaagcttgtgggaaccgtgggtaggtctgaggctgtgggttggaaggagaaaaccagggaggaccaggaaagggctcgggagaggagaggagggaggaagccaacagaaggcagaaggagccgcaggacagaggtgggaggtccttagagagcatcgaatccgacccactccgtttgagatggggaagctgaggtcgtgagaaggaaaatatccagattctactgcgagttaatggcagagctgggacttgaacccagagctcctgatacccaagcaag

SEQ ID NO: 119464 - DNA, 449 bp, Homo sapiens
tgcctttgtggttttctgtgcagtcttatagtggggctcacatctggttggggaggtgcaggttagtattttagcccatgaatctgtggcaaatcattcatttgcatttattaataattcttagaatatgcatttaaaaatgtctgaatggttaaaggaaacagagtttcagctgcgcttttgggactggctgttatgtgtctggaacagatactgcaaccagccacacagtttaccctctggggataaacagcgggataaacagcttccttaggaatccttggacaggcaggttcttgaggacttcattcctttgaagtaacagagggatggtgtaaaagaaaaggacaatggcacgtggatccacaatggcacgtggatcacaatggcacgtggatcacaatggcacgtggatcacaatggcacgtggatcacaattggcacgtgga

SEQ ID NO: 119465 - DNA, 300 bp, Homo sapiens
accagtgcatcccacagctattctagcaccccataaacactccagtgtcccccacttcctgatcccgtaacaccttgggccctccagataacccgctgctccagcctggcagtttgtcaaccccctcacccagacccccaacacctcatgcctgtcttatgccatgagtctgaggcccctgacctgggtgccacccaggcctgtctgtgtgggcagctcccccaccagctcccttccatcccccatgggccttatcccgggtttcttacacccatgcacacactatccagcattcctgac

SEQ ID NO: 119466 - DNA, 202 bp, Homo sapiens
aaaagtgcccccattcacctagtgagacagggaagctctgggcatgaaattacaattttttaaaaagaataaacaactaattaacaaaaaattaaaacatgagatcggtgctttgccctgtttttgagtctaaatttattctacccatatggtgaactccaagtcacaaaagtaacaacaacaacaacaatttcccctgccc

SEQ ID NO: 119467 - DNA, 496 bp, Homo sapiens
caaaatggaactcatttctgtgagtgcataatgattatttctgataggatagcagacatgttggagcatttggaaaaaattaatcacaagtatatggaaagccagacaagtgggaaaacaaggaaatcattaactgaaggaaaaatacgtggtcatacaagaaaggagcaatggtcataggctcaacagtgaaaatgtttgtacagtcatagtgtaaacactgatgtattatccaagctgcataaagagatcttataaatcaattagaaaaagacaaccattggaaaaacgagcaaagtgtatgaatgggctaattcacagaagatgaaactcaagctcaactcatgagtaattggggaaattaaaactattcactggctgggcatggtggctcatgcctgtaattccagcactttgggagcctgaagcaggagggactgctcgaggccaggagttcaagaccaacctggtcaatgaagtaagacccagtctctac

SEQ ID NO: 119468 - DNA, 493 bp, Homo sapiens
caaaatggaactcatttctgtgagtgcataatgattatttctgataggatagcagacatgttggagcatttggaaaaaattaatcacaagtatatggaaagccagacaagtgggaaaacaaggaaatcattaactgaaggaaaaatacgtggtcatacaagaaaggagcaatggtcataggctcaacagtgaaaatgtttgtacagtcatagtgtaaacactgatgtattatccaagctgcataaagagatcttataaatcaattagaaaaagacaaccattggaaaaacgagcaaagtgtatgaatgggctaattcacagaagatgaaactcaagctcaactcatgagtaattggggaaattaaaactattcactggctgggcatggtggctcatgcctgtaattccagcactttgggagcctgaagcaggagggtcttacttcattgaccaggttggtctcgaactcctggcctcgagcagtcccgtcgac

SEQ ID NO: 119469 - DNA, 251 bp, Homo sapiens
aatcatgaccagcgcattaaccctttgatggtacccatcgattcctgattctgggtcctttttttttctttactgcctacattttcctgctttttcagataccatgagctctccatactgtctaaaagttccctctgccagcccactcatcaagtcagcatagaaaaggatttaatagatgccatttacgccttctcatttattgcctgattaaactgaagagtaaatgaaagacattcctgtagtgtcag

SEQ ID NO: 119470 - DNA, 350 bp, Homo sapiens
gcacgaggtttctactattaacttaaacaagaacatttgtcagatttgttcattcaaatattgtttgtagctggggatggtggctcacgcctgtaatcccagcacttcgggaggctgaggtaggtggatcatctgaggtcagaagttggagagcagcctggcccacgtggtgagaccctgtctctattacaaataaaaaattagctgggcgttgtggtgtgctcctgtagtcccagctactcatgaggcaaggctggagaatcacttgaacccgggaggtggaggttgcagtgagccgagatcacaccattgcactccagcctgggcaacaagactgaaactctatctca

SEQ ID NO: 119471 - DNA, 350 bp, Homo sapiens
tcaggctgtacacctaggatgtgtgcaacctcccctttctacattccacttcaacagaatgttttaagctggctgggcacagtggctcacgtctataatcgcagcactttgggaggcagagtcaggcggatcgcttaaggtcatgagttcgagatcagtctgcataacatggcaaaaccccatttctactaaaaatacaaaaattagctgggcatggtggcacatgcctgtaatcccagctactcaggagactgaggcaggagaatcgcttgaacctgggaggcagaggttacaatgagctgagattgtgccactgcactccagcctgggagacagagtgagactctgcc

SEQ ID NO: 119472 - DNA, 126 bp, Homo sapiens
agtgtgcagtttttggtggcgagaccttaccccctccatctccccgggggtctgggcctgctggaggtaggggtctgtttttttcctcccacataaagatttgccttggagctcggatttcagccc

SEQ ID NO: 119473 - DNA, 289 bp, Homo sapiens
attgggctgggctttcctcctttccttggatgacttcagaaactttatttacgttggtggccttttgagcccctttttttcagaccttcaattaatgcctcctggtattgtcttagcctctccatatctggtccttcattcagatcccattgagggtccattcctggcagctgaattcttatgtattcctggggattttggtaatcggctgggacatgctcctctagccatttagttgctgcctggagcacccttcgcttttcatctgtgttaaaggggtacatgagta

SEQ ID NO: 119474 - DNA, 799 bp, Homo sapiens
ggttgatgactagctcctttgacactggtaaaatgagacatgcagctttaattttttatgaaaattataatagatctagtggggaaaaatgaatctagaaactagctattttttttcagagtatcttagatttgtattggcctcactgatgctgagctctgcaacatttcacttaaaagagtcttcagcaaacacagtgtctcatgcaccttcctgtcctggaaatcctattttagccaaggacataatgtgccaacatctgaatcctggacagtgtctctttatgttttggggttatttttaaagtgtgtgtgacatatagatttatttgcactgaataggaaagatgtccacaatatattgtttaatgaaaataaaaagcaagctagagcacataatacacattggagggttgggtgtaaaatcttggatcagacggctttggtttaagtcttaactctggcttcctaggagctgtgtgacactggcccagtctcagaacctttctgtgtcttcattttctcatctggtgactaaataatagtctcttaattcacaggatcctggtgaggattaaatgaattaatatgtatacacacagcgagcagtgcctggcacacagtgagtgtttaaaaatatgcatatgtcattttgcaaaagaacacattttggaagaacataaccattcatctaacaaatatttacttagtaaactgctaccagtgattacctctagggcatgggaatgagagaggcaagggcaagaggactgagtttctgctttataagcttaggtatt

SEQ ID NO: 119475 - DNA, 553 bp, Homo sapiens
aagagaaacctctccctaggaaagcacgcataactacaattctggactcaatttcactgacacttctgacctcacacccaaggataagaaacgaatgggtctactgcctatttgaaaatatagacacacacatacatatctacaaaatcatgtgatcctacactgaaggattgtttcaacaatgcaaagtacttatgaggcttattaatagccttatattttcagttaacaacatattactagtggcaatgagagaagtcccaccacaaataaaacagcatgtttattctcaagtacaatgcattgaactgacacagactatcactccagttacacaatggctgttcagagttctcagttaatggaatattcacagtttaagaccaaacacaatgcacaaagaacagaaaaatagacaaagttgccgtattagggatagcaacattagcttcctggcaacagagactctggggagggctacacataaaattattttctattaagggtcagtaagtaaaaaaaaaaaaaaagtctgacaaaatatttcattcat

SEQ ID NO: 119476 - DNA, 180 bp, Homo sapiens
gtagggggaaatttttggctttctctgtttggtcctaagttggaagtagtatgggaaaaagtagggaatctgatagtttttaatcaaattgctaccccatctctacaaaaataaaaaaagaaagaaagaaagaaataaagaaaaatagccagctcctggctactcagaagtctgagatgg

SEQ ID NO: 119477 - DNA, 735 bp, Homo sapiens
cgataagcaccctgccttcttttctgtctttaacacaaaatatagtgggattttgacagattttttgttaatttgatcaattcagactgtcagttcaaatatttaaaatctcacaggcatttgtaattagatacaagtcattgattgaagaaagaggatagatgaaaacatcccatgacagcttcttaggtctagtgctatttacacattaccccacggggagccaagctgaacaagccactctatcctcaggctgaatcaaggtgccaccaataaaagttttcactgaatttagactggtggtttgagattaaataaagacagaatccaaatatgtttgggaaatataaaatgttttttgattatttagctttgggagcagataaggaaacaaaaatacaacaaacagatttactaagcactattttctgtttcagttaaggtatttgggccttaatagacaaattatacctaatagtaataatattattattataaacctcttattatgtgccaggtatgattctaaatggtctctctcatgtaatatattacatatcatcatatattctattatatactatgtaagacaggatagttacgtatagatgtagacactcaattcttaacaatagttttatgacatgggtacaatgatcatcatcccatttgatagatggtaaaactgaaacaaaagttagctacctcagccaaagtcagacagcttctaaatgg

SEQ ID NO: 119478 - DNA, 556 bp, Homo sapiens
acttatcccaggtatgcaaggttgatttaatatttgaaaatcactcaatgtaatctaccatgtcaacagcttaaataagaaatatcttatgattatatcagttgaaaatagtctatgtagaaattacaagaaatctaccaaaaaatttcctgcaaataaatgaattcagcaagtacatgagatctatgaccaacacatgaaaatcaatctcatgtatatattctaacaacaaacatacagagactgaaattaaaaacacaatacccatttacattgctcaaagaaaatggaatacttaggtatacactaaacaaaacgtgccatatatttttgctgaaattacgaaatgctgatgaaagaactcaaagaaggcttaaataattggaagggcttatcatgttcatggattggaatactcaacacagtaaagatatatattattgtcaacttaatctggaggtttaatacaattcctatgagaatcccaacaagatttttgtagttctagaaaagcttctcctaaaatttatataaaatggcaaaagacctaaaatat

SEQ ID NO: 119479 - DNA, 231 bp, Homo sapiens
gtctcctagggttattctgaagactgctggagaagatgtacacaccatgctggcattccttgacatgcttcacataggcgctgttctctgaggcagggttccaggaagctcatagtcctggcattcattgtagaatgaatgaatacaaatgcctctgccaaacacagtggataaaaacagaaatgatcattaatgtatgtgaatggagtagattgaaagtaaagaaaaccc

SEQ ID NO: 119480 - DNA, 266 bp, Homo sapiens
cccttgaatatttgtatcagctattttgacacatgacagcattctcaggtaatctgactagcaactgttttttgaactgaattgttgtgaaacattcaggtttttagttcttttttgtttttaatttttaacacagaaacataaataatgttcatatcctcttggcattgtgatggttatttgcgcttatattttatatatcagtttaaatgaagcaaacgttaagtaataaagccagtcttttgttcatactgcattgtaacatt

SEQ ID NO: 119481 - DNA, 357 bp, Homo sapiens
tcgtctttactaaaattacataaattagctcggtgtggtggcatgcacctgtagtcccagctacttgagaggctgaggcttgagaatcacctgaacctgggaggcggaggttgcagtgagctgagatgatgacattgcactccagcctgggtgacagagtgagactccgtctgaagacaaacaaacaaaaaacaaaaaccgaatcctttagccaggcgtgtctcttgttggataagtcagtttggaatcttttggatgttttccttcttttacttgctcagccataataaatctttcattttaattttgatcagcagcattgtgaggtcctgcccagtgtggtaatgggcagttagc

SEQ ID NO: 119482 - DNA, 281 bp, Homo sapiens
gtggacagcaggacgggatgcgggtgcctagagggggtgccatctatccccaccttttcttcatttcccatcatgccacaaaattcatttattgattcaaacccacatatgccacactcctactatcttccaaacactattttactaggtctcagaaatacattggtgatataaaacaaaaaatccctgctctcatagagcttacttctgtctggtaagacagacaataaacaagataatctaaagtcatttaatcgtgatggatggcttttcttttttct

SEQ ID NO: 119483 - DNA, 345 bp, Homo sapiens
ttcacttcagcctgggtgacagagcaagactttgtctcaaaagaaacaaaaacaaaaacaaaatacattcagaatctgacttcctccatcgccttccactgacacttctgtggcccaagcctcctgtctctagctgggatcagtgcagtagctatctgctcccttgtcttccccttctctctcagcacccttcagcgcagcagcagccagagtggctctggtaaagagagtcagatcatgtcactctgagcagaggcttaagaccctccagtgactccccaagtcagcccacatgagagctgacaaggtcctaccctctttctctctaacttcacccactgtgat

SEQ ID NO: 119484 - DNA, 280 bp, Homo sapiens
gaagggtttgatataagtatctttgatattctgtaatttaaaaacataataccctgtaaaggagtggctgaaaatgactgaagaagttgtaatcaggaatacaggtaaattcacttagaggaaccattataacaagttcatttctataaaaggtggatggctcatgaaaaaatggtttcattaatttgtattgtaaatgtatcatacttttgtgagtacgtggatttcttttaaagaaaggggtggatagtggtgatggtatttggggttgaagataaga

SEQ ID NO: 119485 - DNA, 319 bp, Homo sapiens
caggccctgccaccacccagctcctagtgtatagggcactgtgctcactgttgtgggggtgaacacagagatggccataccgctgccccttccctggaggtactcagtgtggctggagaacccatgcatctgcagtccccacagttagcctggctggacttgcagagcctgaatcgctgctcacagggttgctgtgagaattacaggggatcatacctgtgaagcatttagcacagtgcctggcacctaggcatgccctagaagttctggctggtgtcatgttgtcattggcatatgtctgaccttacctcctgtgagg

SEQ ID NO: 119486 - DNA, 307 bp, Homo sapiens
gttaggaatacagaaaggatcatacccgccacgtaacagaggaaagatggtcacgttttgtcacatgtattttgaacaatatttccaagatttacttaaagctgtttgttgaagggagtgtgggttgcaagtcaaagttcatcttggaattgcactctttccttccccttctctgtaatgcatcctgtgaatgcatcatggggattatactgctatagtcttgcatcattacgacacacctggctgcacttttagccaactcttagctggccaaatggtgcaaatagtggatgaactgatagtgatg

SEQ ID NO: 119487 - DNA, 808 bp, Homo sapiens
gaatgaattgttagaagtttttatagttgtgggaagcttttatggtagaaagatacaatgactatgcaaatataacaagttaaaagtcatcttttaaattatggttttactttggcttcatcccattttttgtttttgttccttaacatggtcaaggaaatgaaatattttaaacagtgtggtagtacaggatggatatatgttagtttactttgtcaaacacaattttagctgtcacattaggcttaagatacacatttgtctatttataatttttctagagaaattacctctacctctatggaggtagacttgtattgaggttaatttacaattaagcacagcctttagtcttaattatatgtatatttagggtacttctatagaggctgatggtgattatggtgtaaaatcttccaactaccactgctctcttcccactggcccctttgtggttaataaagttcaagagcagctggcttagtgtggcatcttatccaggtatgttttgtattacaaagtgaatatgtgaggatagataaaatctagtaagggcaaagaaattaaaccgtagaagtgaacgcaagtagtaaagttgatattttgaatgaatagatcaggattcttctttttataaaggcagccctggacaaaaaaagatgggattgtagagctataggtatgtagagagtccctgatttggctacattgctggatcttgggtcttagaaatgtgatatccctacccatcatgcattagtaaatgaatgaatgaaattttgacagtgacccttaaaatcaatgacta

SEQ ID NO: 119488 - DNA, 574 bp, Homo sapiens
gggttattaaacagaaatctcccaggcaatgaacctcttctgcagagtgcaattctgcagagaaggaagcagctgtattcatcagctaatacccacagcagctgggggatggatctatctgccttgtaaagggggcctgaactggtcaccagctgtgtaaaacactatggtatagaaacactgtcatatatatgttaggaccccagaacagctctgaagaaacaaataactgaaacatactgaagaaagcactgcagaacctgaacacttaaattatgtacgtagagcattgcttctaaaaatatgctatgagtacgactaaggatgctaggaacacatctccctttctaacattgggtttacgaacatcctctcccctcaactacccagtttgcttagcagtagcagctggtggtgaattctgccattagggcaagatgcccagcaaggaaagaactgggttggttaggagaatttaaggcagatgaagtctctggaatggggatatggtgtgtagggtgaaaggagctaaaagggaaaggtttctttgtgtatgaaacccactcaccaatct

SEQ ID NO: 119489 - DNA, 356 bp, Homo sapiens
tttctaggacatgtacgttaccaattttatacctcgtttgattttcaagacaattttaaacaccaaaaagataaatccttaaacacttattagtgacctaacaacagaagaccagaaaatgcagaagctaagtgactttgaaaagcaaaaggtcagctttcctgtgctcactataaaaagcttagttcaaaataaagcaacctactattagtgttcactctgagctgaatcctctcattttccctacatagcagcaagcatccaggggaaaatatagccagtgtctcctgagatctatccgtgctactggaaaacacacgctcggacagtcttagaggatctttaaccatcggtgc

SEQ ID NO: 119490 - DNA, 278 bp, Homo sapiens
gcccccagatctccccccgctgaggatgccatgagtttggctttacccactgtgtgatgaccattttcggagccaccgatgggcttctccagccctcctggctttgcggggtgtgggtgtttgggtaatgtgatgaaaaaacctacaccccaggcagtgggtgtctgcctctgtactccttcacctttccattctataaaggttcctgggcataaaagtatccagctaaatccacacactggttaagaaatgctaacagctgtgaggaattacatgag

SEQ ID NO: 119491 - DNA, 630 bp, Homo sapiens
caagactctgtttcaaaaaaaaaaaaaagaaaatgacacaaatatcaatagaagaatggaaaaacaaagtgtagtatattcataaaatgacatattgtgtcacttagaaattatctgttgtctacaataatgatgtagaatttactatacaatgaggatgcctatttttagccttatttttagtttcttcaaattctgtctcattttaaagtacattttaaacagtctctagttgaagatcattttgattctgaaaataaccttactttttgtttagtaactcacttgggttttcttatcacaatagaaacttttgaaggatttttgttttgttttgtttttgttgacggagtcccactctgtcgcccaggatggaccacagtagcgtgatctcggctcactgcaacctctgccccctgggttcaagggattctcctgcctcagcctcctgagttttagctgggattacaggcaggagaatcgcttgaacccaggaggcggaggttgcagtaaactgagatcgtatcactgcactccagcctggtgacagagcaagactccatctcaaaaaaataaagaaaaaaaaagaaactcttaaatatatttgtacctatatattttttctctctc

SEQ ID NO: 119492 - DNA, 469 bp, Homo sapiens
ggactttgttcttggagcctcacgctgagtctggcacacagaagacacaagacattgttaattcagtgtttgttgtatgaggaaggtagacagactggaaacagacttccctaaggtcttatagctagcaatggcagaaaagtctattgaatcctaaagccgagctgagggcctttctattctcctaggtctgcgttgggagaatgagcaagatgccttggccctcactccttcggtgggtcccagcacgtgccaggggcagcatgtgcggtcacctgtatgacccctttgctctagtcccaattccctactacagataaaacatcattcacccctccgcaggctttctgttctgaatcacgattaccagcatgtctcatagctcagatcctaaccagcacttactaggcagaattcagcacttaagtgacccattaaggacttttggcagaggaatgggaaagataaa

SEQ ID NO: 119493 - DNA, 474 bp, Homo sapiens
atgctaaattttatttaaaactatatggtcccatatgtttctggttgacattttactaggattttctgatttcaacatgttctcattaagtactatgttttattaactgctaaaaatgaatgtaattcaaatccatggacgttcaaaaagctcagtaaatactttttagtaataccgcttttcggcataattcaagtacatagatctacttagtttcacaatatcggtatagtttgatgtgtattagaatagttacaaggttattaatcccactagttcttgaaaaaagtttacattaatttgtcttactttcaacttgacccattttgtataataatttaaaggaaattaacacattttgactaaacataaaaaacttactttaaaaaacctgatggactctaaactttaattatatgggttacacatgagtaaatgttttcaaatggacatattttattacacagaaataaa

SEQ ID NO: 119494 - DNA, 824 bp, Homo sapiens
cctcttcctgtgtggaagctgggattccaatggcaggcaggaaatcttgtagtaggtgatcgtggccttccttgggatccctgtttcccccttttattcccttttcacccagtaaaaccctgctttgctcactctttaaagcatctgtgagcgtaaatttttgtggccatgggatggacaagaaccacatgtttacctgaagtcctgtgacattttggtgtgcagcatgggagctccaaaagtgagtcaagtgaacttattttgaatggtttatggcctttaataattacataagttatatactcctgtgatcaaaatttggagcatgtttgtttctctctgcctggttcctccagaatttagaacctatctacattctttcagatgccagaggatgctatagaaaaatgcgtgccctcttgtaatactttgttcaagttctgatcagaaggatgaatgatggagcccaagaagccagagtctcattgtgttgctcaggctggaatccagtggcatgatctcggctcagtgcaacctccgcctcctgggttcaagcagttctcctagatcagcatcagcgtcccgagtagctgggattacaggcacccgccacatgcctggctaatgttggtcaggctggctcgaactcctgacctcaagagatccactgctttggcctcccaaagtgctcggattacaggcatgagctgccacacccagcctccaaatactttttttttaaatcaaaataatgatttcaatgactgagatctggttatgtatttcaacataatcatgtttcataaagatttagtcttctgaaa

SEQ ID NO: 119495 - DNA, 606 bp, Homo sapiens
cctcttcctgtgtggaagctgggattccaatggcaggcaggaaatcttgtacatctgtgagcgtaaatttttgtggccatgggatggacaagaaccacatgtttacctgaagtcctgtgacattttggtgtgcagcatgggagctccaaaagtgacattctttcagatgccagaggatgctatagaaaaatgcgtgccctcttgtaatactttgttcaagttctgatcagaaggatgaatgatggagcccaagaagccagagtctcattgtgttgctcaggctggaatccagtggcatgatctcggctcagtgcaacctccgcctcctgggttcaagcagttctcctagatcagcatcagcgtcccgagtagctgggattacaggcacccgccacatgcctggctaatgttggtcaggctggctcgaactcctgacctcaagagatccactgctttggcctcccaaagtgctcggattacaggcatgagctgccacacccagcctccaaatactttttttttaaatcaaaataatgatttcaatgactgagatctggttatgtatttcaacataatcatgtttcataaagatttagtcttctgaaa

SEQ ID NO: 119496 - DNA, 317 bp, Homo sapiens
ctgctctgtgccagcatgtatctcacaataggctaaatggtatcctgaatatgtaaataattcagtcctgaccctttagagattcatttggtgaaagtgatccacatagaaaacccttactaaatcctgtgtatagctaggccaaaaagcagaggcagattatctgaggtaaacaattaaaaaaaaactactagctgggggctgggcacggtggctcatgcctgtaatcccagcactttgggaggccaaggtggatggatcacctgaggtcgggagttcgagaccagcctgaccaacatggagaaaccctgtctcta

SEQ ID NO: 119497 - DNA, 348 bp, Homo sapiens
aggatcagacacagcaggcgtacatcccaggtttccagactcctaatcaagtgctctcttcgctctgtccctatccagtggtggcagcccatgtctgagccctcagggctataacaaccatgcaaagctcggacggggcagggtcatgccaggtgtagagaaacctctctgcaagctcaccagagtataagctgccctctcggagctgttccctggcccccttctttccccttgccatctaggaaagggtgggtggagggccagtgatgtggcaggggaagtgaaacacacttagacgctgaatgtttgaccttccatgggtgccgatgaatagcgaggggatcctct

SEQ ID NO: 119498 - DNA, 311 bp, Homo sapiens
atttaggggtgaagaataatgatgtctgcaatttagtttcacacagtttaggggaaataaaggagggagaaagagaaaagagagagaatgccaacatgcgaggagttaatagatttttgactctagattgaggccatatgggagcttattgtgctattcttttgatttttctgcatgtttaaaattttttctttttaaaaagttggaggtaagggaaaacaagtatttacagaagcagtactttgattgaaagaaatggattaacaatcaagtttggccaggcacagtggctcacgcctgtaatcccagca

SEQ ID NO: 119499 - DNA, 590 bp, Homo sapiens
tattcatcatgtcagtgacagaactaaaataagagagctacatatatgaagattctaaattggaattggcaagccactctccaccagctaaatgtggcctactgcatgtttttataaatgaatttttattggaacccatcacacctgttggtttgtatgttgtctaggcctgcctcacaggtacaaagacacattgagtattgcagcacaaactatttggcccacaagcgtaaaatactatctggcccattaagaaagaaaatttgcaacctctagtctaaatgggatcaactctgtggtagctaatttgttttgttgaagaggtacacatactgtaaaaatttatctaattctgtcttaagtcaaattatgagggttttctctacactgaaaagactaacattttaagtctctctttactagtttaacatcaaagtggttaaaagttgtttgcctttttaaaaaatgttcagattgcttagtgttttgattctatggtgatgacagattaagaatttatcacttctttctgtatgtgtgtatgatatatgtttaatatatatttactaaatataagatattcaaaacac

SEQ ID NO: 119500 - DNA, 379 bp, Homo sapiens
aggtaatcttatatttattaccagtgaccattgtggcagcaatggttgttaggttttataatgttatatcactgctcaccaaacagaatttgttcttttgttatggagcaggttcagtaataagagttggtgagtattattcagaagagaagctgcctcttgggttgagtaattaataaagtgattcattgggaggtagtttttgtctgtaagaatctctaaggaatgatcacaatgataagttttaggacatcccgttttaaaaactggactcttacaaactttgttatctagatagcattaggtataactaaattggggagacaaaagtgaaaaacgattaaccatataagggtggtttcatgcaggtactgtggat

SEQ ID NO: 119501 - DNA, 722 bp, Homo sapiens
ctgcagtataacacgaaacttttctcacaaagtttgggaggcacatcaccaatgtgttgatcagcaaatatttattaaactaatgctcttggagaccaagccaacagttaagagcacgggcagtcctgaacataatcaaacctactcgattatagattggagaaagcccagaatccaagccccaagactgtcccttaatcactatgtgaggataggaaagcgctcagagcaccagttccctcatttgtaaaatggggcttacagtcccaccctggaaacatgtcttaaggatcacatgaagaagcacaggggaagtgcttggaacagcagctgccatttggaaggtggtaactttgaagttgatatctaccaggaaagtgatcacaagggcagaactctgacttttcccattttcctaagatctatttctaaattcagtagcattggctctctcagtctaacggcagtcagtccactgtctcggtggtggtgttttttgaatcattaatcagaatgaatagtctatggtacagataatacatgctgctgagtttcagaggacggaggtgttttcttcagatgcatgttgaggaaaagattcacacagtaaaaggtacattccatctgaaaaaaacgtagtggggaggggcgcaaagagctgctcagtccaaccagaatgtatgtgtctaccatagaattacagtaatttaaccctggaaaga

SEQ ID NO: 119502 - DNA, 420 bp, Homo sapiens
cccagctgtctgacacaggctgtgcagccagtgaagcctcagccctcacagttgccacaaaactttgggagtaaaatctgaaaagcttttacattcaaaaccattaaaaatctacttgttggctgggtgtggtggctcatgcctgtaatcccagcactttgggaggccgaggcgggcggatcacctgagatcaggagtttgagaccagcttggccaatgtggtgaaatcccctctcctgtctctactaaaaatacaaaaattagccggtcatggtggcgggtgcctgtaatcccagctactctggaggctgaggcaggagaatcgcttgaactcagcaggcggaggttgcagtgagccgagatcatgccattgcactccagcctgggcaacaagagcaaaactgtgtctcaaaaaaaaaa

SEQ ID NO: 119503 - DNA, 562 bp, Homo sapiens
gcgcctagaggatcctcactggtcgagttccacataatctagttttttggttccacataatttgggaggtggggggagcaagtcaaggggacacaagtatgtccaaaatcaaatcacaggttactataactacaaaaaatgttcagattactgcttttgtgtaatgaaaaggtagaatagtaatttatgtcctttaaaactactagctattttattttaaaagcatatatcaaggtgatttaatagcactattaaaaaacctaaaaattgatatatatttatagacttaacataaaaaataacccataacaaatacatctagatgaaacaaattattggcttagaaacaacacagcatttctggaaaggaattatcaagagcagaatgaggaaagcataagggaatctaaagtacaaataaggccaggggctatggctcacacctgtaatcccagcactttgggagggccaggcgggcggatcacctgaggccaggagttcgagaccaggctggccaacatggtgaaaccccatctctactaaaaataaaaaaactagccag

SEQ ID NO: 119504 - DNA, 187 bp, Homo sapiens
tcaaattcttaggagttaattttctatgtttgaatctttaaaaagaaacatacaaatgtaggatgaatacattcagagggtttagtgcatgctttggctagcaattcaataaagatgacttggaaggatcaaagcaaagatttccataaaattgaatatgagatatttcagcaacatcaatgctata

SEQ ID NO: 119505 - DNA, 297 bp, Homo sapiens
ctggaagtgtggtgacaaccaaggacaggaggggctggggccggtggccgtggctggtgaaccctggccctgctagagacaggaggggcactggcgctggggctggacccggaaccttccctctccttcgccccacactgaggtgggcggggcctcaggctgcactttggcccagggcctgagtctgctcctggctgggatagcgggacacacccaggcggcttgtgcagcgtctggcctcgcctcgatctccgatctctcacgggcacttgaccctctgtctcacgacttaaataa

SEQ ID NO: 119506 - DNA, 714 bp, Homo sapiens
cttttattaaaaattacttttacattttacttttataaaaatgtcagtataacctggtcaacatagcaagaccctgtctctacaaaaaaataaataaataaatgaaaatagctgggtgtgatgactcacgccggtagtcctagctacttgggaggctgaagtgagaggatctatcacttgaaccaagaggtgtgaaattacagtgagctacgatcatgtcactgcactccagcatgggtgacagaatgaggccctgtcttaaaaaaaaaaaaaaaaagaaaaagaaaatgacaatctgcttcctaagcatgtttgttgtggagataaaatgaagattcagaatataggtgaaaagtgtttggaaatggagtttcaaggaacatgtccttccatcatgatctggtcccacttgcctctccaatctttctattcatcattatctgctcccattctcccaaactctatacttagtcctaaatactttctgatctcttgtgctttgggaacctttacaaatactgttctgacccagtgttctcccctttcccccaaaccccgccaaaatctagctgctactctcattgttcaggttcccattcctatcttgctttcttcatctcctcaaactggattttaggtatttcttcttatggcacttcatttattatgttttgattgccagtcttcttatttcttcccttcaatagtatggct

SEQ ID NO: 119507 - DNA, 125 bp, Homo sapiens
aagcaataaaactgaaagattaggaatatattaagaatcatagtatactggtaaattattaaacaggtacagaaataataaattttataatcattgtttatacatgtcttttatcagctgtttaa

SEQ ID NO: 119508 - DNA, 488 bp, Homo sapiens
taaggcatcgccttgatttcttcttaaaacgatttattctggggctgatttttcccaaccttaatgtaattgtactttaatcaataaaaaatttcctgtggaacaactgggaggggtggggaggagagaagcccagcaaatgtgaattgttgtttatttgtctctcttaaacaatgtttcacgttaaaccagttgcaaatgaaatgaattgtattataaccatcttggaaaaatagctgctgatctcataaattcatcgagcttcctggttccaaagccctctcttacaataatagtaagtgttgctgtgctcagtaaatatctgcctccacttggctggtagtgaaggaactagaatggcaaacccaagatgggccccccttctgcctcctccaaaatcacaggttttgtgctgaccctgaacaggaatggagaggaacatggcttcccaggacagtgactactgtcctgtctcctaggatgccagt

SEQ ID NO: 119509 - DNA, 231 bp, Homo sapiens
ttttttcctcctttgttagattcaagatagtgagacatatacatacgtagttactctaccctggcttcctggcaatcatttagatagtttcttttactaatttgatcctcttcgctgataactttttcttttctttcttcttcttcttttttttttttcctttttcttttttgagacaaagggaaacaccgggttaccgagcatcgaatcgtaactagtggtcactagctg

SEQ ID NO: 119510 - DNA, 704 bp, Homo sapiens
gcgagtaggaaatgccagccgataaaggaagagagcgcttggagactgatgccctgttaaaccaatagtgtgagagatgggagaaatttggacggggctttccaggatagaggagctaggggaggggctgaggagaaaccggacggggtcctttgcccggctgtccttgggcaacttcatttcaaaagcggcaccgtgtgcctcagtttccccactgatctaggaggtgcttgtatatcctccgtttaggacgtcgacgtgcctcagttttactgtagtcaataagtctggattaggggcatggttcgggggtgaagtctgggttctggagacatggcctgggaatccggaaaaggactttgagccagagaggacattcatctgtgtactcattaatgcgctcatacgccgtcctttcattcggttgacagactatgcggcctttttgctcagcactgggagatatactcctgatccatcactgtcaacccagagtggtcgggaaagtgggagccccggagctcagaggaactggctgacccagggacctgaggccagcagggctgcctagagggggccgcccgagctcagatctaaagggcatagtaaggtccggcgcggtggctcacacctgtaataccagcactttgggaggccgaggcgggcggatcacatgaggccaggagttcgagaccagcctggcc

SEQ ID NO: 119511 - DNA, 678 bp, Homo sapiens
tctcaggcagatcattgccccctacaccatggtcctgggcagctctaggattacatcattcttccaacttatgattcaagtaaacactcatctcctagcatgcattctgcaaaatatctctgtttagctctggttaggtcgcatggtcgcttttgaacaaatcacaacatccaaggatctgagatcatgtacccacctagagtcaggcgattgacagcttcagttggaagagggatggttcccaaaggacaagaaggcattttgttatcagaaaggaggagatgggatggaggcatggaaaaatcagcaggtatccactagagatcaccattatatacgtactttatatattttgtatctaagaagataaattttatatagcacgtatatacaatatttacatatataaacatatatttatagaaaaaagactagaaggaaataccaaaataccaatatatgaagagcagttatctcaggtggggggatttcaggctagtgggtttttaaattttattgtttattacttccctgaaacctccaagtttcttacagcaaacaaacattacttttaaaatctagggccagcggtggggggtcaggcccataatgccgccctttaggaggctgagcagggaggatacctgggtccagatttgagaaccgcctggccactaa

SEQ ID NO: 119512 - DNA, 503 bp, Homo sapiens
ctgtagtcccagctactcaggagcctgaggcaagagaattgcttgaacctagaaggcagaggttgcagtgagccaagatcatgccactgcgctccagcctgggcgactgagtgcgactccgtgtcaaaaaacaaacaaacaacactacaatgagatcctactacacacccattaggatggttataattttttttacaaagcgagtatatagagaaattggaatcctcatacatagctgtgggaatataaatgtgcagagaacacagtttgcagttcctcaaaaagttaaacatagacttactacatcacccaagaactccactcctaagttacagtgtggatgcacttcaaaagccagatataaaaggccacataatgtatgactcaatttttatgaaatgtctccatagacacagaaagtagattagtggttactaatctgagagtggggaaattggggtgtaattgcttaacagttatggggtttcttttatgggtgatga

SEQ ID NO: 119513 - DNA, 729 bp, Homo sapiens
  misc_feature (142)..(142): n is a, c, g, or t
  misc_feature (167)..(167): n is a, c, g, or t
gggagaaggaccttaggtacccaattcgctagggttcgtcgtcccgtcctcctacgtgaggataaggtagagacgagtggcgtctatcatcgtcgaactccatactgatgatcacatgggcttgtagacctcaatagcattngcgatacgttcatccatacttagtnagacagcgcacgcagcgccgactgccatgatcgcgtgcgtgaatagatccatcgtagggcgtccatcacgtcgtccttgggtcttggaaccggagtcaaaggcgatctccaggtcatttgtgctcggtcctgatctgtgagtaataaatattctgtcctctgatccagaggtctggggtgttggggtatgtgagtatgtgtgtgtgtgtgcatgtgtgtgtgtgtgtgtatacacacaaaactggcagactaatttcttagcttgtaagtagcataaaagtctcagaaacttcacagtttcagacttaatgattggattcctccttcctcttattttacatttggggaaagtcaactcctgaaaggagccaattgacttggctaaggcacacagctatttggacctgatagattctgtcttttccatcagacttgacagagagcactggcaaggtaataataaaacctggacttgaatctaagctctgccatttagttgtagtggaggttttaaaaagtgtggatgaaagcctttattttctcatctgtgagaagcatataa

SEQ ID NO: 119514 - DNA, 214 bp, Homo sapiens
gatgtcagctccttgggagcaggaccatattttctacttggtcaatgattcccacacatctagaagagtagaataccctgtacttgctaccacatgatgccaagggaagcacacaaattaagtgtgacaacacaccacaatgctcccccaatacaccactaagacagcagagctacaaagatagcaaatgttagtgccaagggctagtgatcct

SEQ ID NO: 119515 - DNA, 366 bp, Homo sapiens
attacaccgggtatcttatttttttaagagaagcccaaattaaatgcagtttatttttcttgaaaagaaatgctgatctctattcatagcctgctaatagcattatttctttttttttttttattttcggtacacacagaggaacagaagggaggggtgtaaaggaagggagtgttataaagacttttttgtagaagtgggattttttgcaccttcaattacctcatggcaggtgcaatgaccactttgtgctctcttgaggacaaaagtggcaatctgtacttacaaatacatgatcatatcagtaaaaatgaggccatgctgaaaatttgccccgagatgtttaaaggacactgaattttgact

SEQ ID NO: 119516 - DNA, 129 bp, Homo sapiens
taccacaacaatcaacaaagaagatttctgtgactaaatgtggggtggaggtgggggactttttccacacaccccaagcaagcaatcagttctgcagcagtcactagcagggtatcctccagttcaact

SEQ ID NO: 119517 - DNA, 658 bp, Homo sapiens
atatgttgcctacaagacagttcatttttaaggatacatataaattgaaagtgaaaggatggacagatatgccatgtaaatggaaactaacagagagcagaggcagatctcttaatatttacatcagatgaaatagaattaaagtaaaaatttttaagcagagacagggtcattatataatgataaaaagtggtctgttcatccatggggtataaaagtcataaaggtatatgcactcaacattacagcacctaaatatataaagccaatattaaaagctttgaaggaaaatataaaatctaatacaataattgatgggacttcagcacacctctttaagcaatggtgagatcattcagacagaacatcaatgagacatcagacttaaaccacaattgaaaaccaaagttgcccatatggacctaaaagacattgatgcagtcttctgttcaacagcagtggaatacacgtttttcaaaagtgcacacagaatattctccagagtaaatcatacgttaggtcacaaaagaagtcttaagaaattttaaaagattgaagtaatattgaatatcttttctgaccataatggtatgaaactagaaatcagttataggaggaattttagaatattcacaagcacatggaaattaaataacat

SEQ ID NO: 119518 - DNA, 331 bp, Homo sapiens
ggagcctcaggaagctaatcaacaacctcaaatcacaaaatcagaaaagtgttgaacatttagaagaagaatagaaaggaaaaaaaaatgcctctgagttgtggtattaactgtcagtagagcaaaacaaatgtgtacgcccattttcttttttttctttttctttttgagacaagagtctcactctgtcgcctaggcttgagtgcagttgcacaatctcggctcactgcaacctccgcctcccaggttgaagcaattctccttcctcagcctcccaagtagctgggattacagatgcttgccagaatgcccggctaattttgcattttta

SEQ ID NO: 119519 - DNA, 507 bp, Homo sapiens
ctctagaggggctaaacgagaggttctgggcttgagcctactaataccaggcatagttgagggtggaggtaagactctacattaagaacaggattaagtaaaattctctatgctgaatggtgattccctcttcctaccacttcctctgtttaactgccagaatgccaataggcaggagagtagatatgtcttctctgggtagttgaccaggtacaggaaagacctacaaattcactggcttttccacaatgaaatagccagctgccttgtcatcttacggtgaaggcctccagtagctaagttttattagcaaatagagatcttagtttttagtttcttgtcattaaataaaaagccaataaaaagcaagctgatttgtgctgtagacttctggggaggctcaggaatttgaagcattgggttctttttgggacattggtctctgggttagcctaaaacagggattagttaaaaatctgagaagcagatccttttccttagcacagg

SEQ ID NO: 119520 - DNA, 314 bp, Homo sapiens
ttcggctgtagtctgtaccttacaggggtccggagtgtgggcagctcctggcttgtttgcctgagagctcatagggcaagaagggtgactggactgaccttgaattcaggtatcctttggtccttcctaggccttcggcttaaaaaaaccaaaagtgctagtttgctttgggcagtggcaagaggagggagagctgacattgtaagatttgaagatgtgtaacagtggttagatttgtgataaatatgtgcttggatgtaaattgtggaaaactgagatttgaatgtaaaaataactgacatattagggtatca

SEQ ID NO: 119521 - DNA, 518 bp, Homo sapiens
cctgcgtagcccaccccttcccaaagtgactgccaaatcagcattctgtcaccccacagtgcttcctaccttgccaggcaaccaccccctcttcctgaactgccttttaggaaaatgaaaagtagataccttttctggaaaagagtaggggcagcaggccttagaaaaacacacaattacattggtcactgtggctcagtgtgaaacggttgcccacatggtacctagtgaccacaagacaccataaggcctaggtctgggcttctttaggaactggttcttaccctgctgtgggccccagtttccagagaggtaaaatgtggtctttggagcagacagtttttctagtcctaatatcctgggagttctttctcccaagatctagggtcttcctggacccatttgaggatgttagctgggctctgagtaggtggcagtgcactttcaggatggcatgggctttatgctttagtcagtgtaccatgtgagcccaggtatttcctctgtcaggaagcttc

SEQ ID NO: 119522 - DNA, 305 bp, Homo sapiens
tacacaccggggcctgtcacggggttgggggctaggggagagaaaacattaggagaaatacctaatgtaggtgacgagttgatgggtacagaaaaccactatggcatgtgtatatccatgtaacaaaactgcacattttgcacatgtaccccagaacttaaaatataataaaaaaatttagacaaggaatacctgcccatttggggacaagctgaattttccaaggcatctgcagaaccagccttgggtgagaagagcaaagtgttgaaaagtggccagtctgtcactgtgtggatcatttctgg

SEQ ID NO: 119523 - DNA, 467 bp, Homo sapiens
gggggggaaatagaagagagtatttttgaacctcaacatcctgttgttcgtttaagcacagagaagaattcaggaagctagactctgggttcataatttagattgatatatttcttttattcctcttcttccctaattcactaggaactgaatcaagcggtcagaaatatttttttgaattgtcgaaaatcactaaatggatttctgacagctcaaaaaaatattgacagttccttatgctgaatgattcacaaggccccattaaccactacccccagatctatttttagccacatacaattcattacttttgaagctgttaaaaacaatatttaaaagaagggaaaaaagcgttttatgttagtccaaattttttccccttttttttttaaactgggggagcaatgttgaaggcttttttttctttttttcattgttgttttaggtttgtgatcggggtggtttct

SEQ ID NO: 119524 - DNA, 266 bp, Homo sapiens
ttcaggtcttttagctcatttattattttagtaaccttaggaaacaagtaggataagccttattttccagatagggaaactgaggcttagattatcactgatccctggttacatagactccacacactaccttatttgcttataagcacacatcctactgtaaggacatgctctaaacatttctaaagaatcaccagtaacagaatatattagagcaaaatgggaggtcaaagagaaactacagaggagtctcacaggcttaacag

SEQ ID NO: 119525 - DNA, 423 bp, Homo sapiens
cctggggactgtagggatttacctttgtagccctctcgctgcctgcacctccattctccctccagataagggaaccatccacccaaacactctgtgccctggggctgtgtcgccctcgctgtgctcttggcaagtccctgtgatgcatgattaaagcaactgagagtagatttaatttcttggttggtctttcccttttcaaaatgaaagttttaagtgtggggactttcttacaacatgattattctgtacatttccaaagaaagaagaatctgccctacatctcaggctgctctccagcctgcacctaagctttattttcttcccagagactgtgctaggctttgtagtaacacttctccccgctgccgcatgtgattttgcagagcggcatccttcttgcttctccagcttattctctgt

SEQ ID NO: 119526 - DNA, 265 bp, Homo sapiens
tggagagtagaggggaggttctagtgggattgaagaattaatggagtgagatagctaaggaagcaagtagaaatgaatacttgaagagaaagttattattggttgtaatgagggttagaaattactatggatgatgtagttgattgaagaggggtgaagaacaacatcactgggggtgggaggtcagataggtgagtcaggatggagtgcctctaccaatgatgaagatgccaaggaatagtagcagggaagagacatggagcca

SEQ ID NO: 119527 - DNA, 367 bp, Homo sapiens
aatatctttcttcatacaaaacaacatttcttactcattaacactatattttttcttcccaagaaacccagtggctggttttcacacttgactctctactattcctttctctaaaaatggaaggtgcaaagattttctttctcacaaaatctctcatgcttcagggtttaaaaaaaaaaatcttctgacttagtaaatatagactctcaaagaatgagcagactcgtgtgtgacttttcataacatacacaggacagaaatactacaaataactttagataaacagagggaaatatcatgcaatatccctctaacttgatttctgaagaactgtgctttaaatgtgatggcatttcaagacaaaatt

SEQ ID NO: 119528 - DNA, 384 bp, Homo sapiens
ccagaaggacactttcctcctttgggggtgtccccacgtcttccagcagcgctcaggcactgagtcctcagggtgtacctcttcagacacgctggagacttagagattggcaagtctcagtagggcctgccaacctgagcggagtaagcatgaagcaggctgggctggtttcagcccctaccagcttttcctcatgctgcctttggccttgcattcttgcctctgagcgagtccagcaactagggtctgggtggcttcctgcatcccagagcaatcagaagacatccttaaatgatgagggagccctggcccaggcaagtgcatgttcatgtgcgcacacacgcaaacacacacacacaacatgcactcaggaaagccaccaat

SEQ ID NO: 119529 - DNA, 253 bp, Homo sapiens
tcgtctcatccaagagtgagaaaaagagtgaaaaaatgctcaacatttttagtaaaactatgcaaggcccagtacattgtactgtttcacataccttaaccttcaaaggacaaattcgccttaagaattcagtacagccaagttttgtctgtgtttacttcctttcaaaataggagatttttataacctctcattatcgctaaactttgccaagacgtcaagaactaaggtttcttttcaattacagtatact

SEQ ID NO: 119530 - DNA, 2759 bp, Homo sapiens
tccagtgccccacccccacccccatcctgcgcccagctggggtgggtttgggtccattggtgaaaaaagtcacacgttcccatcagctgctcctccccctggagacaaggtaggggggagcagaggaggcaggcgccgcggaggaccctggccgacctctagtccctccgccgccgccaccggagcggtgcgtcccggggctcgagcgcagccgagtacccgccgaaggctgtccccatcagtgcgtgtctgctgccgggcagcggcagcatccaacctgctttattcctcctgcctgcagcgccacagcgagcgagcgagcgaggagggggagagagggagtctgtctgcaaagtgctgctccctggtgctcagaggcggctgctccagctccaactctcattcatttcgccggttaacatgagagatcatggccgccttcgggcttctcagctatgagcagagaccgctgaagcgcccccggctcgggccgcccgacgtctacccacaggaccccaagcagaaggaggatgaacttactgctgtgaatgtaaagcaaggcttcaataatcagccagccttcactggagatgaacatggctcagccagaaatattgtaattaacccatcaaagattggagcttattttagcagcatattagctgagaaactgaagcttaacactttccaggacacgggaaagaagaaaccacaagttaatgctaaagataattattggctggttactgctcgatcccagagtgcaattcatagttggttttctgacttagcaggaaataagccactttctattttggcaaaaaaggttcctatccttagtaaaaaagaggatgtttttgcatatttagctaaatattctgtgccaatggttcgagcaacgtggctgatcaagatgacttgtgcctattattctgctatatctgaagctaaaattaagaaacgtcaggctcctgatccgaatttggagtggacacagatatctaccagatatcttcgagagcagttggccaagatttctgacttttaccacatggcctccagcacgggcgatggccctgtccctgtgccaccagaggtggagcaagccatgaagcaatgggaatacaacgaaaagctagcatttcacatgttccaggaaggaatgttagaaaaacacgaatatttgacatggatcctggatgttttagaaaagatcagaccaatggatgatgatcttcttaaactcttgctaccactaatgctgcagtattcagatgagtttgttcagtcggcctacctgtctcgtcgtcttgcctacttttgtgcccggcgtctttccttgctgctgagcgatagccccaacctccttgctgcccactcaccccacatgatgataggaccaaacaactcgagtatcggggcccccagccctggcccccccggccctggcatgagccccgtgcagctggccttctcagattttctttcctgtgcacagcatggtcccctggtttatggacttagttgtatgttgcagactgtcactctctgttgcccaagtgccttggtgtggaattattccacaaatgaaaataagagcgcaaacccaggctcacccctggatctgctgcaggtggccccgtccagcctccccatgccgggtgggaacacggctttcaatcagcaggttcgggcaaggatttatgaagtagaacaacagataaaacaaagaggccgtgcagtggaagttcggtggtcatttgacaagtgccaagaatccacagcaggggtgactattagtcgggttttgcacacgttggaagttttggatcgtcactgttttgaccgaactgattccagcaattccatggagacactttatcataagattttctgggcaaaccaaaacaaagataaccaagaggttgcgcccaacgatgaagctgtggtgacgctgttatgtgaatgggccgtgagctgcaaacggtctggcaagcacagggccatggctgtggcaaaactcctggagaagaggcaagcagaaattgaggcagagagatgtggtgaatcagaagtcttagatgagaaggagtctatttcttcatcctctcttgctggatccagtttgcctgttttccagaatgtgctgttaaggtttttagatacacaggccccctctttgtcggacccaaacagtgaatgtgaaaaggtggaatttgtgaacctggtgctgctcttctgcgagttcatccgccatgatgtcttctcccatgacgcatacatgtgtaccctcatatctcgaggagatttgtcagtcactgcctcaactcggccgcggtcaccagtaggggaaaatgcagatgaacactattcaaaggaccatgatgtgaaaatggaggaacagagtattatggcgcatatgggcattgactcaggaaccactaacatttttgatgaagtagacaagagtgactttaaaactgactttggttcggaatttccaattttttctcctatgcctggagaatcctgtgagaatgccaacacttcgttgggcagaagaatgtcagttaattgtgagaagttggtgaagagggaaaagccaagggaattaatttttccatctaattatgacctccttcgccacttacagtatgcaacacattttcctatacctctggtaagtcattgcttcagttaatctataccctgattattttattataagatcaataactgttgaacgtcagattattcaa

SEQ ID NO: 119531 - DNA, 2654 bp, Homo sapiens
tccagtgccccacccccacccccatcctgcgcccagctggggtgggtttgggtccattggtgaaaaaagtcacacgttcccatcagctgctcctccccctggagacaaggtaggggggagcagaggaggcaggcgccgcggaggaccctggccgacctctagtccctccgccgccgccaccggagcggtgcgtcccggggctcgagcgcagccgagtacccgccgaaggctgtccccatcagtgcgtgtctgctgccgggcagcggcagcatccaacctgctttattcctcctgcctgcagcgccacagcgagcgagcgagcgaggagggggagagagggagtctgtctgcaaagtgctgctccctggtgctcagaggcggctgctccagctccaactctcattcatttcgccggttaacatgagagatcatggccgccttcgggcttctcagctatgagcagagaccgctgaagcgcccccggctcgggccgcccgacgtctacccacaggaccccaagcagaaggaggatgaacttactgctgtgaatgtaaagcaaggcttcaataatcagccagccttcactggagatgaacatggctcagccagaaatattgtaattaacccatcaaagattggagcttattttagcagcatattagctgagaaactgaagcttaacactttccaggacacgggaaagaagaaaccacaagttaatgctaaagataattattggctggttactgctcgatcccagagtgcaattcatagttggttttctgacttagcaggaaataagccactttctattttggcaaaaaaggttcctatccttagtaaaaaagaggatgtttttgcatatttagctaaatattctgtgccaatggttcgagcaacgtggctgatcaagatgacttgtgcctattattctgctatatctgaagctaaaattaagaaacgtcaggctcctgatccgaatttggagtggacacagatatctaccagatatcttcgagagcagttggccaagatttctgacttttaccacatggcctccagcacgggcgatggccctgtccctgtgccaccagaggtggagcaagccatgaagcaatgggaatacaacgaaaagctagcatttcacatgttccaggaaggaatgttagaaaaacacgaatatttgacatggatcctggatgttttagaaaagatcagaccaatggatgatgatcttcttaaactcttgctaccactaatgctgcagtattcagatgagtttgttcagtcggcctacctgtctcgtcgtcttgcctacttttgtgcccggcgtctttccttgctgctgagcgatagccccaacctccttgctgcccactcaccccacatgatgataggaccaaacaactcgagtatcggggcccccagccctggcccccccggccctggcatgagccccgtgcagctggccttctcagattttctttcctgtgcacagcatggtcccctggtttatggacttagttgtatgttgcagactgtcactctctgttgcccaagtgccttggtgtggaattattccacaaatgaaaataagagcgcaaacccaggctcacccctggatctgctgcaggtggccccgtccagcctccccatgccgggtgggaacacggctttcaatcagcaggttcgggcaaggatttatgaagtagaacaacagataaaacaaagaggccgtgcagtggaagttcggtggtcatttgacaagtgccaagaatccacagcaggggtgactattagtcgggttttgcacacgttggaagttttggatcgtcactgttttgaccgaactgattccagcaattccatggagacactttatcataagattttctgggcaaaccaaaacaaagataaccaagaggttgcgcccaacgatgaagctgtggtgacgctgttatgtgaatgggccgtgagctgcaaacggtctggcaagcacagggccatggctgtggcaaaactcctggagaagaggcaagcagaaattgaggcagagagatgtggtgaatcagaagtcttagatgagaaggagtctatttcttcatcctctcttgctggatccagtttgcctgttttccagaatgtgctgttaaggtttttagatacacaggccccctctttgtcggacccaaacagtgaatgtgaaaaggtggaatttgtgaacctggtgctgctcttctgcgagttcatccgccatgatgtcttctcccatgacgcatacatgtgtaccctcatatctcgaggagatttgtcagtcactgcctcaactcggccgcggtcaccagtaggggaaaatgcagatgaacactattcaaaggaccatgatgtgaaaatggagattttttctcctatgcctggagaatcctgtgagaatgccaacacttcgttgggcagaagaatgtcagttaattgtgagaagttggtgaagagggaaaagccaagggaattaatttttccatctaattatgacctccttcgccacttacagtatgcaacacattttcctatacctctggtaagtcattgcttcagttaatctataccctgattattttattataagatcaataactgttgaacgtcagattattcaa

SEQ ID NO: 119532 - DNA, 202 bp, Homo sapiens
tcctttcttttgttctaagatagtgttaaaaatagatcagatccattacaggcatgagccgccagacccggcctttttctttcttaaacagctttattgagatataattcacatatataattcatccatttaaagcatacaatttaatggtttttagtgtattcagagatatacacagccgtcaccacagtccattttagaa

SEQ ID NO: 119533 - DNA, 302 bp, Homo sapiens
cctgattgacatagtgcactacaacttagaactcctggactcaagcgatcctcctccctcagcctcccaagtagctgggactataggcatgtgtgactgtgcccagctagaaatttgtattttaaacatgtacctagatttaatgcttatgaacactgaagttttatttcttttaattaattgattaattagttaatttttagagacagggcttcacttggttgcccaggctggagtgcattggtgtgatcataacttactgtagcttgtagccttgaactccaggcctcttgcttcctgag

SEQ ID NO: 119534 - DNA, 375 bp, Homo sapiens
aagtgcctagcccaagggaagcactccacagacaatccctagcgtgaggtgtgacaccaaggccccagccacctcagttctgagcgctgcagggaacacctgctctgagcctgctccgcacacagacacgctccccgactcctcaggaaaaagaactacgcaggtgggtcatcttgtgctcccagggccaagcacggtgacattccccaccctgtgacaggacacgggctcctgttcctgggctccccactgcacctagaagcactgcacgatgcagatctccacggcctgtgttcaggctagtcggggctgtcgggctagtcggggccccgactagcccgacaggggggataacacgttcgcgaggggtaccga

SEQ ID NO: 119535 - DNA, 303 bp, Homo sapiens
cctcacgcacatttgcaaagtccctttttgccatgtaagataatatattcataggtccggggggttagagcatggacatcttttgggtgccattattttgcctaccacatcaggttaacaaacaaatacaataaaatagttacatattgtggcacatgctgaaaaagacataaagagagtgctatgagagaggtgagaatagggcacccactttagatagtgtagttaggagagacattttagcgaaggtgatattcaaggtgagcaatgaaggatgagaaggaagtttccctcattaaatca

SEQ ID NO: 119536 - DNA, 95 bp, Homo sapiens
ggatggatgtgtttgtggtttgtaaccattacggtttaaaccatggtttaagaatttgcccaaataacagaaattttgttcgggaagggataaac

SEQ ID NO: 119537 - DNA, 381 bp, Homo sapiens
gcatagatttgtggtctttgacttgaatactttgtttttttcttagcatccttggagctggttggcaacacaggtcaggccagatgatgaggccgcggtgggcacagagggtagattaaagataaaattcctctgtaggagcatttcccaaatgtcagagaatatggacaaagcagcactttcagaattctgtttcggacaatgagaccaggtacttgcccataatgcgtctgttcaggaattcagtaggagaatcatagttttttgctggtaaagaaaggatctagctctgttcagatttgacagaggtaaggtctgtacttgatactgatgagagagtgaagtagtttttggagtgctctggatttcagggaaaatgag

SEQ ID NO: 119538 - DNA, 881 bp, Homo sapiens
caaataagaacatggtaactttttctctaaatgggtcagatagtaacctctactttatagtccctaatcagtgtgcccacctgtagacatagaaactttagtggttcctaggggcagagagggtgggaatcaggccttaaagagaggcagcaggagacattaactttgtgtaattgtactctgatgtactaagacttaatgacttaggttccttagcatctatatctttttccaaagctgcagctgtaattcattttactatttctcctaaagagtgtccattcagtgttattattattcatcaaataggttttgcatgcttactatgtggagggcaagtcataagatctttaactgtaagaggaatttcttggatccctttctttatggcgctcttagtctaggggaggtgttagaggcaggatgatggacactaagaaagatgtaattataaaactgttaagttatggcaacattaactgatagtcaggatgcagtgcttcccaggagaaacactgtgctcctttgaccccatgagtggagttgtcagagaagtctcagtgaagaggcacatctaaacttctgtagggggtcagagaagagacagcaatttattcagtttgggattgatgaaagtattgcaaatgtaggcggcactactgcctttacagaagagttagatttcaccaggaaagaaggaaggaaaaggtactctaagcaggaaacacaagaaaggcatgaaaaaaaattttttttaaagtatgtgatatgtgtgtgggatatgttgaatacccttgggttgcttgaaatagaattttgtgtcagcaggggagaaaaaggtagggtgaggacagcttgtgatataagatggatggtacagt

SEQ ID NO: 119539 - DNA, 602 bp, Homo sapiens
attgtatcccctatagcaataactgaaaaagcaatgccaaaaggtatatgtaaagagcctttaagtataacttaaaaactgaaatggaattataaaatatattgaaataatgtatatatagatatattgttcaaagtccggaagggaagctaaggaacaaaatacagaggctacaaatagaaaaacagtagtaaaaatggtagataaacacctaatcattcaaaaattccattaaatagaaatggaagaaccacttcaattgaatgaaagagattgtcagattgtcatcatggattaaaaattaaaagcaaggctggctgtggtggctcaggcctgtaatcctagcacttttggaggccaagatgggccaattgccctgagctcaggagtttgaaaccagtctgggcaatatgttgaaaccccatgtctactaaaaatacaaaaaattagctggatgtggtgatgcgcatttgtaatgccagctactcaggaggctgaggcaggagaatcgcttgaacctgggaggtggaggttgcagtgagccaagatcgtgccactgcactccagcctgggcagcagagcaagactctatctcaaaataa

SEQ ID NO: 119540 - DNA, 595 bp, Homo sapiens
aggaggcaatgtctgagctaagtcttaaaggatgaaggacaattggccaagtggagacaaagggaggaggggattacaggttgagggctcaacatgagcaaagaacgggtgatgcagatggctggggtaatttgtcacagtagcaacaggaaatcagtacaagccctggacctggcccattcttcatgtccccttcccaagcctccaagcccacatgggcacttgccaagatcagagctccaggggcctccagggacggggttttcagtcctttgggaccatgatccacagagagaaattgatcctacttgagacacaggaagcaacacatgtaatgcaacagccaagcacccaacgatcatctaatgcaacagccaaacacccagcgatcatctaatgcaacagccaaacacccagcgatcatctaatgcaacagccaaacacccagcgatcatctaatgcaacagccaaacacccagcgatcatctaatgcaacagccaaacacccagtgatcatctaatgcaacagccaaacacccagtgatcatctaatgcaacagccaaacagacaagtgatcatctaatgcaacagcca

SEQ ID NO: 119541 - DNA, 252 bp, Homo sapiens
gcgtttggctgggaagcagggcaaaagctggcactggaaaaccgatgccacttctgtgaactgtctgcagccaagcacccaacgatcatctaatgcaacagccaaacacccagcgatcatctaatgcaacagccaaacacccagcgatcatctactggaataggctaatcatgcagcagtatcatgtaactgtgtgtgccatagaccgtacggaacatctaatgcgagaggcaaagacgcagggagtatcta

SEQ ID NO: 119542 - DNA, 245 bp, Homo sapiens
gctatcatggcttacaccttccagagcctctaatagaggttttgtaaaaagggagaaagtatgcacgtattaatgcaagtactagacataattaaagtaattaataacattgacaagaattactaaactattgaaatataatacagtttctttaaaaatacatactgtatattcagaaagggtaatgttatttttacatcttaaaaggaattcattttcatctctggttcaaaatatatatcttt

SEQ ID NO: 119543 - DNA, 384 bp, Homo sapiens
tatagaagagagaagactgaggactgagtcttgtggcacttcaacattcagaatttaggaaaagatgggaatatcagcaaaggagcctgaggaggagcagcgaatgtggtaagagaaaaaactggagaacgtgatatcctagaagctaagtgaaggagagaatgacccgttgtgtcaaatactaagattatgtcctgaagaaagaccactttggttataggatggatgatggactacagagaggcaagactgtaggtggggaaatagatgctgttgctctacttaggggagaaatgataaatattgtcttaggccggggtggtggcatcgataaacagcggtgtttatcgatgccagaaaaataaggtcagagtgaagtagaat

SEQ ID NO: 119544 - DNA, 581 bp, Homo sapiens
gggaaaaatgtggaagacatgagccttgatcttcacctcacaaaactagctcaaaatggatgatagtcgcatacataaaataaaaaactataaagaagcttctagtagaaaacagaaaaattttacaaccttgggttaaacatttcttttttttttttttttcgagattccgtctccaaaaaaaagataaaaagaaaagaaaaagaaatgtttctggagttgtttctattaaaagggaaagccttactgaggcctccttaccctctctatctgcctagtataatttctgaataactcctctattaaaagtaccactgaggtgcttaatatgacatttctgatatttcccaatgctcctccacaaattcaatttggaaaggtaatctgttccaggagggcaaaccaaagaaaaagtcctaggctcctgagtcaaggcttgtttctttcctttgtacaagctgactactttttaatcatagtaaaaatgagaaaaatgcaagatgaagttaacagcattgctttatttcccatgaaaagctgttataaagcattctcaaaataaactgttattcagccacaaa

SEQ ID NO: 119545 - DNA, 569 bp, Homo sapiens
aaaaaaaaagacttttggtattaggctgggggtggtggctcacgcctgtaatcccagcactttgggaggacgaggcgggtgaatcatgaggtcaggagttcaagacaagcctggccaacatggtgaaaccctgactctacggacgtctgtaatcccagctactcgggaggctgaggcaggagaatcacttgaacccgggaggcagaggttgcagtgagccgacattgcaccactgcactctagcctgggcgacagaggaagactccgtttccaaaaaaagacttttggtactaagctttctcgtatgatttttctgtaatcttatattaatagacgtgggatgacgattatgaaaaataactttttagtcattcggtaggttgtcatgtagtcagtgttaagtctctctttactttgaagatttagagttctgaaaagttgatttgtgcctgcagtatctcttagtgtttaccacaagtcatttctcagagtgtctgtagatgtttaggctgtacttaagtactgcacctacctacttggaatatctttttgagactgtattcagagat

SEQ ID NO: 119546 - DNA, 345 bp, Homo sapiens
cactgcgcccagccagaaaatatattttttaattcacgtattttgagaagaaagtacaatttgaaaccaagaagtttcctttcattattcttaaaacgttttcagaagtaaaatatgtggttctgctaaaagcagttcttttagttaaatgttaaaggctgcaccatctttgtgttttttaaacataaataacttctactttattagttgttaaattagaaaaagtctgtaattttacaaaattcctaacactgtggaaacagcaaaagtgatttaactcctattgaagtcagaagcttgcttttatatttcccatctgatgattccaaatgtatacagttttct

SEQ ID NO: 119547 - DNA, 688 bp, Homo sapiens
gggcacatattataaataaggggggacaagactaaattgggataaaatatattattatgattatgtaatgttttaatataaaatgtgaataccaagatcttggatagtgaagttgaattttaagaaaattatacttgggaggtcttataacaaacataaaagacttaaataagagagcatagctcattttgtgattatcgtagtcaaagatttatttaaagagaacctctgcagtacaaagaatgaatttagcttccaatataaaatgtgtaatgtctatattaatcatttcaaatcatagttttccctcctgaactcaaaagaaacttaaaaaaataaatgaaatcctctgcttttcctttgctgtctgttttggttttttgacaatgtggaagtaacagactactaagttatttctcacaaaggcagcccaacacttttccatacacagattactttttcttaatgttttttttcctaactacacatgtgaagatttcatgtccatcatttgtcttcgttttacttggcaagttcaaagagccaaagttatgttatatttgataaataaacttctaaacataaacaggtcaagccacaaatgtctaataacattgctcttctgttcaaaagtaatgatcgtcctggtactttagatcttaaaacatcaaagaatataggattaaaa

SEQ ID NO: 119548 - DNA, 738 bp, Homo sapiens
ctaccccatcccaggcccatcactgagggagacagagcaggtcagaaccaagcctggcagcccccagggctgtgccccatggacgcaggtgtgtctgcagagcagggtcctcccctgccagtgccagccctcaggtgtctcgggtgctgcgttactcttgtgagcttccacgctgacacctgtggccacaatgttggtgtctgctggacctctggccctgttctaggtgcaggacatgtggccacagcaggcctggcccctgccccagggagtggacattccctgagcctgccccccacccccactgagaacttagtggctatgagagaacaggaaagcaggaagctagacagggcacagacccccgacggtggagaccctgacccggagcacgtgggtgtcagttttggggaagccagacagggagggtgctaacaggagggccagtgaggggaccttgggaccccagacagccctggaaggaaggcagccctggaaggaaggcagccctggggtccgggccacgctccatcctgggggcacccccttcccacctgcgtgcagtgtgcagggccgggggaggagcctggatctgaggagtgcagttccagttgtggctttgccgcggcgtccccatggcatgctgttggggaccgtgagactgtgggcggcctagctgtattgcagcctgaggccagaggagaggtcagtaacccttacccgtcccatcttgattta

SEQ ID NO: 119549 - DNA, 436 bp, Homo sapiens
gtacaaagagaaacacagcataattcctgatctctcccctaatatcacactctcctggcagcagctgcaccttgttccccaccctcccccaggactttcctgaagacaagctgtcatcttcaggcctcagccaagcagcctggctgagagcaagactctctcagctctccgaggacatgggggaggcccactcactctgcttcctcggaccaacaggtacacctagggtccaactgcgaagcgagatattttggacagcaaatgggaaggatatttatactgaatcatatatctagagatcacagctgagagtgttgcttattctttatgtctataacaatataagcaatagtataattaccactataacactaagcctaggtatgcagttgaacattgtctccctctgctttcctttttgtctctctctctactt

SEQ ID NO: 119550 - DNA, 233 bp, Homo sapiens
ggtggtgaatccgtgcatgtgtgttttttatatatatacacacatatatatacacacacatatgtatagatatgtgtatatatagacatacctatatacatacacatatatatgtgtgtatatatagtggtgcagtggtacaatcatagctcattgcacccttgaactcctgggcttaagcgatcctcccacctcagcctcttgtgtagctggggccacaggcatgtaccacc

SEQ ID NO: 119551 - DNA, 669 bp, Homo sapiens
tgggtcactctaaggatcccgatcacgtgcattgtggatccacgtccattgggagggcaattccattagccagtgggaggtagaaagtttgtaagaaataccatgccaggggactggagaaagaccccagatgtcattgtttctgggtggagatcctgtgtgagcggtggtggtatatcctaagagggggcagtaccactggatgattaagggtggtcccacaaggcctggggtgaagaaagacctgaatggataataccattaatagctgttggggaaaggaccagaaaaggtgaaaaagtgaaaccttggactggatggaggggacatcgctgggcttttaggaggtaccctgactggtactctgatcacttgtttctttttgcgggggactctgaggtgggatgaaaagctatagtactgcaccaggagtgggcccttgttgagagagttcctcactgggggagactttaagaaggggaaacctgaatagggtcctgtcggggaggagagggactctgagcgagaacaggttaaaaacaaaaacaagttagtaaaataattcaaataaaaacaaaacattaacaatctaagcactgatcttttttttctatttatattatgatgtactgaagttgctatttgataagcaatgatctttaacataaa

SEQ ID NO: 119552 - DNA, 694 bp, Homo sapiens
attacaggcgtgagccaccgtgccaggccgatgttgcagtcttgagtctgaagggagactggagacagagttccttcttctttagggacttcaatctttttctcttaaggccttcaactgatgatatatgaggcctacatacattacaaaggataatctgcttcactccttctactgatataaatgttaaacctcatctaaaaaaatacctgcacagcgacatctagactggtgcttgaccaagtatctgggtactgtggcctcgccaagctgatacatacaattagccattacaccatcctttcagaaggggtgatgcccacaccgaaggaaaaaacctctagactccacagccatttaatcttctattggagaccataatcgaggcaaggaattcagatgaggctactcttttcttcacaggtgaattccaagcgtctcacagcttccagggcatttcttgttctggttcctgctcacctgtcttatctccttgctcttccctccattccagccacacgtggtttttggtttaaagacactgtgttcttatcttgctctgcctgagtacgcgctacttccacggcctggggtatgctgttttcccactttttatctgggtcctcatcatttgagtctcatgttgagaaccacaactgcctctagagagcttccctgacctgacaaggttagg

SEQ ID NO: 119553 - DNA, 346 bp, Homo sapiens
gggacccccttggaggtttagcggacaggacgtcatccacacaaagaagagccggcaggtcccgggctcacacaggtctggaatggtgccactgcccagccagatccctgtccgcagccctgggaagaaggttctggaaggcactgccacagcccggggaatgatgaacccaaaactgaaccaagctccagcctgtctcacaaatcctaaaagcaacagctgaaagggacaaaaaggttccaaggaactatgtggatcccagaacaaagcccaagatgacttacaggaatatacaattatccagcacataatgaggtaaaattcacaatgtccagcatcccatcaa

SEQ ID NO: 119554 - DNA, 699 bp, Homo sapiens
gttagatgaatgaatcatgtagctttagtttgcatccttaaatgtttataaaaataatgaaaataaagtccttttatttacatggtggcaattaatagcataggctctggcatcaagctgcctgaaatcaaatcctactattagcttcatgagtttttgactaaatttcttaagctgtctatgcctcagtttttctctgtagagtgagggtagtaatagtacctacctcagagagttactgtgaaactaaaatgtagtttgtgggtgggaagtgcttagtacaggcctttgcacatactttgtgtccagccaatgaaattgttggtagtagctgtggtactagcagatcctagcaagaaaatgtttgcaaataacaggaaagcacacattgaagggaaatagatcagtattatgtcaattatgtatatggtgttaaagcatataatgtactctgaaaaaagtggccaggttgtgttttttttgttgttgtttttttaaatctgagagctgtcaacagaagcttctcaaaggattttttattatacattttttcctcatcattgtggcacctcttaaaggtatttagaagattaaataaactgcaaaaaagcttatacaaatgattcctttattatatacaggtctaagaaagctgttgggcactcagaagcttgcttagaaatctagtttgttcttgag

SEQ ID NO: 119555 - DNA, 351 bp, Homo sapiens
aggaagccagcggtgagggagtgagggctctgtgggataaggctcttcggaaggtgcgggaagtaggcttagaagcccttggggagctcagctccagatgcagaaggagagtttccttctcagaggcatgaaggaaagaagaagggcaagaaggaagaaaagttcagggcagagcccacgtgggcgcctcattcaatgccagtatctaggagggtgggggatttgtggagcacatttattacgtttcctacaagaatggataataatgtggacttacatttggcagtttttacacttttttaaattacactctttcagttggaaagagtgatgtggtgtgatatttattta

SEQ ID NO: 119556 - DNA, 629 bp, Homo sapiens
gcttgaacagctccactgacaaatgcctcactatcttctgatacatcgtaggcagttctgagggtgagaaagttcaaagcagatagatgttttaacacaacaggaggacttttaaacaatcaccaggactcactcctcggtggtcaattgggcctgtttggaggcctgacctttggtcatcttaaggtcatctaaggcagaaaagagaagctcacttataagttggcacttctgaatcatttgccttgaggtccattttttattcagcctttgtttaaaccttcttaggaagccagtttgtagagttctggggataagaaggcagaaaaaccatgtcaattcagtgcttttatttcacagaaaatgaagcaaaggcctagaaactagaaagacatttctcaaaaagaagatggtgaacttttggaaatactgagattagactacattttccaatttctatccctagcccactgctctttccaatataatatctgtattccatgggaaagacatgccatctgaattgatgtatcgtagttgttgagataattttgaaatgagaaaacaatagggcacagtcgtttgggaagaatttccagaaattgccatcattttcttaaaggctaagg

SEQ ID NO: 119557 - DNA, 112 bp, Homo sapiens
ctgagggagaggaagggcaatgtggacaagaaggaatttggaaaccctgtaaatggacttttgggaccgtctccgggtttcagttacccaggttctccccatgccccatccc

SEQ ID NO: 119558 - DNA, 132 bp, Homo sapiens
tactgagggaaggacacgatcagggtggaacagccagggtgcaatggcaaatgcacagagtacagacaggcacagggcctgcgtccctgaggggcctcagagtgctgccaagagggctcaggccttaataaa

SEQ ID NO: 119559 - DNA, 336 bp, Homo sapiens
cagactcaatttaaatatttttaatgttgagatgtatcatttctcaagaccgttttacaatgcatttctttattcattaagggtatgtattatgtggtgatattttctctgaaatgctagacactctgctggttttggaaaataaacatttgatttaaagcatttcatggtttggtttgtcatcctgaagttatttcacactttattttccttgtgttacaagcctgattactagaacaacatcaccagttcttctaggctttgatgtactttctctgttgtggtgatggcttttccatgtctcttttgcctcatgattttaaaagattaagatgc

SEQ ID NO: 119560 - DNA, 1034 bp, Homo sapiens
ttcctctggattccctgaggagaacatggcgactctgttagcttcactgctcggctgtttctatgtacatgctagcatgtgtcagtgagtgcaagagatgggagtagatttctttctgggctttttgggccaggctggcttggccaagtggacatgagtcagcctgtccctcagggctggtttcctttggtggaggctgggagcattgcaggaagccagccaagggcctaggagctcctgaagcttgggtcatgattgggtcataaaagtaatctgtggggatagagtggctcctgtttgtggtctgtgactgccaagctacaagtaggaagactgggccctccttgagacaggtggcagggtatatggagctggaagtggggtatggaaatgggtggttattttgcagcctttacttttcatctggacttgtattcagcaatccctccccaagtcagctctcagaaaaatattaaaatattgtgaaattggcagtgtctttcctaaatgttggctttagaaagcttttcattcctggatcagagaggactggcagtgagggtaacaggcctaccaagatctcatgagccctagagaggtcttgaggtgtctttagccacagatatctcaatcatttcacagcccagttctctaggtcatcagtccctaaatgtggctgtgtacagtcacccggggagctgagaccctaatctcaaatctgttggatcacattctggttggtgtggagtctaaaaagctgtgcttttaagaattgcccttggcccggcacggtggctcacgcctgtaatcctaacactttgggaggctgaggtgggcgaatcagcaggtcaggaattcgagaccagcctgaccaacatagagaaaccctgtctctactaaaaatacaaaaattggctgggcatggtggtgcgcgcctgtaatcccagctacttaggaggctgaggcaggagaatggcttgaaaacaggaggcggaagttgcagtaagccgagattgtgccactgccctccatcc

SEQ ID NO: 119561 - DNA, 292 bp, Homo sapiens
cctaaaagggggtttgacaaacaaagcccgacatgtaccagcagatcctactccacattccttcctctgaccatcacctaaaggccctcttaatgccttgtcctgtgctcgcacctccctccttcctggtcttaggctccgctggtcaccacctctggggccctctggggctgaggtgtgatgtgcacgtccctgccctcctgtccattcttgctttgcatctggttgaagaggaagtttagtatttacctcgttgattctgctcaaacacaaaccacagctacccacagcg

SEQ ID NO: 119562 - DNA, 361 bp, Homo sapiens
attataaactgtagttcattttgtagttcatttaacttcagaactcttaatctcttgatgagggagagcctacctggatcagagttagggagttctctatgttgagattggttgtatatgaggagacaaaacctgtaaataaggccgaggcaggtagtttgagaccagcctggccaacatggtgaaaccctgtctctactaaaaatataaaaactatctgggcgtcgtggcacatgactgtaatcccagctactggggaggctgaggcaggagaaccacttgaacccaggaggcccaggttgcagtgagctgggatttcactactgtactccagcctgggcgacagagggactctccatct

SEQ ID NO: 119563 - DNA, 707 bp, Homo sapiens
gtcgtttttacatagcacctttatacacgatataaaaaagtaggttttttgcatcaactgcaaacatgttttgtactctgtggatcggaatcttggtgaggaagagcattgcatcccgcaaaaggctgatgagtcagttagctggagagacagtgccatcattctgggttgcagttctggtgaagtaagtaggatgttaacactgcagatggaaatggttttcagattgccacatggaataatagtatggaacgtgaaatttcaggaataggaggagattcttttattattttcctccttccactttgtacatttttttaatagcctgcaactagttacatttatctttttttttttttttacatttttatccataatacaagtaacttgactaaagccagtgtctgtttcatgtaaatatattaacaggtccaaaatcaccaactaaaattagctttatactgactttttctaaagtcagtccttgtctcacccaaatattttaacaagtccaaaaatagcacatagctacttggaaccatattaaaatctcattataacatgaatttcaggtattccatgttgtagacttctccttgaaagataatgacattgaaaaatgctcttaagagagttgttaattctgtttcccaaaacttcctggataaaacaattctaccttaatgctattaagactatggtaggtg

SEQ ID NO: 119564 - DNA, 214 bp, Homo sapiens
gggtgcaaaaatgttgtgtggtatcatcccaagaggtttggggtttgtttttatgccctaaattgtaaagtaccaacctacaaagtatgatccagatcctctcactctgcagtttacattttcttctattaaacaaccagttcaacaaaaagataacttactggcatgtggtcttttaccaaaattctaaagctgtgaattgaaacaactattt

SEQ ID NO: 119565 - DNA, 441 bp, Homo sapiens
ctctagaggatcgtaccgggtgcatgcatgtgcaaaacgtgcaggtttgttacataggtatacacgtgccatggtggtttgctgcacccatcaacctgtcatctacgttaggtatttctcctaatgttatccctcccctggccctccaacccccagattttttcttttgttttgttttgtttttaatgatgtcttacaccgagcacttggttagcaggacagaatgccaattaatacagtatgacttctgttatatataaaactgacatatgtagccatatatcctttctttgacatctaagtaatacacatttactgaactgactaaatccacagcatgcacccaggcctgggtgcatgcatgtgtcccattcatccggtctctcaaatctcaggaatcttctccttcaattaactcatcaacctctcatggcaagactt

SEQ ID NO: 119566 - DNA, 512 bp, Homo sapiens
aacagaggaccattttttcccctaatgctaaaccttaaacattcaaagcaaaagcactaagaattgtatctcacttatctatacttgatggataacatgtgtgtgaaatctccagaaaatctttctttctaacaccatcaggtttaattagttgggtaatatgaagtcagaaaggtggcagaaatattagcagttatcatgatagtctaaaattatctcacaataatttctttattcttagataagactatacatagccttgaaataatagagcggagtagtaactttttactggcttttattccaattagcttagtttgacagtcaaatgtagccagctaggccttagaagattctacagtatacaacaaaataataaaattttccaactcaaaagcttaaaattcaccttagcacattacaggaaaatacaaccaaatactgctaaatgcaagacgtttgcttatttaccaatatctattcaaataaagttaaaagatactgccaaaata

SEQ ID NO: 119567 - DNA, 603 bp, Homo sapiens
tatgcttcaaaattttataaattaaaattttaaaaaaacatttaaaaagtactccccatattgactggggtagtaaaagagtataagggtagagatagatataaaatgaaacaaaataaactaggattctcataatgaacaatattaattaaagtctccaacatgtggagaggtgaaagtaagaccaatggccctgcttctcacgtgatgaactcatacacagagcacatcttagaggaatacaggatataaaacagaaagaagttttaggaggaaatggccagcgcacttcccgcggcatctgggaaggctttgtttttttcatccattcattcaaatatttattaagcacctactatggcaccaggcactgtggtagggagatactaaggttagagtaaggaacaagaaccatagtctttgatctcatagaatttaaactctatcaaggaaaacagtcagtgaattaatgctcaaaaggctctataattacaactggaggataatttccataagaaaaattacaggatgctacccaatcatttatcagggaaatatcttaatctaatattggggctaggggaagattcccttaggaagctg

SEQ ID NO: 119568 - DNA, 318 bp, Homo sapiens
atttgaattgacggaacttggggcccggcagttcaggcagtcagtcccagtctccttggccccttcgagtcatcagacgggacccaggcagatctgtgagtgcatcagtcctggaccagtctctaggtgctcagcgtgctgcgggagatctgggtgtctggggagggaccacacagcaggatcagaaccttgaaggaggctcctgcccctggtggcctgcagggcatgctggcctgccctgagcttctgcttgtggccccgacatcctgccacttcttgcctgtctctctgcataggctctgactggggtatcatgct

SEQ ID NO: 119569 - DNA, 362 bp, Homo sapiens
ggcaatttcgaagtgccatctgaaatgctttagtttcaaacagaaattaatacatcctagcatttattaactgagcaagacgttctaaatatgcaatagatgaaagatactgttccagacattcagaaggatgttttaaaaagtgtcctggcgacagttgtcatcatcaatgaaattaaagcctcatttaagggttacaacctgcatgtaaaaagctgtgaacaatgcaatataaagcaaaaagtggtaaaaaagtgttctaaaagagatagatacaatgaaatgaaaggttgaggaacatattaaaactgtgtgagtaatatgctacacttgtatcctgtaggaccaaggagtgatacaag

SEQ ID NO: 119570 - DNA, 582 bp, Homo sapiens
acccaccccttaaagcctagttaaaaagccacctcctccagaaagcctttcctaggctgtcttctcaggtggaaagaatctctcctctggaccctactcagttttatctgaatttctattaccccctcaaacaggtctaattcgtgctctccttccctttcatctcaagctcccaaggcagaagcatttgtctgctcattcctgtaccccaccgccccggcatcaagcttgacacactgtaggtgtttgattgacacctgctgcattgagccgaaccaggactgcattttaattgctatttaatgcacatgcccaggaagccactgcactttctaacctttgctcatcaaacctgattatgaaaggcaggagaaagtgcagtggcatcgataaacaccggtgtttatcgatgccagcttagccgaacaattcagccctgggcaggtggtcggctaggtgacagtagagctaaataaatgccaggggcaggtggggcagggggtacctcgaatgttgttcactgcaagtcctccaggatgattgatctttccaagagtcttgaataacatctctcttctctga

SEQ ID NO: 119571 - DNA, 710 bp, Homo sapiens
gttcattgtttccctaagtattaaacaaagtactgagtagaggtgaaaaaataaaaaaaaaaaacaaagtcgaatttgcactctggcgctggtatgtgaccgtaatcttttatatagttctagttcccaaaatacaatcctgtactgcataacatttcagtcaacaatgggctacatatacaacagtggtcccataaggttataatactatatttttactgtaccttttctatgcttagatatgtttagatacacagtaattgtcattgtgttacagttcctacaatatcagtacactaatgtgctgtgcaggtttgtagcttaagaacaatagggctatacatataccctaggtgtttagtaggctatgtgtatataccatccatgtttatgcaagtaccctctgtgatacttgcacaacaaaattgcctaacaatgcatttctcagaatgtatgcatccctattgttatgtgagcatgagtttataaaatgaggcttattttcaagaacaaggatggagctggagatccttatgttatgtgaaataagccggggacagaaagacaaacatcacatgttcttacttatttgtgggatctaaaaatcaaaacaattaactcacagacataggaagtagaaggatggttacccgaggctgagaagggatttgatatggtcggaggggagtggggatggttaatgggtacca

SEQ ID NO: 119572 - DNA, 383 bp, Homo sapiens
ctctgtcgcaaagaaaaaaaaaaaaaaagatcctgagttctggattctctccgtgggacatcctcttcagaggccatctaactcagtgctgctcagctgaactttctgcagtgatgttttatatgcactagctaatccagccaccaccagtcacatgtggctatccagccttggagatataacaagtgagacagaggagttacatttctggctttatgtaattttaattggaagagccagctgcggttagtggctaccatattggccagcagaggtctccactatctaattacctatcatggaagttggagaaaaacaataagctcctttggttaggtcttagtatgtgcaggctaactgacttctttacttactgtgttata

SEQ ID NO: 119573 - DNA, 943 bp, Homo sapiens
atgctgatgtcgagaatgacccaactaaatggcccagccagatgacccagttgaagctggtggacaagaagtttcattcatggaatcagaacttccaataaggtcttttagtacctcactcctaaatttgaatagactaccaaagattatcagacatctaaggggaactaccagcatgaaaggtagagaccaaagcaaacaaacaaacaaagaaaataatttggaactaaccaagactatgctgggagaagaaaactattattaatatccacagagcgtagtacagccactatggagaacagtatggaggttcctctaaagactaaaaatagaaccatcatataattcaacaatcccactgctagatatataccccaaagaaaggaaatcagtatattgaaaagatatctgcactctcatgtttactgtagcgctattcataatagccaagatttggaagcaacttaagtgtccatcaacagatgaatagatttttttaaaatgtggtacatatacacaatggagtactattcagccataaaaaagaatgagaaatgtcatttgcaacaacatggttggaactggaggaccttatgttaagtgaaataagccaggcccaaaaaagcaaatttcacatgttctcactcatttgtgggacccaaaaatgaaaacagttgaactcagggagatagagtaggatgatggttaccagaggctggaagggtagttgtggtgggaggtgggtggttaatgagtacaaaaatatagttagatagaatgaataaatctaatagttgctagcacaacagggtgactacagtcaacaataatttaccgtacatttaaaataactaaaagagtataattggcatgttagttacacaaaaaaaggataaatgcttgaggcaacggatataccatttacctggatttggttatcaca

SEQ ID NO: 119574 - DNA, 862 bp, Homo sapiens
aaaaaacgcagctgaaaacgtatttaaaaagacaattccaggaatacattgctggtttaatggtagaaaatgaatcactgtaagttattcaattagctgtataaatatgaaatacacgagatgataattcttaatgaagtggtaacagaaagaaactttcttaacctgttgaaggatatctaccaaaatcttacatcacatatcatacttcatagtggaacatcgaaattatttcctttttttttttttccagacagtctttcttgccctgtcacccaggctagagcgcagtggtgcgatcatggcccactgcaacctcaaactcctgggtacaagtgatcctcccgcctgagcctcccaaggtgcctggattacaggagtgagccgccacgccctgccattccccttgtaaggtcaggaatacgcaagggtggcctgctactctccacctgcattcagactcatgctggagagtttagtctgcacagtaacacaataaaaggagataaaacatatcagcctggaaaggaaggaaaaagcagctatcattcttcagaggcggtataattacctatgtagaaaacccaaaaagtcagaggtacatttttagaatgaagagtttagcaaggttgccagatataaaatctgtacaaaaagtcaattgtaaaatgtaactttaaaaatactctgtcgatagtagtatcagaaaataaaagtacttaaaaataaatgtgttaaaatctgaggcaagcatggtggctcatgcctataatcccagcacttcgggagactgaggcgagaggattgcttgagcccaggagttcaagacgagcccgagctgcacagggagaccctatctctt

SEQ ID NO: 119575 - DNA, 1344 bp, Homo sapiens
  misc_feature (967)..(967): n is a, c, g, or t
  misc_feature (1110)..(1110): n is a, c, g, or t
  misc_feature (1118)..(1118): n is a, c, g, or t
  misc_feature (1122)..(1122): n is a, c, g, or t
caggctggagttcagtggtgcaatctcggctcactgcaagctctgcctcctgggttcaagccattctcctgcctcagcctcccgagtagctgggactacaggcacccaccaccactcccggctaatttttagaaacaaatatttaaaatgacatattctcccaatacaatctatttagatctggagaaggaaaaatcagatatttatgatatagttttattttaattttgaattatttgtgtcacagctcagctttttggaagacaaactcaaacacctataatttcatttatatttctaattcacttggaacctttctgctttatgttacctagaaaatgataatttgtgtaacccaaaacttctaaaataaattgcttaatccttgaaatatgttattggaaaattttaagcagtgcttaaacaccattaaattattatgaacttgtaattcagaattgagtaaagaaatattttttctagtccttcatatattgaaaacttgccacatgacattgtatcgtcttcattttccagaagatgcgttggtgtgccataggtttctaacttccttgaaaatagttttttaagtcaattgtaaatatacgtattattgttaaaagtaactttaaactgcaacacatagcttcaaaacaatatagagattttgtaataccttataagtggagttggctaaaataccttatccatataaaacttattctattctttgcatgcttattttgtgtgttggttgctagcttaaagtttgatttgttgttactctttgtgtgccaaattcactaggcaagcggatttttcctcagacttcaaaaaataattcttttaagaaaaaatgtaaaaatgtttattctaaaaagctgcattaaagggacaacctataaaaagttttgctagctcatctttagaaggaagaaagaatattagcttgggtgatgtttaattngggtggcgatagtttctgtaggctaaactttatgagaaaagtgtacctactctataaaggtataaatgtaaaacctcttgctgttattgaggaagctcttcaactaccctaaatttcacaaatgtaacttataacactatganagatttgnccancaattacgtttgcgggttgcctagtttgggtagcctatcttagctgaactctcgggtcgagaattaggcggttaagctgacattaacatttagtatatcccgaaataaattgtcataaaagaaactatacgaaaaatatcggacattaaagaacacatattgacttggggaaagaactatagtcaaacaagacaacaaaaagcaccaaaacataagtatcgc

SEQ ID NO: 119576 - DNA, 297 bp, Homo sapiens
cactccatctttcttgaagcactcttctcccttgacatcactaacaactctccttgttctcttacttctgggactgtgccttacttccttcactggttctccatctctctaaatatgggtaccttaccaagatctaaactttacactcctctttgcacaaggagtcagtcagctgcatcactctcactccctgatctctctaacccagccctcagtcctgaattccactatccacttccatgtaacataaatgtgctacttcacttcaaacttatgtctagacagagctcctctcac

SEQ ID NO: 119577 - DNA, 561 bp, Homo sapiens
tctcatctgtgagatgttaatgatgatggcaccatcctcacagggttgccgtgaagattccatgagatacacgtgtaaagggcttagccaagtgccgtgctgggcacataataagcagtcagcaacgtctgctaatgatgcagggagggcaggtgccccaaatcccagttagccgaccgggaaagtgaggcttggtgatttcaaggctagtaaatatcagggacaaaaaccaaggtcacctgacccagaaatctagggctctgagctcacctgcaccaagatgcctctctttgttgggcacccccttgggaggaggaaagaaaggacagtggtacttgttccatgtctttggatggcaaaacccaccttctttgagcagcctccccagctgcctctggaacacccaacaacagacttaggggctggctctggagttgggtctatgccgttgtctgcctccaaccccaggcccaccacatccacccctgcagcctggctttcagagagtccttctaggatacaaccgtagagtaggaagttagcctttgggatctcagcctc

SEQ ID NO: 119578 - DNA, 418 bp, Homo sapiens
gaggtcgattgccagtggcaagggatttaatcaatcatgcctacataatgaaaccttgataaaaacccctgaacaacagggttcagggagcttctgaattggtgaatacatttatgtgttggaggtggggttgaggctcacctggagagggcatgaaagctctgtccctccttccacaccttgtgctatatttggttcttcctgaggttttatttttttccatgcaacaaaactttgactaacattttgattaggttcaactgtttactgaaactggtaatttccaaacttaagttggggcgcaaatggctatagtgcagagtaatgccatcactgggcactgcgaatgcgagagtgaagaataaacgtggttcacttgaagtcaggagttcgagaccagcctatccaacatcatgaa

SEQ ID NO: 119579 - DNA, 333 bp, Homo sapiens
tgggaatgtgcgttactaaccagtctctggggatgattctgctaccagtcttgaggaccacactttaagatttgctctaagagaaacaataggaagcaaagagggataaagcatcctggactccctcccagaggaggtagattggtttgaggccccaaagaaaaggtaggattttgaacaggaaaaaattacatgagaaaagcagactggttgtgtttcttctctcccactctacctgctgctggaaagaatataaagaggtctatacaacatctatttacacagttatctgcctagagctctctctagcgaccctatcttttttgtggcaag

SEQ ID NO: 119580 - DNA, 822 bp, Homo sapiens
ggaaattcagttctattctaggacaaacacccgacaaaatttataaatctcaatatctaccagcctcagggcagaaagtttacttaggttatgtattcctaaaggctatgatgctcagagaattgctaaaaattaatagaaaaataggaatgatttcagataatggcattcagtgacctgtatcaggtagtgagaacaatatgtgactttagatcttccttttgtaccacagggagaccccagcaacatcctggtctctccttttattatgcagtcgtcatagttgaccccattcaagttgtaatcataggatccttaaacgactacattttgaacctcactctcagtatgcatttccattacttttgttaattttgcttaggaagacaactgccttcacctggttgattttgcctaatttcatgggggcatgaatacagaagacagagaaacttggttccggtgaggaaatacggcctgttgatgttctgaactatggacttagctagagcctagatttttttcagtttgagggatttctgtcctcatgagtaagactatttatgaccagctctgttgtaggtttttatatctctacacataacaataaacttactatcttgtctttgactgggttgagtatatgtcttagatgtttcttccctgcaagagaaaactcagttccaagacacaagccactttttcatccctagctcattcacagtgacgggctgctgccaatcagtcaaaccagacaggagtctgtgtagcattacacacgctcatatcccagtaattgtccctaaaaactcccacatggga

SEQ ID NO: 119581 - DNA, 249 bp, Homo sapiens
gtttgtgtcctccccaaattcttatgtggaaatcttataccccaaagccattgtagtaggaggtgggacctttgagaggtaattagatcatgagattaggacccttataaaagaggcctgaaagagactcctcccccttccatgtgatgatgcagctagaagacaccatctatggaccaggaaccagggcctcaccagacattgaaactgcctgcaccttgatcatggagttcccagtctccagaactg

SEQ ID NO: 119582 - DNA, 398 bp, Homo sapiens
tgcttagatcatttcagccatgctggccgccgttggagtatttgttaagcataccaagttcccttctcttccatggcttctaattagctctcctcattgccttggtggagaggctccccagcaccttacttactgcactcaggtcattcctcaaatgttatatcattagagaggccttctatgtttaaatttaccattttaatttaaaataccatcttccttccattttccatccccttacctttcctttctctccttctttgctttctcttgaatttgcatattcctcaggtctattgacttaaaaattaaaagtaagctgggtatggtggtacatacctgtaatcctggctacatgggaggctgaagtgagaggatcacttgagctgaagagttcc

SEQ ID NO: 119583 - DNA, 783 bp, Homo sapiens
aggataatgactatttggtaatacttttgggaaatacagttttggtttaattttttttctggtaaagtaatcgttaaattttgaaaatacaaataagaatatagaagaaaatctgctaggtgcagtggttcatgcctgtaatcccagcgctttgagaggccgaggctggtggatcacttgaggtcaggagttcaagaccagcctgggcaacatggttaaaccgcgtctctgctaaaaaatatagaagttgggccgggtgtggtggctcacgccagcactttgggaggccgaggtgggtggatcacgaggtcaggagttcaagaccagactggccaacatggtgaaaccccgtctctactaaaaatacaaaaaaaattagccaggcgtagtggcacacacctgtaatcccagctactcaggaggctgaggcaggagaattgcttgaacccgggcagcagaggttgcagtgagccgagatcgtgctgctgcactccaaccttgggcgacagagctagactccatctcaaaaatataataaaaattaaaaaaagaacataggagaaaataaaacagtccatcaggatttctaacattaaatacacacacacacacacatacacatatatacacatacattttttttttgagacagggtctttattgcccaggctggaatgcagtagcatgattatagctcactgcagcctcaaactcctgggctcaagcaatcctcctatctcagtctcacagtgtgtgccaccacacccagctaattttcaaaca

SEQ ID NO: 119584 - DNA, 305 bp, Homo sapiens
tacaggcacacaccagcatgcctggctaatttttaagttttttgagactgggtctcactgggttgcccaggctgctcttaaactcctgcctcaagtgctcctcctgcctcagcctcctgaatagctgtcattacaggcgtgagccaccactcctggctatcatgccagttgttttgatcaccttctcctcacccctgctctaggattatggggatggacaaacacacacatccaacactggagagacaagatcagcagcagtttatgagtcacatatatgcacagcccaggggaggaggacactg

SEQ ID NO: 119585 - DNA, 468 bp, Homo sapiens
ctgtggctacaaggacaggcttgtgcagcagaatatggctgcagggagctctgcagcagaggaggggagcagtgtgcagctctcagaaggcagggcaagtcacacaacccaacagctggccaccacaagcaccaattgaccagagttgtgcgtgtgaggcagtgaaggaataagtgtgtttgggatgaacattcaaccccttgccccgcccatgagaccgaccttgaattaaaagtaacttgttaagtgctgctggtgccaggcagccttttagaccctagagcccagataccagcaaatccgagctgcccactgagagcttacagtctaccatgtttgcagctgaatcagaaataaactcctggccgggcatggtggctcacacctgtaatcccagcattttgggaggccgaggcaggcggatcacctgaggtcaggagttcgagaccagcctggccaacacagtga

SEQ ID NO: 119586 - DNA, 443 bp, Homo sapiens
atattaatcagtaattgggttgatttcctgtaccaccaaccacctgcatttgattcctcattgataatcaaggcaactttttgcttttttagaagtctccagtgtaacaaaaatgagtacactgcaaagagagccctgttataaattgtaaattctgaacgctaattaagcatgctagtcctctccaaataatcaaatcctaacatgtccatgataattaacagaaaaaaattgttacataatcctatcaggaaataaaagttggttatgtatagatgggggtgaaggaagaggtttctctccttcccatgaaaattgaagtactaaaggctagccaaacctcatccacaacttctcaaagaccttctgtaatacatctgttttcatgcatttctttccatttttataagtcttttactttcctctcctctcaacttgaaatc

SEQ ID NO: 119587 - DNA, 581 bp, Homo sapiens
ggaaataagtggtaccctttaacttactaaaaaagatgagtagaaagaattttggctttagccaaaaagacaaaggttcaattataggccctatcacttaggaatgtgtaacgcagaggcaaagttattcactaactctatgcttcaaattttttcaatgtgtaaaaataataccttaatttagaagtttgttgcagaaattaaatacacacacaccacacacacataaacttcctggcacctaggaaatgttcaaaatttggtaggtattattcaacgattcaataaatattgtgtttcaaagggtaatattttctatatcatttattacttatggatatacttaaaaaatgacttgttctctgctatgtgtcatttgtttttcagacctcaacaatgcatgcttgggattcttttccacttctatactttctgcaattcctgtttgtatgtaagtagattttatgaggttttctttaactttgcttttgctgttttgtttttccacctttatttgatataaaagtgggctttaacagcaacacacattggctatgtcactggctttggctaaaacattt

SEQ ID NO: 119588 - DNA, 278 bp, Homo sapiens
tcccagcccaccctccagggaacgtcactgcttcctgctctttgttccagggacctgagctttccactagcgcagctgctccgtgcagggtgtagttagttactcgtgcctcctgccttgtgaactccttgagggaaaggactagagttcattcatcttggcacctcgcgtacaactttgtgaagatggcgggggcagggtggaaaaagttctagagcctttcagggccttcgtctttccaccacctgcctagctctaggggtttgaagatctaatgc

SEQ ID NO: 119589 - DNA, 371 bp, Homo sapiens
caaaggtgataggatagtaaatatcataagataacaaattcaagatgtatataagcaagaaacaaaaaatgaattttatggatactgaggaatccaaaagaataccagtagctactgttcagacatttatatggtttcaaattgaacactatgaacaccgtaacctttgtttttagcttgaaagtactcattttgcgtgtatagtagaaattcctaaaacataagaaattgatgttacatgtccatgaaaacctaaaatcaatgagattaggcatatttaagtttttgggaaactgcatatataagcctttaaaatgactactgggtgtgaagcaagatgagataatttgtaaagttcaatctttggagcc

SEQ ID NO: 119590 - DNA, 192 bp, Homo sapiens
tcctattcaattaaaaatcctggtaggcataaatttcatcttatcagaatataaataaacattttaagtttataccaagcttgtggcttggggtgtgtgtgtgtgtgtgtgtgtgtgtgtgtgtgtgtataaatatgtgtgtgtgtataaatatatttatgaggggggggacgagggggtagcgcgcgcgaa

SEQ ID NO: 119591 - DNA, 539 bp, Homo sapiens
ggggaggggctgcttccctgacctacctctgaaccaaaagatgaggccagtgtagctggtggagaaaggttacaggaagggtggcaggaaagtcagggcttcagttaccaaaggtggatggctaaggggagtggactcaagatggctggactccgagtgaatgcacaaaatggtgtcaggcagaaaagacacatgaaaaaatgctcatcaacactggccatcagagaaatgcaaatcaaaaccacaatgataccatctcacaccagttagaatggcgatcattaaaaagtcaggaaacaacaggtgctggagaggatgtggagaaataggaacacttttacactgttggtgggactgtaaactagttcaaccattgtggaagtcagtgtggcgattcctcagggatctagaactagaaataccatttgacccagcaatcccattactggatatatacccaaaggattataaatcatgctgctataaagacacgtgcacacgtatgtttattacggcactattcacaatagcaaagactt

SEQ ID NO: 119592 - DNA, 398 bp, Homo sapiens
taaaaaccgttgcataacctacttacgggttacaggggtccctagaagtcagagcaaagggcttccaagcagaagtgagacacacgtcccctctgatttgggccaactcttgcttaattcctagaagaattcaattctacccactttgagggcctacagctgttctggatgcatatttttttggagtatgcatgtacagaacccccaggactgtcattcttcccgtgcccagtggctcagccttggagaggcaagaagggcaatctgtcattcactaaagcaacactgcaatgtagaaaaaacccagccagtctgggtgcagtggctcactcctgtaatcccagcactttgggagaccgaggcgggcggatctcctggggtcgggagtttgagaccag

SEQ ID NO: 119593 - DNA, 680 bp, Homo sapiens
atctcggctcactgcaacctcctcctcaccacaacctcctcctcactacaacctcctcctcagtgcaacctcctcctcactgcgacctcctcctcactgcgacctcctcctcactgcgacctcctcctcactgcaacctcctactcattgcaacctgctcctcactacaacctcctcctcactgcaacctcctcctcactgcaacctgctcctcactacaacctcctcctcactgcaacctcctccttactgcgacctcctcctcactgcaacctcctccttactgcgacctcctcctcactgcaacctcctcctcactgcaacctgctcttcactacaacctcctcctcactgcaacctcctcctcattgcaacctgctcctcactgcaacctgctccttctgggttcaagggattctcttgcctcagcctcccaaataactaggattacaggcatgcaccaccaagcccgactaacttttgtattttttgtagatacagggtttcactattttggccacctggtctcaaactcctggcctgcccaccttagcctccaaaagtcctgggattacaggtgtgagccaccacgtctggcctgcattgcttgaattctcagaccacatggaccctctcatctggtccaattgcaagagtccaaggcaggaaaggcagaaggc

SEQ ID NO: 119594 - DNA, 461 bp, Homo sapiens
atgatcagcagatttctcacctgatactttggagaccagtgtattcaaagtgctaaaaaaaacaaaaccaaaaaactcaaaaccctgtatatggcaaaattgcccttcaaaagcataaggaaattaagatgttcttagatagacaaaagctaagggagttcattaccgctagaactgccctgcgagaaatgcttaaggaagtcctgaaaggtgaaatgaaagggcactagacagaggggacagtgcagattcaggcaggtgcaatggcttctggggaagacccagccagtggggctattgccagcatccagtcagctgccaccttccctgaccccagtgtcaagtgatgcgcagggtgatccaggtgtgtgaggggcagctggatgtccagactgagggcactggtgccatcagtggctatcctaccactcaattcatgacccaggtggtgatccagggtg

SEQ ID NO: 119595 - DNA, 401 bp, Homo sapiens
cccgcccggtcactgctctcggacctgtcactgagcatccaggaccccccccgctccgccgtgcaggccggccccgcccagtcaccactctcgacctgtcactgagcatccaggacctccttgccatgcaggctggccccacccggtcaccactctcggaccttgcagggtcttccctgctccttgagaagggggtggtttcggggacaagccatccccatggccagccctgtgggagctaccaccaatctccagacactgtcacttctgctcagctccagccttccctggggggaggctcaggcagctccttggacttcctgattgtgttaggcttagaccaagggcaaggtcgatttgcaccccttagcccatcccaggcagcagcaaaagagaataat

SEQ ID NO: 119596 - DNA, 295 bp, Homo sapiens
aagccattcaaattatcttgtggaaggcaattctcgtcagagggaatagcaagcacaaagctctaagacaggaacatccttggcttgttcaaagaacagcaaagacaaggcggctggagagtagtgggcactaagattacaagataaggtgagagaacgttagaaaagtagccagggcccatggcacatagaataaagaattctgaatgtattctgagtaagatggaaagctattagataattgtgtgcagagaagtggcatggcacgacaagttttagagagattattctggct

SEQ ID NO: 119597 - DNA, 325 bp, Homo sapiens
tcaaccctcacagcaaaccctgtggagatcttattacatttactttacagagaaagccaaggatttgaggttaagcagtattcccatgatcacgctgcccagggacacacagatggaatctctctcccggtgagtggctcccaaatctatatccaggtgaatgctactctcctcatggccagcctgtctcctgggcagctctgcttggagactccactagtatcttacactctccaaatgccaatttcattcctccccaaactagtcctttttggaatctcatggagggcaccacccaccacagcccaagccagaaggctaactg

SEQ ID NO: 119598 - DNA, 479 bp, Homo sapiens
agaaatagtcatagcaaacatatgtttagtaataataatactaactagctcttcatctatgcaaagctctatcttaagcattttaaatctattaactcatgcattcttcattgcagcacaatcattcaaattccaatattatccttattgtaatgcaaggaatatgagtttctagaagtttgagtaaatgactcaatatgtaaataactcaagtgactcaataagacaaaaaaaagcaaccaaatataaaaatgggaaaaagaaatgagtaacaatgaacattaaaaagtaagcataaattggtcatgaatatatgaaaagatgttcaaccgtattattcacattatattaaaaccataggccaggagcagtggctcacatttgttatcccagcactttgggagactgaggtgagtggatcacttgaggccaggagttcgagaccagcctggccaacatgatgaaaccctgtctctact

SEQ ID NO: 119599 - DNA, 370 bp, Homo sapiens
ggaacccctatcctcatccctgagagatcagctacatcaagatggtcatcacaacatctggacattgagctgcttcgatatgtacccgcctctaggtattccttaggcgggtctggggactccctatcaatggaagacaacagtttggggaatcatgcttttggtctcagtacaaagggcctccccttaaaccttaataatggcttgcaaagaaactgtaatgcacttgtaaggtgttatagaattttttgaaactaataaggaggttagaatagtgcttagcatctaataagcgctcacggataggctttcattagctaatcaaatgtaaaatataagtattgtatcaaaaaaaagagattcatttata

SEQ ID NO: 119600 - DNA, 900 bp, Homo sapiens
aatggccagtattttccaaaaatgtcaatgtcataaatgacaaaaagactgaggaactgctccactatgtcctgccaaaaaaaattttttaatagagttgaggtctcactatcttgcccaggctggttatcaagctcctgccctcaaacaatacaccagccatggcttcccaaagcactggaattacaggtgtgagctaccatgcctggcctaagtaatagcttttaaaggtaattatctttgattaatttttcaatgtttttgaagggataatttttttgaaagacctttctgaaggtctttccccatatctaacattcatagggtttctgattagtatgacttacttgatactgagttaactgaaagttatgaccaaagtctctgccacattccttatattctctgcatttctttccagtgaaatttctctgatgttccatatgatttgtgcaaaatataaaggtgctcccacacatttcattaagcttatcactggcatggattcttccttgtggagtaaagttttcacattttggcttcattcagactttctatagcttcaagtttggcttcattcagattttctatacctcagtgaaccaactagaaacatttacatattcctgtaaaatgaagtttaccatagatattttaaatttaattgaaatactaaacaaaataattcataatattaaaaatgcctgtaaaatttccatgttcccatttgcactgatgcatttatgttatttctcttactcatctcaatcataactggcaaatttagtctatattactggttatttcaaaccacttttagataaagtccactttctgtttagctcattttctttttaagtaattcattcaaattcactgaataaacagattgatttgtga

SEQ ID NO: 119601 - DNA, 280 bp, Homo sapiens
acagtgccccacctcattcagagcacaggccaaagtccttatagtacctacaaggtcctatatgacctgtgacacctctccatcatctgctacccctcctctgccctatttctacctccctctctgctctagtcaggctgacgtccttgctactcctcaaacacggcaagagcacccacttaggacacttgtaccttgcagtgtctccacccagactaatgttctcctaagaagagttgcgcagctcattccattccctcttcaagtctttgcataaagg

SEQ ID NO: 119602 - DNA, 861 bp, Homo sapiens
gggtttcaccgtgttggccaggctggtctcaaactcctgacctcaggtgatctgcccgcctcggcctcccaaagtgccgggattacaggcgtgagccactgtgcccggcctgaggagaacttttctgtgcctctttgtcttgccttctcttttgcagttctttccttgccttcctttccaactgtttgctttgtttctttccatcttcctgtatcaggcagcaattcctataaacattctttgacgttattggtagcccttacacctgaatgggtgaagcctatctcagagtagatcattcattccagctgaaaatgttagtctgcttggtaagtgcaatgtgatggaagaaacaacttctcaggcctgtgaaacattgattaaatatactttgtttgtttgtttgttggagacagacacgctctgtcgcccaggctggagtgcagtgtcatgatctcagctcactgcaacctccgcctcctgggttcaagcgattctcctgcctcagcttcccaagcagctgatattacaggcacgcaccaccacgcccagctaattttttgtatttttagtagagagagggtttcgctgtgttggccaggctggtctcgaaatcctggcctcaagtgatctgcccacctatgtttcccaaagtgctgggattacaggcgtgagccactgcacctggcctgttaaatatacttttgtagttactgttccttctgcctggtagcctggtttctcttccccgtgtttatctatttggtaaactccatttcttactcaaaagattttatttaaaagctgaatgtaatggcttctttgctccgtttccagattcacccaggcagttagtgactc

SEQ ID NO: 119603 - DNA, 399 bp, Homo sapiens
agttgggccatctattgggatatatagcagcagctgggaagaagggttgaggttaatgtgagggaatcggggaggcagtgactgtaggctaagaatggttggaaagatgataggagccttagtgtagtgtcagtgctaaagaggggatgttgatacaggatgtgtacagctcagatgtcaaggatgatgaaacttgaaaaggaatactgcattgagtgccttcagacagcaggttgaatggcatgaccagcaacgatctagaaaagtgggaaggagagggtgacggtgaaggcaaaactggtgcctgctggtttgagttaggccatgaggaagtgacagacatgggttagagagtcggtacaaaaggacttgttacgggtcgtatctaggctggtgagc

SEQ ID NO: 119604 - DNA, 208 bp, Homo sapiens
acgtatttgctgggtaatgggattgagagaggcgtgtggccagcaagcagcaaggcaaattcgaggatgggttggagagcacctatcccaagcttctgtttgtgcctattgactaatgtcagaattggtggcagaacccagggttgtgctgcttcaaaaagtaaagcacatttatgttagctgctgtactcttatccaaatccagaat

SEQ ID NO: 119605 - DNA, 406 bp, Homo sapiens
aaattaactccaccagagtaaatgttggaggttctgcaaagggaagaaggatgataccttgttattgatcttgttattgattgaggagagatgggaagggacccagaagcagctcatttgttgcacacaagataattctaaatgcattttactaaatgtaacactgtatctcttccctaaaatattggacctcagactcctttttgattaatacaccagaaagagaaaaaatgattttgggtaaaacatacaagaaacctgtaaaataaccatgaatgtaactttcaagaggtaggttctctaagttcatatgcacacaaaatgtccactgcttatttaacaactggcttaaaaaaaaacacacacacacacacaattataacagtttcacaaacccttatctgaa

SEQ ID NO: 119606 - DNA, 370 bp, Homo sapiens
ctgcattcactgcccctcctagtttggagctatcaaaacatttaataaatttgtattcaagttgttgatcaaatcttgaagacaactggaattaattcctgatggaattaatacattaatatacactttttgtatgtcattgttctactggctccaaacttatatttaatgattacctgatctggcatttattcattgtgaccataagaatatctggagatgtgctttctaatactgtgccaaaattaagttacattctgtctatgcatagtaaccttataaaaaatattatgtcggtttgacctaagatgttattaatgaatctatgctggcttctactactcattgctttcttatgagaggggttaag

SEQ ID NO: 119607 - DNA, 786 bp, Homo sapiens
gttgtctccaggagcctgccttattaaaactaacagcagaaaacaccacatgttctcactcataggtgggaattgaacaatgagaacacttggacacagggcggggaacatcacactctggggcctgtcgtgggatggggggcaggggaagggagggcagagggagggatagcattagcagaaatacctaatgtaaatgacgagttaatgggtgcagtaaaccaacttggcacatgtatacatatgtaacaaacctgcacgttgtgcacatgtaccctagaacttaaagtataattaaaaaaaaaaaccagaattttccttcccccttttttaaaaaatcgtgctaatccatatcgttccaattttagtatatgtgctgctaatgcaaacacagcagaatttttcaaatgagaaatacttaggaccaataaattaactttgtttttgacttatctggtatatatgcaaagaatgtatttaggtggcatttcccattagtagggaataaaacaattataacgataagataaagaacaactcttagggaaaatttcttcggggacagttagatccctgtacctcagttatgtctcaaaaattctacattgactaaaaaatgaattactctggaaaggagaccagaaaacatggcttccggcagtaggggattttgaggaaatctcatgcactgctagtgggagcctgaattagcctgatctttctagagagcaaaatgtatgcactttttatccagagcattagaattgccataccctttgagccata

SEQ ID NO: 119608 - DNA, 571 bp, Homo sapiens
atttttagtacagacagggtttcaccttgttagccaggatggtctcaatctcctgacctcgtgatcctcccgcctcggcctcccaaagtgctgggattacaggcgtgagccaccgcgcccggccatgaagtcctttcaaatagacttaattcggtgtcccagccttccctagttttttttaagccatcttccccttcgactcagtgcagtctgagttcattgcacacacattgtgtgtgtatgtgcgtgtgtgtggacatgcaagtgcacacatgtgcttcagctggattttaaacttcttcagggagattgtggtcagtgtctttaatttagcacagtgctttgtatgtggtagcatttagttgttgacttcaagctactgtcctaaaattgcttaaaaccatagcagttcttttaaaaagtgttctatatggaattttttaaaaatgccttgcatttcttgaaggtttgtcttttatggttggagtcaaaccacttagtatataaaaacctttacttctatttttaaaaattgtagattgcactaatatgaagtttctgtggaagacta

SEQ ID NO: 119609 - DNA, 593 bp, Homo sapiens
acagcctccctccactttgtgccgagaagccgcacagtgtggtcccgacattccacctgtccttgcccatgtgtggggaggcacatggccccaagtctattaaacagcaagtgaaatcttcctcatcttggataaacccacaactgtaattccacgtaagtgtgtctatgtgcacacacagtaccccacgttctaccgtagaatgtaaggcgcctgcgtgccaggtgatggctctaaggatgtggtagagaaaaccggagtagacatgagcaagcacagggtaaggaaagaaaacacacgggcctttcaaaagggaagagcaaggtgaggagaaaggtgacccacagaagggcttggctgtcagctcaggcaatggcatcatttcggctggcggctgccagctctggctctgagcccctagttctgtggctttggaggttaagatggagcttgtcagtgacgcccaggaggtggtggttctatccagaggaagaacgcacggaagagtctccccaggcagcccagccgagtgctccaattaaagccacgtccctgctccacttgtttccctataaccagacgccctgagagat

SEQ ID NO: 119610 - DNA, 609 bp, Homo sapiens
tttataacttaatactactttatttaaatttcaaacatatcaacccaaaattccttaaggcacaagcatagaaaagtggtagaaaaccataatgaataaactattatagattaccagtttaaactacttgtggtaataaaaaatgattaaggcaatttactgttcttccacaggggagtgaacaatttatatgtaaaagcagggggagtggaagcttcactctaacttccctcccagggatgaagaggagccccctttctgtgcctcacactgtgcctggtgatttaggttggtcatcccgtctaatccccttattacactctgaagttgatcttcccactctcattcaacagataaggaatttgaagctcaaagggcttaagtaatttgtttctggtcactagtagaaatgagaattgaactgtctgcctgcaaacacatactctgttcaagatggcaaatgcttgggttagaatatttttatatgtttgacaggacaaacaatggtaatgatgttcttttggctaatggtaacttcaaaaattgcttttcaaagcataaccttactgtagttttaaagtagaaaaggaaaaatggaaaaaaaaaaaa

SEQ ID NO: 119611 - DNA, 193 bp, Homo sapiens
ctgaactggggttttcaagcggcctttcttaatacattagagtgctgaaggaaagtagaatgtcagtaacatatttgtgattccaagactttcagtcataagataaatctgctgtaccattgtccctgatttaatatttaaattataagtagataaatgctttgtaagttcttaagttaagaaaactatatat

SEQ ID NO: 119612 - DNA, 311 bp, Homo sapiens
ttcacagctgactcttgaggatccactctccctactggatcctacctgtagttttttggcctgaggaactggatgaataatgtagctgaaatgagcaagaaaggagaggataagtgcgtctccttggtaaaaagtaagagttctgtttggacatgttaaatctgagatgcccattagacatccaaggggcactgctaggtaagcagctggatatatgagtctgaagcttagtgaagaggacaagtatagacatttagatttggaagtcagcttacagtttgtgattaaaaccatgggaatggatgagacca

SEQ ID NO: 119613 - DNA, 369 bp, Homo sapiens
accattaaaccttgaagtttaggaggagaagagcagtagtgttactggaccttggtgagagctggagctgcagcagaggagctagggctgacatagaaagcagccaaagccagaaccaagaggggaatgcaatgcgagggtaaaagtctataccccagcctctgtctcttcctgtcctttgctttcctgctagtgcctctcaatgaccaaaatggaatggaagctccagggcagagagcagaaagaaggtcagaggatgactggggactgtggcaaacagaggataaccagctatgagcataagcatgcattaatatacccagaaggtcctacaatagaacctggcagtgagttcctttgtaaaatgaa

SEQ ID NO: 119614 - DNA, 797 bp, Homo sapiens
ttttttttttttagatggagtcttgctctgtcggccaggctggagtgcagtggcgcgatctcggctcactgaaatctttgcctcctgagttcaagtcatcctcccacctcagcctcccaagtagctgggattacaggcacatcaccaccactcccggctaattagcgtcaaattttttaattgcattaaactgcactgtaatttaaagtttcttattttatattaattccgtttttttttgagaaggcatctcactgtgttgtccaggcgggggtgcaatggtgggatctcggctcactacaacttccgactcccgagttcaagcaattctccagccttagcctcctgagtagctgcgactacagcacgcaccaccatccctggctaattttttgtatttgtagtagagacggggtttcaccatattggccaggctggtctcaaactcctggtctgaagtgatccacccaccacctcggtctcccaaagtgcccggcctcttaattccttttctgataaatgttaattataaactagttgacaaatctctacaatatattttataacaatgaagaggaaaatggctctagggtacaattgtttgtgttcaaatttcagttctgtcttatattagctatgtgtctgtggctcccagttttctaatcaataaaataaaaacactaatagtataacagtacctacttcataaggttgtgaaaactgcatgagttaaaatgtttattttatggtaggcactattcagttaaaactcataaaataaacattcaataaatgtt

SEQ ID NO: 119615 - DNA, 337 bp, Homo sapiens
gggtctaagattaactttgttaatagcatggtaaggtttcaaaggattaaactgaaaatgaatcacaggggtaaaacgggatttacaggaaacacttggagccattgagtgaggggagagaacagactttattccatgagatctagagattcccagcactgcctacctactagaatcaccagaggagttttaaaacaataccaatgtctgggttctatcccagagactgatttaattggtctggaataggaccccaacactggtatttgttgaacattcttcaagtgattttaacattcagcctggcctgaaaaccactgatttagagagttgtgaa

SEQ ID NO: 119616 - DNA, 878 bp, Homo sapiens
tgtctggtgtatattgcaaatgtttatcatttgtcttttaaatttattcatggtgctatttactataaagaagatttaattatgtaaatagacaaacattttaatcttttatagtttcttgtttttgtttcatatttagataggcttctgcactcccaagattaaaaaagtattctcctatatattcttctaatcaaaaaatatattttttgagatatcgtctttctgtgttgtccacactggtcttgaactcttgggccaaagagatcttcttgcctcagcctcccgagtagctgggactacaggtgtgggccagtgtgcctggttcttccaatattttgtacgttcttattgcttagtactctatgtagaattggcttttcttttataagtgtttctatggtacaaagtaggaatctaagcttattttttttcagaagagagagtcagtttttttcaacttacttattcaattgaattatttccatactgatttggaattctctttttatcatgaactatatgggtatatttttttgtttcttttctgttcaactgataatatttctctagtactgagctagtacctcactgctttaattactgtagcattatgttttgacatatgatgggactgcttcccctacattattatttttttcagaatttttcgctattcttgtgcatcccatttttccagattaattttaaaattaactcatgaatgcccataaaaaattaatcccttggaaatgcttcagacctttgagtaacatgtcaagaactgccatctttatgatagtgggttttgcatctagtaacgagggatctgtctcaatttatttaaatttactgtagtctccatttagatattaaaa

SEQ ID NO: 119617 - DNA, 209 bp, Homo sapiens
actgagctaccagcctctatgacctaggggtcccactcgactctacaagccagcctacagaagtagggtaaccttttctgccttcctagacctttcaaggtctgctggcttgctcagtctaagatccccagaccatgcttaaacccccagactctttcctaaccctgttcaagcaaggtgtgcttcgctgcctgttgctttgtcttagc

SEQ ID NO: 119618 - DNA, 414 bp, Homo sapiens
  misc_feature (324)..(324): n is a, c, g, or t
catgcgcacacacacatgcacacccgcacacaggcgcacccgcacacccctgtagacacaggcacatgcacatgctcacgcacactcccactcccacccccgcccccacccccaccctggtgaaccgtggggcctctgggggtcaaaagagaaagagaggggagggccctgagctccagggtgaaggaggcgttttggtgggggcggggggggggtaatgtgtgtgcgaggacagacatggcaagacagcaggacatctttggggggcagtggtgtagctggcactggggtacaaccagaattcagagcaggggtcaataaacntgtgccatgggccagatctagcccgggccctctgtttgtacaattcatgaactaaaaaaatgattttacatttttaaagggttgtttaaa

SEQ ID NO: 119619 - DNA, 610 bp, Homo sapiens
actatatgatcaatttgtgttatatatcttaaaaattctatctcaggaattttgaacatacacaaaagtggacacaatagtcagtgaatcccaagttcctctcgttcatctccaacaaccatcagttatggcctatctgcttttctccttcctgtatttttttttttcttgagacaggatctcactttgtcacccatgctggagtgcagtggtgtgatcactgcttactgtgtcccttcaacctcccgggctcaagagatcctcccatcttagctttccaagtagctaggactacaggcgcacaccaccatactcggctaatttttgtattttctgtagagacaaggtctcactctgttgcccaggctggtctcgaactcctgggctcaagtgatctgtctgcctcggcctctcaaagtgctgggattacaggtgtgagccactgcacccagccttttttttttgagacggagtctcgttctgttgcccaggctggagtgcagtggcgtgatctcagctcactgcaacctctgcctcccgggttcaagctattcttgtgcttcagcctcctgagtagctgggattacaggcgtgtgctaccacgcccagc

SEQ ID NO: 119620 - DNA, 429 bp, Homo sapiens
tggtaaagaaaccagccaaaaccaagatagcaatgaaagtgacctctggtcgtcctcactgcttattatacactaaccataatgcattagcatgcaaaagacactcccaccagcaccatgacagtttacaaatgccatgacaatgtctggaaattaccttattttgtgtaaagaggagagaaaccctcagttccaggaattgcccacccgtttcctggaacactcatgaataatccatcccttgtttagcacataatcaataaataaccgttaagtatactcagtcgagcagcccatgccactgctctacctatggagtagccgttctttttttttttttgagacagactctcactctgtcgccaggctggagtgcagtggggcgatttcggctcactgcaacctctgcctcctgggttcaagcaattc

SEQ ID NO: 119621 - DNA, 193 bp, Homo sapiens
aagactggcaatggggacaggcctcctgggggcagatcttcacatttttcaagtgagaagccaaacattcggttattacctgaagattcttgattttcaaatgttggctacaaactcaacattttcaagagcagataaagggctggagcaggcgcagcttggctaggacagcttccctatggctcctcccccc

SEQ ID NO: 119622 - DNA, 410 bp, Homo sapiens
tgagtagctgggactacaggctcccatcaagtctggctaatttttgtatttttggtataggcagggtttcaccatgttgcccatgctggagaagctcctattttaatagcagctttctcagtacttgttcaggttgcaaaggaagcaaacacttttgtgatgatgctgtttgctttacaaatttactaaaatatttgatggctgaaggggaaacccagaaaagttccaccattttaaaaatggagaaccttcctaaagttaatgaccttagatcagattcaagttttgaattatctcaataaatgcagcacctccaaattgttacaagcttcccacaatgattctccaatgattcagtcttgaataggattgatttggtttttgaggcattcagctttcttggcatcttt

SEQ ID NO: 119623 - DNA, 588 bp, Homo sapiens
acggaccctctccgttgcctgcctcccaaaatggagccaggcttccaacttccgctgccttcggacatagggacccagttcccaggagcggggaggtagggttggggctggggcatttggattgtaattgggagctctgccgtacgccagggcggttccaaactctaaaccgttcccaccgtcagggagacctacagtttcgggggaccaccctgggctggccttgtatataggaaatgctgctgaactgaatagaaaggaacttgggagatttgaaacagtgctcgggttttcgctaggaccggtttgggctttgtacaggttatttaatagctttgttaaagataattataataattataacattaataaaaatgttgcttttgtcttcagctccatgcagagctacagcatgatatgtctctgtaaagtgatcagcagttgcagcgtgaaaataaatactttaactcaggggtcactacaggaagaccccgttgagccggtctcatttgatcttttcttcttctgggtggctgtactaagcggtcgggtttccccgggaatttgatggttcctatagtctgcctg

SEQ ID NO: 119624 - DNA, 252 bp, Homo sapiens
caggagaatcgcttgaacctgggaggcggaggttgcagtgagctgagatggcaccactgcactccagcctgggtgacagagcaaggctctgtctcaaaagaaaaaaaaaagaaggaaaagaggatgaacccaagaatagaaagatggtacccaaaacttgatgtccgtaggaaactgcacccaattctgggctctccattcctgcaggcctaactccgggctctctgctccgccagcagtggctctgcaaga

SEQ ID NO: 119625 - DNA, 352 bp, Homo sapiens
cacttgaggtcaggagttcgagaccagcctggccaacatggtgaaaccccgtctctactaaaaatacaaaagttagctgggtgtgctggtgcatgcatataatcccagctatgtgggagactgaggcatgagaatcacttgaacctgagaaatggaggttgcagtgagccgacattgagccactgcactctagctggtgacgaagtgagactgtctccataaataaatgaacacattactcaaatattctgaagtgggcctgctgttttcaggcaaaagagaattaagagttaggtggtgcttttaagtgctcctttaaaccagcctttttctctctgccagaatctttaaa

SEQ ID NO: 119626 - DNA, 514 bp, Homo sapiens
gcccagagccggagcaccgacgcagagagacgtggaaacagaaagcgaacgtactacggggccgcagcgggatccccgcgccagacgccaccccgttagcaacatatgggagagcagggatggttcccagccccttgacaagcgcggcgacggctccgcggggcctggcggcgaaggcgaggcgaggctgcggcgacgaggggcgcggcgggcgggccgccgggggagccccgcacattcctccccgcggcggaggcgcacgtggggttcgaggccgcagggcctgcagaggcggccagagcagagggcggcaggtgcgggaaagaaagaggacgggccccggaggccgcaagcccgagcagcggaggacgattcccggagcggcggcatgcgggtccgcgaccccgaggcaccggcagctcggacagggtgggggaagggagggaggcaccgggacgcctagagacggcagtgtgggggtctgaaggagagaccggatgggggccccgaggga

SEQ ID NO: 119627 - DNA, 375 bp, Homo sapiens
aattggacatctttcattgttggaggaacttcctccattttcatttcttttaaaaaagtccctttttgagattcttaactgtcagaatagtactgcaaataactgttagggtaaaatttctattgtgtttaaaatacgtttgtggttgtcccatgaagaggaagcagttgagggtctagtacagttctagtcttatctttttgtcttctgacatttttctcctgaaataaagatcctgtccttagaatttaggtaaaaatttcattgttaatttgagaggggaaatagaatactctgcttgactcctcaaattgaatgtgattcttactcataaggttttagaccatcagtttacctgggaagaagtatctttaa

SEQ ID NO: 119628 - DNA, 200 bp, Homo sapiens
tttcttctccctcagatgcctttctctgcagcttcagtctttctccttatgataatgtatcacttttataatgttaaaatttaaaagaaaaatttcaagcttgggataagataaagttttgaaagcaataaaaataaatgtgactaggtagatgaattctcataattttgagttcatttttgtaggtagtactaatgtta

SEQ ID NO: 119629 - DNA, 290 bp, Homo sapiens
ttattttaatatttcaactgaatgttgtcctaaagtaaacttggggaaattattttagccatgttgaccttgttaaaaagatttttagaactctttcttaggtataatggttgtggatttttaaaattactatttaaaaaataacttggctgggtgtggtggctcatgcctgtaatcctaagactttgggaggccaaggcaggtggctcacttgaggtcaggagtttgaaaccagcctggccaacatggtgaaaccctgtccctactaaaaataccaaaaataaataaat

SEQ ID NO: 119630 - DNA, 418 bp, Homo sapiens
ccctgctttgtgtttcatcaacaaagttatacatacttgacattacatcaaatttattagttgattatttttctctcccactaacatacacattccagtagggatgaagacctagcatttagaacagtacctaatataccacagacagccaatacatagttgatgaataattcaatgagataaatgaattaagtgaatgaacaaattatttctatctatgaagtgtagaaatttcaatccagacaagctcctgagggtggaggactagggctatacatttggctttaactactagcatagtaaagtaatgggagtataaaacattgcctgggaggcagttgccaatgaagaaagaacaaatacctgggaaacactgatggccttttttgttttgttttgtttgtttgagacaggatct

SEQ ID NO: 119631 - DNA, 311 bp, Homo sapiens
agtggatgcccatcaccaagctgggccgcctggtcaaggacatgaagatcaagtccctggaggagagctatctcttctcccgcccatcaaggaatctgagatcattgacttttgcctggggggctctctcaaggatgaggttttgaagattatgccagtgcagaaacagacccgcgccggccagtgcaccaggttcaaggcgtttgttgctatcggggactacaatggccacatcggtctgggtattaagtgctccaaggaggcggccactgccatccgcagggccatcatactggccaagctctccattg

SEQ ID NO: 119632 - DNA, 291 bp, Homo sapiens
gcagcttctcctgagcagtggccaccctacttcctgagacgtgggatgctggcagtcagcctttgcagaggctcctgacaacatccaggtcttgattctgcagcgaggcggtgatttcagaatcccccagctgtgtgggggagggagggagacagtgggaagacaagctctgctcggctgagctgacaacaccaggaaagcttcactcctctttgagaaggagaaggagcttgtgaggctgagacggagcaggagacagaagtgcgcctgggtgcagaagtgcgcgggtgg

SEQ ID NO: 119633 - DNA, 634 bp, Homo sapiens
tccctgcgggaagccgggcggggtgggggagccccggccgcgccggctcccggcgcgctcggcctcggaggggagggggcggcggtagcggcggcggcggtgagcggcgcggctgccctggggccatgtggactggcggtcgccggccgggccggctgcgccgggcggcctctgccgcagacatggagaaactcagcgcgctgcaggagcagaagggcgagctgcgcaagcggctgtcctacaccacacacaagctcgagaagctcgagaccgagttcgactccacgcgccactacctggagatcgagctgcggcgcgcgcaggaggaactggagaaggtcacggagaagctgcgcaggattcagagcaactacatggcactgcagaggatcaaccaggagctggaggacaagctgtaccgcatgggccagcactatgaggaggagaagcgtgcgctgagccacgagattgttgccctcaacagccatctgctagaagccaaggtgaccatcgacaagctgtcagaggacaacgagctctataggaaggactgcaatctagcggcccagctgctgcagtgcagccagacctacggcagggtccacaaggtgtctgagctgccctcggatttcca

SEQ ID NO: 119634 - DNA, 195 bp, Homo sapiens
aggctcagcaggccgaaggaatccagcactgcagtgagaggcctggctggggaggggaagccctccagttatcttgggacaatcactccttgggggcctgggacctggctggctcttcatatctggttatctcgcctggctgatgggagacgatgttggccgataggagggagctgacaggcctctggatcagat

SEQ ID NO: 119635 - DNA, 474 bp, Homo sapiens
gcacgagtgcaatcctacacctgtatataagcactattgatattttgattaagttccttccagacatctttacaggtacatgtgtgcagtacatgtatgtgtttttgtcactctaaagaagagaagggatcacagtaatgcttttggggtgggaggaagcccaccttcacgttcagtaaaagggatacgtgaggccgggcatagtggctcgggcctgttatcccagcactttgggaggccaaggcgggtggatcacgaggtctggagatcgagaccatcctggctagcacggtgaaaccccgtctctactaaaaatacaaaaaattagccgggcgtggtggcgggcgcctgtggtcccagttactggggaggctgaggcaggagaatggcgtgaacccgggaggcagagtttgcagtgagctgagattgtgccactgcactccagcctgggcgacagagtgagactgcatctta

SEQ ID NO: 119636 - DNA, 506 bp, Homo sapiens
tcagagttattgtgccatctctaaagtatactttttctccctcaggaagcatgatacactttagccacactggcttaccagggccttgctgctcagtggggaaaggggcacattctgataggctttcttcctcttcacttgggttactttaattatgtatcagctgggtgcagtggctcatgcctgtaatcccagcactttgggtggccgaggcgggcggatcacctgaggttgggagtttgagaccagcctcaccaacacagagacaccctgactccactaaaaatacaaaattagcctggtgtggtggcgtatgcctgtaataccagctacttgggaggctcgggcaggggaatctcttgaacctgggaggtggaggttgcagtgagccgagattgcgttattgcactccagcctgggcaacaagagtgaaactctgtctctaataataataataataataataataatgtatcaatttggcttttctttcgtcacaataaatt

SEQ ID NO: 119637 - DNA, 344 bp, Homo sapiens
aggcgactccgaggattcccggctctgaacttaggctatttctctatctccctcacatttccccattactagcatcttgaaatagtgtggtacatttgttacaactgaagagccaaatattgatacattactgttaactaaggtccgtaatttactttagagttcactcttggtgttgcagtttctatgagtgttggcaaatatatcatgacatgtatctagcattatagtatcatattgagtagtttcactgccctaaaaatcccctttgttccaccttttcatccctccatctacctgaacccctgataaccactgatccttttacagtctctatagtttta

SEQ ID NO: 119638 - DNA, 633 bp, Homo sapiens
attccagcttgggtgacagagtgagtccttatctcagaacaagtatctatattactttggaatatagatccagtatctatattccaggtagtatctatattattttggaaatgtatataactcaagtatttaatgtatgggtgaatagcaagaatgcagaaaatccacattttaaagagatgtcagagagaaaatgagaattcgtaagcatttaggggcgaatgatcctgtaatttatttttcctttttacgagatttacccaaccatctcgtttacctctgatatggtctatttaagggctgtatacagatatagctactccctacgtatatacttaagatatctggccgtgtgcggtggctcactcttgtaatcccagcactttgggaggccgaggcaggcggatcacctgaggtcaggagttcgagaccagcctgaccaacatggagaaaccttgtcttgactaaaaatacaaaattagcagggtgtggtggtgcatgcctgtaatcccagctactcgggaggctgaggcaggagaatcgcttgaacccggggggtggagattgcagtgagccgagatcaagacattgcattccagcctgggcaagaagagggaagttctgtctctaaga

SEQ ID NO: 119639 - DNA, 419 bp, Homo sapiens
tattttgctatacaaaggtcctgggctcaaatacatttgtgaaaatattaaatagttcaaacagctttatgtcataacttcttggctcctatgatgatgtgcttgtgaagctctaagactggggagatacgacaccccgagcctatttaaccatggaatacttttacttcagagcatttctcagcactggcattccattggctattttttgataaatgctgaactgcagcaaagaaaggaatcgtcttgaagagatttcactcagaccaggaagcagcctaataatgaaacgtccatgacccactgaacagaacacttcagtagtaaccaaaatctttcgtctctaggctcctcatctctttcacctggacagggatggattcatatggcaaaatattcttttccaaacccagtttatc

SEQ ID NO: 119640 - DNA, 527 bp, Homo sapiens
ctgtcttcccgtctgccacatgttgcctgttctccgtgactttggtaatagcttccttgtgtatgaggatgatgtccaggatgttggtctggtgtccctgagacagcactaacaggtccatggctgggtccaggtccttcctggactgattggcaaagagctcactgatgttcttgaagtcatctttggtgaagtggatggcctagtcaagttccaaggcctggctgaggctgaagaaaaactggccaccttctgatgctctttctaaaagcctgtgactgtcatctgcttgcttgtcaactcattggctgtgaggttgagctaagtggcctgtgtccatcttcttggggaagaatttgaagccatcagtctttctctcccacccctaaaggttgatggtcaccacctgggggtgtgctgagggtcagaaagaagccagcactcactatctcatccttctcagccttcctcttgcactctctccgggctgtctcttcagtgctggtaggatacatcagaaagtgatg

SEQ ID NO: 119641 - DNA, 405 bp, Homo sapiens
gcactaggattttaagttccctaggtgactctactatgcagccaattttgagaaccaccaaactaaaatactttttatccagcccttttcaaaaaaattttgtaaaataatggcaaaatacacataacataacattatcattttaacatgtaccatttagtggcactaaatatgttcacaatgttgtataaccatcataattatttctaggacttttttttttttgagatggagtctcacactgtctctcaggctggagtgcaatggtgccatctcagctcactgcaacctccacctcctaggttcaagcgattctcctgccccagcctcccgagtagctgggattacagacacctgccaccatgcccggctaaatttttttttttttttagtggagacggggtt

SEQ ID NO: 119642 - DNA, 227 bp, Homo sapiens
  misc_feature (10)..(10): n is a, c, g, or t
tcgactgttnacctatcttccctacttacctctattgttagaatcccgatagctccaccctggacactctttcttctcatttttctattagatctttcttatcggcattcaaaggcctagcaaccctagtaacctttaaaaacaaacaaaagttccatgacctgataactctcttcagttaccatcctttctcttgcctatctttcccagccaaatgcctggaaaag

SEQ ID NO: 119643 - DNA, 400 bp, Homo sapiens
ctggctctcagagactatgttgcgtccatcctgaaatcgtatggatatgagaaatctgagcccatagtaggtggctgcttttaatgtcactgaaaaacttagagaataagaagttcaaatctctaaagtctgaattcaagccacaggctgaaacctaaagactgcctagaacaacgcggaatttcattccttacagatgcgaggccaggatatctgaaaacccatcttaagagtctgagcctttggctgggcgccgtggctcatgcctgtaatccaaacactttgggaggccgaggcaggtggatcgcttgagtccaggagttcaagaccagcctgaccaacatggagaaaccctgtctctactaaaaatacaaaataagcaggtgaggggatcctctag

SEQ ID NO: 119644 - DNA, 239 bp, Homo sapiens
cttaaaaacttgactcccacatgagctacacagaaaactgtgcaagaaggaaaggttttcacaaacacactcacacctatgaattactgaagtccctgctctgtgttgacctgcagtgcagtatgttcagatcgctcccgttcatctacggtgtaaacttctccaaaacatagcttcttatttacacaggaaagctctgaagggcaactaatgataaagccacaggaaagttttctctg

SEQ ID NO: 119645 - DNA, 151 bp, Homo sapiens
gggtggtggggattgctccaggccctgaatgaggtagtgtggtacccttcttgcagggctatgggaacactgagtggcacagaacagagcaagtatttacaaatcctgtgaatggggagtcagagcctaccttatccgtgaagatgggaca

SEQ ID NO: 119646 - DNA, 468 bp, Homo sapiens
aattcagaaaacaaagtgatcccttatcacttttgatacagtgtgagaaatcagcagatctcctggatgacgttctggcggtcagcagtcttctggacactttccggacaccagcccacagtcattccctcccacagcccactcagaactgcaactggaaatccaaacgcattcaaaaactggctaaggcaggtcagcattttagccagaaagtatctgcttcactcaagccagcagattctcaaatcacaatcatttgactcaaaaagcaccattagttacagactcctgtgtatgccagattatgccagaaaagcatacatgtcctggtaatgcaataaatcttgacctaagctagaagagtgtcaaaaacctaaatacagaaaaaagagtgggtatcgaaacagacacagcatggagcatcaggcctcattacaaatcatgtttttaaagaatttcagtcgctta

SEQ ID NO: 119647 - DNA, 582 bp, Homo sapiens
tagaaatggaaactgtagactcaggaaaatgagcaggagaggtgaacaatgcagtgcgctaatgagatacaagtgtagagtcaacaactggatactcgatcatcagaaatactgcttgaaacgaccttcttttttttttctgagatagtctcgctctgtcacccagcctggaatgcagtggcacaatctgggttcaatgcaacctccacttcccaggttcaagagattctcctgctcagcctcccgagtagctgggattacaagcatgtaccaccacatccagctaatttttgtacttttagtggcaacggggtttcaccatgttggccaggctggtctcaaactctgacctcaagtgatccacctgcctcggcctcccaaagtgctgggattgcacgcgtgagcccccgcgcccggcccagaaccccttgataatgaaatgtgaagcctgaaccttagacaccagactgcagttaaatacggtttgtccgtaagactggaggctgcagttgaatacggtttgtccataagattggaggctgcacttgaatacggtttgtctgtaagattggaggctgcagt

SEQ ID NO: 119648 - DNA, 212 bp, Homo sapiens
tttagctacagattatcacagtttgtcccaggcttgcagatgttagaagctttttctttaaataggcacaggatcttgcagtgttgaccaggatggtttccaactcctaacctcaagtgatccatccacctcagctttccaaagtgctggggttacaggtgtaagccaccgcacctgaccctttcattcttttcgtcaatttgtagaccccg

SEQ ID NO: 119649 - DNA, 391 bp, Homo sapiens
  misc_feature (43)..(43): n is a, c, g, or t
tctagaggatctgttcggggcattctggactcacagttggggnttgtatgaccttgggcaaattcctcaacctctccagccctgcagcaatagcaccctcctcagagagctgttgagaaaatgcaaggtgttcagtgtctgttattatcacatccccatcacacagatgggacaactgaggtctgcccagagaggaaaggacgcttgcccagcgtggcacaaaagctgtgtccaaattagtaagcaggtatactgggtcctggttgcgaggggacacccagccctccttgagctctgcaaagtcagcagccccagcctcctctgcaggacacagccagaaaaccctgcagggagcgcccagatcctgtcccaacaaacccagtccacttgg

SEQ ID NO: 119650 - DNA, 449 bp, Homo sapiens
ggtaactgtagagagaaactaccacctttattctccctatgttgggtgaaaatgaaatttctgtagaaaaatttatagtccccagtccagttcaagctttcttgtacagatgctgcttgccttacaaaggggttgtgtcctgataaacccatcgtaagtagaaaatattgcaagttaaaatgcattaaatacacctaacctgttgagcatcatgacttagcccagcctaccttaaacgcgccgagaacgcttaacattagcctacagttagacaaagttatgtaacacaaagcctattttataaccgtgttgaatatcttgtgtaatttactgactatagtacactgtagaacataatagcagtcatttaccctcgtgatcacagggctaactgggaagtgtggttcactgccactgccccgcctcatgagagagtgttttcacacatt

SEQ ID NO: 119651 - DNA, 449 bp, Homo sapiens
ccaaggtgggggctacattaaaaggaggatacattaaaccgttaaggagagaggaaagtgggaaaaagccaccagctaatttcggtttcctcaccccatgcagctaaaaggttatgtggacttgtggttgatacctgtggggatgggtatcatactccttgctagatgctgcagatgcaggaatgaatgtgtcaccagcttagctcttgataacaaatggtgcatttcgattttcttaaaattgtgaacaattgaataagcagtgacattctttgtggtgttcaaggacagaatgaacactctactattgttgcaaaatcattttttatactccagagcattcagaactaaaccatttaaccacgtactgctcagtcttagaaatgacattgtgttggctaggtgtggtggctcatgcctgtaatcccagcactttgggaggctgagga

SEQ ID NO: 119652 - DNA, 333 bp, Homo sapiens
ttatttgtgacaattttgtggatgagaaatagtcactgctctttagactaacctagtatttcctttaaacactcattttatgaattaatttagtgacagcaccccagaattggcttggcgggggttccagaattggcttggtggggggtatcttctcacccagaaccatcccaaactaagatattagctaagtaaaatcagtgtgcttgctctgcaaacagcttccaaacagggctcctggtaccacctctgctccatccttttcaaaccaaattgctagctctgagctcctccttgatagaaattctggagctgccactaagcccctaatgg

SEQ ID NO: 119653 - DNA, 440 bp, Homo sapiens
tgtatctttaactccacaaggcatctcccatgaactgtctgaaatatctttcttcttcaagatgccaatatgccttccactctcctcctcccaggagatgacctctccaaggcatgtaaccttgaacaagttgcttaacctgagactcagtgcctcatcccattaaatgtcctcatgtaatgttatgagaccaagttaagagaatggcagcaaaacacttcatcaattaaaagtaagtgataagtgaagacttaattagtattgctcatctctgagactaagactgacaagcccttccaacattgctccttccacctcagatttctctgcatttgcagctcagctcaactgttttcctttttactggttttggaggaaatacataaaactctctcccatttcctctatagcccatcctaaatttcttttttttttttttt

SEQ ID NO: 119654 - DNA, 590 bp, Homo sapiens
gaggaacctggtttcatccatcttcagccactcagataaagaatgctcttggaaggcaagaagcagtgacaatctgttcacttggtaacatcctctgaagagatctgggtcagagacaagttcttgctctgttgcccagcctggagcgcagtggcgtgatcatggctcactgcagccttaaccttctgggcttaagtgatcgtcctgtctcagtcccccaagtagctgggactacaggtcttggctcaaaggtcattcccctcagagggaatttccctgaacatcatatgaacagaacgccttcccattcttctctattgcatcatatcacatcatcacgcttattcgcatcatgtcatttttcaccatctatagatatatttcattccttacttatgtttatgtttgcctcactagaacatagcttctgtaatgaacattattatgtatgtaatctttcctcttctttgaattattcctgtggactcttttcctgaataaattctcaggagtgagattattgaattgaatattgtgaaccttcttattgtttttgaaatacggttgccatagcactctccaaaagttgt

SEQ ID NO: 119655 - DNA, 379 bp, Homo sapiens
taaaatattgaacctctgcggtcaaagcaagtgtgttttgagaataaagatggaaacaataattatataaaagatagtaatttaataaattttgaatgatgacaacaccaatacctacaaataagtcatatatcaaaaacaaagaatttcatgaagattctaagctatatataaaaaacaccaaaatagcatgcattaaacagtttttggaataaatattgctagtatctcaaaaactaaagagaaaaattatcagtacaaaggatggactttgtactacaaaggaggtgaagcaacaacttcctctaaactaactaatgttaaatttttcatgctatccacattcataacttaagtccacatgcaaaagaaacaagct

SEQ ID NO: 119656 - DNA, 242 bp, Homo sapiens
tgagtggggacctattggctgccagttgtttggtgtctggtcagtgcaaacctgggctgtggggcttgatcagtggagacctggtcagctggggcttagtgctggcctggtcagcatgggctggggcactggtgaccaggtcaaggggtgctattcagtggaggactgggcacatgggacctagtcagcagaccctggtgggcgtgtcctcatcagtgaggtccttgtcagtggggccctgg

SEQ ID NO: 119657 - DNA, 169 bp, Homo sapiens
gttttgtgagagaaaaaaagataaagaaaacataaaatagtctcacatttcagaggaagttccatattccaagactccactggcattatcagagaccttcaatgaagaaagactctttcctggccttctgatacttgccaagctcttaactgtcccataagtgtctctg

SEQ ID NO: 119658 - DNA, 506 bp, Homo sapiens
aagctagggcatttatctactgattctgccccagtggttgacagtcgccccaatggtgtcagttctcttgcattaactcccctgcacttcctggcagtggctggagagagaatgcccttaggcagaggggcagagtcactggcacttgaggagaggggctgggaacatctcggggactgcctgtcacagctgcaagtgaacccagggatgggctggggacacagggcaggatatcaacaaagtcatacgcacatgtgcgtgcgcacacacacacacacacaagcatactcatatattaggacaaaatgtaaattcaagtgaggtctgtaataataggaactattaattttgttaagatatgagaatggtggttatacttaaaaagtctttagacaaatgtctgtgtctaattgagaaagtgatgtttatgggtaaaatgataggttgtctgggatttaccttaacatattatgccaaaaaaatgggataaatgaaataagaatggc

SEQ ID NO: 119659 - DNA, 602 bp, Homo sapiens
aattccatgccagttgtagttttcattacgtattttataaaagcattagttgggtttatggaaggagatgggcgagaaaaatgtttctttttaaagggaaggtgggaatgaatgctttcatatgtgtgtccagattggctttgcaaatacagtatcccacattgaaataccactgtactataaatattgctataacagtcttatggagatgtaatggtggaatcaggggaagagaactaaattaagagtcaggaaaccttaattctcattgggttttctgggtaagtggaatgatgattgtgccaatatcacttaccctgtctgtgcctgagaggtctctgacctaaactaagtcactgggcggttgggcagagccaaggagtttaatatgtgtgaaacaattttataagttatgatttctatctaaatctgagattgcattaggtctgagggaacaaggaaagcccttttaagtgagatagttacatttctttcctaaggaagttctgaatcagtaagttaattacctctctcagctagggaatcaattagctaattataaagagagccaaggtcaaatttaagccagtctttccattagt

SEQ ID NO: 119660 - DNA, 280 bp, Homo sapiens
tagaatgagccgggaccggggcaatctgggctgtgatttgtcataatgggttctttgattgaaagacaagtaactcattccactttggctataactgatgcaaatcagttattatttaagtagttggtttattttgcattttattttcgatcatcctgtctcccacacatagccttactgccaacttaatttaatggatattcccctaatttcctaataccaagtatacaaaattacttatatctgttactacagagaaactgccccttttccttcctaa

SEQ ID NO: 119661 - DNA, 283 bp, Homo sapiens
gctgctctcacgttggctgggcggcgggttatgatcctgtattcctgccttcctcagagagcagcctccttccccattttagagatggggaaattaaggtccacggctctgacggcctgacccctaaaggctcctcgagttcccgaaatccagcaccgtaactgccgctagaaggataaaccctcgactttctctaatttaagcaaccttagaaaaccagcgcctaaacctttcctcttaggaccctcaagctttctgaccaaacaccaccagcccagttagc

SEQ ID NO: 119662 - DNA, 348 bp, Homo sapiens
ccactccatcttccttttccagcaaaaggacctatgcggggggctgggatctaccccaggggctgagtaaagaaaccaggccacggtgtaatgcttctgcagttgatcacactagagcccgacccaaaaccccaaaccactctccatcctccccagcctcgcagactgctggcttctccaagccatctttccttctgtctgtctcctctgctgagctccatgtgccgctccttctcctccccattctcccgtttttctgtcctcagaacacttcctcatatccttccctggtccctggctctctgagtccctttttttttttttttttttcgttgttgttgtcgttgt

SEQ ID NO: 119663 - DNA, 181 bp, Homo sapiens
ccttttgagaatgtgatcacccaacagagtctttatctaggaaaaaagcaaatatatgctatattctgcatatgatttctgggaagccaaggaccctcagaagtatatgcatgaaattaagaaagaagcagggcatggtggctcacatctgtaatcccagcacttagagaggctaaggcag

SEQ ID NO: 119664 - DNA, 787 bp, Homo sapiens
gagggagtgggcttattttcttctgctcttctaccatgtgaggacccagctttcaatcctctttgtccttccctctcttctgccatgtgaggacagagcattcatttcttctggaggatgcagcaagaaggcatcatcttggaagcagagaatagccctcatcagacaccaaacttgctggagccttgatcttggactttacattctccagaacagtgagcaataaatttttagtgtttataaactacccagtctcaggcattttgttatagcagctcagactaagacagactaagacaatatacaatgccttagtttaatactttaatactttcatgaataacaatagtaaataaatgaatacaattatttaaattatgagattgttcattgtctcattgtctagtccttacctgtatctgtctctctccacattctgaaatcgaccttgtgatttttgcataattgtgttatacataactgtatacccagatgtccctcaatttcatatatatgtttacaaaatagacattttatcttgctcttctctttcctttttatttgatacttttcttatctattattggtttagctattcctagtggcctaaagatgtaattttattgcaaacatctgaacaactcaatatattcttcacactccctgcttactttaaagctttagtatttacacagttggggatatatctatatagaaatacttatcagtgaagtaaaccttttttccctgatgtttcatcttaatggtaaaatcatcctcctgttgc

SEQ ID NO: 119665 - DNA, 714 bp, Homo sapiens
gctcctgagagggactttgtcctataatccatccatccctggaaaatacatgaaataagacttggagataaaggctgaatgcaacagtaagccggtataaaagttatgttctgggaggcaatgctacgagttacagaggagcactttatttatttgtgtatatttatttttaattggtgtgatatttagagtagtcaatcattttgacccctcttaactacttattgatcagaatattgctaattccgcatggtgcatatactttttaaaaaagacttattcaattacagtgatgaatgtaatttatttgtctttaaatttgctctgatattaattaatgaaaaaatgcattacagcctctttgtaaaagatgagggcaaggtaaacaaggcatgctgtctctgagggcttcagattttatctctaatactcaagatgataaacttagatattacattagctttagatatgttagtaatcaagtgtggccagatagctgtctcctgattacgtatctgagaagataaatatggtatttatgccaatcaaagtcaacttcaattcactttttgacgagttccaagcttaacagagtgttctgcaaacagaagcagcttaagagatcagctgaaaatgaaaaaattatttatccctcagccatcttaaggctaaagataaacagtccctcgatatattccttaaatgtgagaaaag

SEQ ID NO: 119666 - DNA, 420 bp, Homo sapiens
cggaggcgtgaatggcccgaggcgtgaatggcccaggactgtggtggcactccacatgggagtaccattcatctttttctccatctctctggttatagcattgagtatgcaaggtccaaacattatcacaaggcacacgggaaaaagaggtcctagtagagagctaaccaggtccaaaacaaagactagaatccattaaaaagggattgtagccaactgagtttgcattttcacctgagtttgtcaatgattctaattgagtctttaagcactcataaattctcctctacctaactggaggtgttgatccagaaacagcatgtttcatttacaaatgcacaagcgccccttacttcagccataaggacatcaagagtttgtctattttgcatggccactgaggccagagaatttatggac

SEQ ID NO: 119667 - DNA, 309 bp, Homo sapiens
ccactctgcaggctttttaccatcactggccaacagcgctgagaagggagaaagtgctgatcaactgtggctaagatatgactccacactgtccacgcacatgccacctggtgccccaggtgagtcttggccggaccaaagggatgaagcaagaaaataaatcagcagcctggaaacagagaaatgagagccaccagaaatccagagggcacagccccggaaggcagactgctgctgtagctctcctggaaggccatggccctgcctgacatgcagagggaagcgggtggggattctgcccaagcatcc

SEQ ID NO: 119668 - DNA, 357 bp, Homo sapiens
tttttttttttttttttgagatggagttttgctcttgtcgcccaggctggaatgcaatggcacgatctcggctcactgcaacctccacttcccagttcaagcagttctgcctcagcttcctgagtagctgggattacaagtgcccaccaccacgcctggctaatttttatatttttagtagagactgggtttcgccatgttggccaggctagtctcgactcctgacctcaggtgatctacccgctttggcctcccaaagtgctgggattacaggcgtgagccactgcgcccagcccaaaaacttaactattgacagcatactgttgaccagaagccttaccaatgacagttgattag

SEQ ID NO: 119669 - DNA, 474 bp, Homo sapiens
aacatgcactgggtgcctactatattggtgatgggattgggagtatagacaaagcttctatcctcaatgaggttacattatagagaaatactaagcaaaaaatgtcttggacagggcagaaaagacagcactgcagttgcacccgcacaggtgatgtccctcaagaacgcagttcctggagctgggaccacgttaattcttctgtctacctgcagagggcgccattgcaccaggtacgctttcagtctcacctggtaaaactagaagatggcagctttacaaagaatttcaagaatcctaaaacagtaaaggggtcttatgtgggctaattgcatgaggtgctgaacttaagtatcttcagttgctggagaaaagcagaaattctgcgtttaaggggagaaaatggaggaaaagtgagacaggtgtgtgtggatactggatgtattcatttgtttcaccttgtgcccggctttt

SEQ ID NO: 119670 - DNA, 614 bp, Homo sapiens
gttattttatatatagcagaagcttttatgctgctaaagggaaggaaccaggagaggggagaggaatgattgatggagcaagaccctggaagagatgagagtacagagattgtttccagagaagggaaaccttcccttgcatctgacaccaaggagaatgtaagggggatgtaagcaaatatttaaaaagagcaagaagaatacaaataataccaaggtgttgagccaagaaaaccccgatgctcctgaatcatttgggtaatgttcgtttgctccttgttcattcatttttatgcagctgctaatcctgactcacagagaagcagcaacagaggcaaaatattaagaaaatgtattaaaaacttacatttggcatatttctaatagagaatccaaaatagattgccactttccaattcatatttatctcactcttagaatcccagggcaccatgagattgaaagtaatgagaactataaccaggagggtagcactagaaatcgaaatacgggcatgtgttcctgagtcactgagagctctgagggtacagaacatcacagcttttggaacctacatgagggaaaacagacaagagccagctggagcgacacat

SEQ ID NO: 119671 - DNA, 598 bp, Homo sapiens
aaagaaatcttaccttgagtacttctggctgtggagatcggtgccttaattagccacatgttctttttacctcctgggaaataagtacgggataaaattggggatcaagccgtagacgtacattgacttagcacacgccgctaagtaattcatcaaggaatgttggtaattagtcctgcctctttcaactcttggcttattttataaaaccggttgatttaaaataatgcctgctgatttattacccacacgtttcaagactggtacttggctcttaaacaaaagcaatattgtgcagcgatggaaatgcgccctcttgtttttgtgtttttacaaattctgaagggccatctatggcccccctattaactttgttgcctttccttttgccccattcagcattttactgggctttcttttctgtcttggtgaagagaaaaggggaacaaatttaaaacaaaaaacgaaaaaatccaggctcttagagatttgggatgtgaggtgcttgtcaaagtgtattggctcggtgtgatttgatggaatttaatttgaatccttcgtctggtaagacaggctgtagtaatagcctttggttttt

SEQ ID NO: 119672 - DNA, 561 bp, Homo sapiens
gcacgagaaaaaaagtttacattaattcaggtggagcaatatggggcaataggataagaaaggagtaataatattggtctaatgtgtggagaaaatgagaatacttgatgaagatatcacaggttacccagagaggcttgaagaccagctgctgggagatcaggaacctgagcagcaaggatagctcaaagggaagtcattttacatggtgtgaactggtgtaaaagatcagggaaaaatagaaatcatagataattaaccaatcttaaaatagagcagactgggcacggtggctcatgcctgtaatcctagcattttcagaggccaaggcaggcggaacacctgaggtcaagaattcgagaccagcctggccaacatggtgaaaccccatctctactagaaatacaaaaattacccgggcgtggtggcgggtgcctgtaatcccagctgctgaggaggctgaggcaggacaatcacttgaacctgggaggcagaggttgcagtgagccaagattgcaccactgcactccagcctgggtgacagagggagactccatctca

SEQ ID NO: 119673 - DNA, 658 bp, Homo sapiens
acagcctagaaagggaaacagtcaggtaaaccagcaattacaattagggcacagacattcatcaggtactacagcagtagcaaaggaggtgggaattggttaggaaaaacttcctatatttagctgatttctgaaatggaactataactatagggagatcaggtaagggtatttcagactgaagcgaacagaatggataaagcttgaaagaacatggtcagtttggagtcatgctggcaaggctggagtgtaagtcatggggaatagcaagagttgagagtgggcaggagttaagatcacacactgtcacacagagctgacagagttaatggtggtaaaggagagatgacagagccaaagtaaatagcatgcttttaatttggtgactgaatatggtgacatcattcaccaaggaagggaataacgatttaacacatttttatgtggctttgagtaggaaaacactaaaggtaatttcatgcagtgaatttgaggtgccttgactcattcagatagggatgcttagatagcagtagtacatataaattttgtttgaaggaagagatctgaagtagaaatacaatttatgcgtctagaaggtttaacttgtgttggtgcagcagtcctggaaataccagcactctatggtcacattcct

SEQ ID NO: 119674 - DNA, 277 bp, Homo sapiens
tgtagtcccacctactcgggaggctgaggcaggagaatcgcttgaacccgggaggcagaggttgcagtgagccgagatcatgccactgcactccagcctggcgacagagagagactccaccacaaaaaaaaaaaaaaaaaaaaaaaaatcaatagctcaaagttttactttcatattgcatgtatttatttttttattttttgaaggaaatactaaccaagtacctacttaaagtgagaactagaggaaacaccaggggcataacagggaacaagct

SEQ ID NO: 119675 - DNA, 804 bp, Homo sapiens
agaaagaaaagagaagagaagagaaaatggagaaagcatccaaagagacatttctcaaaagaagacattcaaatggccaacaggttcaagaaaaaaaatgctgagcaccactaatcattaggaaaaacaaattaaaccacaatgagatatcatcttacatctgttagattagatgttatcaaaaagacaagaaacaagtgttggtgaggaggcagaaaaaagaaaacccttgtacaatgttggagggaatgtaaatcagtacaaccactgtattggtctgttctcatgctgctaataaagacatatccgagactgggtaatttataaagtaaaggtttaatggactcacagttccacatggctggggaggcctcacaatcatggcagaggtgaaagaggagcaaaggcacgtcttacatgggagcaggcaagagagcatgagcaggggaactgccctttataaagccatcatatctcttgagacttattcactatcattagaatggtgggaaaaacccacccccacgattcaattacctcccaccaggtccctcccacgacagctggggattatgagagctacaattcaagatgagatttgtgtggggacacaaccaaaccatatcaaccactacgagaaatagtatggggtttcctcaaaaaactaaaattagaactactatatgatctagcaattccacttctgggtatatatccaaaagagatcaatatgtcatatcaatatgtcaaagaaatacctgcactcccatgttcattgcagcacttttcacaatagccaagata

SEQ ID NO: 119676 - DNA, 419 bp, Homo sapiens
ggcattaaaaatgctaatttttaacaattacctaatataaaattattgcccttttgatttgtgctttggctaaggtagagcctgaaatcaactgtgatttggttggtatttgagcaggccagagtctttaaattaacttgtctttacgatttaatggaatattgccaacatattcgttaagtaagtggagtgtgacattactgcttccttcctcccatcagactgtaaatttagactccgttttattgtgcacacatggacacttcagaaaggcagctgtggctgagttgtagcctttattaaatctcttgtcttgaggagcccgagaattgtgttaagggagacagtggttccaaatgactgaggaccaagcagggtacgttctggattttagaggaaaggaaatcttctatccaaaa

SEQ ID NO: 119677 - DNA, 748 bp, Homo sapiens
cgcctttgggtccgcgccgcctttatgagctgtaacactcactgtgaaggtctgcagcttcactcctgaagccagtgagaccacaaacccacagagagggacaaacaactcccaacgggaggaacgaacaactccggacgcgccaactttatgaactgtaacactcaccgcaaaggtctgcagcttcactcctgaagccagcgagaccacaaacccacagagagggacaaacaactcccgacgggaagaacgaacaactccggacgcgccaactttatgaactgttaacactcaccatgaaggtctgcagcttcactcctgaggccagtgagaccacgaacccaccggaaggaaagaacaactccagacgcgccgcttttaagagctgtaacactcaccgcgaaggtctgcagcttcactcctgaagtcagtgagaccacgaacccaccggaaggaagaaactctggacacatctgaacatcagaaggaacaaactccggacacgccgcctttaagaactgtaacactcaccgcgaggctccgcggcttcactcttgaagtcagcgagaccaagaacccaccaattccggacatactaggttataaaaatcaaaatgtctcaagacatggccagattcttttgggaggtaaaaatcaccaccagttgagaacctctgctttcatgctatagcacaacactgtctgatagaacttgctgcaataaggggagcagtctctgtctgtactg

SEQ ID NO: 119678 - DNA, 281 bp, Homo sapiens
tggaattacccctgccctttgtctcctggtgaacctttgctttttcaagtctcaattcaaaagtcaccctgacttctactccccagtgtcctacccagagttggatgcccctgcaccgtgttgctccagccctgaattcacaccctctgtgagaaaacacattacgttggcttctaatcagttgcttccctgctttcttctctcaatgggctgcacgcttcctgagaacagggactgagtctctttctgcttttcattttcagaacagagtgtctgtaata

SEQ ID NO: 119679 - DNA, 527 bp, Homo sapiens
gtgcacgtctggtactcagatattggtttctaaacaccattgtccagtaaaaggacccaggctccttagggaagtgactgattccaaaagtagggcaaggaaaatacaagattagcctagagcatcaggggatgccataatgtgaggaagtacttgaaaaaagatggaagcatgtcaaaaggacatcagagtcagcctgaaggagctcccagtggccaaagctagaataatttgaagaagaaaataatgatgataatattgggttataacccacagaatgaagtaactgtccatgatgagtccacacgaatagcactagcaataagggaaactgacatcaagtaaccagttatgaggcaataaaaaagatacatcattgcttttgtggtcttctttcaaaacaaaaaaaagcataacttaaaggtaaacactaggaaacatcagacagccccaaatctagtcattccacaaaataactaaccagaaataactgacagggaatgacaaggaactgtcacaaactgtgg

SEQ ID NO: 119680 - DNA, 374 bp, Homo sapiens
ctatgaaaccagtagaatttcttcaacacacacccaagtttatcctgagcaagtataacaaatacctttacatagaggactggtgactcaattcatcgggcatacattattattgctttaatttattactttttagctatttattaatttttgtgtcaagtaaagccttgagcataaataatttgggacacatatacttttactttccctttgacacagttaaaactgaactaacaatactttatccaaagaaagaagataaccactgactaacagatttatttatatcaaagacttctatagagctacaaaaccacctctttccaaaggggttcaaaattgactgaaatcattcaagtggtaccacaaaatac

SEQ ID NO: 119681 - DNA, 504 bp, Homo sapiens
agaggtggcatctttccctggggctgcctcccctgcttgcccatggcaggatttctgaaggccacagtcagcctgggaagttaggatgccagggagttggcatggagtccctgtgggacttggtagctctggggggcttctgaggaagagactcattgttactggagtgaacgtcagaagctctgcattggtggattagtgagtcctttcctcattttctcctcttgtgcaggcttcttgttcctaatgcactcattctaactgatgagataattacagcaaaattttgtatagctactagaaccaggaattccgtcgacacaattagaattggtaatccttaccttcaaatcttcattctagtgaaacctaaaataaaattagcattgctttcaagcagagcttttgtgcttaaattgccccatttctgttccatatcttaaggctgacctccattccagatttcccatttggggacttggatggttctcctgtggagccaag

SEQ ID NO: 119682 - DNA, 299 bp, Homo sapiens
tacttagagtgtatacatgtttatagactgcaagtctatgggatttaatagatattacagcaaattacactgcgaaaacattgatagttctacactgtaattaaatgttatatatattattaaaattattaggttggtgcaaaagtaattgaggtttttgccattgaaagtggtggtgcatgcctgtaatcccagctactcgggaggctgaatcagaattgcttgaacccggagggcagaggttgcagtgagctgagatctcgccactatgctccagcctgggcaacagattgagactc

SEQ ID NO: 119683 - DNA, 192 bp, Homo sapiens
gatcagggaagggtaagctggcctgcttctaaccacagaggtatgaggatgtgtctagagtacaaaaggctaagctcaggctgggcgcggtagctcacgcctgtaatcccagcactttggaaaatggtttgacaatatccactaaagctaaacatatgtcttccctatgctctgggccattcaacgcctgcg

SEQ ID NO: 119684 - DNA, 487 bp, Homo sapiens
accagagttctgttgtctccaatgtcatcttccacagatttcaagttgtgaagccctgaactgttaatttatcttgagaatgtatatttaagcttaatttaagactatatacctaaaaattgagcatataatttctataatttgtttatgtaagtttctgtaagtcataagtatgtggtttccaagtgtataatttatctgaatgtaataggcattaatatattttacattactgggaccatagtacagaaatttctaaatggtttgtaaaataacttgttatttgtgttgttgtaaaagcagttaatacaatggaaaaactcgtaataagaagatacagtttaacatcaaaaagtttacccaaggtaattatgagtactacctggcaaaacttcacggaagctgtggtatcacttttatgatggaagaatggtgtttgcattttgtgtaaaagtacttgcggctgggcgtggtggctcatgtccca

SEQ ID NO: 119685 - DNA, 582 bp, Homo sapiens
gcaggcctgtaatcccagctacttaggaggctgaggcatgagaaccgcttgaacccaggaggcagaggttgcagtgagccgagatggcgccaatgcactatagtccagcctgggcgacagagcaagactttgtctccaaaaaaacaaaacagaaaaaagaatgttatggtaaattagtaatgtctgccatgatcgtgcagtgtaagtggcaacatctgccagttatttactattccttgataacactgttcaatataactgagttaaatatatgcttcagaaataatgctttatgtagcattcttcagagtattctcaacaatgtataaaatacagttgattatcctaagagatggcaaatctagatttggagaaactgagatgaggtggttgtgaggtttttatgactgtttagtaaaaaatttagaaattgaatttatttacctgatttctagtttaatattcattagacaagatagaaagtattgaggatttactattagaggtaagatgattgtgtaaggtggtagaataaaaagctaacagaaagaagactgctaacagtttagtgtcactctgacc

SEQ ID NO: 119686 - DNA, 173 bp, Homo sapiens
ctgccttagcctcccacagtgctgggattatagctgtgagacactgggcctcgcttgtcattatacacttctgtccttcctttatggacaacactgagttcttcatagacctgcctgagtaggtgttcctgcctatgtggcgtctgcctcatcaatccccagggccctcttct

SEQ ID NO: 119687 - DNA, 791 bp, Homo sapiens
gacggtggctcacgcctgtaatcccagcactttgggaggccgagatgtgcagatcacgaggtcaggagatcgagaccatcctggctaacatggtgaaaccctgtctctactaaaaatacaaaaaaattagccgggtgtggtggcaggcgcctgtggtcccagctacttgggaggctgaggcaggagaatcgcgcgaacccgggaggcggagcctgcagtgagctgagatcgtgccactgcactccagcctgggcgacagagcaagactctgtctcaaaaaaaataaaataaaataaaattcattaaattcaatctgttcatcctattttaaggaaactgtgggacagagagataaaaatgaataaataaaggtcaaaaagtcggagcttggaataaacaccaagtctgtatttacagtatgctggctttctcagtgtacattcactctgtcctgtctaatgaaaataacagtggtagtggtagtatagcccaggataaataaataacaatggcattgcttattaatctacctcaaggttatttttccatgtggcatgagcatcaatctacctatattttttacatggatagccaattattgagtgacctattcttttccactgataggccatgattattataaatgaaattatcatatattcatgagtagcttttaactttcattctctgtacaagtattagatgaggactaacagtgacagtgtgctactcacaggtgacaaaaagataagtcagtcaggcatactgtgtccttaagatctgcagaagaa

SEQ ID NO: 119688 - DNA, 358 bp, Homo sapiens
aggtgacccatgccgcgggagtggccaagctacccaacaggcttcacaccactcgttcatgcaaccttctgcggggctcagggtccaagcccttcctgcctatccaggccatagatggggtaccatcaacagagacacataagatcaactctagtaggcagctggtgccactccaggtttacagatggggaaactgaggaagagacagatgcagtgaaatggcccacacagccaagatagggcaacagcaccccaagaccagggtcttcctgagccagctcctccctgccagggcaagtgcatgtgacaagcacatgacatgcctacagccaccctccctggggaccacttcattcca

SEQ ID NO: 119689 - DNA, 391 bp, Homo sapiens
gagatctcactatgttgcttaggctagaaggaccttcttatcaaacttgtaagaaataaattattttaatatatcattatatcttaggaaataaacctatctgattttaaaacaatatctgaaaatacattactgtggccaagaaatgttcttggttctttggttgttttcacttgatgttgaaattaaaagaaacacagccacatggtttttgttgctcttgataggacaagagcaaatgcagatattgccaaacacttggaatttgctgaagaagttatgtaagaaaattagaaatctgcaagccagctaaaacgtgtaaaaggaaattgacaacctaggagaaactggataatgtagaatgcttaaaagatttcagaagttttggata

SEQ ID NO: 119690 - DNA, 602 bp, Homo sapiens
ggtttttctagtctgactttgctgtgatgtaatctgtctgaggttttgtctgtcttcctctgtgtgtgtgtgcgtgtgtgcgcgcgcactcgcgcatgtgtgtgtgtggtagacattgcctgatagattgcatcttacgagagatctctgagtgggaaccagaacagtactcatgccctgatagtccttttcattgagtaatttttatttatttatttaaataggagtgcagtggtgcaatcttggctcactgcaacctccgcctcctgggttcaagtgattctcatgcctcagcctccctagtagttgggactacaggcaagcaccatcacgcctgtaatcccagcgcttttggagactgaggtgggtggatcacctgaggtccggagttcaagaccagcctgatcaacatggagaaaccccgcctctactaaaaatacaaaattagctgggcgtggtggtgcatgcctgtaatcccagctactcggaaagctgaggcaggagaattgcttgaaccggggaggcagaggttgcggtgagctgagattgtgccattgcactacatgcctgggcaacaagagcgaaactcctgtctcaaaaaa

SEQ ID NO: 119691 - DNA, 603 bp, Homo sapiens
catcctgaactttttcatgcatttacagacatgtatgtttttatatttcgtggtggctttatcctcttggtgtatgtatgaccttccatgccagtttctcagcaactacaatttgtaaggaggatctgcttgcaggccatggtgtaatacttttaatgctttccttttccatcctgccgttagagatcgtcttgtgaatggacaggatagacaaaagatggcttccctttagtgttggttggaagagtcaccctgctgtttgcacagttaacagcttctatttagttattcttttctccttccaactcccacaactacggcaaacattgttcaaggcaatgctatgcaaatagcccacatccttgcccttgtcttttctctcccagttaaggcagtgtccaaaaaagtgtcccactcaccaagtagcagctttctgtatttttaagtgctgttttgagataggaggaaggctagaagaggaatagaagaaaaagaatcttgaaaaggactggcagcgttactatgactacccactacaaagttgagtatacttaacagcgagtgccatgattaagccccggatagtgcagagaatgaggtacc

SEQ ID NO: 119692 - DNA, 363 bp, Homo sapiens
cagagggcagcgccgtgtctgaattgtttaccactgcggtgacaaggcctaaagcaggcccttggctgctttgtaccaaggctgggaggcactcagtgacttgcaaaggagggaggagggaaagaaggaagagctctgggcctcatcactgcacggatgaggaagaacctagaattggaggatgcaaggactcctccaggtggtcagcatggcaggggcctggcaggtgtcttccagctgctaccctttcctcgtacactctaagacccttcttgcagcccttgtagggagcagggccagaagatcagacagtgccaagggtgcctggtttatccagcatctgggattgtcatctgtagaaac

SEQ ID NO: 119693 - DNA, 606 bp, Homo sapiens
ggattcaagcaattctcctgcctcagcctcccgagtagctgggattacaggcatgtgccaccacacccagctaatttttgtatttttagtagagacagggtttctccatgttgttcagtctggtctcgaactcctgacctcaggtgatccacccgcttcggcctcccaaagtgctgggattataggcaagagccactgcgcccggcctttggtgtggatttttaaaaagaaataagctaaataataaaatggcaatcttgaaaaatgaagacgtgtacatcaatgaaagtttggaggaacagacaccaaaatattagcaatggtcatcttcagtggttgggattatgagtgtttaatattacttccccttttttttagctgtattttctgaaacttctacaggggaaatgtgctaatttttaaaaagttatttctaaaaatgaacagggattcagtagcagaatacccgaaataagcaaaagagaaagaaactttagaccttatttatattaagtattctgttgactgtgttagttgtgatctagtcttctagtcttattgacataatcttgattctttacttccaactcttgttaattcttgatt

SEQ ID NO: 119694 - DNA, 641 bp, Homo sapiens
gctagtgaagcttatgccgtgaggtctgattctcatctctcccatctaaatgaccacggggaccccagtcaataatgtctcccattaacatggactgttgtctagctaaggggccaagacagtgggcccaaggagaggggtgagaattatcaaagggagcccattctgtataatcaatacaatttgggcgatggggccgggagtgattagtaaccacaccagtaatattaatagagctaaggcctaataggtacataatatttccatggtaactcagccatgcttgggattgaattgcaaggcaactgcagttgagtgaggtatcctgggtgacgcataaaggaagttcctccaatggagtggtataattgataccattgttctgagagtctaattgctctgtgtcaggggagattaggggtcctggtgcctatgctccttgatcatgatatatctcaggaggagtgtcgttccagagtatggtcacactaccagtgggttaggaacatatgcccaatatgtttttgcctctgcacagggaaaacatacctcacaggatattacagctagcatggccataaacatggagtctggggtttttgcctgaccctggcgctccagcagtttttcaacttcctgtg

SEQ ID NO: 119695 - DNA, 334 bp, Homo sapiens
ttttgttcttcctctttcacttccctacttctttttttttcttccttgccaaccatccttatttactcacctggcaagtttagttaactcttatcttcattggtgctgaaataagggtactctactgaaatgtgctgtttagggactttctaaattgttgcttttcacttatttaaatttattttttattgtttaaattctttcacataatatttatcccaaagaatttgcatttagaaagagccaaaaacagagtgtgagaagttctcagagatataagcagtagctgttaagctacagttgtaatgggggagacgcagcaagctccctctac

SEQ ID NO: 119696 - DNA, 226 bp, Homo sapiens
  misc_feature (1)..(1): n is a, c, g, or t
  misc_feature (12)..(12): n is a, c, g, or t
natatcagctcngtaccagtgctactccacaaacaggtggtcagggaagggccccacggaagagccatgtgaactaaaaatgctgaaatcgggcacggcaaaaccaagagagtgcatggatggctgaggcaggggtaagagcaagtgcaaaggcccaggtgtgaggaagagattagcacgttcagcaaaaacaacaaagggccagtgagcttagggagtagcagat

SEQ ID NO: 119697 - DNA, 178 bp, Homo sapiens
gcaaagaaagcaacttccacatctcagagggagacacagcatttttttattccataactcaaagtttaggagcagaagagactgattattaccctggagatccatttcacttcgatgagagtccatttcattctctttttctttggataaacaaccaccagtgtatcttccattcaga

SEQ ID NO: 119698 - DNA, 226 bp, Homo sapiens
tgctcttggtcctggctttcttggggttggtattatggtgatcaggtgctactacatgtcagatacaagaagttacaaggtttccttgatttcatagttgatgattttaaaagtgaaactgtcttgattgtattagtagaacctcttaggaacacaatggaatggcccaggcttctggccctatgcctctagggactctcagttaaactgtgtccctactgatttt

SEQ ID NO: 119699 - DNA, 178 bp, Homo sapiens
cacaggttcttgcccatctggaacacacaccctcctccccctccccttgctgaaataactactgctttcctcggagtctcaggtcaggcattgtccccccaggaggctcccccacccagtccttgaggtgactcttaccatgccccttgtcacctcagttactgcggactgtccatgt

SEQ ID NO: 119700 - DNA, 935 bp, Homo sapiens
tattcactaaatgtacacagtggtcaccattatatgaatcagtattccaatttattaattcacaacaagaaatataacttaagaagactctacatttaggctatctaactgatacatttattctctgaatgcaaactctttgggatgccaaattataagcagcatcagaccaaagttatatgttataggtatttagtggcattagatattgacatcaagatgcagtatctccatgttagagacatacctattaccagaatgtaacaggtttaatctttgggtcaaaaaaacttctatccttgccttctgatattagttctggccttctttctctagttctaaaatacttagtataatgatctccaggctgttccatctcttaaagatgatcttgtatatatctctgttttgatatatgtctcttttctttaagggaaggcagccttgttcccaggatcttggagagacccccaaaatcaccattaccttgtttactgatatatttttgtatattgaatcaatagacattaaatctgatgctcaaaatgagaccatctgtaactgacagggaaaggagggaaggatgagatagttatctatgataacttgaaggatgagtgatggggaaaatttctccattattgtgagtctgtgactactcaagagtttttgttggtgtagctttctggaagcataatgacatttggggctattgagtgtcccaaggcagtaactggggaagggtctctagtacattaaatgctatcaggatggctttaggagtccgtgctctcttaaatagaaaggagactacattctgggtgtggtggctcacacctgtaatcccagtactgcttgaggccaggaatttgagaccagcctgagcaacatagtgagactctacctgtataaaaaaaattttttttaaagaaaag

SEQ ID NO: 119701 - DNA, 827 bp, Homo sapiens
aacaaaaataagcaatggggaaaggactccatattcaataaatggtgctggaatacctggccagccatacacagaagactgaaacaggaccccttccttataccatatgcaaaaaaacaattcaagatggattaaagacttgaatgttgttaaaaacttaagccaaattaaattttaaggagtttaattgagcaatgaatgatatgcaagtcgggcagcccccagaatcacagcagattcagagagactccagggatgcctcgtggtcagaacaaatttatagaccaaaaaaggggaagtgacgtacagaaatcagaaatgaagtacagaaacaactggattggttacagctcatcattttccttatgtgaacacttagcagtgtatgagtggttgaagtatggctgctgggattggccaagactgagctattgttacagatgcatactcctaagttaagttctcaatcttgtctacatattaagttaggtggcagttcatctacaaggactcaaatattgaagtatggagttcttctcaggtcacatttagcctgttttaacaatgtaaaacctaaagctgtaaaaactctggaagataagctaggaaattccattgtggacataatcgctggcaaagattttatgataaagatgccaaaagcaattacaacaaaaacaaaaattgacaaatgggacctacttaaactaaagagcttctgaacagcaaaagaaactatcaacagagaaaacaacctacagaatagaagaaaatatttgtaagctctacatccaacaaaggcctaatattcagaatctataagaaat

SEQ ID NO: 119702 - DNA, 617 bp, Homo sapiens
attgtgacatatcactgggcctcaaactaaggtgaagttacactttcattttcgaactgtactcagaaggcatcgtgacatattcctgggcccagcaccaaggtgatgtgagtctcctgcctgcactttgcccacaaatggcattgtaacatatctttagacctatcaactacttgatatgacttatttttttaaagtgaaagcaagtttattagagaagtaaataaacaaaagaatggctactccatagacagagaagacctcagggctgctcattggctcttttcatggttatttcttgagtacatactaaacaagggatggattatttgtgagttttccagggaaaggatgggcaatttccagaactcagggtgccttccctttttagaccatataggataccttcctaacattgccatgacatttgtaaagtgtcatggtgctgttgggagtgtcttttagcatactgatgcattacatttagtgtataatgagcagtgaggactaacagaggtcactttcattgcagtttttctttcggtgggtttttgctgtcttttgtcctgcatcctcttttatcagcaaggtgtttgtgaatggtaccttgtggtgac

SEQ ID NO: 119703 - DNA, 375 bp, Homo sapiens
actggtgatgaaataaaagctgcaaggattttttcacataaactctgtgaaaacatttcctcatatgtctgtgcagtcaatgttaagtgctataaatccatctagtgtgcactttgattttagcatttatcattctagttcatatatttaataatctccttcttccatatgtatacatagtaggaagagatcctgaaggacaggccaaagttcattaaaaaagtattcctagtgcttactaccatgtctattcagtaaataaataaagagataaacatatttcttaaagatttttggtagattttgttaagacctcctcccattaaattttattctatggttcaaatcttttgaaataaatttatgttctatttt

SEQ ID NO: 119704 - DNA, 696 bp, Homo sapiens
atccttcctgagacttttttgggcttcaagaaaattagttttaatagaaatttgtggccgggcgcggtggctcacgcctctaatcccaacactttgggaggccaatgtggatggatagcctcagttcaggagtttgagaccagcctgacaaacgtggaggtttccatgtctactaaaaatacaaaattagccaggcgtggtggcagaggcctgtaatcccagctactcaggaggatgaggcaggagaatcgcttgaacccaggagacagagattgcagtgagccaagatggtgtcattgcactccagcccaggcaacaagagcaaaactttgtctcaaaaaaaaaaaaaagaaaagaaaagaaattagtccagcctgggtaacgtggcaaactttgtcaatacaaaaacatacctggtcatggtgatgtgtacctgtagtcccagctactcaggaggctgaggtagaaggatctgttgagcctaggagtttgaggctgcagtgagctatgattgcaccaccacactccagcctgggcaacagaatgagcctgagaccctgtttcagaaaaaaaaagggaagaaaagaaaaaagaaaaaaatgagtttcaatagagtatgttgtcttttaaaaattacattcaacaggttgtggctgataattgaaattcactgagatttatttttgtataaagtgt

SEQ ID NO: 119705 - DNA, 401 bp, Homo sapiens
caagctctctggtatctcttcttatgagtacagtaatctcatcagatcttggccccagacttattaccttacttaactttaattacttccttagaggtcccagaccatctgtaaatataggcatactggtggttaggatttcaacatatgaattttagattccatccataacagtgtgcttggtacctaaattttagattttcatatttactattcatatcaacacatgagttttatatctttaactctaaagaaaaaaagttctgtttatatactatggtacaatatggcagtttttaaaaagttaaacataagcttatcctatgacccaacaattccactcctaggaatcaacacaactcaaatattcatagcagcattattcagaataaccccacacc

SEQ ID NO: 119706 - DNA, 202 bp, Homo sapiens
tgactctcatttgctgtaacataattcaacttcttttagctattcacatagataaccagttgagacccataatacatgactaacctcttctcttatctccctggaccaattatatttctgtctcaggcatgtagcctctctcttaaatctcagccaaaggccccttcactcctatacttctcctactgagcagggtagaaaa

SEQ ID NO: 119707 - DNA, 345 bp, Homo sapiens
gctgtctgaatcaatgacttaattatgttcacaacagatttgatgctaaccaaacattatactgtaatactttgaaaaactggaaccccacatatataaccattctttgaaacggatcacttgctcaaccaggatacccaggtgacttcctgaatgcgccatgaacagtcaactgtgcaaaaggaaaaatatctaatgcagtcaagagctgccatgagcaaaatgtttttttttcttctttttttttcttgagacggagtctcactctgttgcccaggctggagtgcagtggcacgatctcggctcactgcagcctctgcctcccacgttcaagtgattctcctg

SEQ ID NO: 119708 - DNA, 807 bp, Homo sapiens
attaacgtttatccttttgtatatgtcagaatttttccagccttcacacacaaagcagtaaacaattgtaaattgagtaattattagtaggcttagctattctagggttgccaacactacacactgtgctattcaccagagagtcacaatatttgacaggactaatagtctgctagctggcacaggctgcccactttgcgatggatgccagaaaacccaggcatgaacaggaatcggccagccaggctgccagccacaaggtactggcacaggctccaacgagaggtcccactctggctttcccacctgataataaagtgtcaaagcagaaagactggtaaagtgtggtataagaaaagaaccactgaattaaattcacctagtgttgcaaatgagtacttatctctaagttttcttttaccataaaaagagagcaagtgtgatatgttgaatagaaagagaaacatactatttacagctgcctttttttttttttttcgctatcaatcacaggtatacaagtacttgcctttactcctgcatgtagaagactcttatgagcgagataatgcagagaaggcctttcatataaatttatacagctctgagctgttcttcttctagggtgccttttcattaagaggtaggcagtattattattaaagtacttaggatacattggggcagctaggacatattcagtatcattcttgctccatttccaaattattcatttctaaattagcatgtagaagttcactaaataatcatctagtggcctggcagaaatagtgaatttccctaagt

SEQ ID NO: 119709 - DNA, 618 bp, Homo sapiens
agtgggctgagtgagtggagtttgcccctgccagcacccgtgcactccagttcccacctgtgaaggtgtcagagagatattctgcttaaaaatcagagtgactccatcttaaatagcagctgggtgagataaggctgagacctactgggctgcattcccaggaggttaggcattctaaccttctatcaggatgagatagaaggccagcataagatataggtcacgaagactctgctgataaaacaggatgtggtttaaataaatgccagccagaacccaccaaaaccaagatggtgatgctcattctcactgctcattatatgccagtataatgcatttgcatgcaaaaagactctaccaccagtgccatgacagcttacagatgccatggcaagatctggaagttaccctgtagcctctaaaatggggaagaaccctcagttctggaaaatttctgccccttcctgaaaaactcatgaataatctaccctttgtttagcatataatcaagaaacaactataagtatagtcaatcgagcagccaatctcaccgctctgtctatggagtagtcattcttttctttacatctctaataaaattgctttcactttactgta

SEQ ID NO: 119710 - DNA, 367 bp, Homo sapiens
aacttcaagcgatacttttctgtttcctcagcacctacagcctttaatgccttgttcacaaatcaaggtcttgtgcatattcatttagcactttctattatattttctttttccattttgtaacttcatgtcaaaatgacccacaatagaatagtcatttctagtcaatattgctaatcatttcatgttacactttcctgtctccccttatgatgcattttttagggttaacttttagcatttgattagtcaaatacttgcaaatgaaatactgtattttcatagcattttactgtttcgaaaggtctttcatacatcttctttccctaataaccataccaaacccaaataactattgtttacttta

SEQ ID NO: 119711 - DNA, 168 bp, Homo sapiens
ttgaagcattccttggagatattgtgggtttggttccagactgttggaataaagcgagtcacacaaatttgttggtttcctggtgcatataaaatttaggtttacactatactgtagtctaaatgtgaatagcattacatcttttaaaaaacctatatatcttaattt

SEQ ID NO: 119712 - DNA, 285 bp, Homo sapiens
ccagagttgtcataaaattaaagtacagatgggctcagcaccgttcttagcacatggtgcaccctcaataaatgtgagctattatcagtccttgtcagcactttttgctaatatttaatgccttaatcattcactgacagatatcactttctgccatcataagagaggctgagaacagatggtatttggcatattccttttgcttaaaaaccaagaatatacttatttgacctttcagcctcttttttctagattagatattcctggaatctaagatatgagtga

SEQ ID NO: 119713 - DNA, 807 bp, Homo sapiens
tgagaaatctatcgatggttctacgagatactcttctcacgtcgtacatactcgagtcttaatgatacgttggagttgctgtggggtcatataatttgaaatgtcatagatactaattgtgataaaaactgcagagattttcttttttttcttcaagagcagaaatccgcttttatttattgacttttcgttagtttaaatccttgaggggtacagcatcactcagattttgtgtccaatggtctcagcaggaagattgctttgaaatttggcacgaaccatgccactgtttccatgggcccagattactctggctttgtttagtttgccgccaggagtctctgtgttgttctttgttttatgtacataagcacatctcttgcccaaagagaattctgtttcacctcatgcgtcaacatcttcaattttaacaagagctgtgtgtttcctttggttctggagaccctgcttttagccagcagaaaaggccttgggccacagccttccagacatacttccttttagaagtcctattcccagcaggctgcagttatttgcccccaaatttcagcagcagctgcttcactccagagattttattaatgaaaacctaggctataacataaacctatgctataacaaacctatgctaatgaaaacctaggctataacattagagatgatgttaaaaatatggaattataactaggtactctaactctattactgcactaatataatccaaatattcgtaaaccaagcaggaaattaaaagattagcaccacccattttgctgtgctaattag

SEQ ID NO: 119714 - DNA, 877 bp, Homo sapiens
atgtatatgatcgatgctatacgatcctctaagataggagaccatttaacagattgcatttgagactcatatcgaatactctcttatttgtctctccctttattctgtatcttgtaaaatcaatttgctgacttgtatgcagtgtttccggggggtcatattattacgtctgtcgtgaataaaaccttgcttaacgaactgcagagattttcttttttttcttcaagagcagaaatccgcttttatttattgacttttcgttagtttaaatccttgaggggtacagcatcactcagattttgtgtccaatggtctcagcaggaagattgctttgaaatttggcacgaaccatgccactgtttccatgggcccagattactctggctttgtttagtttgccgccaggagtctctgtgttgttctttgttttatgtacataagcacatctcttgcccaaagagaattctgtttcacctcatgcgtcaacatcttcaattttaacaagagctgtgtgtttcctttggttctggagaccctgcttttagccagcagaaaaggccttgggccacagccttccagacatacttccttttagaagtcctattcccagcaggctgcagttatttgcccccaaatttcagcagcagctgcttcactccagagattttattaatgaaaacctaggctataacataaacctatgctataacaaacctatgctaatgaaaacctaggctataacattagagatgatgttaaaaatatggaattataactaggtactctaactctattactgcactaatataatccaaatattcgtaaaccaagcaggaaattaaaagattagcaccacccattttgctgtgctaattag

SEQ ID NO: 119715 - DNA, 705 bp, Homo sapiens
ccctgcctgtttccaaaagctggccgcaatatcaaattcatgtccctggacaaggctccagtaaggcactgcctgcagtgtgcagagagcacttaggtggttgcagagcaggcagagacgaatgtggggagtggaagtcaccatatctgcccactcggcaggaggccgtccattcctgagacgcccccgggaggcaggctcctgtacggcactcatgctgggtacccaacccctacaacccaggcaaacccctaccctgggcagagaagggcctggacacaccaggggcagaaggagaaaggggatggagacaaacctgggtgggggtgacctgggggcagctggggtggggtgacacggggaccattggggtggggacacactccgggagggggagacacggggcagcaggggtgggggcacacctggagtggggtgacatgggggcccctggggtggggacacactcggggagggggtgacacagggaccactggggtggggacacactccgggagggggtgatacggggcagcggtgtagggaaaagagagatcagactgtcactgtgtctatgtagaaagggaagacatgagactccgttttgaaaaagacctgtactttaaataattgctttgctgagatgatgttaatgtgtagctttgccccagccactttgccccaacctggagctcacaaaaacat

SEQ ID NO: 119716 - DNA, 490 bp, Homo sapiens
cctcccgagtagctgggattacacgcacccaccatcgtgcccgggtaatttttgtagagatggagttccaccatgttggccaggctggtcttgaactcctggcctcaggtgatccgccccccgctcagcctcccacagtgctgggattacaggcgtgagccaccgcacccggtgtaagttgaatttcctatgaccagataagtttgtgaatgaaagtagccagcattggttgctgttatggcagaagtgagtttcacttcaccatcaacatgttctttctgcttttttgtggtgctgtaatgcggtgtgagcacttagacaagagccaaaatagtgtgaacttggccacttaattctctgaaaagaaagtttggtccatacattgagaagctagttttagggttcacgtggcgaggctaggacactggcgaggctaggacactggcgaggctaggacactggcgaggctaggacactggcgaggctagga

SEQ ID NO: 119717 - DNA, 197 bp, Homo sapiens
ggtcttgaactcctgacctcgtgatccgcccgcctcagcttcccaaagtgctgggattacaggtgtgagccaccgcgcccggctgagaagactttctggataaagttgatgtttgagctgctcagcgatgagtaaatgttagccaaggttgttagggagggaagattatgggaaactatttcagagagagggaaaat

SEQ ID NO: 119718 - DNA, 466 bp, Homo sapiens
gggatcatttccatcaacatacaaaatacatctcctatcttaaaactctctctcaaaccttccagcagctgtcccatttctctattcccattacagcaaacctcctcaaagctgtctatactcactgtctccaatttatttcctctcactctctctcttttttttcagagtttagctcttgttgcctaggctggagtgcaatggtgcgatctcagctcactgcaacctccgcctcctgaattcaagcaattctcctgcctcggcctcccaagtagctgggattacaggcgtccgccaccacgcctggctaattttttgtatttttagtagagatggggtttcaccatgttggccaggctggtcttgaactcctgacctcaagtgatccacctgcctcggcctcccaaagtgctaggattacaggcgggagccaccaaaaaaaagtctgcaacctctacctcctggg

SEQ ID NO: 119719 - DNA, 464 bp, Homo sapiens
gctgccgcctactactactaaattcgcggccgctcgaccaggtgtggtggtgcacacctggctaagttttttgtatttttagtagagaaggggtttcaccacattggtcaggctggtctcgaactcctgaccttgtgatccacccacctcagcctcccaaagtgctgggactacagatgtgagccacggcgcctggccttatataggttcttaacaaaataaatgtctacttcactgcaagagctttcctttttatttaaaagtaaataagtccttacaatatgccacacatgtgcaaagagacaggaaatactctctctcagaagattctctaaaagtgaatttaggccatataaaccatttctgctctaaagaaaaatcattaacagtcatgtgttttgcctgttaaaaccatgtgtcactgaaagttaagctatttaaagtagctaacaaaaagcacaaag

SEQ ID NO: 119720 - DNA, 422 bp, Homo sapiens
catggggtacagggtaaagtaagatagtagatataatcaggagcttctagctgaactggagtcacctttaatgccaggcacatgaacttgacttcattttataggcatcaagaaagagcatctttgaatgttgctgaagatgaaaaatatcttgggcatggtagtagggaggtgggagggaggtttactgttccttaaatgaggcttatcccttcctgcttccatgcggctgatcaccattgtgatgaggaaagagatgattttgagccagatctgggtttgagacctagatttaccttgggcaaatttcttaaactggttaaaggctttgagagatacaccctttcctagggtcatctgttgtgaggttgtgaggtacagatgagaatttatgtgtaagtacttatcatggtggtatctgt

SEQ ID NO: 119721 - DNA, 518 bp, Homo sapiens
taaataacgccgcaaatcatgtcattaggagttcaggcagaaagcggtggacgtgtccccaaagcagtttgagcgcttaagatccctactacgttcaaggtagcatttgccaaatgatatatatttgggtgagcccgaaaagccggatctgaacaaataacaccaggcagaacgaccgctcttccagttgatgggacaggagcaggtggatttgtccttcaaagaatatcgttttattcttagccaaatgctctcaccaacagctgggttttaaaccttctcgcagttttccccaacgccccagtttcagactgcgagggagggagcaggacttcaggctcctctcggccagtgcagacaagcgaaagagaaagagggaggggcccacggccccgaggggcgtgggaggcagttcgggccagctcggccgcgcatccgtcccttcccgtgcggtaccacctgcggaccactctcctagcccgagcttcagggcctacagagctgcggggcgcggccgc

SEQ ID NO: 119722 - DNA, 652 bp, Homo sapiens
gtcagactcagaaggctcaaagacactccaagagtgagccgtgtgccaggctgcggacttgcggggaggtgtcacaggacaggggtgggggagtgagcatttcatggaacttcccctttagcccagcagcagtagggggcgtggaggaccccagggaggagcctaggtcggggtcttgggctaggccctgcgttctgcagtgggagaagggggagacctctctcagtctcctgaagtcctagggggctgtggggggttcttgaggctctgaaatgtctggtgatgtctgagtgtggctgtggttcaaggatttacagggtcgaggattttagtgtgtggggggggattgttcagggacataatgttttgtagatttggggccaagggcatcttgtcttggggtctcagcccccatgtaccctcagccctccaggccctggccacccccagagggataagaagggaggttcagtgtcactccggaggcctggctggcacaggtgaactcaggcaacacgttccctggcccaggcctcagtttccccatgtatacaaggacaggactgaccttggatcccccaaacccctgcctgatgggggcctggggagctgagacatctgaaactacacagggaggtgggacttagttcct

SEQ ID NO: 119723 - DNA, 447 bp, Homo sapiens
gggattacaggcgtgagccaccatgcctagctatcttattttctataacttattttaatatattagcccaccaatcagtaacaattaacaaatatttatttagcatcaagtattagatcagctttttccatatctccttcctactctctgacacatgcctcagttcttcacttgtggtttggtctcactcttcttcatgtgtgtcatgcttatcccaaatccatttaggattataaaattctccctattctttctctgacctaacagtccatggctttaccacagtttgtagtgcagcatatggttttgggtttttaagtaatgggttttctccttttttctttctttctccttccttcttttcttcctcccttcctcccttccttcctcttttcttttcttttttcctccgtccctcctccctctctccctctttctcctcccctc

SEQ ID NO: 119724 - DNA, 132 bp, Homo sapiens
ccttcctgcttcccatcaaaattcatatcctgtcactgttctaggagcagaaaggcttctcattatagcatcattcccctcttgcaaaaaacactgattgctgcactggtggctttggaaggcaaagatgta

SEQ ID NO: 119725 - DNA, 393 bp, Homo sapiens
acatgttcagctatccagtagctctttgtaccccatcctcttgagccttttatggagatttcaatggataggcatgactgaagcatggacaatcattttggaaatgtgattggacaaaaaagatatgatctgatactaacagactgagtggggaaacccagcaaggcctgtctgctcagattcttcttggcttctctgttcagcattccttccaggatatagggcaagacccattctgaaacaggggtcttatgacctacagctagacaagataggtcagagaaaggcagggatgattagagttctgctttggagagaaggagcaggtgaaaggaggagaggaggaagtcagaaatagattctgttttctgaggcctaaagcaccctaacata

SEQ ID NO: 119726 - DNA, 801 bp, Homo sapiens
gatctctccactgcactccagcctggtgacagagtgagaccccatctcaaaaaaaaaaaaaaattcctcatgagagagttaaagttcgtcttattctcacactgagattttggaatgagctgtgtattttacacgtgccaaagtctctaatcagagccctatttcaggtgctcagtagcttctgtggtcaaccttcaactccacgggacaatgctgttccaatggcctccccagcagaagacaggcagggaacaaggctgaccccagagggccaggccacagcaggggctgaggatgcctggtgaatggatgcctgggagaaaggatgccagaattcgtgctcgaggacatgatgaaacagggaaagactcaatagaataaagaaggaaggggacgggtgcggtggctcacgcctgtaattccagcactttgggaggctgaggcgggcggatcacgaggtcgggagttcgagaccagcctggccaatacggtgaaaccctgtcgctactaaaaatacaacatttagatgggcatggtgtcacgagcctgtagtcccacctacttgggaagctgaggtaggaaaatcccttgaacctgggagacagaggttgcagtgagacgagattgtgccattgcactcgagcctggctacagagtgagactctgtctcagaaaaaaataaaaattaaaaataaagaaggaaggagaaggatggaagcgaatctcaatgaacaaaatgcactgggacctactatgtacccagaaaaatgaaaagtaaataaataaaataaggacttgcat

SEQ ID NO: 119727 - DNA, 679 bp, Homo sapiens
ttctcaggtcttttttgttcttcagtgagggtctggagtaaactagctcaaagtaattcattttcagagtgaaggaaggaggtcctttctttgatgatgaagaaatcattacagatttagaaatatttgtatttcatgtgtctgtatctcccactttttagtgagtaatgccagaaaatatctagtattcagacataacgttgtgtttgtaggtaaagtttgtcttctactttgtagtagatgaagtagttattggtcagtaatatgtaggtagttgtgttacatatgagtctggattaaatcttttacaatcccttttgttactgtaatgtagcactgccatatgctgctatgtagattgtgtaaccctaacactatcttttaatttttcatgtaatataattggtctttatgcttaatttttcctcacattggactacaagaagtcctcatttaaatataatttatttgaagaacatatgagtaattttggaacacaagatgaatttattttagagaaatagtgatgcagtagcctgctatttcagctcgattgtggtttctttgggctttaaatcagctagccttgaaacctcattattgtgtagtccaaataaagttggacctgcttgctttctcactgggcgcccatctcattattgtatatgatctaagataa

SEQ ID NO: 119728 - DNA, 376 bp, Homo sapiens
ccaggcaatgtgttttaaaaatatatgttcttctttgtggctatacacaacataaagccaggcttccctgttgaaaatctttctggggtcagttttaataaatagatgagaaggtttcctgttcagagtggattgcaggagctatggtgagagctcctttcgaagtccccgaggagtttgttttctgaagcagtttaaaggaagccctccgtattcctgtttgtaatcagtattgcgctttatggcttaaaatgcacactgatgttcgaggattgccaggctccaaaacagaagcttctctgttttgatccagagccttaagaagtaaaaggcgttctctgccctggctgtcccaaaaggttccctcagcgtcctc

SEQ ID NO: 119729 - DNA, 400 bp, Homo sapiens
gaactgaatttttaattttaataaatttaaatttgcatagttaatatatggctaatagtaaccatatgggagcgtgtagctgcagaacatttattcaccctaccacccattagagacttttcagccatttccattttttgtgataataaaccccatcgggatgactgtcttcatgtagaaatgcctgacgcatgccctgtcattttcttaaattagattcttagaattggaattactggggcaaagagtaccaattcatttgtgggtttggtacacattccaaaaacattttctaaaaagtctgtgccaatttataacatttaaaactgttactaggctaagatttccaaatgggttaagaggcttaaggtaatcaatgaaccacaccccaaaatatgta

SEQ ID NO: 119730 - DNA, 108 bp, Homo sapiens
ttattaaagacctagttaaaatacattcttgaaagcaaaagaaaaaaaagttgtgggggaggttcaaaatgacctgttcccgtcagtctcctctggaaatgtactggg

SEQ ID NO: 119731 - DNA, 509 bp, Homo sapiens
gcacgaggatttactctttgtgtgtcacttcttcactctcaaatttagagatttatccatgttgttctgtagttgtagatcatttattctcattgttagtatttcattacgtgaatgtaccaaaatgtgttattcttctgttgatgggcacttaagtagtttccaagtttgggtgattacaaagtgctgctatgaactttctagaacttattctggtgaacatatacatattcatttctcgaggccatttcacctaaaagtgaaatttcggagtcgaaatctactgaggcatatatattcaaccttagtagatggcaaccagctttccaaaacagacgtactcaggtaaaccctcaccatccgtgtatgagggttccggttgctccacattctcaccaacacttgcttctttcagtcttgttagccaatctagtgagttgataatatctttgtaagcgcaaattagtgctatttttctatccaataaaatttgtgaagcctcataccca

SEQ ID NO: 119732 - DNA, 478 bp, Homo sapiens
tatttattttataattttacaaaaaattctaatacctgtaatacactttttagtgccttttctttctaaaagttaatgtttgaaattacaatgtgtaaatgttatctcgtcttgtttttcttattagggccccatttcactgaatgacaattgcaatgaggcataggaaagaaaagggaaatgaaattgcttgctgaagtcctactatgttctgggcactatgctgtttgcctaataaataattgccttgtgctgtgtaccttggagcagggccttacatagtgaatatatcaatagttgttcacaaaaagagcaatataccacttagaagctacagaacttaaaaatggctacttatactccatagaagatatagtaaataatagaagaaaaaaatgaaatggctaaagacattttgttttacaatggggctgtttttacatgttaattaaaattctatgtttaaacaaatctcttg

SEQ ID NO: 119733 - DNA, 363 bp, Homo sapiens
gagattagagcaacttagctcacaatcaaatctggtggagctttttcccatttactgaggtaactcaagaatgctgtttggtggtttctaataaaattaaacatacgcttattctgcaaggcttgtatgagaatgtgtgtagcaactttataattgtcccaaactggaacaaaccaaatgttcagtaggattatgaataaacaaattgtggcttatttatgtatttgcacattggagtaatactacacaataaggttaaagaattaagtattgatacatataacaacctagatttatctttaaaaattgagcaaaagaagggagacacaaaagatgtacaatagtgtttactgctgcaggttt

SEQ ID NO: 119734 - DNA, 347 bp, Homo sapiens
tgagacggaattttgctcttgttgcccaggctggactgcaatggcgcaatctcgggtcaccacaacctccgcctcccgggttcaagtgattctcctgcctcagcctcccgagtagctgggattacaggcatgcaccatcatgcccaactaatttttgtatttttagtacagacggggtttctccatgttggtcaggctggtctcaaactcccgacctcaggtaatccacctgcctcggccttccaaagtgctgggattacaggtgtgagccacctctcccagcctgtgattttttttgatgaatgtgttctagacatggatctgtgtcagcacctacagactggcct

SEQ ID NO: 119735 - DNA, 250 bp, Homo sapiens
acaatgtgcaaagtgggggtatgcatgcttatgattgccagtatagctactgaggctactcacactattttaattataaacttaagaatttactacaaaattatattacaaagtcacacaagcttctgtctacttagataaacaaagcagttacagatgagagatcagcaaccatggttatataaattttattttttgagacacagtctcgctctgttgcccaggctagagtgcagtggtgggatctcac

SEQ ID NO: 119736 - DNA, 235 bp, Homo sapiens
agtctcaagttcacttctatcccaggtcagtggtgcccgaatgctgccttttcctgtttggcaggctatgtgatgtgattgttagaccagctcctagtgcagagctgtctacatcagagaatggcacttctattgacagtctcagcagtgaggctgaatggtcctagaaatccaactacctgcagactatcggagttggtcccttaggtcagggttcaaaggatgttgtggaaca

SEQ ID NO: 119737 - DNA, 209 bp, Homo sapiens
accatggggtgcagtgactgaagaaagcctgcctaaatgatcagagcaggaaggattgggttgggattcttaggattgaaaaggttttaaagccctggaggctctggggtttgctttcttaagattttttctaccacaattcagtttttatttttttagacctagtctcgcactgtcgcccaggctggagtgcagtggtgcaatctcgg

SEQ ID NO: 119738 - DNA, 229 bp, Homo sapiens
ttctactaatttctctcactttctcccaggacaggtagtgaattagaacacagacactggagcccaattgccggggaccagacttcagctctgccatttactgtgggatgacctcgagcaaattttttcacatcttagtgttgttggggttttctcatcagaagtatgagggtataatagtcttcaccttatagaattgttgtgtgtataagttaataaatatctagat

SEQ ID NO: 119739 - DNA, 814 bp, Homo sapiens
gaatagtcaagttcagatagtcatctggggtcaccaatcatttgatattcacttggcccttaaatcacaataccacaatacatttgagttttaactaagacaaacatttcagggtaaccttcaagtaggaactctttgaacagtgttctctaagtgaaaactataatttacctgagagcccttaataattgaggagaagaaagtgacttttaaagtttgggattatctaattttcaggttttcaaattgtttatttttcaatccttagcactaaggtagtagcttaaactatgacagcactgaaaaatttatgttgatgcttattaaatttagatattttcaaaaagttgcaaagcagctctctttgtttaggttatatttcctttattgcatgtttctttttagggttatgttttccttttacagtcttcactgctgcttttattcaacaaatatttgggtaagactatgtgccaaacatattcatagttacagaatgatcttatcttttgccctagtaattaggtttctttccttatcaagtgtaacactaattaaatgtgttatgagctgctttccctttcttatatcttgttttgtaaataatggttttgtttaaatgtgttatttagttatttaacctattttgtgtggtttgacagtttttagcatatataaattaatgtcccggctgtaagtgggatcaaactatctagatctgtgaactggtacgttctaattctagtgctttatacattgcaacattaaaaaatcagatattcattttttctttttcccatgttttactgattct

SEQ ID NO: 119740 - DNA, 111 bp, Homo sapiens
agtaaacatggagtagttatactacaaaacaaatcagatgacctccctcactgggtattatctgccatgaagtgcctagcaaattggccaagaagcaatgatatgaataat

SEQ ID NO: 119741 - DNA, 708 bp, Homo sapiens
tagtatacgttggaacactgctgtaactttgtgctatggaacatggctgtagaaactgcttatcaataacagctgtagcactgtggcttttctccatggactcatggtggtctttggaacaacgttcttcaactttgacagcttcatagggaaaacagattctatagaaataattggaaaatcagtttttccctattgttatcacaatatccttccactgctgaatgattctggcaggttaatgctccaaatggaatgacaatgatatttcaaaatagagattttgatagtacgagtagtaataatgtacaaggtattttttgacgctaatgactaggaaaagtttatggatacaattatttaggcaaacttctaaatgggatatttgactacgttatacaaaagatcattgggtaaaagcaatctgattaagtttttattaactttgtaaatgcttttgaagatactgttatataaaaagtaatcctaaatttttgttgcagtagttttgactttaacaagtatgtaaggccttcattgttttcctttttctgttttctgctcttctttcttttatactattttatttttatattctggatgtgaaattttttttaaaccgtttcataattatctgcaattttataattttgtaaacgttccaaggaaggtatcatcattattaaaagattcttatgacagataatg

SEQ ID NO: 119742 - DNA, 386 bp, Homo sapiens
tcacaccccaagctcccaattctgtccgccaagcactgcccatgcattgctcacgagaaacgcctctggacggtgctgcttctctccagcctcgacctcctgcctttcctgctttgccccacctggcctctcctgcctggatgacagcatggctcctgggaggcccccacctccagcgtcaacgctttgcaatcttcttcatgtagcagtgagggcacgctttcaaacgggccagtggacctggtcactcccctgctgaatgtcccccaagtgctcttctgccatcctgcctctgctgaagagcccctccatcgtgtggccatgttgcccctgcagcctccctgccaccctgctcccgaccacgccgctggctctgcatccctcat

SEQ ID NO: 119743 - DNA, 284 bp, Homo sapiens
cgtattcttaaccactattctccattaccttcgattccagcacaaagaaaaaccatttacctgccaaagaaaatgcaattctaggaactcacttgttggctacagttggatttgcttgtattactagtatactttaaagcagagtaagggatcatttaaaccaaactgcctggtttgccccaagagaggtttttattcagttcatttagacagagtattacagccaccacacagattctaatacaacctgtgtggtggcatcgataaacaccgggtaccgagct

SEQ ID NO: 119744 - DNA, 619 bp, Homo sapiens
tagaaagtgaagctttattatcacaaccataagagactgccaccatgaagagtttgtgttaagatccttacagacattgttgttttatgtataaaaacatgaaaaaccaaaacatatcatgcaaacatgtttcaagtataccctcttgatgaagtaaatgtctacaaaaggtatccctctccctgtagccctccaaccctttgaatgtacttgttctgacacactcaaatattatcattaagttcatttaccagaggcaaataggtaacttgataaagtcggtgggccgagatgtcttttgcctcatctaagagcacttctttgttttattggtcactaatgcgtgacacacatttctaggtaatgcatgttaatctccagctgtttaatcacaaattgccatttctcagaccttgctcatggtggctgtacactgtacagccatatatggaagcccttttacctctcactgcttttttctagaacaaactttgccctagtcataatgaaataagaaaagtcaaggggccttgtttatagagacagctgcattagcagagatttttgctgtgggtgtctgccaagtggtaaagttaaaatcttactgcttgcaaagaat

SEQ ID NO: 119745 - DNA, 357 bp, Homo sapiens
ctggcgtgaaactagcctctggtaaacatacaaaactgtatcttgccctcagttatagatacttttaccaatgcagaaagttggcatggagctagaaatgtctaaagcttggccatgagcctacaaaatattataccagaaacatatttttgaaaccagtggttattattcttagtttaaaattatctattttaaggaaaattgatttttaatttgttagatagttactgtgaaatgctcttctgtgtcggcataaagcttggtgagcaataattttgcttctctcttgcagctattctgtactgtctttttaagtcctcctccaacatatagagttcaaggtctcagtatttctca

SEQ ID NO: 119746 - DNA, 623 bp, Homo sapiens
ccccttctttttgtttgtcctgtcagtgaggtttggaagaatacaagccttccacattttagatctgtctcattgtttttaatgatttgttttaggttaaacattttgacaaggattcttaattttaaggtgaagttgtgtacattttagcacaccagtgataaagtgaaaaagtgagttatagcacagatctaaaaataccttaaatgctttattttaatgtaaaacgtaaatgtacattgccattagtgtgaacataatgtcaagttctccccttgtgtagaaaagtttgatcacatgtgccatgctgtgcgctgcacccactaacgtgtcatctagcattaggtatatactaacctgcacaatgtgcacatgtaccctaaaacttaaagtataattaaaaaaaaaaattaaaaaaaaaaaaaaaaagaaaaaaaagaaaataattagggagcttcctgatagcttaacacatggagtttcctggagagtggcccactcaggaaggcttggaagctcccagcaccttccccactaccttgccctacacatctcttcatctgtatcctttgcaatatcctttataataaacaagtaaacttaattttcaaagaaaaaaaaaa

SEQ ID NO: 119747 - DNA, 451 bp, Homo sapiens
ccccttctttttgtttgtcctgtcagtgaggtttggaagaatacaagccttccacattttagatctgtctcattgtttttaatgatttgttttaggttaaacattttgacaaggattcttaattttaaggtgaagttgtgtacattttagcacaccagtgataaagtgaaaaagtatatactaacctgcacaatgtgcacatgtaccctaaaacttaaagtataattaaaaaaaaaaattaaaaaaaaaaaaaaaaagaaaaaaaagaaaataattagggagcttcctgatagcttaacacatggagtttcctggagagtggcccactcaggaaggcttggaagctcccagcaccttccccactaccttgccctacacatctcttcatctgtatcctttgcaatatcctttataataaacaagtaaacttaattttcaaagaaaaaaaaaa

SEQ ID NO: 119748 - DNA, 357 bp, Homo sapiens
ctccggcgaggcgaaccttgggaaagttatcttcccaataaaagagtgcactttggtttctcgtgttggtctgccatcagtaacccctcctttcagacctcatttacccgttcctgcttccaccccggccagagaaagaaggcattcccagggttcgaaaggcaaggcaaaaatctgtacagcaagacactaccacttttgcactcccgacccagtctgaaacgatccctagtttccccatattcttctgacacatagatccctcaactttggctactggagctttgggggggcggtgggggggtgatgttaatgtcccagataccttgcactgagggcagagacctacttgaccat

SEQ ID NO: 119749 - DNA, 499 bp, Homo sapiens
aagtctcatgttggccatgattgggagccatgaccctaccaacagcacggaggatgatgtagaggtaggaaggcagaaagataggaggcacaaaagcaggcagataggagacatgaaaacaggcaagaaagtgggaggcctgtgcgccctgcagtgagggaggacactgcccccacggtgcagcccaccagagcagtctttccaaattacacaccaggaaagctcccctgctgcaagtttctccttcccatttccccgttctttaatcctataaatgtttattgaatgtctgtcatatgctgggcctgtgtgaggttggaggcatacaggagaaatgtcccagtccctcatctcaagctcaaggctctgtgtgacttgatgcttacatggtttgtgtgcagaggacgggaattggtggagctaggagtgggtcgtgacagtgtatgtgtgtgcatgtgggaaggagggttgtggagtgagggaaggggtcattcaagga

SEQ ID NO: 119750 - DNA, 214 bp, Homo sapiens
cttataatgagacatgtagttagaattatgagaataaaaataggttagcatcccctaatacagaaatggttactttgtcataagaatactaattctataacatattacatggtgattaaaatgagagtgtatttagaataatgttaagtcttaacattattttataatataatttattgaaataattaattacggatatttttaaaatatgtag

SEQ ID NO: 119751 - DNA, 411 bp, Homo sapiens
agcaacttcagatataaaatgaacctatgatgggacacagaatgaacattttaaaaaactgtgtttgagcttagccaattcctcaaaagttgtgatgaactcaaaaagttacttgagatgcttatttatttcacagaaatagaaatggaggctgaacgcatttggctcacacctataatctcagcactttagaaggctgaggcaggaggatctcttgagaccaggagctcgggaccagcctgggcaacatagggagacccctgtctctacaaaaaataaaaattttcccggtgtggtggcatatgcctgtaatcccagctactctgggaactgaggtgggaggatcacttgtgcctgggatgtcgaggctgcagtgagtggtgatcatgtcactgcactccagcctgggaa

SEQ ID NO: 119752 - DNA, 212 bp, Homo sapiens
catttgttgagataattatatatcttctctctttatgctgttattgtgttgaaatacattgatttttgaattcctgggataaatgccctcctcctgtctggcgcctgcacctgggcaactcttgctcctgtttgaatgccagtctcagacaccatctctctcagcaagtgttttgtctctctgttttttttttttttttttttttttttttt

SEQ ID NO: 119753 - DNA, 755 bp, Homo sapiens
acttcctgtatgagcggcggcccagccctaaccgccactcatccccttgtctccctctctgaacccgcccatcgtgggtaggacactcagccgtcaccgcctgctctgctggccgctacctgcagcaagatagggccgccaacgcccggcgacgacaaggaggaggtggccgccggagccggggcacccgccgctgctggagcgacaggtgatttggcttctgcactgttaggaggagcaccaaactgatgggaggttttgtcagccacacctacaactataaaagatgaagctggtaatctagtacagattccaggtgctgctacttcaagtgggcaggcagtatgttctcccccttcagaatctgcagaatgagcaaacattttcagacgcagcaggatcagattcatcaaatggtacgtagtccaatcaacagatggtcggcaggttcaaactggtttcacaggcttttcagataatgggggtataaatgaagaaggcagtcaaattcagatcattcctggctctaatcaaaccttacttgcctctggaacacctgccaacatccagaatctcctaccacggactggtcaagtccaggttcagggagttgcaattggtggttcatcttttgctggtccaacccaagtagttgctaatgtgcctcttggtctaccaggaaatattacgtttgtaccaatcaatagtgtcgatctagattctttgggactctccgacagttctcagacagtgac

SEQ ID NO: 119754 - DNA, 123 bp, Homo sapiens
tgcctggattacggatgtgagtcactgtgcctggtttaaataagacgttttagaatactgttaagacagctagaattttgtgttaaggagtttggtactgagaatatgagggaggggatttcc

SEQ ID NO: 119755 - DNA, 536 bp, Homo sapiens
tatttgttttatgtaaacattaactttttacttattttattctataaatgtggatctcttaaattcaaagggataatctgctagaccataagaattactatactaattagtacattaatgaacatataagggaaagagcatggaattaagaacacctggttctaccactacctttgttatgtgaccttgggtaagtcactgccagtttgtgttttctcatttgtataatgagagtgctggactggattattctaatatccttttcaaattctaatattctgtgatgcttactaaattaaattactacaagcaacaacaaataggctggctattttccttacacaatgtgctcaattattcacttatgttatttttacatctgtctggaaaaaaatgtctcaggctgtttaggtgcttgcacaaaaagggtaaagatggatggctactggtgtacttatgtatgctctggcaccaagaaattcctattactgtactttacatggaggtacatggtcattctaaagtctccacatgca

SEQ ID NO: 119756 - DNA, 268 bp, Homo sapiens
cagtcctgtggcctagactgcctttcaagtatatttaggaccccagatatctttggcccgcagtggtgaggtttatcaaaactcaagttcctatcactcggatggacgattaccctctggctagggctagtccaaatgctccttctatgtgtgggtgctggctgagccctgcatggctttgctctctgctttgacagggcagtactgagttcaatgccaaatctcccagttgctgtgttctccctctccaagtgcacagattctctct

SEQ ID NO: 119757 - DNA, 173 bp, Homo sapiens
aacatgctgtctcagagaagtaaacccaacaaattattggggtaaaaatgaataaaattatgtatatatactagtttgtacttatttgcataaaaatataaaaatatgtaaggataaaaacaaaattttttactagttaacaatcatgagatttttttgagagatggagtagg

SEQ ID NO: 119758 - DNA, 264 bp, Homo sapiens
ctgtcacctgacctctaagtgggttttaacacctcataaacaaaatacaaaggtctagcctagaataatttcctgaacccaaagtacagctgttgtaaatatgcaagactgatcctgtagtagcagaatacttgctataattagaaagtttatgatgaaatgtgtcatttatagtctatactttgacctacattaaaatctctcagtaaagtttatttgttgcaaagtttcaatcattatttcaggttatacatttccacttac

SEQ ID NO: 119759 - DNA, 261 bp, Homo sapiens
gcacataggaaccctgaaaggaaagtactatttgcaattgttcgtgcctccaaagtaggcacgaacctgcatcagtgtagaggcacagattgatatagcctccaatgtagtctcctttcccagttcaattagaatgattcagtctagttctagtttttggagagactgaggacaggacagtcagttgacttctttcctatttatttatttatttattgagatggagtcccgctctgtcgcccaggctggagtgcagtgaca

SEQ ID NO: 119760 - DNA, 720 bp, Homo sapiens
cgagaggagcctctgttcccaaagctggggtagatgtgttgctggactcacgtgcacacacacacgtgcatgggccgagggcagggcccgcagtcccctggtgtgggtagaacaccctgaccatctctggcgtggagagggccttccatcccccagggtgtgcctcagggccccgaagcccaggctggccctccccactcttcctgtactcctggctcaggcccctggtgcctttgggtccccacgccatctgcccatgggcctgaggccctaggcctggggagggctgtcccatggatctctgccgcagtactgtggctcagtgaagggtgccaagtacacctgtgccctccgctggtagctgctctaacacccttctgagcccgcaggccccatgaccagggagggagggagggctgtgagcagagtcctgccctgccccccagatgtccatgggcacagcaagcggggatggtcctctgtggccaccagagctggcctcctacctggggtggccggacatccgcgtctgcagagcggggcccaccccgcccgccgaggcagctgagctgtcctgcgagtggattggtttgaggtcaaggtgctgctgctactgccttctgccctgtgcacccacctacccacccacgatcccagtggagcctctttcctgactcccagcatcctcccacagccccaccccaactgctggctgcactg

SEQ ID NO: 119761 - DNA, 354 bp, Homo sapiens
attcagtattttgccccaaatgtaaacctttaacagctacatgtttatttttgcagaggtgagtctaaaacacaagcagattttggcgatcatttgcataggaagaaacagacttcacacttgtgagtcagaggtgtttgctttggagggttgcattttcgctttctatgctgggtgaagtgagggtgttgtctttctgtgtccccttcctcctatctcccaaacatcacctacaggctttcccatgagaattcaacagctgttcctttccaattcctaaaggtttatgctgtagctctccatttatcttggacgttccccctgggttgagcttattaacttattgctttgcca

SEQ ID NO: 119762 - DNA, 312 bp, Homo sapiens
tgttgtattctcttgcatgtgaacattcttctttgaaaaatcttacctcctttcttttactgtgtttttctattttgttaccccctggccctctgtcacctgggcagttaggaactaaagagaagttctaggcagagtttttctctgcagggttgacccttttattacttgtggattatttgcttctgggggtgaaataggggttgagagggagggatggttgatttccatttcatcactgggtttggcagctggttctgcatgggacaggggtctttggagacagaggagcatgttctgtgtctcgcagtc

SEQ ID NO: 119763 - DNA, 681 bp, Homo sapiens
agcgggcaggagtgcgcatgcggccgagtgcgggactggggctcctggctgtgggtgtggtactgaggcttcagcgggtgccgcccgcctagagggagtggagcggtgagcacgtcaggggtggggggcgcaggtcaagctttcaccagtttttaattctttgatggggtaaatttgagcaattttctcgacttgtcgacattcgttattaactgagcaggaatcaggagaggaacccggtcctctccacacagcccagcagagagcctacgactagatttgcatctttacgtcctgcgcggaggctgctacacacatgcagaagtcatgctggtggcctggacattgaagggagagaagtggatttgggagacatttaggagatggcaccgaaagcgaaggaagctcctgctcctcctaaagccgaagccaaagcgaaggctttaaaggccaagaaggcgtgttgaaaggtgtccgcagccacacgcaaaaaagaggatccgcatgtcactcaccttcaggcggcccaagacactgcgactccggaggcagcccagatatcctcagaagagcacccccaggagaaacaagcttggccactatgctatcatcaagtttccgctgaccactgagtcggccgtgaagaagatagaagaaaacaacatgcttgtgttcactgtg

SEQ ID NO: 119764 - DNA, 928 bp, Homo sapiens
ctgagattgggagtttgagaccagcctgaccaacatggtgaaaccgtgtctctactaaaaaaaaatacaaaaaattagctgggcaaggtggcacacgcctgagtctgtaatatatgtgtctgataaagttcttatatatgtaaaataaggaactcttacagctcattaatgagttagacacttgtaccaaagatgaatttgttctagttgatagtctgaatgcagctacaaaaacacacctaaaagttagtatccacaattttttctttaatagtttttatttgtactgattttacgtagggtattaacatataatggtttaaaaatcgtgatcatacagatgtaatgtatagggtgtacttcttattaccaaagcctaacgtaacctaatccaagtcttcatgttgttacaaagtaaatcttattttgggacaaaggattttattgtactgtaaattgaattgaagcaaataaccccccaaactttacaaagtgttaaaacaaaattgctggtggtaatttcttaagtaaacatcatgaaatatagcttaaagtagaaataaattaagtcaaccatacataacagaactggacccacagtaaatgaagtgtgctgactgggctatgtatcttttgtctgtcttgataaaagaaatgaggtgaccagattttgagggagttatttttccccagtgctcttcctgttgcacacactaaataaacagtgaattctctaattttgcctatctataacttttaaaacacaaatggaaaaatttagacttgagaatcaaaataaaacactgaatatactcaaagaaccttgttcttcatgtgatactaaaactcaaattctaaaatgggtcaataggctggtgcagtggtgcacacctgtaatctcagcactttggcaggctgaggtgggagg

SEQ ID NO: 119765 - DNA, 439 bp, Homo sapiens
tatatgatgagacagagaagaatctgggatggctccaagatgtgtgacccaatgttgtgaaggatagaggtccaatcttcccggaagattggacctctagacacacaggagaaggctgggggtttttctaggggagagacaagacacgcagatgttccacagggtggaggggtgtttcagatggagcaggtgtgtgtgcaaggcccaggatgtgcaggagtgcaaggatgagtgagtggttgctgcctggaggcctgggatggtggccttgggtcacttcccctgagtcccagaccaaatctccagatgttcccaacagcccatcaaagagcaggtactgaagagggggctgaggagctccttatgtccacttaagtggaggaacagagacacagtacaagagaagggaacagagacagggacacacaaaggcagacac

SEQ ID NO: 119766 - DNA, 106 bp, Homo sapiens
cgctgctgccagcccgtagctgccccaggtgtgtctggtggctcatctgtggcttcctagtagaagcccttaaaaaatccagatcactagttgtacacctgtcaac

SEQ ID NO: 119767 - DNA, 658 bp, Homo sapiens
tagggaaaatgtttaaattcacttgaaactaggcgtatgcaaattaaaaccactcagataccatttatcactttccagactccatgaaatgtaaaaatatggcaatacattctgttgggaaggctgtgggaaaataggtacattcatacattgctgatgggaatgcaaaagtttattagttgcaatattgttcttagttgcaaagtattggaagcaacctaaattcccatccacaggagagtgatttaataaactatagcatgtcatgcagtggaatattaaataggtataagaaaagaatgaggaagagctctatgaactaatatggagtgatttccaagatggactgtcaaatgaaaaaagcaaagcacaaaagagtatccatagcatgctaccttcatgtaggaaagaaaggatatagaaagtaaatagttatctgctcatttgttcaaaagaaatacaggaaagataaaatactagtaaggctgattacctagagggaaaggaataaagaaggaaatgaggttagcaaggatgaagtacagtaacatttctttgattatatctttctgtgtagctctgactcttggaatcataattatgtctcacatacccttcacataatcccaaataaataaatgataaaaccaaccaagaa

SEQ ID NO: 119768 - DNA, 464 bp, Homo sapiens
ttctctttttaaaaatattgaagtattggttacataaaataaaattattttacgtgtatgttttgatgaattttggcaaatgtatacagctgtgtaaccatcaccaccatcaaagtagagagcagttccctcaccctaaaaagtttccttataaccttttgtggttgatctccctgctgcccagtatactcccttctcccgccctaggcaatcacacatcagctttctgtcagtatagttttggtatttcagtagtttcaagtctgggcaatatagcaggatcccatttctaaaagacattttaaaaattacctgggtgttgtggcgcccacctgtattcccagctacttgggaggctgaggtgagagattgcttgagcccaggaaattgaggctgcagtgagctgtgatctcaccactgcactccagagcctaggcaacagagtgaagccttgtctttaaaaa

SEQ ID NO: 119769 - DNA, 224 bp, Homo sapiens
tggtgcgcgcctgtagtctcaggtaatggggatgggagggatcagaggcagaacgaccgtttggtcggtccaaagcgttgaggttggggtgatcctgggcggcagagacagaggaagaccctgccagtaagggagggaaggaaggaaggaaggaaggaaggaaggaaggaaggaaggaaggaaggaaataaacaggcaagcaggcaagcaaacgatgaacgtga

SEQ ID NO: 119770 - DNA, 571 bp, Homo sapiens
ataagcattattttttaaaaacatctttgtccagtaattccagtggctgaagtctgtgggctatatttctgcttattgttgctcatgttgttgtatttctttgtgtttggttaatgtggctgcttccttgttattgtcattgagaaaattatttgtaaggttccccaaggactagtgtggatttgctcctctctagagaggcttcaatttggcttctgctgggtcctgtaagcattggcattagggctgccatgtgcttaaaggtttttggtctagccaagcaatatatctccatgctgcaactcttccctagggttgatttcaacaatttctccaggatggttttcccctacctactttttcttttttcttaccttagtctgacctttctgtagtttgttcttaccctgagactatcctctggtttgtaatttgttcttatcctgagcccaccgtttggaggtgggctgtatctcagcttatcatggaacctatcttgccaaagactaccatgagctggtgttgggctttgaatgttctttctccttagctctttctctccctaccccat

SEQ ID NO: 119771 - DNA, 370 bp, Homo sapiens
aagcatacagagaaatggtatatactctccgtacttttgacatcttaatggtggattttaataaggggaattctatatctctggcacgtacttgtggttggggctcaacggttttcataataggattctagcccctcgggagatggaagttaggagcagaatgaaggctttggtcccaaagatgggagttgtgagagcaaagtggcagatgtgtggtagcaaggatgaactatgtagaataaggagcctctctaaactctctgtatgggttttaagctttaaacattgatggctttcattgtgggtatgacagaaatattttacaaatgaccatcacctaaggcaaattgaattttcttcttacaactta

SEQ ID NO: 119772 - DNA, 260 bp, Homo sapiens
ttcatcaccctgttgtatttattttttcatagcacttattaccatctgaaagtatttcgcttatttccgtacacagttttatctttttcccctgccaccatcaccagaatgtgagctctagaagagacactgtgtatgtgttgttcactgtaatgtcctcagtgtccactgagacataatcatcactgagtaggtgtttcttgaatgtaagaactaataaataatcaaatgaattataataaaggagaataaagactata

SEQ ID NO: 119773 - DNA, 517 bp, Homo sapiens
agatgaaacccgggtgagagggctagaaaaaaaataaaggtatgaatgagatgtagtaaacctctgaatatcacactgatgactgatttcaagccaaaatgtatagaactcatgacagaaagtgaaatccacatgattaatatggtgtcacttccaaatgcattaaaggtctgctaatactctcggcactctgtgaaaaaagaaaaaaattttatagtaaagaagagctcaagttcccatttgctaactcaggtaccaccctaccattttgcagattttcctctttatgtggcccttgctgttcctttggaatttttaaagacctgggatttgagtaattgtagccatttctgaaatagttatggacaacccagttacttatacgctgctttaaacatttgcttttgagtatctggtttatagagagactacatttgcaatcttacctagttctttcatatccagaaccttcttaccccagtatcatttgcttgctgtctaccaacagtcactcatt

SEQ ID NO: 119774 - DNA, 446 bp, Homo sapiens
ccatgttccacccaaatccctggaactcaccaacactgtccatttgttcctaatcaaagggcctttgaacttactgtattgtctacctagaaaatgcttcccttctacttctgtcgttaattccaacccaatatttaagtcctgcttaagtgttacttcctgggaaaagcctttgctaactatgccaaaccctccaattgagctcaattacacagtacttatcagttttaatttcacatttgcctatgtcattattcaattatcatctgtctcctactgtaagctataagttccaagacagctaggatgcctgtttttgctcatcattgtaaccctagtggctaatacttagtctagtacacaaaaaattttcagtaaaaacatttgaatgaatacatcaatgaatggtaaaggtgtatcaaagatgtataaggaaagaacttacc

SEQ ID NO: 119775 - DNA, 337 bp, Homo sapiens
ccaaggaatatctataaaggaattcgggcccctacgtgagaagctcggagggggtggtttcaggagttccttgtggagaggggatcgtccgtgactcagaccccgtcgaaaagctctcgatttcacgcaaccaaccttaccctcgtccccaacacaatccttgattttacccctgggaaaattagcatgaggccacactgcaaaaggggtcctggagtttgctgaaggatctgaaacgcatcacagacagtgatgtaaaaggcgatctcttcgtgaaggagctattttggatgttgcacttgcaaaaggaaacctttgccacctatgttgctcgatt

SEQ ID NO: 119776 - DNA, 1274 bp, Homo sapiens
ccaaggaatatctataaaggaattcgggcccctacgtgagaagctcggagggggtggtttcaggagttccttgtggagaggggatcgtccgtgactcagaccccgtcgaaaagctctcgatttcacgcaaccaaccttaccctcgtccccaacacaatccttgattttacccctgggaaaattagcgtaggtggtcatgaccccggcttcctctttaaaagccctcagaacctggaccgggctcctcaatgaaccctagtgttagaggccacaaatcgggaatcaaggtcggggagcggctgtttagggtgcatcactgttcaggatgcatcggggctcctttttctaagcggaagtgtgcgccctgcaaattggaagcccgttagttttggggaagggtgaacaagggccccctaggtctagaggaccgcatggagtctcgcttaagtgttagtggggtcctcagttctagaaatctgcgttctcctgctctcggtttggggtgagagcacccttcctaacggtcttcgggaactgtgcgcgccggctgcaatggggccgcattttaccctcctgtgtgcggcgctggccggttgcttgcttcctgccgaggggtgtgttatatgtgacccgtctgtcgtgctggcgctaaagtccctggagaaagattacctgcctggccacctggatgcgaagcatcacaaagccatgatggaaagggtagagaatgccgtgaaggatttccaggaactgtcgcttaatgaggatgcctatatgggggtcgttggtgagggcaggggggaccacggacccctgggtcctgggaaaggagggagataagaccaggggaaggaagaggctgacagcagggtctccgggattcgggaatggagaaggctgagatgcagattccgaggttccccgaggctagtaaataccgttttccctatcctcggctggcaattttatgtaataaaactacaactcccagaaggcaacgggcggctgagtccttaaccaggcctatctttgcccagtggcctcatgggtattgtagtttctaagattaggcgcgccaatgagacagtaaggctggaatctggggttatatctcctctgacagatgaggccacactgcaaaaggggtcctggagtttgctgaaggatctgaaacgcatcacagacagtgatgtaaaaggcgatctcttcgtgaaggagctattttggatgttgcacttgcaaaaggaaacctttgccacctatgttgctcgatt

SEQ ID NO: 119777 - DNA, 437 bp, Homo sapiens
ttaagaagaagttacattctcagggtatatcgggcgtttctctatctactagaatcaaaaagacagatgagaacaagtgttggccaggttgtggagcaattggaaccctcatccattcattgctggtgggagtgtcaggtggtgcagctgccaagcctgctccacagtctttcccatctcagctgatggcacctccatcctcctgttgctcaggtcagaagtcctggggtcttcccaacccctctgtcatacataaactccacacacaatgcatcagcaaatcccattgactctacttcgctacttataaggtagatgctaagtacatcaccacttctgccaccaccaccctggtcgggggtgggtggactcctgaatccccgcttgccttgacctcctctcgctggcccctgatggtccattctccacataactgc

SEQ ID NO: 119778 - DNA, 803 bp, Homo sapiens
cgggggccaggagcctgtagtcccagcaactcgggaggctgacacaggagaatggcgtgaacccgggaggcggagggtgcagtgagccaagatagcgccactgcactccagcctgggcagaagagtgagactccatctcaaaaaaaaaaaattactcagtctcaggtattctgttacagcagcaaaagcagactaagatatcacctctactaatgtttttcacattgtttgatagaaagagttcaatcaatggccactgttattatgagcttattatatctgttcggaaccccatagaatgttccctgcactggaagaaaagtgaactagagagtatctaacccttcttttcactcatctgtagttctagtgaaccaataattatgcaatcccaggataaccaagtccctctacctctcagaaaataagtaataatatactttaacagcaatttgtacaattatgtgacattcagaccaactaaaggtcctatcatacagcactaaattatcaacttccctctgaatttgaaaatgtcaaagccatttttaattaaagaatataaaaatagttctgtcctccaaacaataatgaatgatatttgctgttgttgataaattgccagaagataaataatgaagtatacttcaataatcccatttaagaaattttccacacagaataatacatagaacaaaaactcttagcaatggcacgttcacatttaaaatcagatcaccagcaggagcaaaaacaaaaggcccatggagaaatcccctcgcataagcgtattactcaggtga

SEQ ID NO: 119779 - DNA, 396 bp, Homo sapiens
tataaaactttacttttttactcaagttatatatattgccaccaccagcagtttttcagctaataaagtatacttatgatttaagtcacttggttaatgtcctcatccctaaagaatatgttaaaacgaatgcttaacttatagtagaagagattttcaatggcagtaatgaaatttccaaaaatgaaatttaatcatgcctcatgcacttctgtagtatatgtaagttttatttatatatcttaacgtaagcatttaagttattaagttatgactagttaaaaggaaatagtagcatagttaattgtgtttttgtatgtccacagtacagaattaagaataactattttggccaggtgcggtggctcacgcctgtaatcccagcactttgggagg

SEQ ID NO: 119780 - DNA, 247 bp, Homo sapiens
agaagtaaaccatcagaagaatggttggggcaagatgagaaagataaactgggcctgaaattctttatgtttgtggacaagctcagaggcaagagggaagtcattacatatttttgtgtaacacataaacaccatcaaggcactgtgaccaattatcagggcagagtggaatgtatatgaaaccaaaccccttgtttttattcccctttccgacataccttttaagagtactaaatacataatagcg

SEQ ID NO: 119781 - DNA, 427 bp, Homo sapiens
ctctaattatgggagataagaaagctgggttttctgttttctgggctgatgatggcttggatacaggacccatccttcttcagagatcatgtgatgttgaacccaatgatacagtggatgcactttataatcggtttctttttcctgaaggaatcaaggccatggtagaagctgtccaactcatagctgatggaaaagctcctcgtataccccagccagaagaaggggcaacatatgaaggtatccagaaaaaggaaaatgctgagatttcttgggaccagtctgccgaagttttacataactggattcgaggtcatgataaagtccctggagcttggacagagataaatggacagatggtcactttctatggctcgacattactgaatagctctgtgcctcctggagaaccactggaaattaaagg

SEQ ID NO: 119782 - DNA, 880 bp, Homo sapiens
accagcaaaaagatcatgaattgctgaaagctcaaatgatggttagcttttttagcaataaagcatttttaatgaaggaatgtacatgttttagatataatgctattacacatttaacatactacatatagtgtgagcataacttttacacgtactggaaaatcaaaaaatatgtgtggctcatctgttataatgtttgttttattgtggtgatctggagccaaggctgaaatatctctgaggtatgcctgtaatgtataagtgctagtagaaatgagttgtgcagaattgctatttttttcaatttttatatttgggttaatggtaatatactaagcgtccagtctataaacttcagcattcgttgcgaaatccagaggagacttttaagtgctgttttgtagatgaaatatgaaagagaaacaagggcttaatggtaaagatgacatatgactatattaagaaactgaatggccctttgtccacaaacagtaacccacacagcattgctactgtggcatgcccactgctctgcactgacctcatggagcagagaacctccttcagacacctcacgcaccccctgaggagctaatgtttcttcccaacatggaaaatttggaagaggcctattcttcacagctgtcacttctcattttgaaagaatatgcccacccttattcgcaggcaaggtgtgaggaggtctttgggctccagctgttgccagcagaggtggtgaaagtcaacaacagggcactggacacacatagaaatgtgacccacagctatggtttgcaaatacagtctttcaagaagtcctgccatgtcctaaatgcccaaaccccttgcctcccatgattcttctcctcaaaggaccttc

SEQ ID NO: 119783 - DNA, 634 bp, Homo sapiens
catctcccaggttcaagcgattctcctgcctcggcctcccgagtagctgggactacaggcatgcgccaccatgcctggctaatttttgtatttttagtaaagacggggtttcaccatgttgaccaggttggtctcgaactcctgacctcaagtgatccgcctgccttggcctgccaaagtggtgggattacaggtgtgagcccccatgcccagccgatacagcctatttctgattactgcccagcacactttgcctatgtttatgatgtctcttttagtgcccttttggtctcatctcttctttttctctgtccattcaagtcctcttccatgaagttgtccccaactgcttcagcaactgcttcagcttatactgtccttgttcttccctaagttcagagccaggcctggctctgaacttaggaagctcttaagaattatcagtacactgaatttgttgaattaactattctagtccaccttgatctattctttttcagggcatcttgaccatttctcttcatcacacaatctagactttaaaggtatacaggctctcattaatttcaagacattcctcatgtcccagctagactgaactacaggcaggggctggttacttccacttaggtac

SEQ ID NO: 119784 - DNA, 862 bp, Homo sapiens
ttaatgagaaggattgaaaatactatcccgtgacaggtcaaccttgtcttggaaatctcagaaatctcaatcttatccatagaaaagtcatgacttctgtgcttatgtccatttgttctttaaataccaaactgtcagctcataggaaccatttacacacacacactgacacacacacaaacacgcacacccctacttactgagatgttcctggggagattcgaagacctgttccattgagaaaacaagaataagcccctggggcaaaagactccgcgtctctggggaactcagtatccgcgccgcgagcacccatgcccattttgaacacaacgcgactgctaaggacgtggtgtaatcatatggaccttcactcccaagagactcgatttcagagaaaatctgggagacaaatttagatccctacccgcacccacgcgatcaataaagctggggagacctttgggggaggggacagatgtgcttgcatccgggccgtgcgtgcctgcttcacgggttttccgggcagcaccggcccgcacacgccggtgcactctttttctggaattcttgaaatagccgggcctgaggacagtaagggagctgagttgtgtctgctacagacaagcggcgcagagcctgggggccaagccagggatgcagggagcgcggcgttagcggatgacggatagctcagggctaaggcctggcaggtccttcctacccccgacccagtacaccccgcagccccgccctcgccccagcacgcgaggtgaaagcgcgaggcccggggatggcggagagcgtgcgccactatcggggcgctgtctcttgccccgctctcgccctgggccggagaacg

SEQ ID NO: 119785 - DNA, 580 bp, Homo sapiens
gatcagacaaacccaaattgagggaaatttcacaaaatacttgtcaagttcccttaaaagcttcaaggtcataagagacaagaaaagactgagaaactgtcagattggaagaggctgcggagacatgacgagtaaatgcgagacaatatcctagattggattctggaaccgaaaaaatggatactggtagaaaaattagggaaatctgagtagttaatagtattgtgccattgttaatttctcctttttgataaatatgtcctgattacatacgaagttaaacaggccgagcctcatggtgcctcacacctcttatcccagcactttgggaggccaaggcaggaggatcgcttgagcccatgagtttgagactagcctgggcaacataaggagaccccatctctacaacagattacacaattagtcaagcatgcttgtagtcccagctacttggtggtgcatgcatgtagtcccagctacttgggaggctgaagtaggaggatcgcgtgagcccaggaggtcaaggctatagtgagccatgatggcaccagtctgggcaacagagctagatcctgtctca

SEQ ID NO: 119786 - DNA, 200 bp, Homo sapiens
gagaaatgctgggtgccttagctgggtgaaggctgggaagccagatgggactgcagaagacctagaatgctccctctcctcaacccccttcactgattctcctcttcgtccttaacttctcatcacaagatcgcttcctcagtgaccatttccctaacctcctagactagaccaatgttctcgttgcttctcccttgtta

SEQ ID NO: 119787 - DNA, 492 bp, Homo sapiens
cagggaagcagaggttgcagtgagccatgatcatgccactgcactctgggaaatagagcaagactctgtctccaaaaaaaaagaaaagaaaaagaaaagacagaaggagggaaacacccttccacacatcaggccttgaagaccttggggcctctcctgtatgactggtcaacccactccagtatccagcgcagcacccagcataggtgaagggtgggcttacggaattcactgaaagaaaccaacactgctcagatgctttccccaccccgtgcaaagggacatcttcacctcaaagacatagattcctatgtaagaaatcatctcaggcaggccctcccagggcttggaagattcaaagagatggcactcgaagtatgagtaacacagtacctggcccacaataagtacccagaaatgggtgcttttgtttagatgtcagacggatggcaaatctgatgcctacacttaagcagaagaccattaagcaca

SEQ ID NO: 119788 - DNA, 461 bp, Homo sapiens
aagaaaaattgcacgtggtatgtacatacaatagaatactactcagccataaaaaggaattaaatattgatacatggtctaaccctagaaacatgctaagtaaaagaagttcaatacaaatggtgacacattgtctgcttctattcatatgaaatatccagagtaggtaaatccctagaggcaaaaagcacatagctagttgagaggcggggggcaaagtgtaatgaggagttgatacaggagatagaaagtatttaggcaggcagtgagggcaaagagtcctcagcagaatttcttttctaacagaaagtagcccctgatatcatttcttttctaataaatagcagcctgaaaactcaagctgcaaacatagataaggaagctggaagcttgcacgtgggaatgctggcagctgcaccaacagaaaatggctacctgggagccaggcatatccaacacgg

SEQ ID NO: 119789 - DNA, 849 bp, Homo sapiens
actcggattgtgcagcgactccccgtggcggttgaggggcagtggtggcggcggaagcccaagtcgatgctgatgttgatgctggtggcggctgtgaccatgtggctccgaccgctggtcacagctcagctctgtcgttctcgcacagtgaggacaggaaaagtgtttaatctgatacaggacgttcaaggggaccgcctgtattttcatcctacaacaacacgcttgattaaacatccttgcgagaaaaatatagcactatatctagggaaacaagtttttttcacaatggataactttgagactagtctccttccatttaccatccctacatcaatgcaggtcggcgtaccagaagtgacatcagcacattttgctggttcgttattgctgttagtagtggatcaaaaagtctatatttatgattatgaaaataattcttggagcatgtctttaggtataaaacaccctgttacacatgtctctggtgataattgttgttatactggaagtttgttttgtgtgcatgtcagtaatttggtttttgcatatttccgtggagatcagatatcccagacttatatatattattcaaatactgggggattcagtttttggaagtatcactatgacagacaggcagaaatcattgggtctttaggcggaatcttccactttttttctttgtcacaggttgcgatgcttgtagtgaatcacagggaagggcatgttcaagtactcagatcaccccctcaaccggagttcgggctgtcttttgactataatgggactctagacatcctcatcgcccccggccagagaggcatcctgccctatggtttgagaaca

SEQ ID NO: 119790 - DNA, 267 bp, Homo sapiens
tccccatttccctctttctgacctccccaaggcaaataccttgtatgtatcatttttctgctttactttatggtgttgcaaagtgtaaatgtatccttatataatgtgacttcatttttgcattcctttagacaatgtaaatggagtcactttgttctttttttgcccccactcaacattgtttctgtgatccttttattcagatgtttgagtacttaccatgtcttaaacactgttctactgctgggcatgtcaacagtaagcaaa

SEQ ID NO: 119791 - DNA, 358 bp, Homo sapiens
ttggatggtatctatgtgtctgaaaaaggaacagttctgcaggatgatgaataaggtctaagagttgcccagctacagaaacaagatgctggatgattcctaagacctatttgtgatatataaacaatacaataaaagacctattgatggccaggcatggtagctcacacctggaatcaaagcactttgggaggccaaggcgtgacgatcatgaggtcaggagttcaagaccagcctgaccaacgtggtgaaaccccatctctactaaaaatgcaaaaattagccaagcgtggtggtgcacgcatgtaattccagctactcaggaggctgaggcaggagaattgcttgaacccaggag

SEQ ID NO: 119792 - DNA, 333 bp, Homo sapiens
ccccacccaaatctcaccttgaattggaataatcctcacctgtcaagagtggaaccaggtggagataattgaatcatggggatggtttttcctgtgctcttcttgagatagtgagtgagttgtcaggagatcttgtggttttataaggggctttccccctttttgctcggcacttctccttactgctatcatgtgaaggatgtgtttgcttccccttccaccatgattgtaagtttcccgaggcctccccagccgtgcagaactgtgagtcaattaaacctctttcctttataaattacccagtctcaggcagttctttatagtagggtgaga

SEQ ID NO: 119793 - DNA, 618 bp, Homo sapiens
gggagggggaggtgttggggatgaaaagtcttgttgcaattcattacccagggatagaaagaaaaaacttatagttgttataattttaaataaataagacctgacaccaaagtcagggaaatgaatggacaggaaatgcagcaaactttaaagaggaagtgggtttgagcctccaactggaggacattgaggaggaggaaacctacaagacgtgtaaaaatggaaaatcaaggctctcatcttaagaaagaaactcagagcccatgactaaattatcggaaagatatgaaatacaaccaattaacgtttatggctatttgaagcgatcataagacataataattgacacaatggttgtacagatttatgggatacagagtgtgatattttgatatttgcaatgtgtaatgatcaaatcagggtaattaccatactcatcacctcaaacatttatcatttctttgtgttgggaacattaaaaaatcctctcttctagctatttgaaaataaataacaaattattgttaactatactcaccctacagtgctatagaacaccagaatttattcttcctggttataatttgacatcctttaaccaacctctccctattccct

SEQ ID NO: 119794 - DNA, 186 bp, Homo sapiens
gctcacccacagaacccagctgtggtatgacagccagtgaccctgtctgtggtacatctggagaagctgagacaaagacaggcgattccttacgccgggtcacacggccagctggtagccggtgaagagagaaaaccaccaggtattattgagcaccgtctgtgacagcggacactgctacaatgt

SEQ ID NO: 119795 - DNA, 627 bp, Homo sapiens
gtttgtatcctttgactcagccaagagcacaatttgctctgtttttgtgaaatattatttatggacattgtcaaaatttgaaagacataggaaagtgttaagaatataacaatcttccagggaaaacattttggcatatttccatttaatcttctctgactgtaactacaattacattgctaccatcatagaatctctcttaacccacttcccttcttttatttatttatttttttgagatggagtctcactctgttgcccaggctggagtgcagtggcatgatcttggctcattgcaacctctgcctcccgggttcaagcaattctcctgtctcagcctccccagtagctgggactacaggtgcacagcaccatgcccggctgattttttgtattttagtagagatgaggtttcaccgtgttgcccaggctggttgcgaactcctgagctcaggcaatctgcccaccttggcctcccaaagtgttgggattacaggcattagccaccatgcctggccaacccacttcttaaccaagtcacaaattcatgagttttctcgactcttctacagaagccactgactgaagtccacagcctgctgggcattcatagctggcatggaaccc

SEQ ID NO: 119796 - DNA, 481 bp, Homo sapiens
ccgaggtaagtgtcgcgcagggccggggagggaacagcagcaggaagaggggacctacggagcgcacagcagcactaggggaggctcgcctccttcctgacgcctctacacggaacatggatttgagtcttactaaaactgtgtacagagacaaaaagcccactcagcacaaacagagttgtctgttgttagccttcaaaatcgtccgtggtgtcactcttagtgcaacagtttctagattggcaaacccaagtctggggccccaaatgcaaaccccagaagaacggcccatgccctctgctggccctgctatccttgggcctcccagggccaggcaagctccttcgctgtgaccgacggcctcacgcccagcagagccaccaccaacagctttctacgaatctcagtgcatagatctatggaagtcatctgacaaaagagcacacggagaggagtgagtccccacacatcaatgtttccc

SEQ ID NO: 119797 - DNA, 415 bp, Homo sapiens
acacagtggggtgagggctgctactggcagctcgtggggagagaccagggatgctgcttaacatcctacagtacacagggcagcccccaccacaaggaattatcagctgaaattgtgaacagtgtctacactagacccttgctactcatagtgtggtccgtagaccagcagcattggcatcacctgggaccttgttagaaatgctgttagaccccaccccacatccactaaagccagctcttcatttcaacaaactccccgatgatgtgagtgcacattcaagtctgagaagggcttctttgaggtgagccttagtgcccatccccctttggtggccccggataccaagggtgtgtgaaaggggtgggtagggaatatgggtctcacctgccaatctgcttataataacacttgt

SEQ ID NO: 119798 - DNA, 145 bp, Homo sapiens
agaaaaaaaaagaataaaccatattgatttgctgatgataaatcacatacgatcccattccccttcttcctggtattttttttacttaaagtaatacatggcaaccatatagtgtaatactatgcagccattgaagagaacaagg

SEQ ID NO: 119799 - DNA, 344 bp, Homo sapiens
tctgattctgaccaaactctcttctgtcctcactccctcattctgactaaactcttctctgcttcttctaccaggcagctgagcacttttaggaaaatcttatagattcaacagtcctcaatttcagcacaaacttccacggcacctaaaattcctttaatctgcccttggtcagctctccttcccattccctataggatattaaaccaaaccattattccttgcctcaaaacccctactgccatcctgacttcattttagcaaactgaattaacatcctatcttcagaaaactaaaggccaggagtaatcaaaacctctgcaacttcctagctgggcacagtg

SEQ ID NO: 119800 - DNA, 791 bp, Homo sapiens
ctgtggatctagatttgcatagaagacatttatagacggttcctgatgtgagctgcagctggtaaaatacattccttacctatccaataagaatataataggatttgctttttaatttttaaagcacaattatgagtcaatattaaactataaagctctgaaactggcgaagaaaacaactatcaggaagagagcagagaatattttgtatatttcacataaagggcatttaacagtattgttttctaattttactttcatttcaatctgtttcattaaaaaagaaagttgaggtgacttgcctcaaaggtctgtataatttttgaggcttctttctgcttgtgtttttgtaactgtaaaataagaacacactgaaaatatactggaattaagaaagccagtgtgagtaaatgaaaatgtcattaaatttggtagagaaatggacagatgggtaacttgaagttaataaagacataaaaatcaaagcagaggaatgtattttaagaataaaacaatctaaattgcatgacttaaaagtaaaataataggtagggaattatgtattataaagaaacatgaatgtgttaactacaggtgttaatatttaaaaaattatagtgggaatgatttgagacttcagacttggttacatggcttttatgacatcactttttctaaattactggaacctgtgtttgtttttacattgttttgtcatgagaaaatacatttatataacttaaggctcttttcttcatttatttcaccttgtcttcaaaaaattacatgaa

SEQ ID NO: 119801 - DNA, 833 bp, Homo sapiens
ggaacatctttggggttttggtattacctgtcttattttaagtggatttatggcccactaggatgaaataatggaaaagtccatcctagaataattgaacaaaatataatttcagaggtaactacttacgacagactatttgaacactgattttgggtttggaataattaatagaaaacagtcaccttgcctaaaatggcaattttatgcttaaaaatttaaattttgcttggacaacccccaatcaacttctcacagactgaattgcgtgtatgttctttcttgtgtcttcagatcaatgtaggactgttggaggtcaattaaattatagtttatggacagggaggccacttctgtattgtttaattcctactgaggtcatgtcactttttaaatgttaagtagtatgtcaggtttccctggaaattcagtgtttcctccttgaccttgtataggatcattttataatctccatctccaaatattcatcatttaaattgcaaacgctgcttcaaaagcaaaataaatgtaccaccatttaaaaatgtcatatacagacttaataaaaggttctgtgtctgtcacagtttatatattactgtttacttttatttctagtttaaaatcccagttttacattttcagctgtgtttaagctctagaaagaaggaaaatattcatagggcaagtattttagcagcactgcgaaatgaggagatgaaactctgttgggaaaaaaatcaaggcaagattttagtttccatatgtctgacaagaagattttacaaaagacaattatatacactttggacataacatgaaaaaggaatcac

SEQ ID NO: 119802 - DNA, 317 bp, Homo sapiens
ggtgcagagatcccccaaggataagttaatccaactaaacatcgagaaaagcctacggcggttgcaatttcctattataaaaacattccagtggccgaaactcctcaacttagggagagaggtgaaatcaagggaaacaatgaactgctcggcgagggagagtccaggctctggctgaatgtggccccaaagaacaccttgggaggcaggccccgactccggaggctcgtcgggtgcccagggagctgcaccgggtccctgggccccgggcccggtcagtctgaggcggtgcggacgcagcctctcccgctccttct

SEQ ID NO: 119803 - DNA, 470 bp, Homo sapiens
aaaagtggggctaattctggacttcactgcacttttccctaccagagtgacttgcctgctctgcttatacatacatttttgtcatcaatattatcatcaaacacgttaaaattaatatatgcaagtggtttggatggtcactatagaaaggtacaaatagttctcagtgcccagttgtcaaaactgagagtgctcttaaataccaggctgaggagctctaaggacatgctagaggcagcccttttattttctgaaaccaaattaatgtcaaccacacactgctgggctttcctgagcctccatatatgtcataataacttgatttttaaaaaacccactactgacaataactataataactatgaaaaattggcattagtaggccaggcacagtggctgatgcctgtaattcctgcactttgggaggctgaggtgggtggatcacctgagctcaggagtttgagaccagc

SEQ ID NO: 119804 - DNA, 615 bp, Homo sapiens
attgtaactttttaaatgtctatagcactgaagttattttcaggttttgtattttctttcattgtggaatattttaattaatatagcatggcacctcattttcttttgcctgctgttaaagatggaagctgttgtcaaatgacaactttaaaaagggaagtataaataaaaagcctgattattttaggccagtttgccaatcactgtgtaattcctctggtagtattctacctactttaagtctaattttactagatagagtaatggaaaatgaaaatttaaccctttattccgataatctcatgaagcaaacctaactatttaacatcagctggaaagaagggaacatttatattgcccgtctcctgtgtcttcaaaggtgtgagagttgaggaatatgtgttcctacgggaactatgtttgaatatgtgcagttttcaacattttggcaaatgaaagcctgacaagtttttaaaagggcagaagctttattttttgaacagaaaaatctattttttaaattcacatgtttgtatgagtacttctgggaagcaagggatgaactgctaggtattattaagaatgaatgatttttgcatttaagttgtttgaagg

SEQ ID NO: 119805 - DNA, 264 bp, Homo sapiens
gaacttttgttacagtaggtggactagcactatctagaagagtctgaaaggaatcccaggagttaattggagctctgtgggtgagtgggtatgtgccccatacacgcccacttgctcccattgtgccttctcaattgctagtgttcaagtgcactttgaggccctttttccagcagtgatgatttaggttagtaatacatcagtcttggcttgcttcccttgtgacctcccggaaataggattcagggccagacttttggaaaa

SEQ ID NO: 119806 - DNA, 355 bp, Homo sapiens
gcacgagtgagagattttagtttgtttatttttatgcttttaacataaaaagtgaagccacaagatggtatatgattgattgcctagcaaaaggttcaagtatgagtcttgaggtagggaaagaaggccttaaggtctggggcttttggaagaaggtagaacttgagctaagtttgaagatgagttggatttaggtaggtgaagagcctggcggggttgctgatgcctgtaatcccagcactttggggaggctgaggtgggaagatcccttgagcccaggagtttgaggttatagtgagctgtgactgtgccattgcactctagcctgggtgacagagtaagaccttgtctctta

SEQ ID NO: 119807 - DNA, 248 bp, Homo sapiens
gcacgaggccatctttcccatgaggttaagatttttgtctcaaagaccaggagctcttggtagtgtgcaaatttattatttaagttcaaataagatctctggtcacctagaaagctttgaatacacacttgcacacatactccactcataatatacactggtacatgcaggacaggtagggaggttggagtgagccgagatcacaacactgcactccagtctgggcaacatggtgagacgctgtctca

SEQ ID NO: 119808 - DNA, 294 bp, Homo sapiens
aataaaattgggcttctaaaaaaaactggggagaaaaagtacaacaattacaactgaatcccaacagtgtcaggatccaccagtcagtagctgctctcatcttttgctactcactccagttagggtttcccaaccaattgtagctgcaggtacaacggcagccacagctggagactgcacgggacaagaaaagtagcaccctcatggccctggagtgtaggcgttgctttttagcccactgtgtgaccctggataagtcatgtctcatctcagttttctcatctgaaaactgcc

SEQ ID NO: 119809 - DNA, 675 bp, Homo sapiens
tgtcagtacagtgcactgcacagtggataagaatgtagactccagagccagagagagttgtgtttgacttgtatctacggagcttgtgatttttgtttccctttagccagtttatcaactatcttctggatttctggttctcaatcctgacaataaatgaaatcatattctgaaagaacgtcatcattcgttgaaatattttcatttctggtaaatacattgtcttgacttaaaaagtgttttttttggtagcggatgactcctagaatagtacctggcatgtgttaggtgctcaataactatttactgatggaatgaacacaggctctagtgtaaacagatgagacttcataatgtcacttaccacatggcactcaggagatatttagcctacctaagcctcgattatcatcaactataaaattgagataataatagtatctaccatttaccgttgttctaagaattaaatgacatagtgcatgcaaaggacttagcatagagcctatcacctagcaagtgctaaaacattagctattatttttaacattaattatttttcaaccctagaatggtacatttttaacaggtagtacattttaacagcaaaattttagcagaatgtatttatcccccactttgcattttttcctaaaaactgtatcatgggataat

SEQ ID NO: 119810 - DNA, 380 bp, Homo sapiens
caaacaaaatatacgaaagagtggttttatgactctggaaataaggcaatgaaggacagtgctccctgagagccaggaaactaacaaggtgaacaccatgtttggcacagctgactgccttgacagggctgtagggcacacaacccactctggggaaagaaccatctgaaatagagaaaatagtgcatggtgctcacacagggctggaaagagtgcctgtttccaccagccagactgaaaaaaaccttgtaatgcataagccatttggctagactactcagaaaggtcttgtgtgaatagtggggaatatttagctgcaggctgagtcctgctctgaatctccctaatgattcacaatagcaaggctccaacgttgccaa

SEQ ID NO: 119811 - DNA, 478 bp, Homo sapiens
atgttgctgtaatgagagttgtgtacttgatattttaacccaaagcagagcccgcattgattgatgatcctttacaaaaagtacataaggggatactcacttttctgcataatcatcttagcattttcaaacgttctagaatttagcctgaagtaggggtaatctaataagtatgataaataccacaaacaaaatataagcaggtggaaagcatctaagatttaaagagcagcttcaaaaaaaaatccctttggaaacttgagtggttttaatttaaatgccccaaatcaaccataccaagctaacttacctatattcctcagaatatcaaaaccaactgctatcaacttaagcaagagatgtcttattcgagttatctgtccaaacaaaattttttaatgccttgggttgcacctcagagactgtctttttcatggagcaatgcagaaactgcaaccagactacaggaaatacaaac

SEQ ID NO: 119812 - DNA, 458 bp, Homo sapiens
aggagggttgccaggcactatgagaatataaaggatgatagagcaatcagaaaactaaaaagtgtggtagtttttgagctaaaattttaaatgcagagacaaatacaaaagaagatttgaaatgcagaaatagatacaaaaggacaaatagcaacagaagcagagagaacattttcagcagggtaagaaatggcaggaaaatgtagctcatgttcaaagagcatttgatggtcctgtttggcagtcacagaatacgtgaaaggtagcagtagtgaaagaaaaattaaggccatgtaatttggaaattcaagtgctctctttttctataggtgtaatttcttcttggcagttagtagtgacagcacattgtttgaagtaggtcttaaatgcagatctttgaaatgattcccacagaaaatgtctaaattgggagttttttctatgcccttcctcctcac

SEQ ID NO: 119813 - DNA, 347 bp, Homo sapiens
catgtttttgagactcatccatattcccccattgagttttacctctagcatgtaccccaatgcaaaaataatcacttctctccagtgtgttagaaatcatcatctgggtgctattactttgcagtaaacatccattccatgagattttggaaatgagaacaaatgcaatgtctacctttggagccccaaagcatgccagtgttgacaccatgtcattgactgggagggggtgtggttggggggtccttcgaggtaggcagtactaggggatgggcagacttcaggttgcatgaaattgaaagggggcagtgcttgggggagggaatccattggaagagctgtttcta

SEQ ID NO: 119814 - DNA, 355 bp, Homo sapiens
ctgagctctactacttactaactatatagtcttggccaagttacctaattactcctaacctcagtttcctcagctgcaaaatggggataggtacagcacctgatttgtgggattatcctgaggatgaacagagttaatatctaaaaaacactcagtaaatagggcttgataacgtaggagccattcactaactggcagcttttactgccaccgttccccaggatgttgtcattatttttgatttggaaaggtcacagaccgctctcggaccaggtggagacaaggtagagccgagtctccctactgtatcctaaataatcttctggaaagacaaggtagagccgaggggtaccga

SEQ ID NO: 119815 - DNA, 305 bp, Homo sapiens
gttatttccaccagagtgagtctctgagggtcgtctctggctccctgcagcaagcctggttcatggttcccttactgcctcctctcagggtctgccctgtcttggatgtacctctggagggcccctggcccagccttcagatcccaggggcaagagacccaagtctggggcctgccagaggccagttcagacacccaggcatggcaggagagaagcaagggggtgaaggatgagttctctttcccaccctgcccttgcctttcaaactcttagggctgaccctccaacttgtccatgctgcactt

SEQ ID NO: 119816 - DNA, 234 bp, Homo sapiens
gcaggggcagaggtggaagaggtagagaaggtggaaggggaggcaggagagggaggcacactcagtgtaatttatattgaaaaaaaatctgggtataagtagatccatgcagttcaaacctgtgttgttcaagggtcaactgtatgtaacagggtagggttggagagtctgtccttgggggaagaggtgggaaggtcgctctgaggaagtaacatttaagtgagacccgaagaa

SEQ ID NO: 119817 - DNA, 448 bp, Homo sapiens
gcctggcaagaaatgaatgacaatggcccctaggtggtgctgaatcatcatggaagtggaggctggacacttggcatttgcggaggtgacttccttctggtttgaatttcaaataagagcaggacagctccttgggatgtctgggaaaaaagaccaggcagaaaagagtcttttcactaggagcgggtgcaaaatactcttgcctgtgaggcctcttcaggtcttcggtttgctttagttggaaacaggaagcagggtcagaccaacttgtattcatttgctgagagctgttggagctgtgactgattctgacagatcaaataccatttataacactcctgtgggggacactttaaccggggatgttagtgctagcccctccagagactaagtatgtttgcgggatgtgaggacccctggaatatacaaatatgcatgctaatgaatt

SEQ ID NO: 119818 - DNA, 450 bp, Homo sapiens
  misc_feature (371)..(371): n is a, c, g, or t
  misc_feature (396)..(396): n is a, c, g, or t
  misc_feature (403)..(403): n is a, c, g, or t
atcctagctcagacagttagatggaccctatccccctgaagagaatcagagggatgggtgggcgtgaacaagtgcacgtgtatgtgatggtaatgagtccagttttggataggctgtgttagacattcagtaagactaccaagtggtgatgtgctatatgcagtaagcagctgtcacctgtgtgcagtacgcagaaattacctagagaaaactggccggggcagtggctcacgcctaggtcttctgaagcgatcctctcgatccacatctctctctctgtccctttctctcccaggttcaagcaattctcctgcctcagcttcccaagtagctgggactacaggcacatgccaccatgcatggctaatttnttttttttttttttttttgggaaanggattcncgctctgtcatctggtttgattgcagtggcgcgatttccccccattg

SEQ ID NO: 119819 - DNA, 722 bp, Homo sapiens
ctgtgctggatgcataggacattgagaaatgactaaacataggaattatcctcaagaagcttacaatcgaatgaagagtttaaactaactgcacaataaactatagtgaaaggtaggtttaagaaggtagaatagacggaaaattacacggttggtctagtataatttaggctcatggtataatgagcaacattttgttgttggatgatacaaagctgtgtgtttggcaaatagctgcaggcattggtgagactttgcttcagttgcccttccattcagtttgctacttaatacaaatcttaaaaatatggaaattccttttttatatttttttgtgataataaattatggttacagttctgtgtttcgttatataactgaggaaagggctttatatgtttcagtggttcgtgttctgaagtagaacttgcactaccaagtgtcaagagaaatatcagagaagcatgtgttgttggacacagagcagaagaccatattttgactcatgagagttttcctttgctctgaattttgcctgctaaagccagtctcatagttttaattacgtgatactgtctgttaagtattacagggccagacacagtggctgacacctataatcccagaactttgggaggccaacacgggaggattgcttgagcctaggagtttgagaccagcctgggcaacatggcaagaccctgtcactacaaattggaaaa

SEQ ID NO: 119820 - DNA, 285 bp, Homo sapiens
ttttttttctcttattgtcctgtagccagctgctgaattcctcaccactcaccttcacctttctctcgttttctgttcagccagctctcttgaccctggtgcttccttgctcgaaatcatgtctttttttttttttgacaatacactgtgtcagaggaatccttgagttttacaactggaagtgactttagaggttagctgattcagcttctctcccttcccaggtgaggaacgggacacccacagctgtgtggagacttatccaccctgcaggtgccagctaaa

SEQ ID NO: 119821 - DNA, 784 bp, Homo sapiens
aacttttctaagccccagtctactcatttataaagtgggattattaataatgtctacttcataaaattatgaagcctgagttaggtcattcagatagtgtttagtctgattcttcgaacctagtaaacagtcagtaaacagaagcaaatgccacatgcctgatttatatccaaggggagaaaggtaaaagtgaaattttcatgatttatggattcaaattatacatttcaaagatgctttataagctattgttttggtaagaagaattgagctgaaacagaattttctgacagcagtgattattaaatggtgaaataggctattgatgtctttagaggatatagatgttcaccttttgcatataagtgcacaaaaattcactaagtagatatgtctgtctacacagagagagagagcgtgagagcattaaagttagtaaacatccccctcgcttttttttttttgagacagggtcttactctgttgcctaggctggagtgcagtggtgcaatcgtggctcactgcagtctcaacatcctgggctcaagcgatcctctcgctcagcctcctgagtagctgaggtgtgcaccaccacacccggctaatttttaaatttttttattgtaaaggtgaggtttcaccatgttgcccaggtctcaaactcctgagctcaagcaatctgctcacttcagcctccaaaaatgctgggattacaggcgtgagccaccacgcctggccagtaaaccccattcatttacatcatcttacttgtccctccaaaatc

SEQ ID NO: 119822 - DNA, 457 bp, Homo sapiens
agcatcccctatttcctagccccctgccctccaaacctaggctctaaattgttggggtggctgatttgagtaataataaagctttggtctcccacttggccagctctctgtgtactaaactctttctctattgcaattccctcgtcttcataaatcggctctatctgggcagcgagcaaggtaacccattgtgtggttacaaaatatgtacagaactgctattattagggagaaaaacttgctgagactatagcagtcccagggtgttggagaggccagaatcccagtaagaaaaagagcagggggaactgagttcaacgttcttccagtttttccttaaagacatttacaaaattctaaagttatataaggaagcaagattagtgtacaagttcctatagagtgaacaaactcgaattctagggaagaactccaggctctcgattgagaaccccta

SEQ ID NO: 119823 - DNA, 407 bp, Homo sapiens
aaaatcagaggcatggccgggcgcggtggctcacgcctgtaatcccagcactttggaaggctgagcggggcggatcatctgaggtcaggagttcaagaccagcctaggcaacatggtgaaaccccgtctctactaaaaatacaaattagccgggtgcagtggtgtctgcctgtaatcccagctactcagggggctgaggtaggagaatcgcttgaacttgggaggcagaggttgcagtgagctgagagcacgccactgcactctagcctgggagacggagcgagactttgtctcaaaaaaaaaaaatcagaggcattatagtgaggacaaaatgctattaccattatcaactgacagtgttttaaagttcttgctaattcaatggtcaaggagaagagttgcagaga

SEQ ID NO: 119824 - DNA, 438 bp, Homo sapiens
tgctagtgagttttaaaatatcaaacatatgtccctgttgtttaaagagttgcactttagagtgaattaatgggaattttcacaacacagtgatcctagagttgtggcagtttttggtgatatcattgaagttgtcaagactcagcaatgaagcaaataaaagggatagtagttgtctaaatgtctctggaatggcaggggagaagttttagcatttgcagtgagaaaagaaaaaagtaaaaaagaatgtatttacatgtattttccagcttcaaaggggcttaatatatgccaataataaaaaattaaggatctaagtgagtgatgtttactccttggacagtgtatgctgcaattcactaatatgtcaaacactgaaattaggatatcagtgtttcatacagatgtgtcccctcatttgagatggctattaaatag

SEQ ID NO: 119825 - DNA, 638 bp, Homo sapiens
gtaggtatgctgcacaaggaaactggggagatagacgtggctgtgtatggctggtgtcacctcagattttacctcttgagaccaaggtgcctggtttctgtccccagtagttttattgtcttggtctgtaccatccacgtccttcccatcccctctttttgtcctctctcctctcaccttaaaggtttttcattttcagtttattgatttagttctaccctgtggtgggattcatgatgtgttactttaatgttcgttgaggcttgctttccctactagactgtaagtgctgtgaaaacagagcatatccgttttgttgaaaaatgtatgctttgggtagcaccatgcctggcacataaaataattcaatgaattttttgagcaatgagtgatgggaggcctggaagagctaatggtgaaaagcatagagctgaattatatacagaggagctttctagtgcaggacagaatagaggtgtagagctttagtccttgctctttctgcagcttgtaagcatcatgactttgggtaagtcagtctcttttttcctcaactggaaaatggggctcatgtgaaatgacttggtttagctcacagggtatggttaggatcaaaggtacaaattaatgtgaagtga

SEQ ID NO: 119826 - DNA, 574 bp, Homo sapiens
cacacagcccagttttggggagaaagtcttggtttgtcaaatgtatcaatagtttgtttcttttcattgagagtagtgatccacagtagaccactttttcgtgtattgtgtctcattttgtagtcaaaataccatggggccgggtgtggtggctcatgcctgtaatcccagcactttgggaggccgaggcaggcggatcacgaggtcaggagattgagaccatcctggctaacacggtgaaacctcatctctactaaaaattcaaaaaattattatctgggcgtggtggcatgcgcctgtagtcccagctactcgggaggctgaggcaggagaatcgcttgaacccgggaggcggagattgcagttagccaagattgcaccactgcactccagcctgggcaacagagcaagactctgacccaaaaaaaaaagcacactaccctaataaacacaattttgggcgcatttcgggccttgaaaaacgtttctttaaaccagttggttttgggcgcgcggggcccccagataggtatgtgtgaccctgtggttgctcgcggcgtttttccctagggaa

SEQ ID NO: 119827 - DNA, 181 bp, Homo sapiens
aaggagaagcagccccagctatgactgccgcatgttaatagctgccgctgggtccctcggctgctgctggagacagagcctgactccgaagttgtgcaactgtggactgggagagacatttgaaccctcttttcttttcgctccccttttgcccccttggggtgtgtgaagcgaggaacgt

SEQ ID NO: 119828 - DNA, 389 bp, Homo sapiens
tgcatttttttctgttgaggcagaaaacgacatttgccaaaattaagtgggtctttccttcctagaggctgtaacccagcttttaatgcgcagcatatgatcatcacgtgggttctcctgctggccagaaacccttcctcctgcctcagcgtttcctgcagcacatgccggtgagaatgtctggttagtgctgccagattcaaagacagagtcaagcagtgatcagctgtgttcagattggctgggccaaggacacttggtttttcaggtttctttgaaagcttaggtgtttcgttttgtttttaattgaagaaagaaatcttttctgattcctgttttgatctgtttgttttcatatatatattttgagacagcatatttctcagtgt

SEQ ID NO: 119829 - DNA, 255 bp, Homo sapiens
aatatgtggatcacccgatttgggaggctcactctgcctctgagattaaagagatgagggcactggctcccagcgaaggctctcggccttaatcatgtgtgaaatgttttccttcctcggctgcagagcctcggtggtttgcagcagtggaaccaggcaggcccagttgtgggtaggagaggccgtcacctgttgaggcctcccccccacacccccgcatggcctgccctggctagcccatccccggccgcggta

SEQ ID NO: 119830 - DNA, 683 bp, Homo sapiens
agcggggtcacaagggaaagcatatgtagattgaagctatgcagagtgaagtctcaacagctgaagcttactagggaaccaatggtgccctaaattaagataatttatgaaatattggtctccctctgttgctgcccaagctccaggctgaagtgcagaggcatgatcttggctcactgccgcctcctcttcccaggctcaagcgatcctcccacatttgcctcctgagtagctgagactacagtcttgccttgtcacccaggctggagtgcaatggcacaatctcggctcactgcaatctctgcctcccaggttcaagtgattcttctgcctcagcctcccaagcaactgggactacagcccctgaaaagtagcagcaatgtgccctgcaacagaatctgcacactacagagatactacaaaagctaccatgaagaagctacatagatgatcactgggttgtacctctcaagtactttctcagaagccacatccatgttattgctgagagtacatgctttgctataaaccctaactgggttgaatcctggctgtgccacttagtagctaagagattttgaccaaatcactggcagagacctttgtccccttgtctatgaaataaaataaaaatagctaccgctctgagatttttcaataaaacctgttaaattttacaaggt

SEQ ID NO: 119831 - DNA, 282 bp, Homo sapiens
  misc_feature (103)..(103): n is a, c, g, or t
gcaagtgtgacacagagcacagccacttctgcagggaggagccagaagccacttgggcagccctcctgggagggggctgtgggtgaggctggcccgggaacgngtcctggcttcgctgatctcaaactcctgacctcaagtgatccgcccgccttggcctcccaaagtgctgggattataggcaggagccactgcgcccagctctgattggataaaattccgtgccaggctgtctcaggtgtggcctctcttgcttctagcctaaatgtggtccccttggcc

SEQ ID NO: 119832 - DNA, 394 bp, Homo sapiens
taaatctccttcagacaatgcccgtattacctgagcccagcacaggccgctctcaccacctgtccccttggtacaccattgactagaaaatcatttgttgacattttgctttcatcctaagatttgaagtcctcaaggcagtccctgcgtccttttcatttgggcatcctcagtactcagtatgatgcctgccatgcagcaggtgctgcttctaagcacaatacctagagaagtcccgtcctatagtccctaggagttagactcaaaagcaaaggccttatggtggcctacagggcactatccgatacagccccttctacttccagacctctgcacctactcactctgctctactcacagtggccttgttgcttgtgaacagacccaacacact

SEQ ID NO: 119833 - DNA, 522 bp, Homo sapiens
tggacagattttcatcaaatttaaagattgggtttgagatggtcctacataaaatacagaccatgtggagtatgttaaactcatgttggggtcccaggaggggatacctaaagaggtcatcctcacaagttaaagcaaatgttaaacaggagacccactgaaaacaaatactcaggtttatttcaaaagatctcatatatgacaccaaatctgaagtcacaacttcagattagactaacttgcaaccattgatatgcattctcgtggcttctcccattagttactccagggttaatggtaataagaatttatctatttaaaaaacaataatgatttttccaagcacttgcgggtcaaggactagctaataaatacacatgttcaagttgtgatgttatggatgagaagatcaaagagactgatgggaggacttgttttagactgagtggtcaggaaaggcctctctggagagacggcatgtaacctaaaacatgaaggatgaaagggcacctgccaagcaga

SEQ ID NO: 119834 - DNA, 387 bp, Homo sapiens
aaactcatttcatggactgctctaaagtatattggggccaatgtgattggtttctggaaattcttggagattattgaaaacggtggttaagcagagctaatattccatgttcataccctgatatacttctacattttgcaaagatggtattttgggcagcagcaacctatgctaaagggttattgtcctctggcagtaagttagcaggccttttgtactatacagctggttaatggaatcaataactcgtttgatacttgaattgagtaaaaaaattgtaataacagctttatcgtgatacaattcacataccatacagtttacctatttaaaatgtacaaatcaatggtttttagtgtatttacagaactgtgcagtctattttag

SEQ ID NO: 119835 - DNA, 161 bp, Homo sapiens
tacacccctggccagcaggaagaagttagagctgtctttgccctttctccatcttcattagctaatgccttaagattaaggtgttatgaaacccaaaggggtgccaggcgcggtggcgcatgcctataatcccagcactttgggaggccgaggtgggcaga

SEQ ID NO: 119836 - DNA, 306 bp, Homo sapiens
ttcaaagacagggtatggtttttcatttattcaattatcttttatgtccctcagtagaattttaaaatttacttcttgtagattttgcccatgttttgaattttatctctttggttgttgttgtaaatgagatcattttttcccatatactttgtaactgtttggtgtttcacttaccatcctatcaatgaggatttttgatctgtaaatctccttttgatatataaatctccttcataacttaaaatgtattcactagatgttggtttagttttaaaagtaatacatgatattataagcaatatt

SEQ ID NO: 119837 - DNA, 210 bp, Homo sapiens
cagatctagaaatcaaaacaccaaagggacacaaatagggaagaagagagtatggtcatctcttgtctttcagcaagcaacactgggatccccaaagagactcctctacagggccaagcttgtgtgatttatcacacctgtccctgtactccccaagtgccttgtacataacctcacctgctatacatgctatgttgtattataattatt

SEQ ID NO: 119838 - DNA, 176 bp, Homo sapiens
ccctcttaacatttcaagatctaaaaaagaatataaaatgtaaagccctgtagtaaatgtatttgtgtgagtaatatatcttttgtttcatgttgtttccacttataatttattttcacttacgtatactcatgtctaatgcttttgctctttatacttcaagaggccttttctaa

SEQ ID NO: 119839 - DNA, 484 bp, Homo sapiens
gattctagacgtgttcggggttgtgaaaggggcgaggaggagagagcagctgggccagggctagcgtttgaccacacccactagccactccctcccagctgcccgcagagccacatcgaatcgaaacagcagtggcagcggcttgccctctgagtggagacgtgcaggaggcccagagctctcagtcctctggatgttctttgcctttcctagtaccttcatttgttcgtttactcattcatcaaaccctgctaaggtctcaagttgttcacggcctggctttgcggagctacctctcgccccataacatatttagtgatgcctgaactccattcccctctccttcatctccactttctggagagcatcaagagcaaatgccaccgtgaccgttttgctggtagtttcttgagattcgagcaggacccagtgaatcgaagcggagttgcctgcaagatgaatcccgttgccatggcgactcctg

SEQ ID NO: 119840 - DNA, 775 bp, Homo sapiens
acctcagtagctggaggaatgggcgctccacgctcccagctccgttagttgggagttgaggcgcaggagcagggagggtgcccagggtgccaattcggccctcgaagcgacgtgcggctcagagcccaggtgggacttggctcggcggccatgggcaagcagaacagcaagctgcggcccgagatgttgcaggacctgcgagagaacacagagttctcagagctggagctgcaggagtggtacaagggcttcctcaaggactgccccacaggaatcctcaatgtggatgagttcaagaagatctacgccaacttctttccctatggtgacgcctccaagtttgccgagcacgtcttccgcacctttgacaccaacagcgatggcaccatagactttcgggagttcatcattgcgctgagcgtgacctcgcgcggccgcctggagcagaagctcatgtgggccttcagcatgtatgacctggacggcaacggctacatcagccgggaggagatgctggagatcgtgcagggccatttacaagatggtttcgtccatgatgaagatgccggaggacgagtcgaccccggaaaagaggactgagaaaatcttccgccaaatggacacaaacaacgacggcaagctgtccttggaggagttcatccgcggggccaaaagcgaccgtccatcgtgcgtctgctgcagtgcgaccccagcagcgcctccagttctgagaggagccagggttccctttcctccctcccttcaccggcccctc

SEQ ID NO: 119841 - DNA, 126 bp, Homo sapiens
aagtgtagtccgcgtctgcgccggccggccgggccgccgaagccgggggctccgggcggaaacggcaccacccaccaagggatgcgaggcgctcggggcgggctcaacgaggccgggggcgggccc

SEQ ID NO: 119842 - DNA, 475 bp, Homo sapiens
gtggatgtaaagtaatactttgttgtagttttgatttgcatttccctaatgcaaatgatgttgcatttttttcaggtgcttattgtccatttaaatatcttagggaggaatgcctttcacgtcctttacccattgaacagtttgtctttttgttactgagttataagagttcttagtctggacactagacccttaccagatacgtgatttgcagatattttttcccatttatagattgtcttttcactttcttgataatttccttgaatggacagaggtatttaattttgatgaagtccatttttttcttctgttgctgtgcttttcgtgtcatatctaagaatacattgccaaatccatggtcttgaagctatactccctaggttttcttctaagagttttatggtgtttatgtcatatttaggatattgatccattttgaatttttgtttattgtgtgaggtagggaaaggtt

SEQ ID NO: 119843 - DNA, 710 bp, Homo sapiens
gagtactacttgacatgcctatattgatgttaaagtcaattgtctataaaaatattagcattttattatttatcctgttttctgtcatatatgacatagttacctgtttttatcagaataaccacctatttctttgttaaacaagtgttatataagacatatcaggatgacaggttattaagtagaaaaagttcccttgtttatcgtgccactgcactccagcctggggaacaaagcaagagacttgtctcaaaaacaaaaaacaaaaacaaaaaaaagttctcttgttcactggttattctaagaatatcttgtttcaccttcagaagtgtttattaatgacaggaccatccatgtcttacattttcttttttaaaaatatcttttaagttctttaatataccagaacactaagaatattaacctattttctaattgatattaataaggggtaacaaggccatccatgccctacatttgtcttgctaggcatatcattggcacttgattattaagttaaattttgaattaaaattactcatttgtcatcaatcagaatgtaaatttattcaggattggttagattcatgctgctttgggccaaaaggtgcttctaaatattattattagccccatataatgggagtacctatcataaagtaaaaggagtatttcacttcatgtgagacatttttaatttttaaaggttg

SEQ ID NO: 119844 - DNA, 139 bp, Homo sapiens
aaactcgtacctaagaatcttattctccctgggtttggagctgttgaagagtattaagcaagtgagtggcatgctcacatgttctgaagagtgtttcctggtagtgatatagaagatggatttgaagggacagtaaagg

SEQ ID NO: 119845 - DNA, 422 bp, Homo sapiens
ggtgtgtagtaagggaaagtacagctgaactggtagggtgaagttcatcagctcaggtgccctcgccaaacctgagcttgtcaagccggctgctggaggcaaaatggaaatatagaacctgtcaactcctctttgagcataaacacaagtgtgagccgatgatctagaatccagatttactcaattaattccgtcaacaagtaagcatctagctcctctatacccagtgaagagtggaggggactgggaagaggccaggagaaacagaagacacggcacctgccctcagggaggagtaggtctatgagcatttataaagcaaccacaaataagcaaacacacacacagagtctaataccaagaccagtagtggggaggcgcagtggttagacacagactaggttcgtactctgatcttacca

SEQ ID NO: 119846 - DNA, 115 bp, Homo sapiens
cccgcccttcttgggtgcctactgtgtgtgagttctgtacagcaacatgatacagagatcacaaaggctgagcccttgcccacagtgtaggagacaggaggaaaaggaatgcaac

SEQ ID NO: 119847 - DNA, 300 bp, Homo sapiens
gaatactgacagtaaaagaagaaaacatttgtagtgcttgccaaagggtaaagggggagtttctcttgctttgtttaggtgtaaaacgttattctctattatcctgcacaccgaagtattgccagcatctttagaagggaggtagacatactgtttgcattttcaaattttaaaattgaggtagtggctcatgcctgtaatcccagcactttgggaggctaaggtgggtggatcacctgagatcaggagttcgagaccagcctgaccaacatggggaaaccccatctctactaaaaatac

SEQ ID NO: 119848 - DNA, 699 bp, Homo sapiens
acttgaaggagaaagtggtcggaggtcgtgcgcttcagagcagcctttgctttcttactgctccagtccacctccagcgcttctttaacggggcagaagaccaccttcttcttgaccatcgttgtctcagaagaatcaagttttactctcttggtatcaggcccatcttctactccttggctaactttagcaactttagttttctcctctacaaactcatgttctcctagattggcaaatgtgtatccatggtagctaaaaacatctcctgcaaagaacttgatgctatttttgtgacagatctggtcaaccttaactatgacagccctggagcagcaagtcaacacacagcatcaaattgagtgaaaaatgactctggtttcttctctatatcctcagtgtccaacttcacatccaccatggggttaagattctgagctcgctccaaagaggcttcagccctatttcggccaacagacccaatacgaatcaagaactgagctccgggttcttctggagatatctgtttgtgatccagcatggtcagtcctttcactcctgccaggatgagattcttggcaatttcagccccgagtcctttcatgcctgcaagaagcacctgggaggcccgcagccatttcggggcctccagtccccaaaggcagatctgctggtcatactgcgcctgcctcctcctgg

SEQ ID NO: 119849 - DNA, 387 bp, Homo sapiens
gtgttctgaagtcctgcttctccccagaatatctgccccctagagctgcagacccttccaggcctagcccttctccctaagcaggagcagccaggcaggaagatggtttccgccttgaggttggaagttagcagtatgtgaccctggagggttgtcacagacgtcattggagaggtgctccggagtgtttattaccatggctgctaggaataattggggtcatcaggaagtgcttcaaggactgtgctctccttgacgttgtcggtactgcctgtgggagccagctccttcatgtactaacttcctttctcagacgggagagctctgctcttgctctaactggagttttgcgcaggctcgtagagaccccatcctaactagtgccca

SEQ ID NO: 119850 - DNA, 823 bp, Homo sapiens
aggcgggcagatcacgaggtcaagagattgagaccatcctggccaacatggtgaaacgctgtctctgctaaaaatacaaaaattagttgggcatggtggtgcgcgcctgtagtcctagctacttgggaggctaaggcaggagaattgcttgaacctgggaagtggaggttgcagtgagctgagatcacgccactgcactccagcctggcaaaagagtgagactctgtctcaaaaaaaatttattattattatttttttattttttttaggatatggggtctcactatgttgcctaggctggattcaaactcctgggctcaagcaatccttctgcctcagtctcctgagtagctgtgactacagatgtgcaccaccatgcccagcttttatattatttttaaaaatgtctatacacgtattctcttcatgaagatgccttttaggaattaaaatttctgatcatatacctgaatgagaccactcttctggcagtctctctgtattagtctgtttccctattaaatatttttcttcattttctcccaagggaggtttctcttgtagccgtgtagtcagtgggatgaaatactatgagataattacttgaaatgattttcatatcccccaatctagagcctagataagcccaataacttagtaatttttttttaaattagaaaattgtaatttttttgtcaaagtaattcttgcacatgttgaaagctgagttgttcagaaggcttctctatgccatcgcaccaccttcattagtggtagctctgtgcctctcagtaatggccttaaaccactctttgttgattca

SEQ ID NO: 119851 - DNA, 879 bp, Homo sapiens
ggggccttgactgtatggatcccagtctggccaagggaggggctgggaacgtgtccttgaggaggcgggaatgtgctctgggggctttagggccaccttcttttttgctgaggtgaaaccatcaagagagagaatcttgctgggtacagtggctcacacctgtaatcacagggctttgggaggccaaggtgggaggatcacttgagcctaggaattcaaggccagcctgggcaacatagcaagaccccatctctacaaaaaaataaaaagatagctgagcatgatggctcgcgcctgtggtcctagctgctcaggaggctgaggtgggaggatcgcttgggcccgggagctcaaggctgcagtgagctatgattgcaccgttgcattgcagccttagtgacagggtgagaccctgtctccaaaaaacaaaagagaatctagggaaactgctcttgtttgggagaacaatactgaaaaatgcctccagtaaaaaaatttggaagatacaggaaaattcaaagaagacattgaaagtgcccctaaaattccacctcccagaattagttctggcattttggtgtccctcctcctggaggttgctctacctgcatttgcaggtggtgttctagccagccctgggtgtgccccgggtggctcacccgcaggagcaggagcaggagccgccagggttaggagtcagcctgggagtgagcttggaacgtgccagtcaggccattccctgggtgtgaccttttatgactgggttttttacatgagtaagcttgcacttaagtgctgttttatcttctcctctttgcatttaatagaatgtttatctgtatttgtcaataaacatcgacttgtgtggattgtactgcc

SEQ ID NO: 119852 - DNA, 262 bp, Homo sapiens
aagtgcaaagatattcaacacagtactatgttattaaaaattacaagtaagccaggagcggtggctcaccttatagtcacttctcactttatagtcccagcactttgggaggctgacgcaggcggattacttgaggccaggagttcgagaccagcctggccaacatgtaaaaatacaaaaaattagccaggcttggtggcacacgcctatggttccagctactcgggaggctgaggcagaagaattgcttgaacccgggagg

SEQ ID NO: 119853 - DNA, 509 bp, Homo sapiens
ttcctaccctccctgcaaccttgactctcaggccctccagactcaaccttccatcaccttcacctgacttcagggtcctcctgcaccccttcctcctcgtagccctccacttgtgcagtcagtggtcaaagcctattgattctactccctcaatcatttatactttgcctcctctcttccattccttgccaccgccatgtccgggccctttaatgtctttagaaatgtgtgccatttatgacattccagtctgagttcatgctagctgtgcagcttccgacaagtttcttatttctccaagcctcagtttacttttctgtgggaaggaaataactaacagagtctcactatttatggcagttttgtctcataaagtcactgtgaacactgaagtagtgaatactgaaacattgttactggaggaaatgcaaggtgacgtctccgtgagcacgttttcttcagcccacctgtacgtacctttggttttctgtttgtttctgttgaaccat

SEQ ID NO: 119854 - DNA, 152 bp, Homo sapiens
tttagtcctttctccgtattctaatacctgagaacacaccgggaatcctagcaccctcccagcttggagggagatgatcagccctcaggctttgggtccagaaccatggcccctctgggagccctgtttctactctccccttggagctctat

SEQ ID NO: 119855 - DNA, 282 bp, Homo sapiens
ggttcaggggctccatgtcaccggcccagctggccccaactccagctctggcttccttggaatatgtcctcgcagccctgcttctaatttattttttttaattaagatgcattggttttttgctgatcaaaaattctgacatatggccgggcgtggtggctcacgcctgtaatcccagcactttgggaggccgagatgggcggatcacgaggtcaggagattgagaccatcctggctaacacggtgaaaccccatctctactaaaaatacaaaaaatcagcc

SEQ ID NO: 119856 - DNA, 751 bp, Homo sapiens
gggaagaaaaagaggtttaattggaattacagttccacatggctggggaggcctcagaatcatggcaggggtgagaggtatttcctacattgtggcaacaagagaaaaaatgaggaagaagcaaaagcagaaacccctgataaacccatcagatctcatgagacttattcactatcacgacagtagcacaggaaagaccggcccccatgattcaattacctccccttgggtccctcccacaacactgagacatgtgtagactcaagctgtatatttctctgtttgcaaacttatgtttattaatttttataaacactccagagcaggggttggcaaattctttctgtaaaggtccagatcataaatacttttggtgttgaggaccatacggtttcagtcacaactactccactctgccactgtagctcaaaagctgacatagacaatacttaaataaatagacatggatgtgtttcaataaaactttatttacagatacctagagcctgttgaccgctgctccgtggcaaaagcattttagctcttcctgctaccaacacatggcggtagcaattgtgactggttatcacctgatttgttggggaatgtttgcactgtttgtgttacactgaagctattttacaaatgttgttatcgtcatgaccaacaataagtggagaagtggagaagtggcgagtgagcttattgaaaatgctggttagaagagacatatggttatgatggaatccaa

SEQ ID NO: 119857 - DNA, 411 bp, Homo sapiens
ggggtcccaaaatcactaagctaagggaagagtcaagctgggaactgcttagggccaacctgcctcccgttctgttcaaagtcatccctctgctcactgagaaaaatgcatatctaattgcctcctttggaaaggctaatcagaaactcaaaagagtgcaattgtttgtctctcatctacccgtgacctggaagccccctccctgtcctgcttttgcctccagttgtcctacctttctgggccaaaccaatgttcattttacatatgttgattgcttctcatgtctctctaaaatgtataaaaccaagctgtgctctgaccaccttgggcatatgtcgtcaggaccgcttgaggcagtgttacaggtgcacatcctcaaccttcgcaaaataaactttctgaattaactga

SEQ ID NO: 119858 - DNA, 187 bp, Homo sapiens
ctatgatttatagacctagtggactttctctgggttctttagtgctttacagccttaaatgttttctaattcagttgtctttactaggtgttctgtttacttcttgtcaatgagaagtaaaacctgagggagaaagatcttgatttttgcttctgttggtagattagaaaaaaagcatgtaatactt

SEQ ID NO: 119859 - DNA, 657 bp, Homo sapiens
cgacagacaaccacatcttcttttgcatcgccagccgagccacatcgctgagacaccatggggaaggtgaaggtcggagtcaacggatttggtcgtattgggcgcctggtcaccagggctgcttttaactctgttaaagtggatattgttgccatcaatgaccccttcattgacctcaactacatggtttacatgttccaatatgattccacccatggcaaattccatggcaccatcaaggctgagaacgggaaatttgtcatcaaatggaaatcccatcaccatctttcaggagcaagatccctctaaaatcaagtggggcgatgctggtgctgagtacgtcgtggagtccactggcgtcttcaccaccatgtagaaggctggggctcatttgcaggggggagccaaaagggtcatcatctctgccccctctgctgatgcccccatgtttgtgatgggcatgaaccatgagaagtatgacaacaacctcaagatcgtcagctgatgcccccatgttcgtcatgggtgtgaaccatgagaagtatgacaacagcctcaagatcatcagcaatgcctcctgcaccaccaactgcttagcacccctggccaaggtcatccatgacaactttggtatcgtggaaggactcatgaccacag

SEQ ID NO: 119860 - DNA, 391 bp, Homo sapiens
aacatctgtaatctcattgcccagagatgagttgagaaatgaaataacattaaattgccactgactgtaaaatgtagtgtattgttattgccacattatcagatctttccttgctcttgaactaagaccctcatatttattgagtgcttgttgtgtgttagccagtgtgtaggatctgaaatacaaaggtgaataaggcaagcatagggtattcctggcttctggaagtgtctagttagttctctaggccaggtgggcatggtggctcatgcctgtaatcccagctacttgggaggctgaggcaggagaatcgcttgaacctgggaggtggaagttgcagtgagccgagattgtgccattgcactgcagcctgggcaacagagcaagtctc

SEQ ID NO: 119861 - DNA, 516 bp, Homo sapiens
ctttttttcccaacctttctttagtgaagttgtattacttaagttaaaaaggaaataatgagcctggtgtggtggctcacgcctgtaattccagcactttgggaagccgaggcaggagcatcacttgaggtcaggagtttgagaccaggctggtcaacatggtgaaactccatctctactaaaaatacaaaaaattagctgggtgtggtggtgacacctataatcccagccattcaggaggctgaggcaggagaatcgcttgaacccgggaggcggaggttgcagtgagctgagattgtgtcactgcactatagcttgggagacagagcaaactccgtctcaaaaataaataaataaataaataaacaaaatttaaaaaggtaataatgtaagaaaataaagagcatggagaaagtagaaaaccagataacctcggtcctattttgttaaattttgggaaatttcagtatctgcattgtacagatgacaggcagaatcttgagaagttaacacttt

SEQ ID NO: 119862 - DNA, 482 bp, Homo sapiens
aactttgagtctaccttaatcccatttattttttagaatactatttttgatttttaaattgattttagattccagtaaaacacctctctttatagttctagtcgggctcagtggtgtgcccctatagtcccagctactcatgaggctggcaggaggatcacttgagctcaagagttagcggctataatgtgctatgattgtgcctgtgaatagtcactgcactccagcctgggcaacatagcataaaaatattgtagttctagcttggggaaatcctttattagaaaaggaaattatagggaaatttcaaaatgtagacttgattaggaaactaagcaaactaatgaattttcattagtctatagattagatctttgaaggggtgagccttaataatggcttgtgttgacaagcgaatagatttttcttttaatacttcttaaatatattaaggattaataaatttagctatgcacataagt

SEQ ID NO: 119863 - DNA, 417 bp, Homo sapiens
gctttaggattaggcctccaatgtatggctttatactaacacaggatcatgtaagtccctaccgttaagactggctgctggctttttctctcaagccaaccagaaggctttccattggacagaaataacctgggttgtaactgtcccctttctactaaaaatgagcttctgggtgcggtggtgttcactgggtctttacaggacaactgctctgatcctgtagggtcagcccttaactattctagactgttgaatgtcaggtctcagcaatcagcaatttggctactgacccaaatgccggagaaacaaggctggggggaaaatatacaggtatcaaaataatgaagccatacttctttcttttttggtggggagggagttttggtaagacaacatgtatattactctctgaaaacc

SEQ ID NO: 119864 - DNA, 302 bp, Homo sapiens
agcttggtactcccttctcttactgtaaattgttctgtatgactattgttgattactagggatgattgtcttctagaatttagttcatctgatggggatgccttattaagtattttttttttaacctgtagtgttaatgtttggggtttgatcatttctgagacgtttatctaaagacatgtagacagagggttcaaagttctttactgtatggaaaagatgtagaggaccaggtcgattattggcagtaaaattggagatttcccttgcaaaagttgaccatgttgtgctgttatcccagg

SEQ ID NO: 119865 - DNA, 733 bp, Homo sapiens
tgggttcaagtgattctcctgcctcagcctcccgagtagctggataggtgccaccaccacacccagctagtttttgtatttttagtagagatgaggtttcaccatcttggccaggctggtctcgaactcttgacctcaggtgatccacccgcctcagcctcccaaagtgctaggattacaggcgtgggccaccgcacctggcctaagagttccttttctatacatccttgccagcatgttattttttgactttttaataatagccattctaactgaggtaagatgatatcttattgtggctttgatttgcactttcctgatgattagtgatgttgaacattttttcatatacctgttggccatttatgtcttcttttggtgaatgtttattcatgtccttcgcccactttttaataggattatttgtttttcactctttagtcatttgagttacttgtatactctggttattagtcccttgttggattaatagtttgcagatattttctcccattcaggaggttatcttttcactctgttgattgtcttctttgctgtgcagaaactttttagtttaatatagtcccatttgtctatttttgtttttgttacctgtgcttttgagatgttagccataaaatctttgtctagaccaatgtcctaaagtgtttccctgtgttttcttctagtagctttatagttttgggtcttatatttaagtctttaatcccac

SEQ ID NO: 119866 - DNA, 452 bp, Homo sapiens
gacattcttatccaatggacatggaaaacatagttctctaatatcttcttgaaaactatattgcaatgaaatgcagccaatgaagagatgaatcaaaatggagaacttgccgagttggatggatcacttgaggtcaggagttgaagaccagcctgggcaacatggtgaagcccagtctctactaaaaatataaaaattagccaagtgtggtggcacacacatgtggtcccagctactcgggaggctgaggcatgagaattgcttggacgcaggaagttggaggttacagtgagccaagaccacaccactgcactccagcttgggcaagagagcgagactctgtcatctctatggcaaattaaactaggaaaattcttaggaaggaaatgggataaattcctggaacacatggcaacctcccaagactgagccagggagaagtcaaatccctg

SEQ ID NO: 119867 - DNA, 404 bp, Homo sapiens
ttgcgacctccaccacccctgcagtgggctgccagctgagccacctgtcttccactgtatctactgtacgaacttctccagctctgctctgttttctcttcctcagcatccaccccgtgacacgtagtggtggctgatgtcgccacagtaccatgaggttaacaggtcctccctccagcttccctcatggtggcagcctaacctgcattgcagccgttcaccggacaccgcaccagaccctcaaaacccatccaagactgtgggaggagtaaacaacccagcccagttaagaggagatgccgaatttaatgaaccctatttgaattgcagggctgtgattcctcttacctttaacgtgaactcacaggcggattaaagtgaaataaaacctaccatttgagtta

SEQ ID NO: 119868 - DNA, 317 bp, Homo sapiens
acccccacttactatagttctgtgatcctggacaagtaactgaatctctccgtgccacaagtaccatgaggttaacaggtcctccctccagcttccctcatggtggcagcctaacctgcattgcagccgttcaccggacaccgcaccagaccctcaaaacccatccaagactgtgggaggagtaaacaacccagcccagttaagaggagatgccgaatttaatgaaccctatttgaattgcagggctgtgattcctcttacctttaacgtgaactcacaggcggattaaagtgaaataaaacctaccatttgagtta

SEQ ID NO: 119869 - DNA, 584 bp, Homo sapiens
attattaacatgtattgttatcacattgttttaaggaattataatggtacaagtttactttcgcatttcactcttttattctatgtgaggatatctacacaagatatgtttcttaatattaatcaacccttgatggatacacatattattagatagatttagcatttcgggactttgaatgtacctggaaacatcacatccaacaacttaaatgaagatgaaaagagaaccaatatagtatgaagcaggaattttattactttgtgcactgccaaagagcctgtccccactgcgaaattactcatgatacactcaagatgttttactctctagtctattcattataactacaaaattaaataacgctttacaggaacgcttttaatgattgctcctcgttattagagatagcacaggaagaaaaagcctttattttaaaaaatagtctccttaaaaggtatatctgtcacgagttctgtatcctgctagtctctagggaaggcagatggatgtgcccgttcccatgtgcaggggaaatgtaacagacctgaccgagcctctgataaatcttctctatagtccca

SEQ ID NO: 119870 - DNA, 214 bp, Homo sapiens
aaaaaaaatcacactggcagagaaacagaacacacccttgaagactggaaaaccagcaaatataactgctaactagacagcagtgggagagttgcggagcgcctggccactacattaacacaggagagagcagacctagccaggtataaacaaactccaagatcacaccactgcactccagcctgggcaagacagagcaagactctgtcttagg

SEQ ID NO: 119871 - DNA, 235 bp, Homo sapiens
gcagaagcccaggcctcccaaacacccccaagtaagctctcccacacaaaacctggacccctaaacccaggctgaagtattcaaatctcagtttgttggctattgcgggcggggccccatagagaagtcctatgcagtggaatctccatccctcctgctgcccagtcagcccagctgctttattttctcacccacccatttctgcagatttccctctctgcaacccggaggcccg

SEQ ID NO: 119872 - DNA, 508 bp, Homo sapiens
cgagatcatgtcattgcactccagcctgggtgacaagagtgaaactctgtctcaaaaaaaaaaaaagagattgacacccccaattcagtgtcaaaagtcttatcttggaaagggtataatttccaattaagacagagaattttttttttttcactacaacaaaattatgtgacttttctcacccttctctagatatctaattagcctgcaagctaacactctaaagacatgaaacaggctgggcttatgtctgtaatcccagcactttgggaggctgaggtggaaggatcactgaagcccaggaggtcaagaccagcctgggcaacatggtgagaccctgcctctacaaaaaaatttctaaaaattaaccagatatggtggcgtgtgcttgtggtcccacctactcaggatgctgaggcaagaggatcacttgagctcaggagattgaagctgtagtgagctgtgatcacaccacacaccacacactccagcctgggtgacaaaggga

SEQ ID NO: 119873 - DNA, 580 bp, Homo sapiens
aaatatttatgtacttttaaggtttagttttgatttttaaaaagcgggtagaagcttaactattaaaaaaaaaatgcttcagatcaagtggtaacattccaagttcactgcagttagctttattggaaaacatggttttgtcttttaaagaaaatcaaacgcttcctaaaacatttcaagaactggctgatgttacaactttggccagcagaacccatcgaagccaccgaggcgaggggctggtgttagtatccggcatatcgtgttacacaggagcttcgccagcttctcccaatggcgccatctcatgtagctatcctaagacgtattttattttgagccactttctcagagggaattgggtgggtgtggtcgtaagaacacctagaaaataggggtgaaacctttatggggccagggagccatggcagagggtggagtgggggatagaagccttcagactcctccgccccagccactctgcacctggggcctttcagctgttaaaatgaaaagccaattatcttctgtaaatgagggaaaaaaagaaggaataaaagtgtctattatgtatgctgat

SEQ ID NO: 119874 - DNA, 198 bp, Homo sapiens
cacacccttcagcacatgataccatttgacatgcagtcagagccatttaacatgcagtcagaggtattatgaggagggaaggtgttctgaaccccagaaggctgggtgctgtccgtgtggccttgcagagatcacagatacgcttagaaccccagtttgctcagtgttttgtataagcgaaactcctgtcttcagaat

SEQ ID NO: 119875 - DNA, 179 bp, Homo sapiens
aagccgagggctctcgctcttctggtctcctgggtctgccctacctgaagacatgagtggtgagttggctccaagtaaaagcacagagcatgtatccactcgcccattccctgacaaataatgacatatactgcatattttccaagcatggcaaagttgtaaaggttactataatgaaa

SEQ ID NO: 119876 - DNA, 269 bp, Homo sapiens
ggccagatgccactggaacagaggtgccatggttagcaaaactgagtcaaagaactacttatcttgtgtggtatttttatctaaaatccactttgtggaaaacaaagggatgatttctgaagataagccatgctggaaaataaccactcgattgtattttcttcatgtctggaatttttttttgtttcacattgggttatttattactgtctctttttctcaagaagtgattggaatgcttttcttctgttgaaaaacaagagaaagtt

SEQ ID NO: 119877 - DNA, 577 bp, Homo sapiens
gcagttccccaattagatagcatatgttgttccacatactgctacacgtttgtgcccaggttttcctctgcttaaaacacccctctcatctttatccatctggagaactcctgttaatttttcaatactaaacaaaagtgtcaccatttcagtcaagctttcctcgatctctccagatggaactgatcatcttcacacaatttggtgtatttactcatttacatatttgccttcccaactagtcctttaattccttgatggcacagatgtcttattcctttttctatatctagcacttaagcacggtcttgagagagtacatgggtcatgtactggacagatctcccagacaaaaaatcaacaaagaaacatcagacttgggccaggtgcagtggctcacgcctgtaatccagcactttgtgcggcgaggcggatggatcatgaggtcaggagttcaagaccagcctggccaagatggtgaaatctcatttctactcaaaaatacaaaaattagccaggttggtagctcatgcctgtaatcccagctactggggaggctgaggcaggagaagtgctt

SEQ ID NO: 119878 - DNA, 134 bp, Homo sapiens
tactcttacttgtagctctctgtgccctcttaaattgtggcattagtattttaagtgattgtgtttttattcttttataaaatatacctgcacacactcgcccagacatttagtctttgctgtgtttcagttca

SEQ ID NO: 119879 - DNA, 482 bp, Homo sapiens
ctacgtaactatggcagacggaccaggaaggattctagattgctcaaacgttggatcaggatcagacttcttataggatggttgctaaatttcacagaggaaatccatatccagcctgtttacctgctgtcaaagtgagcattcaaagggacaccccagtggctccccacttccaggcctcttggcaagtcatgcctccaagtcattggtggcatcctgcagctctccactgacagcaatgcttctgcagactgcgtctgcatactcttgtagtgctggttcaagactgggccaccaaagactcagctgagaacataacccaagaggtcaccaaagaggtgttgccgcctttatgtggtccccttcgggatggaggatttcttcaatgttattaaatagcattgccggtcagaatattcttgaaccctatggcaaacgtctctccctcgagagtggatttgattcttggacagagccagtgg

SEQ ID NO: 119880 - DNA, 218 bp, Homo sapiens
cttcctcccgcagcccgtctcacttttttaagccttcagagtcaactgcagcaaacacgtcactaactagagcccagcgtctgttctcagctcaggtgtaatttttggaggtgactgacgcagggggaagtgccgtggggagcactcgttgcatttagacagaggcagcgacactttggtgttggggtgggtctgcttgggcctgtggttaggcacga

SEQ ID NO: 119881 - DNA, 368 bp, Homo sapiens
ggaaaaccaaagacttggatatgtagatatctttatacccattactcatacagtcattttataacaaaagtgtgattaataaaacgctgtgtatgtgaaattaagaattgctgagactgggcgcggtggctcatgcctttaatcccagcactttgggaggccgaggcgggcggatcacttgaggttaggagttcgagaccagcctgaccaagatggagaaaccctgtctctactaaaaatacaaaattagccaggcgcagtggcacatgcctgtaatcccagctactcgggagactgaggcaggagaatcgcttgaacctgggaggcagagcctgcagtgagccgagagcacgccattgcactccagc

SEQ ID NO: 119882 - DNA, 461 bp, Homo sapiens
agatttgtctactctctcccattattcaatcatttatttaagttagtatgaactcatggatatttattatatactttagattataatctaatattattttatttgtttttcttaaattggccattggtgctttttcagttgggttcctgtgtccctttgacgtactcccactattgtggggtgtgattttagcacgctgctacttgctggcactactagtacttccgaatcatcttatatagcccctccctggtccctaaattggataatgctttttaactctcatcataaagatcagtattgaaaaggacacactgagtgtctattgcataaagaccttgtattaggaatacgactttttaaaaagcctccttttggatagatcttttgctttagctgagaaaattagacaaatacatacaatagcataatcccatttattaaacataatattagcctaa

SEQ ID NO: 119883 - DNA, 400 bp, Homo sapiens
aagcaatttaacaatgaaccttaaccagaaaagcaagagcaaaacaaacacaaaattagaagaaaacaaataataaaaattagagcataaataaataaaattgaaataaaaatcaatgcaaaagaacaatgaaacaaaaagttgctttttttcaaaagttaaacaaaactgacaagcctttagcaagactgagaaaaaagagacaagatacaaatcagaaatgaaaaagacattacaactgacactgcagaaattcaaaggatcattaggggctactatgagcaactctatgccaataaattggaaaatctagaagaaattgacaattcctagacacatacaacctactgagactggaccaggaagaaatccaaaacctgaacagactaataacaagtaa

SEQ ID NO: 119884 - DNA, 799 bp, Homo sapiens
cagagcctaccctatttattcccagcatggacctaaatccacttcagccaaaaatgaacaaagaaatgatgaagaacagagcctgtttctttctcagtggtgtactcagaaaatggatgcaagagtagaagctgatcctcgaggcttgcaaaagtggggttctttctgaaagtgaagccagcagccaagagccacccttcagaagatagaaggaagagcagctgcatgagtgatggccacagcaatgcatgggtcctgtctgtccacgtagtcctctccatctgcccgtagcttgccaggaaactttctataataataccaatacaaccaaagactattattctgaacagaaaacaagaaatacagctggagctatttcctatctacctgatgaagggcactaccaggcggtcactctggctctgtccaccgatgcctgtgcccactttgtgcgacgtagcttccatggagacaagagcaatggtaatggaagaagaaagtctggatgtactcttgcagaagcagaaagcttcatggaacaatattaatcttctggtcatctctgtgctggtctagttgcccataaagttgtcagattgactttggatttaaagcctgaaaatgagtcccaaggaaatccgttgacatgaggcccaaggaagacagtttttggaaggggcaagcataatgatttggaatgatgcctaataaaataaatggttgaccagaagattaataatgtgttggtttctcaatagaagaggaggaaaacatgtttttaagattcttaccaataagg

SEQ ID NO: 119885 - DNA, 396 bp, Homo sapiens
ttacacatcacatagtgccaatcatttacatgaaaatgctctgtatactatgtattatagtttgtctttgctactgaagataactttttccagcactcttctaacttattgcaacatgttaatcaaatcagagcgagatagtgagaataagtgaaaagagttcttaaaataaaaaaagtctcatcatgtcttctgatctcagcggggaaaaaaagaaaataaaaaatgtcttagtttgaaggagtcaaatgaacttgggtagtggaaatgataaacactaactcattttatgacatccttacaagaactgctttaaatataagtgaagtggttctgtaacactcttggactaatcagaatttgttctgttctgtgaattaaagtccaaatatttgg

SEQ ID NO: 119886 - DNA, 652 bp, Homo sapiens
agcgggaggaggtccccatggcgtcgttgccgctactacctagaattggtgaagaagaggagtttagtgccaaggtgggtgcaagagtgaaacaaaggcaacacatccacatgcactggacagggaaatggggttacttaaaggttgtttcaaaatatggacttaggaaggagaaagaaacaagattaaaaaggaacaagtaactaggagagaaaaatatgaagaaggttatggatatgaagatgcatttttggctgaaaaacaaaagtactcactttcctagcctctcctgtagccaaaggaggtcatctgacacaattttggacaaggagacaaagttcaactggacagcactgctctaggctgttgcagattaatgagactaaggaggcttgataactaaaggcaatgtgtcatcctggattgagtcctggaccacaaaaaaaggacatcagtaggacatttggtgaaatttaaataagagacagagtctcactgtgctgcccaggatgatgttgaacttctggcctcaagcagtcctcctgcctcagccttccaaagagctgggattacaggcataaaccactgtgcctgccctggctgggcaatggattttagaggccaataatgattcaacttttgagataaggtg

SEQ ID NO: 119887 - DNA, 373 bp, Homo sapiens
ccccttctttactcttagctcctcacagtatattacaattgcttccccaaggcaggaactgcaccttttattgccataatattataccaaatgtcatctctgtgcataacacgttatgtatgcaacatgtttgttgaaatagccgaattgtttcactagttatctgatagtttaactactcaggccaatggtcaagtcactcttgtctgggccctagcaactctctgcatgatgcatattggaccttgaagtcctttcaagatgaactacacagactggtgacatattcaaaaatggtgtgtatttgattttattctattttttttctttttgagacatggtctgtgtcgtccaggctgaagtgcagtggtac

SEQ ID NO: 119888 - DNA, 282 bp, Homo sapiens
ggtcttgtacctttggacaataaaagggatggtggtccttgtccagtgatatgataaatgtaccgtttaaaccagacagagctgatttctgggatagctggtccaatatgctgaggggtgcagctgctgatgggccggatttcattggtgaggggagccatggaaacaagcagcgtgtagtttttgtttaaaactctgctgaaagttccagggtccagaccaagaaggctttcacagtataagagatccagaggaaaaccataattgggttggtctggctgt

SEQ ID NO: 119889 - DNA, 755 bp, Homo sapiens
gaaaggagttgttgttttgtaagggattgaggtttgggagattaatcagacaccatcagcagggagagcacctgtgtttttgtgaagaattatgccgaggtaggtaacggatggagaagaaatttgagctttggagggggatacccgatatcctttggagaataaatgctgaaggagcagaagtatgtcttgttgagaagattcaaaggaggggctacaaagaagaaggtcatcaatatattgaataagaagacgatgattccagatggaaaaaatggaaatgtaagagggaattaacaacactggaattagtaaacccatgggtaactataaattatatgcttgaaatgtttatagactttaaattacatgaataacacaagtgcatgccatcaatagctgcaaaaccttgttattgggattaagtagagtttcgaggtcttaaggttctagcagtattagaaagtggtcaaagtgatcaaatctgttaggaagcaatgagtaaaggatgcatgttgtcttctcttgtgaaattactaaaagaataatataatatttaatcaaagttaatgtaacagtgaaataataaatatccaattaatctaaaagaacgcaagaactgtagagaaaaggatatgaaaatagagaccaattcctaacaagacaaagtaaagcataaaaactagacaaacaaacagaatccaaatctctacccagcagttggtgttactcttccatctccttatggcatatgc

SEQ ID NO: 119890 - DNA, 267 bp, Homo sapiens
gctgagaatagactcatgggaaaagaattccaaagtttatgaaacagtcaaattggcatttaagtgaccctgtacataccattgcttatctgcattgctttaagctcatttagttagcaagattatgtattaaaacaaatagtcacagcagacaacaagtattttaccttcaataaatagttactgtcagattatcaatgaagcagaaacttcttgatttttttttctaaaaaaccttgcatttagtgcattaagcagagtagtatg

SEQ ID NO: 119891 - DNA, 329 bp, Homo sapiens
tttcactgacagcacttgttaaaaaaaatcacttcgatatatttttttgagacgggatctcactgtcacccaggctggagtgcagtggtatgatcacagctcacatagctggagtgcagtggtgtgattgcagccttgacttcctgggctcaagtggtcttcctacctcaggctcctgtgtagctgggactacaggaaaataccaccatgctccgatgatttttaaactttttttttttttttaatagagacagggccttgctgtgttgcccaggtttgtcttgaactcctgggcccaagttatctgcctcagcctcccaaagtgctcg

SEQ ID NO: 119892 - DNA, 426 bp, Homo sapiens
ggactttacagatgaggaaactgaggcacagagaggttcacttgcccaagttcactcagctgggaggtagtgggcgggatcccaccctccacagtctgtgctccgagctactgtctcccatctcccaccacctgcactgcccacggcacctgccgggcccaatctgtcaccctctgctctctgccctcggcctctggtccctgttcccctggaacatgccaaataatatttcttttttctgagacggcgttttactctttttgcccaggctggagtgcaatggcgtgatctcggctcaccaaaacccccatctcccaggttcaggcaattctcctgcctcagcctcctgagtagctgggattacaggcatgcgccaccaagcctggctaatttggtattttccagtggggaaagggcaccgcaaaa

SEQ ID NO: 119893 - DNA, 823 bp, Homo sapiens
agaagtaagtcggggcgctgcgggccgggacaggggtgggcgttcgccgggggcgtgctggggccgggcgagggtcaggcagtccaccgcgagcctctgccagggaacagccgtctcctgagtcgaggcctcggggctgcagccgggacggccggaaagccgcctccagctgccagaagggggcggggcttccggtggggcagccatagggacctcgcggcccagggcagcgcggcctccgcgcgccgctggcgttcttccctgcgggacccgggctggctcggcccggctgtcagtgcgcacgcgcggcgacgcggcctgagaacctgggttcgcgcgccctgtccccctcccacgggcccctggccgcgtgccccgcgcccatgttaggggcagagccgcagggcctactcgccgctaaaaagcacggttgactaggacctgcgtgtggggaaaggcttcctaatgacccagcgcctaagtgcccggaaaaaaaagactgatacataataacattaaaaaacggaagctggggccgggcacggtggttcacgcttgtaatctcagcacttcgcgaggccgaggcaggcagatcacttgaggtcaggagttcgagaccagcctgggcaacatggtgaaaccgtgtctctgctaaaaataacaaaaattagtcggtcgtgctgctggtggtgctcctgtaatcccagctactcaggaggctgaggcaggagaatcacttgaactcgggaggtggaggttgcagtgagctgagattgcaccgctgcactccagcctggacgacaagagcgaactccgtctcatt

SEQ ID NO: 119894 - DNA, 1298 bp, Homo sapiens
ctccataagggcaggaacatctgtctttttcaacaatgcatttttggggcataatgctaagtaaatgatcctcaatataaatgtgctgaatgaaagaattaatggatgaatgaataaaagtgaattgtgactacctaggaactatggaaaagatgaaaagagagttcaggcagttggcttaagttgctgaatacctgaaaattctcctgtgataaagacccagccagcatcctcgagtgtggaccacgttaagggaaagcttgaaggaaaagagagactttgcggaccccaattaaatagtttaccctagaagaatagaacctatttggggtggggtgagtggctgcaagagggacgtttccccaggacatcatgcacaaaaggggcttcaaatgtagtcttttgacttatctccaaatgaagatttctatgttggatgcatgtagaaagctttcatattgaagcagagttttcagtgaagttggaaaaagaagaacaaaggtgaagatatccacttagcaactctcatcatttgtgtgtcaccatggcttcagagacagggatacacatttagtatgaaaaggaggcttggaggttagcggagagttggtggtggtatagagtaagaagaccttttcaaagtttgctttcttgaagagcactagtttccctggcatggccaatggggtgtttgctgttcagtagctataacttaaagtgcttaaaaccacaagatttactgctcctaaaggtaccgaatacagctattcagtatgcatgcacatttgtttacagttcttcagtgctgaggttataaaacaatatggaccctcaaatctcatggaaaaaccagtctaataccatgttagagaaaaaagagagtggatgcaaatggttaaattaggtactcttgagggaccaagtgtcctatcacacatgtatgaatctatgctgtcaattactctcattgtttcttcactaaaacctccctttcagaagtttatgaaagaggaatttaagattcaactttggagtaagattacatgactcttaagatccatttcagggccgggtgcggtggctcatgcctgtaatcccagcactttgggtgaccgaggtgggtggatcatgaggtcacacgtttgagactagcctgaccaacatggtgaaacctcatctctaccaaaaatacaaaaattagccggtcgtggtggcacgtgcctatcatttcagctactcaggaggctgaggcaggagaatcgcttgaacctgggaggcggaggttgcagtgagccgag

SEQ ID NO: 119895 - DNA, 939 bp, Homo sapiens
taggttaagtgtttcctccttagagttcttccttgatttatcttccccccagtctaaagtgccagtcacattaatctgttttatttctccatacagcactcatcactgattttttaaaaatctattttgccatctttctctctcactggaatattatgtgctcatgaagaagctccttgtctattttgttcctgatcgtctgcgctgcataacagattacctgtctcatagaaggtgcacaataactattttgttgcgtgaatgaacacgggaggcggagctgcagagagctgagatggcaccactgcactccagcccgggcaacagagcgagaccctgcctcaaaaaaaaaataaaaaataacagactaagataacaagagaaaattctttatgcaaatgtttgccattcaaaaccattctgccttacccttgaaactaagaatggtgaaagtagaaggtggagatctctgaattctattttaatgttagaccactgtataattattaatattattccataatacaagtgcaggcccttgaaagtaggtatcccgtgttttgctttttaaacattctccccttccccaacatgtagcatctgctacaaagcctgtcagagtattgttcattcatcagatattttcagaacatctgccacattccaggcactgttgagcactagggatacagcagaaaacaggtcagacaaggtccttattctcataaatgtattctagtggaaaggatggaaaacaagcaaataaggatttcagagagtgagtaatgcactgaagaaaatacagcagggtaatgatagcagggtatgatgaaaatgaagccatattagatggtctgattggaggagtccccagtagcaggggacatttgaactgagccttgaacgataaagagataaccatgaaaagaactggggaaa

SEQ ID NO: 119896 - DNA, 457 bp, Homo sapiens
tttttttttaaatgagacgtagtttcactcttgttgtccaggctggagtacaatggcatgatctcagctcactgcaacctctgcctcccaggttcaagtgcttcttctgcctcagcctcccgaatagctgggattacaggtgcctgacaccatgccaggctgatttttgtatttttagtagagacagggttttaccatgttggccaggctggtctcaaactcctgacctcaagtgattcgcccatctcagcctcccaaagtgctgggattacaggcgtgagccaccgtgccctgcctagatgacatacttttaaaacttattctcagttatccttaagttcaagtcaatgaaaggaagttggaggttggcagtgttggctgaatgtgaaaaagaaagcttttcctcaagataatgaacttgaaaccgttaggagtttgaactgtcaggctaaatgac

SEQ ID NO: 119897 - DNA, 204 bp, Homo sapiens
cagtcacccctgtgataacttcatctgggagggtgccttggaaagggttgctcttcagacctggtacagtcacccctgtgataacttcatctgggaggatgcctgggaaaggggtcactcttcagacgtggtacagtcacccctgtgataacttcatctgggaggatgccttggaaagggttgctcttcagacctggtacagtc

SEQ ID NO: 119898 - DNA, 510 bp, Homo sapiens
aggaaaatgggaggtgaggttgtgttaccagcgagaagtcagctttgaggagaagtcctccacagaagagagacaagggcaagggcttacttacttgtgggttaccactgctctcacctggaccctggtaggctttggaaaagccaaggtctccccacagttgtaagacatttcatcctcgactccaaggtctccacggagtgagaagcttctggcagctggcctttcaacaagaacaagaacaggaatttttattctgttgcaaacagttaactttttctcttttgatcctttacgcatagatattgaggtaatatactcatcctaataatttgttgatggtgacagtgtgtccccatgcctgaagacataatgaccttttatggttcttaccatttttcttcattcagtattgcttctcttcatctgaatatatttaaccatgtctccaactctttttttcaaaagtgctcatccttcagcttatcttgactctggacagtcttcatc

SEQ ID NO: 119899 - DNA, 113 bp, Homo sapiens
agtgttaagttcagggaaggaattgagttcggagccaaactgcccaggtttgaattcagctctgccacttgctagttgtgtaatactgcttttttgtttggtttggtgtattt

SEQ ID NO: 119900 - DNA, 314 bp, Homo sapiens
tgacctcaggtgatcctcccacttcagccttttaaactgttgggactacaggcatgagccgccgtgcccggccccttttctcagttttggaacccagtttttttttttccacagaaagtgcttgtgttcctccatctctggtgcagcaattcccagtcatttcctgcccagtaaatacctaaccatggccacgtggcttctcagtacccttccctcaactgacccacttcagatccccgagtgccagggtgggactccctcagggctctgacccggcaccaggggcacccctcaggctgttggtggggccgttg

SEQ ID NO: 119901 - DNA, 259 bp, Homo sapiens
tgctccacctggaacccccaatgtgccagattgtcagcctctggtaccatgtgccagattgtcagcctctgttaccatgaactgccttcaccacacccattcttgggataggtctgtggattgttcagatgccctttgatatggtttggctgtgtccccacccaaatctcatcttgaattgtagctcctataatccccacatgtcatgggaaggacctggtgggaggtaattgaatcaagggggtgggtttttcccatg

SEQ ID NO: 119902 - DNA, 572 bp, Homo sapiens
cttccctgggtggccgtaggacaaagggacgggaagtgcgtggtgtttttctctgtcttccctacagcaccaagcacagaattgggtgcctttccagccgtcggtccttccttgctgagatgttagactggaagatgagaaatggcatcattttaaggcattaaccgttccagccaaggaactctcatttcacaagttcagtgaactcttaactttggcctctgctgcaggggacagcagcgtgatgtttcagaacctgactttggagtcaaacaaagcctggatttgaagcccagttctgccacctgctagctgttggcaatttacttaacctctccctgcttcagtttcctcatctgcaaaggtgctgcacttcataggtttgttttgaggattaagtcgtataaagcacggacgaagccttgatgcccggagttactgctcctgttactctcctggtacagcacaggtctccctcaccacagggccaggggcagggccaggcagccttgtattggtttccttaaacggggttgatgccgggacttgggtttggctcaagctcaccctgt

SEQ ID NO: 119903 - DNA, 389 bp, Homo sapiens
tattcctattaaaatagggccaattgttctgatgtcccgtagcaggtttttgccttgatccagacccagttcaggactggacgttgtgttcagttgtcccactcctgaccccgcttgaatctggacagatcttcagtctcccctcatttttcatgatgtcgatgcttctgaaggtgcaggccaggaggttgtagatggtctctctgtttgggtttgcttgtgtttcctcatgttgagattcaggtggtgccttttgggcagggacaagaagtaggtgatgcagcgtcctcagtggtccacgcaggaggtggacatgctaacagcaccactgggtgaagctgtgcgcctcttcctctgtggtggccccaaggtttagtagtaacgtgatt

SEQ ID NO: 119904 - DNA, 575 bp, Homo sapiens
aggcaggagaatcgcttgaaccagggggtggaggttgcaatgagccgagatcgtgccattgcactccagcctgggtggcagaatgagactctgtctcaaaaataataataataataataataattgatggaattaagaaatattgaaaaatatataccattcactgtgagaaaaaagttcaactcctcaaactgggaatctcagtccattttatgtatgaaggtgatggcctgcactaaccttttgaggctgctatcatcctatgcctattttatgggtgaaaaaattgatggacagagaaagggagcattttcagtatatcacctagagaatcagtgacagagtcagtctatgaatcttgtggtggtgggtggccttcactgtagaaaggatagattccatgatcttttgtaccatcaaataaaatacttacaaacaaatgagaattagccatttgtatttgttttgttttaatagtgcaaataagatgtcattctagacctaaaaaaatgtttttctcccttttgtttccaaattttaggataaaaggcaaataaaaatctgttcttagagaa

SEQ ID NO: 119905 - DNA, 391 bp, Homo sapiens
cccatttcacctgcttgtgcctcctttcttgtgtccttctatacatccatccatccatccatccatccacccatccactcatccaccacccacccatcctcctgcctatccatgcgcttgtctttccttccttccggccttccatccattcatccatctgcccatccacccactcatcctctcgcccatgcacctgcgtgtccttccttccacctgtccttttatccatccatccatccatccatcttgctcactcctccactcacacagtcactcgttccctcagactcatttatggcccacctgcgaatgggtgtcctgacttgcaccactgatgaagcccactggggcttctcccacgaggaggtgcgctcttgccctctctgatggg

SEQ ID NO: 119906 - DNA, 394 bp, Homo sapiens
acagaggttcggtagcctgccccaggtcacacagctagtaagggatggagctggggagcaaattcagggcctgtgagtccctcctcttaatgatcatgcttttgattttagggatacttactgttacttattgctggtacattttccagtttgcatttgccttttgttcatggtgtcgttttatacaagagctttaactttttgtatgggagaactaagttttatttattagtgtaatgcctcaaacataacagattctcaaatctatgtgttgaacaaatgagaatgaacccatcagcagtctgttgatggtgatgaccttttatgtagtgtaatatgtatctccttttaaagggattcccagggcttcataaatgagttactctttggtttt

SEQ ID NO: 119907 - DNA, 279 bp, Homo sapiens
tcaaggtgcttgccatctggggcacctcctgttatggctgaattgtgacccctaaaagaagctgtcttggagccttgaccccaatacctccgaatatgacagtttttgaaactcaggcctttaaagaggtgactaaggttaaacagggacattgggtgggccctgatccaatctgaccggtgtccatattataaaaagggaatgtggatgtgcagaccattcccctgcccgggagggaggccggaagtagctccttccctcacagcctccgaggggggc

SEQ ID NO: 119908 - DNA, 366 bp, Homo sapiens
cgtagctgagattgcaggcgtgcaccaccacgcctggctaattttttgtatctttactagagatggggtttcaccatgttggtcaggctggtctcgaactcctgacttcgtgactcaccagcctcagcctcccaaagggctgggatgacaggcgtgagccactgtgcccagccagttctgactttttaacttgtgatttgacttttcctgtctgaagtctttctctgctggacgtgagttgttgaaggtgttgcttttctttgtagacaattagaggcgctcatgcactgggcaacagagcgagactccgtttcataaaaacaaagaaacaaacaaacagaaaaaaccaacaaaacaaacaaacag

SEQ ID NO: 119909 - DNA, 533 bp, Homo sapiens
ctgtaggtgctttgatgtgcgtccactagagctaaacttgatccttttcagcagcgggaccgctcttctgccaccaaaactgacaacctgcgaggcctaacagctgaaagaaataccactcagaataaactgccaagggtagcaggtgtggctttgggagccaaggataaagcttctagtttagcacagtccggttcctatcctcagatctttctcctagcctgctgctccagcccagctcctcatagctgatgtccccactatcccaatcttagtcaggggctcctgtcattaccaccaacagagttagtgattacaaaagataaagagacaaaaaaagatttccaaaagagcctctgccctaggggaacactttacgtatttggaagaaagtgggtttctaaaggttcagagaatatgctgacctcacatcctgaaaaagcttggcaactgaagagggaatgcaaccctcatggcttgatgttgcttaggtcaacaagcaaatatttcctggacacctaccataggctcag

SEQ ID NO: 119910 - DNA, 809 bp, Homo sapiens
gctatgtggcctcccccgccccaccagttagatgggggtctcactctgttgcccaggctggagtgccgtggcccaatctcggctcactgtaacctccacctcccaggctcaagtgatcctcccgtctcagcctcctgagtagctgggactatagtcacatgacccctctaaattaactcctggctaatttttgtattttttgtagaggcaggatttcgtcatgttgcctaggctggcctcaaactcctggactcaagtgatctgcccatcttggcctcgtaaagtgctgggattacaggtgtgagccaccattcctggccttattttgtgtccagcttctcactcagcgccacgtttccaaggctcacctacgttatagcctggatccgggcttcattccgttttatggctgcgtagtattccactgcatgggtggaccatgttttctttatccagtcatcggtaatggacatgtgggctgttgcacagaagggtcctttttattttctccctagctttactgaggcatcactgacaaatagaaattacatatatttaaggttacatgatattttgatatccattatgtgttgtgaaatgattactacaaccaagctaactaacaacatatccaacacctcacctagatacctttctggtgtgtgtggtgagaacacttgagtctaattcctcagcaagtttcaagaaaacagtatgctataataataatattattattttgagacggagtctcgctctgtcacccaggctggagtgcagtggcacaatcttggctcactgcaacttct

SEQ ID NO: 119911 - DNA, 705 bp, Homo sapiens
atcagtgcacggtgccaccatccttccaggccctccagccagaaccccaggagctgaaagccttgactcctctttctctcacccctaaatccagttcaagaaggcaggatttcgtcatgttgcctaggctggcctcaaactcctggactcaagtgatctgcccatcttggcctcgtaaagtgctgggattacaggtgtgagccaccattcctggccttattttgtgtccagcttctcactcagcgccacgtttccaaggctcacctacgttatagcctggatccgggcttcattccgttttatggctgcgtagtattccactgcatgggtggaccatgttttctttatccagtcatcggtaatggacatgtgggctgttgcacagaagggtcctttttattttctccctagctttactgaggcatcactgacaaatagaaattacatatatttaaggttacatgatattttgatatccattatgtgttgtgaaatgattactacaaccaagctaactaacaacatatccaacacctcacctagatacctttctggtgtgtgtggtgagaacacttgagtctaattcctcagcaagtttcaagaaaacagtatgctataataataatattattattttgagacggagtctcgctctgtcacccaggctggagtgcagtggcacaatcttggctcactgcaacttct

SEQ ID NO: 119912 - DNA, 320 bp, Homo sapiens
gcaatcatcccacctcgatcacccaaagtgctgggagtacaggcagaggacaccatgcccagccacgctattggttttaaatgtcagatttctttaagaattctcatagtacttttctgccgcagaatttatagcacatctgtccatcctttcaataggcactcaaggaaatgtatctattcatatgctcaacttcaattgattagtctcatatgatttttcagaaccccttttgctaacccctcttggccatttcattaataatgtatttgacagagattgaatcaggaaataaattcatgacatttcagttaactagt

SEQ ID NO: 119913 - DNA, 719 bp, Homo sapiens
catagacgacacaagcaaatggaaacacatcccaagctcatggatgggtagaatcattattgtgaaaatgaccatactgccaaatacaatctacaaattcaatgctatgcccatcaacacccccaccattcttcacagaattagaaaaagcaatcccaaagttcataaggaaccaaaagagagcccgcatagccaaagcaagactaagcaaaaagaagaaatctgaaggcatcacattaactgatttccaactactataaggccattgtcaccaaaacagaatggtactgttataaaaataggcatatacaacaaagggacagcatagataacccagaaataaacccaaatacttacagccaactgatctttgacaaagcaaacaaaaacataaagtgggcaaagggcaccctattcaacaaatggtactgggataattggctagccacacgtaggaaaatgaaactggattctgttctcttaccttatacaaaaatcaactcaagatggatcaaggacttaaacctaagacttgaaactataaacactctagaagaaatcattggaaaaacccttctagagattggcttagggaaggatttcatgaccaagaacccaaaagcaaatgcaataaaaacaaagataaatagctgggacttaattaaactaaagagcttttgcatgccaaaaagaacagtcagcagagtaaccagacaacc

SEQ ID NO: 119914 - DNA, 414 bp, Homo sapiens
tccacactcttcacttagatgaataccatggggggttgcaagtggcatgacagtgacctgctgagacagagctcctgaacccgcgtgctggataaagaggtacagaccttctttttgccaaagagagtgaagtaaagtgccagaaagatcctgcctcaaaagcctgtcttgccaattcatccctaaaactgctgagggggttaatctcaaaagttgtctgatttctctgtgaaatgcctatggaatgaaagctaaaataactgaaggaaagaaaaagaaaaaaaaagctagagaaacagaagaaacagccaaagacaataaaagataaagaagattctgttgttttgcattgtatcaataatgctttcaaaatgcaagaagcacaaggattctgctgaattttttttacaaata

SEQ ID NO: 119915 - DNA, 413 bp, Homo sapiens
aaatagtatattttaatctgctaatggcttagaatctgtaaagtacaataatcgcataagagaaaccgttagtctgtagcctaagtcattatgcctgaacatcaaaataaactgtgtggagctgtttttaatttctcctgctcaacccctggagatttctgtttcagaaaatatttcttagaaacttgagctttaaaatgctcttcaggtgatactgatacatagtcagattagagaccctgtaccttaaaattaaagcactttaaagaaggaacacttagctaaatacagaaagaattaatataattggctggacatggtggctcacgcctgaaatcccagcactttgggaggccgaggtgggcagatcacaaggtcaggagactgagaccatcctggccaacatggtgaaa

SEQ ID NO: 119916 - DNA, 855 bp, Homo sapiens
ccagaagccagatggtcccgggacaggcccagccccagagcccagagatgctgctgctgcccctgctgctgcccgtgctgggggcggggtccctgaacaaggatcccagttacagtcttcaagtgcagaggcaggtgccggtgccggagggcctgtgtgtcatcgtgtcttgcaacctctcctacccccgggatggctgggacgagtctactgctgcttatggctactggttcaaaggatggaccagcccaaagacgggtgctcctgtggccactaacaaccagagtcgagaggtggaaatgagcacccgggaccgattccagctcactggggatcccggcaaagggagctgctccttggtgatcagagacgcgcagagggaggatgaggcatggtacttctttcgggtggagagaggaagccgtgtgagacatagtttcgtgaacaatttgttctaaaagtaacagccctgactcagaagcctgatgtctacatccccgagaccctggagcccgggcgcctgtagtcccagctactcgggaggctgaggcagaagaatcatttgaaccaggaggtggaggttgcagtgagccgagatcgcatcactgcactccagcctgggcgacagagcaagactgtctcaaaaactaaaacaaaaaaacaccaccaccaccaccaatgtctgattaaatctaagccacggttccattttggggcaaggggcagggtgtgggtgtggtggacagagaacgggctccagccaccatcagctgcacgtcctggtagcacctgagccattcccagtctcctgtgctgggagatcatcatctaatcctgatgatgacgccctcctct

SEQ ID NO: 119917 - DNA, 729 bp, Homo sapiens
tctgatcatttttattgctcttttccaaactctacattccccatcctctttgaaactttgaatcctgatgtggttgggtggtgggttctgcttaacttgttaaaagtgaccctaatgagcctgaagtggttggtttcattgcattagggtctttagacagctcagggagaaactgccactctgtaagcatttatcacctctactagggaaaaaaggcccaggcctgattataatggttcagcaagtggaggagaagatattgttagcttcaatgtctttggtattggatttcttttcgttcctgcattaataactcataatttattgatcttttccctaatctttgttagtgatgttgccttaaattataaaggacagtaatacaatattagtaacagttctatcaatatgctaaaagctttacctcctcctactccttcatttttaatcaaaataggaccttccctgaaggattgggttatgagtacaatgaatttatgttggtctagtaggcaatattatgatttaaaagcatttctcaatggccaagtagataaggaattatatgaaattctacaaataccaagaggtatttcagtggtttacaaatattgtctaccttctgtatgcataaaatgtcatagattggtgccagtgaacacacacacgtatctcaggtgaggattggcctcagagaaattactggtacattctagaagacaaaaatta

SEQ ID NO: 119918 - DNA, 544 bp, Homo sapiens
tccaagcagccactgttctggtatctatcatcaaatgctagttttgcctggaagtggctttaatataaaagtaattagatagtatgttatgtctgagaagccccacttctttcctctgtttctgctgccattgccccagtctctgaccctgccactcaatcactctataaacacagcaggtactaggggtggctctgggctcggcactaagacaatgcccccggtaaagccacagtctagcaatgacagtcaaccacgtatcagcaacagccctgccccacacgtgctgactgcgcacaaggccggcgccgtgaacgtgctgtcaacagtgatctcactgaaccctcatggcagctctaggatgcagacagtagtatcacattatccccattttacttttgaggaaactgaagaaggcaaaggcaggcctcgagatctgcagtaacattgccaggaatgtttgagaaagcaaacttctccagagtgaggcagtctgccagagctcggaagccagagtccctgttagcaggggctggggggaccg

SEQ ID NO: 119919 - DNA, 193 bp, Homo sapiens
catgccattctcctgctcagaaacctctaaaagtttaccaatacattaaataaaacccaaatttttggccatgacccataaatctctgcatgtctgatgcttgcatgtctgcgtaaattaacacgatcttgcattcttccattcttttctcttgttttactccagccaaactggtcttcttgcaaaattctca

SEQ ID NO: 119920 - DNA, 607 bp, Homo sapiens
ggcgcctggggcggtggccgccggaccaaagctggcctctcccggctcctcctcctcgctccccaaggcctttcccaccgcgtcattgtctcggtttatctgcagatacgtctacctagcagtcagcccagcagcgtaagtggtgaccagtgtgggcctctttgatcctgagaccgaaggctcggccactggccctctccatttgttccttgttgccctcccttcatgattcaatccattaattaggacttttcctaccagctggcagttcagagctccgcatccccaggcctctgagtcacagttcctgccttcatgaaactaggagttggggccactgcattctactccttcgggactattgtttcatttctcagtccctcaaaccctttattggatgaacatggggttaggacagcggttctccactgcaacagttttgcctcccaggagacatttggcaatgtatgaatcattttcagcctctcatctggggtgagatgtcattggaatctacagatggtggagggcacaggtgagtagaggccgggaatactgcttcacgccttacagtgcgcaggacagcgccgcacaacaaagaattacc

SEQ ID NO: 119921 - DNA, 226 bp, Homo sapiens
ttgctgagctcagtaaatgctatcagtcagatgctcattatagaaattcagaggtttggccgggtgcagtggctcacgcctgtaatcccaccactttgggaggccaaggtgggtggatcacctgaggtcaggagtttgagatcagattggccagcatgccaaaaccctgtctctactaaaaatacaaaaattagccaggtatggtggcgtgcgcctgtgatcccag

SEQ ID NO: 119922 - DNA, 469 bp, Homo sapiens
cactagcaagagaaaaagaccccaaaaggattgtcagcttgaccattcttttctcccaatcactttcccttttctcttgtataggtttgtatcctccctaaatcttatgtaaatagcgctaacgacaaatataatcactaccaagtgttcaacccacagctaacagttttatcatccagtagttaaagccatttcatccctaattgtccagccaaaagaagacagccatgtaaactctcatttgtggaaactactgttgatagtcagctctccacaagttaaaaaaaaaatggcatttattcagcgttcagccctaactgtatgccctttagcaactgcttcagtacccaaacggttatttatctgaaaactgattttagaaaagctcccaataactaaagagcaaaaatatttaattgtacacaagtgagaaaagcaaaatattgcaacaagttttataattttttat

SEQ ID NO: 119923 - DNA, 317 bp, Homo sapiens
ggggagggggcaggtcaagacagagggagcaagagagagacgagtgaggtcccagattctcttaacaatcagatctcacataaacttacagagggagaactcccttattactgtggggtgggaaccacgtcattcatgaggattccacccccatgacccaaacacctcccactagatcccagctgcaacactagagatcacttttcaacatgagatttggagggaacaaatatctaactatatgaaaagccaagggaaaaaaggagctggttcttcaaaaaggtcaataaagttgacaaacctctagcaagactgac

SEQ ID NO: 119924 - DNA, 536 bp, Homo sapiens
caatgaattcctgttgtttaagccattaggtttgctacattttgtgaggacaacttggcaaactaacatacggcacatctctatttagaccagccacatttctttaattttttaattttaatttttttttaacttttaacttccggggtacatgtgcaagatgtgtaggtttgttacataggtaaatgtgtgccatggtggtttactgcgcagatcatcccatcatcccatcaccaagttactaagcccagcatccattagctattcttcctgatgctctccctcccctcaacccccaacaggtacacagtgtgtgttgttcacctatgtgtccatgggttctcatcagtcagctaccacttataagcgagaatatgcggtgtttagttttctgttcctctgttagtttgctgaagagtaatggtttccaactccatccatgctcctgcaaaggacatgatctcattcttttttcttagactagccacatttcaacatcctcatgtggctggtggctgccaacactgactcagaag

SEQ ID NO: 119925 - DNA, 575 bp, Homo sapiens
tgcgggacgctctggtctgcgcgacactctgggctgggggacactctggactggggcaccctcagggttgcgggacgctctggtctgcgggaccctcgggactgggggacactctggactgggggaccctcagggctgcgggacgctctggtctgcgggacactctggactgggggacactctggactgggggaccctcagggttgcgggacgctctgggctgggggaccctcagggctgcgggacgctctggactgctgacccctcacccacacccagccttttctgccccatccgccctctgtgcataacctgggggtacaacaggctcgcgctgtggcttcagttgtgcttccgtgtcccgggggcttccaactgggtcctgcaggagctgagacaatctccctgcttcgctttcatcctccgggcgtgtcctgcttcttcccgagagaagcctctaagatatgacttgtacaggaatcatacgctctctcctctctctgtctcccaggctggagtgcaggcgcgatctgggctcactgcagcctccaccccctggctcaagcctcccaccc

SEQ ID NO: 119926 - DNA, 216 bp, Homo sapiens
cacgttgaacatctccactctgattgctgttccctttggcattacaatgagagaaagagagactgacatactatgaagaaaagatttaaagttgcagtatcgttgcacattccttgtattggctatgaaatattgaactgtcagaatgtgacacttggttttttaagcaacctttcttgtttgaggtgtttgcagttcattcctttctcccccatt

SEQ ID NO: 119927 - DNA, 665 bp, Homo sapiens
ccaccattatctcacaccctaaatacaccctaaatatctattcccatacatattttccagatttctccttgtataaattagaaacctcaagtagcttttttaccatgtagcacatctcctcatgagtaaaactttgtacctcatctttaggggctgctgggactcaagtctagctataggtctagaagcaaagaggtgtggtgggggtgggtcctgagaagactcagcattctctggcttagcagctgcctagaggaaggccattatggtttcctcaggcaatgcagagtcaatcccctcagacaaaggtggaaaggccagtgtaggggggatgctgttactgggggtgggaggccatttctgctggcaaacaagactcatcagaatttaggagctcaacgtccccagcctcatcagggtcttcccacacatccccatccaaacgtatagaattccatctttcccaaccaatgccctcattttaacagcagataccttacaaggctgatatttcacctttgattgtaattcagctaatcacatgatgagagtatgtgtttgattttgtgcaatttcagacctttggcaacagaagagaagattctgacttagggcatatttagaagctcttgggctatttatggcagagctggggccaggaaatc

SEQ ID NO: 119928 - DNA, 265 bp, Homo sapiens
gactgagggggtgggtgcagggtggggaatagtagctctcgagctgtcatgcaaactcagtgagggagacgatgctcacgctcacgttgcacttgccacatgccaggcaccgttctgagccttttgcacatattaactcactgaatcctctcccagccacatgaggtagtactgttattatcctcattttccagatgagaggatgaggttaagtaacttgtccaggggctcagtggtcaagacagaatttccacccagacagcgt

SEQ ID NO: 119929 - DNA, 252 bp, Homo sapiens
ctgtacaggtataatctcagacatattgctagtctggttccagatcactaaaataaagtgaatattgcaataaagtaagtcacaaaaactttttggcttcccagtgcatataaaagttacgtttatactatagtctattaagtgtgcaatagcattatgtctaagaacaacatatataccttaattaaaaaatgctaacaatcatctgagccttcagtaagtgataatctttttggtgttggtgggtctacc

SEQ ID NO: 119930 - DNA, 482 bp, Homo sapiens
attcgcggccgcgtcgacagcttttccatttctgcacacatggccattaccagttcgataatagttgttttgagtctgtagatcatttgtgtaatattgtgtattagtaagatttagacttcctatccatgaatacaggatgccttttcacttatttttaccttctttgctttctttcagtagtctttctttctaatcactctacaagtatttcacctccttggttaggtttattcctaagtatttagttattttagatgttattataagtgggattacatttgtcatcttcttgttggatcattcactgttggtttgtattaacaaaccaatcatttgaatattggccttgtaccctgcaactttgatgtaattattaacactaatagcattcttggagattatttctgattttctatatgtagaatgatagagaagttctgtttcacacctattttctcaagatagtctatattgatact

SEQ ID NO: 119931 - DNA, 423 bp, Homo sapiens
tacttttggtctttgatgatggtgatgtacagatgggtttttggtgtggatgtcttttctgttaacacacagaccctcagctaagagtcctttctgttaacaaacagaccctctgttaacagagaccctcagctgcaggtctgttggagtttgctagaggtccactccagaccctgtttgcctgggtaccagtagcggtggctgcagaacagcagattttcttgaaccacgaatgctgctgtctgatggttcctctggaagttttgtctcagaggagtacctggccatgtgaggtgtcagtctgcccctactgggcggtgcctcccagttaggctgctcaggggtcaggggtcaagaacccacttaaggaggcagtctgcctgttctcagatctccaggtgcgtgctgagagaaccactgctc

SEQ ID NO: 119932 - DNA, 414 bp, Homo sapiens
acatgtacctatgtaataaacctgcacgtactgcacatgtatcccggtacttaaatttaaattttgaaaaaatgagaaatgattttatttctcataaagatagaatgacacaatttatgataaatagcaaaatatcaccaagacacttactaagtgcagtctttcttatgacattaatattacatttttctacttttgtgaatttatgtgactccttgttaaaggaaatttgcatttcatagaatttttaataaactaagatactagaacttatctaatctctttttaacactgaccttgaatagtcctaatttctactatgtgatttgtgctctgtatttatctggagatttaattcaagagacaaagagataagacatagtggtatttaaaaatgcatcagcttccgctaaa

SEQ ID NO: 119933 - DNA, 461 bp, Homo sapiens
aataaagcctagatttgcttttgtggggagacctctttactgattttctgtagttttgaagcatagtctgggaattcctgaatttcagaaattacattggaatgcttatttgaaacacatcttcaaattaataaaattaagatattgatttacatccctgaaaatattttcctatctgttacagatttggggagatgttaggtgtgaggaatagtgttcctcataggatggttgctttcagagggcagtgtttgtggtactcctgtggcagaaaaaaagaattcgtttctcttaccttaccattaggtaaacatagtaatttagggggaaattcttgtaagtattagttcacaaaaataaatgacctaagaaatttatctgccaataaatttttaaaacgttgtgtttaaaaattactctggggcggccgcacacagtggctcatgcttgtaatcccagca

SEQ ID NO: 119934 - DNA, 437 bp, Homo sapiens
tttaagcagggaaatggcatgatttggtgtgtgtttttagaacgatcactgtgaggagattggattgtaggtggccactgcagggggaggcaggagagcagctgaggctgttgccctcttccaggcaggagttagaagtggcttgcctgagggtggtagcacagtagacagggagtagtggtcacattcaggctgtgtttaggaaataggctcttcacaccttcatgatggactgaataaagtctgtgggagaaagagaagaggcaaagatgactcctcagggcttgggcacctgagtggatagcattcatatcgttgagatgggaagagccggtttggggtggaggagaatcatgagatcttgttttgccatcttacatttgagatatgagtatgtcagatagtgtgatctgaagcttggtggggagagaggacag

SEQ ID NO: 119935 - DNA, 524 bp, Homo sapiens
caacctctatgcaaaaccagtccccctgggcccctgaacaggagtcctgagaggatccagatgcagggccatggtcaggcacagtggaagggactcagcgccaaaccactcccaaccctaccctgagaataccagcagctccccagaaagcagatggcacaagtcctttccagaaaaactgaacagtctagggaacagccatccagatccagacatttgggagtccctccaaaaagcctggcttgccatttagctaccatccaccccaccccaaacacagaacttcttggctagccttttagggcctcactcagatatagacagatagccttgggtaaggcatctgaggagggcctccaacataaaagagataaactggagtaacagagagggaaaaaaaaaaaaaaagaggaaccagataatacgtgaaccaaagaaaacttagaccccaaaaaccctaatttccttggaaagataagatgatgcatccaaaaaataagatgctatgaaaaagtcatgataaa

SEQ ID NO: 119936 - DNA, 488 bp, Homo sapiens
tgagatttgggtggggacacagccaaaccacgtcaatcactaaagccagtcttcagtgacctgccatctcgatccttcggacactccatggaggcttctggacgcagcatctgtgctgctcagggccgttcctcttctcattggctgatgtgctctgtggcatctgtcacaggttttaattgaaggtcagcagtggcaggtaagccaccagcatcatcagcttctttcagccttttggaacaagagtgaaattggccaaggtcactgctatgacaaacggttgcttggatggagcccttccgagcataggtatttatagatccaaacatttatggaagccccaccatgaattaatgcacagtggcgttctcccaccaaacctggagaaagtcttccaaacatttttggaaaacattttaaatatttaaaaaattgtttctattctgtttcttagtaacagcagtctaacacaaaactatagcatttct

SEQ ID NO: 119937 - DNA, 438 bp, Homo sapiens
gtggtttttagttctgaatcactaaaataattgtaataaactacagaaataatcttgccataatcacttacctatacacagttgaaaaagatactgtttgtgaaagaagtcacagtcaatgtgtttctgtagtgtcctatttatttacttttaaaatttctgtcttcttgagtttcttgtgctagtttcagtcattttgtttgtttgtttgtttgttttaatcaatagcccagagttagagttttagtatattgggaattcgtgccaaacatttgatggagcgacacaagagcatgagaagctggtataaagagcactaactgtgggaggcaagttccagttctggcatcagctaactttgtaaccctgaacaaatcacagaatgtctgatatagctatgggattggttttcaggtactgagctcaaatgagagtatc

SEQ ID NO: 119938 - DNA, 452 bp, Homo sapiens
ggtgggctgtctcctacccaggtggctggggactgctttataccatcccagtttaggggaaagaatcaaacttggaaaccctgctgccgatgtagcagcaccgacttttgtctcgcccactttgaagaggtcagttgaccctatacagcttctttgatatgtgacagaaaggaggtcatttgctgaaatgaaagacacattacaaaccagattttaagtgtgactctttccttcagctgggtcacagttcttactttgagccagagcaacacactttactggtcagataaaaatactctgccatattttagaataatgacctttcttatgctttggtgtctccaaatggttaaatggagaatatatccaattgacaggaggaattctgttcatcatttttactcttgtgtttatatcttctcataaaaaaaaaacatgtgaaaatggcatca

SEQ ID NO: 119939 - DNA, 264 bp, Homo sapiens
ggttcaggtgggccagttcttgggtctccaggtggcttgcttgggtgcatgcagtggctgcggtcggccaggtggatgggcaggttcttgaacccctgggcactggtcatgttgtgggcaatggcagtagcagtgacgagacaaccctttgtctccagagtggtccacacgggtgttggcagtggctacaacaggctgggtgggccagtctccagaccaccagttggcgcgtgcaggaggttgccagctgtggtggtagcagca

SEQ ID NO: 119940 - DNA, 432 bp, Homo sapiens
  misc_feature (399)..(399): n is a, c, g, or t
agtgctgggattacatgcatcagtcattgcgcccagtcagcaatatattttgattgattttttaaatctcttttgcacagattctttataaaaattttgcaaaaatatacataacatgaaatttgccattttaaccatttttgagtatactattcagtggcattaagcacattcacagcattgtgccaccatccccactattccttctgcgtatttagtattttcttgaatgtaattgatatgtaacaaattacatatatctcagatgtgtaatttgataagttgtaccatatttacacatcttcaaaagtttcctcatgaccatttgttatcctttcttcaaaccactctctgcctccaccctcccgagcagctgggattaaaggcacccaacaacanacccgctaattttcgtttgttagtaagtttttt

SEQ ID NO: 119941 - DNA, 736 bp, Homo sapiens
ggccagagtaagaccctgtctcaagacaaaacagaacacatctcttttttgtttgtttttctccattagattgacttggcatcttagcgtgtcagctgagctactttgcattttagttgtgcttatattgtcagtttcttaagcacggaccctgaccttaaaaattaaatgtttatgctcctcttccagattgggacttgactgagattgatccagggctagttaccatgtatttcctgatggaagaatgttaagtatgaatttgaattttaaatggcttttctgtgggtcgagttaatggagacaacctcattttagaagcaattgcatcttccttataaaataggcagatgtttagaatgaaggagatgtaagcaaggaaagatcacctaggactccaacatagcaagctatagggagcttaatatttcttgtttattggcttgatctaaatagatgcaattatatataagccatgtgttttagtttccatctttttctgttttgttttgttttgagacaaggtctcaatttgtcacccagtttggagtgcagtagtgtgatcttggctcactgcagcctcgacctcctgggctcaagcagtccgtcagcctcagcctctcaagtattaatagctgggactacaggcatgcaccaccataactggctaatttttgtatgtttagtagagatggagtttcatcatgtttcccaggctgtccttgaactcctgagc

SEQ ID NO: 119942 - DNA, 295 bp, Homo sapiens
tgccatctaacctgctgtcatctctggcatgtgcactagtatgggtgacagcatgagaaactgagatagggaacatgagagagtaaagtaggtttaagagggaagatacagagttgggtttggatatgttggtattgatgtacatacctataagatatccagtaagttatggatattatacacatgaagctcttgagagagatcttggctgtatgtgtctgtcatgggcttagagatagaaattaaagccccagataccaattaggaagaatcaagagaagaggactacttgaag

SEQ ID NO: 119943 - DNA, 572 bp, Homo sapiens
cttacgtatctttggaaatgtggctccaaggcctttcccagccaccctgcagtcctctccctatatctcggtagctgtagttaccagctagatccttctcccgtcctggtggaggtggggctccttgggctctgaaacactgccctttctcccctggatccaaccttctgttgcctgtgttgcattgtcccagctcctctgacttttgcccatgtgtaggtaaggatgggggttgtaggagaaacttcggggtagaaaagccacaggacagttgtgagggaggaagagggtgagaggtccatacataagagatcctggctgggtgtggtgactcatgcctgtaatcccaaccttttgggaggacgaagcaggaggatcacttgagcccaggagttcaagaccagcctatgcaaaatatcaaaacccagtttctataaaacaatacaaaaattagcccagtgtggcagtgtggtgcctgtggtccccgctacttggaaggctgagcgagatcacttggaggttcaggctacagtgagctggaataatgccactgcattccagccagcctgggt

SEQ ID NO: 119944 - DNA, 572 bp, Homo sapiens
ggattacaggcatgtgccattatgcctggctaatttttgtatttttagtacagacgggttttcatcatgttggccaggctgatctcgaactcctggcctcaactgatctgtccgcctcaacctcccaaagtgctgggattacagatgtgagccaccacacccagctcatttgcgctatttatagcctttaacagctgagtagagtgtacagaatttgaggtgtatttctctctgcccagtttcttcagaattcataaattatttgtgaattttcttttttttttttttttttttttttttttacatggcgtcttcctctgtcacccaggctggaaggcagtggcatgatcttgggtcactgcaacctccacttcccaggttcaagcgattctcttgccccaacctaccgagcagctgggattacaggcacttgctaccacacctggctgatttttgtatttttagtagatacggggtttcaccatgttggccaggctggtctcagactcctgacttcaagtgatccacctaccttggcctcccaaagtgctaggattacaagtgtgagccac

SEQ ID NO: 119945 - DNA, 635 bp, Homo sapiens
gttctcaacctttatttggtatactcatcacttggagaagttgctaaaatgcaaatttgcagattccagacctacagcctagagattctgattccataggaggggaatgaggcccatgaatctgggaatctgtacattagatatccattaatccatttgaattacaggataacaggaaaaagtacataaaatttatataagttccctttttttatactctttctctctcctctctctctctctttctctctcctctctctctctctttccctctctctttctccctctctctcttctctctctcctctctctctctctcccctacccccaaaatgccaaagcacttatattttaaaagttgtttcaaagttgtttgaggggtccattttcacttgtggcttttagtgaacagaaaaaaatataagaaggctctctattgtgttacagcgaggaaatgcatgcatttacacatttgtctacctggtctcagcatgaaacagagcccagaaaagtcttcaattaagaaggagaaagacaagcaatccagaaaataatttaagagggctttgtctgcttgggagccagctggcaacctgggttccagatcagtgagacaagaaagaagcaaaagggat

SEQ ID NO: 119946 - DNA, 656 bp, Homo sapiens
ttctggagactaatcttgtcaaggcttcttattttatttttttgagacagggtcttgctctgttgccgggcctggagtgtagcggtgccatcatggctcactacagccttgacctcctgggctcaagtgatccttctgcctcagcctcctgagcagctgggactacgggtgcatgccaccatgcctggctaatttttgtattttttgtagggacgaggtttcgccatgtggcccaggctggtcttgaactcctaagctgaagcaatccacccaccctaaggcttcttcttaatgtttctttccctccatgagacacaagattattattatttctttattgcaatttttttcagctgtcctagatgttttgacgtgccctaaagctgggcattaggaaactggtacactactgtactttgagagggtcaacattaatgaagattgcaacaggcttgggagcagggacacgtgccatgccgaggctgacagacagcctgagttgcccctcttctctactcgccttgcccaggctgtgctcatactatttatttaataattcttatcggtgtgcttatgtcagcagaaactttccaccatacacaggcaaaactcatgaattgaactgtttccaatggggcattctcttctggtctacc

SEQ ID NO: 119947 - DNA, 237 bp, Homo sapiens
gcttaatcactcaggcctggaccaaatggaggggcccaccccaagcacaactgccaggagggcagtagctatcactggtcacccctgcggaaacttgctgcccctacaaaggccttgagatgagtggagagagcctcgtctgagggtcaggaacccggctcctttccctagtcctgggggaccttgggcaagtcattaaatctccttttgcctcagtttcctcttatgctagccaga

SEQ ID NO: 119948 - DNA, 615 bp, Homo sapiens
ggaggcagaggttgcagtgagccgaggtcacgccactgcactccagcctgggggacggagcaaggctctgtctcaaaataaaataagcagagaagtaacagggtttacaatgccctaaattctaaattatcctacactttggaggcacagttcccatagaggacaccatccttcatagaggttcagggccagggaagcccctggtcaaggaaatggccttgtagaaaggggagcccctgctgcttagtggctgggctcatccttctttttccttgtggtggctccgagctgctgagccagctccctactaaagctggctccagggaagactgttctgtgctcatgaaattagactgaagtggtccctaggaaatccaaaaataaataaagtgtgtatgtgaggaagatgaacagctttctaacatgtattattctgaaccaacttttaatttggcatgaaattaatctcaggctagagtctctcaaaatattaaaataagtaaacactactgggcaagaataagtatatatagtaagaataattttttttagtttattgtaaaatatccaagtctattttaatttttaatctatcaaaataaaccacttgtaata

SEQ ID NO: 119949 - DNA, 361 bp, Homo sapiens
gtaaaagcattttcttgcaccacttccctgaaccgcagttcctacagagtgatgtgatgatggcccggtgatgcctgcatatgcattgggttgcactacggtggagaaactgcatgctgaatttaggggacccacgtcttttataataagctgcaagcaaacctgcccaggtgggagatgttatctttagtatacgggacaataaaatctgccttttgctctggagggagatactacctctatcttctaaggttactcactataataatcacccttgtaaagattatttagaacaagggcaaccagtgcctctactggcaagtgtgcagaaataggagagaaccatggggaattgtctctc

SEQ ID NO: 119950 - DNA, 413 bp, Homo sapiens
gagaatgtgcacttctagcaagttcccagaagatgctgctgctcttgaaatcacactttgaaaaccactggtgtactggaaaaagcacaggctttgagggccatacagacatgaattcaaatcccaaacctaccacttcctagctgtgtgactttgggtaaatttgtataactcttttgagtcttgggttcttatctgtaaactaggaaaatactactaacctcatggtagggtgatggttgcatagctttcctgttagaagagcccttagagtgggcccactgcatctcccttgcagtgtcctccttggttctgctttcttgtgcaacccaaaacaagtccaccccgccttatcaagcacctactatgtgccaagtgctctgtgaactttatttaatctttaccaccatgta

SEQ ID NO: 119951 - DNA, 504 bp, Homo sapiens
gaggcacagcctcatccctctccacacagttcatttcattcttaactgctcaattgtgttgcattggacatgaatagaaaagtaggccttgatgtcctcaacgtttcttcctgtttgtgtgaacagtctctagcctaaggaggtgctgatggctaggcatcttcacccaacactttagtcctgcgtcccattcatcacatagacgtcctgctggcacaggccctgaaagcttcaggatgagcatcctggtagccacggcccagaggaggcatcgcagtgtgtcagtgggatggtggtggatgtgtgaacgcacctccttgtctctgctgcttcacttaactgtagagaatggcagctgaagagccttatgatggttttgccttcagatgtcatcttcctgcttggctgggactgctggtcaaaaaatgacaggtccagagccctcagagactttcttttactggctgtttaattgcatcagacgagcttctcctctcactgcac

SEQ ID NO: 119952 - DNA, 323 bp, Homo sapiens
aggtgcccctccagacaatcacgccccttcctttccctacaggggaaaggagagtcaccattctcatccctatactcactcataatcatatagttactgacggaaacactgggtagaatcgctggcaccattcacttaactcacttgctgaatttatacacttgaatttaaatgactaaaataaatgcctggagaatgctactccactgtatcaagcaaatgttaacagcaagcagatacaatactagcagaccaaacaacacaaacaaaaaagcattaagaagggacaaaaaaaaaactctctcatgtgcataaaaagtaca

SEQ ID NO: 119953 - DNA, 158 bp, Homo sapiens
actctgtgtctaccaaaacaaaaaaaaatttttttaaacgggatagagtcaactaatgactcagagaaacacttccctcctgaaaaatggaatcctggacacaactatctggcttttacatccttatttatagatttctagctcccaatcaattcctg

SEQ ID NO: 119954 - DNA, 293 bp, Homo sapiens
ctatgttgcccaagccactctcccacctcggcctcccaaagtgctgggattacacacgtgagctgctgcaaatctctttttcaaaatggacttattttggagagtgttcaaagctacagaacagttgcaagaatatcacagtaaacaccttcatgctctgtcctagaccagcacccaacaatagtgtagccgctagctacatgtggctattttcatttaaaagtacatgaggccgggcgcggtggctcgcgcccgtaatcccagcactttgggaggctgaggcaggtggatca

SEQ ID NO: 119955 - DNA, 121 bp, Homo sapiens
gtcactgtcaccttgctcaggtctttgctcaactggaccctgtcatttccacctgccctgaccaacctatttaaaattatcacccagccaggtacggtagttcatgcctgtaatcccagca

SEQ ID NO: 119956 - DNA, 409 bp, Homo sapiens
tcatttgatgaatgggtggcttccttttattttattacaattatgagacttgttaataatgtatagaatttgtataatattaggtttaaatttcttttctgctgcgattttgttcgtttgtaataaaactatgaaacacactatttgagataatgtgaattcgccatttttatttttgatcagtttctaattaatacatttacttttggggggaaaagttgatcaataatgagctgaaatattgcctttagccctaataaagtatattttggaaaacaaatgttaccttaaaatgacaataacaacaacagcaacacaaaccttcacataataagagcccaaatgagatagtttaaatctagcttaagctctacttaataaacaacaataatgtataacactattggac

SEQ ID NO: 119957 - DNA, 313 bp, Homo sapiens
catataaacaaacaaacctttactgaaaactaatgacgaacacaaagggactatttacagaaaacagcgtgcctagccccatctagattataaacataactgcacactggctctaaggaccctgccatcttcccaggccctggcctggctgttctgccactccccacctcatgcctgaaactgacacaaaggaaccaatcctccagccaaagtaagcaattacaacgtgtagctgaaattcagagaggtgatctaaaaagcaattttgtaagatagctccaaattgggaagaaaacaaatttttgtattttat

SEQ ID NO: 119958 - DNA, 1076 bp, Homo sapiens
  misc_feature (20)..(20): n is a, c, g, or t
attaggcgcgttctgcgtcnagcaaacatgtctcccagcccctgagagcccctttgctacccgttcccccaagcaaatcaagattgagtcttcgggggctgtgactgtgctctcaaccacctgcttccattcagaggagggaggacaggaggccacacccaccaaggctgagaacccactcacacccaccctcagtggcttcttggagtcacctcttaagtacctggacacacccaccaagagtctgctggacacacctgccaagagagcccaggccgagttccccacctgcgattgcgtcgaacaaatagtggagaaagatgaaggtccatattatactcacttgggatctggccccacggtcgcctctatccgggaactcatggaggagcggtatggagagaaggggaaagccatccggatcgagaaggtcatctacacggggaaggagggaaagagctcccgcggttgccccattgcaaagtgggtgatccgcaggcacacgctggaggagaagctactctgcctggtgcggcaccgggcaggccaccacgcagaacgcgcgtgatcgtcatcctcatcctggcctgggagggcattccccgtagcctcggagacaccctctaccaggagctcaccgacaccctccggaagtatgggaaccccaccagccggagatgcggcctcaacgatgaccggacctgcgcttgccaaggcaaagaccccaacacctgtggtgcctccttctcctttggttgttcctggagcatgtacttcaacggctgcaagtatgctcggagcaagacacctcgcaagttccgcctcgcaggggacaatcccaaagaggaagaagtgctccggaagagtttccaggacctggccaccgaagtcgctcccctgtacaagcgactggcccctcaggcctatcagaaccaggtgaccaacgaggaaatagcgattgactgccgtctggggctgaaggaaggacggcccttcgcgggggtcacggcctgcatggacttctgtgcccacgcccacaaggaccagcataacctctacaatgggtgcaccgtggt

SEQ ID NO: 119959 - DNA, 377 bp, Homo sapiens
ttatttctttatttattgaaaaatctttctgtaaattagcaaaggcccagtctcaataaaagaccgatttcatatcacccaatagaatgttttacatccacatcaaaggcagcagcttttgggttacttcactaactctggacacccccaaaacataaatccgcacaaataaactccaaagtgagccctctcagaagaaaagcaagatttgaccaagaaatgaatgctgactttctagaatgcagaaatcctcagagttcttaacctggctcccgcggactttcaagacatccacaaatagaatccaggagtccttgcacttggatgggaaatgaagtattaccaatacctgtgactttgttggcactgggaatcac

SEQ ID NO: 119960 - DNA, 618 bp, Homo sapiens
tggcttcacacgggctatggggcacttgaagtcgcccacccttagccaggtgcactcacccctggtcacctcgccctctgccaacctcaagtcaccccagactccctcacagatggtgcccttgccttctgccaacccgccaggacctctcaagtcgccccaggtcctcggctcctccctcagtgtccgttcacccactggctcgcccagcaggctcaagtctccttccatggcggtgccttctccaggctgggttgcctcacctaagacggccatgcccagcccgggggtctcccagaacaagcagccgcctctcaacatgaactcttccaccaccctgagcaacatggaacagggtaccctcccgcctagcggcccccggagcagctcctcagcacctcccgccaaccctcccagcggcctcatgaaccccagcctaccattcacttcctccccagaccccacaccttcccagaaccccctgtcactgatgatgacccagatgtccaagtacgccatgcccagctccaccccgctctaccacaatgccatcaagaccatcgccacctcagacgacgagctgctgcccgaccggcccctgctgccccccccaccacc

SEQ ID NO: 119961 - DNA, 445 bp, Homo sapiens
cggtgtctggccgggcctgtcaccgggacgaagctcctaggctcaagtctccttccatggcggtgccttctccaggctgggttgcctcacctaagacggccatgcccagcccgggggtctcccagaacaagcagccgcctctcaacatgaactcttccaccaccctgagcaacatggaacagggtaccctcccgcctagcggcccccggagcagctcctcagcacctcccgccaaccctcccagcggcctcatgaaccccagcctaccattcacttcctccccagaccccacaccttcccagaaccccctgtcactgatgatgacccagatgtccaagtacgccatgcccagctccaccccgctctaccacaatgccatcaagaccatcgccacctcagacgacgagctgctgcccgaccggcccctgctgccccccccaccacc

SEQ ID NO: 119962 - DNA, 577 bp, Homo sapiens
aacagtcggtaccctgtaacatctatgagtgaatacacagttcgctgcgtgtttcttttccattttattctttgtttttgaggtgtctcactctgttacccaggctggagggcagtggcatgatcatggcttactgcaaccttctcctaccaggctcaagcaatccttccacttcagcctcctaagtagctgggaccacaggcacgcaccaccacactcagctaattgtttatatttttggtagagatggggtctcactatgttgcccaagctggtctcgaactccaaggctcaagcagtcctctcacctctacccccaaagtgctagggtaacaagcatgagcaactgctcccagcctgcatttttttcataataatgtatcatgaacatcagattagtaaatactagtataaaacatcctgttttgtttttctaatttcttgacaaacataattttatataagtaatattatgtcatcctggcagttttttattgtcctaaccttctctctccctaccctaccactggaccatttcccacacacacacatgctagttaacccgtgtttctctcct

SEQ ID NO: 119963 - DNA, 517 bp, Homo sapiens
agtggccgaagtactgtctgagacagtggctctcaacccagggtgattttgccctccaggggatacttggtagttgtctggggacatttttgatggtcatgattgggggtgggcaggagccagggatgctgctgaacatcccgcagtgcacgagacaggcctccaccacacggaattaccttggcctgaggtgttacgagagcacagagagaaaccaggtacagacgcggggcagaggggagagagggagagagtgtgagagctaaggtttcgggagaagactttgtggaaaaagtctttggctgggtcctgcaacatagccaggattcagtgacaggtgaggaccactccagattttgtatgtattgaaggccctgaatacttttttgaaagagaatgacatgagtacacctggtcagccacacgtgagaggggttggaggagggaagtaccagaggcagggagaccaggtagaaagacctcgccatagtcaggctgaaggtggtggaggcccaga

SEQ ID NO: 119964 - DNA, 922 bp, Homo sapiens
  misc_feature (568)..(568): n is a, c, g, or t
aatatgagaattcgaaagcagtggggaagtgatgttggacctatcacagcattgctaacagacagcctattacagtatttaataaaaacagaaacagcatgcctatcataggctaataaatcctacctcctgcacgctttaaaacagtatgaagcagctttaacggagctccagataactaatttcaagcatggctgtctagcgtgcctgtcactcctattgtccttccaaactctttcagacattttgagcagggagtattaaagctatgagttagaaagggttgtgacattaatggtccacaaaggctttaggcacaagaggtaatgatgattaccggtggctatttggaggactgcaccggatcgctgtcattaaaaattaagcgtggcttttgaggaagatgtgacaactaccggaggtctttttgccattcctccaggacatccaccataaggaaaggagaccctggaccaacattctctaagatgtttatatggaccagtggccggacctcttcatcttatagacatgatgaaaaaagaaatatttaccagaaaatcagggnccatgacctcctggacaaaaggaaaacagtcacagcactgaaggcaggagaggaccgagctattctcctgggactggctatgatggtgtgctccatcatgatgtattttctgctgggaatcacactcctgcgctcatacatgcagagcgtgtggaccgaagagtctcaatgcaccttgctgaatgcgtccatcacggaaacatttaactgctccttcagctgtggtccagactgctggaaacttttctcagtacccctgctccaggtgtaccgttaacctgacttcttccggggaaaagttctccttctaccaacagaagaaacattaaaatcatcaaagtgtcctaatataac

SEQ ID NO: 119965 - DNA, 706 bp, Homo sapiens
ggaacagagacaaggctttgttccagagcattctggtccagaggaatagacagccccaccttcagaggcctgtcctctgtactgcactcacggcatgcgccttgccatctgttcaactaggaaagagtaaccatcaggcaacaatgcctcaactccctgacccaccttcctccccacaaatgtcagtatttcttttatctcctagagactatgaggaaagctatggactctcttgcctaaaaacatacgcatgtgtttttacatacacacaggcacacacacatgcagtgttatacatacaacttcaggaggttaggaaagctctagatcccatcccaataccacttggagatctctgaagcccaggttaagacccaagaccctgttctagactctaagcacacctccgaaagggcaaatcaaactaggttgtgtcctacaagataaagctgaagctccttatcatggcagcgaggccttctgtgatatagattcaacctatatttccagcttccattccaaatactgtccatgaatcctatgggctatgctcactgaactaatgctaaacactccctggatgaggcattcctttcttgcctctatgtcttttcacatgctatttcttctaacagaactgttttaccccactacatcaaatttctatttatccttccaaatcctgcccaaatatcatctcctccag

SEQ ID NO: 119966 - DNA, 729 bp, Homo sapiens
ggcgatcgtggggcccgcgaagtgtggaggggatctgttgcctcagctagtttcaaagactgcgaccctgttttgaattggcttgtttatgttgcgacggtggctggaagccaggccaacccagggtcagctttcccaaatcagtcgccaaggcccacgagaacagtagtttcagaactcccagaaataggttcaaagatgcctgtcctgtaccagtcctgcccagcctcgtttttccttaccaccctgactgcagtcttaactcctgcaaactaatttgatcgctctaagtttaaccgcgcccagaatttcacttttgcttgcttggcctttgctgtgggtcacaacagcccttcttgccttcctcatcttcgtggggcccaggagagattacagaatcatagagtttggatctgaaaggaatcttagaaattccttctcttaccctctcgttttacagtaatgacccagtaagagaaatgacctgttgcatacaaaggctttcacttaccgaacatgtctttactgggtaagaatcagtgtaactcactcaggtgtggtgtttcggttgccttgttaagatcagacacagttggcgggcgcggtggctcacgcctgtaatcccagcactttgggaggccaaggcgggcggatcacgaggtcaagaggtagagaccatcctaacacggtgaaaccccgtctctactaaaaatacaaaaaaatgagctg

SEQ ID NO: 119967 - DNA, 486 bp, Homo sapiens
ggaactgaccaaccaattagtgagtcagccagcagcccctgcttttagttctcttccaaatagcttgtacatttatttctctccaaaatcttattggtgacctcttagcaagtttctctatgtgcctaaattaattctgacttcctataaatattttattcaattagcgagtgaacaaatgaggcgtacatgggaggctcatttatttttcaggccaaaacatgaatctataatatggtgatcccactcattgaggaaatccatctattccttctccatactcacagctagtgcttatctttttaaaaacaccataatcttcagcatgaaaataatctcctaattaacccccagcttccagacttcctctactccagttcattcttctcacagtagccagagtaatttttctacattgaatttttttataaagaaacttccatagtttttactctgttatatttaataactaaaatatatgagtgg

SEQ ID NO: 119968 - DNA, 188 bp, Homo sapiens
aactccagcaaggcagcaagccagggtgatacaggcttcccagttttcctttctccaccgcttggggattattgtccttcataacttgatatccagtatgtaggaaaccaccgtttcatagctgttgttgggtttgtttgtttttttgagatagagtctcactctgtctcccaggctggagtgcaatg

SEQ ID NO: 119969 - DNA, 413 bp, Homo sapiens
cactcgggcccagttctgtataaaattaggtttctggtgagcaggactggtttcaagaagcaggaactgggttagacaagccacagaaaagaagcttctttaaattaatttttgaaagtttagagggagaaaattcagtcaatgggatgtttatctgcaagaatgtctgatatcacctggaatcatgtatctgggagtctggctggattttccacttttttattagaattctcaaatggcttatcggtgaaatttgtaagagagtctcaattttcctgttctgtgtcctgttctgttatgaaaccttaggatgagctcaggcaaaccacagggtagctgagaaaatgggaatcccttcttgcttgtttattttgtcaacattctttatcctctgcatttcaagatgcaggtgt

SEQ ID NO: 119970 - DNA, 277 bp, Homo sapiens
gaacctgggaggcggagattgctgcgagccgagatcatgccactgcactccagcctgggccacagagtgagactctgcctaaaaaaaataaataaaaacaatgtggctgctggctttgacccatgggttatagttgtttgctgttttagtagattcttcaggcagactcatgattccaatatatgctaagttcctccatctctaagactgctttgatactggcaatactttctttttaagaaaattttttttgtagagacagagtcttgctttgttg

SEQ ID NO: 119971 - DNA, 818 bp, Homo sapiens
cttgcccgttgccatgggcgttttctatgttgacacaagcagggacacggaatcccttgactttgagttgcagatcgtgggtgttggcgtctccgctgctttaccaggaaggatggaaggggcttcagcctccattctcactttccttctcaaggagttggctaagcatcaggagttttctcttaggcttctctcaggtcccctttccctgagaggtgaaaagtttttcagaaaggtgagcagctttctctttattcccagggaccacttcacacacccctttttcgcctccagagtagatggaaccgtggaacgagggaatcctgccctctggttgtgtctgtcatctcctactgggaccagagccacaaaagccacaaaagacccaactctctccagcgtgcaggcatcccaactagaggaagcaaggaggcagagaccaagaggacatcaagaggcgtttgaacccgcagagagggcctgggagcacaatgctgagcgtaggtccaaccactgcttctcaatggggtgggagagcggcgtggggagagttgtgggcatttagggcaggacagtgccccccaccccacttgggacggggccgcattgcatcatcactgtaacagcactagctgcccctgcccccacaacccctatgtatgaaatgcaagtagcacctccccatctttgtgacaacccaaaatgccacctcctgtgcccaagcactctctagtgaggtgtttccttaggttaaaaaccactgttagatcatttcctaaaatatatctcaaaagacctcaattagttccttcatatat

SEQ ID NO: 119972 - DNA, 500 bp, Homo sapiens
gaacgaggccaccacgacagaggcttaatgtgagggctggggcacaaggacagttacaatctttcttagggcatggatataacaaagtgtcagtttaagtgataccagctgccagggtcgcctggggtctgtggtctcttaaattccctacaactagggcctgacatggactggggctcctgaggcagcctgaacctgtagaaatgggagatctggggcctttcgtcacacaggggcctttagatgttttttggaggcagctgcttgcgtggatgagaagcagaaaagatcaagagttactcaccaccttgcataaagacacgtgtgcagagctcttcatcagctgtaaagagctgatggttctcaggggaaaaccagtcgctcttggctaatgaggccctagcagatgacaatgtggaaaatgagacaaaggaggccagtctgcccaccgcgaggctggtagacagcatagtgacagtgtggcatctgaccctggccta

SEQ ID NO: 119973 - DNA, 277 bp, Homo sapiens
cagggcttcttccactccgactctgttagacacagtttgttggcaaagtcttgtttctctaatcccaaagttgcctaacaggccccgaaaggaaaacacaggagcagggtggccataggaaagggctcccttccagtgagccagttgctcaagaatcacttttctcactgcttcagaggaatctggctttttgtatcctgctgtcttacccatttggtcagggctcctggataagctacctggggaacagagtggggcctctgcctaaattggcaca

SEQ ID NO: 119974 - DNA, 667 bp, Homo sapiens
caagcagcaaaaccccaatagcaaggagcacgtttaacgctcacatctttgcttctcaaaatagctcaccactaagaagaaccaaggctctttgaaaaaatggtttgttccagggaaggggcagggaaaaaataagaatagcctagaacatcttgtaccagaaagtaaggaatcacttaaagaatcatgagatgcatcaaaaaggacataaaaggcagtctgaagaagctcctactggccaagtctgggacattttaagcatgaaaatcgtaaggtcgtaatgggtaatagctttctgttaatttggtggaactgatttttaaaaagtgaacaaataaatggggacaagagaaactcttctttacagtaaattttaacttgtaaatgtagaagaaatgatggaactgaacattttcatttggcaatcacagtactagttaattctgattacagaattgagacatgttaatattagcgggtgaaagagaaacaacaggatatttacatagtctcaaagtatctcatccgaaaacatttattacttttatagactttattaattttaaagaaaaacaggacaagtttatagtggagaaagctggcagatatcattttactcaagtgatcaaaattaacattaccagtggtgtcaccagttgacataaat

SEQ ID NO: 119975 - DNA, 633 bp, Homo sapiens
tagctttcctgtatattaggggaagcttagaggggaagaggggagaaagacggggcagtggcgagagccgatgggtggtagggagaaatggaagtccagctgtccaaagtgggcactgtcctaggcctaagatgcctccagggagctgttgcccttaaaggggagctgcctttgtttatatgatcgtcctgggaagatttgggtgtgatttctctcctccttctccctaattgccaccccccacctcatttattgagctttcgcctaccacgtactgtactggggtctgttctgagagcctcacaggacacagggagctcccaggctggaaggagaatgccaggcttgatcacccatgccgttgggaagggagtatcctctggtgaggggtacagtcctgaatgaccccagtcagtcctttctatggagtcaccaccttgcatagtgctgggcctgtggtagacatccaataaatacttactgcatgtatgcggtaactagcagttttacttttgcgagtagctgggagtttttcagagtttcatgtggtgaagaaggtggatgatgaagctgggacaggatgttttttggggtcacagattagtgttcttgtatacttgtcaatgggctctt

SEQ ID NO: 119976 - DNA, 393 bp, Homo sapiens
tatgggagaaagttgagggatagcagataatcattatttttagggaagaggaagagtcagggatagctacagattggtattagcaatttgaggagatggaaaaggtttgcaaggggcactggggatgggtccaggagtggattagagatgtagaaactgattgatttctaaacaatatagataacccaattaaagttgttgaataatgtcagctgtagccaatgttggcttggtctctttgacataatccagttttaggtatttgaatactctataaatacaaatacatagactgaagcacaattttaatttttttctatcttttgcctaggtctgtatgattgtataggacttagagctttttgtcctaccaaattattaatttctttattc

SEQ ID NO: 119977 - DNA, 783 bp, Homo sapiens
ctaagtttactgtttagcttactttttttgtagcaagattttgatgaaggacgcaatatgttgatttacagtctggtacaaattttgatgtagaagatgcttccaatatcctggtctcttagttccttgatttcttctccagtgatcttattttctaccctaactcaactacatattcccattgtcatatcctagaatattttgtcttttatctgtaactctgctctcttcccccaatctcatttcaagcatcccactttctaattcctctagtaaatacgtcagttccaacagcccatcaatcccattgggacctacagtttatctatccaagcttttccctgttcctcaccctcacttctatacagctgaagtttcatactgaattataatcactttctcgtatacacgtttaacaatcttgtccctccctggcttcatgcccagtgatctcttgtatctatgaccatgtcctttatcttctcctctgtcactggatgaactgtagccttccaagataaggccactcagttcatttgtacagcagattccatcccctcttgctctcaagaatattactgtggtatctctcttttcttgtctctactggctctttccatgagcaaacatggtattatcccattacaaaaaaaattttttctccgtctctccttccactcaccacctcagtctctgcttctctttcccgcaaaataaccttgaaaaattgctttatgtactcccgttttcttttgaacccctgccagtgaccaccacgttata

SEQ ID NO: 119978 - DNA, 471 bp, Homo sapiens
aacagaatttggaaatcaacattttgcaatctccaatgattgatttagataaggatcataactggatgctatgtcctctaggtgaaagttacacttgcaaagtgtggctgacaccatctgaaccaagtgaacaaatttaacatcatcaatagtgggacaatctgacatcatgtgcctagtaagatgatgcagtgcgttatacatggattatttatgaaatgtcctgctagaagtgtttatcctgaatctaatcgggctccagcttaatttaaagtctgtgaaagttttaaaatatattacccatttccctccaggaagatgacctcaatttatactctcagcagcgtagtagactgccagtttccctgaacaagttaattgagaccacaaggacacaaaaatacacaggcagtatgtgagatattcatcaagacaacaactgatctggattcttctcaagacaatgtcatg

SEQ ID NO: 119979 - DNA, 587 bp, Homo sapiens
  misc_feature (329)..(329): n is a, c, g, or t
gcccttaggggccaagcgccatgatatagatagtggtagtactgggtgaattacgctgctggatgatcgagcatgtaatcataatcttatcgggtagtcttcatccatttcaataaggtagtactttttcgtttcaggcaattgtggtggatcttaatggtcccagcggtctggacgattccaactttctttccaagaaccaaaacctttatacgttgtttctctcctccgtgtctgtcctgatgccttgacaagcgagggcaataatgctccgttgtttctacttctcgtacatggaataacgtgtggtgcttcgtgcgtggtgtccnatgtccacatcccaatcctctgtgggcatagtgcgaggaggacgtgggacgtggcatctgataaacagccggtgtatatccgatgccactatgagggcagcatgggaagtagatgctcctcatagtggcttgtcatgggctgacttcagggacacagccctctacaggagttgcaggagcagaagagaggccaggaagtctctagatgtaggccagggagaagggaggatgtttcaacaaatgggcaggacaccccag

SEQ ID NO: 119980 - DNA, 642 bp, Homo sapiens
taggaattttctagattagtttggggcttccatttaattctaaaatgaaaattttactttcagcttcatgcctaacaagcagagtttgatgtacctagtctaacatttttctgacaatttgcagccatcactgtcaacattgaaaaatctgtgttagatagtgaggcttttaaataatgccatcaatatacctgtctctaaaagtcttctatccattctgccatttctaatctagcctaggcaggaaaagcagacctggataattcatcactgtgtctcaagtgtaagtaaactgctttgaaccacagtttatagggggcgtgggtagcctggaaaggatcactctgaaaggagtagaatactctcttagagaaaaagaaagtgtggtagacagaagggatattcaaagtataatggtggtgactgagttatgtgttagaaacagttttgtctagtccgactagaaggaattaacttggattttcaaattcaacaaatattgactgagcaccttctgtgtgcttcaggcagttagtaaactatgagaaaataaaatgtgtcaggtagtgataaataccacagcaataaataaataaataaatagggaaggaagggagagaaagaaggaaagaaagaaaagaa

SEQ ID NO: 119981 - DNA, 919 bp, Homo sapiens
acatacgggaagagtctctggaccaatagaataggaatctgaacgttgataacagtgatttaaaacaaaagcatttttggggttgtggatatctttgagaatctaatatatgctacagattcttccatagagaatttgcatacttgccaacatgcacaatttttgtgatgttaaattatgttttctcccactattttctcttatttcttcccatttaagcagccagcagtccctgtgtttctttgcctgaggggaggtttgagacttggcagaaagctcaagttttctgcaaggcatctctcttcctgactctcagtccccaaagactaaatctaaggcatttgttatgcttaatgtcttgaacagaaaggaaagagggattcttcagacagtaaaaggagacgttttccccagacttaaaagacattcacatggatcaactggacttccaaacatacacaaaagagaacctgggcctaaacttcacattttatatcaaatctaattccaaatagatcacagacttaaatatgaagcacatacttttaggaaaacaaacataaaagttttaagggaaaaaaaatcagaaaaaaatctttgggatcatagagttcttaaacttgacaccaaaagtatgtctataaaagaaaaaattaggctggacgcagtggctcacacctgtaatcccatcactttgagagactgagacaggtggatcacttgaggtcaggagttcaagaccagcctggccaacatggcaaaaccctgtctccattaaaaaatacacaaattagccagctgcttgggtggctgagacaggagaatcgcttgaacgcaggaggtggagattgcagtgagctgaggtcatgccactgcactctggcctgcctgacagagcgagactgtttcaaaaaaaaaa

SEQ ID NO: 119982 - DNA, 403 bp, Homo sapiens
ggggcggggaggagaccgcccaacagttctttttggaccccccaagggtctccttcttctagtccggggggcacccctttcatcctgcgcccgctacgagaccctatctgtatcccgggagggggagaggagacccccacaagttctttttggacctccaagggctctccttctccgtcttgcacgggagggcacccctttcattccgcatcccgagaccccatcagcaccccaggccaggaggaggagacccccacagtcctcaacccctcagggatacgtcttctgcaccccgggtcggagaaaggctggcttccctccatgtggcagtgggtgggggcacccctcttcattccgcattcccaaggcaccccatctgcaccctggacgggggaccctccgc

SEQ ID NO: 119983 - DNA, 168 bp, Homo sapiens
cttctagacatgctttctttggctcaaacactaatttttaaaaatgtaaaccaacaatttaaaatccagaaatttggattttgctttctcttgaaaatgtgcagagctggtcacaccaagtcaggccctccatggagacaacggaacagtgcagcacagctgcagcca

SEQ ID NO: 119984 - DNA, 854 bp, Homo sapiens
tgcgtctaaagtaagtattgacaacagcttgcatttattaagctcttgcaatgtgtcaggcctggtgctaactcctttacatccattaatttaactctcatcgtatgtttataaagtaggtgctattattctgcccattctaccggtaagaaaattccacaactaaagagaagtaacttgcccaagaccagacagctagtatatactggagtgaaatttgaacccatgttgttttgatttcagagcccagactcttattcactacctgcagtaggatatggcatgaaagtgtattaagctggtgttaatttttcttccccacatttgatcattctttttagactgctgagagtcacgcaggagaacttagcatcactaaaccacacactaaatctatcattcaataagggtgttcttggcactcatgttggctgaatgtagacttgatacttgtgacaagaaaaaggagaaacatatttaatgtctttgatgtgtctacatttttatgtagttataccagacaaacattgtcacttcctaaaagtagaaaaatgaaattatattgtggcttggcaaattggccaaggctcatgtattacatcaacacaccttaatgaatagaagagaagccaaaaggtactgaacacaggggcaaatattttattccctcaataaaggggtatcattttgttcattttagagatgaggaagtcaaggctcagaaaagtggtttgctcaattaccaaagagtcagtaagtggtagagttaggatttccacccacatcttttggttcaaaagtctttactctttctattacatcctaatgcttttcattaaactcaatttcctgga

SEQ ID NO: 119985 - DNA, 308 bp, Homo sapiens
ggttgcatatgtaagcttttatgtgaatttattctctgaggaatgaagggtgatcagataagttctcaggcatctcgtctcactgtatttgtgactccatcattactattaaagttgcttccccctacgccatcctttcaccccaaaccatacccattccttcatcatgcccattgtggtggaacatgatgaaactattgggaaacttaagtgttgagggagctcatgttctaagtcaaaggaaaaaacacataacacaatactttttttcttttcattaaaaaaaagccagtccctaacatagctat

SEQ ID NO: 119986 - DNA, 151 bp, Homo sapiens
ggaagaagtagatgataagcaaataaacaagaaaatgctatctagatgcgtatctagatacacataaggcctgtgggctttcctgatcaagggtcgaggaaggactctggccaggtgaggtggctcatgcctataatcctagcactttttt

SEQ ID NO: 119987 - DNA, 837 bp, Homo sapiens
aagaaatcacaagaaaaaaattaaaatattttaaaataaatgaaaatacaacttatcaaaatttatggaaggcagtgaaagcaatgctcagaggggaatctataggattgaatacatataacaggaaagaataaacatctataagatctgaacttatactttaagaaactagagaaagaggagcaaatgaaatgaaaagcaagcagaagaaaagagataataaatatagtagaatatttattatgtagagtatataatatactctacataatatatattctattctatattataaacatagagtagaaaccaatgaaattgagaacaggaaacccacagagaaaaatcaatgatgttaaaagctagttctttggaaaaaatcaattaaattgataaacttctagccaggttaatcaagaaaaaaagagacaacaagttactcatggtagaaatgaaatgagaggatttaactacagatcccatggacattaaaaggaaaataaagaaatactatgaacaactctatgcccacaaattcaataacctagacaaaatagattaattctctaaaaggtacaatctatcaaaactcacacaaaaagaaatacacaatctacataagcctatacctattaagcaactgaatcaataataaatttccaaaacagaaagcaccaggtccagatggattttcttggtgaattctaccaaacatcaaaggaagaaactatattaattatctacaatctctttcagaagacagaagcagagggaatacttcctaactcattctatgaggccagcattaccttaatactaaaaccagacaaaaacact

SEQ ID NO: 119988 - DNA, 335 bp, Homo sapiens
gatccagttttttctctccattgaatgtgcagttttagttagaattacactaaagggcacttatcatttatcgtatttccaagttcttgtaacagatatgtatagagaaaacgttggctctcaataggatattttactgttagtttgtaatcctagcttatgttattttatcaatactcaaagggattttcatatcctaaattctgggaactcttagtgtgccaggagcttgagtaataagtgtgcctaaaaattatttgtatctcacttctccctcattcattcattcggtaattagtggtgataaagactgatgtgggctgtgccctcaaagt

SEQ ID NO: 119989 - DNA, 278 bp, Homo sapiens
ctattcccagaagaaagaagcaagaatcttatggggattgattaacatcatgtgtgtcaagttcttagcaccatgcctagtacatcataagagctgaaaaatcagccgttgcatattaacaattataaattggaatggctgatagcagatcaataatgtaaactattccaaataaaaagctaatgatgcatacacataaatgagtgtaataaaaattagaaatacgaataagattgttggactgtatcagtgtcaatatcctggttgtgaaattacac

SEQ ID NO: 119990 - DNA, 292 bp, Homo sapiens
tttccagtactatgttgaatagaagtggtgaaagtgggcatccttgtcttgttccagttctcagggggaatgctttcaacttttccctgttcagtataatgttggctatgggtttatcatagatggctttcattacttttaaggtacgtcccttgtatgccagttttgctgagggtttaaatcataaaggatgcttgattttgtcaaatgctttttctgcgtctattgagatgatcatatgatttttgtttttaattgtttatgtggtatatcatatttattgacttgcgta

SEQ ID NO: 119991 - DNA, 438 bp, Homo sapiens
gggactaaaacagtcactcaacaaacatctggccagagcttcctatgaggaggataccaagtcaggagccacgggaagtcactcatctgtggatccaacaagcatgtggagaacgcctactatgtgccaggcactgttttaggtactggggttgcactgctgaacaaaacatctctgggaactcaacttctaacatggggttggaggcagggcacagagacagtccctaagcaaggtaaaccatacatcaggtcagaggtactaaacgctctggtgaagatacggcagaaaatgaactcccagagctcaaaggccacttggtggtgtgcacaggcctctgctccagcaggtgggctgtatgctcaccaagagccagtgggtttgttcccacgccgacttggctgatgtgtacttgttactgtaagtgggtaaatgaaa

SEQ ID NO: 119992 - DNA, 398 bp, Homo sapiens
tttgtcaaaaagaaagttaacagttcagccacaaagcagatattatatatacatgtacacacactgacattttttaaatggccaacacatgataacaaaaagcagaccaactcttagtcaataattttactgattttaaattccctaaagaaaatgcactttgttattgcctgaacctggggtagacctcacctttcacccccagccttaggtacactactgacttttggggttttgcaatgtttatgtcatcacctaggtcaagttacataaggtttggctttgtgataattcactgaatatctcctataccttatgaagtgtttgccatgcttcactgtggcatagtttaaaaagccaatgagtatctacacctcttgatttaaaaaagtggtaaa

SEQ ID NO: 119993 - DNA, 304 bp, Homo sapiens
cacctcccccgactcagcaccccttggaagtgctccttctggggacctgaggagggcataggcagcatggcccacgtacccacctctcaagagaggcctccagcaatgcctccttttagccacaggccctgggaccggtgagccagggcctacagcagcccacatggacacatggacacatggaaacgtggccacactgccacagagtcaagagcccttctccctgctgagcaggctaatgccttaatccctttacacaaagcctgctgattctttcctcggcggggggaaagtggttggggca

SEQ ID NO: 119994 - DNA, 482 bp, Homo sapiens
tgatgctgctgtcgctctagagatccccactagtccaggaagtgcacagagcttgacgagaccatacctacacctgtggtttcaggtactcccggtcggtaccggagcgcgggttcgtagtcagggtcgtagctggatgacatcactgaagaattccttggcaagcagtcagtcagccacctttgggtagtccctactttcacctgggtcgctagggttggttaatttttaataccaactgagtgacccatccccttctccaccttgactgagtcctgaaggccccctcaaaagctaggttttagtgccctatttcatggtacaccaaggagtgctctggcaccatctagagcaagccctagtcatctgcatacctgagcgaagtcttccagcccctgctggaccctgttggaaacaatgtatcctctcttggacacagtccatgccttagacctatactccaaggagcacaacctgaccag

SEQ ID NO: 119995 - DNA, 809 bp, Homo sapiens
ggctaggaagtagaagatcaaagcactggcaggttcactgtctggtgagggcctgttccttatagaaggtgccatctaagtgtcctcacgtggcagacgggatagaatgggtgaaaaaaagggggaagggcatgtaatcccattcatgagggcagagcactcatgactcaatcacctacaaaaggtcacaactcttaatactattggattggggatacagtttcaacatgaattttaaaagggacaaaaacattcaaaccatagcacaggataaagggaaaaaagactatacagacatttcatagtcaaactacagaaaatcaaagataaagaaaaagatctagaaaaaaaccagagaggaaaaatgctacctatagaggaggagagataagaattacatctaggttgggcatggttgctcatgcctgtaaatcccagcactttgggaggctgaggtgggtggatcacctgagatcaggagtttgagaccagcctggccaaacatggtgaaaccctgtctctactaataatacaaaaattaactgggtatggtggcatgcacctgtaatcccagctactctggaggctgaggcaggagaattgcttgaatccaggaggtggaggctgcagtgagccgagatcgtgacattgcatcccagcctgggagacaagagccaagctctctctccaaaaaaaaaaaaattacatctgacttctcagaaattatgcaaatgagaagagaatggtgtgaaatatttaaagcgttgagagaggaaaaaaaacccaccaacctggaattctgtaccctg

SEQ ID NO: 119996 - DNA, 482 bp, Homo sapiens
gtgatcctcctgccttagactcctgagtagctgggactacaggcgtgtgccaccctgccctgcttctaataacctcttaaagattcctcctcttaacactatcacaatggcaattaaatttccccatagttttggagggaacattcaaatagtaacatctagctagaacagcctatctgttggcagaatgaagtagaacagtttagtgggaacaaggatacaagtgtatttttcatggaccaaatacagactctggaaaggatacggttgtggatcatcgggaaaagaacttcacgaaagagatagatgcacagatggatagtgaaggtcaccctggtgaaagccaaggactgaatgcagttcttaaatggccagttgtggaaagaatcatccttataaaagaattgagataggagatctctaatagaggaggagttctctaatagaggaggagttctttgtgaaacccacagaaatccccc

SEQ ID NO: 119997 - DNA, 345 bp, Homo sapiens
aatgaattgcctcttaccttccttaacccttatagcatccagcctacctgttcctgcatcttgttttcttgtcatattaccaagagttgccacatattggctgctgacctcatgccaggtgctttacatacattccctcatttgttactcacatgatatgcagaaccacaacattttacaagggagaaatctcacattcagagagaccacaatgttagtgaatggcagggctgggatctgaccccctgatctgcttgactctaattcttttgagtctactcctttaatgctcatctcaaatgttatcccattcaggatctaaatttgaagatcttcaatgtagaa

SEQ ID NO: 119998 - DNA, 223 bp, Homo sapiens
gtctcattagagacacaattatggggttttaaggctttcagaattgacaaggacaagttttggcagaggttctatgtttgtaaaccatttaggactgcaggaagctctgtcaccccatgtcttggcagtaagccaaatagctgcttctgtttcctcttcctaaagcctcttttatcccatacaagcatgtacctgaaacttcaagaagcccctctctagcctc

SEQ ID NO: 119999 - DNA, 461 bp, Homo sapiens
gatggaaagagcggcgaggcgctctcgcagccgtggcagtctggacgaaaagaaccaggtccctttcctggtctagcctacctccctacctctcttccctcatatccagaagaagcgacggagagatggagtttcgctcttgttgcccaggctggagtgcaatggcgcgatctcggctcaccgcaacctctgcctccagggttcaagcgattctcctgccgcctcagcttcccgagtagctgggattacaggcacgcgccaccaccccagctaattttttttttgtgtgtgtgacggagtctcgctctgtcgcccaggctggagtgcagtggcgcgcgctgcaagctccgcctcccgggttcacgccattctcctgcctcagcctcccgagtagctgggactacaggcgcctgccaccacgcctggctaattttttgtattttttagtagaattggggttt

SEQ ID NO: 120000 - DNA, 462 bp, Homo sapiens
tacaaatatttattgagtaattactgtgtgccagatattctaaatatactaggtcgttggcatttattgataaaatagacaaggtccctactcttgtgaagcttacattctgggggatgagggggagaaggcaacaaacaagttttaaaaatatagatgagctgggtgcagtggcacgtacctatagttttagctactcgggaggctgaggtgagagactgtcttgagcacagcctgggcaatataagtttgtccccatctccaataaaaagtttgggccggggccgggtgcggtggctcacgcctgtaatcccagcactttgggaggccgaggcaggtggatcacgaggtcaggagatcgagaccatcctggctaacacagtgaaaccccatctctaccaaaaatacaaaaaattagccgggcgtggtggcgggcgcctgtagtcctagctgctcgggagg

SEQ ID NO: 120001 - DNA, 591 bp, Homo sapiens
atccccggtgtttatcgattgccacgcccaatccttctcagatacatgggcagtggctgctatgccatgtacctcggagaggaggacactaccttgggggcttctgccaggcttgagacatgctcaggtgtagagcgcggctactcactcaaaagtccaggctcagcaagtcatagaatatctaggcagggcaggacttctaccatggccaaggccacttgagaggtaagaaaggaaactggtgcccagggagggtaagcagcttgcacaaggctacccaaggagatgatggccaagtcagagttgggaccacagagaaaaggatgacacaggctctgtccgtaaggtgtcatggtctggttggaggagagaggcgaggtaatcagctatgaaagctcagggttaccgagtgttccagtagaggtgaaggaagcttggggagcctggaaaggggcaccctaccccgccaggagctgtaggagaaagagggaatgagggaggaggcgtctagctgaaaccatggtgcaggagtggagtcagtgggatatgaaccagcggggtaagcagacttagatcatggtggcatcgaga

SEQ ID NO: 120002 - DNA, 580 bp, Homo sapiens
tctcgatggcattgcatcttcttagcgtagctcgactctgtctgcattgtcataggctgtctgctgatgtgaactctgtccttggataagttctgccaggcttgagacatgctcaggtgtagagcgcggctactcactcaaaagtccaggctcagcaagtcatagaatatctaggcagggcaggacttctaccatggccaaggccacttgagaggtaagaaaggaaactggtgcccagggagggtaagcagcttgcacaaggctacccaaggagatgatggccaagtcagagttgggaccacagagaaaaggatgacacaggctctgtccgtaaggtgtcatggtctggttggaggagagaggcgaggtaatcagctatgaaagctcagggttaccgagtgttccagtagaggtgaaggaagcttggggagcctggaaaggggcaccctaccccgccaggagctgtaggagaaagagggaatgagggaggaggcgtctagctgaaaccatggtgcaggagtggagtcagtgggatatgaaccagcggggtaagcagacttagatcatggtggcatcgaga

SEQ ID NO: 120003 - DNA, 240 bp, Homo sapiens
ctggtctcgaactcctgagctcaggcaatctgtccacctcgacctcccaaactgctaggattacaagcgtgagcacccagcctcatacttatttttaatatttaaaatgattttgcttttcttgtttcttagtgcatgtaaagaagtatctttgcctgctgtataactgtgtgtatctcattttcctcacagtacttattgattccatttacaaagtgactgagggccggcagtctgaaa

SEQ ID NO: 120004 - DNA, 414 bp, Homo sapiens
tggttttgataactcagactaagctcagggttatcctactgtctcaaggcaacagacacatactgaacctcaggagctaagaacagagatgacttcatggcccctgccctcaaggagctccctctctcactggcatggaggagatgcctctgaaaacagccagaaaacaacaggacaggtgtgtacagtgcagcacagggacacaaataaatgaagcagcaacagggtactgctggtgggcaccagtggtaaggagtccacggcgagccagtgcacgctatattcaaagaacagtgagcagacaagaatggccaaagggaactatgttcccccaaagtttaatccctggacttacatgtgatggtgatatatgaaccatttttatttctatcaatagtatgtacccactttcat

SEQ ID NO: 120005 - DNA, 397 bp, Homo sapiens
ggttgctgaccacaggccatgtctagagcacagactatatcgtcacgttactctgttgtcttctcattgttcaattcagcagcattttagaaggcccgctgtgtgctctgcactgtgctaagtactgcgagaaacagaaaagttgaagacgtggttattgtctgaaatggcagctcctgggaaaaagtgccgtagaaagaggagctggctatagaaaatatggtaatttctaacctaaaattaatatgcctgtaatcccagctactcaggaggctgaggcaggagaatcgcttgagccccaggaggcggaggttgtggtaagccaagatcgcaccactgcactccagcctgggcaacaagagcaaaacgccatctcaaaaaaagaaaagaaaagaaa

SEQ ID NO: 120006 - DNA, 298 bp, Homo sapiens
cagtaacagaaaaatttctagaaaatcaccaataatcagcaactaaagcacctttctaaataatccatgggtctaatttcaagagaaattaggaagcatactgaactaaatgaaaataaaaatacaacatactggtctttttggaatgtattactgaagagaaaaattataaattaaatacttatattcatttaagctttcactttaacaaaatatgtgcaaagactgtatatactgaaaactttttttttttttttgagacagagtcttgctctgtcacccaggctggagtgcagtg

SEQ ID NO: 120007 - DNA, 88 bp, Homo sapiens
gacccctgccctgcaaccctgtcccatcttgacctgctggaatccaatgtgtctgatttcttccttttgtgttctgactctgtctcct

SEQ ID NO: 120008 - DNA, 338 bp, Homo sapiens
ttctttgctgggcttagagtcacctagctagtacaaactttgaccacttacgtcaaggaacatattatttgttccaaaaatgtaataggtgttatggtattttcaatctctagtctcttttgtaagaataccttgtagatagcacactgtacccttgcaaattaagggtacattctagattttagacgaggaaatacttatgtggccaaaggtatcagcccgatcatcatattcattcatttaatgaatatctactgaatgttaggtgcagcatgttagtgtcagctgtaggtatttggttcatctgtagattttcacaattcttaccataaaatgtg

SEQ ID NO: 120009 - DNA, 860 bp, Homo sapiens
gcggtaaagcagagaggttgggggaaatagacctctaaaggctctaaggcaggaggctgccagacaggtgtgtggaggtgggagtgtagaattcagtctggaagatgaggtcagaggtgaggggagggtgaagggtagatcaggcagaggctgataggctgttgcaactattttgacttttattcctgagtgagttgagatggctttaattaaaggagtcacgtgatctgatttagctttatgtaaacatctgacagtgttcagtttaatagagtctgtagagaaaatgcttctagatagtatttcttttttttttcccccaagtagctgggactccaggcacacaccaccatgccaagtgacttgtttttatttatttttatagagacagggtctcagtatgttgcccaggctggtcttcagctcctggcctcaagtgatcttccctcctcaggctctcaaagtattgggattataggcgtgagccaccacgcctggcttagatactgtttctacctgcttccaatgtctgaaaatataagcacatttctattgttgtttacttgagctgcactcttggtgcataaaccctggagatggtcacaggtaaacattcagtgttttagattctcctgttcaacactgaaagggtgatttgtttttgtggtcctttaaggctgctgctgtaccagagagatcctggctgtggagtcgctttctgttgatggtgctttactgaaggggaataaataaatattgagttgacctcaaaagctgcctaatgacatcatagctcctctctgtattggcttcccagagacagccgatagtaattctgactcttcttatgaaaatgtaaa

SEQ ID NO: 120010 - DNA, 426 bp, Homo sapiens
cccctattagttcatgtccttcagcttgattggaatggctcagcaactccatgtgggcagcactgaggaggtatctgctctgggcgaggcctgcgcccgaggcacagacacagatttctccagctttggagaaccatggtctggaaggacatcaacacccaggcactccctattcttcgatggagagtttctaaacaaaggattttccaatatttataaagaaaagaggccgggcgtggtggctcacaccagtaatcccagcactttgggaggctgaggcgggcggatcacctaaggtcaggagtttgagaccaggctgaccaacatggtgaaaccccgtctctactaaaaatacaaaattagctgggtgtggtggcacatgcctgtaatcccagctactcgggaggctgaggcaggagaatcgct

SEQ ID NO: 120011 - DNA, 276 bp, Homo sapiens
tacctcgctaatgcatcggcacaagggcatgactatccagaggccatcttggacactagcttctaccacatgctgtgctgtctttgggaattgctttcggacaggctggaaatagatgggtcttacaaatgcctggctgaaatgtgaagagggtgcaagaaaacatctggggaacgtgaatgtctgagagaagactcaaggaagaggagtcattgaaaaaaaataaatgactagagacaggaagaaaacttggagaaagtggtgccacagaagcca

SEQ ID NO: 120012 - DNA, 153 bp, Homo sapiens
acaccccatggtgcaaaatacccattgaatcttttttaaggtatatgccttaagattatgattactttgtcaaaggttacaaactaaattattttgccaaagtgctttttaaataagctgcctctgtttatactgaataggttgcttcttcaa

SEQ ID NO: 120013 - DNA, 359 bp, Homo sapiens
tctaagcacctagatattgtatataaagtgcttgctaggaaggcaatatgaaagattttaagtgaacgttcatggcatagtatttacactatgtgtgctaggtagtcttgtatcatacatatgttaatttttcttcttcctagaagcatccccagttacctatccaaatcaagtacactcagttcagctcagatactttttttgcgattttttttttttttttttttgagatggagtcttgctctgtcgcccaggctgtaatgcaatggcacaatctcaggtcactccaacctccgcctcccaggttcaagtgattctcctgcctcagccttcccagtagctgggattacaggcgcccg

SEQ ID NO: 120014 - DNA, 349 bp, Homo sapiens
gcacgaggtaatgcagtaggacaaaatagttgtcaaatacgttgagtcatttattaaagttatgactcagctttagaaagaaaaattgcagctgagagcattttgggaggacaaggcaggtgaatcacctgaggtcaggagtttgagaccagcctggccaacatggtgaaatcccgtgtctattaaaatacaaaaaattagctgggcatggtgacaaatgcctgtaatcccagctacttgggaggctgaggcaggagaattgcttgtacccaggaggcgggctttgccatgagccatgattgcaccattgcactccagcctgggcaacagagggagactctgtctcaga

SEQ ID NO: 120015 - DNA, 338 bp, Homo sapiens
cacaatgctctcctaattcttcttctgctctgatttttcctaatctgtctcctttactgagacccaaaacaggaactcttgagctgaaaaaatttctccagttaagggcagggataacgtgcctggctcacagctcttgattctcatgttcctattttcccagtcatcaccacatgatgtgtttgggttatggtacaaaggtagcaagcactgcaattggaaagaattctgaaatgaattgggaaaagtgctttctctctttcttatataaggcttgttcaaagcagctttctggaatggttggtgatgcctgtttccctagcggtcatgtggtcctg

SEQ ID NO: 120016 - DNA, 498 bp, Homo sapiens
ttgctttttcttactgttgtggttaacactttactcatatcgtttgtgagcccccaccagtctgcagtgtcttaatcttattttaaaaactgtgatcatgggaggctcaggtgggtcataacgcacatcaggttggtcatttcctgggctacataccttgtacagaataacattatacaaacaaggcttttttagagttctagtacacttatgataactgtaaaataataggaccatagcaaccttttgtcctacctcagtgacttgatgtatatactgggaacagtcctcagtctgaggaaggtcagttgaagtccttactgtaaaattccaaattttaaggcaaatgatatttgagaacagttcctttcatttttgggcatctgagaagaatttctgtgctgagaaatagagaggttaattcagtccgaacagattccatgaagcatttgggaacatggaaagaatattttaaaataatacaacggctttgacttt

SEQ ID NO: 120017 - DNA, 790 bp, Homo sapiens
ggtggggcaagggcggagttagttaggtttccttttcctgagtgtgacgcgccttagtgggcacacgtgctagccgggatggtgggaacggggggaagatgaacccagaaatgctgagtcagggtggccaagatggttgcctgtcgccatcttggggccttcaccagagtccaaacaaaaagctaagctagggcctggttctgctcccagtctagcattggaaccacttctaggaacgtttcttgctgagtcagcttgtcatacagatcctggtctacattttgaaccttacttttgaggtgaaaagctcagctaggtcctggctctggtcccagtctagcattggaaccacttctaggaacgtttcttgctgagtcagcttgtcatacagattctggtctacatttagaaccttgcttttgaggtgaaaagtgaaaggcaatggaagggttccgtagacaaaaagggtcgagaggcagggcaaagaatgcaaaagttcctttattaagctcttggacgaggttcactggtccgcaggggagggccggggaagtcgcactgtgttggaggtgcagcaggcttatatggacactaggtgagttaggggcggattcggggtggggcaagggcggagttagttaggttttattttcctgagtgtgacacgccttagcgggctcacgttcttgccgggatggcgggaacggggggaagatgaacccgctaatgctgagtcagggtggccaagatggttgcctgtcgccatcttggggccttcaccggagtccaa

SEQ ID NO: 120018 - DNA, 504 bp, Homo sapiens
caacccaaatgtccttcaacaagcgaatggatacaaactgtggtccattcgaataagggaatattagtcagcaggaaaaagggatgactactgacacccaccatgacacggatgggactcaaacgcaccatgctgagcagaggaagctggactctgaatgctacaaacagtgtcattctgtttacaggaaactcagaaaaggcaaacttttaggccagggaacagctcagtgttgccaggggctgggggtgtggagatttggctgatgacaaaggggcacatggggaccctctgggggatgaagctgtgtgttctgtttgactgtggtggttacacagcaagcccatgacctgcaccctaaaaagagtcaatcagccgggcacggtggctcacacctgtaatcccagcactttgggaggctgagacaggagaatagcttgaacctgggaggcgaaggtttcaatgagccgaaggttgcagtgagccgagatcacgccattgcac

SEQ ID NO: 120019 - DNA, 609 bp, Homo sapiens
ccctggctgacctagcaggactccggcactgctcggatgtgggactatatatagaggtaacagctttgtgtcactgttaaatattctgaatttgattgtagcaatgcagttatataagagaatgtacttatcttagaagatgtgtgctgaaatacttaggagtgaagaatcatgatggctgcagtttactctcaaatggttcagtaacgatgacagcagcagcgacaacaataataatgcatatgttttcttttggtttttgttttttttgggatggagtctcactctgttacccaggttggagtgcagtggcgcgatctcggctcactgcaacctctgcctcccgggttcaagcgattcttctgcctcagccttctgagtggctgggattataggcatgcgcccgccgttgccttggctagtttttgtatttttggtagagtcagggtttcatcattttggccaggctggtcttgaactcctgaccttaataatgcatgtgttttatgtgtgtatgcattgtcttcttcaaggcatcttttctctccttttctcttcatgccatgctcttttcctaagacctcttacccactgcctcttccctgcttc

SEQ ID NO: 120020 - DNA, 338 bp, Homo sapiens
aaggttagttcccattcccctgctgtggccagggggccccaaacccttctttcactttctcagcttctgtcccctagccaagaaactctctgacccctctcctctccatatcatgtggttgggaggccaggtccttgcttcactgcccagtgtcagggcagggacagtagggaatctgaggccttgctgaagtcacagggctgtcaaggaagggagcatgggggcagcacgtggacttcctgactcccagctcagagccccgtccctcacatggggctgccccatctgggattggcatgacctaggacacagtatggagacccagagcagggtgtggc

SEQ ID NO: 120021 - DNA, 373 bp, Homo sapiens
tagctgggattacaggcacccgccaccacgcccggctaatttttgtactgttagtagagacagggtttcaccatgttggccaggatggtctcgatctcctgaccttgtgaaccacccgcctcagcttcccaaagtgctgggattacaggcgtgagccaccacgcccagtcgatgatgtgtccttttcagttcatcatactgggggacggacatgatgttcatatgtccccttactggtaatgacttgatcactggttaaggtggtgcctgctgagtttctgcagtgtaaagtttctattgttcccattgtgattgataaatagcttgagggagatatttgagactatgtcagtgtcctgtttctccttaaact

SEQ ID NO: 120022 - DNA, 250 bp, Homo sapiens
caacacttaaagacaggaggtaacagaataatgtatccaaaattctgagggcaacagttacttaagacctagaattctaaacagtctacttaacaataagaagcaggagtataaggaatataagagttattcagatacataaaaattcaaagaagtacctccgagcaggttcccaaaagttacttaaagcaatattccaacaaactaaatagaacctgaaaaaagggtgctttgggaaacagaaaacagg

SEQ ID NO: 120023 - DNA, 363 bp, Homo sapiens
gtaacacaggtcataacttctgctgcctgagccctgggaactgttaaaaatacagatggttggtgtttcccatttgtctctttttcttacacttaagttcctttaccatttaagatttataaagtttcaccaacctccgatgagtgattctcagaatcactgaacatataattgaaaacactttataaccccaaagagcaacaggtagagaagttaatataaagcgtgccatgaaacactagagactaacaaacatgaaccactggaatggagttttcttttcagaacagggccagcagggccagggagaaagttagctcctctcctgccatcgaatattaaacacgcgcgcgtgtgcgcgcg

SEQ ID NO: 120024 - DNA, 327 bp, Homo sapiens
agctatttgcaaccataaagagaattcacaagaactctctttgagggttaacttttcctgtttatagtcaggtagtttgggttgtttgcttttatattttaattatttaaagagctatctgaatgaagctacacacttcaaaaacactaaattgcaagtgggaccaaataatggcttccaaggttttacgaatttactaactatggtactacataatacttcttcttgctggcctatcatattctttaaatatttcacttagtcgatgagcttcagatttaagaataagagtggaaaggagagacaagaactaagtttaatgcaaca

SEQ ID NO: 120025 - DNA, 626 bp, Homo sapiens
acttccacattttgtggggacacaattcaacccaaaatgcctccctccctagcagttccagcaaagacagcccagtgcggagcagcacgggctcccaggtactcgccgatggaaggtcctgggatgggaccagcgggactcaggcagtagaccaatgacatctgctgtggcctctaagcccacgagtatatgagtgtattctcctggctacacttccaaggcagtgcaaattgggttaaagctgaaaaggccatccaccctcaagcatgactaaaagattaagagttgtatctcaaaaccaaaagccaagtgtgcgtttgggccacagctccgaccagctcagctgccaagaagttatcagtgcagatgaactgcctaataacgggaagtgcctcttaatggcccttcaaatcatttcattaaaagttgccgtgatgtctccagctgaatccgagtcgtgctgggaaggccattaggttaatcaaaatacaaggacagctcaccatctactcttaattaacaaattaggtcctactgccaactcagcaaaacagagagctggccagcgacccttggggcagtcggaatgatcagaacacccttccatcactgactgccaatcaatc

SEQ ID NO: 120026 - DNA, 360 bp, Homo sapiens
ttccaaggccatgccaaattggtttaaacttaaaaggccattcaaccttaaagcggccacaactccgaccagctcagctgccaagaagttatcagtgcagatgaactgcctaataacgggaagtgcctcttaatggcccttcaaatcatttcattaaaagttgccgtgatgtctccagctgaatccgagtcgtgctgggaaggccattaggttaatcaaaatacaaggacagctcaccatctactcttaattaacaaattaggtcctactgccaactcagcaaaacagagagctggccagcgacccttggggcagtcggaatgatcagaacacccttccatcactgactgccaatcaatc

SEQ ID NO: 120027 - DNA, 206 bp, Homo sapiens
gatttccaccctctgcctgcttacctcttacccctagacctccccacaagctctcctttgaagtggcctcctgtctccccttggtcttctcaaagctggtccaggcattccactgtcacagactctagtggtttctggagataatgacatcaccagatccagctcattctggcgggtggatcaagcactgtttctggctatgctcc

SEQ ID NO: 120028 - DNA, 230 bp, Homo sapiens
ggatgaaaaagaaacatttgaccttgaacaaagccggagctgctctgaatcatctctgagcccaaccagcctggcgtgtgctgtgctttcctcctttaggtgggtgtctggctgcaggcccaaagcaaacatgatcctctcttcaaaggatgggggaccccacttacgaagagcctctttatccctgaatgctccttagaggatggttcaaagatgctggaaggaggtct

SEQ ID NO: 120029 - DNA, 153 bp, Homo sapiens
acggctccatgcctacatgcacaactgccagacacatgcagcaacgttcaacagcccagatgaggaggtaatgcaggcgctcatccaaaggggtacagataagcaaaatcagtgacacctgaaggagaaaagatggcttgcagaaaaacatgt

SEQ ID NO: 120030 - DNA, 468 bp, Homo sapiens
gcttgggccataaaacaaacagtaacaaattcaaaagaattaaaatcatacagagtatgttatctgaccataatgcattgaaactagaattcactaaaagaaagagaagtcaatgaaactaaaagctagttctttgaaaagatcaataaaattgataaacctctagcaaaacagagcaacaaaaaaaagagggcataaattatcaatattactaatgaaagaggggaagttatcactacagaacacatgaacattaaaagaaacaccatagaaatattatgaacaattctaatctatacatataacaactcagataaaactgaccaattcctcaaaagctacaaattgccagaactcgcccagggtgaaacagataaccagaataaccctataattactaaagagattgaatttgtagtttaaaaaaaaaccttctgtgaaaggaatctgcaagcccaattctacaag

SEQ ID NO: 120031 - DNA, 747 bp, Homo sapiens
aaaactctaaaattgccatgtgcatatgtatgtatatacacacacatatatataaatagacacacatacacacacataaatatttcatcaaacaactgtatgtattctctgctttggatttctttaaaatagcactacaatcttgttaaaataagtagaaaatactctaaaatgttaaaataaaagggtgaaaggaaatttataagaacttggagaaatctaaacacatttgaaaattctcatttcaggtattagacaatgttgctgtgtctcactgataagaccaaataagatatgacatgatataaaagtttgggatcaggaacagtttaaaaaagactccgtatgaattgaaaatattaaaagtatatatttttatttaaatatatgtatatattatatgtagctaatgcttacatatggaaaatattttcatgattttttgacataatccagttaaatttcttattttataaaggaaactgttgcagcccagagtctcatctgctcaaaaatagacactcagttagtggcacagttagagttgctgattccaggagcagctctctttagaccaatctcactatagaacagtgtatctttataatagcatggcaatatttgtgccattttatcatttctttttgatgtatgatttttcaatataataaaacctattgatttagagacccttgtatgtattgccaaaataatattcagaaagtgagtgctttctatttatataag

SEQ ID NO: 120032 - DNA, 386 bp, Homo sapiens
attttaccatcatgcttgtagttttaataaacaaaaatcaaatgcatataggcttcacacactttgtgtaattgcttgtttaacatccccaaattccataaatgcaaaaactagatctgtctggctttccattaagtccccagcacctagcaaggtgcttaacaaatagcagatggatgttggaaggaataaaggaacaaagaaaagaatagaagaagttagtgacttgattctatacagagtggaccttgacacatactgcaagtgaatgttaaactaaaagtataatttctttatcagtgaatatatttccatgaattttaagtattttgctgatgatttattaaatatgtatttcactactttcttttcttttaatcagtcct

SEQ ID NO: 120033 - DNA, 356 bp, Homo sapiens
  misc_feature (18)..(18): n is a, c, g, or t
  misc_feature (21)..(21): n is a, c, g, or t
  misc_feature (26)..(26): n is a, c, g, or t
  misc_feature (41)..(41): n is a, c, g, or t
  misc_feature (64)..(64): n is a, c, g, or t
ggcaagaggaaggctganaangatgngatggtgagtgccanattcttcctggccctgagcccanccccagtgtgacactcaacttttaggcatgggagagcaagattgacggcttcaagtgcttcaccaagaagatggacaacagggcactcagctcaacttcacagccaatgagtggtggcaggctttgagaaagagcatcagaagcctgacagttcttcagcctcagccaggccttggagctggaccaggccatccacttcagtatagatgccttccactctgtcagtgagctctttgccagtcagtccaggaaggacctggacccagccatggacctgttagtgctgtctcat

SEQ ID NO: 120034 - DNA, 540 bp, Homo sapiens
aggctggtcttaactcctgggctcaagcaattatctgaccttagcctccctaggtgctgggagtgcggggattactggtgtgagccaccatgcctgtttaaagtttcctattcttgttactttcctcttgacatttgtttttagaactctgatgttggatgtgaatgtttgatgctttctggcatttgcttctgtaatggttcagtgagttttattttccgatctctttatgttttccctctctctctgaaacagtaaggctttttccgtctctttattcttttataatttgagtgtttactctgggtcaggtactgtgcttaactattgtatatgtattaactcaggataatccctacgagaatcctggaaggtaagtggcagtatctttgactgtgtaaacaaggaaactgaggctttgcctacttgagcaaggttttatggtttgcccccaaagctggtgcctcctataaaaataatagctaccactaatgacagtggttctcaaagtgtgggagactccaagggcctctgaagtca

SEQ ID NO: 120035 - DNA, 768 bp, Homo sapiens
caggaatcctcctcaaattctttccaggtcaagctgaagtataaacaaagtagagttaccattacaaaattttaatggggggaggtggtaacaagatttaacacctccaaccccttgtttatcttcacgtttgaaatggagatgtcaaaagttcttcttttttttttttgagatggagtctcactctggcacccacgttggagtgcagtggcacaatcttggctcactgcaacctcactcccaggttcaagtgattctcctgcctcagcctagctgggattacaggcgccccaccaccacacctggctaatttttgtatttttagtagagatgcgttttcatcatgttcgccaggctagtcttgaactcctgacctcaagtgatccgcccgccttggcctcccaaagtgctgagattacaggtgtgaaccactgcacctggccaaaaactgttctttttaaaaattgagatataggctgggcatggtagctcatgcgtataatcccagcactttgggaggccaaagcagaaggatcacttgagcccaggagttcgagaacagcctgggcaacatagtgagaactcgtctctacaaaaaaatacaaaaattagctgggtatggtggctcacacctgtagtcccagatactcaggaggctgaggtgggaggattgcttgagcctgggaggtcaaggctgcagtgagctgtgattgtacgactgcactccagcccgggtgacagagtgagaccctgcttcaaaagaaaaat

SEQ ID NO: 120036 - DNA, 335 bp, Homo sapiens
ataccaggaaagggaacagcatatgcaaagcctaagaagcaggaaaaagagggacatgttcaaggaatcagagaaaaccataggacttggagcaaaataacaaaaagatatagaggaaaagatgagcctggagaagcagatggaagggggattatgcagagcctcataagacaaggtaaagctcttgcattttttcctaagtgtgattagaaaccactgaaaggatttaggcctaattttaaatccagtttgcagtgttaaaaattatttggcagtagtgtggagaatggattggaaaggggcccaagtggacagattaggatgctgtcacagta

SEQ ID NO: 120037 - DNA, 332 bp, Homo sapiens
aactagttgtgccacaggtaaggcagtgctccataaaacaaaataaaacaaagcatagtgatgggagtgtgtcaaaggaatacaggagccaagggaaagagctcccagtggccaaagctggaacaatttgagcaataaaattaatatggtagtattggattataacccaaagtataaaataaatatccatgagtgcatagtgatataaaaaaaatgacagaataaaccaatcaacatgggaaaggagacaaatccccctcacagaggaattccaaacaatgtagctattctgctatcaagaagctggagcctagctccttgctccttaagtg

SEQ ID NO: 120038 - DNA, 561 bp, Homo sapiens
tcgcgctcgttacccgacggatatgcgtatctgcatttcttccatgagataaacttgagccccactaattacttgtttattttatttttctaatttctttttcttttcttccttttttctttttctttttctttcttttttttttttttttttttgagtttgagtttcgctcttatcgcccaggctggagagcaatggcatgatttcagctcactgcaacccttacctcctgggttcaagtggttctcctgcctcagactactgagtagctggtattacaggtacccaccaccacgtccagctaatttttgtgtttttagtagagacaacgtttcaccatgttggtcagcctggtctcgaactcctgacctcaggtgatccacccgccttggcctcccgaagtgctgggattacaggcatgagccaccacgcccagcctgttttctaatttctagtcagatgtcttggcaaagcatgatttgtctcatgggaatacccatttcctcccatagcatacctgatcattgtctgcccacagtaagtgcatgctatgagcttctt

SEQ ID NO: 120039 - DNA, 595 bp, Homo sapiens
cattccaggcagagggacctgcaagcacagaggactggacaaaggctggaataaattcaatgtagtattcaaggaatagaaaggtctttgtggaatactgtatcttttcatggtgggggttgcagttgtgtttaaaaaaaatcaataatctcaaatacttaagccctcctacttcattatactttttaaagaagcagtgtatcttagcagttagaaaacttggattctggaggcagtttacttaatcctacaaggggataatttggccctagatcagaccacctgggttcaatcctggatttttctacctactagctaagtgacgttgagcaacttacagaatcttactgtgccttgtttgccataaaaagaagataataataatcctattgcacagaaatcatttgatgataaactgggataatgaacataaagttttgaccagcatagggaaagtatccaaaatatgttggctattataattcgttccttgtttcctctagaagtttattttcttgatcattgttgccatccttttatcgcaccagccactcattgaacagaattctaaacataaagtagaaaatagtttccc

SEQ ID NO: 120040 - DNA, 1054 bp, Homo sapiens
aaagaattgggtgctttttattttctgtttttgttactttaactgcctggagtcaatgggtagaactaaagtaacttaggagaaccttcataaggaatctgtagcgccaagaggttatccagaggagccagtgtctaagccagcatagtagagggtgaaggcccctgagatatccagttcaactgcatcattttgtaagggatagaattgtagcttagagagaaggaacttatctacggcctcacagctcctttttggcaaaactggggcagaactggggctcctttttggcagattttgtttgcttcattttactggtacagttttatttttgtttggattcaagcaacaaaagcccacaaaaccagcttaaggaaaagaaatgttttgaaactgccagatcagctccaggacttgggttaccaggaatcatggggaactagaactagggtctggaaagtcattaaaaatcagtactgctgtgttctgtttcactttcaacagaggtgaaaaaaaacaaacaaacaaagatacaagaaacgaataacacaacacaggacatgaacacacaaccaccgcttacgaacaaacaaaaaggggggggggggccccctaaatattctgccccactcgcggaggggacagagatttagtaggctagcacaacagctgctctgttgtatagatagaaaggaggggccacgcctatatgtagggaggaggttaatataatgacagagcaggcacgcgcgtgcggcttttaataataacccatgctggtcctagcggaaggaaacagtagtggtcggcggtggctcatgtctagaggagagacgcacactacatctcgggggggggagggaaccacacatgttggagccgcaaaccaccacctaggaaggagtagttagagcagcctgggcggacgtaatattactaactagtcgaggcttattaacggggtgtatacacaagcccacggaatctatactgcggggcaacagaaagagttgtgtcccatgcagattggttgatggtagacaaacacagctag

SEQ ID NO: 120041 - DNA, 153 bp, Homo sapiens
ggtcagagacgacgtgtgggatcctgggatggaattctattccatcatctcagtagaaatgacgtgattatcctggaggagtagaagctgatttgttttaactgtctgagattacatgagaacaagaatcacggtaagccacagggttaaaat

SEQ ID NO: 120042 - DNA, 185 bp, Homo sapiens
cgtgttgggcctaccgcgtgttgggccaacgcacctggaacccttattatcaaatcctttttctccagtggttagagcatggaagttttctgctgtctttggaactttgtctgcaaacagctcaaaggagacgtggctcaagggctgtccatggcctagaacatggtggggttgacggtggctgg

SEQ ID NO: 120043 - DNA, 327 bp, Homo sapiens
gaggacaacccccttgttgttctcatcataatgagtgagttctcatgagatttgtttttttaaaagtgtgtagcacttcccccttcactctttctctcctgctttaccatggtaaaatgtatttgcttcccctttgccgtcttccatgattgtaagtttcctgaggcttcttggctatgccttctttatagcctgtggaactataagtcaattagaccgcttttcttcataaattacccagtctcaggtagtcctttatagcaatgcgagaacagactaatacacaggtgatcaggcctactgtggtatactttaaaaaatacatag

SEQ ID NO: 120044 - DNA, 695 bp, Homo sapiens
agttgtgagccactgggccttacccagttctattgtttttaattgttactctttgactacatcatcaccactaaactattttaagaaacaaaacaatactatcacctaacttactatttcatttctattatctaccaggatcatatattcccttattttttatttaaacttctgtcttttcatggagattgaggaaacaaaagactatcctcctgccctcactgtgggttaactacaagtacatgtatctcatttttcccaatctatatttgattctatttttcctctaactttgaaactttaaaactaaagtttcagtttattttattttattttattttattattattatactttaagttttagggtacatgtgcacaatatgcaggttagttacatatgtatacatgtgccatgctggtgtgctgcacccattaactcgtcatttagcattaggtatatctcctaaagctatccctcccccctccccccaccccaccacagtccctagagtgtgatgttccccttcctgtgtccatgtgttctcattgttcagttcctacctatgagtgagaaaatgcagtgtctggttttttgttcttgcgatagtttactgagaatgaagatttcccatttcatccatgtccctacaaaggacatgaactcatcattttttatggctgcatagtattcca

SEQ ID NO: 120045 - DNA, 291 bp, Homo sapiens
cccagctactcaggaggctgaggcagaagaatcacttgaacccaggaggtgaaggttgcagtgagccaagattgcgccactgcactccagcctggcgacagagtgagactccgtctcaaaaaaaaagaaaaaatagattgtctagggtcgagtgagagaagggagtgtagaagtttgtctgatcttaagtttgtagcatcatgagattgttcaggctcaacctgatgggatgggagactaaagggcatctgggcttagatttgtgagaactaagtttgttcaccactggga

SEQ ID NO: 120046 - DNA, 901 bp, Homo sapiens
tggtcaggtgttggaatcggtgggtggattgccagtacatttgcaccgtgtcctagagagcctctatgcatttcaactctgattctccttcaccatctacgcgcagcccacaaccgcaggaccccacccctggctctgaatctcccatgtcctggcgccaagcaggtgagtcagcctaggaggaggaagggcttccggaagccaagcccatgctggggtggtgagaaacaactttcctatgcaaggaggtgcctgagcaccccctgatgatcaagctggagccccctcacctccccgaagtgtgctggaggaaaggccagaaagaggcagcagtcttcacccactgaggctgagtttctcactcatgccaagttttacataagctggggaccatgtgcttcaaggctagaggtcttggtgggcccagggccttggaggggcctggatgaccaaggggtccgtggcttaggccctggctctgcatggggaatcttgggaaggttggaagcccacagcccctactgagaaaggagccacgggccagatcttttgcacaaatcctgcctgtgctccttgactgtctctccccaccggggtcacggtgaccaagcaggcaggagactccatccgttcacaggactagcatcctgggagggccctggcctgagcgagctgctgcaggggaccctcatgctggatggttggccactcagcacccttttctctgtggagcagggatgacatttgagagccaccaaagatgggcaggaaaaacaaaggccaccacagaggaagctgaaggcagaaagagatgcagagaaagtgggagaaactcggctgtgctttgtgggggccctgcagggacatcagctcctgaaggggtgaaagaaagggtcccctg

SEQ ID NO: 120047 - DNA, 431 bp, Homo sapiens
ttctctgctgacttaggagttggggctgaatgaagagaagaagtcaattacaccaagatctaagaacattccagaaagagggatacgcacatgcaaaggtccactactctgaggggtgggaggtgagcttggtttgttggggacaaagaaggggcactggtttgaggcatgaaaccaacctgacagtttttttttagctctctgtgagggccgccaccttgtggtccatgtctttctgtcctcccacagtgcctgcaaagagcctcgcatgctctgtgtactcagcgaacacactgatggacaggtagtcacctgtgaaaatggtgacacacacgccccacctcttggggcattcagagaagtggagaactgacttcgtggttggagaccactgaagacagaactggaatcagtggaagagagatccctgt

SEQ ID NO: 120048 - DNA, 448 bp, Homo sapiens
tgccatgaccttgacccacacacacccagcattcttaactcctaggaaccccattatatgaaaatccaaaggtatgaaataaattgggagggtagttacttgttacaaagtgattccttactttacagaaggatttgcttcagatttctcttaagtactcagtttccctagtgtatttaaatgttgttctgtgaaaattaagcatttgtaaaagaacttcaggagcccttctcttgtgtaaagggagatatccgtgtattcataggcaaaggtgcagaaccccaaagcccggttgatgttgctggagaaacaggcaggcagggcttggggtggacatcataggcagcccacctgaaagcagtaaccagcgattccccttcccctctccccatccacatccctgagctgggagagctccgcggagcttgataagtatatacccgagccc

SEQ ID NO: 120049 - DNA, 281 bp, Homo sapiens
tttaatgtgatgaaatagtgtttttaccttcatctggcagtctatttccactttttcccattctttttacttttttaaagccactcaaatttagcaatgagggattatatatctcttgttctttttagatagatttactttaccatacataaaaatttctcacaaaggcaaatagcttacctcgttctttgtaaataacaccataattccatttgcttaagcctatgagtacaccttaatatttctcttccacccccacatgtttaatctatcacctgatc

SEQ ID NO: 120050 - DNA, 431 bp, Homo sapiens
tggtacagggtgtggtagtgcgtgcctgtaatcccagctacttgggaggctgaggcaggagaatcgcttgaacctgggagacagagattgcagtgagccgagatagtgccattgcactccagcctgggtgacagggtgagactctgtctcaaacaaacaaacaaacaaaaaaagccaagtttctcttcagaggtagaaaggtactcctctaatagatcattactaagcgttaagcgtttccataaattataaatgagttgcaaaacttccgatacaagctcctgtccaaacctaagagttgcaggtaaagtctggttaaaggtatccagggaagacttatagagcagagcaaacaacctacattgtaactgaaaattatgtaccgcctttttatcccccctaaagagacagggtctcactctgttgccgag

SEQ ID NO: 120051 - DNA, 313 bp, Homo sapiens
tgcgcggatcctggggcataccataaactcttcatggattatttctctggagaggggtgggagcaagtaagctggtagatgggaggccagcagggcctgggtatgaatgtcaagtacctcaaagcagcgtagatgtgaaggaagggtgagctgcacagaggaggaaggaggggtgtcaatgagctcatagaaaccgccacagaaaggccaagcaaagagtgagaagaagcagccaaatcacaggtcagaacaagctgtgggtaaccacagcccccagctattgcccttgaaacctgctagactggtctccaca

SEQ ID NO: 120052 - DNA, 704 bp, Homo sapiens
ggggttattatgtcctttttcttctcctttgctgtgtttaggtggctactagtttattgagaaatttttggtctatttgcataagagatcttagcatattataatgttctttctatgtaacatttgtctgcatttggttttgatgtccaggtaacactagatttatgaaaaaagtttgtgttacctctttttccgttatgtggaacagtttgtacaaaattaatattagttgttccttaaatgcttggttgaactacccagtttaggcccggttgtttgtgtgtgtgtgtgtgtgtgagacattccttcttactagtttaatatttttctttttaaaacaccttaaatgtagttttttcagttagagtctgttagtggtaagttctttttgtgtttctggaagtttctttgtttaactctcactcttggatgatagtttagctgggtatagaattctgacaagtctgttttgagttttttcttccttaaatcttttgaaaattttctaagttttttcttattttcagtttggcttgatgaccatgtggcttgatatgtggcctgaatcttacttaaatattaggtctatagatttaacaagtgaaaactaatttttataattcatttcctagtttttatttagataccagcaatattcatgataaaaagtaccatatagtctcagatatctttaattttaatgg

SEQ ID NO: 120053 - DNA, 236 bp, Homo sapiens
tgtccatcaaaacccccagtatgatggccactatggaactggacttctatttcaggactggcatttcctgaagcgttatggcagggtctctcaaagtgaggtgcctgggatagtaaagagattacgttataagagacacaaacgtgacagggaactactgtgtcactgatggttccagcaccttgctgtccagtctgtttgatgaggtcaaggaaagattctctctgtagctgtca

SEQ ID NO: 120054 - DNA, 712 bp, Homo sapiens
aacacccctttgtagtattattattggccccacttgacagataaactgaggcacagagcaattaaagcacttgcccaaggtcatacagttataagacagagagacaggattcagaccaggatgtaagtctgccaaggcccaaatattaaccacaaatgcctgcttcagcaggttcatgggaagatttaaggtatgatgaaaggggttctaaacagtgatgtttgttatcattttgaaaggagaccagagaagcatttcctgcatccattttcctatcatcgttaattgcctactcacacacagtttaaggttatcagtatatagtaaaatttaaaatctgtaataggataatgtttcttattttgccttttaaacactgatttttctcatttaaaaattagtatttgttataaaaattcaaatcttacagaaataacagatatacagtgaatatcccatgaaatcttaattatcctcctacccccaaatcattatttactgttgggtagaaattcctccagctcttttcttttttttaatctgagacggagttttgctcttgttgcccaggctggagcgtaatggcacgttctcagctcactgcaacctcgatttcccaggagaattgcttgaacctgggagatggagccttgtggtgagccgaattggcaccattggactcaatcgtgccattttttgaaatgcttgtccc

SEQ ID NO: 120055 - DNA, 337 bp, Homo sapiens
accctctactttgccccttccgttgtggatgctatggagatggtctccctgcagtaccagagattgcccttgtgggtttcagcctcctaatcttggcatctctctgttgtcgctctcagcaaccatctcttctctgctacatccaccccttttcactatcagtgagaatgacaaaatccccaggtctttcttccctgctgttggcaatcaaattaggagccacagtttccctagttactctgagaaagagtaagtgctaacagctgtgtgtgggccagacaccaactaataatccgtagattccttcgagaatgccctcttctccttagattggcca

SEQ ID NO: 120056 - DNA, 391 bp, Homo sapiens
atggagtaaccggaactctgtactgtcttcacaatttttctgtaaatctgaaactactctaaaattaaaagttcacttaaaaacaacaatgaaaaaaatgtcagagaaacactaacattatcaagtagatcacaagcttcaaattatttaccaagatttccaaatgagtttaaactctccaagggaaaatatctctgagacaacatctttttatcaggtcccctggacaaataccaaagatattatctatgattaaaataaatagtaattttcctccacattcatcattaatcaatcatttaggtcattgcactgaaagtcaatagcaagaatttaaaaaatctcaagcatctacaactgctcttccctgcccacactattaaatgataaa

SEQ ID NO: 120057 - DNA, 712 bp, Homo sapiens
aaattaggtaattgtgtttgtatattatttgtatgtatagaattccccctcataatctattgtactgtaataaatctgctaaaaggttaccttagaaacattacctggttggattatggatgtgtttgtgagcctaatctcagtaatgaaaaatgcctttagtggctcatgcctgtaattccaacactttgggaggccgaggtgggaggatccctttagcctaggagtttgagaccagcctgggcaacataatcagctggtgtgggacatcctgggatagataaccatttccttccaaagtcaagatagctgcccagtgaagatcaaacaaacaaacaaaaaaaggaaaaaagaaaaatgcatttatggggatgaggactttgagaaagctccgactctagaaagctgaaacaccaagtaaatgcccttttctagtccttaatgtgacgctaaaagattgattaaatatcataggacattgaatatactgttgtaatgctcttaggactttttttgaagatcatttggggaacttcagttacagaaatttatcacttgattttggcataatttaatcattgtggattatttctgataatttacaaggagtatctcttcattatcacataggtgggagagctgatgtgtcttttaaatgattgtttgcaatgcttccaaatacctacaactctttatttttatatatatatat

SEQ ID NO: 120058 - DNA, 449 bp, Homo sapiens
ttttctgtatgtataatggtaaactgccagaatactgatcaggccagaatgatgtttgaatctttctctgtaacccaccaacccacacgcatcctcccattttgttttggggaaggaagaaatgtatccacgcccctgtctgtcccttcaccagttgcatcagtgaggtggagactgtcccccctgggcagtctgctcgctgggtggacgcactgcctgtccagctattctgcactggctcgtctctaattaaagtacttgctatgaacgatttttaagtactggagcttaatgaagttagaaaaaggatttggatgcagtttgtgaagacttcaaattgtttgagttttttctctagggagaattgtaaagtctggaggcattctgaattacttacaatgtattccattttgttcttttcaaaaattctctcatagtggtgaatagct

SEQ ID NO: 120059 - DNA, 603 bp, Homo sapiens
ctccagccctgtctcctaagcttcaaactgctggatctaactgcctactaaacatctctgcatggctgactcggtgtccaaaatattaactcctccttcctatacctcaattccaactgctgttcctcccagtgttcaccatctcaggaaatgacatcaccacccagcccattactcaagtctgaaacctgggagtcatccttgattccttcttctccctcagcaactcctttcacatttaaacaatcacaagatcctattccactcctaaatatttctcaaatgcttagtgacatagatgtcccttctctatatgcccactagtccaagctacccttattctttgcctaactactacagtagctccctaaatcccttacaaccattcttgccccatccttccatcaatcgaatcaaatccaattataccaatctctggctttaaaacgttcaaaggctttatagcccagagtgtccaaaggaaagtattgggactaattgcatcagaacaagaggagcttgttaaagtatgggctcttgagctgcaccaaaccgaaagaatcaaaagctctaggaacaggctcaaggcactgaatttttaat

SEQ ID NO: 120060 - DNA, 442 bp, Homo sapiens
ttgagggcatcctggacaaagcagtatgtaccgtgggagacagaaaagtagtaagacacatggttccccaagctcctttatgcctaaaaagttctgactttgcagttgagtattaagctcaacaactcgaggtgaaagtcaccttcactgaggggagaaggtgagtcttcctagctgactatggagatgtggggcctgatctaaataaaaagggtcattctcttctgtggagaactacacctctcctttgattctattttgattatagctataaatagtccttagggcccagtgaactaactagccctccacaaaaacagaaatggagatataaagaatttgtgctcttcccatcttctaagtatgcttgtgttcttgggatatcactccactaggggcatttcacaaggatgtaaagacccagactagtctaatatgagac

SEQ ID NO: 120061 - DNA, 478 bp, Homo sapiens
tcactgttgacatctcttctgcacagtggcattgctgggaggtgcttactgtgcctattcaaggggctggcagccgcagcctcactgcagatcagggacttggcttcccagttgaccacaggtccaagaacctgcagggtccagcctcccccccatccccagtcttccccaccctggcccggccctccaggtgcagaaacatgcaggcccctctccaggactgtgggaggagcgtgtccctcagactggcctgtgtcctggctcctcttaccacctcttccacaggttgtcacctgcagctgccccaggataaaggcaaggccagagaggactcctgaactcctgtgtgcctggggtggcaggggcaaacatagccaactggtggcctgagcggggccatggtgaggacacccttggtggcttgtcccacatcaagctgggaggtgacactgaggatgcattagtctgcagcgtatga

SEQ ID NO: 120062 - DNA, 501 bp, Homo sapiens
aaggagcatgggaaatggcttcccctccagctggcggaaatcctttcccgtgtaccctatttaatcttaaccccaagtctgttcatgcctgggcattcaccccgtttcttatgcccctatcttgggttacaagaagctggctctggtattagctggttcagatctcagcctctctaaccacctcagagactaagggtattcttctcaagtccattggaggaattgtcttttcctgcctagggtccttactgaaaatagtctttctgatgttatgctattaaaggttcctccagtaacagatttgggtgggttttgtttgtttgttttttgctcaatcaccttatgccagaaccagatgtattacaatgtacaaaattaaactgtatatctaggtagacagatagatacacacattgtgtgtgtgtgtgtgtgtgtgtgtgtgtaaagagagacagagagagacagagcaagagagagagagggcatctgaatagtctgagg

SEQ ID NO: 120063 - DNA, 569 bp, Homo sapiens
tgccgcttccctcccttaatgtgtccccttttgggctgggtggcacagctggtctgcacctgcagggctgaaggacatccctgggatacagggtgtcattcctcctgcttgatctgcctcccaaaacccagccctgagcaggcagcaagtgccctttcagcctccgctgcaccagcctgagccggaatcccagctctcattagctgtgtgattgggcaagttgactgagctctctatgccttggtttctgcatctattaactgggattaattatatcgacacctctttgggttgctatgagacttgaagagagtttgggtgaagcactctataaatgctaggtaagtgagtgttattaatttcccaaacgtgagaaaatgaccaacatctgttctggcacccctccatctctatgccctccccaccagccctatcaaatgcagtttcctgtaaataatcctcacatggggatggagcagggccggggagggagtacatccctggtccacaaggctgctgtgacatgacaaataagctgcaggctgacaatgtctccaagacatattgga

SEQ ID NO: 120064 - DNA, 289 bp, Homo sapiens
agaagggagggttcagtagtcatacttaagtgaactagaaaaaataccgaaatgtttttatttcaatagacttacatcttgtaaggcctagttctcaaagacctcacgaaagaatgacataaagagtttagtctgaacaatctggttagagaggggaaattcctgtaatcagaaagagcactcacaattctacgtaaaccaacgagaaattttaagggaattgggattgttttgtaacatgttgctgagctcagaggctgtgaatggggacagatcaagccagttctag

SEQ ID NO: 120065 - DNA, 395 bp, Homo sapiens
tgcacttgtgttctggaccatccttctcataaatgtgcctattcaattccgtctgcagaagcagggaagcaccctgttttgagacctgtcctgtggaaaggaagaatggtgtagtggaaggtgcagtggtctgggatggagacctcaggactactcctggtattgcacaggtctatggctctttacctcagttcgcccatccttaggatgaagataattctacctgccctgtcccttcccacggtcattaaaggattatatgagatttggagtcctaatggcctttgatggagaagtaccaatgtaagggctcatttttccccgtcttccaatggccctccccgattcctacatgggcatgagcgtctggtgcttcggaggcaagtaggcatttt

SEQ ID NO: 120066 - DNA, 376 bp, Homo sapiens
atccaacgttcaatggaaacgcctatcggacaatgagtgaatggctgtgccttccatataaaagcacgataatgatgtgttctgagtggaggcatgcctccgtgattttactcctctctcagctcggctgggactcagattctttcagatttacgtctctctggattaaaaaaaaaaaagctgggacccagattctcagagttaagtatagtctttctgcaagaggctctttgtccacatcaacagtgagataatttgctgtctcagaactgctagaccagctgaactttccttgtttgctttcttgttagagtacccatgaaaaggcagattggagataaaattgattcaagagaggccatggataagagatgtt

SEQ ID NO: 120067 - DNA, 365 bp, Homo sapiens
tacaggggaatgctggacaaaaagctgagtttatagacatgggttaattagcaaagagactggatggctggtagatgaatatgaaagtatgagtctgttgggctggctgtggtggctcacaactataatcctagcactctgggaggccgaggctggcagatcacttgaggtcaggagttcgagaccagcctagccaacgtggtgaaaccccgtctccactaacaatacaaaataaattagtcagacatggtggcacacgcctgtagtcccagctactcaggagactgaggcagaattgcttgaatccgggaggcggaggttgcagtgaatcaagatcgcaccactgtactccagcctgggcgaca

SEQ ID NO: 120068 - DNA, 222 bp, Homo sapiens
gcttagagaaacctaaagtaacaatctactccattgttagtctacaagttacttaaatacttcgccaagaaattgtgataatcatcatcagaaatctagagttctggagagctggctgactcagtcttaaggaaattactttcatccctaaaaaccgtaacagtatttaatatgttgtggatagccttaacgtttggcatgaatcatgagcctccttaactg

SEQ ID NO: 120069 - DNA, 398 bp, Homo sapiens
ttaatctctgtttcctcatctgtaaaataagcataatgatagccctatcttacagagatttagtgaaaatgaaataacaaatattcttgttttctattgaggcataaaaattaccagccaggtggggtggttcacgcctgtaatcccagcactttgggaggccaaggcgggaggatcacgaggtcaggagatcgagaccatcttggctaacaccatgaaaccccgtctctactaaaaatacaaaaaaattagccgggtgtggtggcgggcgcctgtagtcccagctactggggaggctgaggcaggagaattgtgtgaacctcggaggtagagcttgcagtgagctgagattgcgccactgcactccagcctgggcgacagagcgagactccatctca

SEQ ID NO: 120070 - DNA, 359 bp, Homo sapiens
cattggttacagtttggtgctactatgataatgcttgtacatttcttttagtgcaatgtccacatactgatgttgagtgaaattgctttgacactgtatcaatcctgttaaaaagcataatttcccataaagtggtttttttttttgttttgttttgtttttttgagacggagcctacgtcagtcgcccagcctggagtgcagtggtgcaatctcggctcactgcaagctccgcctcccgggttcactccattctcctgcctcagcctcatgaatagctgggactacaggcgcccaccaccacgcccggctaatttgtttgtatttttagtagagacggggtttcaccatgttagccag

SEQ ID NO: 120071 - DNA, 831 bp, Homo sapiens
ggtaattcagagaattcttccaggtcttatccaagactgccagagtggtacctctatgagtctgcaaaactgacagcattatggggcttcaggtccgatcccttcaaataccctgaaagcctcctcaaggacaaccagaaataagatcagactataaagactacagtaaatacctagcttttcattgcttagacactgacaaatatctataagcatcaagaccatccaggaaagcataacctcaccaaatgaactaaataatgaaccagggaccaattctagagaaagagacatatgtgacctttcagagagataattcataatagttgttttgaggaaaatcaaagaaatccaagatagtctagaaaaggaattaagaattctatccaataaatttaacaaagagattgaaattatgaaaaagaatcaagcagaaattcttgagtcgagaaatgcaattgccatcatgaagaatgcatcagagccttttaatagaattgatcaatttaatagaagaaagaattggtgagcttgaagacaggctgcttgaaaatacacagtcagaggacacaaaaaaaaaagagtaaaaaagaatgaagcatgcataccaatctagaaaatagcctcaaaagggcaaatctaagagttattaaccttaaagaaaaggtagagaaagagataggggtttattcaaagggataatatcagaaaacttctcaaatctacagaaagatagcaacattcaagtacaaagttatagacaccaagcagatttaacacaaaggaaactatctcaaagcatttaataatcaaactcccaaatgtcaagga

SEQ ID NO: 120072 - DNA, 704 bp, Homo sapiens
caaaacttatgagataatattttgttttctttaaatgcacttgaacttagtctctagacctcctgcaactcttcttgtctctttggcttctctctgcctcacctctctagataaccacctatttctctaatgtttcttagccaaaagatgctagctaactcagacattttctagttccctctttcaaggttctgaggatacatagccctgaaacatccaggactaaaatgatcaatggcagagatttctattgtgttttattttccattaagaagaaggaaaaaacaactttttttgacttcttgaaatttgtaggcagggcacagtggtttatgcctgtaatcccagcactttgggaggcagaggaggatccctgtagaccaggagttcaggaccagcctgggcaacacagggaagaccctatctctacgaaaaattttttaaaaataagccaggagaccaggcaaggtggcttatgcctgtaatcccagcactttgggaggctgaggcaggaggatcacttaagcctaggagttcaagaccagcctgggcaacatggtgtaaaaccccatctctacaaaaaatacaaaaattagctgggtatggtaatgtgtgcctgtagtcccagctacttgggaggctgaggtaggtgaattgcttgagctgaggaggcagaaattgcagtgagccgagactgtgccact

SEQ ID NO: 120073 - DNA, 119 bp, Homo sapiens
ctatatatttatggagtacatgtgatgttttgatataggcatacaatgtgtaatgatgaaataatgataattggggtatccatcagctcaagcatagacaaaatttacttcatgaacaa

SEQ ID NO: 120074 - DNA, 236 bp, Homo sapiens
gtgcttgcatttatatatgagtgttttttggtgggggataccaatgaaactcatttccaatggaatcctgttgccatgcttgaggatgtgactcgggaggaagttggcagttttctagttttctacttctgctcctattcagcaatgcctctaaccacatccaccctgggacaaatctatcttctctgattcagacaaaatgcccacatacaaatctttcctggagtaggaagtgg

SEQ ID NO: 120075 - DNA, 279 bp, Homo sapiens
ctgggatacagatgtgcaccaccacatccagctaatttttttgtatttttagtagagatgggtttcaccatgttggccaggctggtcttgaactcctgacctccagcgacccatctgcctcggcctgctgaagtgctgcgattttttttttggagatggtcaccgtgcccagccgaggccctactttttaaccacgtgtgctatgtataactgtactaccctggtatagtatacactatgctttattatagctatactctagtatatgtatagtctctt

SEQ ID NO: 120076 - DNA, 465 bp, Homo sapiens
gttggtcaggctggtctcgaactcctgacctcaggtgatccaccagcctcggcctcccaaaatgctgggattacaggcgtgagccaccgtgcccggccgatcctctgacatttgtatacaagtttttgtgtggatgtacgtttttatttttcatggtgtatacctagaagtggaattgctaggttaggtggtaactctattgaacattttgaggaactgcagaactgttttctgaagtagtgataccattttacatttttaccagcagtgtgtgaatgttctagtttctccacattgtgactaacacttgtttccgaactgagacgcttctgagagtgaaagggtgcaccattaagaaatatgccaataagactgacattaactggaacatattcttaccctacctagataccaaaaaaattagaagattcaattcctgatttcagggaactttctggccacatg

SEQ ID NO: 120077 - DNA, 489 bp, Homo sapiens
gagagaactggagagaaaatgatgtgaatagacaagccaccattttacaggtgtctgctctgcgccagacactacacatcctcctctcctctaattctcatgaccctgtgcggcaggtggccgtgacccaatttaaagaggaaatacacttctgagagatgaactgagtttctgaagatcacataggtggtaagtcagatttgaacctggatcttcctgagtccagaatctgtgcttttaactcttaggctgcagggccctgctgcgtggaggcagcctagcggggactccgagctgacaggtcaggtgatggagttacgcacgagcctgtttacctccctgttgtcatcctagcacctacacagaactcttaagtgaacattcctcctaatccttgccaggctgaagggatgatcctcattctaccacggtacagagccgggatactaaagggaaagtcaagtaataattgaggtccccccaaaagag

SEQ ID NO: 120078 - DNA, 395 bp, Homo sapiens
ctgcctctctctctctctgtttctctgtatttacttatcatcagtaactgaggtgttggctatgaaccaattgcaaagtgctttgtgaggtgttagtgggattatttctctttctcagaggcttgcagtaccctatctactcccccctcatataagccccacccagcctcagtccctgccttggcccagtgcctggagagtcctccttccctagctaagcgctgccctcacataccacctcctccagaatggcaacagccctgtttgtgtgctgttactgcctaccaggcactggtgtaagagcatcagcctctttcatccccatggcaaccctgtgaggtgactcctattagtgctcttgttgaggatgaactaataaatgaactaataaataa

SEQ ID NO: 120079 - DNA, 421 bp, Homo sapiens
atgtgtacgagataagtgcaagggtgagacaaggagaaggaaggagagagaaatctggaggaggagtccaaggtttagagcctgaacatcctgaagagtgacactgccttgaactgatgtggagaacaccttccatgtagcaggtgtgtgggacggaggtcagggctctggtcgggtccttcaaggttagttcatgggaagcgtgaggggatgagtaggggaggctgcgattatggatgtgaatccagagtctccagcaaagggatgttatttaacgccaggagactgcagagagtaccaggaagtgagtggctccgatcctgagaaggtggggaaccagcctagggcctcacctgctcactcaactacccctgtgtactttgtccctgcgttctcctcagcccaggaaaagaatcccctc

SEQ ID NO: 120080 - DNA, 323 bp, Homo sapiens
gctttcatgatgagaagcgcttcacttgagctacaataaaaccaaaactatcctgatgatagcaaaagagtactatttatgtgcagtgcaatttgctaaacccctgacaagaattatttcactgaattatatcaacagtatatgaaatggatactacttactattcccatttctcagatgacaaaacgaagaggtagaaagtttaataacttgcctatagtacatggttattaagtagtagagcctgtatctgaaaccccatctgccttacccgagtcctactctgaacgattacattgcgtgtgaaaagaaggggctactga

SEQ ID NO: 120081 - DNA, 311 bp, Homo sapiens
gtctagtctccactattatcatatttcatattttatttctcctactcattctcaaaaccaaaccctctaaagcatatttgtctggccagccttatgatgacaagtcttcaaatgcatgataccatgttgaatttaattttatgcctgaaacactaaaggctggcacggctccattatctttttgtcaaaccctcacattttaatctgccatccagtcagtggactggaaacagagaaaaatcacttcagattatgaaaaattttgaccctgcaccaccagaatttgtttaaatcaaattgtcatctaaatg

SEQ ID NO: 120082 - DNA, 423 bp, Homo sapiens
cggaggtgtaaggtcacacccatagcaatggctcctctcgtaccaaaagcgcctggtaaagcacactttctggacaccggatgtgttcccagggatgccagagagctccctgtagccggtggcatccaggtggacagacttacacagcagcacgctgtccctcgctacatcggtcagaatttagggacacaagctgcccagtgcacctccatccatcacctctcttccccctcttcttgcttccttcattattcaacctcgaaataaaaaagaaaacaagatgcttggtcaagccaatctcaactaccgagactttctacctcacactaccgtgtacatggcaggaaatctcaacagaacaggggcgagaaaagactcctcggacagacttcagtggaccaggatctgagcaggatttgctcg

SEQ ID NO: 120083 - DNA, 171 bp, Homo sapiens
gtactgcatagtttgtatgagcacaatttattcaaccgcctttcagacagaccagttacagagctggtcctaggatcgctgcaacagtccgagggcatagcttccctaacttcattttcaccaatttcaaatcaactttagtttacatttcctggcagaatgcttcacata

SEQ ID NO: 120084 - DNA, 425 bp, Homo sapiens
gcaggagaatcgcttgaacccaggaggcggaagttgcagtgagccaagatcgcgccactgcactccagcctggcgacagagcaagactccatctcaaaaaacaaacaaacaaacaaaaaagaaaatacttatattcaaaattagtcctacttttcacacttagctacctgagtctatatatgccaatatttccactaaatttcacggtcatttctctcaaagaggctagtttagtagagcagaaagtttaagtaaatgtacttaaacagtataggaacaaagaggaaatggttgatttgacttgttgggagacaggacaagttaagtttaatacaggaaatgacacttgaactaatcttgttagatgagtagggctcaacagaacaggacaaagaacgatgttcaagaggaaaggtataggatga

SEQ ID NO: 120085 - DNA, 379 bp, Homo sapiens
ccacccttaggtacttaccaaaaagaaattaaaacatttgtccatatagagaaccatatatgaatattcagagcagctctattcacaatagccccaatctttaaacaacccaaatatttatcaaatgaggaatagatattatgagatattgctcaataatgaaaaggaacaaactactgataaatgcaaccttgatgaatcttcaaaaacataatcataagtccaagaagccagacacaaaagagtacattctacattattccatttatatgaaactctagaaaaagaaatctcatctgtagtgccaaaaactaaatctgtgattatccggggccagaaacacgttaggcatgggcagcggggcatgcacaggaggagg

SEQ ID NO: 120086 - DNA, 301 bp, Homo sapiens
  misc_feature (14)..(14): n is a, c, g, or t
actagtccacggtngcggaacacacaattctacccaatagacaaacacagtgtgttccagccatcataacacatactctgtccaccacaaaatatttagctctgattatacatgtgcttgttttctttttgtctagcttctcaggcatgggaattctatttcatcatccattcctttgtttccagtctaatcgggagcttgattcataatgggagtcatacatgtttgatttaattaacatatttcgtcaaatctaagatgctagtagttttaagagccaaccgtggactagtgggaacca

SEQ ID NO: 120087 - DNA, 196 bp, Homo sapiens
gatccctaacagctctgctcacttaagcttttactcccaatgcctccagcatcttcccccatggctccaccttaccctgtctcctcctatcccatccttctcatgtaggtgactcctactcattcttcacgacgcagttcagatgttgcctcctccatgaagctttctctgatatgcgtaacctccccatcctttg

SEQ ID NO: 120088 - DNA, 478 bp, Homo sapiens
atgcatgtagcagggacagtaagttggtggcatgtttttctattaagatgatgtattagtctgttgtcacactgctataaaggactccccaagactgggtagtttataaaggaaagaggtttaattgactcacagtttggcatggctggggaggcctcaggaaacttacagtcatggcggaaggggaagcaaacacgtccctcttcacatggcagcaggaagcagaagtgctgagccaaaaggggaaaagccccttacaaaaccatcagaacttgggaaaactcactcactatcacgagaacatcagcatggaggtaacttcccccatgattcaatcacctcccactcagcccctcccatgacacatggggattatgggaacaacaagatgagatttgggtggggacacagccaaaccatatcagattattttttgcatcaatatcatatactatattttgattctttattttgtcag

SEQ ID NO: 120089 - DNA, 349 bp, Homo sapiens
ggctcaggaacctgcagtggctccccagtgccctggtccagtggtcttaacctcattttatagatgagaactttgatgcttagagcagatgtgttgctggctcatagcggcatttgaacgcggggctgctgatttctgggcctgtattatttctaagacacctcactgccttctgcactagcaggaaggggtgaaccccatggcttcagaactggaacaggaaagtggaccaacatggagcccgccccagccacagccctagggaagcgtccaagctggctctttgtgtataaatcatggtctgtttactgaacagggagtgtgtctttcctcctggggagctgcccca

SEQ ID NO: 120090 - DNA, 755 bp, Homo sapiens
taaaaaagaagttgaatgaatgccgattgaatgaatgaaatattatagaagatacctggaaaagtcagaagacacatacacccacacccatacacacatacaccgtactcctcaaggagttgaccatctagacatttagccatgtacctttaggcaagttactgaacctctctgtgcctcagtttcctcatctgtaaaatgggcagactaaaaataatgagcacatacactgcagagaattaaatgagttaagaattaattgatgtttgggacagtgtctggtacttctgtgcactcagtgtgtatcagctattattgggatgatggttgtcatgggggcagagtagaagcctctaggtagtgctgggagagacagcatgcagtgtgagtcgagaatggccctgggggatgctatgggcatacaaggagggcatcaccagctgatgggtggctggtgtgggctgtatcaggtctccaaggaggagggatgatgcgggtgaaccatggggccagggacaacatgaggtgacaagaaggagactggccttgacagaaaggtccaggttgtagcctccaggagagtggccaccccggggacaggcggagaattgagatggctgcttctccatgagttgtctggggtggtaacagccaggaaaccatttgaaaacctcgctggggttcagggtggcatgcagggaagaggcggcagagaagaccagatgaatgtctctgagctgaagaggcacagaatg

SEQ ID NO: 120091 - DNA, 949 bp, Homo sapiens
tgcaccactgcactccagcctgggtgacagagtgagacaatacctgaaaaacaaaaaacaaaaacaaaaaaagggaattcgcagaaatctaatgacaatgacagaccctccccatgttttatttctaatgataatcttgtgagggaaacttaacattaccaacctaaagaagacccttgaagcgcagtggggaaagcacgggtgtctccatcacactggtctcctgggtatccacgtagagaggatgagcctcgaccacccccacacacgcacacaccatgcacttggatccacgtgacatggactgtggatgtaagaacgtgaaaggtaaaacaaaattctagaagaaagcacgggagaaaatcttcatgagtaggcatcgatttcttccacgggagccaaaagccactaatcacaaacaattgagaaattagacctcactgaaattaataacatctgtttattaatggacacgctgatggagacagtgaaaactcctcatagatgaggaaaagacaacacaatttaaagctggacaagagccgggaacagacgcctccttacacaggacatcccaggactaatcaatgtggggaaaggtgctcacgtcattgcattagcatcacaacttcaagaaaatgctcgttaaaaccagagtgacttgcaccagcacccgccccagaacggccgaatgcccatcagtgctggcaagtctgaagcagtctggcctcacaccctgcgtgtaggagtatgcagctctttggcaatctcttctgttttgctttgtttgtttttaaccatcgaactgcagaagataatattttctgaggctcagcctgtacataccctctgacccagcagcctgcagccctcgttctacccaggagagctgagtgcatctgtccacaccgacagacgtgtccatagccactttggtcataatctccca

SEQ ID NO: 120092 - DNA, 548 bp, Homo sapiens
ctctcagattttattatgtaaaagtgactttatttcatcttaatttttaattaatttttaagttttagtgtcaaggcaatgctggctctataaaataaatcagggaatatactgtagtttgaccacttaaatttaatgtaattagcaatatagttaggttttactctaccatcttgtcatctgttctttttaaattttttttcctgttttcctacctcgtcttggattaatcttatttttttagtatttaattttatcgtcactataggattatttgctatatctctttgttttgctgttttaggggttaaggtttgcaatgtgctttacactattcaagtcattttagaacacttcaggtataatgtaaacatattacaattgggtactcttttttttttttaaagagactgggtcatgctctgtttcccaggctggattccagtggtgtcatcatagcttattgcagcctcgaactcctaggctcaagtgatcctcctgcctcagccttccaagtaactaggactacagttgtgtgccaccacccc

SEQ ID NO: 120093 - DNA, 111 bp, Homo sapiens
tctcctctacccacacatggcagaaatagaaaggagaaacaagatgcagaggggctgtgaactctacttaaagacagagtgagggcacagactggggtatgggcacaggtg

SEQ ID NO: 120094 - DNA, 494 bp, Homo sapiens
aagtgtgtatttttgtatatagatatactttaatttctgtatatttggtatatagaaagggaaatgagttgttatggctagtattgatcatcagtgtgggggttatagatcctaaatctagatttgtagttcctgtctttgaatatctttggttagggagagaagggagaggagaataattagtgcattcatgaagtacagttgggagactttaatatgatactaaaagaattccaactcttctaagaagaggtagggtctgggaaacattggcttaaatggtagagaacctttgtgctctttgagaataaatgaacaaaattgcattagcacagggaaatgaggttggagactgaaaaataacaatattcaccaaaaccctaatggtggagaagtgatacattagtaaagactgaaattggtagctgggttatgttaaaacacatttcctatctctgattacaaattgtatctcaactgctggcaactctttg

SEQ ID NO: 120095 - DNA, 419 bp, Homo sapiens
tagcgtgaatggccaaagtcgcaagactcataggtggtgggacagaaattcaaattcaggcagagtcacttcagaaaccaccatgctattctgccttgcaactgaaaaaacatacgtcaatgtgctttgcagactgctagctgtgcatgtgtcagctcccatcatggtaaatatttttattggacaccatattaacccatcagcacccattttctagtcactgggatacaggatggctgcattttagtggatagtgggtgcctaggaagtcaaatgagtgggctgtgtttggaggggcaaagaccaaagacaactaagggactcagggccttagaggtggccttctagagtcatgggcagaaggctcttagggagttctctccagatgatctgcgagtaagggaagaaggcagcactgg

SEQ ID NO: 120096 - DNA, 204 bp, Homo sapiens
acattacaggcaagagccactactctcagcccataagcattgtttctatcagttactaatggtttcccaaccattaaatccgttacacatttctattttcccctcccacccccgtgctttcctttttagagagacaggatcttgctctgtcacacaggctagagttcagtggtgtgatcatcgctgactgctgccttgatctcc

SEQ ID NO: 120097 - DNA, 213 bp, Homo sapiens
ttcgtctggcctcaggtcaaatgcctcccaggatgaggctgcataactccattgttataccgcacacacattcccagaaagtgtcttccgcggagaccagttctgtgtaattcgtacctctctttgtcctttgggcttataatgagtaagcaactttgtttcacttgagggtcgtgtgatgtaagggaaagaccaccagcttagtcctgagtt

SEQ ID NO: 120098 - DNA, 613 bp, Homo sapiens
tgcttttccctgcagaaggtttaagaactatggcagacttctatcactttccttttccctctgccatgaggattacatatttcaaatagaggctacatcttctgcccagatcccagaatggagaggacaacacagagcagaaccaccaatgaccacagccgacataaaatgtgcataagaaataaacccttcttactgtaagccactaagagttttgggttatttgttactacagtgtaactcagagaaagctaattaaaatataaacacatatgtcagcaatattatttctttcatcacagaagagccttgctgtatccatagagttgagagcaggtctccttgttacactgtgggtacactagattccagaaccactacctactgtgtctctgtatcagctcctgccttcaagcggctcaagaaatgactttggggacccaagcctggggccagtctgtccaggatgactaaagagggagttagatggagaaggcagggtctggagcagtacctggcacatgcagtactcaaggatttgatagataaatgagtaatttgcttgcattcttgtgccagggtttttaagagtcagtccaaaataaggattatg

SEQ ID NO: 120099 - DNA, 202 bp, Homo sapiens
aatttgtaattaactaaagatttaccaatagggctttccatataatttttttaaatttaataagtgggggaaaaagctgccttagcaatacatcaaattacttctctgccatgccaagctactatataacgttatacaaagaatatacttctaaatgttgtgacatctctaaatgattaagctcactatcatattaaagcct

SEQ ID NO: 120100 - DNA, 387 bp, Homo sapiens
tgagcagcccctctatgacaaggactctatttcctgagggaagtgggaggagagaagactggggcagaagaggaagtaagaaggtacctttttgggaacttttcatggctacccaggccttcctcagcctctatcctattctatcaccccaagagggcctcctcttagaaggaaagatttcccaccctgtccccaagaagttccctgtgagaccctggaaggctggtagtggtgagcccacaggccctggagtggaagggaaatcaggagcctcataagactacaattaaaatgtccatctgctcaggcgcagtggctcacacctataatcccagcattctgggaggccaaggtgggaggatcacttgagcccaggcaatatagtga

SEQ ID NO: 120101 - DNA, 211 bp, Homo sapiens
agtctaaagatcttaaaaaccctcggtatccagcaacccataaggattttgctgagaatttgatgtattgttttcagcccaattctaatcactgagattgttttcatgctgtaacttgcataactaaatttttttttttttttttgggagacagagtctcattctgtcgcccaggcgggagtgcagtcttggggaggccgaagcaggcaga

SEQ ID NO: 120102 - DNA, 415 bp, Homo sapiens
ttagacataactagcaactcaacaccagtgtggcatttcctgcatctcacctctcccctcccactacagcataatccctcctcagtctggttctctttcttttggccaggttctacctcccttgcttccctaagcaggtctttccccggagtcagtcatcctgttggtcctgcaataagtggcttccaaaaaatggaataaataatcaaattcttctactctgacacccatcttctatttctttctgaaaatgaacttggattagttgaattgcttttcacaattcaattcagtttcaagggctctacagcctcttcacaatttcttgcaaatttatttccatctacttgtctataaaaggtatttgtttcagagacattgttctcctttctccatcacactcacatcttggcca

SEQ ID NO: 120103 - DNA, 268 bp, Homo sapiens
tcttttccttcagaaaacctttataaacatgctgatgtaacaaaaccaaagtgattggtaaagaagatttaataatgtatttaagccttgagaaatttctttgttgtttgtcaaatcaacaacaaaaaaatctgtgtttttaattgaatgtaatgttaaagaaaattcttgagtaaatgccaatttatgttttcctagaaaaccttttcttaacagcctcatctcaattcaacacatcttgccactgatatactgtataatataacaa

SEQ ID NO: 120104 - DNA, 557 bp, Homo sapiens
caaaattagaaagtattattaactgaatgataatgaaaacacaatatatcagaatttgtggaatgtcactaaactactacataaggggaaatttgtagcattaatgcctatgttagaaaaaaagaatggtctaaaattgatgacatcaacttccactttcagaaactagaaaaagaagagcaaattaatcacagtaaacagaagaaaggatgtgaaaaagggcaaagcagggatcaatgaaacagaaaatcaaggaaaccaaaagctggtcaaaaaacaacaacaacaacaaaaaaaacttaggagaaatttaaaaagccacaattatgaaattatgagatttcaacacctctgtctcaataactggtaatacagatagacagaaaatcagcaaggatatagtagactctcacagcactgtcaaccaatataacctaattgatatttatagaacactccaccaataagagcagaatacacattattttcaagtggatatgaaacatttaccactttgaaatggtcaattaaattgattaacatctaaccagctagaa

SEQ ID NO: 120105 - DNA, 564 bp, Homo sapiens
ttcctccactgggcagattaggggcctggcattacagagtcgttggtaactgctcatggttgtgccattggtaagggacagagacagaattcaagcccacattctcaccactgcctggggttgcccattttgttgtagttggtcattaacagcaaccacatggttcttggtaggtctcttggacacttgtccgtcatctgaaggaatgtggttgaggcagatgttgtgccgtgagggcaggggttgtgctgattctttctgtgctgttaagtggcagttgtgctatatgctacgataataaaatttctgtgcaactaactgcaggagaagagcagtgtgctgaataaggaggtgtgactcagttgaccttataaaagagatatgctagcctgcttctcattagctctcacgttttcttagaagtggtaagtttaacttcaatcttttcccttactgatatttgcagttcttccagcagaaacgcttttaaaggtgaatgtgttgccgctgcttccaaagccagccagcgctggctggaggccccctcctctacgagtcgggcat

SEQ ID NO: 120106 - DNA, 818 bp, Homo sapiens
tgggattacaggcatgagccaccgcgcctggccgagacaatttttaaaaagacatttctcaagagagttataagccaaaatttccctagccccctccaactcattctgtccttctcccagtgcatgtcaggacagggaagaaggctttaaatcagattttaagaaagaggatacattggtttacaacctttgcctatcgtccagagagtttctgatcttttctttttttttgagacggagtcttgctctgtcgcccaggctggagtgtagtggcacgatcttggctcactgcaagctctgcctcccaggttcacgccattctcctgccccagcctcccgagcagttgggactacaggcacctgccaccacgcctggcaaattttttgtatttttagtaaagacggggtttcattgtgttagccaggatggtttcgatctcctgaccttgtgatccgcccacctcggcctcccagagtgctgggattacaggtgtgagccactacacccggccctgatcttttctttgacggtggcagtatctcattttttgataatacacatgggtaatggcaagctcttgggaccccatgccaagcatcaagatcccatttacctggtgataggaaagacagacattcctcaccctttctacccacacccttgttcacagggatgactgtaactaaggtctgcaggtatttatgcttaggagaagaaatcgtagttcaattcaccaggaatatgagaaacaaaagaaagccactatgtgctatgtaaatgtctggccatccaaagccaccttatgcagaggaacact

SEQ ID NO: 120107 - DNA, 330 bp, Homo sapiens
attaagtttccctggtagttttcctgaaagctttgagtcttgaaaaacaatcaaaatgcattttcaaacatctggcttccccaggtaattacctgccaagatgaatgagctacacacccttcaaagggcttcaaatgaaaggtaaggctgctacagacagaagagaaagacaggctggacatgctgactcatgcctgtaatcctggcactttgggaggccgaggcaggaggactgcttgagcccaggagttcgagaccagcctgggcaacacggcaaaaacctgtctctacaaaggaaaaaaaaacgaaaaaattagctcattgtggtgg

SEQ ID NO: 120108 - DNA, 396 bp, Homo sapiens
caaacaggtttctaagtgcatgacaattcttgcctgctagtttctatcagatacacagtgtttaggtttcagacggacagctgaattcagtaggaagagtattattacggatgtctgccgtgggaaggcagagactgggaactcataccccaagtatatgccacagtatatttaagtttctgtatccataaaatgggagaggaagaaatatttaatattatcaaattgctatagggattaagagggaaaaatgtaaatatgtataccagacactagtatcaaataaatgctctggatgttatttcctcagagaataaaatacatttaagagattcatattcaactgtcactttagcttgtttacactttgctgacaaagttacaactttgccctat

SEQ ID NO: 120109 - DNA, 708 bp, Homo sapiens
gtgctatcaagccatgaaaatatacatggaaagcgcaacacggctgaatagaaacagctccgttctgcagctcccagttgatcaatgcagaagttcgtaggtcttgagatcaagagcaaccccatgtggatccatggtagatcacaagatctggaagtttgtgcctaatgttgttatcagatgagccttttggggatgtcctgaagggttccttgaggtgtgaccttagattgtctatttgtattcttcatccaaatacaagaagcaccaagaacacctgggaaattcaccgcaaaaacatctttgcatgggcacattgtcatcaggttatccaaagttaagacagggaaagaatcttaagagctgtgagacagaagtaccaggtaacctctaaaggaaaacctaaggtcagttttttttaagaaaagtaactttattgtggtataaagactacaaaatcaaggtgtcaaaaattaaattagatgcaaggtataaaaaattgctgttctgtaggtccaaatgaactttatgaaattcccatcttttaaaatcataaatggctgaaatttgtcaattttgtatggaactcactattatatatgggaatataatcagtgacttatactcagaggaaatcctttgacactgtatcaaagatctggtcatgaaatgcatatttagacattgcaagttataataaaatgttga

SEQ ID NO: 120110 - DNA, 351 bp, Homo sapiens
tgttacatgagcacagttcttactgacgtcaatgcaagctgtgcatgcataactgagggcagattttggcctgggctatagacatgtgagagctggcacaccatactcacatcagaactctgtcccacccggccttctgataacacggcctcctcattcgtcactctctctgcacacactgggagctgggccttaacccaaaacacaaattagaagcatcatctaatacagaaatctaagccggatgcaaatttaatgtagatgtggcacaagcaacctgagtggggaaccatctaactgtaaatttcagcaacagattatgggtcagctccccttgaagcaaactcagtg

SEQ ID NO: 120111 - DNA, 587 bp, Homo sapiens
tactgggctttcattttctcttgcttttaaactgtgaagtttgccttgaaatattaaataacgatgtagcaaagagcttctaccttgcttaatattgggaaattttgatttaaccaagatttggttcaagaatataaaaggaaatcactaaaaataaataaaaaaaattgttcctgggaatagagcctgtatgaatactttccctttagtaatagaactttgttgcttagggtgttttccctataggaactggtgaatccaaattgttttgttggcgaatatgtcaagtgtagaagggaaaacagttgctgtagtaaaaaggaaaatctttttttatgacaataaaccatgaaaggaggacagggacagccagattaaccagtccttcagattcataaacaaaaggaagagataactatttttattggcacagattctgtggaaaactagtaaaaccaaatctccccactttgagatgggttttctttgaggctgtttcttcttttactgaatgacataccattctttgcactgtttagaatgacctacttctctatggaagggtcatgtgaaagttctgcccttcc

SEQ ID NO: 120112 - DNA, 374 bp, Homo sapiens
tggtattggctgatagcctctgggttggtgctgtgactggacatgcaggaaggattagaaatcaagagtggcccagatagtgctgtggatgcccttagtaacacaagggtcacaaaagaatgaggagacttaggagagcctgagggcctggaggacctttggaggggacatttggcaaccacaagaaggtcggttctggagcttgggagaaaggccgtggtggaaaggtcggtctgggaaccacccatgttagggtgaaagttgatgccagatgggtgtcattgcccagggagaggcaagtgcattaagagggcacggtcctattggcggaaacctacagtataccccaaaacagatgaatgccatgtaggcct

SEQ ID NO: 120113 - DNA, 234 bp, Homo sapiens
tttctttcattactgatttacattttcataccattgtggtcagaaaagatactcaatatgattccaatcttcttaaatttgtgaagacttattttgtcacctaacatgctctgttctggagaatgttctgtgtgcttgagaagaatgtattctgctggtgttggacagcatattctgtatattttgtttttattagaaccaatttctctataaaacctagtaagtaaactccta

SEQ ID NO: 120114 - DNA, 131 bp, Homo sapiens
catttttgacagtggtaatgtaagtgttagaaacagaaattctgaacaaaggaattactctttaaaaatcagtatttaatctatggaaaacttgtaatatccaaattccttagtgtgtctagttctgcaag

SEQ ID NO: 120115 - DNA, 312 bp, Homo sapiens
gggaatgtgcaacaaattctagtcatggctcttttaacttagtgatcttggttaagccaccatatctttctgggtcacagtactttcggcagttaagaattagacttgagccagatccaagattctttgaactctgacattttatcattccttttaatgaaggaactgaaaaacatttcggggcagtggggaagtggaagcattattttcagaagaacactgaagttagtattttttcaattaacaaaaagttcttcctaacttactgtttctttacttagccaccaaacattaatcactgtcttggttcta

SEQ ID NO: 120116 - DNA, 378 bp, Homo sapiens
ccgaggacaagagccccacaggagctctttgtcccgcaggagagcagcggacccacgtcagagaagatgcttgtatcttttcacggctcttctctgagaaatgaagccacaccatgatacagtctgcaagaggaagccgggaatgagagatggcaacaatccctgtcactggaacggtgacctcgctggacaagccacccttttggaacccctccccttatgcctgtggcggtggcatggtgctatatccggcctgggctccggcctctgctctctcctccctcttgctctgtcctccctctgctctgttctccctcttgctccttctgctctgtcctccctcttgctctgcctcccctgtcctagatgcctctcgct

SEQ ID NO: 120117 - DNA, 583 bp, Homo sapiens
tgggtcatccccggtctttggcagtagaaactattcgtcttgtcttggtttccattcaggagctttccttcccaaaccttgtcccctgctttaggagtaatttttttagggctttaggtttttctcatgtcccagtgactaagcttgcttttgggtggttctctgtgctgcatgtagtccttctgggaagaaactcccatgaagttcaaaggagcagcagatatgcagggtgcatctagaaatgaaaatctgaccctttgtccctctccttttcatctctcttttgtacaggccttctttccttctgtgcaaacagacccttgtcatagtcatagtccatcacgctgttaaatgatttccagcactgctctatgatgtgctgtaatttcagggagtagttttattttctacaacatgttgctctgtagcacgtgtatttcactactgagtggtagttctaatggacatattcttaacaaaatagtcccagcattacagaatactaggttagaatacatacccaaataaataaaatgttacagacacagtccaagctcgttctctcctgacttcctttctcccg

SEQ ID NO: 120118 - DNA, 394 bp, Homo sapiens
tgttagtctccatttgagctgaatgtggagcacacgcttgccatacacagaatccctcatttctcaaaatgtactgctcttttctcagtcaatcatcattgaaaaacaatacttcagcaacgtctgattaggttgtcttcttaatggtaaatgtcaatttaagtctgctgaacctagaaatgcttcttttatagttcttttagataaggaggtgatttattttggcggggagtaggaaaggtgtttttcaaagaagacattttgaagcatctcgaacatcactaagactggctaggagcttggacacaattttactgcaagagtactgctagggaaataaaggttgctatgaagtaaaattattttttaatccactattgtgcacatttaattt

SEQ ID NO: 120119 - DNA, 770 bp, Homo sapiens
tttctcacatttttgggattttgttggtgatttcgctgttgagaatggtcccagcatcatgcagcagtgccgtctcgtgttcctcagtgccaggaggctgggatgagcctcacagagaaaccatgtgtgagagcagttctctcaggcaggagtgatagctccgtgtccatgagttcagtgtgggtgaatcacagtaaatatgaactaaggaaatacgcataaaggacaggtgcagcggctcatgcctgtcacccagcactttggaaggctgaggcaggaggatggcttgagcctgggagtttgagaccagcatgggcaacaaagtgaaaccccgtctctacaaaaataccaaaaaataaaaaataaaaaaaaaaataactctgtgtggtgatgcacgcctgtagtcccagctactcgggagactgaggccagaggattgattgagcttgggaagtcaaggctgcagtgagccatgatcacgccactgcactctagcctgggtgacagagcaagacctggtctcaaaaaaaaaaaaaaatgtccaggcgtggtggctcatgcctgtaatcccagcattttgggaggctgaggcaggtggatcacttgaggtcaggagttcgagaccagcctggccaacatggtgaaaccctgcctctattaaaaatacaaaattagccaggcgtggtggtgtgtacttgtaatcacaattactcagaagcctgaggctggagactcacttgaacccgggaggcagaggttgcagtgagcca

SEQ ID NO: 120120 - DNA, 492 bp, Homo sapiens
atgtgcccacgcagctacccttccccttaatgattttgcacaggccccaaagcaatgctgtcttacctgcgtgctcagctgcggaaagcggaaaagtgcaagctgatgaagatgatcatcgtgggtcccccgcgccagggcaagtccaccctcctggagatcttacagacggggagggccccccaggtggtgcatggagaggccaccatcaggaccaccaagtgggagctccagaggccggctggctcgagagccaagtaggttgagtccgtggagttcaacgtctgggacatcgggggaccggccagcatggccactgtcaaccagtgcttcttcacggacaaggccctgtacgtggtggtctggaacctggcgctgggggaggaggccgtggccaacctccagttctggctgctcaacatcgagccaaggccccatacaacgtgatggtggtgtcagggacgctacctggattttattgaaccaagatac

SEQ ID NO: 120121 - DNA, 407 bp, Homo sapiens
gctgccccatgggtagagtatacttttcattttcagttatcaccctgcctccagattaacattctcatgtcatgtaaaggtgagcacttaatagatgaagaattagtgcaccagaaggtggtcctgaaagtactaagccttatcatcatagaccaggcttgtgtgttgcttatggaatcaccactaaaataaacacttgagttgaggccacccaaacttacggagagaaagggaatgatagtcatttagtgtttattttctaaatggcactttaaaaccgatacatatccctagagctttgaaagtattaactgaatagcttttttgctttcaaataagtgaatacattaaacaatgaaatgatgtcataaagcatctaaaataatgatgctagatcatatccattt

SEQ ID NO: 120122 - DNA, 430 bp, Homo sapiens
gacaaaggaatggtatagaactcagtttcaagagatgtttcagcacgccaggcatatataagtaaccatacctgtcccaaataagcagctgaggcacagcagataggcaagactgccaaccaaaacttattagaaaaacaccaggctttcattatttaattcttcccccagtttctaggggaaaggctttctatataagcctccaatgcagtacaatactaattcacagagtagaggacccaaacagctgaagcaaaggaaggtacttttgttttcaatagataacaaggatctttaaaaaaaaaaaaaaaaaaaaagagaggggttaaaaaccgggggttggttaaaaatgtgcgattttcaaaatttcccaggggttaggtttcccaagaagatttcgtgaccaattataattgaggtgagggattaa

SEQ ID NO: 120123 - DNA, 269 bp, Homo sapiens
acagggtcccttccctcctccagatgtccaagaaggctgagtgggaaaatggacttcgcctcccacctggcagcaataagataccctaagcccttctcctgctggatggggtcagaggaaaccaggtgaaacagagttaaaaataagacccagagctcctagcataatcctcaaaatgttgagatttcaattaaaaatcatgtgtgtgaagaaccaaggaaaacttgaatgaaaaaaccaatcaataagcaccaacactgagataacaa

SEQ ID NO: 120124 - DNA, 419 bp, Homo sapiens
tccactttgtctggtgaacatttgcagaagatacactctgcaaggattatagggtgtaagggttaaggaaggcttcataacattggattggaccttcaccaatagcctgtagaccagcaaacatgaacaacaaatatgggcttagcccctgaaatctgtgtccctctgagaaagttttatgataaaggaatggcctgtcactgtgacatcatagatggggaggaaaaaggagaagggcttcctctccacggatctccataaatgatcctttatgctatttgcagtttgcagaaaatgattgccagagactaatgtctgggcagcagacagggtcattgctgccatcttgaagtctaccttgctgagtctaccctgctgacctcaagccccatcaaggactggttgaccctggcctagac

SEQ ID NO: 120125 - DNA, 361 bp, Homo sapiens
atgccactgtacatttgtgtgggttagaaaaagcaaaagtgtgttcataacctcttatgagaagagactataaattactttgcactgaggatctgaaggtaatctcattttacccacattccagtgtaggagacagacatggaatcttaaattttaaaaagatgtatataccatgcaccatatgagaatgatgcaccaagtgctgtggagcccagaaaggtacatgatttttttctgctaggagaggtaaagcagggaagcattacagaggaaggatgacatttgttccatccttggtcttagtttccaatggcacgtgatccacaatgcacgtgatcgggatccttagagtcgcccgcga

SEQ ID NO: 120126 - DNA, 262 bp, Homo sapiens
  misc_feature (28)..(28): n is a, c, g, or t
actctcggaggcgtgaatggcatcgganggcgttgaatggcatcggaggcgttgcaatggcccggaggcgttgaatggcccggaggcgttgactggccccaggctgcccactgtctgctcaggcttccaaagctacaacctgccagcctatgctccatacctgccctgcgaggtgaggagctccgggagggggaggctcagcacagatatgagccataaccacctcctgaggggatggggggtggccatgtacagagctcag

SEQ ID NO: 120127 - DNA, 603 bp, Homo sapiens
agaataagacagaagtgacaagaatctgatgtctgagagtaagttatacattacattgcagcttcaatatttctctcttggatcaccagctctgagggaaaccagctaacgtgttgtgggaacactcaagcagccctatcaagaggctgttgttgagagaaatgtaggtcttctaccaatgacaaagattctttggttggccaaattttagtcaggcttctgagccttctcctaggtccatctgtgcacttccttgtaaaatctagttttagcaaagaacctgctaagtctagtttagcaagaactgccgcccatcttcgatatctgatcaggttcctcctcctccaccatcccccaggtgatggctgatgggcctgtcttcagcaagaatcctgttgggtcagtttggacagaacccctttaccccaacgtttcctcttagtcattttccattcactgctccccactctgttccttggctcagaattcccactcgcccatgctgtattcagaatggagcccaatctctctccccctctgcaagatcccattgcagtggtccctgtgactatctcaatggtcctgaataaagttttctttact

SEQ ID NO: 120128 - DNA, 201 bp, Homo sapiens
aagtagctgagaatacaggcatgagccaccacgcccaggtaatttttgcattttttgtagagatggggttttgccatagtttttattgagacttcatcacataagcattactgattgatcagtttcccacatggttaatttcagtctccagcttggctgataacccatgacttaaggctcccacactaaatcacataattg

SEQ ID NO: 120129 - DNA, 252 bp, Homo sapiens
cctgttatacttattaatctgatgatctctgagaagttgtaatgtctcttactttttagtatggttttgatcaaaatgcaaatctgacctacttcccctgcccagcttccaaccctgctgtggctccccagtgccctcaggaggacacccatggctcagccaagaatgctgtgctttaagaacaaaaaagctctactggggtgcctgctggctgctcagcccttctcatgacactctctaagccccactact

SEQ ID NO: 120130 - DNA, 401 bp, Homo sapiens
agagtactgagcactcagagggtggtgaggatggaccaaacaccaagcactcagagggtagtgaggatggaccaagtaccgagcactcagagggcagtgagatggaccaagtacctagcactcagagggcagtgagaacagatggagtactcagtactgagcactcagagggcagtgaggacagatggaacactgagtagtgagcacgcatagggcagtgaggatggactgagcaccaatcactcagaggacagtgaggacagactgagcattgagcactcatatggcagtgaggatggaccaagcaccaagtactgaccacttagagggcagtgaggatagactgagcacccagcactcagagggcagtgagaatggaccaagtaccgagcactcagagg

SEQ ID NO: 120131 - DNA, 336 bp, Homo sapiens
gtggcacactcctgtgatcccagctactcacaaggctgaggtagaaggattagctgagcccaggaggttgaggctggagtgagctgtgatggcaccactgcactccagcctgggtgacagagcaagaccttgtctcaaaaaaaaagagaaaattaaagacaaatgtccaaacatttaaatcatacaaggtctttaattatggcagggaatatataggatgacataatcatttagaatgcttatactataatgcgtcatacttgcattttattgccattggattattctggggtgtgtgtgtgtgtgtgtgtgtgtgtgtgtgtgtgtgtgtgtgtg

SEQ ID NO: 120132 - DNA, 216 bp, Homo sapiens
tgaaatcacgcatatgaaagcactttgaaactacaagccacacagctgtaccatggtagattattggacaagccaaatattattgctctcatttacaaacaaggaaactgaggctggaagcagacccgggaccagggcccaagtctttaggttctttggccagaggtctgtcctctccatgacgatgcttcactaactaggagcaggtaggaagta

SEQ ID NO: 120133 - DNA, 562 bp, Homo sapiens
tgaatccttgctctgtgacttgggacagctgagttgccttctctgtgcctcagtttgcttgtctgtaaaatgggattgctatagtactatctcacagtgttagagggagggctaaatgacatcgagtgcctggcacagggagtgatcattctggctcttccaagggtagaagagggaggttttgcccagaggcaaaggcacaaagaccattgactattatggggccagatgggccctccacttgagacccacccttttccccatgcccaggtcacctggctgccatctctgaatcaggcggaagaggtggaggtgaaactaacattggttactgtatgtcccataccgtgctaggcccatctcctttttacagatgaggaaattgaagctcagtggtgtgaaggagtttgcccaggagtgcacggctccatggtggagcaggaatgtgtcctcatgcttttatacaggggtctttcccaccccactcaactcctgaagccccctaagaaacagatgtagggccattcccaggctgcgggtgctgggtccaaggtggggacag

SEQ ID NO: 120134 - DNA, 508 bp, Homo sapiens
ctgggtccccacacacccatttcacagatgaagaatgtgacaccttgcccgaagtcacacagtagttcatgacagccagacagaggcttgtccaactccaaagccatcctctactccacagcaccaagctttttgtttttgtttttgtttgtttgtttgtttgtttgtttgttttgagacggagtctcgctctgttgcccaggttggagtacagtggcgcgatctcagctcactgcagcctccacctcccaggttcaagcgattctctgcctcagcctcccgagttgctgggattacaggtgtgcaccaccatgcccagctaatttttgtatttttagtagagatggggtttcaccatgttggtcaggctggtctcgcactcctgaccttgtgatccacccacctcggcttcccaaagtgctgggattacaggcatgagccatggcacctggccatgcccccccgctttttttttttgagatggagtcttgctctgtcacccgggctg

SEQ ID NO: 120135 - DNA, 290 bp, Homo sapiens
ggcttcgactaacattttggggtggaatggattttggggagtagggcatggatacatctctatcaggcaagtacagcagaggaagagaaaggcaagaacatcagggagtttgcaggatatgattctcgtgatggattatggagtcttaactagccaaccgtggactagtcacggttggctactagtccacggttggctactagtccacggttggctactagtccacggttggccactagtccacggttggctactagtccacggttggctagtacgctggaatggaattg

SEQ ID NO: 120136 - DNA, 370 bp, Homo sapiens
cagaattccacctccccacccccagccaaacctaagctattagcaaattccctccttttctaaaattttccttcgtaatttacagtaaggtcagtctcacaaaacaccagcgtttaaatgaagcttctgctatcttggcactgaagaaatgtactcaaggcaggtggggtagacaaggaacatgaactaggttatgaatccctgctttgctgtgtcagaaaccaagccataggaaatagaagcgtgtatagattaaataataccgtgctgtgccaccagaagcacactgctgccaagagaagagaaagcacctataagataaaggaaaaagagaaaaagggagggtaaaagggagtttcattcataactc

SEQ ID NO: 120137 - DNA, 215 bp, Homo sapiens
ccctcgctcacggagcctcctaactggagagaaccacttccaaactgttcagccatctcagtttctcctacattcaacctggtcctggtgtgcccagcttagcctacaaaaataagcagaactgggctaaattatcttggatttggaggtgtcctcccttaggggaggtggggaggtgtctgagccacctagaatgagggtgagcatggggataa

SEQ ID NO: 120138 - DNA, 322 bp, Homo sapiens
tcttacctgcctggcaaaaccaaaacctcagatgcatgtttccgttcatctttgctgtgactcttacgtagctttgtgcagatggagcaaagtgtgaagacagaaatccatgccccagcaggtgtgcatcctccaagctcagccaggccttccagtgtccagtattttcccttggtctcctgttccctataataacactaaatgggccaggtgcggtggctcacacctgtaatccgagcactttgggaggccaagatgggtggatcacctgacgtcaggagtttaagaccagcctggccaacatgatgaaacactgtctcta

SEQ ID NO: 120139 - DNA, 897 bp, Homo sapiens
cacatctgagcttcatcaaaaactaaagctaaagtcctagctttggaacatcacggaggtccctcagctctggaacatcaaggagacccctctttctggaaatctgggctttgtcagatgttggaactgggtcccagccctagaacatcaaagaggtccctctttctggacatctgcgcttcttcgaaagctagagctgaagtcctggctgaagagggacatcaaggaggtccctcttcctgtacacttgatctttatcaaatgatagagttgttatcttggctttggaacatcaaagaggcacttctttctggacacttgagctttgttaagtgctacagctgggtcttggctctagaacatcaaggacgtccttcattctgaacatccgagctttatcggaggctggagctggagtcctggctctaaaacatcaaggtagtccctctttctggacatctgagcttcactggaggctggaactggagtcctggctctagaacatcaaggaggtccctctttctggacctctgagcttcttcagacactggatctggaatcctggctctagaacatcaaggtctctctttctggacatctcagcatcatcggatgctggatctggagtcctggctctagaaaatcaaggaggtccctctttctggatatctgagcatcagacactggatctggagtcccggctctagaatatcaaggaggtccctgtttctgaatatctgagcatcagatgctggatctggagtcttggctctagaacattaagcaggttcctctttctagacctctgagcatcacctgatgctagatctggagtcctggctctagaacatcaaggaggtccctctttctgaacatctgggtttcattggaggctgg

SEQ ID NO: 120140 - DNA, 549 bp, Homo sapiens
cacgagagtctcaccatgtcacttctctgctcaacacccttcaaagcagtactgcttccagagccagcaagaggaatccctgccccaggcccctcatgacatggatatgacactgacgcttcctttgctggagaacccatgacagcctaggtcatgcaggctctggtaccaagggctgcggggtgcaacccacagcttcaaacttctgctctacacttctgtcactacagccatcgggcctcagtcacaggcttcttgctctaagtgtttgaaacaaagagcaactgcgtctgcgcgccattggtggagatggactttgtacaagcgccggagtgaaatgaaaaatgaatggggagcatcataacttcgggtttccagtctgccacataagaagcttggaagtcaccgctccatcctaattacaaaaaacagaagtaactgaaagaaaaaatacatatacttgttagattatttctttcaagtagcgtacatgcaatagattattaatattttaaaaacattcaagaataattaaatggattcttacat

SEQ ID NO: 120141 - DNA, 381 bp, Homo sapiens
agtttttggaggacattaaaagagctactccaggaaacacacaaaaattaagtaggtcaaacagccttattgcttacatggagaaagttttagtggtctagatagaagatcaaaccagctgcaacatttctacaagccaaagcctaatccagagcaaggcactaactcccttcatttctataaagtgtgaggaagctgcagaaggaaagttagaagctagcaaaggctggttcacgaagtttaaggaaagaagctgtccccataacataaaagtgcgagatgaagcaccaaattctgatttagaggctgcagcaagttatccaaagatctaagctaagagcactgatgaaacaagctatactaaatgacatattttcagta

SEQ ID NO: 120142 - DNA, 821 bp, Homo sapiens
agaagcatcctatggggaagtccaggagaactataagttgtctctggaggaccggatccaggagcagtccacgtccccggacacctccttgggaagcacgactcccagcagccacacgttggagctggtggcactggacagtgaggtcctgcgagactcactgcagtgtcaagatcacctttccccgggagtgtcttctttgtgtgacgatgacccaggctccaacaagcccctgagcagcaatttgaggcggctgctggaggctggttccctcaaactcgatgctgcagccacggctaatggcagagtggagtcccccgtaaacgttggctcgaacctctccttttccccgccttcccaccacgcccagcagctcagtgttctggccaggaagttggccgagaagcaggaacagaatgaccaatacactccaagtaaccgttttatatggaatcaaggtaagtggttgccaaactcaaccaccacctgcagcttgtctccggattcagccatcctaaaactgaaagctgcagccaatgccgttctgcaggacaaatctctcaccaggactgaggagaccatgcgatttgagtccttttcctccccttttagctcccagtctgccagttctaccttggccgctttgtccaagaaggtcagtgaaagaagtttgactcctggtcaggagcaccctccaccggccagctccttcctttccctggcttctatgacctcctcagcggcccttctgaaggaggtggccgcaagggctgcgggcagtcttctggctgagaaatcatcgctgctgcctgaggaccctc

SEQ ID NO: 120143 - DNA, 632 bp, Homo sapiens
gttaggagataaatttcaagacatgtgtgtgagagagagagagagcaagagagcgagctgtgagctgtgctgccgccgccgctgccctttgatcccgacattagtgttaggggctcggagacacagagcgcggccatagacaccgccgcaccggcactcatttatttatacctcccatcacacacgcgagcataggacacacacacactcacacctattagatccgtttccattgaagaatattacgctcggggacaagccaggtgcacgaccaaaaatttaaaaaaaaaaaaattttggggcgcgcgcaccctgggcccccagagaaaagtttccagaaaccatgcgcggtgggggcgcgcgcggggccacagaagggtaaagtggaaccgggggcaaagagggggtccccaggggaaaccgcggacgacagacaaaggagggctgggttatttctcaccaattaaaaaaaagccgccggggggggagaaacgcacagaggggtttctgaaacaaaattccccaaaagggggggtgcccggagaggggacataaacggggactcttcaacacgaggggagctcaccaagggagagccggaagtacaaattttgccccgacagcgggggggc

SEQ ID NO: 120144 - DNA, 894 bp, Homo sapiens
tgagaaaaactttttccccctagatttggtgactagcgggataaatttgaagaactccatcccacccccgcacgcgcgccccccattctttccagacagagcggttgtaaatccgaggctgagtccgccctgggagccttggggcactttcctctttgctctgtgtgtgtgtgtgcgtgcgtgtgtgtgtgtgtagctctcgctctttccctcagtctgtgcctcttgtgtgtgtgtgtgtgtgacagagagagagcgagagagagagcgcgagaggagagagagcgagaaagagagagagagagagcaagagagcgagctgtgagctgtgctgccgccgccgctgccctttgatcccgacattagtgttaggggctcggagacacagagcgcggccatagacaccgccgcaccggcactcatttatttatacctcccatcacacacgcgagcataggacacacacacactcacacctattagatccgtttccattgaagaatattacgctcggggacaagccaggtgcacgaccaaaaatttaaaaaaaaaaaaattttggggcgcgcgcaccctgggcccccagagaaaagtttccagaaaccatgcgcggtgggggcgcgcgcggggccacagaagggtaaagtggaaccgggggcaaagagggggtccccaggggaaaccgcggacgacagacaaaggagggctgggttatttctcaccaattaaaaaaaagccgccggggggggagaaacgcacagaggggtttctgaaacaaaattccccaaaagggggggtgcccggagaggggacataaacggggactcttcaacacgaggggagctcaccaagggagagccggaagtacaaattttgccccgacagcgggggggc

SEQ ID NO: 120145 - DNA, 906 bp, Homo sapiens
agaagcatcctatggggaagtccaggagaactataagttgtctctggaggaccggatccaggagcagtccacgtccccggacacctccttgggaagcacgactcccagcagccacacgttggagctggtggcactggacagtgaggtcctgcgagactcactgcagtgtcaagatcacctttccccgggagtgtcttctttgtgtgacgatgacccaggctccaacaagcccctgagcagcaatttgaggcggctgctggaggctggttccctcaaactcgatgctgcagccacggctaatggcagagtggagtcccccgtaaacgttggctcgaacctctccttttccccgccgctgccctttgatcccgacattagtgttaggggctcggagacacagagcgcggccatagacaccgccgcaccggcactcatttatttatacctcccatcacacacgcgagcataggacacacacacactcacacctattagatccgtttccattgaagaatattacgctcggggacaagccaggtgcacgaccaaaaatttaaaaaaaaaaaaattttggggcgcgcgcaccctgggcccccagagaaaagtttccagaaaccatgcgcggtgggggcgcgcgcggggccacagaagggtaaagtggaaccgggggcaaagagggggtccccaggggaaaccgcggacgacagacaaaggagggctgggttatttctcaccaattaaaaaaaagccgccggggggggagaaacgcacagaggggtttctgaaacaaaattccccaaaagggggggtgcccggagaggggacataaacggggactcttcaacacgaggggagctcaccaagggagagccggaagtacaaattttgccccgacagcgggggggc

SEQ ID NO: 120146 - DNA, 671 bp, Homo sapiens
atgttgaagagaaaaagcaatcaatagaaacagagtcggaaatgacacttatgaaagaattagtggacaagaccactaaagcaattgggataattatattttatgtgttaagaaagtagaggagaaattgagcatgaaaagtagagacatggaagttgttgaaaaagacccaaattaaacttctagagatggaaaatacaatatctgagatgaaaatacattggataggatttatttacacactgcaaaaaaataaattagtgaatttgaaaacaaagcaatagaaattatctataaaaagtacacggagggaaaaacactggaaaaagaaggaaagaacagagcatcagtgagctgtgggacagcgtcagatggcttaatatgagtgtaatggagtccacagaatggtggtgggaaaggaaaaatatttgaagaaacactggctaaaatattttcaaatttgatttaaaaaattccacttattcaagaagctcaacaaactataaatacaagaaatatgaagaaaaccacaccaatgtacacaagaataaaattgcttaaagccagtgataaagagaaaatcttaaattagccagagagaaaagaacagtatagttggccctctgtattcatgggttctgcatccatggattcagccaactgcagatcaa

SEQ ID NO: 120147 - DNA, 228 bp, Homo sapiens
tctgtgtcagtgctgagtgtctgtcccactcttcatggggtggctgccgtggcctctgtgtcagtgctgagtgtctgtcccactcctcgtggggtggctgccgtggcctccgtgtcagtgctgagtgtccgtcccactcttcatggggtggctgctgtggcctctgtgtcagtgctgagtgtctgtcccactcctcgtggggtggctgccgtggcctctagcgccagt

SEQ ID NO: 120148 - DNA, 563 bp, Homo sapiens
agcggaattaaatgagatagtatgtaagtttctcacattgtaggctcatgttatcttccttatattcagccctgcgtagtctgtttctcactatcacacatttgctctttaattacatatttgtgtatacgtttctgtaatttcaaagaagtgagtcaaatttaaccctatcatagacatgactatagtaatcattttggtatgttttataaggtgggtgagggaggttgttttgccctgaaaacatctacaaatgctagcatataaaattgagcaaaagatgtgggatagagattgaattcatattctttgtgaagactattaggatttgttcttgtgatgatcagattgtcagttcagtttactgtatttcacacacagtagccccagttagggttccagaaatgcttataaatttgtctcctgtggtattatcttaatgtggtgttggattcttcatcgctgaagtcagctattcaggtaaaactttatttggtaagatcagatacctaagcaatatatagtcactaagtcacttcatatataaaacttggggccggata

SEQ ID NO: 120149 - DNA, 199 bp, Homo sapiens
cccccctccctcgggccgcgttacccagggcaaccgcagtgcggccgcacctgagctgtgcgcctgcgtcccgcgggcccgaccctcccttcccctcggccttcgcccctgccccgccacagccgggcggaagggggcgtagccccgcctcgccaagtgaatatcggcccgccgcccccgcccagcccggcagacacag

SEQ ID NO: 120150 - DNA, 317 bp, Homo sapiens
taatttccccccccccccccagcacaaccagaatacagaaagagaaatagtttttccatttacatgtgttagtaactggtagaaaatgattccaacaaatttctaaataattattagaatttaagtgtaattaactcaatgaataggtttctgggatgaccaactaggtggatgacagtgccttttactcagatggggaaaagtgaagatcacacttgtggtaggaatgggaaatcaaaagtttgatttagaacacgtttaagaaaagatgtccacattagctatatgacagtggaactcatagcaagatttgggta

SEQ ID NO: 120151 - DNA, 330 bp, Homo sapiens
tggttgaaaatatgtaatagccatatgttcacagaatcatctgaataatttatttctgtattctagatgatctattgttataaatggaaaggtagtttataaatgtttatgtatattatctatgttaggattacaactatttaaaatatatgcatagtaaacatactggaaagaaaccaaaatgataactatgattttgtaaatatagtggtaggataagtaatttttgtctaataattataaatgtgttccttaagttgtttttggttttttgggggttgttttgttttgttttgttttgttttgtttttaatctcgagacggagtctt

SEQ ID NO: 120152 - DNA, 177 bp, Homo sapiens
gagacagaaccaccaagtaggagatctttgatactttattcttctaatgggataatgccaactttctccataatttatggctaattaagcttgttctatcagctttgatccttctaaaatagacatcttatttctcagacttgcgttactacttttcttccctagtttctcaccatt

SEQ ID NO: 120153 - DNA, 750 bp, Homo sapiens
gaactaactctggtattagaccaagccagctggaagtagattgtatctttcagtccccagatgctgtgttctcattttctgcaaagagctcatggtctaataggcagcaagctctaccctcccacaaataagagctttatccacgaagtgggaaaatggacgggtagttgttaatgtaattattttcacctgtctcccatgattgagtttttgaatgttactgtttgttcttttggtttttctttttattacggaagaacatgacattgtggaaggagagtgagttttagggaataggaggaattagaaatacagaaggacctacaagttaaatgtcttgtttctcaccctagaagttctaatttattttataagtttgagccagcgatgaactttattttattaattttgtattaataccaggtcttaacagatgattttaagagcctagaaataagataatgatactaggtgttaattcttctaaccaccatttattgagtgtttacgacagaccaagcatatgcatatatatctatatatattatcacctgtaatccttgcagccaccttgttaggtaggatttcttacctctgctttaaagatgaggtaactggggcttagggagtgacttacctaccccacgttgcactaagtggtggcagagccaaattcaaacctattttgcataattctaaagtcttcctgcttagccactgccactctcctgcttccctattatggtccta

SEQ ID NO: 120154 - DNA, 855 bp, Homo sapiens
catataaacaatattttatacatctttcctctctttgtgtttttcacttgtatcctagaaatcagtctgtagcagtgtattactccattgtgtggatgtaatattttttcaactagtctctaattacatgattatttggattgttttcagttttctgttattctgagtttgtgtttgaaatacagtatttcaaacacaagggaaaaaggaaaaaaacttttgttgttacaaatagtgcttcagcgaataaccttgtgaatatattttgtttttctgtttttgttttgttagagtatctttggaatagattactattagtggggtggctggattaaggaggaaatccatatataattttgttagatattatcaagttactctgtactggggttgtaccattttgcagtcccagcagaagtgtatgagagtgcctgtttttccatagcctcaccaacataatatgttgctgtcaaactgatttttgccaatctattagagaaggaatggtatcaaaatagtttttaactttcaagttaatattaaaatttttttaattaaaaaagtaggtatatgcttattaaaaaaattaaaaataagtgcaaaaagtgaaaatactctcaattttcttccattctcatttgcttggtataacatgtatatttcatgtgacacagatagtacatgcatatacatacacacacatacttgtttttaagagtgagaatgggccaggtgggtggctcatgcctgtaatcccagcaccttggcagcccgaggtgagcatattgtttgagcccagaagttcaagaccaacctgggcaacatggcaaaaccctatctctacaaaaaaacaaa

SEQ ID NO: 120155 - DNA, 941 bp, Homo sapiens
aggaagacaaaaagacagaaaaagaaagaaagaaagaaaatggcatgcaagcagcagagtaaaaacctttaagaaaatgaaagaaatatgttatctcccatgaaacaactatgagtcaagaatatgctcattttgaagtttgggagagtacactggactattttaggaagaaaatgatagttttaaattagaattttattactgggctgggtggggtggctcacacctgtaatcccagcattttgggaagccaaggcaggcggatcgcttgagcccaggatggcgaaaccccatctttattaaaaatacaaaaaagtagccagatatggtggcacatgcccatagtctcagttactcaggagggtgaggtgggaggggcaagcccagggaggtcgaggctgcagtgagccataatcgcaccactgtactccagcctgggcaatgggaataagaacctattttaaaaaaattattaatgtgtaaccccatataaacaggttaaaaagaaaaactacactatcatcaacagattaagaaaaaatatttaataaaattcagcccttatttgtgatttaaagaaaatactcagcaatctaggaatagaagcgaatggtcttaacatgacaagatacacttatcacaaatctatgggccaggcatggttggtcacacctgtaatcccagcacttcgcgaggctgagacaggcagaccacttgaggtcaggagttcgagaccagcctggccaacatggtgaaatcctgtttctacttaaaataaaaaaatcagcctggcgtggtggtgcgctcctgtaaccacagctactcggcaggctgagacaggagaatcgcttgaacccaggaggtggaggttgcaatgagctgagatcatgccactgcactccagcctgggtgacagagcaaggctctgtctcaaaaaaaaa

SEQ ID NO: 120156 - DNA, 413 bp, Homo sapiens
gcatctttaaacaccccacgatggttaattttgtgtgtcaactgactaggctatggtctcagttgtttggtcagacactagtctagatgttgctgtgaaggtattttgtagatgtggttaacattcataatcagttgactgtaagtaaagtaaagtggatgaccctccgtaatgcaggcgagcctcatccaatccagttgaaggctttcagagtaacaactgagggttcctgcggaagaagaaattctgcctctaggctgcaacatagaaatcttgcctgtgttgaaattctgttggcctgctctaaaattttaggcagaagcctgcaacatgattctcatttgaagttccagtttgctagcatgctgtatggatttcagacttgccagcctccacaattgcatgagccaatt

SEQ ID NO: 120157 - DNA, 206 bp, Homo sapiens
gcaggaggccataatccttagccaactaatgtaggaacagaaaaccaaataccatatattctcactttaagtaggagataaataatgagaaaatatcgacacaaagggagaaacaacagacactggggcctacttgaggatggaggcgggaaacagaagtgaggacctaaaaaggacagattagaagcaatagtaatgaataaaaa

SEQ ID NO: 120158 - DNA, 765 bp, Homo sapiens
gaagtttattacagcagtcgtttggtgcgcggaatccaggtggcgtgtgcggtgcatattgtgacaaatccatgtatccatcttgcggatactctgggacggttgcattcaatgcttgtgtgatccgtatatcacatatcgatataagtgcccagttcgtgggaaccagcaatgctattgttacataatccaggatggatatcatggaggggctatatactgaaatctaatcaaggtaggcacacgcgatttgctgagctcgccctctttgatatatacatctcgaacttggaatttgcctttatttcaagttgtatttgtgggtattcagaattattgtacctgtgtataactcagtggttcaaaagtcattagtctttaataaattagaatttattttaaaaattcaagatctgaaaacatcatttcattgactctcaagtaatgttaatgccaagttttgaaaagcaatttttctttttggaggcagtaattttgagtaattggattccatgaaaaaaatggattcaggagctaattgtgtaccaggtttactggcatttgtgcaaaacaacatttagcaactgtcagtgacaatactcatctaatttctctttatcaccagctggtcaatcacgtatcttcatcaatacaagtattttaatttcctctttcaggtatcctctttgtgtgttttcttccttctcactctcccttctctccttattttaagctactttagaaaatagtaatactttactgatg

SEQ ID NO: 120159 - DNA, 268 bp, Homo sapiens
taatgtgataaataacttttacatttagcctggcacacgtatgcatgttgcatcaccaagtccatatttagttgtcactgttttaaaatgtagctgggcatggtggctcacgcctgtaatcccagcactttgggaggccgaggtgagtggatcacaaggtcaagagatggagaccatcctggccaacatggtgaaacccatcctggccaacatggtgaaaccccatctctactaaaaatacaaaaattagctgggcatggtggcatgc

SEQ ID NO: 120160 - DNA, 504 bp, Homo sapiens
  misc_feature (429)..(429): n is a, c, g, or t
atccttgcattcctgtactcccggaaatattcattagctcagactcatatctgccccccaggatagaattcctgtagctgtgacctttggagcaggtgagtacctgccgcctatgagctgtgtgaccttgggcaagtcactcaacctctctgtgtcttagcttcctcatctaaacaacagagataataatatccacctcagtgagctgttaagcagattaaataagtttctgatgtgaagtactggtaagcgctgcataagggtttgctgttattatttcagttgctgttgttacaggcattcactccatgttgctaactgctaaggggtttccctcctttccatgggaaaggtgatgtccattctgacctctcctgggcctccctaatcctgtgggtgggacattcagggcaggcccaggcatcaggntttctggtgcagccaaggttggacactactgttttgggtgctattcttggggcatctgctctgcaaggaacccac

SEQ ID NO: 120161 - DNA, 457 bp, Homo sapiens
tgggtcttcctgggtgtgaccacatccacagcctcccctagagctgagtctgagggcacttgcacctgggcagccagtcgcgtacacacacaggcgccccaccatggggctctgctgcattccagggagcacattcgccgcgtgcacagagaagcacattttcacgcatgtgacaacacacacatcagcatgtggacccgtactgctgcccacaccaacaccagccgtgtacccccactgctgtccacacccacaccagccatgtacctgcattgctgtgcccgacaccagccgtgtacctacactgcagtgcctgacaccagctgtgtaactgcactgctgcccacagcagcaccagccatgtacccacattgctgtgcccagcaacgtaagctgtgtacccgcactgctgcccacaccagccgtgtacccccactgctgtccacacccacaccag

SEQ ID NO: 120162 - DNA, 1495 bp, Homo sapiens
agaaaggggtagaaatggcggctccgctcggctcccgctgaggagggcgaagccggcggagtgtctgtgctgccggtctgcagcaccgcccccgcttcccgcacgccgcctgctcacgccgacttcccttcctctgcccggctctctcttgtgctcgtctgcgctccgcacgctccgggccggctcgtctctcattgcccggctcggctccgctggccctgactgaccggccggcgggccggccttgctcggctctcccgggcgcggcgtggactccgtccccctggctggaccatggtgaacacccggaagagctctctccgccttctcgggtccaagtctcctggtcccgggcctgggcctggggccggagcagagcctggggcgaccggaggcagcagccatttcatctcctctcggacccgctcctccaagacccgcgccgccagctgccccgccgccaaagccgggggaagcggtggcgccggcgtcactctggatgaggccaggaaagttgaagttgatggtagtttaagtgatagccacgtatctcctccagccaaacgcactttgaaacaacctgattctgtttgcaaagacaaatcaaaatcacgaagtactggtcagcgagaggaatggaacttatcaactggacaggccaggttaacttctcagcctggtgctacattaccaaatggacatagtggcttatcccttcgaagccatccccttcgaggggaaaagaagggagatggggacctttcttgtataaatggtgacatggaagtcagaaaaagttgtcgttccaggaaaaacagatttgaaagtgtgaaccagagtttgttatttgatcaactagtaaatagcactgctgaagctgtactacaggaaatggacaacattaacatccgacggaatcgtcgatcaggagaagtagaacgacttcgaatgtggacagatacagaatttgaaaacatggatatgtattcaagagtgaaaaggcgaagaaagtcactaagaagaaatagttatgggatacaaaatcatcatgaagtttctactgagggtgaagaagaagaatctcaagaggaggatggagatatagaagttgaagaggcagaaggagaagaaaatgatagaccatataatttgagacagagaaaaacagtggatcgataccaagcacctccaatagtaccagctcatcaaaaaaagagggaaaacacgctgtttgatattcatagatctccagcaagaagaagccatattaggagaaagaagcatgccattcatagtagtgacacaacttcttctgatgaggaacgctttgaaagaaggaaatcaaagagcatggcaagagcaagaaatagatgtttgcctatgaacttcagagcagaggacttagctagcggtattctccgagaacgagtgaaagtgggtgcaagcttggctgatgttgatccaatgaacattgataaatcagtaagttttgtaa

SEQ ID NO: 120163 - DNA, 1537 bp, Homo sapiens
agaaaggggtagaaatggcggctccgctcggctcccgctgaggagggcgaagccggcggagtgtctgtgctgccggtctgcagcaccgcccccgcttcccgcacgccgcctgctcacgccgacttcccttcctctgcccggctctctcttgtgctcgtctgcgctccgcacgctccgggccggctcgtctctcattgcccggctcggctccgctggccctgactgaccggccggcgggccggccttgctcggctctcccgggcgcggcgtggactccgtccccctggctggaccatggtgaacacccggaagagctctctccgccttctcgggtccaagtctcctggtcccgggcctgggcctggggccggagcagagcctggggcgaccggaggcagcagccatttcatctcctctcggacccgctcctccaagacccgcgccgccagctgccccgccgccaaagccgggggaagcggtggcgccggcgtcactctggatgaggccaggaaagttgaagttgatggtagtttaagtgatagccacgtatctcctccagccaaacgcactttgaaacaacctgattctgtttgcaaagacaaatcaaaatcacgaagtactggtcagcgagaggaatggaacttatcaactggacaggccaggttaacttctcagcctggtgctacattaccaaatggacatagtggcttatcccttcgaagccatccccttcgaggggaaaagaagggagatggggacctttcttgtataaatggtgacatggaagtcagaaaaagttgtcgttccaggaaaaacagatttgaaagtgtgaaccagagtttgttatttgatcaactagtaaatagcactgctgaagctgtactacaggaaatggacaacattaacatccgacggaatcgtcgatcaggagaagtagaacgacttcgaatgtggacagatacagaatttgaaaacatggatatgtattcaagagtgaaaaggcgaagaaagtcactaagaagaaatagttatgggatacaaaatcatcatgaagtttctactgagggtgaagaagaagctagaacctctaaattgcttcctttggagaaaatcagtatagaatctcaagaggaggatggagatatagaagttgaagaggcagaaggagaagaaaatgatagaccatataatttgagacagagaaaaacagtggatcgataccaagcacctccaatagtaccagctcatcaaaaaaagagggaaaacacgctgtttgatattcatagatctccagcaagaagaagccatattaggagaaagaagcatgccattcatagtagtgacacaacttcttctgatgaggaacgctttgaaagaaggaaatcaaagagcatggcaagagcaagaaatagatgtttgcctatgaacttcagagcagaggacttagctagcggtattctccgagaacgagtgaaagtgggtgcaagcttggctgatgttgatccaatgaacattgataaatcagtaagttttgtaa

SEQ ID NO: 120164 - DNA, 804 bp, Homo sapiens
gtttacactgcacagtctcctcacttcctttagacctcccggtgagcaagcttgtattgtcttttgtgaattctggcatctgcctcccctctttttcttcctgaggttctgcccaggaaataccacatactggtcattctaggcccattcactgtctaatcaggctttgagcttgctagtgctatcagtgttttacagctgagaaggctggctcgctgaggttggccattgcctgaaggtctcccaggttgggagggtcaggttggggggttgtcacatacccctttccaccatgtcacaatgtttccttctaacacatgcatgcacatcataaaaggctcgagacccagtatatctggtctccctgcctgcattaatagcaccgctgccaacctccctcccacttccctccacttagttttatcatctaagaggccaaaagaacaaaatgtcccccctccaccacaccatatttcaaagggctataaataggactgttagtggtggcattctgggtcacatttgccagggacagactttatatgatgtcagccgtgtccttgggtgcaaggtttccatggctaatagttttctttctcccttctcttccttcccattttcgttccttctttttctccctccctttcttctttcgtttcttcatcctaaaaatcttgttcgaaagtacatagttatgcagccttcattagctgaggttgcttagaagacaaacaggtccatgtttcacaattcctcccagatctgagaaaggaacgtgactctgagcggacagaacaatatatg

SEQ ID NO: 120165 - DNA, 693 bp, Homo sapiens
gcacccatccttccctctctacgtaagctcccaccacaggcccttccggtgtttgtcttccagtctcagccagccttcttggctttcttggacctaccacgccttcagtccctgaaggctcctgttcctcctgccttcaatactccccacctacaccaccctccctgcccagcagctctgttggggtttcccaggtcatgcctcccatggctaccaccaactcagcccagaccatgccaaatacccctcttagacatttgcctggcacaagggaccttaccatcgaagtccttggcgcagttgtccttgtacatatatctgcgtcattctttgatcaaggtatctatctagactgaagtcttcctaaggaagccatctcgcttattcttgcttgcctttgtatctccatcatgtaccaccatggggtttaaatactcattgcagaaataaattattgagtacattagattcactgggcatacaccagtttatccctggtccttcagtcctcatattaggatggtaccatagtgagtacagtcctgaatgatatatggtataaatctatacataaagaaacaattctctctatcctcattctgctccccaccaaaaccaaaaggatcttcagaaacttaacacttatcaaatataaaaccaacgtatataaacagaatacttatctttttaatt

SEQ ID NO: 120166 - DNA, 257 bp, Homo sapiens
gttctaggagctatttagatttgcaggtatcattgggtgcagtggctcacacctgtaatcccaacactttggaaggctgagttgggaggattgcttgaggccaggagtttgagacaaatttgggcaacaaaaagtgagaccttgtctctacaaaaaaaatgccctctcatttcattgagagggcatggcaggagcatccaattcaggggtgtgatggataaagagatgttatatataacctaatatataacatgtaa

SEQ ID NO: 120167 - DNA, 694 bp, Homo sapiens
gactctgaagggatgtggaactgtgtcacacgaggtaaggattgaccagggcagtgaaaggaagagctggaaaggacatgtttgttaggctggcgtgtgggaaagggttggtattgttctctgagacataagggacagaacttagagcaaagagtagaagcaagaggaagctctattttaaatgattctaaggaagaagtgtctaatgcttaaagatgaaacagattgctttaaaaggaggcaatttctcctgtcactggaggtattcaagaagcttcaacatcacgcacagcttactcgtacacacagtaagggatgaatgaatgtgtgagcgagtgaatggctgagggtgtgagtatgtaagtgtgagtgaatggagactgaatgaatgagtgagtgtgtgagtggagaatgaacgaatgagtgaatgtgtaggagtgtgtgtgtagagaatgaatgagcgaatgtatggatgagtaagtgtatgagcgagtgaatgaatgaatgagaggggtaagtatctaggttcagaacacttgtgagtactggttactctacctgtgtaagttgcaccgcttgagcataggattgctgagacccagaagaaaagtcagcattgctctcacactacagacaaatagaggtggctcaagaacttcagatgacacttctgaaatgctgcattacgctcttc

SEQ ID NO: 120168 - DNA, 306 bp, Homo sapiens
gaatttctgtaatgagattataatgcaaaggtttgtttagtcacaatattttttaaaattttaattatgattttcgggcgatgaccccaatctttccatcttttacattcaactgccttttaaatgctggcttccttcaatttctcttattatgttcatcctctttttaaagtttttgagcataactaaaactaccctacctttgagaaccctctgtcttcacctagtagaataaatgaaatgtggatacaaaggctgagcatataaattacctttaaaaaagaaaatgccttctacataaagctt

SEQ ID NO: 120169 - DNA, 223 bp, Homo sapiens
tcgccatgttggccaggctagtctcaaactcctgacctcaggtgatccacctgccttgatctcccaaaatgctgggattacaggtgtgagccaccgcacctggcccactgaagtgttaaaatgaccctttgctctcagtttaacactcctacccatctttctgctctctggttttagcctacagctatattggtttgtccttttaaagatttccccgacttcc

SEQ ID NO: 120170 - DNA, 241 bp, Homo sapiens
gtcttccgcaaaaccagccactgataccaaaaatgttgcagaccactgcgttaaagtcagggcatcggcagttctggttcctcctagaggctctgaaggaaggctctattccttgtctttttccgtttctagtggctgcctatagtccttagtctgtggttccttcctcagtcttcagagtgcaccaccccaatctctgcctacattttcctctcctcatctgcagcagtagctctccctg

SEQ ID NO: 120171 - DNA, 386 bp, Homo sapiens
gaggggcacatgcaggtgccattgctgacgtaaacgaagcaggcagggtgtgagaggtggggactggggcaaagtggaaacatgccccctccttttttgtgtgtggctagtgcactatgttgcccaggctggtcttgaactcctggcctcaactgatcctcccacctcagcctcttgaagtgctggggttacaggcataagccgccatacccagctgttcagcccttttaaaatttcctactgaaggctgagccatctgtccctcctgcctatctgcccggctcaagttagcttaagtaagctttaaagcacgtcgaaatccctggatcccttgctatcctcaaacctcaaggtagtatcagctcctgcacctgcccccaaagcag

SEQ ID NO: 120172 - DNA, 525 bp, Homo sapiens
catggtggcatgtgcctgtagtcccagctactcaggaggctgaggcaggagaattgcttgaaccagggaggcagaggttgcagtgacctgagatcgcaccactgcactccagcctgggcgacagatcgagacttcatctcaaaaacaaaacaaaacagaaagccattatgtatttaaagttcacccaactttgtggcagttggccacactaagaacttgaattcattctgaatcgaacaccaatgcaggatgagacattaaacttaaagaaagcactgactggagttcagctgtccattaagtaaatgaatattccaaaattctgtaatatgttacactaaaatcctgttttactatctcaactgtgcttaggcagcattttaacgtttaagtcacagctgaaaataaaaagaaaacaagatttcattttctttggggttaaaacaagaaaataaataaacaaaaccaaactattgacatctatatctatatctagtcagatactcacacaaagtataccctagg

SEQ ID NO: 120173 - DNA, 419 bp, Homo sapiens
tgctcgcgccctgtactgtagcacgtggggaggcaaggcaagaggattgcttgaagtcaggtgttcaagactggcctgggcaatatagcgagaacctgtccttacaggggcagtggggtggggcagcaggaaacaacacccaccaccaccaaacattcagaaaacagaggaatagagatactacagtcagacagccaagtccctccatgtgtagcccagaggaagtgccccttcctggatgctctcaccttgcactttgttgctggcccgctggcgaagccctggtccatgcgtggattgccagctggcaatccacgcatgggacatgagcaggcacccacagcacccccggatgtacagacacctgtgcacaaatgtggcacacacaggacatcacagtaaccccttgccccagtgtc

SEQ ID NO: 120174 - DNA, 936 bp, Homo sapiens
tgaggcaaatacacgtaactcatgaacgtaatgtaatcttgcaaaattatgtctgagaaagccctaatattctaggctttttttccatccagccctgaaaattttttctgtagataactttatgttgtaacttattctgaatcttattatggcatttccctgtaaactatgtaagtgtaagctaatgattattttgtgaagcgtgctgtttcaggtattaatctgccatgaatactagatatagtagaaaaactgagaaaacatttagcttgagagccaatttgaactagacactatctttttttctcctttttaatggaataaatttaatgcaaataagtgtaagcaggtatacaatgtttagatgaggcttattttcccaactctttttaacaggttttatgatatccccaatttatacccaaaagactgctgagaggttttatgtcaaattgattacaaacttctctgggttgtatttcagtcttctgttaagtatgaaattgagaaatagttttgctcaacaaaagatgatgaggaattgatttgtgaatgtcactggagataaaagggtatgagaaggaatcccaagcaggcaaagaaacagtctagctgtcaagaagaaaacagggagatacataccaaacccaggagctactaatataacaatcatactatagagcgaagtgaacttacactttttgataaactgatagattttttgtaatgtgattatggtaaaatactgaaatatttatgttaatttatttgcatttgaatgcttacatttttaattgacagaatctttgcatttcattacttgagtcatgaaggcgaaattaaagaatggcagtctaaaatacccaggtaaagaagataatttctagaaacaaaaataaaaattcttttcaagccatgttgtttgaattaaatgac

SEQ ID NO: 120175 - DNA, 334 bp, Homo sapiens
gcttttttattaatgctttgaactgactaggttatttaggggttaaaataataactttcaatttgcatctaagtgtcaaaattgctgaatggtttacaaactcagaaagacaaataaaagagcaaggccaaagtgttgcaggcccatggtagatgagcagcttccatggggtttatcagctgggtttactcaagattgtgtcattcactttaatagcattagctaaatacgtactctagggaaagtaagaaagctgcttacttactgtgctgtccaacgaattggtagctgctctttccatgaatgtcacataagactttaaacttgaagaatg

SEQ ID NO: 120176 - DNA, 402 bp, Homo sapiens
ataacagatgaattatgtgtgatctattttataaagaatatcctacaagttagacattcatataaaagatgttgccttttaattcatcactgttagggtggcagagtgtgcacgcctttattctagaatatggcagtattcaaagctttgctggaaattctcttttgtaattcttactctgcagcattttaaagacttttcatagtgtcaaaccttaacattttgagaaacaaaataagaaacaacaaaccttaacatttgagaaagaatttctgtgaacaatcaaatacttttagatctaaacctgctgcataaaatagaaaagcataatttaaaaccatgtattaattagaaatatatatttagtatgttctgtaactgtgatggagcaatttatatcaa

SEQ ID NO: 120177 - DNA, 361 bp, Homo sapiens
ataacagatgaattatgtgtgatctattttataaagaatatcctacaagttagacattcatataaaagatgttgccttttaattcatcactgttagggtggcagagtgtgcacgcctttattctagaatatggcagtattcaaagctttgctggattttcatagtgtcaaaccttaacattttgagaaacaaaataagaaacaacaaaccttaacatttgagaaagaatttctgtgaacaatcaaatacttttagatctaaacctgctgcataaaatagaaaagcataatttaaaaccatgtattaattagaaatatatatttagtatgttctgtaactgtgatggagcaatttatatcaa

SEQ ID NO: 120178 - DNA, 1083 bp, Homo sapiens
cttgaatccacgtatgacctggaagcctctgcttccagttgtcccattgttccagaccgaaatagtgtacattttacatatattgattgatgtcttatgtctccctaaaatgtataaaaccatgttatataccaaccaccttgggcaaatggtctcaggatctcctgagggctgtgtcacaggccattggtgactcatattcggcttggaataaaccttttcaaatattttacagagtttgactcttttcatggatagtagtctcacatatttaagtagtttcctttctacttattagaaatggttactgtatttttcatcgggtgcctaatctgtaattaccaatccgatcacaagttttcttcttccttttatctgctgaaataatgactaatgttgatagaatttttcgactctgaaccaatcttgcacctctggcataaagttggtcattgtgtattcttttcatacattgtgaaattctatttgctaagattttgacttttttggatctatgctcataaatgaaactggcttctggttgctttatttttgtactacctttcaggttttataaaggaaactaagtaaataaaatgaaatggtgaacttccttcttttgctaagtagttttttaaaagatacgcaactatttaaaacggtttggtggggaagagttcccattaataaaaatcaacatcaacatgcacactaaaaccaatcaatcagtcaggcaggtgcccactccctgttccccacaccactgcccagtatggtctctggtgagaaacaggaatatccagtgtgggataatgagtaggttaggggagaagactttaggtaatggcttaattagactctaaaggtgtcctacagaagtgttttcatgggtgaggagaagaaacttaaccatgaggttctagggacttgactttaaaccacatacgacaatcccaacatttagttgaaaatgtcgtgatactcaaaaaacgcttttctcaataaacataactgtggggaatccctggtaatgaaaattctaagaaatttatggaaatatggtagttacggctgggcgcggtg

SEQ ID NO: 120179 - DNA, 815 bp, Homo sapiens
ggcagagtgtgagaggcctgcagagggcgaggctgcgagggctgatgctttctcaggccggcatgcctgtccgcactcactgtattgcagactttaaaggggtttttttgtacacaaattacacctcaataaagctgattaattaaaagacggaaagctgacaacatcaaatgttggcaaagatgtggagcacctggaactctcatgcattgcaggtggtaatgcaaaatggcacagccacttttaaaagaagtctggcagtttcttacaaaattaaacatactcttaccataagatccagtgatcacattccctggcatttatccactggaactgaaaactcacgtccacacaaaaacccacacacggatgtttacagcagttttattcataattgccaaaacatggaagcaacaaggctgttctgcagtaggtgaataaactgtggtatatctacacaatggaatgttattcattacttaaaaaaaaaaaaaagagctggtcaagccatgaaaaaattttgaaagaacttaaaaggcttttccctagatgaaaaaggccaagtctgaaagggtaaaaacatttgattccaattacttgatgactttcgtggaaagggcgaacatggacacaattaaaaagatcaggggttgcccaggttctaagggggaatgacaggggaggaagtggggagccggagggatttaggaacagtgaaagtttcggggacgatactaataggagggaatctggtattatacattgttcaaactaaaatgcgaatgcaacgtggaaccttattttacttgactggt

SEQ ID NO: 120180 - DNA, 415 bp, Homo sapiens
agtaccagtagggcaaggtgaatttgattcctgttttgcagatgtgactgttaggttgttagggttaatttaataacccaggtggaattgatttggagatagacttaccacttctgatcctttgattggatctagcctccagctcaatataccttcctcaatttgcctacaagaagaaaaagatctgaagctcagcataatgctggctttagccagaagaatccagcctttaagccatctatatgtgtagccatgaaggaccttctaatatgccttgtgagcccttatggggccacctcacagccacaatttatgcccacgtgtcagcctcacagactcaggaggtgtttctattcattgtaaagcagaccagatgacatttcaggatgaaagaaatgtaagtcatcattacata

SEQ ID NO: 120181 - DNA, 887 bp, Homo sapiens
ttattacctgaggatataggactgcaccagaaagtttatgctgatgatgtgacttatggtggggcattgggccaactggtatcagcttggcctcttgaggagctggaaacaaagaccagataagcttatatgaccagccttggataaaaaaaaacaagacatcaaggctcagtgagcttcactgtctggcaatactttatgtgtgttgcacacaccgttggtggtaaaatgaagtgctgtccacatgactccaatgagggaagacaaatgtgtacccggtttcttctggacgctctcctaggtgctttttcccatggttgattttactctatatcctttcactgtgacaaattttaactatgagcataacagcttttctgagttctgtgagttcttgtagcaatgattaaacctgagggtggtcttggcaaccctcgaatacaggtagttttcttgtacatatatcctcagatgaatacttgatgggaaccctctggaatctctggctttatctttctgtgcagctgtctcctttctgacactctcccacatgagttatagtccccttagtctcctgagactaaattccatatcctcaaatctggtagtctgccatcctacacttgggttccccttgcctgcaccgtagcttgggaactcaagcagtaaaagaggaaaatgatagggattattgcatttgtttcttgtctctcagggaatcatagttattcagtgcctgttacaggatagattttgtctgctcaaaaaagtttgttgttctaactcccagtaccccagaatgtaatcttatttagagatcaatctttacaaagttaatcaagatacaatgagggcaggctctaatgcattatgactgatgtccttat

SEQ ID NO: 120182 - DNA, 553 bp, Homo sapiens
gagtcttgtcctgtcacccaggctggtgtgcactggtatgatctcagctcactgcaaccatcacctcccaggttcaagcgattctccttcctcagcctcctgagtagctgggatttcaggcacatgccaccaagcctggctaatttttgtatttttagtagagacagggtttcaccatgttggccatgctggtcttgaactcctggtctcaagtgatccgcccacctcagcttccccaagtgctgagattacagtcctgagccactgctcccagccttacagaattgtttcattttggggcattcagaagtctgacataaaaattaacttgagacttttatgttcattctttttatcttccagtttctttccttccttgctttaaaaataccttggacttattttctgccctcgattttatttatttctttaggcattcagataccaaaaccttgtcctccacctgtgcttgtgaattgagtcacagcttgtggtgtacgttatttccccaagtccatgctcagttgatgtgatgatgtagcgctccctcagc

SEQ ID NO: 120183 - DNA, 509 bp, Homo sapiens
tagtgcttagcaaaatagtattctatatttaaataattcttacatattactaacaacagttagcatttatgtagcctcagaagactggaactcactttgaatgaatgttgcctcataacacctctttgatgtagtcaggaagtatatgattctctcaatgagaaattctggttagaagagttccccaaattatataacaaatcaatagaggagagatacaagtttgcacatttttacttcacgttatgattgtatagttcttgaagttggaaccaagaagccatttgttataaaggtataatggaaagcaacttgttctttggaggcagaaagacctgagttcaggatatttcttatttaagattttccttatatgtaaaaagaagatacaaatttaggttgaaggctatgggatataggtgatcaataaataggagccattattcctgatgccctggtatagcattagtgagacagtcccacttgagaaatgtgatggagcactcagt

SEQ ID NO: 120184 - DNA, 482 bp, Homo sapiens
cccagccaagccctgctagccgctgcagtgtcctgggtaacaccagcccccatggggacaccctcaagccctgactcagacctagacccctgagcggaagtaaaggaggaagaaaaagaaactaaaaagttatccaatacttggttgggcgtggtgggtcacatctgtcatcccagcacttttggaggccaggggatcacttgaggtcaggagttcgaaactgacctgggcaccacagtgaaacaaaaatacaaaaatatctaccaaaaatacaaaaaattagccagagctgggcatggtggtgcatgcttgtggtcccagctactcgggagggtgagacagaaggatcgcttgagcccgggaggcagaggttgcagtataccaagattgttccactgcactccagcctgggcgacagagtgagaccctgtctcaagaaagagaaaaaaagtttgttgtgcacgttcggcaggtcaaatggt

SEQ ID NO: 120185 - DNA, 228 bp, Homo sapiens
tttgatgtgtatgtgagttgtagcaggaggtgggtaattatataaggactcgttgtttgattaatgcccagcatgaggcagcacacagtagggtctcacgttgaggtcgttgaatgaatcatattctcttcagttgagggaggctgtctccattttacgggtgaggaaaccaaggctcagagagggacagctgctttcccagggtcacacagcgagcagggggctgag

SEQ ID NO: 120186 - DNA, 263 bp, Homo sapiens
aaccacaagactttctctttattccccctgaaggccttcatcactcttgttcttgttttgatctacatatctctaacgagaatgaagttctccataaaggctaagcagtttggcagaacttccttccttccctccctaaccgcaggctgtattgacctcaccctcttggatcagtttgctaaaatggcctccaaactttatgtgatatgatagtgaaccttcaacaacaacaacagcaataacaacaacaacaacaagagcaa

SEQ ID NO: 120187 - DNA, 223 bp, Homo sapiens
attgaaagtcttagtttctaaagccacttctttttcactaggtttgtacatgcattcaattcatcaaatacttgaacacctgctctgtgcctggtactgttcttgttctaagtgctggaaagagaacagtgaacaaaacataggaaaatatgtgccctcaggaagccttcattctcaacctcactgcctttacagagaggtaggacacagagatcagtaaata

SEQ ID NO: 120188 - DNA, 382 bp, Homo sapiens
agctcccagcccagagcctgacttgctcttttaggttttatacagctttctacctggctttgtcctggatgatgggaaggagattttcagtaattcttttttttctcactctataaataagggaaattttcagatcatgtcttcctgacattctagtgatttcctaatcatttcttggacatcttctgggcactttgggagacatcaactttctaagataccagaaatagcatagattattctcattagatcatgaggacctgaaccagaggaaactaagtgaccacagacaagtcagcttccaaaatgcctcacttactcattagagaaacttgggctttaggaaaatgtaattccttcatttttatcaaaatggagtaaa

SEQ ID NO: 120189 - DNA, 744 bp, Homo sapiens
atcaaggggggagagcttggaaacctggagaccttgtgagcaaggcttcgtagtggggatttctattatcatttacgtattgcatagcatgtaattttatctcttgtgggagaagcttaactcaaagtaactcttataagggatgaatctagtttttattttgaatattgtataatcaaggaataatacagttaagcaacatgccatcagaaatgcacagagttacattttaaatactgtataacacccaagatgatcttaacatggtaggttgtcttcagctttcagtgggagactgtatatttagcttaatgagaacagtgtttctcatttaagctgctttatctgaaataccttctttaactttaggatagctgctgaagtggtacacatttcttccatattacagtgtacttttttacaattgaggttgtatattgacataaaagaaagtagccagaataatggctaatgagttgttttgccagcagatgcagtttactctgatactacagtgggtgtaacctagaagctgtggtaatcctcgtccccatgagggagaaggaggagctgatgttggggcctgctatagattagaccttgtgcatggcactgccccacagcctaacgggatccccaagacagccatctgagtggatggcattgtccttcttgtatacaggaggaaaccaaagctcagagagaagagtgatttgctgaaggtgaggctaggaagtgccatcc

SEQ ID NO: 120190 - DNA, 429 bp, Homo sapiens
tcaggagcttgaggttactatgaactgtgatcagacttctgcactccagcctgggcaaaagcaagaccctgtctctaaaaaataaataaatacaaagacttgtgctgatttttcatgttagtatttttagttttacatttctcttgcatgcttacttttaaaataattgagccaacctctctgtccctttttgttattgcatgtaaatctacagccttctgatataacctaagcttgcagaatcttccatccatcaccttcctagtatgcctcttggcccttattccagcagttagttgcttaaaacaaagcactttgtgttggtagtggtactatataacttatagtctatgcactgttggggattgacacactcttcccttccctaccactgcagtgggaagatcatttagaagactaagttcgatt

SEQ ID NO: 120191 - DNA, 529 bp, Homo sapiens
aaaatgtactgggtgtctgcaatgcgtaaatgacatcattttctctctagtttctaaaaagagttgaactttctatgctataaaagttatccaaaccctcattgagataatattcagcaagggcaaaaccacagggaaaaaagtgatctcagcgttaggggtttccagcttcctaaagaaattgcttttagaagcagatcaatttgagtacaagttctagctacacctctgtagcaaacagaataatggcctcaaagataatcagaatccaatacccagaatctgtgaataggtttggttacacggtgaagaattttggtagcagacagaattaaggtggctaatcagatgaccttaaaatagggaggttatccaggattatggggtgggtcaatgtaaccacaagggtcctttgaaagggaagacagggttggaagacagaccagacccgatgttgctggctttgaagatggaggaagggggcaagccaaggaatgtgggcagcctctagaagctaaaagagagaagg

SEQ ID NO: 120192 - DNA, 693 bp, Homo sapiens
gtatttacatggtatatctttttgtatcctttcacttttttatattattatatttgaagtgggtttcagtacccgacttacagttgtgtcttgtttttactctctaatccagcaatctctttccttattgtagtttgaccatttattttaatgtaatttttgacatgtttggatttaggtcttccattttatttttggcctgtttttctcccatcttttgctttctgttttgttctcctctctttcccttttatgcccacttttggattatttgaaaatttaaaacctatctattgtttttcaaatgtatttctttgagtagactttttattgatagctctaaagattacaacattaatgcctaatttttcatggtctacttagagttgatattttacctctttaagtggaacatataaatctttaactatgtaggtcctttgcacgacccttttgtcctgtaactgttattatgtattacacataccttcactgaaaaccccatcaaagtgttattcttttttgctttcaacagtcaagcatattttcaagaacttaaaagaataaaaataatacatttatctcgattttacctcgtcatttgctcttccctcatttctgaagttccacagttttctctggtatcatcttccttcttgaagcggctcctttagcatttcttttagaacaggc

SEQ ID NO: 120193 - DNA, 288 bp, Homo sapiens
cctgtaagtgacaccgtgaggcttttaacccaaagagtttggttccagaagtctgtcttgctgccttcaagccagccctcgctctgctgctggtgctaacctaaggacttgataccttttttaaggccctcctgagagggaggtatgattctcctccattttcagatgagaaagctgaggctccaagaggttgccaaagttcagctagctgacaagtggcagagccaggatctacagtcacagccatgctcactgtgtcctgtgtcttctgacactcacggctgagct

SEQ ID NO: 120194 - DNA, 270 bp, Homo sapiens
gatagggagatggtaaaatttgtccagcccttttctgcaaagccttctgacagaaaatgtaaaatttttgctgagctttagtcactgagtgtgagtaacatgggcaaagatatgggaccaagaaagccatgagttttaggaaacactaaggtcctttgtagcttgaatattgtgattctacatctgtgaagcctcccaaatccagacctttctcatatcaggatatctgcctggaccttcgaaaacacctctgatttctctgccttatct

SEQ ID NO: 120195 - DNA, 395 bp, Homo sapiens
acccgcctcggcctcccaaagtgctgggtgtctcccaaaggcgtgagccaccgcgcccggccctcccataaagtttttaaataaatatttactagtcagttggtgcttcttgaatttctgtaagtaatttttgtgtgcaacagttgagtcaaaggaagcatgaaaaattgttttgaagcttgactctcacagctatttaaataagttgagaaaataaaatttattcccctctcagaatcagataagacaattggaaattggtgggcaagaggggtgaatgctaaagactgactcccttcagccaaatggggctaacactgaggtccacgccatgattttggggattctgatactgcatgtcagacagacgttgcgattctatagttgtctcttta

SEQ ID NO: 120196 - DNA, 678 bp, Homo sapiens
ctgcagttaaataaaaagattttgcctatgttatttgcatggttaatgtatctagaagggttaattttatattgaagaaacaagtgtagtaattatagaaatgaatataaatattaccagtggatttgaggaattaaaatgtcacagtttcatttattactttactatatcagacctgtgttaaaaagttttgctccagttgaacaaacgagtaaaataaatataggaaaaaataccccaaaaacttttacggtatataaaaagaagaaaagcgatgtactttttattttctagaggtgatgaaaagtgaactagaaataattcctctgttaaaccaggcatcttgtaaaagagaaccatcactatatattgttcctgggattccctgtgaataactggcaatgtgaggctatagtagtcacagctctttattccttccaaaccagttattgtgctgctaattagaattggatattggtggtagtggaaatggggaaaactatcaatgttactttgtgttaaattttaatcacacaagttaggacattcagaattatggtttccatggtaaccacaacactgagtcctgtgtgaaggcattacagtgggggtctttgattaaaagaaagtaaaccagaagtgaaacaaaaatgctccatatgtgcagctaaagttaca

SEQ ID NO: 120197 - DNA, 280 bp, Homo sapiens
gctgggcacgtccagtactaaatcaacccggtccctgtggggtggggcctgccttccctggggcagtgagttcgccttttggtcaagggtctctgggtaccggtatggcgttcgagctcactgcacaggaagccagctacagggaggaagctcgtaggtttcccgtccatggcctgtatccctggggcccctgggttcttccctgggatggtgggacagggggacggtcactctgttggtactgaaaaggagaggccctcattcctagacagagacccct

SEQ ID NO: 120198 - DNA, 283 bp, Homo sapiens
aaatttttctaatcatagcttcaaagagaatataaaatataattagttctgtggctgtaaatgctatgattagaaaaatttgtagggaaattaatatggaaatacagggttttttccataggggtgattcactggagaggtggtactggcttgctatagttataagaggtagtagtcaggctgttaagattagaaggggtgatgttagcggatcagaggagaaagttaatgagaagttgaatagattgtcgttgaattagttaaagaataatagggcaatgaa

SEQ ID NO: 120199 - DNA, 1064 bp, Homo sapiens
tgtggagacggggtttcactatgttgcccaggctggtcttgaactcctgggctcaagtgatcctcctgcctgggcttcccaaagtgctgggactacaggcatgagccaccatgcccgcctttataaattttgcaatattaagctcttgtctggttttagatcctgatggtgatgttgctgtgatgatacctgggttaactctgaacaaataaggaaaagtgctttacaaagaggctgactgtgaacaaagatccttgtcgtgtatattacccattgcatacaatgttaaaaatgcacatatctgggaaatgacaattacattaaagctttaatatctacatttacttgtgtaatgttaactacaaggcacttactaatttaattaggatgtcattatatacacacttataaagcacatttcagaaagaaaggtgtagatgaaatatagttaattgaaaagcactcagttcaagaagtcaaatatccacaggggagatataaaaaaggaaacaagaaacggttaagaaaaaacaaggttcaagacaccaggggttaacaggtgatgccaatggccagccacagaatgagcaggaaagagctcaagcaaggctgtctgtacagtgtcagctgggcatcacccccaagttacactctaaacacacagaatttttcctgaagttcttaaggaaaggcaagcacctgtttttcttcagctggtgggattctggcttcttgcaatccttaacccactccgattaaaaaaataaggattacagccgggcgtggtggctcacaccaagtaatcccagcactttgggaggctgaggtgggcagatcgcagatcgcttgagctcaagagttcaagaccagcctggccaacatggtgaaatctcctctctactaacaatagaaaaattgaccaggcgtggtggtgcacacctgtaatcccagctacttgggaggctgaggcatgagaattgcttaaacctgggaggtggaggttgcagtgagctgagattgagccactgcactccaacctgggcaacagagcaagactccatctc

SEQ ID NO: 120200 - DNA, 466 bp, Homo sapiens
gtgattatcctgcctcagcctcccgagcagcggggattacaggggcacaccaccatgcccagctaatttttgtatttttagtagagacggggtttccccatgttggccaggctggtctcgaactcctgacctcaggtgatcagcctgccttagcctcccgaagtgctgagattacaggcatgagccactgcacccagcctaacaatatttttaattgagaaaaatactcaatttacaagagcaaagtgagctggtgagtccaacacaaagtctgctaaatggaagacactctcaattctctttttttccaaccaaaatgtgtaaatatttcagtccaaatgtttggcatactgtctttttgctttcattgagaatactgcaagccctcaaataaactagttttgttcactgttgtttttgctcaatgttgtttcattgtaatgttgatgagaaagaaaaaaaaaga

SEQ ID NO: 120201 - DNA, 711 bp, Homo sapiens
gccgacccgtctgatcatcctgctcacgtatgtgtcagacttttagtgcccactgcgtgtgtggctctgcactgtgttcttggggtctaacataatgtaggcaatctgaaggttactgtccagtgtgggaagcaaaaggaaatcacggtataagttttgctttctttaatagcagaaggggctacatcctactgtgggaatgcagaaaagggagtgataagctgccttcatagactgtgctttcattttttgcaaaagtaaatgtaatcaatatgaatttgtggaaagtgtagcatatattgccatgtgttatgactttgagcttattttaaaataaagatggatgcctgtttctgcctaacatgttagtcagtgttatcaaagacaagaggcagaccattcattcactcatttccaaaacactgaatgccattctgtgcctagcgctatacaagacatcggaaattcagtgtcaataagtctttgctttccaatcaacagggacgattttaattatagattgtcttcctattaagtatgaattttagcaggtattaaaattagtttgataatatgagaaaaaaatgaagattgaggccgggtgcagtggctcatgcctgtaatcccaatactttgggaggctgaggtgggaggacttgagcctaggaatttgagaccagcctggacatcatagtgagacctcatctctac

SEQ ID NO: 120202 - DNA, 507 bp, Homo sapiens
tgtcatggtatactagacattgctcaagtgaatcccccctctagtgttaagggcatttactcatgttgaacctagttttatttacagtatatttgtatgcatagaagatggaggtccaccaaagtgttaattatgcttagttgtaggtcaggtatagctaactttccttttttaatatatatatttacatttgtgtttcctttataatttatggcatagattgccacgattttcttaagtatacttttataatcagaaaaatgatattaaggactcattttaagtacactaaatcaaatattagaaggcttctttattttaagctaattgtgaggattatttgtcatttaaaacttttgcttctacttattaccctgaagtatctttgtggtgcttatgtttttcacagactgtataaattgatatactctcccgccccatggtaatgttgctacacataagctctaataattatcatttttaatgttttaagattaattcaactaa

SEQ ID NO: 120203 - DNA, 485 bp, Homo sapiens
ctctcctggttcagaggttgccaccgtgtggcccatatggagatgtgtgcaacgtgttttgcagaaactgcaggactgtagacctctgcagagctagcctccccaccatcccccacaggaagttctattcttgcatagactccagggatgctgtaaacaatctcttcaagaagctcaagttcattcccatgaaaacttcttgagtagaacagcttaggtatcagtcatattgattaagcaacacactgaatttctccaagtttttctatcagacgtatagatgtttgaaccacggggtgttgagtgtgttggcgagaaaggcagtttgctaaggctatgacttcaggatatatctgctgtcagatgatttcataagaactgctaggattctcttcccagtgccctttggacactcggaaatgatctcttcatcttggaaaggggacctgaactgagtctcagcttcctgactcctagcccaaagc

SEQ ID NO: 120204 - DNA, 536 bp, Homo sapiens
gagatctcaggtaggatacatattctgagagcttaattgaatagctctacttatttgtgaaaattagctatagcctagatttaagcacagatgcataacactaagtgattattttttaagctatttggttttataaaagcaatggtatgatttaaactttgcaatgagccatataaaggcatttcataccacctgtaatacaacttctaaacattataaataccaaacagaaagagtaagcttcgaaaactccctaaggggtcatttacatttaataatgatttgactaattcatgctcaaatgtgacaaggacttaactatgagaacagctctgtctgttcaggaggaagtaatctgattctgggctcaatacaacacaatgtacaatgaatgccctgtgaagctagctgacttaataaacttacagatagcaagatcagttttttaaaaaaatgagcaagttcggaattctttcaccattcaaattaccctttgaaattgccaaagaaatataaaatgggcggaggggggaagg

SEQ ID NO: 120205 - DNA, 436 bp, Homo sapiens
gataagcgccctttcacttcacgccttgggttgacagagtaagaatccgagctccaaataaaaaaaaaaaggtacatgcctgagagtcattcttgaatttttcagccttcagctctaaattagttcatgtactagacttgtgtttattacataatgagttgatttattaaaaaatacaagaatatcagaactatcagttctgaagctatctggcattaaacatgaccttgtggaaattaacagaaaataaaaattgatttagcaaatgtaaaaaattgaaaagatgaggttaaatgtcctaatcccataaagtaattctaaatgttcaagcaatttgctgatgcatagccatttccagtcatattttaaatcttgtagataatcttttcatcagggaaaagccttcttggctcaccagtttaataaacaaatccag

SEQ ID NO: 120206 - DNA, 508 bp, Homo sapiens
caaagctgcagggtcctctctctgggtgcgtcattcgggtgtattgtcatgagtgctgggatgaaatggaaatgaacttgccaaattattaacccactctgcctcagtgaggttgacttgagccaggggtgggctgggggagggagacaggggagagactatccattttttccttatatgcttgtttattctttgaattgttagaacaaacgtgagattttcatagcaaccacccaccactacaaaaccattaaaatactgcttaaagggtgaggtgcagtggctcatacctgcaattccagcactttaggaggcagaggaggttggattgcttgaggccgggagttcaagaccagcctggccaacatggcaaaaccctgtctctactaaaaatacaaaaatcagccgggcgtggtgacatgcacctgtaattcctgctttttgggaggctgaggcgcaagagttgcttgaacacaagaggcagaagttgtagtgagctgagatcgtg

SEQ ID NO: 120207 - DNA, 346 bp, Homo sapiens
tgctgtcctctctacttttatatatgtttgaaattttctgtaataagaaaggtccaataaaaacatccattacttaaaagtttttacatgaaagatagaagtttgtatgctggctgttttgggagaaataaggaatcaataattttttgcaataaagctaaaatacacattaacttcatgaatagaaatttagtccttgaagtcagttctgcttcataatgtagagatttttttaacagctaaaattaaatgtgtttagaccattgtttgtgatctaatttcctcttttttccaattttggttatttagtttccgaacacctctaattaaaaaaaaaaaaaatcat

SEQ ID NO: 120208 - DNA, 337 bp, Homo sapiens
tgagaggtagaggctgcaagggagccatgttggcgtggctgcactccagcctgggtgacagagtgagaccctgtctcaaaacaacaaagacaccaatctttccatcctcatgacccagtcacctcccaaagacctcacctcctgccgtccccttgggggtgagcagctcagtgtatgaatttgaggagacacaaacattcaccccacaatatgaccccttgtcaaatgttcaccctgtgatggacatggttccctctgctttacatggatggactccatgaactctcacaacaattccaggacgtcaacaccttcataatcaccgttggacctgtgg

SEQ ID NO: 120209 - DNA, 1003 bp, Homo sapiens
tctggagcccagatctgtctctctcctctccacttccttagttcaggtgccctagaacctctggcctctctgtctggtcctcagataggagtgggtcctcagataggagtgggttggttgacccctgggggcagggcagttggagtacagatatcactagcaggtcccagatggtaggaagacagatcagctcagggaaagctgctcacagcctccttcagagttctgggtcttgaaagcagctgttttgggagcctaactgcttttcccagggacttaaggcctttgtaatttttgtagccctttcatcctccagaataaagggaccttcttgagctcagggccttctcagtactggcatgccccagggctcctcctccctgcctggctactctggccagctccactgcttacccagcccagtcactcctagtccaggtggatcccttcagtggcttggcccacggcctgcatggtgaactgattagcagccccaactaatgggtccgacctcagctccagacaccgctgcactggtcgcccatccgccatcactgttgatgccagggtggttcttcccttcactgttgatgccagtggggcccctccctttactgtagatgccagtgtggcccctccctttactgtagatgtgagcgaggtccctcccgtcactgtagatgccagctaggtccctccctttactgtagatgccagcgtgacccttcccttcactatagatgccagcgaggtccctcccttcactgtagatgccagcgaggtccttctctctgctcagacatctttgactccctcttatgcacatcccactgatgactctcagcacatcccatcaccttcacctttgaggtttatccaggatctgacaagtcccagcatcccagctgctgccccctggcctggcctcctgctccccaaccccaggcatcttccccttctccacatgcggttggcgcaagccaggggggaatcagagcccccc

SEQ ID NO: 120210 - DNA, 565 bp, Homo sapiens
ggactcgtgtgggactttgaggaaggggcttaaatgaagctggctcttcagggagggccccttttggtcttcttgagttcttccgccttctggccagcaacacggttaatgctccagcagcagcttggaccatcgggtggccttagaaatgccaaccaaatgtcttcgtggtgaagcaggaagatggagcctggcattttgctgggactgacacactcaccctggactgcccagccttggacatcctttatgggagagagaatacacttctatcttctttaagtctgtgatttggattttctgtttatccatccaagctgcctgcaatgaataaaatcatgttccccgtcctaggcaacgtttagatgggtctaaatgtgtacaccctctactctgagaatgataggatagttacagaatgtgggaggcaggagtgggaggagaaagcactataagtatgggcctgtcttgagagagccaagaaggactttggcatagccgagcactaggctaacctcacctagcagaggattcacttgcccatcgtaaggggcttggtgagggt

SEQ ID NO: 120211 - DNA, 307 bp, Homo sapiens
tttttttttaatttagagactgaatctcactctgtcacccaggctggggtacagtggtgcaatcactgcagccttaagctatcctctcgcctagctaggactacaggcacaagccaccatgcctggctgatttttaaaattttttgtagaggcaggggtctcaccatgttgcctgtgctggcctcaatctcctgggctcaaatgatcctcccacctaggcctcccaaagcgctgggattacaggtgtaagccactgtgcccagacttaaacactttttgactagagtaaaactatgtctattcaaca

SEQ ID NO: 120212 - DNA, 302 bp, Homo sapiens
tgggtgaactaagagataaacagggtgggtactccagagacagcaatgcccagagaggcaggggcagagggagggcgtggagttcccagaccctgcagccgggtcaccagtggaagctgggagccctgggggcctgtctgtcgcagctggagagaaagggagagaaggtccagccccctctgtctcatgctcaggcctcccatgggtggaacctggaagtgtgggagataccacttgcaggggtctgtccccacaagacatggcagaggagggagaggacaagtgtagagtctcaggacaac

SEQ ID NO: 120213 - DNA, 198 bp, Homo sapiens
tctttctcctcttccttctccctgcctggcaacatcttttcatttctctttcccttaggtgacttattagataatgatgttcctctggctcccatactctctcccaggtcctcttccattcttaaagcactcacaccctccctggatgatagtacccactcctgagatggcagttacctcctgaaatgtgagggaccc

SEQ ID NO: 120214 - DNA, 358 bp, Homo sapiens
cccatgctatcatgggatattttaataataatcaaattgttatgtagatatgccaaataattctgttcaggcagacccatttaattcagcaggaatttgccgatatcctgttctatgcatagttcattagtggattattttaggagtttgaaaaaaaacacctgtgctttaaaaatttatactattttaatgtcacaaatatatatgcagagttctgcttccactaatgatagagtagcttatattggattcagtttaccgaagactagaattataaatcaggacaaaatattaaaacaaaaaaaccaactatttaaagatacaagacagtggtcaaatgcaagcaaaaaatgaaatt

SEQ ID NO: 120215 - DNA, 326 bp, Homo sapiens
ccttataagaaatatgggactgtttacaaatgagtgattccagtatttcattttgattttcctctctcacaaatcagtaaatgtgtgtctttttgtatctcattgtgtggtcatatctagtcacttgtttctactcaaaagaaaatatagtcacaggaaactacttcacagtaagtagtaatgattctcaagatcaaaggggacgtcttcacctcttttcaacctgctcctcttttttgccttaactctgatggcagtcacacaactgtgtgtttttcttttaattcactttacaccttggtttggctattgctttccatggttca

SEQ ID NO: 120216 - DNA, 796 bp, Homo sapiens
atctcaatttgaattgtatctcccagaattcccacgtatgtgggagggcaccagagggaggtaattgaatcatgggggccggtctttcccatgctattctcgtggtggtgaataagtctcactagatctgacgggtttatcaggggtttccgcttttgcttcttcctcatttttctcttgccccttgccacgcaagaagtgccttttgcctcccaccataattctgaggcctccccaaccatgtggaactgtaagtccaattaaacctctttttcttcccagtctcaggtatgtctttatcagcagtgtgaaaacggactaatacacatggtaattccatgtttaactttttgaggaacagccaaactgttctccacagtggctgcaccattttacattcctgccagccgctcatgaagcttccaatttttccatatctttgccaagatttattattgtctgtctttttgattgtagcctttctagtgggtgtggagtggtatttcattgtggttttgatttgcatttccctagtaattaacggtattgataatcactttcatgaacttatttgccacttgtatgttttctttggataaatgtcttttccggtcctttgcctattttaaaatggtaccatttgtctttttattgaattataataatatttatgtattctggatactagatccttattatatatattatttgcaaatattttctctcattctgtgtattgtcttttcactttcttgacagtgtcttttaataaacaaaagtttttaatttcaatgaa

SEQ ID NO: 120217 - DNA, 416 bp, Homo sapiens
gaatctgcctgatgactttttttcctctccacacaaaattttctttttctccccataagtcctcatgcattcattcacagcccttccttggcttccgctggtcagttcctgaagcaatccctggccacagagaaagcgaacgggtactaactgtgtcccgtgctgatgtcccactggtggtggccagaactcccaggaagatcaggaagcaccatcataatcaggagagcggaggccagcttcccagtcctgcagggcctctaggggacacaagatacagggcccaggcacggaaggtctcactggtcaagtcccagtaagaagaggagctcccaagtgagagaatggaaagactcttattgttggctacttgaggtgtgccaggagctgttctaagcatttacatggatttgctc

SEQ ID NO: 120218 - DNA, 138 bp, Homo sapiens
tcaagttgcacagcatgaaaattggatgcagctcaatcattacttttagcatgccatagagctcttttgataaagttttagaaggtccaagctaacaacctaaaacatcatgtattacatatcacacacatcacatac

SEQ ID NO: 120219 - DNA, 511 bp, Homo sapiens
acaggtttgggctagggccagagattctgcatttccaacaagaaatgatgcggatgctgctggcccatgatcacgccccttgagtagcaaagttcttcacgacaaaggaattggaccctcttttgaaatctgttgaagagaatttttctgcgtccctgattcctggtagtgtgctttctctgtggagttgactaggggccgtgaaggaagacagaaggcagtgaggggcagcgcgtcgactgcacactctggaagcccactattggaataggaataggaacagacctttctcaccaatgggccaatttgttcattcagcaaagaattccttgccctgatccggacactgtaattttagggtatcaatgtcctctggccaacgacctccagaaactcacctaaaattgaatggatggaattatgctccatgcagtgcaggaggactgtggggtgacttaggaagaggctttagaaagagattgttaaggaactgggcttgtgtttggtgttt

SEQ ID NO: 120220 - DNA, 347 bp, Homo sapiens
agctcctcctctgtgctaggcacttagtacctcataatatctacccatttaatccccaaagcaaccccatgaaatagatacttttaatacctcctagtctacaattgtggaaacttttataaagacacaaagcttaaacaactttcccaaaattatattaatggccactaatgtggaggagtgatttgcacctaagccaactgtcttggaagtccacattcttagctgaaagggaaatctgcgtttagtaaaggtatgagatggagctaagtttcttcatctgtattctgtaacttggtcattataataataaacattataggattctcagttctcaaaaactaaca

SEQ ID NO: 120221 - DNA, 388 bp, Homo sapiens
tgtcagattgactttccacaaaggagattttatatatccagtcaaactttggatttttggaaaactatgtctgaggaacataaattcaagttgagtaaaatggcaaaggctgacaaaattggaaaatgaaggccaggcacggtggctcacgcttatagttccaacactttgggaggctgaggcaggagaattgcttgaacccaggagatggaggtcgcagtgagccaagatcatgccactgtactccagcatggatgacagaacgagactccatctccaaaaaagaaaaggaaaatgaaaaacgattaatccataaatgacactaaaaagatgagtgatttcagtgcttctgaatggtgaccatgtggtttcttctttattgagaatt

SEQ ID NO: 120222 - DNA, 192 bp, Homo sapiens
catcaccgcagaaacaaaggctccagcctccggacaccatgtctgtgcgcttttcttctacctccaggagacttggctcttgcgggggcactggctctgtgaggctctctagtgggggagcaggctttggggctggaaacacatgcggtgtgccaggcattggaagtggcttctcttgtgcttttgggggca

SEQ ID NO: 120223 - DNA, 376 bp, Homo sapiens
attggaaggatgagtaggtactaaccaggggtcaggtgttccaagcagagggaatagcacttgaaaagctcacaagacaggaaggagcttagagccttcccaggactcagaagtgtgtatggccagagcatggaagggaggatgaaataagctgacgctcactgaatcaccgaaggggaaggccgggatcagctctgcacaaccttgtaggcctcaaaaagggagggcatggagaaagagaacaaactacgtgttaggtgctttaccaggtgctaacacacacgcgatcacctttgatccctgcagctaccccatagtaaatgttatcaccatctccaatttacaaatgagaaaacagaggctcagaaagggtcag

SEQ ID NO: 120224 - DNA, 295 bp, Homo sapiens
agacaggctttgctactaggagagcaaggccttggaataaacttttgaaggattgcttgaaaataacattaacaggctgggtgcagtgactcatgcccataatcccaaacactttgggaagctgaggtgggcagatcacctgaagccaggagtctgagaccagcctggtcaacatgacaaaaccccatctttactaaaaaaatgcaaaaattagccaggtgtggtggtgcacgcctgtaatcccagctacttaggaggctgaggcaggagaattgctggaacccgggaggcagag

SEQ ID NO: 120225 - DNA, 538 bp, Homo sapiens
gaaatgctactagacaaggagattaaaggctcttccaacaactgaaattgagatagaaattgctctctggctacatttttggttatagcctaaatttcttcagtagacatccttctcatgtttcaaatttagtttattgttaattataatacataattgatattctttaaaaacactttagtatgattgtgctattgttggagcagggggtcagcaaacttttttagataagagtcagatcgtaaagaatttcagacatgagagccataatggcttctgtcacatccactgaaatatggtgttataatctgaaagcagccattgacaatatgaaccgataggtgtggctgtatttcaataaaaagtaacttacaacagatggcaggtcagatttggctcatgggctattgtcaacccctgtgtgatacgcagaatagtgactcctccaaagacgtccacatcctaatccccagaatctatgactgtgctgtgttacaagccaaaagggatgtttgtgtgagtacatgtcaaaacgcat

SEQ ID NO: 120226 - DNA, 548 bp, Homo sapiens
tgggttccgcttgactctgcattctcctacttccctgcctgcttactctctgccatcatagttttttgcttcaaccttcaaatgtagccattctttttctaaagcggtacttattctctttattagttaaaattattaattttatgcacttactgttctagctccaattttgcatttccagttccctgctgggaataaattaaattggcagaagctcagtctaagtgcctgcaacagaatttgtcccatatccatacaacttgctcctccacaacaaatgggagaatcatcctcttacctccagcacctgcctcaaacaaagtttctgatccatctaccacgtaactttgacgctgaccaagaattacagcttcaaagaaatcattcgaggatcattaatatcttggtcatgaataacttttatgtgaaaggctctgcagctaatctcaagtgcagtgaactctgtttcattactgtatttccaaatttagagttatttgggttgtatataggtcagataatttacttttttgttttcaacctaatat

SEQ ID NO: 120227 - DNA, 185 bp, Homo sapiens
agtaaacagtatgaacagaaggcattgcaatttagatattcattccaggtactaaaggcaaaacaaaaaaaaattcatttctgcacatgtgccctttcagatttactttaattcaagtcttctgacagaattcagtcagatttctcctgaaaatgaaatgttttctttttttttgtttgtttgag

SEQ ID NO: 120228 - DNA, 611 bp, Homo sapiens
gtttggtagaatacagaacataaatgcttatattcttctattgcacttctaggaataatctaacttcttactgtggatttggctctaatacctgcatatgaacacttttctcaccaccccaacccattctagaaatacagttgtatgacaattttggttaaatgaaaataatttttctccactggtgctaagagatacaacgggcaaactgatatgatgaatgaaaaatagtaagatcttttttaaaagcctgtactaagagtattttgtttaattctgctaagtctaggcccttaaaaaaattaaaataatgcccttcaaaaataaatcaatttgataaattagattacaatttaaattaatttttatgactgtgagtttacctgaagcatgaaaaattaacataagagcaatttcacatttaaggcaataggattaaatttaaaaggtgacatttttaatcagtctgacaaggtggactagtccatgaaggctgcccagaaaacacaactagatgtgaaatgattaaatacctataatctgccatattaaaaatatagttagaaaaagtctaaacataaaaaaattataattataaaaatataagaata

SEQ ID NO: 120229 - DNA, 504 bp, Homo sapiens
ccaagaaactagcatgacttgtttcctgcaagaaatatctgggaagttctgtttatacttgaacaaaaggtatgtcccaccactgatagtgccacagtctctctgttggagttattttgcatagcgtgaaactagaaagcaaagcacaaaaggatggtggaaaaagcagttggcaaactactgctcatgagaaaaatctagcctgccacctctttttgtgaataaagttttattggaacacaggcatagaaatgtgtttacatatcatctacgactgcttgcacattctaacaacagagttgaattttttgcaacagagactgcatggcccaagaagcctaaactatctactatctgtccttttacagaaaaagtctgctgtcttctgccctgggctcaagagcttggactcaagagtctagagtcttgcaacttgaattatggtccacatactagcaacagcaacagcacctgaagcctgttagaaatgcagaatctcaggct

SEQ ID NO: 120230 - DNA, 419 bp, Homo sapiens
cagacaggtattctgagcacagagaagagcaattaatctaatctgatggttcagattgaggttagatactgttatttaatagtggatccaacaaaataccttatacctagatgatgctccttagtagtttgttgaatgaacaaactaaagacctgttttgcaattgctgaaaaattaaagaaggatatcaaaattgggggaatgaccctctgcagtttttcacctagtatctaagggtacaaaactaatcttctgaaagaagaaactaaataaaaaataatagactatagagccaaaagttggaatctttctttttctactgttactctgatggagaaattaagagattgggagaagatatagttatgggactataggccaaatgagtttccttataatttgtttggtattgagctggt

SEQ ID NO: 120231 - DNA, 870 bp, Homo sapiens
gtggaagcctccattgatatcagtaccaaccaaatcatactaagtgagcaggttcttagtctttatatgaataaggctttccctaaagtagaaggagtatgcaagcagcaactatatttattgagcctacaatgatatttccttttgatataacattcaaattactgtcacctcaaagaagacctaaatttgtcttaaagattatacagtactctttatctaacttaatcacatcagttttatatttatttaaatttctgtcttcactcttaatatattctacctcccagaaacaaactgagaaaaatgcctgcatgagattatttcatgacagaatgaaaagttatcatgctaagagtgtcttactctaaggaaatttttatattcagttaactcatgattttgttttttctttagccctactttaaattgtttttcaaaggggctaaatttatattaatgtatagtcatatattaagctagtatactaatgaactgcaatcagaaaaaataatagtgcatacctcatttaattgagcatcacttgattgtgcttcacagataaacctgttttttacacattcaaggtttttgacaaccctgtgttgagcaagtctatcaacaccatttttccaacaccttttgctcatattgtatctctgtatcgcattttgctaattcccacaatatttaaaacttcatgattattattattatatttgttatgatgatctgtgatcagtggtctttactattgtaattattttggggtgccatgaaactcacccatataaaactgcaaacttaattgataaatgtgcatgttctgactgctctacaaactagccattccctaagggtcctgtggga

SEQ ID NO: 120232 - DNA, 266 bp, Homo sapiens
taacctgcaagatttggaggaaaggagctgtttctaattcatctttgtatatctgtggtgcttaataagtatttctcaaatagatggattagttgtttgtagtcttgtgtgtatctctggaaaggaagggctcattcaaatttaagcctatgtgaaaatgaacccttgggcttgagagctctaatttgagtaccagaggtaccttagagtgagtactttagaggaccttatacaatatctggaggcataaaggaggtgtttttttt

SEQ ID NO: 120233 - DNA, 417 bp, Homo sapiens
taggttcagcagtgcatgtgcaggtctgttacatatgtaaacttgtgttgtggggggttgttgtacagataatttcattatccaggtgttaagcctgttactcattagttattttccctcatcctctccctcatcccaatctccaacctcaagtaaggcctagtgtctgttcttcccatctctgtatccatgtgttctcataatttaaccgttacttataagtgggaacatgtgttatttgattatctgttcctgcattagtttgccaaggataatgaccttgggctccatctgttcacctgcaaaggacatcttctcattttttatggctgcatagtattccatgatgtatatggattacatagtattccatgatatatatggaccgcattttctttatgcagtccacattcatgt

SEQ ID NO: 120234 - DNA, 286 bp, Homo sapiens
aggggagctagtcccagtgtttgaccagccagagtaggcccttctatcagtaagtgaaagaagtgggtgtggggggaggtgctgcaagaatagtggggacaacaccaactgtcatatttactctaatccttggtacccatacaaagtcactaaaatctagaaaagtaatgtttttttaaaaaattgcacccagaataagggagaaaaacgtctttttaagttctataatcccaggttatcagttggcttgcaactcatggagaaatagaaaccacagctgcttagt

SEQ ID NO: 120235 - DNA, 229 bp, Homo sapiens
catatagtggtgtgttcctgaagtcccagatactcaggaggctgaggcagaattgcttgaagccaggagtttgaggctgtagtgcaccatgattgcacctgtgaatagccactgcattccagcctgggcaacatagcaagacctccacctctaaaaaataaatattaaaataaagtattagattttttttttctaaataagaaagattaggcctttgaaagaaagattg

SEQ ID NO: 120236 - DNA, 454 bp, Homo sapiens
ggggactgaatacctggactgacaggcacctccatagaactgagacccatgagacccgggacccgcagcctccctgccccgtgccctggtgccggccctcagcccagcttcctcgtctgcatgcagcagctcctctgtccaccagcagaggctcttctagggccttgctgggctgcagctgactcaggagggcaacagcctcttcagagaatttgacagcatggagaaccaaacaaaagcagaaagtgaagcctcagaactgggttcaccatcatcccagttttttacaagctatgattttgtcccatctttattaacaagataaggaagtatgaaaagtaatctcgacatctgagatggtgagattacagccccaggagccacccagctggctgaggagcctgagaacaaggcacagccacatgacctgtgccagacaaatgctagaatgatg

SEQ ID NO: 120237 - DNA, 343 bp, Homo sapiens
gagctgagatcgcgccactgcactccagcctgggcaacggagcgaggttctgtctaaaaaaaaaaaacctcagatctcgtgagaattccctcactaccatcagaacagcatgggagaaaccaacctcatgactcagtcacctccctcgacacatgggtattacaattcgagatgagatttgggtggagacccaaagccaaaccatatcatcttagctgtaggcaaaaaaaatgggatatatctttattctttgactttctagaaatgccactatctcaaaaatataagcctaggagacagagggtgaaggtagggtaccattttctatggtagtggggatgag

SEQ ID NO: 120238 - DNA, 747 bp, Homo sapiens
gatcaggacaatgtaaaaaattggactgaatttgtattgtgcagaccttgaatttgttggtttatttcttaaccatttctgccatttaaaaggtgtagtggaaaaaattggttatttgaattttggataaatataatttacagcatgcttgtatattataccttttagatacatgcaaatttatatataagaatgtgcagagtttttaaaacaaagagtaacaaattaaaaaataaaagaatgtgcaaaagtttttatttttaatttcttcttcttggccttttccattgtttccccaagttaatgccaattaaaattcagttagcacaaatatacgttgtagcaagaatcaagtactgtacctcttcagtccttgatgttcattaacctttcctagctactggcatcttcatgttacaactatatgttagtaaaccaggtagtctaattagatcaacagtctgaataccaccaaccgttaagtttgaaatgtagaaattgatgtcctgttcatcagtttcagacctgtctatttaaagagagaatttgtgtgtgtgtgtgtgtgtgtgtgtgtgtgtgtgtgtgtgtgtgtatgttatgtatttatttatttattttatttttttgagacttgagtctcactctgtagcccaggctggaatgcagtggtgcaacctccacctcttgaattcaagcagttctcctgcctcagccttccaagtcgctgggattacaggcatgcgccac

SEQ ID NO: 120239 - DNA, 230 bp, Homo sapiens
cacagctgtgcacacagcaagctcacagctggacttcctatcgacattctatctgcccttgaaccattttttccatccttgactgtgtcctacttaattaaagatgctgctgtctgccttgctacccaagccagaaacttgacggttatttctcaatgtctgcattcaactgtcactaagtcctatcaatctacctcttaaatgccacttaaacctgtccttaccagcct

SEQ ID NO: 120240 - DNA, 770 bp, Homo sapiens
agctgagagggcgtcaccagcgtgtcggcgcctgcggttttcttcgggctgtccccaggcgtcgtgcccgcgtccgtcacgcgcggtggcttgcaggggcgcaccgcgacagccttaaaggaaaacctgttagggacaagggctgctgtgggcagcgagggttatagactcatgtgtgttctgaattctggtgggggtagtgatggacgctgacccagttcacagaattatctgactggcgaagtaaaggtacttgaattgcaggaaaaaaggtcaaggtgaactgaagaaaataagtctttccccaaaggaggtagaagatggggaagatgagatgtcagaagctaaggacaatggcagtagagatgaggttcttgtccctcataagaattgcaggaagaataccactgtcccgggaaagaaaggggaggaaaagtctctggctcctgtgtttgctgagaagttaatatcaccaagcaggaggggagccaagctcaaggaccgtgagagccaccaggagaatgaagacaggaacagtgagttggaccaggatgaggaagataaagaatccttctgtagggggttcccgatgagtggctgtgagttagagacaagctgctgtgtgtgccattctacagcacttggggagaggttctgttaaaaatccatccctctgaaaactgccttggcaattcccggctgattcttcgggatgggcctcattgatggggagtctcagtggatgtttgacttttgctttctacctgacc

SEQ ID NO: 120241 - DNA, 598 bp, Homo sapiens
ttgagactccgtagtcaagtataattgtaaaccagctagtaaaattgaagtttcttttttcatccttgtgttatttggaaacaaaattaagaaatagagtctcttttcttcctcctactttattcaacagccctcactccatatggatactgtatactttggattttagaatattttaactcttaaaggaatgggcagtggaatcacaatatcactgatttagcagatccttggtaaatattcgtcatgtgatcctgtggcaatcctaaataggaattcacctctttctcttaagctttcccatagtactttatatctctttaaaaaaatcagttgtttacattactacattgaaagttttttggaccaccaaccttgtttctgtctcagaaccttagctaaatgcagggtattcaaatatcccatccttatttcctgtcatttcttgtcatgagtcttaggtcctactactatttacctgcttataattacacatttagtttgaagtgttttatgtttgcatgcttttctttcacattattccccctaactgaaatgcccttcatacatttttttgcctaattaaatctgtcagttc

SEQ ID NO: 120242 - DNA, 382 bp, Homo sapiens
ggggcgggtgacctagaggatcccgatcagagcataccgtatcatcctccatccctggcagcaccaatctagttcctgtcactatggatttgcctattctggacatttcatataaatgagataatcaactctatagttctttctggctggctgctttgatttagcttcatgttttcaaggttattccccagttagaagtgtatcatttctctttattgctgaatgatacaccattgtatgcatagaacacattttatttgtccatttaccagttgatggacatttgggttgctttcactttttggttatgaataattctgtgatgtacatttgtgtacaagtttttgtgtggacacatttcatttctctgggatatatacct

SEQ ID NO: 120243 - DNA, 632 bp, Homo sapiens
atccaaggctgtaaaactctcaagggccagaatggtgctgacgtcccttaattcttgccagaaatggagaaagcggcccttatcctcatcagtactttgttttgttattaggacttaaagtagaactgcttgtctatcctggatttacaaattttttttatgaagtttagtttcttcctaaaaagctcaaaatccagtttgtaagattaggtagaggacaaaatgccaatgtgttccttctcttgtccttgatttttaaatctttccatggacacaggcatatactttctctgtatttaaccgaaactcaacccttcttgcaaatctactcatagaaaaacaagtcaacagattcaccagctggaacattatttcagatgcattgaaattcactttgtctgagtttcttttgtactcaaatagaaccaccaattacattgacatgctgacttcaaggtttctgtgcacaaaccaggtagaaatattgaattgctaggaaaagaataagaatctaatcttagaggagaggtaggagtagttacatttatgttggggagttgttcgaatagtgacagtgctttgaagtttaagaatagaagggctcccaatggtgagcatggagagtgagaaaa

SEQ ID NO: 120244 - DNA, 688 bp, Homo sapiens
gtgacttctgaatgcggactggaggagatgaggatggagggctgggaggatagtaagagagggagcagggagaccagttacgggccactgaagtagtcaaggtgtcagacaagagctttgagacaagaggactcgtcttagagatagattgcatgagggccatgagggtaagggaggtgtccaagctgacctcagccttctggcttgtccactggttggatggggtcaccattttattgtaatggcggatactggttgcagagaactgagtgttggaggaccatgaatgagttccatttcagatctgctcagcttgctgtccctgggagacaaccacaggagttgtttaggagacaccgggctacttcagcctggagctccaggaggaggtctgcattggtcgttgggacaataggaccaggacatggcaggctgcaggaccccagttgcaccaaactgccatcccctcctgcctggtttcccttcttcatgaaccgatcaatgggccatagccaggttgggatgcatgtcttccacaggatgggaactacctccagctgatcagttaacagttcagttggggacctttgagtaaaatagatgaccctctattaggtggttgggcctcttccaatcagttgacagcctacagagaacaaagactgatctccccccagcaagaaggaat

SEQ ID NO: 120245 - DNA, 369 bp, Homo sapiens
ataagctaatgcgtcgacctgttatttcatggattttggcagacagcatgaaactcctgagacagagacaaaaggttttagtacccatagtacatcaagcagcatgaacatcatgctgacatctgctcctcatgtcctccaagtcccactggagtagtagtgagtgggccagtggatgctgtgcatgcagtcagtgggtttgtctctattgcagccaaggaacactgggcttagggagcccactgcttttataaaaagcctgctcttggccaggcgtggtggctcatgcctgtaatccctgacctcgtgatccgcccgccttggcctccgtcgacgcggccgcgaatttagtagtagtagtcgacccgg

SEQ ID NO: 120246 - DNA, 392 bp, Homo sapiens
attatacatgtgggagttgtatttctaaaattttctcattaatatgaaaaacagagtaatgaaaaacagagtaacttattgctcctttttgagattgcccagtaagtacaatagtatttaaaagtgttggaaggcgaggaaactaacactttagccacaccagtatgggttgtaagacttgactcctgaaaaactcacctaatcaaagtctaagctggtaagaacctcagctttcatcccagttcagcacaagtatagtccatgtcatcttaatatcatgccaagtaaaagcagcaagacacaaaaggccacatgttatatgattacatttatacaaaatgtctcaaataggcaaatccatagagacagaaaattctttagtggctgtcagg

SEQ ID NO: 120247 - DNA, 726 bp, Homo sapiens
tgggattacaggtgtgagccactgtgcttggccgttgtcaggctttgatttaaaaaagttatgctagcttcatacaacaggttaggggtgtttcctatttttatgttctctggaagagtttgtataagattgtcattcttttttacttaaaatgtttagttagaatctactggtgaagccatctggagttctcctttaagggaagtttttgaattatggatacaatttcttgaatagttatagagctattaatattttctatttcttaatgtctcagttttgataagttatatatttcatttatcatctaaatatgttatctttaaaattttttaattattggcataaaccaagtgtagtggctcatgcctgtaatcccaccactatgggaggctgaggcaggaggatcacacttcaggcaaggagtatgagaccagcctggtcaacacaatgagaatctgtctttacaaaaaaattaaaaaattagcctggcatggtggtgtgagtctttagtcccagatactcaggaggctaaggtggtaggatggcttgggcccaggagttcaaggctgcagtgagctatgatcatgccactgcactacagcctgggcagcaaagcgagaccctgtctccccctccaaaaaaaattattggctggctgggtgaggtggctcatgcctataatcccagcactttgggaggccaaggcaggtggatcacaaggtc

SEQ ID NO: 120248 - DNA, 268 bp, Homo sapiens
ctagaggatcccgtgtgtcgagataagaggataagaaatcaaagataattcagtacactttttattttagtaatctcaatgtccacaatttaccataaacagttactatcggaaaaaataaaaacaaaaaagagaggaagagataatcatatgaatatgataagcattatcaataaatagcgaaaggtcaggcacagtggctcatggctgtaatcccagcactttgggaggccaagatgggaggatcccttgagcccaggcattcaag

SEQ ID NO: 120249 - DNA, 185 bp, Homo sapiens
gctggaagcacgatggggaaggctgggtttatttctgggtcagaatgttgaggggcctcactggagggagtgatacgaattccctcaatttagcctaccagctcttgtgcccaagccctcataagtggcttaaacagaacgcctgaacacacatgtcataaatcagccacacgtggaacatatct

SEQ ID NO: 120250 - DNA, 182 bp, Homo sapiens
ccccttgtctatggccaactcaggttcttccatgccctctcatcttgcaaaaatctttccttctctccccagtcccaggccctacccacaagcccatctaaatcagccgttccttccacaggctccaaatgcttcctccactccatcctcatagcaaggatcacactttggtgcaattcatt

SEQ ID NO: 120251 - DNA, 216 bp, Homo sapiens
acatttgatatgaatggagtcatacactgtgatctgtcgtctctggcttctttcattgtactaaggcataatgttttcagggttcgcccaggttgtagcatgtatcagtacttcgttcctttttatggctttataatattccactgtgtgggtataccatattttatttatccattcttgaactaatggacattttgattgttgccactttttggg

SEQ ID NO: 120252 - DNA, 168 bp, Homo sapiens
gagagagaatgcttgtgcctgcctctgcccaaacattcataaaatcatcagaatttcatgactggaagggaatgggaggtgtcaatggtgaggaagagagaagagtcaaagatgtccagccctctggctgaagccactgggtagatgatagtactgttgaataagatg

SEQ ID NO: 120253 - DNA, 334 bp, Homo sapiens
ttactgtgaaaatgttattaaaaagtccaggcggtgctttctttttactcaaaccaaatgagtattcttccagagctcatttttattttaaagcatatttcttttatggagctgtgatttagtctctaataaggataaataatcattatataaaaaaaggctggtgtcatagattttagtactacatattgatagaaactgcttcagtggttttagataagtgtattttccggaaataacttttgaatttgtggaatgatagtttttctctttttaacagttaacttgtctctactcatttctgcccaatatagaagctctgagaagctgggag

SEQ ID NO: 120254 - DNA, 311 bp, Homo sapiens
tccccttgccacagagaggcgatgagactgaataaaataaactcaacagagaggaggagagacgtgtgtgtgtgtgtgtgtgtgtgtgtgtgtgtgtgtgtgtgtgtgtgtgtgtgtgtgtgtgtgtgtgtgtgtgtggtgtgatagggtgatactatgttttatatcacggtgggtgtgctatcctctctgatgtggctctgcctatccaagaggaaaatgtataatactacgccttatatcgcgcggtgtgtacaccttttctgtgacatcgttcgtaaaatccggtggggaatcagtgatagcacgcc

SEQ ID NO: 120255 - DNA, 455 bp, Homo sapiens
agcatcaaatttatctgtaatattacatttaaaaaaggataaagtaaatatgacaaaaatggatacatgttattctctacatttattatcttaaaaaaatttttcaaaatgaatgttagaataaaaaaacacgacctaaccactgtttcatgtaaataacagctagggctttgaccattaatagtatgttttccatttctctgccctgtatacaactgcaatgtagctattaaaaagccagtatgttaccagatttcatgaatagtgggtctcaacttcaaggaaagacgttatttccaatcttctctctactaccagactacacttggaatactgtgtccaatgctgggggccacaaagtattgtgagatgtttaagatgaggaaggtcctaaaatcccatcttaaaggtgatatagctaaagtaatagggcctctttagccagaaaaaaattg

SEQ ID NO: 120256 - DNA, 349 bp, Homo sapiens
ctcacatccttcccaagccccactttctatttcaggaccttcttgtctctcactggggctcttgcaaatagcctcccaattgatctgcagactcctctcatttttccccccaaatactgataacattttaatgttattaaggcatggatttgaataagctattcctctgcttgaaaacttgcaatgtaggctctccccatggcctacatactggttgaagtccaaactccttagtctgtgccatatttgagggtaacaaatgtatctaatcagaggccttctcttgggaagtgagaatgtgaagaagaagtggcgagggggttttcattcattcaggaaatattgatta

SEQ ID NO: 120257 - DNA, 385 bp, Homo sapiens
ctctctacctagctcgccacctactcattggagttgtaataactagcatttcataatttccagtgtccagcattctaagcatttaccaatgttgttcattttaccaaggttgtcttctcacaacaactttatgaggttgtataaatatcatccccattttacaggtgaggaaactgaagcacagagcggtaaataccttgacctaggccacacagccggtaggcagtacagctaggacctgagtccaggtagtgtggctccaaagtctgcaccatttaccaccaagctgtaagaaaagtgctcatccacagaacaccagatcatccccaaattctctactccaaagggcatgagggtgccaatgaatgctccaccatctaaaata

SEQ ID NO: 120258 - DNA, 266 bp, Homo sapiens
agaacattcattggggaaatgccaagaacattcattgatactactactgagaaaaaaaatcagtatttacattccaatagtaagaatatagtttgtcacaaatttctttgtaaatggagggggaggaagaccagaattcattagtttcttgacaaactttacttcccaaaattaataaagcaccatctgcatcacaataccttattcatctctcttgcaaaatcaatctttcttcccaaaactaaaactgatttctgcctacaaaa

SEQ ID NO: 120259 - DNA, 512 bp, Homo sapiens
atgaggcatttgaacttgggtatcatcaagtaatgtagagctgagagggatctcagaggtcagcaaagttagtttggcctatagcaggagaattccttgtattgtatctttttcagtagatgtatttagcttttgtcctccacctctgggaggaggagacaccatagctggctaggagaacccaggtaactgctgggaacttgcacagcaaagctatttgcccccagagcctgattctgtgatgttcacttctttatttcatgattttattctgtaactatcatactttcccacccttagccctttctgccctggattgaagatactttaatccaaatgtcaaccaggccaggcaggtaatgtaaaggtgtaatgttccagggcgccctgttccctagcaccaaggcacctgtgccacttcccaaggccacgtggaatgagggctcagtgtcagcagatcttcagatttcccaagagaagctggaaatccagatttgattgatatttacatg

SEQ ID NO: 120260 - DNA, 485 bp, Homo sapiens
cgatctaaggatcttcccctgtatcccaccctacctatacttagtccttttcttatacaaatgaaatatttgcttagtaatcctttttgattcatatgctgttttataataactatagtgcttcttctacttaagtaatttttgacatctctaatcaatccctgttgacttaaatacattagaagtcctcaaaatctaaacattaaatagtttttatttaaagaagataaactggatataagtaagaaatactcctcaacaggctaatctttgatatccaaccctggggtggactgaattatagggactttgtttatctgacgtaaaccagaacaagtaaaacattcatttcgaattaaagtgtttttttttttaagagtatgtatgaaaaatgcattattaaaactaagagacaggccgggcgtggtggctcatgcctgtaatcccagcactttgggaggccaaggcgggtggatcacctgagg

SEQ ID NO: 120261 - DNA, 244 bp, Homo sapiens
atcagtgttctgtaaaatgaagaggtcactaaccggcattcaaaagcttttggctatctaggcctccctgtcgcaggcttagaactgaagacactggctgggcgcagtggctcatgcctgtaatcccagcactttgggaggccgaggcaggtgatcacctgaggtctagagtttgagaccagcctagccagcatggtgaaaccctgtctctactaaaaatacaaaaattagctgggtgtggtgg

SEQ ID NO: 120262 - DNA, 777 bp, Homo sapiens
gaactggagatgtagaaagtacttttcctgaaggagttatgtctagatagtaaaccatcatattattattattattctcagacatttgcattgtcagggatttaactaccacttctgttttggtgacccttcaggtgagctctccctgatacccatctttaatacctaaaatcaaactcgtgtcttttacctctatttcttctcggaacgttttttgttttatctattaaataaaattatattatctgccacttagtttcaaaatcctaaggttgtcctttttcttgataactgtcagtttgatccttctacagcagttagagaaaaacaaccaaacatcgatacctctccaaattctaacgtttatttctttgccttcttttttctccctcactttttccccatcacaacacatatttaaggatttcatctttactgtgtgaacctttattttgttttaactttttcattcttcctacacacactgccagattcatattgtaaaccttttttaatatacctcattcttactatcttaagaaacaataacaaaacttcattgtctccattctgtccacagggtaaaaatcaacccttagtagaaacagcctaaatgtcaatagaggtttgtttaagtaagttatggcatatatatacaatgcaagaacaggcaacctattcaaaataaaattctatttcctgtgaactgaaaaaaatctctaagttacatcattaagaggaatcaagatatattaagtgagaaaaatgaagtgcaca

SEQ ID NO: 120263 - DNA, 444 bp, Homo sapiens
gacaatctgcagtgagcaaggctggcttgttagtctcaggcaggcattggacatttttgtctttattctgtgaacagtctcacaagggagacatcattgtcccgctccacagatggggtcactgaggctcatgagtgccctggcccaagattctgcagctggcaggtggtgtgggactcacacccaggtctgtctgatttcagatttcattactatactgtgaggttttggaaactgttgatttgttcaaacaagcagtcgaaggacataggttaaaaaagaaccaaattctggctgggagcggtggcttacgcctgcaatcccagcattggaagccgaggtgggtggattgcctgaggtcaggagttcgagagcagcctggccaacatggtgaagccctgtctctactaaaaatacaaaaattagccaggtgtgttggtgggt

SEQ ID NO: 120264 - DNA, 438 bp, Homo sapiens
tcttatatatggtactagaggttgaaaagtcattagatatttaagaccatagactgggtgagatcacccaggagtaagtgcagataaagagaacccaagactgagcccaaggagactggggagtagcagccaaacagcttttgccatgcagagatcataaacgacctttacaagagaagttttggtgaagtgctggatacaaacccgtaatttagggtgggttcaaggaagaaatggaaggagaggaactgaaggcagaatataaataaatgcttacacaaaatttctctgtaaaggtgagtagagaaaggctgtgactggaggggaaagggaattcaaatttgtttgtttttctgatgggagaaatgccagcatgtttgcatacagatgagaatgacccagatgagaggcacaattgatgatgcacaagagtccttg

SEQ ID NO: 120265 - DNA, 456 bp, Homo sapiens
ggccactaaatacctctttgttttgttttgcttagttttctgcatacctattatttatccccaaaagctccagaaggactctgaaacaactctatgtaagcaggtatgcttggttatgtattagtccgcatttcttccccattagaagcatcctttctggggccttacatctttctgctccaatttatatagctgctacacagctttcatcttgagactttgttttactatcatcttgagaactctcttctacattggatcacttgagtcttggatcactccatcttcttgctttacctcctcatgctggtgaatcatatccttcattttcatgctgagaaaagggtgaatgaaataaagttttagagatgatatatgtctgaaaatatgtatattctactatcatacttggagtatagaattcttttaggttggtgcaaaagtaatagcggtttt

SEQ ID NO: 120266 - DNA, 103 bp, Homo sapiens
taagggggagtatgtactcatgggctttaatgaacaaactgtgaaatgtctagatatcttgagtagccaccactctagtttgtcagtggatgaaggtgccatg

SEQ ID NO: 120267 - DNA, 540 bp, Homo sapiens
tcacaagtttgctttttctagtctttttcatctcaggatgacactatcatccacccagttgttcaagccaagtatctagaagttagccttattctccacatttatcctgtcagccaggtatgattaaactaatattcaaaagctatctcaaattgtctcctctcctctaacatcatggctcaggtctacaactctctttagagtcctcccatggattattatgtcccaacagtacatccctccatggagaagttgaagtaatttttgaaaaatttttattttgtaaagacagagtcaccctatgttgcccaggctagtgtccagctcctggcctcaaataatcctcctgtctcggcctcccaaagtgcttggagtaatgttttaaaagtgcgaatgagaccatgttgctctcctgcttgaactccctcaaagcttcccatctcacctagaagaaaaatcactctccttactcaggcttacaaagtcctacatgatcattcacctgtctcctctttgagcttattttgtgatccttttctc

SEQ ID NO: 120268 - DNA, 288 bp, Homo sapiens
accctcagcctcagacatcaccaccagcccaccctcaccgtcatactcacccactttcattttcagatgtcacccagtccacccttactttttgacgtcacagccagtccaccctcaccctccaatgtcacacccagcccacctgcaccctcagacataacccagctcaccctcagcctcagacatcacccccagcccgcccttaccctcatacccgcccaccctcattctcagtgcaccccagtccacccttacttttggatgtcacggccagtacacctcaccctt

SEQ ID NO: 120269 - DNA, 533 bp, Homo sapiens
ataggtatcaaaaaacaaaaaaagaaagattgctctggtgatgagcgaaaggatgagggactagctattgcagaagtctagttgagaaatgacaaagcctgaccttggagagaggttgtggggatgatcaaaggattggatttagctttttactagtgcaatattgttgccatatttctagatgaggatttttttttagagctaatctgggtaaagggctccttttctgtcaaaagaacccattagcaagtctgaataatattgccaggttatatatgttatgtatagtatgagagtgaattgttcattagcatctttgagaaattagaaagaactatgtcaggtgtaatttggaagagaacttgaagtttgttattgttactatttttgagatggagtcttgctcggccacgcaggttgcagtgagctgagattgtgccactgcactccagcctggcaacaagaatgagactctgtctcaaaagaaagaaaaaaaaaattcgtgttagtactgatagggtacccagtcatct

SEQ ID NO: 120270 - DNA, 470 bp, Homo sapiens
atcctcccacctcggcctcctcaagtgctgggactacaggtgtgagccagtgtgcctggcctggaatttttttctaaaatttacatttctgagttaagaatgcttaaaatattataaaaacagaagcacaattcattatgtgtttcattaattacctctattaaaaacaacacaattatatttcaataggacaaaaaaatgtttaagcaaatgaaaacaaaaccatgacatacccaaactcaggaggaggcaacaaaggcagtgctaaagggaagcttacagctgcagatgcttaaattaaaaagaagaaagatctcaaacccggtaaagggaagcttacagctgcagatgcttaaattaaaaagaagaaagatctcaaagccatgctaaagggaagcttatagttgcaggtgcttaaattaaaaagaagaaagatctcaaaccaataacctaacattacacctaaaggg

SEQ ID NO: 120271 - DNA, 483 bp, Homo sapiens
ttgggggacaaaaaagggggaagggggggcacgaaggctcatcattcaaaataaaacaaaataaaaaatattaaggcgagattaaaaaaattttgcattacataatttacacgaaagcaatgctatcacctcccctgtgtggacttgggagaggactgggccattctccttaaagagaagtggggtggcttttaggatggcaagggacttcctgtaacaacgcatctcatatttggaatgactattaaaaaaacaacaatgtgcaatcaaagtcctcagccacattgtgaactttgggggatgctcgctccaaccgactgctgtcaccttcaccgttccagtttttaaatcctgagtccatctcaaaaaaaaaaaaaaaaattaatgagaagatgacattttttgaaatcaaattttaaatgctttttagttcatttaaaagaattaaaagtattaaagaggctgggggtggtggctcatgcc

SEQ ID NO: 120272 - DNA, 613 bp, Homo sapiens
gcaaccatgacgatttaacaaatcaaaaaggagacatgaccgcagcaccagtaccagtgccaacagcagtatcatttaccaagcactgccgagtgactgtgagatggtccacaaggccataaattggacactattgccatagcaagttgtagagccaagattcaaacccaggccttctgattccagagtttgactccttagcaatggttctctaagcctctgcaaactgttaagctcttcttagctgatgagctttgggctgtttctttctcggtgacagtaggagtggaaatgagcctgtgtgaacttgacactatcagtggctgcttgctgcccacctcagtctgactgacgcacatatgagtcatgggtccatgcattcagcaggcattatttggacacctactgggtgccagcacagcctcggtggagcacccgcatcacaccttattgctccgtccctgtgactagaaaatgatgtcatagtagggttgttttgtgcaatccgtagagagtgtgactctgagtagtcataggtacttctgggagcaattttgctaactgttcctagccttaccatgtgggccctctgctctccagagaggaggaggac

SEQ ID NO: 120273 - DNA, 778 bp, Homo sapiens
  misc_feature (483)..(483): n is a, c, g, or t
gaagatagacaaatgttcctcaaatttggtaaatttctggtatactttcatggtgatggtaacattaatggctggattttcatttttgacctattttgagaatgttaatacagaagcatagtgtatattaatatatttggctctgtcatcttgttttaccctatttttttatgcttctctgtcttcatttgatttttttattctatgagcagtttgctttgcttttatattccacccatcttccctctatagagatatctcaaagtagtgtgtgtgtgtgtgtatgtgtgtgtgtatctatatacatagattcccttcatacacagagtaacattactgatatttctgatagtgggaacaatatagggttattaactttttattttgaaaatatttcaaacttactgaattgtgagaatagtgtaatactctcctgtataactattccttagattcaccaattaaaattgcaccgtgcccggnctgtagatttcatttttagaaggtttgcttttaacagtttaaatttgtaactcacataaaacaaaacttattatcagaaagagaaactaggtgttaggatacagtaaacaactaagcatttgtgtctcttctgtctctgtacgatttcacatcgtttaacttcattacaatcaccttcccttgggggttcaactagctttcacccttttgtaatacctcttgcgtgttaacacttgagcatgaaacttccatcaggggttaagaaacctttcattgacactctcaattatgtgta

SEQ ID NO: 120274 - DNA, 468 bp, Homo sapiens
ccagttgctgcttcttgaatacagttcctccggtcctctaaagcatggataaaccctgtgggggggaaaacagaaaagcaaaataaaattttctcaagtcatgtcacgatcagaaattgaagccatcactttcctccttttttataagggctgggatctcactatgttgcccaggctggagtgcagtggctattcacagatgtgatcattgccccttccagcctcgaattcctgtgctcaagggtatcctcccatctcagtctcccaaatagctgggaaaatagacatgtgctaccatgcctggctagaagacatcactttcaagaagccagttcctgcttttcaaagctctctaagttaagtgacttgtttaagatcatagaacccataagtgaggcagctgggactagaacccaggtctcctgactcactgcagcacacagcctttcggcaatctccaaaccagcc

SEQ ID NO: 120275 - DNA, 252 bp, Homo sapiens
cttgataataaaaactcccagtgcctgatgccagctgacagacactgggagttttcccaggtaccctgtgacctagagaaagcttggattcctgcctttggcttgggctggcaagccctgtgcctttactctacattttaatgccagggagacctggaactggagaagggagtgctgtgggaagaaaacagaaggaatgttgttcccttgttttagctttgtgttcatccattatgggttttgggttttttt

SEQ ID NO: 120276 - DNA, 315 bp, Homo sapiens
gcaataaactcaaacaataaattttaaatctgactgaataaacaggtatgtttatatagattcatgagcccctgtaataattccatgctcttaccctacccttgccccctagcccatgatgctcagctatgaacctacactgttgagtttatctggctcgtgagcttaatccatagaacgtgattatgacacatgatcagtgtggacacagtggttatttgaagacaaacttcctccctaatatgaatggccccaggaaagcctggagagtgtgtgaaatatgtgaacacatgttccatatggtggcacccagaa

SEQ ID NO: 120277 - DNA, 336 bp, Homo sapiens
catggatacttatatctatgtcaccagctgacacctctcttcttctgcctggctcggaaggtgttttgttttagtttggtttgtctttaataagggagcagtggccatttcagagatgggtggctgtagatcctcctcctgaaccagcagaggccaactccattccatcctggacctttccctcctccttcactttcttccagcctctcctcttgacctgtggctcagaagggcatgtgacaagtgctgtccccacctcactgacccactgattgctcttaccagatttgcttctttgagccactggggcagggactgactgggccacatgcacct

SEQ ID NO: 120278 - DNA, 368 bp, Homo sapiens
gggctcaaatcccagctctgctgcttacaagctctaagacctgaagtaaattatttattctctctgcctccatttcctcctctataacgggggataaaatgagtacacaggattacaatgagaattacagaagctaacacacataacaagcacttgaatggtccctggtgcatagcaggtgctcaaaaaacattagctattattggccaggctcacacctgtgagctcacacctgtaatcctaacactgtgggaggccgaggcaggctgattgcttgaacccaggagttcgagcaatcaatcaatacggcaaaacctcatctctaccaaaaatacaaacaaacaaacaaaatagccaggtgtggtggc

SEQ ID NO: 120279 - DNA, 298 bp, Homo sapiens
aatatagctgcgaactggaatttgtacgcggaatggaattgcaattccattccagcgtacagttaacagtgtcagagatagtgaaaatatgaaacaagaactgcttacaagaaaggagcactcaggggaccaaacctctgccagagccagcggggaagtgacttatgcctctctcttctttccctcctgtccccgcccctcgtctcccgcaatgaagcgggtacttaatctgtgtcctgtggaggtcccctttggcagccagctggaagcccgtgcacccttcttcaaataatggctt

SEQ ID NO: 120280 - DNA, 145 bp, Homo sapiens
taacagtccctgactgatacaccacaaacagcctttcctcttctcctctttggccatgatcttctaggaaagtgcagagagccagtgccttcacatagagtgtgcccgataggagtgagtcagtgggctaaagagaagtccactg

SEQ ID NO: 120281 - DNA, 531 bp, Homo sapiens
gttattgccgctgtggggtgtgtggttctctggtggatgctggttattgccgctgtggggcgcgtggttctctggtggatgccggttattgccgctgtggggtgtgtggttctctggtggatgctggttattgccactgtggggcgcgtggttctctggtggatgccggttattgccgctgtggggcacgtggttctctggtgggtgctgattcaattccggacccacgtggctctaggctgtctggggccacagcatacaggaaagttgataatcacaggtgtggcatgttccctctccactgcccacccccagctgtgagcccacccctgcccctctggagacaccaagccagaatgcaggagtgctgctgtgagagtagcttcaaaaccgtcaaaacttctatcaaaagcagttattccaaaccttctgtgtcatattgttgggaatgcattcctttttgaaagtctgcacttggtcacgggtgggctggcacctgctatcgatggatgtttcttcatcctctgagct

SEQ ID NO: 120282 - DNA, 529 bp, Homo sapiens
ttatagggacagggtctcactgttgctcagattggtcttgaactcctggcctcaagcaatctgcctgccttggcctcccaaggtgctgggatcgcaggagtgagccagcccccagtgctagcagtgctcttgggtaatgaacgtgtgaatgagagcacactgaatggtcgcgtggggcggccaccctcctgagggacagctcactatggacaggtgataccaccacttggtacctcctttcttcatccataatttgcgaatggtgacagtgactgtcccacaggcctggtggggtattaattcagatagtacacgtcccacacctaagatgagcctggcacaaagcagcgctcaaaaacacacatcttcctttaacttcctcctcggttcccccaatgggggatcttgcaggcaaagtgttgacgaaaggtccgcccgttcccaagaacgaccctagagggcgccaggcagcggggcttgaatggaccgggcgggtttcgctttcccgctagtagccgcccgcggccgc

SEQ ID NO: 120283 - DNA, 337 bp, Homo sapiens
caacgtttgcgcaaaaacctgtgtaggaatgttcaagcagctttattcataatatgcccaaacaggaaacaactcagctgtccttcagtaggtaaatagttaagcaaattgtcatacccctgtgtcatggagcactacctagcaataacaaggagcaaattattgatacataacaatctggatgaatctccagagaattatgttgaatgaaaaaagccagcccctgaaggatacatactgtatgatgccatttacataacattcttgaaattctaaaattacagagatggggaacagatttgtggttaaagatggagccgggtgggaagaaagtagg

SEQ ID NO: 120284 - DNA, 379 bp, Homo sapiens
tctggaaaagtgggacaacttgaagcaaaggcagaaagactccaagctgggagggggcttccaggtcacagataggtgagagatgaaggttgcattcttttgagtttctgattagccttttgaagggaggcaatcagatatgcatccatgtcagtgagcagcggggtaactctgaatagaatgggaggcaggttggccataagcagttcccacctagacttttccctttagcttagtgatttggggtccccaagattttctttttatacctcttacatgcccagtttctcacacaggctgtcaccagccatcagagattaggacaaagactatacagagagtggaggcttctcatgcatggactctagggtctgaaata

SEQ ID NO: 120285 - DNA, 349 bp, Homo sapiens
caaattcatcagttaaggctacactcctacagaccctaccctcctatgcatcaagggctgaaatcactcaccgaaaaaggtttggttggctggacatggtggcccatgcctgtaatcccagcactttggaaggccaaggtgggtggaggccgggagttcaagaacagccaggccaacatggtaaaacctcatctttactaaaaatacaaaaattagagaagtgtggtggcatgtgtctgtaatcccagctacttgggagtctgaggcacaagaatagcttgaactgggaggtggaggttccagtgagccgagatcttgctgctgcactccagcaatgactctgtctcag

SEQ ID NO: 120286 - DNA, 281 bp, Homo sapiens
ggtgtatgtgtgtctgtgtgtgtgcgtgcgcatttgtattaaggaaatgagatctgttaactataaagcagctaagtggagtccagaaggggtagccactgcctgtttggctctcttaaacagtccctcttctatttccagttggaatattgggggcagggagatgggggaatatcaggagctattttttcccttataccatatgcatgtcatgtatatattaaatgtctgctttctgaatggcaaaaattatctagaaaatcatgagacaaaacaaaacc

SEQ ID NO: 120287 - DNA, 436 bp, Homo sapiens
tgtcagtggcctgccagcagtgttggagaagagagtgagagggcatgattgggaggcttttgtataccaggcctaggataggagctagtgaccaaggctaaaagagagatggttgagaataggcatctgtctactggataggtggtgaattgggtgtgtgtgggtgtttatttgcagaaaatggttgaggtggctctgagaagagtgaggtgcaggacctgcgcaaccccaggagggaatggagaagctcctgcctctatgggcagagttcgggaagggccaaggggcctaggacttgttcctggtaaagaaggcaagtgatgcaaaggtgggagagaggtccctgggtcagggaagagggagctgagaactggggtgttagtacacctttgtggtgagcttcttaaaggctagggagacactgtttatctttttt

SEQ ID NO: 120288 - DNA, 294 bp, Homo sapiens
ttttgtgtgtgtttggaaatgtccatattagaaaagaatcaaatctaacagtatcaactcagcagtactatggcagggttaacaggcctatctaccgagccagtttaatgtatactggggaagtgacattacagattcactgcaaagagcttaggttttggaatcagactctgccacttaaatgcactggaaccctgcacaaatcccttaacttgtcaacatctgtttttgcacctgtgaaactgggatattacttccttgtgtcgctttgtgaagaataggtgagataatgtg

SEQ ID NO: 120289 - DNA, 336 bp, Homo sapiens
caccaaatctttgtttactaagcaatgaaaatcttttgcacaggattcctctgtctctgcctaatcagaatcttaagcttcatcttataccttatctggaggtagcgctggaagcacagcccccacccccaacccagttccttcactggaaatggattggctttggtttacataactttccagcacctacccaaatagagttgggtagggcattaagtgtacagattgttcaaatggacatgtcagctgtagtgttcccctcctcttggagagctaaatggagttcttgaaattattcctcagagacagacccagtccacttcaaaggcagcttcc

SEQ ID NO: 120290 - DNA, 309 bp, Homo sapiens
gtgcattttatgtagtgatattgatctatccgtgcattttatgtagtgatattgatctatcttctcttttgtggcacctggtgtggtgttagcttgagcgctattccccttctagggattttaaagactctcctatcttcaacaaatgcctttatgataagatgaagtgacagtggagattccattgtgctactcagaatggtgtgcaattcaaaacttaggaattgtttatttctggaatcttctttcttcttttttaaatggtactgctccttgcagagcagagctaactcacatgcatgcacccgg

SEQ ID NO: 120291 - DNA, 461 bp, Homo sapiens
cttccacccatccctcccaaagctatgattctgagatgtctaagcaacactagaacagagataatgcaacttctgtcattatgcatgcttctaaatatcatcaaatctattttattttcgtgtgtattgtttctgaccaatttccagtagattccacctttcctggaatggtcagcttttttcagtagattccatcgtgcctggaatgatgaaagaacaccacatcccttaatggcacaattgaattgtactcaggaaatgcagttattttaatattattgcaaaccaaagataattaagaatatgaattttcccaggaaaatatcacatgacttactgcagaacgaaacagaaatgaatctcagtttacttgatgatttggtttatctacttcaccttccattagttaatttaaatgtttaatatttaaggcatctaaaaatcaacaggaactttctact

SEQ ID NO: 120292 - DNA, 225 bp, Homo sapiens
agaaggtcttgagaaataccggattatgtagagagaccaaatctacaagtgattggggtacccaaaagagacgggcagaacagagcccccccagcaaattgcagcagccttacggaagagtggccagactgttaaacagaaaatgacccacaaaaatctcatccaaaggtgtcagcaacctcgaagatcaaaggtagataagcccacaaagatggaaaacatact

SEQ ID NO: 120293 - DNA, 276 bp, Homo sapiens
gtcacactgtagatcgctcacaactaagaacggcgcacctgttagaactcggcccggctaatttttgtatttttagtagagacggggtttcatcatattggtcaggctggtctcgaactcctgacctcaggtgatccgcccgcctcggcctcccaaagtgttgggattacaggcatgagccaccgcgcctgggcacaaatatttgttgagtgagtattatgtgctgagcactcttctcgtcataggaatcaacagtgagcaaatcctaccaagctc

SEQ ID NO: 120294 - DNA, 423 bp, Homo sapiens
tgtaagtgaaggagaaacccctgaatattgattctagagaagataagatggtctcttttacagagctgagaacggatgctattgctcttttatgtccatggggtagacactaaacattaataatgtatacctggagacaagaaaattctacacttcagatacaaatgtcttctcaattaagattgttaatcaattttgaatagattatgaagttctagatactccgtagctgattttgaaagattaattgtcaaggaagtggtctttgagcatgatttttttaaatttattcatcagccctccgagcaacaggagcctacattttcttcagagcttttcttagagaagcttaaaatatgtctgcagaaaacttccacgtaggtaaaatgcaatgccgctttaaaagtataaaactgatgtatg

SEQ ID NO: 120295 - DNA, 372 bp, Homo sapiens
agtgtgggtgtgagcgtgtgacacacagcagccctgggaagggacgtgtgattgagctgtgcagttagtgagaggcagcctgtgggggagaaataccctggtaaggaggctcaggccttctcactgcgggcctgcctgtgcctctctggaactttctacctctatcaagggagaagctcagacatcgccagagtgagagatgaaatgtatcacaaattaaaaagagaactaccatatgatccagcaaccccatttctgggtatttatccaaaacagtcagcatccttatgctcctagaagcctatttacaatagccaagaagtggaagcaacctaaatgtccaccgacagatgaatggataaagaaaatgtg

SEQ ID NO: 120296 - DNA, 154 bp, Homo sapiens
gttcacctggtgtttcaccctttaagggacctgtctggcccatgaagtcatttgtgtttgcaagtcctgacgcagggccaagtactgtgatcaggctgttgagagtgatgaagatgttgtcatggggtcaccaaagaggcctgataccaccctg

SEQ ID NO: 120297 - DNA, 1195 bp, Homo sapiens
  misc_feature (896)..(896): n is a, c, g, or t
agcagtgatcccacacttgttttaattacaatagaataagttaaccaagaaacaagttggaaaatggaaggcccctcccaggtttgcacccagaggcagggagaggtagaccctcaccagaaagacctccagtaataacacagatagccacctactattttggttttttttttttttttttttggaagaagtggaagtttccgcctctgtgttgcgcccgagggtgtggcgagtgtgaaaagtgggcgcacaactctgcgggctcaaggtgaaacccctcgcgcctctcccgaggttctcaagaggcggaattactccgtggcctctcaaggccctctcctctatagtataaagtggggggtactataacgagggcgacccaacctattcgaacagccacagctataaaattatatattttacaggatagaagaagtgggggtttctccacccaaagcgtttgtgccgaggcgtggtctctctcaaaaaactctcctgtgaaccctctacgggtgtgatctcacaaccgcgctgtgtgtggctctctcccccaaagacgtgtgctgtgagggcatatataacagggcgtgtagaacgaccaattgtgacacccacgagcacaagcacaacgcccacactataatttctcgtataagaggggactttattttagttggtggttgacacagacacctgttggtgtggtataaggcgcctttttggggcgatatcttatttttacaccgcgctcgtttgtttataattttttcacgatctctcgttcaaagctcttcgttttgtaggtatagcgccagccgtactttgttagagggcccagaaactatgctatgttcattatatacacgctgttgacaaccaaaacatgtagggggtgncgccatcatgtagcaacagaaaaccgctgtaagtgtgtaggaacgccggccccccaaatggggcggcgcccatagacagaagaaggtcctactaaatgctgtggtaaacgaggcctagtcattttttttaacaacctgcgctagttatatattactctatattagcgtgtgggttcaccccacaagagaggcggcaccttcgtgaacacatatattcacttgagtagataagacactcgtacgacaccaactattcttgtaagtacatctattttccctataagtgttttattcacccc

SEQ ID NO: 120298 - DNA, 789 bp, Homo sapiens
aacatggtaaaaccccatctctactaaaagtacaaaaattagccgggcatagtgacaggcacctgtaatcacagctactaggaaggctgaggcaggaaaatcgcttgaacctgggaggtggaggttgcagtgagccgagatcgtgccattgcactccagcttgggggacaagagcaaaactccatctcaaaacaaacaaacaaaaaacaaaagaaaatacagaagtacaacaggaaaagtaatattttcctttaaggtattgtaatataattgtgatattaatagaatagtggaggcactttatatacacacacacacatacatacatacatacacacacacacatacacactatccccacacatacaactcttgtccaggtaagtcacagtattttatggtacaaagattcttcccatgtaaattaaacaataactaacattattgggtgcttaggatgtgccaggcactattctaaacactttaaagaaaatgcagtcattcatttaatactcagtacaacagcattagataagtactattcttcttttatgagaaaagtaaagtacagctgtccaaagtcacagagctagtaagtggaagagctaacattgaacatagacactcaggcgaatgcacttgtgaacttaaacatcgtaatatactgcataattgcattgattgttctcaactattagtacacttgccaagcacctaccccagaaagccagtccccctgtgaaggacgggaagaaagggaggggttggatctcaacagagctagattgc

SEQ ID NO: 120299 - DNA, 139 bp, Homo sapiens
gtatgtaggttctatcaacttggtagccattggaaaataaaatatacataaattgaagctaagtttatttttacttcattcttaaccacaattactaacaggatgtacttgccttttgggcactgcacagctttgcaaa

SEQ ID NO: 120300 - DNA, 227 bp, Homo sapiens
attgctgcctcttgccctgcctctacctgccaaagcagccggactcaatgcagatgccatgcagggctcacttagtgaatggcctaatctgtccctcctcctgccttctcccttgggccacaccttgcacccactccagcgatcatcacctacaaatcgttattcactccaactttcttcagctctcttccctggtccatttgcttttccctctctcccctgttttt

SEQ ID NO: 120301 - DNA, 116 bp, Homo sapiens
tagaatactgacaatcaataattataattactgtatttccaaaaaccaaaatatttgtttttttaaaaaacgttattttctagcatccaattagcaagtctgaccaggctgtacca

SEQ ID NO: 120302 - DNA, 808 bp, Homo sapiens
tagtcaggatttttcaactctctttctatcttctttttctttttctaaactattcactcttggttctggaacatttagagcaaagcctgaaagtcatgagtactgagcttttcatgatgtgccatccatctgaaatcttactcatttttaaaactatgggtgctaagcttcattggaccctgatgtcattcaggtgcctgaattgcaacattataaaagcatcagattattctggttgagcacatatttttacaaagatcatcccatgttatcttcatcatcccaaggagaatttctactcttaaaaactcaaagaggaatatcaaagaaattaacccactacctcagctatcagtttgcccagagctaaatcagagagcattaagagagcagattgggcaacaaattgatgcccttcttgactttgtgctactctgattgtgaatgtagtacttgaaaataacaatttcctattctttagttcctcttcttaaaacctattttgtaccatatgtctatgataatcttctaaaaaaaaactattctgatcttgtttcattcccacaaaaatatcttaagccttcaggactcatgtctaaaccccttctgtatttttaaaaacccttcataaaagtgctaggattacaggtatgagccattgtgcccagcctataatacatattcctaaacattagttggatgggttcatgaataaatgagcttataatctaataaataaaaaatgtatttgttatttcttataattaaaattatacagactaatatttagaaaatacagaaaagcaaa

SEQ ID NO: 120303 - DNA, 2511 bp, Homo sapiens
ggcggcagcggccaggcgcatgcgccgagtatcgccacgcctggtctctgggacgcccctccggaccggtttcgcctcgcggagccggtaggtccaggtgcagcggccgcagtgctgcgtccgtgcgccgcgggctggggcggtctcaggtgtgccgaagctctggtcagtgccatgatccggcaggagcgctccacatcctaccaggagctgagtgaggagttggtccaggtggttgagaactcagagctggcagacgagcaggacaaggagacggtcagagtccaaggtccgggtatcttaccaggcctggacagcgagtccgcctccagcagcatccgcttcagcaaggcctgcctgaagaacgtcttctcggtcctactcatcttcatctacctgctgctcatggctgtggccgtcttcctggtctaccggaccatcacagactttcgtgagaaactcaagcaccctgtcatgtctgtgtcttacaaggaagtggatcgctatgatgccccaggtattgccttgtaccccggtcaggcccagttgctcagctgtaagcaccattacgaggtcattcctcctctgacaagccctggccagccgggtgacatgaattgcaccacccagaggatcaactacacggaccccttctccaatcagactgtgaaatctgccctgattgtccaggggccccgggaagtgaaaaagcgggagctggtcttcctccagttccgcctgaacaagagtagtgaggacttcagcgccattgattacctcctcttctcttctttccaggagttcctgcaaagcccaaacagggtaggcttcatgcaggcctgtgagagtgcctattccagctggaagttctctgggggcttccgcacctgggtcaagatgtcactggtaaagaccaaggaggaggatgggcgggaagcagtggagttccggcaggagacaagtgtggttaactacattgaccagaggccagctgccaaaaaaagtgctcaattgttttttgtggtctttgaatggaaagatcctttcatccagaaagtccaagatatagtcactgccaatccttggaacacaattgctcttctctgtggcgccttcttggcattatttaaagcagcagagtttgccaaactgagtataaaatggatgatcaaaattagaaagagataccttaaaagaagaggtcaggcaacgagccacataagctgaagtcacctcgcgttgtttagagaactgtccacatcaatgggagctgtcatcacttccactttgtaaacggagctatcaacaatcctgtactcacttgaagaaatggggccttgctgggaggaacagcatgtaaaactggaacttctaaccccgtcccaaaagaggcggtgtagagcctaatagaagagactaatggataaacctacaagttatttaaatatttaaattattaataaactttttaaagagctggccaatgacttttgaatagggtttgtagaagatgcctttcttcctgtttggttcattgtattgtattaggttaagctctactagggtaatgaaggctctacttttcactttttaaaagtggacaaaagagtgtgattttctttttccaaaaattcctgagtatcaagacgtgcaggtcatgctttggagcctatgcactgtacacaaaggcaaaaccctatgactttggcatcatctgccattgatgtccagcctctgacatgctctttgatttgttaaatgttaaatgagactttaaggctactagaaactagtaattaagtttcttaatggactgagtagccacctacttgtccggctagaatgtttgttgatgtatgagtttagattaacactcaaaagcactaggacagatgtacatagaaggtgcctactcattgtattttgatgatttcattaacaggtaaataaaagttaatacaaaaggaacgagtgtgacaatatgaatatctgctcaatcatcgggcacaattactttcatttggtgacttccaaggacaaaaaggtagtatgagtctggactcccaagatggatctaactctcaaggtatgttctaactgcttccagggaagggtttgttaggcatggcaactgatggcaggtgtccagaaagagtgacctggtgtccccgaggaagctgggttaactctttactgtgtccacaaaactacccatcatatgaggaaggggtatacgcagtgtgaccctcaaaaagcttttagcctagcctttgacagaaatgagtatgcattaaaaaaaagtctatttttcacattaaggttctaaaaattgtttccagagttttaaattatttatgtgcctgttgcttcaaagaggacttggtagcatttcctaaattttgtaatctggcttccgataatccaaagggaataactcaaatgtatgaataggcattttaaatgggaagaaactgttttttggatgaatgattaaaagtgaactgtataaag

SEQ ID NO: 120304 - DNA, 817 bp, Homo sapiens
  misc_feature (782)..(782): n is a, c, g, or t
  misc_feature (809)..(809): n is a, c, g, or t
ggcggcagcggccaggcgcatgcgccgagtatcgccacgcctggtctctgggacgcccctccggaccggtttcgcctcgcggagccggtaggtccaggtgcagcggccgcagtgctgcgtccgtgcgccgcgggctggggcggtctcaggtgtgccgaagctctggtcagtgccatgatccggcaggagcgctccacatcctaccaggagctgagtgaggagttggtccaggtggttgagaactcagagctggcagacgagcaggacaaggagacggtcagagtccaaggtccgggtatcttaccaggcctggacagcgagtccgcctccagcagcatccgcttcagcaaggcctgcctgaagaacgtcttctcggtcctactcatcttcatctacctgctgctcatggctgtggccgtcttcctggtctaccggaccatcacagactttcgtgagaaactcaagcaccctgtcatgtctgtgtcttacaaggaagtggatcgctatgatgccccaggtattgccttgtaccccggtcaggcccagttgctcagctgtaagcaccattacgaggtcattcctcctctgacaagccctggccagccgggtgacatgaattgcaccacccagaggatcaactacacggaccccttctccaatcagactgtgaaatctgccctgattgtccaggggccccgggaagtgaaaaagcgggagctggtcttcctccagttccgcctgaacaagagtagtgaggacttcacgcatgatactcttttctnttcagagtctgaagccaaaaggagctnatcagctg

SEQ ID NO: 120305 - DNA, 2631 bp, Homo sapiens
ggcggcagcggccaggcgcatgcgccgagtatcgccacgcctggtctctgggacgcccctccggaccggtttcgcctcgcggagccggtaggtccaggtgcagcggccgcagtgctgcgtccgtgcgccgcgggctggggcggtctcaggtgtgccgaagctctggtcagtgccatgatccggcaggagcgctccacatcctaccaggagctgagtgaggagttggtccaggtggttgagaactcagagctggcagacgagcaggacaaggagacggtcagagtccaaggtccgggtatcttaccaggatggcgtgaccaagctactctgtcactgttggaagccagatgccaagcaaaaagctttcggggcttaggatgagtgaagcatcagctgtggaagaaaagaaaatcaagcagagggaatggcctggacagcgagtccgcctccagcagcatccgcttcagcaaggcctgcctgaagaacgtcttctcggtcctactcatcttcatctacctgctgctcatggctgtggccgtcttcctggtctaccggaccatcacagactttcgtgagaaactcaagcaccctgtcatgtctgtgtcttacaaggaagtggatcgctatgatgccccaggtattgccttgtaccccggtcaggcccagttgctcagctgtaagcaccattacgaggtcattcctcctctgacaagccctggccagccgggtgacatgaattgcaccacccagaggatcaactacacggaccccttctccaatcagactgtgaaatctgccctgattgtccaggggccccgggaagtgaaaaagcgggagctggtcttcctccagttccgcctgaacaagagtagtgaggacttcagcgccattgattacctcctcttctcttctttccaggagttcctgcaaagcccaaacagggtaggcttcatgcaggcctgtgagagtgcctattccagctggaagttctctgggggcttccgcacctgggtcaagatgtcactggtaaagaccaaggaggaggatgggcgggaagcagtggagttccggcaggagacaagtgtggttaactacattgaccagaggccagctgccaaaaaaagtgctcaattgttttttgtggtctttgaatggaaagatcctttcatccagaaagtccaagatatagtcactgccaatccttggaacacaattgctcttctctgtggcgccttcttggcattatttaaagcagcagagtttgccaaactgagtataaaatggatgatcaaaattagaaagagataccttaaaagaagaggtcaggcaacgagccacataagctgaagtcacctcgcgttgtttagagaactgtccacatcaatgggagctgtcatcacttccactttgtaaacggagctatcaacaatcctgtactcacttgaagaaatggggccttgctgggaggaacagcatgtaaaactggaacttctaaccccgtcccaaaagaggcggtgtagagcctaatagaagagactaatggataaacctacaagttatttaaatatttaaattattaataaactttttaaagagctggccaatgacttttgaatagggtttgtagaagatgcctttcttcctgtttggttcattgtattgtattaggttaagctctactagggtaatgaaggctctacttttcactttttaaaagtggacaaaagagtgtgattttctttttccaaaaattcctgagtatcaagacgtgcaggtcatgctttggagcctatgcactgtacacaaaggcaaaaccctatgactttggcatcatctgccattgatgtccagcctctgacatgctctttgatttgttaaatgttaaatgagactttaaggctactagaaactagtaattaagtttcttaatggactgagtagccacctacttgtccggctagaatgtttgttgatgtatgagtttagattaacactcaaaagcactaggacagatgtacatagaaggtgcctactcattgtattttgatgatttcattaacaggtaaataaaagttaatacaaaaggaacgagtgtgacaatatgaatatctgctcaatcatcgggcacaattactttcatttggtgacttccaaggacaaaaaggtagtatgagtctggactcccaagatggatctaactctcaaggtatgttctaactgcttccagggaagggtttgttaggcatggcaactgatggcaggtgtccagaaagagtgacctggtgtccccgaggaagctgggttaactctttactgtgtccacaaaactacccatcatatgaggaaggggtatacgcagtgtgaccctcaaaaagcttttagcctagcctttgacagaaatgagtatgcattaaaaaaaagtctatttttcacattaaggttctaaaaattgtttccagagttttaaattatttatgtgcctgttgcttcaaagaggacttggtagcatttcctaaattttgtaatctggcttccgataatccaaagggaataactcaaatgtatgaataggcattttaaatgggaagaaactgttttttggatgaatgattaaaagtgaactgtataaag

SEQ ID NO: 120306 - DNA, 2307 bp, Homo sapiens
ggcggcagcggccaggcgcatgcgccgagtatcgccacgcctggtctctgggacgcccctccggaccggtttcgcctcgcggagccggtaggtccaggtgcagcggccgcagtgctgcgtccgtgcgccgcgggctggggcggtctcaggtgtgccgaagctctggtcagtgccatgatccggcaggagcgctccacatcctaccaggagctgagtgaggagttggtccaggtggttgagaactcagagctggcagacgagcaggacaaggagacggtcagagtccaaggtccgggtatcttaccaggcctggacagcgagtccgcctccagcagcatccgtgctcatggctgtggccgtcttcctggtctaccggaccatcacagactttcgtgagaaactcaagcaccctgtcatgtctgtgtcttacaaggaagtggatcgctatgatgccccaggtattgccttgtaccccggtcaggcccagttgctcagctgtaagcaccattacgaggtcattcctcctctgacaagccctggccagccgggtgacatgaattgcaccacccagaggatcaactacacggaccccttctccaatcagactgtgaaatctgccctgattgtccaggggccccgggaagtgaaaaagcgggagctggtcttcctccagttccgcctgaacaagagtagtgaggacttcagcgccattgattacctcctcttctcttctttccaggagttcctgcaaagacaagtgtggttaactacattgaccagaggccagctgccaaaaaaagtgctcaattgttttttgtggtctttgaatggaaagatcctttcatccagaaagtccaagatatagtcactgccaatccttggaacacaattgctcttctctgtggcgccttcttggcattatttaaagcagcagagtttgccaaactgagtataaaatggatgatcaaaattagaaagagataccttaaaagaagaggtcaggcaacgagccacataagctgaagtcacctcgcgttgtttagagaactgtccacatcaatgggagctgtcatcacttccactttgtaaacggagctatcaacaatcctgtactcacttgaagaaatggggccttgctgggaggaacagcatgtaaaactggaacttctaaccccgtcccaaaagaggcggtgtagagcctaatagaagagactaatggataaacctacaagttatttaaatatttaaattattaataaactttttaaagagctggccaatgacttttgaatagggtttgtagaagatgcctttcttcctgtttggttcattgtattgtattaggttaagctctactagggtaatgaaggctctacttttcactttttaaaagtggacaaaagagtgtgattttctttttccaaaaattcctgagtatcaagacgtgcaggtcatgctttggagcctatgcactgtacacaaaggcaaaaccctatgactttggcatcatctgccattgatgtccagcctctgacatgctctttgatttgttaaatgttaaatgagactttaaggctactagaaactagtaattaagtttcttaatggactgagtagccacctacttgtccggctagaatgtttgttgatgtatgagtttagattaacactcaaaagcactaggacagatgtacatagaaggtgcctactcattgtattttgatgatttcattaacaggtaaataaaagttaatacaaaaggaacgagtgtgacaatatgaatatctgctcaatcatcgggcacaattactttcatttggtgacttccaaggacaaaaaggtagtatgagtctggactcccaagatggatctaactctcaaggtatgttctaactgcttccagggaagggtttgttaggcatggcaactgatggcaggtgtccagaaagagtgacctggtgtccccgaggaagctgggttaactctttactgtgtccacaaaactacccatcatatgaggaaggggtatacgcagtgtgaccctcaaaaagcttttagcctagcctttgacagaaatgagtatgcattaaaaaaaagtctatttttcacattaaggttctaaaaattgtttccagagttttaaattatttatgtgcctgttgcttcaaagaggacttggtagcatttcctaaattttgtaatctggcttccgataatccaaagggaataactcaaatgtatgaataggcattttaaatgggaagaaactgttttttggatgaatgattaaaagtgaactgtataaag

SEQ ID NO: 120307 - DNA, 2001 bp, Homo sapiens
  misc_feature (1738)..(1738): n is a, c, g, or t
ggcggcagcggccaggcgcatgcgccgagtatcgccacgcctggtctctgggacgcccctccggaccggtttcgcctcgcggagccggtaggtccaggtgcagcggccgcagtgctgcgtccgtgcgccgcgggctggggcggtctcaggtgtgccgaagctctggtcagtgccatgatccggcaggagcgctccacatcctaccaggagctgagtgaggagttggtccaggtggttgagaactcagagctggcagacgagcaggacaaggagacggtcagagtccaaggtccgggtatcttaccaggcctggacagcgagtccgcctccagcagcatccgcttcagcaaggcctgcctgaagaacgtcttctcggtcctactcatcttcatctacctgctgctcatggctgtggccgtcttcctggtctaccggaccatcacagactttcgtgagaaactcaagcaccctgtcatgtctgtgtcttacaaggaagtggatcgctatgatgccccaggtattgccttgtaccccggtcaggcccagttgctcagctgtaagcaccattacgaggtcattcctcctctgacaagccctggccagccgggtgacatgaattgcaccacccagaggatcaactacacggaccccttctccaatcagactgtgaaatctgccctgattgtccaggggccccgggaagtgaaaaagcgggagctggtcttcctccagttccgcctgaacaagagtagtgaggacttcagcgccattgattacctcctcttctcttctttccaggagttcctgcaaagcccaaacagggtaggcttcatgcaggcctgtgagagtgcctattccagctggaagttctctgggggcttccgcacctgggtcaagatgtcactggtaaagaccaaggaggaggatgggcgggaagcagtggagttccggcaggagacaagtgtggttaactacattgaccagaggccagctgccaaaaaaagtgctcaattgttttttgtggtctttgaatggaaagatcctttcatccagaaagtccaagatatagtcactgccaatccttggaacacaattgctcttctctgtggcgccttcttggcattatttaaagcagcagagtttgccaaactgagtataaaatggatgatcaaaattagaaagagataccttaaaagaagaggtcaggcaacgagccacataagctgaagtcacctcgcgttgtttagagaactgtccacatcaatgggagctgtcatcacttccactttgtaaacggagctatcaacaatcctgtactcatttttaaaagtggacaaaagagtgtgattttctttttccaaaaattcctgagtatcaagacgtgcaggtcatgctttggagcctatgcactgtacacaaaggcaaaaccctatgactttggcatcatctgccattgatgtccagcctctgacatgctctttgatttgttaaatgttaaatgagactttaaggctactagaaactagtaattaagtttcttaatggactgagtagccacctacttgtccggctagaatgtttgttgatgtatgagtttagattaacactcaaaagcactaggacagatgtacatagaaggtgcctactcattgtattttgatgatttcattaacaggtaaataaaagttaatacaaaaaaaaaaaaaaaaaaaaaaaaaaaaaaaaaaaaaaacatgtnggccgcctaggcccagtcaactctggtctcgcgcatggtcaagcatgcttttggatttggggatgattaggccagtgccccctattgggggtcatttgccaattcaccgctcgggggtgtacaattacaatactgggaaagccgtttaacaacccaacttattggaaatccgggcattcccattttgaaaggtgtggaaaaaataccagtcccgcacggtgggcctttcccaaaggggcccaacctgatgcctttcgttgttt

SEQ ID NO: 120308 - DNA, 1072 bp, Homo sapiens
atcgaggtcggtacccccgctggcccaatggcacccgctggccaatgacttttgaatagggtttgtagaagatgcctttcttcctgtttggttcattgtattgtattaggttaagctctactagggtaatgaaggctctacttttcactttttaaaagtggacaaaagagtgtgattttctttttccaaaaattcctgagtatcaagacgtgcaggtcatgctttggagcctatgcactgtacacaaaggcaaaaccctatgactttggcatcatctgccattgatgtccagcctctgacatgctctttgatttgttaaatgttaaatgagactttaaggctactagaaactagtaattaagtttcttaatggactgagtagccacctacttgtccggctagaatgtttgttgatgtatgagtttagattaacactcaaaagcactaggacagatgtacatagaaggtgcctactcattgtattttgatgatttcattaacaggtaaataaaagttaatacaaaaggaacgagtgtgacaatatgaatatctgctcaatcatcgggcacaattactttcatttggtgacttccaaggacaaaaaggtagtatgagtctggactcccaagatggatctaactctcaaggtatgttctaactgcttccagggaagggtttgttaggcatggcaactgatggcaggtgtccagaaagagtgacctggtgtccccgaggaagctgggttaactctttactgtgtccacaaaactacccatcatatgaggaaggggtatacgcagtgtgaccctcaaaaagcttttagcctagcctttgacagaaatgagtatgcattaaaaaaaagtctatttttcacattaaggttctaaaaattgtttccagagttttaaattatttatgtgcctgttgcttcaaagaggacttggtagcatttcctaaattttgtaatctggcttccgataatccaaagggaataactcaaatgtatgaataggcattttaaatgggaagaaactgttttttggatgaatgattaaaagtgaactgtataaag

SEQ ID NO: 120309 - DNA, 1029 bp, Homo sapiens
ctattttagaagtttcaatagcaagaagatgcctttcttcctgtttggttcattgtattgtattaggttaagctctactagggtaatgaaggctctacttttcactttttaaaagtggacaaaagagtgtgattttctttttccaaaaattcctgagtatcaagacgtgcaggtcatgctttggagcctatgcactgtacacaaaggcaaaaccctatgactttggcatcatctgccattgatgtccagcctctgacatgctctttgatttgttaaatgttaaatgagactttaaggctactagaaactagtaattaagtttcttaatggactgagtagccacctacttgtccggctagaatgtttgttgatgtatgagtttagattaacactcaaaagcactaggacagatgtacatagaaggtgcctactcattgtattttgatgatttcattaacaggtaaataaaagttaatacaaaaggaacgagtgtgacaatatgaatatctgctcaatcatcgggcacaattactttcatttggtgacttccaaggacaaaaaggtagtatgagtctggactcccaagatggatctaactctcaaggtatgttctaactgcttccagggaagggtttgttaggcatggcaactgatggcaggtgtccagaaagagtgacctggtgtccccgaggaagctgggttaactctttactgtgtccacaaaactacccatcatatgaggaaggggtatacgcagtgtgaccctcaaaaagcttttagcctagcctttgacagaaatgagtatgcattaaaaaaaagtctatttttcacattaaggttctaaaaattgtttccagagttttaaattatttatgtgcctgttgcttcaaagaggacttggtagcatttcctaaattttgtaatctggcttccgataatccaaagggaataactcaaatgtatgaataggcattttaaatgggaagaaactgttttttggatgaatgattaaaagtgaactgtataaag

SEQ ID NO: 120310 - DNA, 979 bp, Homo sapiens
  misc_feature (30)..(30): n is a, c, g, or t
tcaaaactccctgaccctccaagtgaattnccccctgcatcgggccctcccccaaagtgccggggattaataggccatgagccctcccacgccctagccctcaagtggtccctcttgagtcaaccctagacctacagtcctatgcctagagaatgtttgtgtgtgtgacaatgtatgttccttgaacatcatagattcccactttggatgctctttgatttgttaaatgttaaatgagactttaaggctactagaaactagtaattaagtttcttaatggactgagtagccacctacttgtccggctagaatgtttgttgatgtatgagtttagattaacactcaaaagcactaggacagatgtacatagaaggtgcctactcattgtattttgatgatttcattaacaggtaaataaaagttaatacaaaaggaacgagtgtgacaatatgaatatctgctcaatcatcgggcacaattactttcatttggtgacttccaaggacaaaaaggtagtatgagtctggactcccaagatggatctaactctcaaggtatgttctaactgcttccagggaagggtttgttaggcatggcaactgatggcaggtgtccagaaagagtgacctggtgtccccgaggaagctgggttaactctttactgtgtccacaaaactacccatcatatgaggaaggggtatacgcagtgtgaccctcaaaaagcttttagcctagcctttgacagaaatgagtatgcattaaaaaaaagtctatttttcacattaaggttctaaaaattgtttccagagttttaaattatttatgtgcctgttgcttcaaagaggacttggtagcatttcctaaattttgtaatctggcttccgataatccaaagggaataactcaaatgtatgaataggcattttaaatgggaagaaactgttttttggatgaatgattaaaagtgaactgtataaag

SEQ ID NO: 120311 - DNA, 2366 bp, Homo sapiens
ggcggcagcggccaggcgcatgcgccgagtatcgccacgcctggtctctgggacgcccctccggaccggtttcgcctcgcggagccggtaggtccaggtgcagcggccgcagtgctgcgtccgtgcgccgcgggctggggcggtctcaggtgtgccgaagctctggtcagtgccatgatccggcaggagcgctccacatcctaccaggagctgagtgaggagttggtccaggtggttgagaactcagagctggcagacgagcaggacaaggagacggtcagagtccaaggtccgggtatcttaccaggcctggacagcgagtccgcctccagcagcatccgcttcagcaaggcctgcctgaagaacgtcttctcggtcctactcatcttcatctacctgctgctcatggctgtggccgtcttcctggtctaccggaccatcacagactttcgtgagaaactcaagcaccctgtcatgtctgtgtcttacaaggaagtggatcgctatgatgccccaggtattgccttgtaccccggtcaggcccagttgctcagctgtaagcaccattacgaggtcattcctcctctgacaagccctggccagccgggtgacatgaattgcaccacccagaggatcaactacacggaccccttctccaatcagactgtgaaatctgccctgattgtccaggggccccgggaagtgaaaaagcgggagctggtcttcctccagttccgcctgaacaagagtagtgaggacttcagcgccattgattacctcctcttctcttctttccaggagttcctgcaaagacaagtgtggttaactacattgaccagaggccagctgccaaaaaaagtgctcaattgttttttgtggtctttgaatggaaagatcctttcatccagaaagtccaagatatagtcactgccaatccttggaacacaattgctcttctctgtggcgccttcttggcattatttaaagcagcagagtttgccaaactgagtataaaatggatgatcaaaattagaaagagataccttaaaagaagaggtcaggcaacgagccacataagctgaagtcacctcgcgttgtttagagaactgtccacatcaatgggagctgtcatcacttccactttgtaaacggagctatcaacaatcctgtactcacttgaagaaatggggccttgctgggaggaacagcatgtaaaactggaacttctaaccccgtcccaaaagaggcggtgtagagcctaatagaagagactaatggataaacctacaagttatttaaatatttaaattattaataaactttttaaagagctggccaatgacttttgaatagggtttgtagaagatgcctttcttcctgtttggttcattgtattgtattaggttaagctctactagggtaatgaaggctctacttttcactttttaaaagtggacaaaagagtgtgattttctttttccaaaaattcctgagtatcaagacgtgcaggtcatgctttggagcctatgcactgtacacaaaggcaaaaccctatgactttggcatcatctgccattgatgtccagcctctgacatgctctttgatttgttaaatgttaaatgagactttaaggctactagaaactagtaattaagtttcttaatggactgagtagccacctacttgtccggctagaatgtttgttgatgtatgagtttagattaacactcaaaagcactaggacagatgtacatagaaggtgcctactcattgtattttgatgatttcattaacaggtaaataaaagttaatacaaaaggaacgagtgtgacaatatgaatatctgctcaatcatcgggcacaattactttcatttggtgacttccaaggacaaaaaggtagtatgagtctggactcccaagatggatctaactctcaaggtatgttctaactgcttccagggaagggtttgttaggcatggcaactgatggcaggtgtccagaaagagtgacctggtgtccccgaggaagctgggttaactctttactgtgtccacaaaactacccatcatatgaggaaggggtatacgcagtgtgaccctcaaaaagcttttagcctagcctttgacagaaatgagtatgcattaaaaaaaagtctatttttcacattaaggttctaaaaattgtttccagagttttaaattatttatgtgcctgttgcttcaaagaggacttggtagcatttcctaaattttgtaatctggcttccgataatccaaagggaataactcaaatgtatgaataggcattttaaatgggaagaaactgttttttggatgaatgattaaaagtgaactgtataaag

SEQ ID NO: 120312 - DNA, 2243 bp, Homo sapiens
ctgctcttctgttcctctttccctggaaactgctagcaggcctggacagcgagtccgcctccagcagcatccgcttcagcaaggcctgcctgaagaacgtcttctcggtcctactcatcttcatctacctgctgctcatggctgtggccgtcttcctggtctaccggaccatcacagactttcgtgagaaactcaagcaccctgtcatgtctgtgtcttacaaggaagtggatcgctatgatgccccaggtattgccttgtaccccggtcaggcccagttgctcagctgtaagcaccattacgaggtcattcctcctctgacaagccctggccagccgggtgacatgaattgcaccacccagaggatcaactacacggaccccttctccaatcagactgtgaaatctgccctgattgtccaggggccccgggaagtgaaaaagcgggagctggtcttcctccagttccgcctgaacaagagtagtgaggacttcagcgccattgattacctcctcttctcttctttccaggagttcctgcaaagcccaaacagggtaggcttcatgcaggcctgtgagagtgcctattccagctggaagttctctgggggcttccgcacctgggtcaagatgtcactggtaaagaccaaggaggaggatgggcgggaagcagtggagttccggcaggagacaagtgtggttaactacattgaccagaggccagctgccaaaaaaagtgctcaattgttttttgtggtctttgaatggaaagatcctttcatccagaaagtccaagatatagtcactgccaatccttggaacacaattgctcttctctgtggcgccttcttggcattatttaaagcagcagagtttgccaaactgagtataaaatggatgatcaaaattagaaagagataccttaaaagaagaggtcaggcaacgagccacataagctgaagtcacctcgcgttgtttagagaactgtccacatcaatgggagctgtcatcacttccactttgtaaacggagctatcaacaatcctgtactcacttgaagaaatggggccttgctgggaggaacagcatgtaaaactggaacttctaaccccgtcccaaaagaggcggtgtagagcctaatagaagagactaatggataaacctacaagttatttaaatatttaaattattaataaactttttaaagagctggccaatgacttttgaatagggtttgtagaagatgcctttcttcctgtttggttcattgtattgtattaggttaagctctactagggtaatgaaggctctacttttcactttttaaaagtggacaaaagagtgtgattttctttttccaaaaattcctgagtatcaagacgtgcaggtcatgctttggagcctatgcactgtacacaaaggcaaaaccctatgactttggcatcatctgccattgatgtccagcctctgacatgctctttgatttgttaaatgttaaatgagactttaaggctactagaaactagtaattaagtttcttaatggactgagtagccacctacttgtccggctagaatgtttgttgatgtatgagtttagattaacactcaaaagcactaggacagatgtacatagaaggtgcctactcattgtattttgatgatttcattaacaggtaaataaaagttaatacaaaaggaacgagtgtgacaatatgaatatctgctcaatcatcgggcacaattactttcatttggtgacttccaaggacaaaaaggtagtatgagtctggactcccaagatggatctaactctcaaggtatgttctaactgcttccagggaagggtttgttaggcatggcaactgatggcaggtgtccagaaagagtgacctggtgtccccgaggaagctgggttaactctttactgtgtccacaaaactacccatcatatgaggaaggggtatacgcagtgtgaccctcaaaaagcttttagcctagcctttgacagaaatgagtatgcattaaaaaaaagtctatttttcacattaaggttctaaaaattgtttccagagttttaaattatttatgtgcctgttgcttcaaagaggacttggtagcatttcctaaattttgtaatctggcttccgataatccaaagggaataactcaaatgtatgaataggcattttaaatgggaagaaactgttttttggatgaatgattaaaagtgaactgtataaag

SEQ ID NO: 120313 - DNA, 1714 bp, Homo sapiens
  misc_feature (126)..(126): n is a, c, g, or t
  misc_feature (130)..(130): n is a, c, g, or t
  misc_feature (138)..(139): n is a, c, g, or t
  misc_feature (141)..(141): n is a, c, g, or t
  misc_feature (144)..(144): n is a, c, g, or t
  misc_feature (147)..(147): n is a, c, g, or t
  misc_feature (149)..(149): n is a, c, g, or t
  misc_feature (159)..(159): n is a, c, g, or t
  misc_feature (161)..(162): n is a, c, g, or t
  misc_feature (166)..(166): n is a, c, g, or t
gtacccagttcgacggagactctcacaggcttcatgcaggcctgtgagagtgcctattccagctggatgtactcagcgaggacccagcacctcgaactagatctcactactcaattccacggagantctntgacaganncnctntgnantccagcaagnannacanctggtcacccacattgaccagaggccagctgccaaaaaaagtgctcaattgttttttgtggtctttgaatggaaagatcctttcatccagaaagtccaagatatagtcactgccaatccttggaacacaattgctcttctctgtggcgccttcttggcattatttaaagcagcagagtttgccaaactgagtataaaatggatgatcaaaattagaaagagataccttaaaagaagaggtcaggcaacgagccacataagctgaagtcacctcgcgttgtttagagaactgtccacatcaatgggagctgtcatcacttccactttgtaaacggagctatcaacaatcctgtactcacttgaagaaatggggccttgctgggaggaacagcatgtaaaactggaacttctaaccccgtcccaaaagaggcggtgtagagcctaatagaagagactaatggataaacctacaagttatttaaatatttaaattattaataaactttttaaagagctggccaatgacttttgaatagggtttgtagaagatgcctttcttcctgtttggttcattgtattgtattaggttaagctctactagggtaatgaaggctctacttttcactttttaaaagtggacaaaagagtgtgattttctttttccaaaaattcctgagtatcaagacgtgcaggtcatgctttggagcctatgcactgtacacaaaggcaaaaccctatgactttggcatcatctgccattgatgtccagcctctgacatgctctttgatttgttaaatgttaaatgagactttaaggctactagaaactagtaattaagtttcttaatggactgagtagccacctacttgtccggctagaatgtttgttgatgtatgagtttagattaacactcaaaagcactaggacagatgtacatagaaggtgcctactcattgtattttgatgatttcattaacaggtaaataaaagttaatacaaaaggaacgagtgtgacaatatgaatatctgctcaatcatcgggcacaattactttcatttggtgacttccaaggacaaaaaggtagtatgagtctggactcccaagatggatctaactctcaaggtatgttctaactgcttccagggaagggtttgttaggcatggcaactgatggcaggtgtccagaaagagtgacctggtgtccccgaggaagctgggttaactctttactgtgtccacaaaactacccatcatatgaggaaggggtatacgcagtgtgaccctcaaaaagcttttagcctagcctttgacagaaatgagtatgcattaaaaaaaagtctatttttcacattaaggttctaaaaattgtttccagagttttaaattatttatgtgcctgttgcttcaaagaggacttggtagcatttcctaaattttgtaatctggcttccgataatccaaagggaataactcaaatgtatgaataggcattttaaatgggaagaaactgttttttggatgaatgattaaaagtgaactgtataaag

SEQ ID NO: 120314 - DNA, 1378 bp, Homo sapiens
actgttaaacaccgatgacgcatgcactgctctgggattttccaacagaggtttttcacagcattccttagttttctgaagctgacttgctctagggtgcttcatcaccacttccatcttgcatcaccttataactgttctgtcttgttctctcccagcaatttattttaaaacaagggctagcttcaagcatgactgttaatggctcctctgtgacaaaacacaagttggaccaaggagaaagccctttggagaaactggaccctagttcagtttagatctcaaatataggctgaaatctcttaccaaagtgcgttccagataaaaatgagacttagaagacagactggtctaatatgctcactggtcatcacattcagcttattcttacgtgccagtgaggccctaaggtctcagtgcatagcatacctgccactctggatgttttcctgggcttcatatctgtatggcaaggagggagctgtccttcagcagacaaagtcaagcagctttaagtacaaggcagcttgaaacctctctgatgaaagtgaaaaatgtgggtagcttatactttcaaactaatgccagtgactagagagaggtttcattcatgatgtgtatttccaatttggtcttcaattcaagagatgcttcataaaacacttatagccttaaaccattcaagggctaattaaaaaaatagttatgaaatcttagccacaaaaaataaatcaggtaaacattttaacctgtcgttaagtgttgtaacttcaaaaaaccaaaatgcttattttaatgtgatttttctaaaactattgaaaaattaatatttctataatctattaaaaaaaatggagaatgttttctctcaaatttcctctgacccatgggaatgaaaatacttaaatactgtaaagcatatctattaataattcccccaattttttaaactaacaaaatggaatgttaactgaatggaattaaacatagcaattgtcaagccatcaaaattatatatcgaaccacttaggcatgttacggggtaaagtcctcacccctgcatttgagaaatattttattatttttattttaaggcaaaacagtgtttactgtgatgggcagaacagccttttgtatctaggagtccatttgagttctttccaatatttccatatcgttcataaatgtgtctgggggcttccttgtttggaaaatatggatatcgctttgttttcctttgaaagtaattatatcttaagaacatagtatcatgaatggagtagacagggaggctgcagaagccatttctctttgtagataaaaagcattatctatgattgttgtataataaattgatttttacattaaaaaaaaaaag

SEQ ID NO: 120315 - DNA, 1347 bp, Homo sapiens
actgttaaacaccgatgacgcatgcactgctctgggattttccaacagaggtttttcacagcattccttagttttctgaagctgacttgctctagggtgcttcatcaccacttccatcttgcatcaccttataactgttctgtcttgttctctcccagcaatttattttaaaacaagggctagcttcaagcatgactgttaatggctcctctgtgacaaaacacaagttggaccaaggagaaagccctttggagaaactggaccctagttcagtttagatctcaaatataggctgaaatctcttaccaaagtgcgttccagataaaaatgagacttagaagacagactggtctaatatgctcactggtcatcacattcagcttattcttacgtgccagtgaggccctaaggtctcagtgcatagcatacctgccactctggatgttttcctgggcttcatatctgtatggcaaggagggagctgtccttcagcagacaaagtcaagcagctttaagtacaaggcagcttgaaacctctctgatgaaagtgaaaaatgtgggtagcttatagtttcattcatgatgtgtatttccaatttggtcttcaattcaagagatgcttcataaaacacttatagccttaaaccattcaagggctaattaaaaaaatagttatgaaatcttagccacaaaaaataaatcaggtaaacattttaacctgtcgttaagtgttgtaacttcaaaaaaccaaaatgcttattttaatgtgatttttctaaaactattgaaaaattaatatttctataatctattaaaaaaaatggagaatgttttctctcaaatttcctctgacccatgggaatgaaaatacttaaatactgtaaagcatatctattaataattcccccaattttttaaactaacaaaatggaatgttaactgaatggaattaaacatagcaattgtcaagccatcaaaattatatatcgaaccacttaggcatgttacggggtaaagtcctcacccctgcatttgagaaatattttattatttttattttaaggcaaaacagtgtttactgtgatgggcagaacagccttttgtatctaggagtccatttgagttctttccaatatttccatatcgttcataaatgtgtctgggggcttccttgtttggaaaatatggatatcgctttgttttcctttgaaagtaattatatcttaagaacatagtatcatgaatggagtagacagggaggctgcagaagccatttctctttgtagataaaaagcattatctatgattgttgtataataaattgatttttacattaaaaaaaaaaag

SEQ ID NO: 120316 - DNA, 371 bp, Homo sapiens
gtgtgatgcccctgactcttacatttatctttctaaatcattttctgaagctgacttgctctagggtgcttcatcaccacttccatcttgcatcaccttataactgttctgtcttgttctctcccagcaatttattttaaaacaagggctagcttcaagcatgactgttaatggctcctctgtgacaaaacacaagttggaccaaggagaaagccctttggagaaactggaccctagttcagtttagatctcaaatataggctgaaatctcttaccaaagtgcgttccagataaaaatgagacttagaagacagactggtctaatatgctcactggtcatcacattcagcttattcttacgtgccagtgag

SEQ ID NO: 120317 - DNA, 283 bp, Homo sapiens
gtgatcagtttccagcgtctctttatttcttcaccatgatggtctgaatgatgacttcaatgaagggcaaactcaggcactctaggaaagatacattactcagcgtgttattgcctgacacgttctgggaaatcacaggacaatcatcttcatgtgcaacatgtgggtttttttttaatttatttgtttgtttttggcacatttacagttaaattccccagatccaagaaaatgacttcccagttcctggggaaaataaattacgaatggagatggaacccag

SEQ ID NO: 120318 - DNA, 240 bp, Homo sapiens
atcgaggtgtaccggtgttatcgatgccacaagtataatactgtggcatgaatagacagacaaaacagcaagttcagatatggaaacaaatcatttggaaatttagtatatgttaaaggtaggtcttaatttgctgggtaaagatagcatttttttctaacaaatggtgtgaagacagttggggagccatctaggaaaatataaggctttttctatacctcatgtatcaggtaactctca

SEQ ID NO: 120319 - DNA, 210 bp, Homo sapiens
tcaggaagttaaatttgttccctttgtctcataagagtagtattatagtttgtgagaaagttctaatttaacaaacacttaaaaggactaccatgtttaaggcattttcttaagttccagaaatatagtctagctgaaaaatcaaaatcatgtgtattatatattatgaatatgtataatacagtgtaatgggtagacataatgggagca

SEQ ID NO: 120320 - DNA, 576 bp, Homo sapiens
ggcttcagcttcaagataagtcactaatcctttattatgttcttgaatggcttcctcttccactctttgtcatggctcttgaagacccgttacagccccaagaccccgtggtagtagtcctaccttcttgccccttgtcttcacgctctcctttactgacacttaccttgaggttatctaccgggacatctagagcctattgttcgaggaatgcagtcttgcaagcctactctggacccgagcagctgacctcttcttccacgccccccttctcgctatctcttttaccaataaatatggagggctatgtaaagctcagggcccttgtccactagaggcaaggtgccccctgaccccttcttccaaacatatttttttgtctcttatctttattcccacattcatcctcctttgttcagtcccctaaggtctgtgcaggttacaattaagcaagttggcctcttgtttaaatccttcccttgactctctctccccttaggcctcccctgtctcactcttttcttcattgctggacttttagaaagcatatctctacccactgctttcacttcctga

SEQ ID NO: 120321 - DNA, 208 bp, Homo sapiens
atcgcggcgccccgggaggcgcgcaccaaccacgcggtcaccccgcgctctcgcgggcgtgcattcgttcactcgctcattcattcgccgccgcccacactccccgagcgcgcccgttcgccgcgttgcggccaagtcctcccagacgtggtttttgcaaacgccctgagttgcgcaacggccgggatggttggagcgggcgggcccg

SEQ ID NO: 120322 - DNA, 181 bp, Homo sapiens
atggttgtccctccctttagttttagcatttctgttcgtctctgacagaggcacacaggagctccctagtcaccagaggcaggctcaggaggggccagaagacatgggggtgggacggcagagagggaccccatgtctcttctaatcacccgccgccccccgcgccctgtgtgtcgtgtgt

SEQ ID NO: 120323 - DNA, 390 bp, Homo sapiens
atccatgcattcatccatccatccacctacctactcacccacctaaactcatctatccactcaaccatccatccacctatccacccttacctccatccatccccttactgcccatctttccactcatcccatccaactacccatccatccacccagctgtccacccaaccatccacccactcactaatttatccactcacccacgcatgcatccatccatccatccatccacccacccatttacccacccacccatccatccacttacctgcctgtccatccaccctcccagtccatggctctttcatgtattccttcagccagcataggttgaagttaaatgtactattggtgctatttgctgtggtccctgttttttgttctctgctt

SEQ ID NO: 120324 - DNA, 360 bp, Homo sapiens
atccatgcattcatccatccatccacctacctactcacccacctaaactcatctatccactcaaccatccatccacctatccacccttacctccatccatccccttactgcccatctttccactcatcccatccaactacccatccatccacccagctgtccacccaaccatccacccactcactaatttatccactcatgaatggcgaggtgaacaaggcaaagcagactcaaatagaaatgtcgtacggcccataagggaagggcaagagaaaaaaaacccctacaatagaagtgcggtcaaaaagacatagcagggccagggaaaacagtaccatatatatgcaagaagggaggtcg

SEQ ID NO: 120325 - DNA, 386 bp, Homo sapiens
cagggtgaccctatccactacagaagccaaaagaggcaagatgctttctgtcccatcaacctgctgccacttggcaaatccacggtcttgcaacataaattaatacaactataagcttctgcccaggaattctgaacgtagagtgagtaagtggaaggcaaagagatagtcggaattcacttttggtgctgtgtgtccccacatcctgcagtggtccccagtggcaggggtgatacatactacaattgccccatcctgagaagactgtcacagcattgaaggcttcagagatgacttggtctctgcacattttccagactgctcctcaagctttatgtgtattctttgagcccccataccctgccaggaaatctctttaagcttaa

SEQ ID NO: 120326 - DNA, 458 bp, Homo sapiens
taagctttaaaggctctgtgttagggcatagtctagaaacatggggcccaagggcaccgggaaaacttacaaagggaagagatggaactgggagggttcaagctaccagttccatctctccatgttttagagaattggggcactaagtcagccaggtaaggtcaggtcagaggagggcccggatgaagcatgagatgcagagggacagtgcgtgaatggagaccttgggtagcaccaacgtgtagcggcagaggtggggtggatgtggctgatgtcagggagagaatggggagcatgcacagggctcagtcttatacatacattgaaaatcctttagcctttcaaagattattaacccaaatcacctttcttgcttactccagatgcctcagcctctgatataattgctaagtatctgccgtgttaaaaataaacatttgagaatcaagggtgatttt

SEQ ID NO: 120327 - DNA, 395 bp, Homo sapiens
cggtacccggtgtttatcgatgccaccagtgtcactcaagctgaagtgcatctcttttaaaggagaagtgacactggtggtaggatgaaagggtaccagacagagggagcaggagatacggaccctggagcattgtcccaattccttcttctaatgaagaaatacgcttagttgatgatgcgtttggaaaaatttgtcacatggtcagtgatggctcttgggtggttcatgttcaggcagcaaaactgttgggctctatggagcaagtcagttctcatttcttggagcagacccttgacaagaagctgatgtcagatctgaggaggaaacgtactgcacatgagcgtgccaaggaactttacagttcaggggagttttccagtggcagaaagtgg

SEQ ID NO: 120328 - DNA, 315 bp, Homo sapiens
tgttatgaacatccaatttgctctagtaggtgaactaagacaggctttttggaacaagaatcttggcccttcttacctagtctgttcaggttctactactctaaggtgggagaaacatgctaacaccaaacgaatgtgtaaaggaaccacagatgaagtaagtgtcagcctcatcaggtgaccgtgcagtccagctgccgccggggtggagaccacgcgtcctttcagaagtatgtgcctacgcgggggtgcagagtcaggagagtcttccggactcacaccacaggctgaccgttcggtttctcttcttcctcc

SEQ ID NO: 120329 - DNA, 435 bp, Homo sapiens
caatgaaaatttaggagagttggttgagagatggcaaaagagcaaagcttctgagagaagaataaaaggaaataaagggagaatttaaaaaggaaatagtcataatgggcaggtgggattggggtaggatatggttggggtgacccatgtctctgcacacatggcagtcttaggagaaggcagaggctggtgacaagaagttaagacagcaactcccagtcaataaagctgagtcaaaaagcggagtcactgaatatccatattaatgtacttgctagcattttatacacagtagtatttatgcctaggtaatgcttggaaatttgttttacttgaagaaaattattgataagccaggtcacagggttgaagtacttcttaactctaaagggaagtttaaaactttgggacattgattatttggaagttacattt

SEQ ID NO: 120330 - DNA, 953 bp, Homo sapiens
ggacagccttagacatgatattagcagaaagaggaggagtttgcgtcatgatgaaaactcaatgttgtaccttcatcccaaacaccaccaccactgatggaagtataacaaaggcattgcaaagtctgactactctgtccaatgagttagccaacaactcaggggtaaatgacccctttacaggatggcaagaaaagtagttcggtaaatggaaaggaataatagcctcaattcttacttccctcgcagccgtaatgggtgtacttattcttgtcaggtgctgtgtcataccatgcatccgtaggttgatgcagaggctcataaaaacggcacatactaaaacctcccttaactatcctccaccttatccagagaagcttcttttggaaaatcaagcaaaacagctaagccaagacatgttaaaaaaaggtttgaaaagaaagctgtaaggaaatacaaggggagggattgttagatatgagttctaaatttattttcaaagaatcaatatgtcagtatgttcaattctttaccttctacttttaaacttaacttcctcataaagcaacctttttcaattacctgctccaccctgattcatttcaatcacctgctccaccctgactcattctgattacctgctccaccctgactcattccgattacctactccaccctgactcattccgatgacctgctctgtcataaccatttttcctgccaaaccactcaccctgtcactgtctttaaattagccaatcagaattagtttagcctgtgcggtctaaccctagccaataggggaatgacacagcagcaggggccgtatgcatcagggataagaaccccttcccctcccttgtccaagtgtgcactcaccattgctccatgtgtaagcatgcacccttctatagaagtaacttgccttgctgagaattaaaagaaaatgttat

SEQ ID NO: 120331 - DNA, 443 bp, Homo sapiens
ctctggattcagagttcagtctaaatttgggtcacgactttgaagaagtggcctttctcaatggtacatgcttaaactaattgaacgaattggctatttctgccttgttagaaatgtaagtcttctttttctatccacgggcaggaatttagtcatattatcctttgtctttgctgtgactaattatctttcttccttgcagagccccagaactcggaggtggttccaactagttgattaggaataacaatatcacatggaaaatggcaagccccacccctcccctgacagcattagcaaaatctcatcctgagttttgctcttttaaccctaaactgtacgtgaggtgggagcccccaaattaaacaaaactagctcgaatcttattgcttagtggcaccttcctgtggctttgcagacttacttgggcagcaggagctgtg

SEQ ID NO: 120332 - DNA, 364 bp, Homo sapiens
caagattccatctcaaaaaacaaacaaataaacaaaatatagagaagaacagaacaagaagtgttttgagtagcagaacacgactcacacagacatctaatatttagtcaaattgcttttatataaaagaaggtatacattgaagagcaacagagcctacctctatgactgacattttcaaagaaaatggctaagaatcactttgatggccaggcacggtggctcacacctgtaatcccggatctttgggaggccgaggagggcagatcacgaggttaagagattgagaccatcctggccaacatggtgaaaccccgtctctactaaaaatacaaaaattaactgggcgtggtggcacgtgcct

SEQ ID NO: 120333 - DNA, 374 bp, Homo sapiens
cgacagatccaggaagctcagagaatagtaagaaggacaaatgccagaaaaaaactacacatacacatatatattattttcaaactgcagaatatcaaaggcaaagaaaagtcctgaaagaatccagagggggaaaaacatgttacctacaaaagagcaaagatagaaactgcatctgacatgtcctcagaaactatgcacataggaggagaacggattgaaattaaagtgttgagacaaaagtgccaaagcaggaaatctagtcaggagacaatgccagtgtctaggtgagagataaagatgggttggaccacatccactactaccttcctggtccaactctactaaaaatataaaaattcattttgggaggc

SEQ ID NO: 120334 - DNA, 622 bp, Homo sapiens
tatgtacattatcaatattcatttaattgtaaatacctgtttttgtagccagagagcaatctccctaagtgcagagagaagacggtaatgttcatcatgttatctcatatgcctagagtactgcctgtctcccagttagagtacaatatgtatttgtagaaaggagaggggcgtgagttaaagataaagtgactaatttatgccacctatcaataaagttcatctctttaaaggattttctcagcttaagaagtagatgtgctttatacaaattgaaaggtgaaaataagcatcttaaagctcactttcagccattagttacattaagaacttggattcatgtctgaactaaaaatatacctaatcaattaatttctttttgaaaaatgataggataatataggtttattggtttatttccagtacccttatacatttttttttcatgggtgtatgcatgcatgcaatgactaagcatacagaattgcttgtgaaaattctggccatttctctaatactgaatttatttcaccttatactatggtgcaggcagatgatcatagattgtcttaaagccaccacagcaaattcttcttactacaatgtagaggcaaagacaatt

SEQ ID NO: 120335 - DNA, 877 bp, Homo sapiens
ggacaatatatctttatgttaaatctgttgttggaagttggttggtgagaccaaccagctaagtgggataattgcttcccagtctatgtagctaaaatgtagttctaatgctgatactgtggactgactctgagtccaaactccattttaattggtctgtgaggggaaaatacatactaaaatacaggtaaatagatgttcaggaacatcttgtccatcttccttcctccttcacaaagggtctcttagtggtcagggaatggtgtagcactatgaatatttctttttttctcctctcccttggtcatccagagttgcaacaaccttggcagctccctgtaggataagaagtgaatttgagggagtgcatttaattttcatggtagacttatcctgtctctaatgtgtgcaagttagttgttcttataaaccatttgtaagtttgtatgtttgtaagtttgttatagttgtggggatgcttttgtactttgtgacttttcctttgtctctcccctctaaactggtcatttctcttgtgcctagactgttttcttgcattatgtctgtcaattttcattgcctttactctcactcagaaaaccttgtaattttaattgaaatttagaaacccaaacctaaatttttgataaaagaggcctctctaaatctcaagtggttcctaaccttttttgctttagggacccttctgagaatgataaagttttgaactcttttctccagatgcaagtattcatgtacctacttgggtctcagaaatcttagcagtcttttgcaggtcatggttaggcattttatttaaaaacctgttgcaaattttaacaactcattcaaagtgcacaggtgaagttccgtcata

SEQ ID NO: 120336 - DNA, 440 bp, Homo sapiens
cagtgactgatgataagaagggtccggcgagaaggaaggggtagggcatgggcgctgagggacaccgaactctgaagaatcttggtcagggggactgagcagagatggggaggaggcaggaggaacgagtctctccccaccctccaggcgagtctggtgaataagcctgacatggacctgcttcttggcacttcctaaccatgtggtcttgggcttgtaacctaactctagctctacactcagttttctcatctgtgcaatgggataataataatagggatggccggtgtggtggctcatgcctataagcccagcattttgggaggctgaggagggcagatcacttgaggtcaggagttcgagaccagcctggccaacatggtgaaaccctgtctctaccaaaaaaaaatacaaaaagtagccaggcatggtggtgtttg

SEQ ID NO: 120337 - DNA, 147 bp, Homo sapiens
aactgtgggtggatgacttttttctctacttcagtagtctcaacaagttggcatgatgtattgtatagaataaatacacaatcaatttttactgaattactgtgttttcctttgattttcacactggttccttccagtcacatcact

SEQ ID NO: 120338 - DNA, 276 bp, Homo sapiens
tgacagagtccattacacactatcccgggtgagcccacagtccctcaaggtgcaggtgagattatctgcattttataggagaggacaccgagggtcccgcagtgagtccctgcagagaccagggctggaacgccaggtctttggattctgtgttctttcttccatatcatctctgctaatcagactctggggctatttgtggcagccaaatataagtcagccagcaaaatctttatatatcgactttgttccctgtgctggtgttgtgagaaatag

SEQ ID NO: 120339 - DNA, 653 bp, Homo sapiens
  misc_feature (239)..(239): n is a, c, g, or t
tcagctcgtaccccacttatgccgtgggcggggggacccaaagggcaggccgggcgccccatgtgggccgcagctcctggcccggacacacagctcgctgacacccagcattggccggcagccgcagagacgcacgggggcaggttgacacacaatacacgcacgggcacactaacccgtggcacaggcatgctggcgcacacactggcaaccgctagcacacgctcatcacacgcagnggcacgccgtcatacacgcctcggtcaacacattcttgctgacagccttgttggcatgcacagctcacactccaacacacaccaattctagcacaccctcgtgctggcacacacgtgtgggcatacactgatacgcacactgtcacctgcactcgctgtagcaaacactcttgctggcacacacatcaccctcactggcacacacacttgtgctggcatgtctcaccaacacagcggagcgcaaggccacaccaacactgacccccacagacacaatcagactgatgccctcaaagactggcaccccacaggcacgagctgctagcccaaggcccgctgacacacacgcttcaggccccacatggccagaagtggaaacacacacatcacacagggtagagcgccccccgccac

SEQ ID NO: 120340 - DNA, 320 bp, Homo sapiens
cacagaaaacgcttccgtcactgggcctgatatggaggctttcctcttacagttgggttttggctttcttttcctcttcttcccccctcccaaacccctcagccaggcttttatatgaactcaactccttctgagtaaagatgtggttctgagatcagttaataacactgggcacattaactaattaacaagagtaaggagttcagaaaacaaacagtcatggagcaacgctatcattatgtggcttctgcctgactctcctgtcctccttaagcaggcagcgatgtcaatatatctgggaaggcaaagtgaaaatcctt

SEQ ID NO: 120341 - DNA, 342 bp, Homo sapiens
cctggcttggtggagcagctctgaaccagcgtcaaagggcggtcgttattgtgttagtggcgatcctataggagaccgtatttctgagtcttacaagaggctttaccatatcagtgtgatgtattaatcattaatggtttgatctaatgctcctttgaatattatcccagtaagaggtgtggattcaatctctagaaatacgtttattaggggggaaccaagtgcagggtttctctgcaatgtcccaaaataatgtcaaagcctctcattcatgaaactgaatgagcagtgaagaagagccttgctcacaccccctaagttcagagccagggggtaccgagc

SEQ ID NO: 120342 - DNA, 350 bp, Homo sapiens
tacatgtcacacataaatacgtaaaatttaaaaatctaggttacacatggtttcattagatagaaggaaaagaaaaacaagttgagttataatttaaaactgttgttaacatttattgatctttatcagctaacaactccaaggcagaaataatttacggctaagttggatgaactgcgtattgatctaaatcatgcaacgctttttcagggtcttagtcaaaataaggccttgataattagagcaggttaagaacggcagggtggcaatgcaaattattgctttaaatagaatgaaagagagcagtatcctagcgccctcttcacctccaaccctttttaactcacagc

SEQ ID NO: 120343 - DNA, 415 bp, Homo sapiens
aatggatcatgataatgatgtaattgagatgttgtaaaatattggtgagtatggattattggaacagaaagaatgagatgttgggaaaaactctggatttaagaggtgtggctgtgtgtgatggtaggggatagggaaattaatatcacagtgggaggaaataattatttaataatgatatgctaataggggagtcaacattaacttcagtagttatggaaggaaggtgatgtttagcacatttgacaaacaaaaataccttgcaaattaccaggaggaataaaaaaaaagaagagaaacttaacgaggtcagcaaaaaaatataaaaacaggtaaaaaagaaacaatagcaaaatgtaaaaaaattgaaattaaatataagatggaggaattaagtagatcagttattacaaga

SEQ ID NO: 120344 - DNA, 169 bp, Homo sapiens
cagggctttccagaaattgccattcacgtcttccttcagccctggttgagcccatgtgtatataaatacatttcacttctcagtgcccccgtcaggcctcttagccacaccaaggctgccatacccccaccacctgcacatccccgctttgccatgatgcagcccgggt

SEQ ID NO: 120345 - DNA, 101 bp, Homo sapiens
atacagataaattatgaaaaaaaaaatctcacccaaatttctgtcccagagataaccagattttgatataaatccctcaagattttttccactgcaatttt

SEQ ID NO: 120346 - DNA, 561 bp, Homo sapiens
ttacaatcaatgccacagaaatctgaaaaatcattagaagatgactatgaaccattacacaacaacaaattgaataacctatgagaaatggctacatcgtaaaaaaaaaacacaaaacctaccaagactgaatcacaaagaaatagaaaacctcaacagaatcacaactagtaagatgacggaattagtaatcaaaaatttcccagcaaaggaaattccaggaccagatggcttcactggtgaattctgtcaaacatttaaagaattaattccaatccttctcaactcttccaaaaagctgaagaggagggaacacttccaaacaaattttaggaggccagcattatcctaatcccaaagctagacaagaaccttattaaaaactacaggctaataaccctgattaacatggacgcaaaaatcaccaataaaatatagaaaatcaaattcaacaacacattaactaagtgagatttatctctggatgcaaggaagggtcagcacaggaaatcaatcaatgtggctctaccacattaacaaaataaagggcaaaatcacagg

SEQ ID NO: 120347 - DNA, 766 bp, Homo sapiens
gcaggtgggatattttttggattatggagagctgtttgatttcacatcagtgggttcttccctcaaccttgttcagatcagtgcctgagtaagttctaatatattaaccttttctgagagaagagatgtgaggatgagggtggagggtgtgaatcttgttttttcaccatcctgttactcttctgcatgcggtgtccccttactgaggaacagaatagaggagctgtaagttggggtatagtgtggcaaggtttgtgagagacttaagaacaaagggtgtttatcataggtaattatcacagtgttgttagagtgtaggcagagcagctttctaaccaacattacaagtttattttgctagtgaaaccttttatttaccaatgaagcattagaatttcagagagttaattgtttgtgaactttgttcatggtctttctgaaactttcaactctctgtttagttacaataaggctcattttatagcctttattgtcctcttttgagaagaggcagtataggtagataggaacatgggcttgggatcagatagactgggaatagaaatccatgcctgacgcttggacaaattgtttaaacttctgaatgttaatttcttaaccagtaaaatgggaataataatgcttaccttacaggcaaggggacaatttctttgtgtggaataaaaaaaggaaggtaagctgactcattttcagaaagatctttaaaaattaataaacatgccatattccttaatcttatttatga

SEQ ID NO: 120348 - DNA, 949 bp, Homo sapiens
  misc_feature (949)..(949): n is a, c, g, or t
tgggacttttgaaatgcattctgtgaatgagaagaaatgcaaacatgttggcaaaactgattattttcattgtggatctcacgcttgctttggccatttttgttatcttttatttaatggctgccactgtttttttcatctcggtcattttctatattttcaaaagggagatggaaaaaaaactttgacttcaacaagcgccgaatctgggcgctggattctagcaatgctactgaggagcctttggcaggtggcgcagagaaagtcagctccaagctgcttcctgtccattgtccagctgtaggagaagggtctttcctgcccaaggacagtggtcctctcttctaaagagcaaggagctctctgaggtggaggaggcttgtgaagacttcccagaacactgcacccacctgaccaagaggtactttttttaaggtccttcaaactggttcatctaccaccatgtaattacacatggaaattctcattaacagaagccggaaatacccagggaggattgaagagtcaatcatgggcttcccaaggtacatgtttaagacattccacgacctcagggaaagtagacattcgggaatctttaaaggctcaatcttggggaggaagaacatgcttgttgatgacttgcgcagaaacctggtgtaataatcttggaggtgtgaatgttgagaagaggcatcgaaggtttcagaattagtgggaatgtgtcacaggttttgcagcaaataaagtttgttttggtgggaacaggcatccatggttgttgttagtaggcaaaagagattctagtgcgcagagaatgtggtatttttaaaggtgctgtcactactaatatacgtgtgatatcacgaaatatggatgtacacgaggtgtgagacttatttgtgagaaaaacggtgatactggggaaaggttgattagtcgaatgtgn

SEQ ID NO: 120349 - DNA, 815 bp, Homo sapiens
ggacataatgtggagacctgctttggttccttttctaaaaggaagcatggtttgaagtcttgatgaacagagaaagcaagaaaattccacaaaacaaattgaacttgtccagttagaatctatgataagtccacaactctttttaaaattattttacgttgaccttagagctttcagtaaagcttttggattttcccccagcttccccgggtcttatattttattagtggatgtaaaatttcaagctttatttttttcaagtcaacgtttttagtcatgaagaaatcctatagatttttgaatttaaaaaatctttttctttcttaatttttgacttgcaggttcaaaataatattttattttatcaaagttattagcaaaagaaaatatataatctaagagagtagcttgcactcaaattttcatgccctgttctgcattcttttgtataattttttaaacatacgccctgggtcaaggattgatttctctcatgtcctacctggcatcaaaaaacaggctagtatttaatagataatattactggactaaagtcatcatgtgtggctggagatatcaagacctatttgccttcagttttccctccttttaaggtcattgctggaaatttcacttttcaactcagtcttgctctgatgtttgggattaggtgaggtctatgttccatattgcctctctagataagggatttttaggaaattaatacaaaatttggaatttagactttttccatttcagtaggctacatttcataaaaactgatgattatttctggatttagaaataagacagat

SEQ ID NO: 120350 - DNA, 404 bp, Homo sapiens
agaaaaaaagacttactgggtaaatcttgctaagtagatgacactgacctttactatttaatcattataggcatcatctttaggagacggaatggcacttaataaaagatcagctttttatattacaattaaagaaataataaaaattcaaaggttacttagtaagctagaggatatatcaatctaccgttaagaaataaaaaggttgccaagcgcagtggctcacacctctaatcccagcactttgggaggccgaggcgggtagattacctgaggtcaggagttcgagaccagcctgaccaacatagtgaaaccctgtctctactaaaatacaaaaattagccaggtgtggtggcacacgcctgtaatcccagctacttgggaggctgaggcaggagaatcgc

SEQ ID NO: 120351 - DNA, 185 bp, Homo sapiens
tacagaattaaaatgtgaaatggagaattagcaaaaagagttgaggacttcagtagctcactttcaataatggataagacaaataagcagaagttctattaggaaatagaagacttgaacaacaataggatagatagaactaagaagtctttatggaacactccacccaaaataaagcaaaatat

SEQ ID NO: 120352 - DNA, 278 bp, Homo sapiens
cccccagtcccccacactcactcacaccctctccaatcagccagctcagggcagacgccgtcaccccgggggacacgctaatgaagatggccgacattaatctcttccctctcccgacaggtcaatttatagttccacggggagccctggcgctcggccagagggcctgacataactctccctgttccccgggaggacatcaggggtgggctagatggggcaagggaggctggagacacccgagacaggacagggagggaccctctgcctgagcaccc

SEQ ID NO: 120353 - DNA, 557 bp, Homo sapiens
attagaaaagaacgcgtcgacctgggtagaagcagatttaagtggaaagtaacaatgagagtgtgaaattcctgcagcagactcctgataacagacatggcatggctgacatccacagtggcatgtgggggagcagcagcaggactaacaggataagattcatggttgaacactttagactcccctgagcatgccagaaatacattataggggacttttgaaaaggactgagatctgggagtgtcccagtgcaatggaaatttgagcctgtatgctaatgtgaccttatttgtccccagaagcaatagcatttttgccatttgagatgcatccatattccaactcatctataacagtgccttacacccagtaggcatgcaataactatttgctagattgaaccaaataaatgtgcctaattcttcgattagtcatgaccagtcagtacattcttggttatccttccaggaggtagaaacattctgagttggaaaatattgtattaactataaagcaattttgcaaaataaatataactgtataatacttaataaagg

SEQ ID NO: 120354 - DNA, 329 bp, Homo sapiens
agagagctaagtggcgagaagtggtcagattctggacacacactgcaggcagacccaggacttggccggtggagtcctcacaacatggcaaggaagtaactgcggtcaggaatccagggcgctcaggagcttagcctggagctgtggagttaaaatccctgtcagacgcgcaggccggtagacaggtggctgcaggtggaaatgtggggtttgtaagcgtgtataagaagtgggtttaaggtcatgatactgggagcactcttctaaagagcaagtgtagacagaggagaagccccaggcagagtgggaggaagaaggcaaaccaggcg

SEQ ID NO: 120355 - DNA, 380 bp, Homo sapiens
gtggaatatcccccagtttgtgtttgggtgatgttttctcatgattaaattgaagttatgcatattttggaatacttcagaggtgatgttgtaccctttttggtctgtcatgtcaaagggtatatgatgataaatcttatccctggtgatattaaccctgatcacctgtttaaggtgggatgttccagtgttctcccctctcaagttcctatctttctctttgtaattttttctttttttggaacggagtttcactcttgttgcccaggctggagagcagtggcatcgaataaacaggtgtaaatcgatgccacttccggtgctggtgcgttggaaagtggcaatggcagaagccctgaataaatataagcctcagtgtc

SEQ ID NO: 120356 - DNA, 114 bp, Homo sapiens
tgtcttactgtctctatctttgtctccgtatgcctttctctctctgactcctctctcactccctctgtctgtttttcttccccttcacaatccagttggaggaaagagttgttc

SEQ ID NO: 120357 - DNA, 140 bp, Homo sapiens
acagtttgcgaacctgctaaaactgcagcttttgatatatgtgtgtatgcacatgagtgcacatatatgtatttttctggcgacagggtcttggactttcaacaagggatctcaaaggatcagttccatgaccaaaaagg

SEQ ID NO: 120358 - DNA, 295 bp, Homo sapiens
gcacttacagtgatatcctaaacctccggcatctaatccagcagccacaagccacataaggctactgagtacttaacatgtggttagtgtgattaaggagctgaatttttaattttttttttttgagacagggtctcactctgttaaccaggctcaagtacagtggcacaattacagctcattgtagcctcaacgtcctaggctcaagcaatccttccacctcagtcccgagtagctgggaggcaggaaaatggcgtggccccgggaggcagggggtgggtggagagcgggggtc

SEQ ID NO: 120359 - DNA, 448 bp, Homo sapiens
gcagtgggaacgtgttatagatataaatgccttaccgttgataactcagaataagatataggatatcatcattaagtctgattatctaagcttatctgtgagccttacagaaaacaaaaacgaaagatcaggaccacaggttctttgactaccatttccctatttttttcatttgtcctgaacagggcctaacacaaagataggcacatgaggcagggtagtacaaatgagtttttcccccgtatgaagtgacaatcacatggattatatgtgaccttgacattgttgagtttctaaagactttttaaggatgccatacccacccccaatagatcacaacctatttctctcattctaatgttggtcatttgattacatagtcctttgtggctctgtttgcttgagactgcaaaataaacaaaatgtttgcaagtccaggttgacccta

SEQ ID NO: 120360 - DNA, 536 bp, Homo sapiens
attttttgtatatatgtaaaatatccatttttgtatatatgtaaaatatccattttttgtatatatgtaaaatatccattttatatatatatgtattctggatatttacactttatcagttatatggattacaaagatctttctttttttcactttatggtatcttgatgaacagaaaagttcttaattttaatgtagttgaatctatcagtcttttcctttatgttgtgtggtcttaatacctttcttaaaacaagtcccttcattactcaaagtcagagagatatattttcttttatcttagaataagagatatttttgtgccttatgtttaatggttttgcccatgattttttattcatgctgtgagttaggaattgttttgattttgtattgctgagaaacaatctaccccaaactttagtgacttaaagtaaccattttattttactcatgggttttgtggcaagcatttagaaagagctcaactagtagtttttctcttccaataaaggtggtgtcagttgggctagaag

SEQ ID NO: 120361 - DNA, 154 bp, Homo sapiens
atagtttgatggggccctggcagaggcttcatttctccaaaaggtagatattactggacactcctgagatgagaaacagtacttccttacagtttagaagatcctggagtatgcttgattgtgttcattgactgttggcgcacttgaacttacc

SEQ ID NO: 120362 - DNA, 740 bp, Homo sapiens
acgtgagcttctggaacagccggaaaccttgtcaactgtccaggtagtttgtccacctgaagtctcacctatgacttctctggatcctttggcatcctagcactgaaatctgcaaagctgcttatgtactttctgtaaggtgaaaattacggatgcagcacctgtgattaagtcatgatggctggaagtaaatcttggtgaatatttctaaatgttttccacatttcccatacagaggtttgataatttgttcacctagtttccattttataattgaggttggcagtggagaccaagactcgatgtggtgtgggtcaatttggaagaattacttcgaagaaaatgagaaagaaacactcaaatgaaatcccttttgaggaaggagatactcttttccttaaaaaaaaaaaaatcaacatttgtatcaataaaggttgagatcagaaaatgtttcccgttcaatgagaaagatttggactgtgatgaagataaactaaaaagaaaagagtttgaccaactggcaagggtttgacccctttcccctttaaaaaaatcacactaaaactacagcttatgtttcgcatgagtggatgctctgaattgcaatgcaaagtgcttatgaaaacttaagatcttacattactacttcaaagagtacatgtgataggaattcctatagaagaaaatgaaaaaggatatagcttgaaaatccaaatttatagcaaattctgcatctatca

SEQ ID NO: 120363 - DNA, 427 bp, Homo sapiens
agatgtttgccctcaaggaagactttgctgtgaccttgacctgaaaacatacacacccttttaactcaaccccaaaccaagctcatcctcactcatcatctgccgccccactccagggtgcagcaggtcagcaggaggtgaggggagaggatccacctgtcctgtcctgtcctctcctgccctgtcctggctccagcccctcccactcccatgccgcaccactccctgactccccacccccaactgcttgtgtcctcatccccaacctccttcaccccacagtcacctgcgtgtgcatatgtctcttccccttcgcttgtcacactgggaatgctgtggcacccacatccaggaatccaggatgtgcacgaactcccagaaggcattttaaagctttaaatgcattttccattctttctaaaaaaaa

SEQ ID NO: 120364 - DNA, 684 bp, Homo sapiens
tatataacaaacctgcacatgtacccctgaacttaaaataaaaattaaatttaaaaaataagattaatatctgcatacaaatctttgtttacagcttgttatatattgaattatgtctgctcccccaacattcatatgttaaagcccaaagttattgtgtttggaaatagggcttttaggagatatttaaggttaaataaggttataaacgtggagtcttaatctgataggattggtggctttataagaaaaagaaaagagattgctctctccccagtgcagttaccaaggaaaggccatgtgagaacatagcaggaaggcagccatctgtaacctaaggaaagagatctgtcaaaggacaaaactacaacaaatgtaaagatctcaattggctttatctgcgattctggaatcaggcaatactccatttcataaaacagaactagtgctccaatgagctgagcaaaaggggttgttagttttatagacagagaaggacggaagaaagcagaaataacgaatggaaagtagattggtcaaatttactttccttttaaggcagaaaaatagaacaataactattcaagtaatcttaaggttacttcaggttaagggttaaaacagaaggaattttatcatcatgcttattgaagattcaaactggcctgtttaagaaattggctg

SEQ ID NO: 120365 - DNA, 665 bp, Homo sapiens
ccacctctaaacatttttgttttgttttttatttttacttgaaaattctatagcagaaataatgacagacaaataggcttctgtcattactcaacttccttatgatggtgttatacttattgctgagtaatagtaattagtgtggttttgggtgtaggcattttacattttgaatctgagaagattttaggttcacctgagttgctgaatcaactcagtatttcaggaaagtatcttatacatgggttccaagtagtataaatattaaaaagttaattgcatatgctctgagaaattctgtaagcactctttcacgtttatttcatagatgaacagtgaagacagtggtgaggggattttatcaagtttatttgtaaaaaggcctgggctggcagactttttccttagagccagatgatctgtcacaactactcaactgttgacatacagcaaaagcagccataagcaacttgtaaccaaatgggtgtgactattaaaataaaactttatttaggcaggcttagtctgagaatcctaaatggatctggtggagggccaagggaaggcagttggcacacatgttgatgaaaacagttgtttaaacttctggcaaatttgaatactaacttaaaaaggtgtcaataaggtttatataaaaatgaaag

SEQ ID NO: 120366 - DNA, 277 bp, Homo sapiens
gtcagacatgggtcttctggccaattcatcatggcatctccaccaataaagcatggaaccaatccacgactccctctgtccccggggggaggcagtaattacttatttgctaatggggaggggaactgttttaaagtaatgcttatggctagatggtaccttagcaagggagaaaataagtcaatacatcttaaaatcttaagaggcagcaaaggatcaactcctccaaactcttcatttgtcactttaaaaatcaaaaacaaaaacaaagacgata

SEQ ID NO: 120367 - DNA, 210 bp, Homo sapiens
gccagctgctataagatatacttgggtaggatttttaataacaaatgagcaatatattttcagcaggctatatatatgctgtaagataagctttatagaagcagtacactttgtatcttatgttgactactaataatgattttcatttaaaagcacagcaaagagaccccatgtacaaagtaatataacccacttaaagactgcacaagc

SEQ ID NO: 120368 - DNA, 307 bp, Homo sapiens
aattcccagcttaagggatcatcctttgtcttctgtttgtctatgtatttatatgtagtatgtgtgtgtaatataaaagaattttaattaattgctttaataataataagcttaaatcaaatattttgtcacataagtaaaaagtgtaatgccttttagttcatgtgacttaagtaatctttgggaaataaaaacagttttaaagattactggtaaaataaagacatttggtctaaattatgcaggtcagatattaagtttgctaaatgccttaaggtcataaactgctgctttgactttttttttt

SEQ ID NO: 120369 - DNA, 875 bp, Homo sapiens
gggaaattctgttttaggaaggtacaactatgttttaaatttcaaggtaagattatatcataaaattaaatcaatattaggtgcttgacaaatatttgttggataaatgattgattgattagagttagcattttaattgccattcctgttctttattttttcctgtcagttaagtagttactgaatacttaaaaaaaagaattgtgaaaaaatactgcaagctgtattacactagtgtcctttaatttttttgcttttatatttttataaacgattaaacgtaaattagtattgtttcataagcaaatgtgtttatgaaaataaacatttctctaaacaatattttttccccataactttaaagttttagaaggttacatgtgcaagttgttacatgggtaaattgcctgttgctaaggtttgatgtataaccatcacccaggtagtgaggatggtacctgatgggtagtttcttaactctcgccccctctcccaccttccccccgttgttgtccccagtgttgactgctcccatctttaggtccgtgcttactcattgtttagctcccacttgtaagtgaggaaatgcagtatttggttttctgttcctatattaattcgcttaggataatggctaccagctgcatctatgttgctgcaaagggcatgattttattctttttcatgtcgacatagtattccatggcatatatgtactgcattttctttatccagtccactattgatggacacctaggttgactccacatctttgcagttgtgaatagtgctccagtgaatatgcaagtgcatatggctttttgatagaatgatttatttttctttattttcccttatttcattaaaaacattat

SEQ ID NO: 120370 - DNA, 429 bp, Homo sapiens
aggtaggacagttcacaccatgtcatcagttattagaattgggaaaatacagcttaatccaagacttcatgtacaggtcgaactggagggattgaatggctcaccggagactttccagcaggtcagaggctgagccaggactagaacccagaattcctctgtcctaggcctctgccctttcccctccaatgcctactcttactgctgtttctgtgccccctgccatggcacacatttacttatgctcattggtttgtccagggagtttgttctagactatggcatgagaaagggaactcttcccacctacgaactgaccttcctaacattgtgccacttggtcatgacagcccaagagcacaagcctggagccgcagccagtggcaggtggctgaggcatgtgaaggtggagggatgttgcacactctt

SEQ ID NO: 120371 - DNA, 396 bp, Homo sapiens
agcctcttaaaaaagaacctaaaggtcattgattgaagccttttattttcaatatattacatctataaatgtacttttaagaaacgatttatctgcatcccacattttattaagtttttaaaaaattttctttcagtttaaactattttttttgtgtgtgaaacttttcttggccaatgggtttttctgaagtattttgtttaatgttcaaatgttggggtgttattgtacatatcctactgttgtccatctctggttcatgatacaatgcatgttctccattgcacttagataacatgcctccatgtctctggagaattcctcagtctttctaaaatgcttttgatgaatactggcagttattttgtagaatgtccctcctcaatttcagttagt

SEQ ID NO: 120372 - DNA, 443 bp, Homo sapiens
gtggcctaggaaggctcagctccaagtgatcagctctgtcctacagagactgaagcttggagcagctggtgacaggaccacgggcacgtagcctggattgggagaagttgggagtggcgatcactagtgtttgcggagcacttgctaggaggcctgagccaaggatgtaatcttattgatgtacgttatcttatttaatcagagcctgccaaacatcccagtctgccccaaagtcccgggcgacacctgtcgccctggcgtcatcattaataacccccggaaggtgaaaactctcagagtgcccttgtggagctgagaaggagcacggtttcactgtgcttagtcctctgtcgagccctctggaatatccctatgatgtggatgaacaagctgtgggtcagggggatggagggacttgcccagggtcaccagctcggaggcag

SEQ ID NO: 120373 - DNA, 352 bp, Homo sapiens
cagagaggctaattccgtcagcgtgaggaacagaaggagtcactcgagaagccatctccaccaaagtaaacacatccttctggaagcttaaattttcactttatcccttgggaactagggacatgagtcataatgagttagcaggtggcttttgtgaaatacaagaggctttgtgaaatgcagcaaatatagccaaaagcatgtgtagtagcttcctatggctgctctcacaaattactacaaattcagtggcttacaacaacacacatgcattcccatttattcagttaggaagtcaaaagtctgaaatgcatatcataggctaacgtcaacgcgtcaatagaaccgtgtt

SEQ ID NO: 120374 - DNA, 377 bp, Homo sapiens
agctgcttttgtcctggtgatcccaagacccctgtggggcagcctgactctgccaaccaggttccataactgcagtgggtaccccgtgtttgttggtttgatggaggcatcttgactaagcactgcagggtgcctggctctgggtgggggtgggaaacagacaacccatcttcctgctgagtcgccaagtagcaagtctgcagggctgactgatgtgcggggttgtgagtcatccttcctaaagtgatctgggcgcccccagcattgccccagagctcaaaggatgacagttcccgcaggaggccattccagggaagagaattctagggagggggagagcataggtaaaggtgtggaggtgggacattcctgcatcg

SEQ ID NO: 120375 - DNA, 381 bp, Homo sapiens
caaaatttactagaagattcattcatcaatgcttttatgaggctagaagttcagtttaaaaggcaaatcaggcttggctcagtgggtcacacctgtaatcccaacactttgggaggctgaggtgggcagatcacctgaggtcgggagttcgagaccagcctggccaacatggcgaaaccccatctctactaaaaatagaaaaattagccaggtgtggtggcagttgcctgtagtcccagctgctagggaggctgaggcaggagaatcgcttgaacctgggaggaggaggttgcagtgaaccacgattgtgccactgcactccagcttgggtgacgagcaagacagtgtctaaaaaaaaaaaaaaaaaaaagaaaaaaaaaa

SEQ ID NO: 120376 - DNA, 769 bp, Homo sapiens
aaggcacccttgcccagggtgcagaaaggggctgtattgggagactggcacaggccggggcagggagggctgggctaaggcattggcatcattcttgaagagtttgaagccaggcaggtggcctggtcagaccatgtttgaggaaggagcctgtgtcacaattccctgtgaccagtcagagggtcttctgctggacagatcacatgcacccataagtaggtcagatgcccaggagtgttttgcctcagatatggagcaaaattagcctgacagtaaatgcagctctggtcctacctactggagcttaaagcaagactccgaagaatcaaactgtttcagagtaacttaccagcatcttagaacaaagctcaagaatatttacagattgcaaaaatatccaacatcagcaagataaaattcacatgggcaaccaattaacatttacccaacaagcagagaagcaggaaaatacgacctgcaatgaaaggggaagaaatccgtcaataggagctgacccagaaatgatacagatggtaaaattcatagacaggacattaaaacagttgttacacctttatgtgttcaagaagctagtagagagattcagcctgttaagtagaaaatgagagatagaaaaactccaggctaggccaggcatgcaacggctcacacctgtaatcccagcacattgggaggctgaggtgggcagaccacctgaggtcaggagttgcctggccaacatggcaaaacctcatctctactaaaaata

SEQ ID NO: 120377 - DNA, 588 bp, Homo sapiens
tggcaaaactgaggcccacaccagtggggagatttgcccaagtgtcctcagcagcagagttagagccagacccggtgtctgcaggattttaagtagctcagagacagtcacgaagtgctcatgctagtccttagctgtggctcagtggagggctggaaatgagctcagtggggcagttgctgggggtggtcagcaccatcctgagatggtgaggtgaacacagtccctggccacacctgtacagggagaagcacctgcatagggagaagctttccatggccaaccctcctttactgagagaggactcgtcatcaactaggcaccgtgctgaaatgtacatcaacttgggagacactggcaacaaccctatggggtacagcttctacatttaataaatgaaagcctgaggctcagaggcaggagctcacctgaggtcacagagattgatgaacagcagaacagttcaccaagacaaggactctgccattgcacatgcagggactttgtgagtgatgctgaacctcagagtggctcatgctccatcatctgcaaggaaagatggtgacagctcagattgcagaaggaagt

SEQ ID NO: 120378 - DNA, 322 bp, Homo sapiens
cagcagaatcgcttgaacctgggaggcggagattgcagtgagccgagattgcgccacagcactccagcctgggtgacagagcgaaactcagtctcaaaaaaaagtgaggtgaaagaaatgaggtggggttggttaccagttacaggaatgaccaggccaactgtggctttgtctgatgatgtgatctaggggaagtaggagctttgagaaatggtttgtcaaaagagaaatggactgtagttatggggaaggagtggatgtgttatcagagtttgtaatagaaacattgacagaagtcactcgcagctgagttatctgaggg

SEQ ID NO: 120379 - DNA, 340 bp, Homo sapiens
gagaatgtcaaatagaacaaaaagaaataagaattccatcttgaaaaatctttgaaaaatctttaaaaaatcaagtctaaattttatatcttgctccaaatatatagagatataaataggttatcatcaagatatggagaaagccatatcatggaaacactaaaataaggctgtggaaggactacattgatattagacacaacagagttcggaacaagaaatagtatcagagatgagagacaatagataatagaataatcaattctcaagaagatgtaaacatcctactaattagggtatgcagctaacaacagagcctccaaatacgtgaggtaaaaca

SEQ ID NO: 120380 - DNA, 712 bp, Homo sapiens
acctttgtgacttctgcatcttacatctcaatctgtacctcacttctgctttttgtccttttgtctcatccttaattttacttcccatttgttgctatacaatgtgtgtgcatagttcaaactaaatttaactctgctattttgagaggaacaagttaaggggtaatccttgtaggttacaataagaacatttggtagaatttagcctttataaacaactgaccattcaagtactgcaattttacattctctagttattcttgctagcagagctcctattgtctcaaatttaaaaattgcattaaacagttttgccaactactgtttgttaaatgccatcatcctggatccttggatttctttaataaatttgtgtcccttccttggcttttatcttctttcatccatatttcctgtattttttcacctcacgctacacctcccttcttctggtcatggtcctctgtggatatgattcctagtattaagccactcctggatcccatgcatcaaattacctttaccaatttgaaattctaaaataaatgactggcaggtttctgcttttctcagagccatgctggctggcttctcccacacatttacaaattcttaagattcatatatttatagaaaacagcttttaaagttctgtgtttggctatcttccagatatctatttgcatatttaaacccatctagctgactttgc

SEQ ID NO: 120381 - DNA, 469 bp, Homo sapiens
gcacgagaaaaaaaaaacaaaaacaaataaacaaacaaaaaacaacaacaaaaaacaccctgggtactattccatcaaatgaaggtactgtgagttatctaatcagttccctgttgaggggcattttgattgtttcatgtcctttactcttaggaacagtgatgcagtgaatatcctggtggatatttaatagacgttctctgagttgaccttgcctggatggagatgcatggataatagacgctctgtgtttctgctgcccattatactccaaacacttgcagccctgtcgtcagtgcaacctgagtcagttgttcattaatccaactatttattttagctgtacttgctgccatcatttgatttcatcaaatgttatgtaattttaatgaaagttcagatttgaagagatttgctaacattgaatcaccaaatttctgtcaaataaggcatagtagagacagctgtt

SEQ ID NO: 120382 - DNA, 794 bp, Homo sapiens
ggaatttgtgccacaacttttattctgacagaggggctattcatcctatggaattcttttaaaatcactgacctgaacaatatgcttctcagaatgttttcctgcttagcttataaagatattattatgtatctatgatataatcactagaaaatgctccctgtggggcatttgttgtccccctaattatcatagttgattgtagaattgatatacctgatatacttcaaggtacaacaggaaagcagataaaatcttttaagcaaatggcaacttctgtcttcatactgaaatctgttattatatatagtacttctaccaattaaaggatagcctataagcagaactttttagtttaaatgggcaaacattatggtaatagggttaaaataatgattcctctagttatttgtgattttgatatcaagacaaatctatttccaataataatcattagttataatctctgatacaaattactcctcagggactcagtttcctttctggaaaatggagctagaaatactttccatctttaaggactgatttgaacataaagagaggtaatgtatgtaaggagtctaacactgtgtttaactaatttctattagtgtttattttagaattcgtgcaattctgaagcccagagccataaattttattataccaatttttcttattttggctgtgatactgaagaatagtaactcaataaagttaaccaactataaggaaatcacaggcttcatctgtcacttaggtcttcatgattattcaaactatttgggaagatc

SEQ ID NO: 120383 - DNA, 410 bp, Homo sapiens
ttgcggtcttctgtgaggtgcgataggtcctgagccctctctgtctgattctgcacaatcccatggactgggctcttcactgcggattatctgacacatgctgcgggcggatttctggaggaaggtttgtccgaagagctcatcatgctgggtctggttcctgacgggatactttgatgctgaacagggctggagcacaaactgaaattcccctcgtaatcatcattttcttgcgcctgctcaccaagaggtatctccttgtagatcacagccatttgctccaaacctctttcctgaagaaaagcgtcccccaggtcctcccctgggaaaagcccttgttgtgactctagcctgttctcaaatgcaaagctctcaccaaactttgagcagagaccccaggtgatcctcta

SEQ ID NO: 120384 - DNA, 182 bp, Homo sapiens
aggtgtgagccacagtgcctggcctaaaaggaatatttcttaccattctttttccaaagtgtagattcacagtttgactagattgatttcgatgtcactgtaaggtggtagaggaagaggtacagagaaggtcccatttgtaaaccaaaaagtatctgagacaggactcaatcaatttagaa

SEQ ID NO: 120385 - DNA, 332 bp, Homo sapiens
tacaaaatagccatcattaacttaaaagaaaggtgccctacaaagaagggatcattattttttaaaaggttgctgtcctttcttgtaataaagcttggagccaggtaagtaagtggtacaagtaaagaggccgaggctgataggttagacttagataaggaggacacagagggaggcagctctatgtgacaacaagcactgaatggacaaagcatcccgggtaaatcagctggaaacccactgccaggcccagttccagtcacaggcacagtgagtgataacagctggggcagccacgtctccccaagcccggagaggcagatgcctcccca

SEQ ID NO: 120386 - DNA, 841 bp, Homo sapiens
gaacctttgaagagtctctaggttgccctggtaatgctgctagtatagtaacagaaaaaacaaaacacacagggtatctgatgccacctcgattcaagtgcaaaattaacaattctgaaaccacatggcatagttagtcgcttattccatgctcctgccctaaaaaccctggcacagatctgatagggtccttgaagagactttacagttgtctttattatcaatgttctttctttttctgctcccccaacctgggctttgccatagctcctgtggagagccatattctagagcaaggtgtctcaatcttagtaggattgacatttggggccagatcattattcgttggtgggggctgtcctgtgtgcttttaggatgtttagcaccatcactggcctctatccactagcaacatcccagcaactggtgacaaccaaatttctccagacattgcctaatgtccctaaggagtgggagtgaggggcctaatttcacctcgttgagaaccagtggtctagaataatcagtatagagtggtttctggcaggggacacagtaggcaagctctagcagcacctgtggcttttgtgagcttctgatccctatgggacatacacagtcagcatttccaaggggtcagtcttctccatagagagtgaggcttctaatgctataggcccaccctcaggaaacatatttttttgagtcttgtcaactggtttttcatttaaaattgtcagcctctcctccctggaagcatctgctgtcatcaagaaagagttgtcatttccaaaattaacgtgctgacgagtcagacctgacattcttatgcacactgtgc

SEQ ID NO: 120387 - DNA, 591 bp, Homo sapiens
gtatcgatgcacccaccttactaccagacaaccttagccaaccgtgactagtatcttaatcatttttattgccacaactaacctcctcaggcaaaaatagaaaataaaaagtaatgagcaaaaacttcatgacatatgggacaacacaaagcaatgaaatacttgaattatcagggtcccagaaggcaaagaggggagaacttttctagtctagcaagagatttagatatccagatacaggagattcagagatccctaaacagataacagtgcaaaaaggtcctctccatagcacattatagtcaaactcaaaagtcaaagacaaggagagaattctaaaaacaagagaaaagtgtctagtacctataaaggaactcccatcagaataacagcagacttctcagcagaaatgttacatgccaagagagaataggatgatgatatattcaaaatgctgacagaaaaaaaaaagccctgacagccaaagatactatatccagaaaaattatccttgctaaataaaggaaaaataaaatatttcctagacaagcaaaagctgagagaatcaccactacaccagccttacagaaa

SEQ ID NO: 120388 - DNA, 101 bp, Homo sapiens
catgctggggggtggggggtgacaatgatgaaatgcatccagaacctgtttcaaggccaggcctgtgacacagctccagactagatgcatagtgaaggctc

SEQ ID NO: 120389 - DNA, 388 bp, Homo sapiens
acagcgatcacgactcactgcaacctccacttcctgggttcaagcgattctcctgccacagcatcccgagcagctggaattacaggcgcccaccaccatgcccggctcgtttttgtattgttagtatagacaaggtttcaccatgttggccaggctggtctcgaactcctgacctgaagtaatccgcccccttcagcctcccaacgtgctgggattacatgcgtgagccaccgcccctggccaagggaattgctggatttgttttcaaaaaagaaaccctaatttgtaaaagattcctctaaacttagagaaaaaaagaagcatatagaagagggggtgtgagttctgaccttttttgaagtgcagcatgtgtgccgggaagggcccc

SEQ ID NO: 120390 - DNA, 170 bp, Homo sapiens
gaaggttgagactacattgagccacgatcacaccactgcactccagttcagcctgagcaagagaacaagatcccatctcaaaaaaaataaagacaaaggaaatgctaaatttcagaggttagtaaaaataaaaacgcatttttttcaagttaaagtcacagacatcccct

SEQ ID NO: 120391 - DNA, 637 bp, Homo sapiens
actagtaaatccaatgttaccagaaacaaaccacaaaaagaagtgtactctgggagtgctaaaagttaagagcacgttatatttagcaagtggtatagttgtctttgaaatggcctgttgattaaagttttgagctgtatttccaacctgttttatgagttgagaagcataactctcattggtaactgctcttagtaacaaaatcctaattctgctttaaatgctctttcttaattaagatatcatatttgattatgatatcttgaaaacattggttttctggataagttataaaacagaatttgtatccattcactctgccttcctgttatagaaatgctacagctcagggtaataaatgggtctcttgtcaaaatcctgtaatgttgtctcatttgctagaaattcttgtttgcccatttctttctggttgaaacttatttcttgtaaattaactcatctgtgctatccgtgcctggagaattattcctagtactttttagaaaattaataaggcagccgggcgtcgtggctcacgcctgtaatcccagcactttgggcggccgaggcgggcggatcacctgaggtcgggagttcgagaccagcctgagcaacatggagaaaccccatctttact

SEQ ID NO: 120392 - DNA, 358 bp, Homo sapiens
ttcatgcagttgagcatgctcattaaaaacagatgagagaaatttagacaactaacaaagcagatcaatcttcaactatctcacattgcaatctgggatatgcttacctttgctaaggtcacaggctcgggatcagtgggaatgtagctagcacacagaaacctattattattcattgcagtagagctgtagcactatcattaaaagtctcccataaaatatttggtactggtcaaaacagggaaaataatgatgttagaattctatatgcttacaatatataattcagaaaccaaacaaatgcataagccaatttaaaagttaaggaatctcttgggcctcccttctctaattactt

SEQ ID NO: 120393 - DNA, 798 bp, Homo sapiens
  misc_feature (798)..(798): n is a, c, g, or t
gtaagtgaatgctatggaatgaagcccttctcagcctcctgctaccacttattcccagacaaccaccttctccccgcccccatccctaggaaaagctgggaacaggtctatttgacaattttgcattaatgtaaataaatttaacataatttttaactgcgtgcaaccttcaatcctgctgcagaaaattaaatcattttgccgatgttattatgtcctaccatagttacaaccccaacagattatatattgttagggctgctctcatttgatagacaccttgggaaatagatgacttaaagggtcccattatcatgtccactccactcccaaaattaccaccactatcacctccagctttctcagcaaaagcttcatttccaagttgatgtcattctaggaccataaggaaaaatacaataaaaagcccctggaaactaggtacttcaagaagctctagcttaattttcacccccccaaaaaaaaaaaaaaaaagaaaaaaaaaaaactgttgttggggcggcccttgggcccttgggaaaggttttttagaaccttgggttggggacgcggaggcccccagttgggttatagtcaaccctgtcgccataggggtgttcccccgagggaaaacccgggggatcaatgacataggggctgggattttctccaccatataaaaaaggcgccggggggacccgcggagtgtttgtgacaaatttcccaatggagttccaagaaggacaaagggggtgtttttccacggggagtccaaaggagacctcatattcaattccn

SEQ ID NO: 120394 - DNA, 235 bp, Homo sapiens
tcgctattcatcggcacctggataccgcagctaggaataatggaataggaccgctatcccctgcctggtgtttgattgggtgttgggggtctggctgtgccaagctggatggaaccttcgaaactcagccacctacctcatttctcagaaggggagacagaagcccagacactcaaggatttggctatagtcacagagaaaggggtctccctcatggtgccgatgaatatctgta

SEQ ID NO: 120395 - DNA, 147 bp, Homo sapiens
gcatcctgctgaaggcgtcgaggactgaggtctgatctgctcctggagctcagacatcggggtgggattctctctgacctgactctgggttcctgctccgttggactcggcagggttgcacatggaagcccaaggttgagtccccct

SEQ ID NO: 120396 - DNA, 797 bp, Homo sapiens
aaaaggaggctgagtccctgataacataatggagctgctgcaccacttcttaactgtccgactccagacttctttgatttgagagactaaattgctgatttatttaagccactgttgtcaataaaaagcagttaggaatacagttcctagaaggcacattcatattttcatttcacactagaaaaatggaataaaatgtgttataagttgtttggggggggcttgctttttccccccaaatgataaaatcaacatgttctcagtatttaccagaaaactaaaggcaaagttcattgtcacaatgtgaggagccccactgagacaactatttattgacctaagttgatttttcagatctctggtgctgaacattgggaggtggggtgagagggtgaggagattgcgtatgtctacctaggaaggggactaaacaggaaggagaccagcagcccatcttatcctgggaaaggtgggtttgtatttctgcccctagcataggtaggcaggtgtgagatccaccttgaatctatgggaaagctgagcgtattccctggactgggatatggtgtagatgggtccggggccaaatcctgtgaccagaatttagcccagtggccttaagtcttggtcccaatttcccccacctaaaacaatcatgcctccagatgcttttcagactggcatgtaacactcttccaaaagatgaagattcctctcattctttaagacagggctccactgtcacctcctcctgtcccgattttcaccaggaaagtctccattctcttctctgtgcc

SEQ ID NO: 120397 - DNA, 790 bp, Homo sapiens
gatactggaattatttagatagattttccattgttgacagagtctagcttttctggaatgaactgtacatggtagtggtatattattctttcatgctaaattgtaattctggattctgtatatgcttaaattggaatggtattttatgcatccatttttatagatgagattattagcccttaacattttaaaaggtatgtggaaatcttagtattaatttttagagatagggtcttaccctgtaacctggaactcctgggctcaactgatcttcccatctcggcattccaagtagctgggattacaggtatgccctaccacacctggctggttttttaaaaaaatttttgtggagatgagtgtcttgctatattgcccaggctggtcttgagctcctgggctcaaacgattttcccacctcagcttcccaaagtgctggcattacaggtgttgtataatacatttcttttaagaggtgattttatcccattttcacattctttacttggggaagaaaaccacatggcaaacatattttataaacccattgtcttccagacttgtttcttgtcctctatgttctataagctattgttcttgagtcttgccagtgtataaggtgacaggttttgtttccatggtgctatgttgtaagttcagtgtttatgtttttctgtgcatatcacataaagatccttttttaaaaaaagtttagtgtttcattacttgcatttttctttagatgtggcgctgcaaagtgagtcagtaacctttgttgagtttcgaaaaa

SEQ ID NO: 120398 - DNA, 421 bp, Homo sapiens
catgacagccacatttctcctttaggtttacttgatattaatgtgaaggtattctataataatcatcttaataatgattttgaaagtttgtatggtttgtataaaagtttgtatagtggctagtttatgaaaccctttcactgtattataccatttgaagaatgccatagctttataaaataggtagagcagttatattcacgtgttgtgcatgaggaaactgtttatgagtagtgtcttgcctagaaagtggtaccatataatcaaactcacattttcggataatgctgctttttttaaaaaaaacagccttattatagtataattcacataacatgcaatttacctatttaaggtgtatagttcagtggcttttaaagtgtattcacagtggtttttgcaaccatcgtgtattagtcta

SEQ ID NO: 120399 - DNA, 422 bp, Homo sapiens
gatgatgataacagcggtgatgtggttatgatgacaggtggtgatggcaatgatgatggtgataatagtgatgatggtgacgatgatgatggtaatgatggcgatggtgatgatgtggtaatcatggtaatagtggtgggcatgatggtgatggtggtggtgttagtgataatggtgatatggtgattatgatcatggtgatggtagtgacaatggtgataatgatggtgatggtaatggtggtggtgatgttggtgataatgatagtgatggtggtggtgacagggcaagtattgatgatagtgatggtggtaatgctggtggtagcaggaaacacttatcttcatagaaatgttattgttgaatctgctgtacgataagcagttattttcagagaacaagcatcaaggagaacagagagc

SEQ ID NO: 120400 - DNA, 364 bp, Homo sapiens
  misc_feature (10)..(10): n is a, c, g, or t
tatcatcggnacagactgccctcgctatcatcggcaccgatggcgatggtgatgatgtggtaatcatggtaatagtggtgggcatgatggtgatggtggtggtgttagtgataatggtgatatggtgattatgatcatggtgatggtagtgacaatggtgataatgatggtgatggtaatggtggtggtgatgttggtgataatgatagtgatggtggtggtgacagggcaagtattgatgatagtgatggtggtaatgctggtggtagcaggaaacacttatcttcatagaaatgttattgttgaatctgctgtacgataagcagttattttcagagaacaagcatcaaggagaacagagagc

SEQ ID NO: 120401 - DNA, 738 bp, Homo sapiens
atacattttgtttttattagttaattaatcagacaaaaactattgtggaggaaattcacttaagggaaatgttgcaaaaaagaagggtattatttcttctaactgataaacaccttaaattggcttctaagttagaaaacaatttgatacatatgaaaaatattttttctgcttctcctttcatttaatacttttttttttaacacaccctaaccattaacagatttaggtaattcagattatttaaaactactcacaagttattttttttcttttaaaaatagagcttaatgttatggagccttattttcaaagaaattatttattaaggaatattttcattagaacacacacatatgaaagtgccttttattttatgaagaaaatacttctgtgtatcccagaggtctattttgttaaaaacatcatctgattagtttgaagtaacaaaaaggatgtctatatcaatttgtagggtttgtgaaaatgaatgataaaatgagtttttaattcataagacttcaagcaagcaaattgataacttgtttttggtctgaggcaaactggacaaaaaaaagaaaacttgtaacagatgaacataatggtattcctacttacagttaaaaatatattaatgacatctactagaaataggacatgtattatgcgtaaatcggtaattcaaactatatatttgaagtatatcctgtcaaaaaggactttacttgtataaaaatg

SEQ ID NO: 120402 - DNA, 293 bp, Homo sapiens
tggaaggataagtaagacaggaagagaagaagggtggagatgctgggagtttggagagagtttagtgtgaatgtcacttggggtttcagtttccagttgggaattcggtgggcaagccaaggctggcaaaccaggccggggctggctcatgaaaggccttggatgccaggttaagaacagcagattaggtactggctttagttcacatttggtttctgctgttattgctgtatctgagcttgaatgctgttagcatctggtttagccacatgtcctcaaagagcgtgttttcc

SEQ ID NO: 120403 - DNA, 734 bp, Homo sapiens
ggagttcatgctaacatagtattcaaaaaatgtttgctattattatcataccaaataatcatttggtaaattatttttcttaactagggtgaccatatgtcggtgtttgcctgggacagtcctagttcacaccgtttgtaccattgtatttattattagtgccctctttcattcacaaaagtgtcatgagttggaaggaagataaatcatatggtcaccctacccttaatttttttatctttcatattttcccccttgaatatttactaaaatagtaaatacttgtaatttggcttctgaatggtgaagtcttattttttattaataatatcagggttttacaaaaaaaaatacaagttagcaccatatgatggagacagtagcaacttttaaaaaaaggaaatgcataatttaaaccatgtcactatactttttccttttattcaactcactgtgtcactgggctactgacataatttcatagttcagtttaaggaggacatggactaacaagtagatgtgggtaaaattctcttttttttagcatatagaatttatttttaatgattacatgctgttttcatttgatcctacttctgtcttgtttaaatacttactttgtcacaaattagaaatgtgaccttgagcaagttctttaactttctcccaagttttttatctgtaacatagaggtagagctgtttggggctgttatgaggattatggaaaaaaga

SEQ ID NO: 120404 - DNA, 138 bp, Homo sapiens
tggatgcatggattgatgcacggatggatggatggatggatggatggataattggatggatggataattggatggatgaatggacaggtggatgcatggatggatggatggatggacaggtggatgcatgggttgatg

SEQ ID NO: 120405 - DNA, 224 bp, Homo sapiens
  misc_feature (19)..(19): n is a, c, g, or t
  misc_feature (59)..(59): n is a, c, g, or t
tgctggaaaagctgtttgntttttcattaggaattcatgtgagcttcctgaatttcaangaagatacatctgctctttaaatttcagtgctgtgtcaacacttactaggaaattcataaattctggtcaaaaaccatcttttgatctggtttgatttacagtttctaaaacagaatagaaaagcctaaatccccattacactcacatgtacagagatgtatgaa

SEQ ID NO: 120406 - DNA, 461 bp, Homo sapiens
attcctttctcattctccattcatctcatctccctccctcatcaaaagcctcccatcattctgcaagacaatatttcaagtaaccctcattagggaaggctcccctcttccccagtcacaaattcccgttcctcttgccttcgcagttctttactttcaattctaccatgtaaatttgtaatctgttttggattatgctgtttgcatgctgttttctctcccacagagtctaaactgccagaaggtaagaatatcctgttttcatgcctagtctctacagcacctagcacaggattctacatagaggtgctcaatcagtatcccctgaaatcaaacttgtagaatggagaaaaattagctcgagcttaaaaggcagatctatcaactaatgaatgggttaacaaaatgtggtatatctatataatgtaataccatatagcaataagaatactgatacatac

SEQ ID NO: 120407 - DNA, 983 bp, Homo sapiens
cgccagaaagctcagtctcctgctcaaaacaggagcgcagcagccggagggagtggggacaagctcgctgaacactgggcgtctcgacagggaccagagcctgcaggactgttccgagacgctgcggtggcggcggcgccggaggacgcggaggactccctggccacccgccctccgtgcgctctgccaccgggcgctcagcagagaccccgggctgcggctgcacttgctgagtgcctctccccgccgccgcagcccagaggcgcccagcacctggagctcactggagctgagggtccgagctgagcgggctgttgtaaagccgaaaggcgagtcagtgactgggacctctgtcctggtggcgacggagagaaacagtgagcccgaggggcgcgggcacagaactgtccagctccgagaactggggtccgccagccggcggggaaagcagctgagcgcggaggcgagtgagcggacgcgtcccggggtctttgcagtccccgccggccccaaggcaccgactctcggtcagttgggcgcggcagggcgggaggggcgcgccatggaggcgccgggtcgcgccagtatgctccaggccaagtgaagcggtccggctggggtcggcgggacccgcgggccatgtacggcgacatattcaacgccacgggcggccccgaggcggcggtaggcagcgcgctggccccaggagccacggtcaaggcagaaggcgctttgccgctggagctggccactgcgcgcggtatgagggacggcgcggccacaaagcccgacctgcccacctaccttgctgctcttcttcctgctgctgctctcgggtggcgctcgtcgtcctcttcatcggttgccagctgcgccattcggccttcgccgcgctgcccacgaccgctcgctgcgcgacgcccgcgcgcctggaagacgcggccggtgttcttgggactgagccacggccgccggggccccgt

SEQ ID NO: 120408 - DNA, 423 bp, Homo sapiens
gagaggacccaaaagccttcttctaggggagcacgcctggcagctctgagatatgaaagagagaacccagcaaaaacaggatgtcactgggtcctcgagtctggggatcagggtaacccaggctcagtgaatttttctgtctctgagcccctcagatgaattagcgagttcttcagggagggtctttttctccatggctggtactgtctgactgggtggagacttatgtcccaggaaaaccgaaataactgcttttcttgcaaatgctttcacatagctctttatctggtctgtggtttcagggaagggcccttctgcagtcaggaattgtccccagcctttatttagagggctaagctagggaaatggttctgaatgtaacatgtttctaactgtagtaatctatgcccctccccccccacc

SEQ ID NO: 120409 - DNA, 362 bp, Homo sapiens
tgcagttggactgttatttagcatctaggcccagctgctttaagaaagaaaccccgggcacagtaacttcatcgagatagatgttcatgtctcccttcagaacagccccgaggtatgcagtcctggcctggtggggctcgctctgccgtttcaggggagccacctgccacacccactcggcagcctatagtcacatggctacaagtagctgtgggaatactgcgagtgtagtttttggcagggtgaccacgtacccagctatgactgtggataaagagaattgccatagttgttcagagtctctgcaacttgtgttctgtgcaccccgaggtcccgccttcaccccatcagcagtgactggg

SEQ ID NO: 120410 - DNA, 688 bp, Homo sapiens
tgcaggggttccgaggcggacctggggagcagaaacccctgtttagggtgaaccgtggcgggcgccgatggcctcttggaagaggacagactagcagctgcgagggagatgggactgggtttcacccctgaaagggcccctggagacagcggggaaactgacagggagatcatgatgtcgccattttgatggggtccccagaggagagatgtcctccccaacggctcctggacaggactggggaaagagttcaggagggctgctgaacgccggagccttacaactgttaaactcaggcagagctcgggaaatgctgcccggatgggtgagtccttttaacacctcttgggttgatttttctcacaggttttcggggtttgcagagctctgagactgtgaccacagggtgagacctcaagctgcccagtactgtggccccatttcagaggccttgggcctgggccagagatggacgctggggctgccttttactccaagtttttttcttcattggtcattggtcattgggctccaagaaaagcactttttcaggaatcaaagaagcagtgatggaacgaaaagcagagaaagctgatgagccctgaatggaggtgaaacttccaggaaatatcacttgcctcttgattaggggaaatcacttttgaatgaccccgagttttgtgcccca

SEQ ID NO: 120411 - DNA, 911 bp, Homo sapiens
agtggtggtgggcacctgtaatcccaactacttgggaggctgaggcaggagaatctcttgaacctgggaggcagaggttgcagtgagccgagatcacgccactacactccagcctgggcgacagagtgagagtccatctcaattaaaaaaaaaaaaaaaaagagtcagctgcaaaacaatcttacacaaggacatgcacaccaacttagttaccaaataagcttcataaaactgtttattttattgttttggtcaaatgcctgaaatttttttgttaaaatgggccattttctgatttgcctgaagccctgtgacaatttgggaaaagttgacgaggctaataatcaactatcagcaggaggaagaagaactcaaaatagcaaaattcctaagggaagcaggacagacagagtctagaacttccttccactctgagaatcctagcacacctcagaaaaaaaggtatattggaaacactggagaaggagatataaacaacagtaaccaacataaattcaccaggtaaggtttcagtatctactagggaaggtggttaaaagcatatgctgggagtcacattgcctggctatgctgtttactaataataccttgggcaagttacttaacctctctaagcctcaggttcctcatctataaaatgaataaaacaacagtacttacctcattaatattattgtgaggattaatcgatatgtcttcagtgcctagaacatgcttagaacatattaaatgtgcaacacaggtatctattggtagaaatttgaccccacaattctacctctaggaatttgtcctacaaaaataatcaggcaagtatgtaaagatgtatgaataatatgactcattaaagcatcatttgtaaagaaaaaaactgggaacatcttcagtgt

SEQ ID NO: 120412 - DNA, 292 bp, Homo sapiens
tgtctttcatctcgcacagccttcactccaacactcacacatcttttcagaacaccctctcccccacctttggctctgctcatctgcgtggttgcagcctgttatgtaactgccaccttatcaaagcaccaaaatgtggaattgctgtatatttcttaaattatgcaaggcttgaccttattgctgggaaatacctagcatttttaaattgtcttcagaggtccaggcagcatttggaggagctattactatatcgcttgtcattcttcggatctatgctcatgcatgcaac

SEQ ID NO: 120413 - DNA, 1762 bp, Homo sapiens
  misc_feature (463)..(463): n is a, c, g, or t
ttaaaaaagcctcgttagaatttgctattcgaaaagaccttaaaaaccctcacagagttctaaacatcccattcattgaaaatacttttcagttaagtagatttgttttgtgcacttcacaacttttaggtgacatgaatttgaagcgtagcaaaagaaatgtataaagatagccttttctggtcattaccatgtctactcaagtttctgttttctaggtacactctagcattgtaactttttccccctgagaagtaattttaagatctatcagtctcaatttaaatgatctgttaatcagccagagttttagtttcataatatcgttccattgcctgacaaagatatacacactgaagtgcctttagcagacctgggaccgtcaagaatcttgttaccctgattattgcaagatgacatatttcttaagccatttataatctcatattcgggttgaatctgnatttacaaataaaagggttaaattgaggcagtttcaagcagcatttaggaaaatgaagtggcttcaaattttagtgtttctggttacattattttgtttgaattatacaattacataattttctgtaaccaaaatggtaattttgatggattttttaaatgccaaaatccaatcatcaaggccaaagaaatgcatgattactctgatttcttatgcaccattcagtcaagacttaactcagaggcagttgattcagtgcttacatctagacaaagctttaatgagtgcagacccagcctaacagtatttcatctaatttctttgatggcttaagccaataagcactgaggtagcttttctcagaaggaaacagattttattttccaggggctaattaatatgcaccacctaagtccccaaaggatcacacaggtgcctgtatcatgccatatgtcatgtgctatattcctgcaagctcaagagattaatatacaatcattattatgaattattatgttgcattgaagttaatgtcggtcttttgttctaattaaagtacaaacgtggcatctgaatagaagcttagctagagaagtggagttagagtccctattttaatgaactacatatatttttcaatcaaaatgtgtaattatttaattatctagcctgctcagtaatcataactctccaacttcttcaaagggcctttattcaatatgttaccactcatatggtcattacttggtaagtgttttatattttgaatttcttagatgctttcagtgtatgtgctagtgttttattaatattaaaaatttttgtttacttatatatcaagctgctgcaaatggactaccttattttaaaagttagaataaaatgctattactctctaaacagaactttagcatatctgtttgataagaaatacacaaacaaaatatttttctatgctattgcaaattgtccgcaggaagcaaaatgccagatggttaagtgtagctcacataattatattccaaaggtgttataaacaattctatttagcatctgagataggtctatattaggcaatttcatgtttacatttctaacagaaaggtttaatggcaaatattccttatattctaacttgctacttggagaatatggatattctgaaaagaaaaaccctttctagaacactgtgcaggactaatttttttttaatagacatccagaaaatagcctgggcaacaaagtgagaccctgtctctctaaaaaaaaaaagtcgacgcggccgcgaatttagtagta

SEQ ID NO: 120414 - DNA, 394 bp, Homo sapiens
gcacccagcatgattaggcagttatgatgggtatggggtctggtaacatattgtccagatgcagtgatctgtaaagtttcagttccttgatactacctgggaggcctgatggttggtttcctgagaaaggaactaatcaatagatcggagcaagccaggcctggcttgctcaggtctagtaccagcagtaccaggacgccaaggccgaggagggcgagttcgaggaggaggcggaggaggaggtggactaggctgctcccatcgcttcccaactgtaccctcgaggcttactgaactttgatccgctaagacccccatctctgaaccctagagccccgctttccctccaaggactgaatcccccctgaacctcacaataccttaggagctcgct

SEQ ID NO: 120415 - DNA, 398 bp, Homo sapiens
ttgcagcatgataaggccaggtaggcagagtgcaggagaaggaggactgctatgggatgggagtcagcgagggcttcctggaggaggaggcctggcacatcgtggcaggtaatgcaggggcaagaatagcaaaagccaaggccctggggtggggaggagcctggtatgttcaaggggcagaagggaggctgaagcagagtgatcaagcggacagggcaggcagagcctcaaatcccagactgaggaacatggtgaagaggacacttcgggggtccacacataaagacggagacagagactcagggcaggaaagtcacatgccctgggacaccccagtaaacagagccaaattcaaacctcagcctgtctgcagctgacataggatgaagttgaaggac

SEQ ID NO: 120416 - DNA, 385 bp, Homo sapiens
atggttcattaactcgcttgtttactgtggttacagtgaaagcaaggtcttaggtcagctcctcgtatcgaccagcacattcctttctcttctgtggccatagaatattccatgcagttttgactggctctctcaaaaaaaagtttgccattggtcacaccatggcctgagagaggaaattacatgaccattacaacaacaaaaacaatgcagatcccatttcttgctcagtgatggccccagtgcattcttctcatacatgaaacactgcatgttgcttataaatcaacctagaaaaatgtatgctcgagccctgagattactctgcctgggtgtgaatcccgccccacctcttactagctattgaaccatggcaagttattca

SEQ ID NO: 120417 - DNA, 234 bp, Homo sapiens
gaagtgcaaatccatctgattagctgaagcaccctagggtgtgaacgccggtgacatcagagaccctgtcacctgaggtcccccaccaaccagacacaatgaagggaagaggaaggggaagggggtggcaacagaaggcaaggctagccagaggctgaccactcgctcagctgggcttccccatcctgagagggcctacccaagtccagcttctcagaaaggcgcaccctttct

SEQ ID NO: 120418 - DNA, 367 bp, Homo sapiens
tgggaaccacaagagtgggaaagccagaatgagcagaagcctgtcctccatgagaacacagctgtaaagccccccttggtgctctagcgtcactcccaccctaccctcagatctcctggtcactagactgttcttctggatcacttctttctccagtgaggccagtacctaaagaattgttctgaatgggctgagacagcgaacccacggattcagggacctaaattttctacctgtgaacttccactatttggaaggcctgcagatgaagcctgcctgttaggtgacagtagaggtagagaattctaaacaactgccatggctttgagcaaatcagaggtagcagtgactcctctctcatcccatg

SEQ ID NO: 120419 - DNA, 331 bp, Homo sapiens
cgtctcttgaggttccccttacacccacgatcaccaccgaggcctcgaggcctattagcacacaccctggtgcctctaccactactatcccccattagcacacacactgggcctctctccagccataacccctattagcttgctttggaacttcctcaacaccctacccctgtgatacacccacgggtccctcacccgcgctgctcgcccacctcccgctcccgatccttagctgaactctggccaagtgcttgggctgttttgccttcttcaaccatggtctcaattctggacttggacacaaggccccaccctgtgccacctgctctca

SEQ ID NO: 120420 - DNA, 215 bp, Homo sapiens
gatgtgcaggtttgttacataggtaaacgtgtgcttctatgaagtagttctattattatcttttattattatttttgtttcacagatgagggaagtgaggcttagaaagattaagtaacttgaccaaggtcacataactagtaagtagtagagttgatttcaagcacagactttctgcgtttttatatgactctctcattttgtagttctaaggc

SEQ ID NO: 120421 - DNA, 526 bp, Homo sapiens
ttcggcacgagcggcacaaggaacatatggaaattcagcttgcatgtggtagatacctagtaaaatctgataagttaattttgttagtaccaaattcattttaacactaaattaatttttcctgatgttgctctgattctaggaatcttgaccaccagaaccttgagtttgggagatgggaagattcttagtttgtctttgaaatatttgatcataaaaaacacattattggccaggcatggtggctcaagcctgtaatcccagcactttgggtgaccaaggcaggcagattgctgagctcaggagttcaagaccagcctgggcaacatggcaaaaccctgtctctacatacagaaattagccagatgtggtggtgcgcgcctgtggtcctagctacttggggggctgaggctggaggattgcttgagcccgggaggtcgaggctgcagtgaaccatgttcatgccactgcattccagcttgggtgacagagcaagactccttctctaattaaaaaaaaaaaaaag

SEQ ID NO: 120422 - DNA, 427 bp, Homo sapiens
tgtaattatccaagggaatacatcacctagattcattttgcaggatttcattgtaagttaatcaatgaaagagaatatgttacaatttgcaactcctttgcgagaggagtgcagcctgaggctgtaggttttagcttgcctgatattaatgacattttttattttattcagcttccctttacacacattgtaattagtggtattacccttcctttagcagtaattctttccacattcctatgcagaatttgatgagtccagtgataaacaactgacagcacttagtgggaagagccctgtgcagctgccaactaaatgctcctgtgatcacaggcaactctcagtctttttgaatctcagtgtcctgttagcaaatggggaaaatatgatttctttgtttgtagtcaaggttttcagttgcaaataa

SEQ ID NO: 120423 - DNA, 171 bp, Homo sapiens
aaagttacctgtgtttgcagaataatggactcctaaaatgtttgcaccctagctccagaacctgtgcatttacttttcttggtaaaaacacagtgcaggggtgataaaattaaaatcttaagatgtagatgttattctagattatctgggtgggcccattgtaatcagaag

SEQ ID NO: 120424 - DNA, 460 bp, Homo sapiens
ctacagcgcactctggtatggattaagtagtactttacgttatcaactcatttaatttttcctcccattttacagaggcataaactgaatcacagagaggttaagtcatttctctaaggttataattgttagcgaatagcggaaccaggatttgaacccaagtagtctagctccagtgattgcactcttactaatttaattataccacttcaaaagagcatattatatgaacatagatattctgaacattataagcacacaagtttatacccaaaagattaaagtaattattttagggatcttgagctccgatgtcagcaagctaccaggacatcatgaggctttctgaatgagttccacttctcccaatttccagttttttgatcttacactgagcagataaagtctcatctataaatctgggataaataattcttctccttctctttacatatggtta

SEQ ID NO: 120425 - DNA, 373 bp, Homo sapiens
actgtcatgctctaccactgagtgtgtgactcagttctggccaatgagatgtgagcagcgtgggtcttctaggaagtctccttccagggaattaggcacacctcctttctcccttccacattccttgctgcttggaatgtggatgtgatggctggagctcttgcagccatcttagactatgaggttgagagccacaccctgggagtggtgaattagttggaaggaagcttggttcctgttgacttcttggtgccttagactgcctatccctggacttcttttacatgataggaaatttacgtggggtcaaatttcatcctgactgatacatttggcaaagactcttgtctctcagaacgtgaggatttgggtg

SEQ ID NO: 120426 - DNA, 711 bp, Homo sapiens
tgttggagttgtttatgaaattaaagggcttttgggcagagactgtaaggtttagaatcatattgtctgcaaacagggacagtttttcttcctctctttatatttggatgccttttatttctcttccctgatttatctggcaaggacttccagtactatgttgaataggagtagtgagagagggcatccttatcttgctctggttttcaaggggaatgcttccagattttgcccattcagtatgatgttgactgtgggttttgcatacatggctcttattattttgaagtaagttctatcaatgcctgatatgttgacgatttttaacatgaaaggatgttgaatttcattgaaagccttttctgaatctattgagatgatcctgtggttttcatttttagttcttgttatgtgttgaatcacatttattgatttgcgtatgttgaatctatcttgcttctcaggtataaagcctacctcattatgagggattagctttttgatgtgttcctgaatttggtttccaagtattttgttgtgaatttttgcatctatgctcatcaaatatattgggctaaagtttttgttgttgttgctgttgtttttgtttttctgccagattttcaaatcatgatgacaccagtattatagaaggagtttgggagttctttctcctcagagtttccataggaatggtatcagcttttttat

SEQ ID NO: 120427 - DNA, 145 bp, Homo sapiens
caacagtacaagcatggggtagttccagtggttccaggaacaaaacgaattccttgaagaggttgtgactcatctgcagtcctctgtttcctttccttagatgtaagcagactgagctgcctgggtttgagtcctacctctggtg

SEQ ID NO: 120428 - DNA, 444 bp, Homo sapiens
aagctccatggtgaaccctatctgcagagagaatatgttcttcaaaaggaacctagaaatcattgatttagaactatcaggagtcaaggtgatatatattttttctttgttttctttttttaactcttaagttcaggggtacaagtgcaggtttgttacataggtaaacttgtgtcatgggggtttgttgtacagattatttcatcacccaggtattaagcccagtacccattagttgtttttcctgatcctctcccttctcccaccctccaccctctgataggccccagtgtgtgtcattcccctctatgtgttcaggtgttcttaggatacataattttgcctatttacactctttccgagtctttcacattctctgttagactgaaggacttttaggacagcatatctcttaatgccttctacattgagtcaagagcagta

SEQ ID NO: 120429 - DNA, 406 bp, Homo sapiens
tttcaaaactcctgagatgattctactaagcagcaaaggctgagaatgatggataggggtcctttgcagccatgggaagttaagattttatttcaagtgtcatgaaaaccattggggagttttaagcagtagaggacataattagggggtagtttctggctgctggttgtagaatggattttgtaagagattaagaatgagtgaggagaacagtcagaaaatgtcataattgtccaggttaaaagtgatgttggcttattttatgtgatagtgatggggatgatgagaaatgagaaacaggatggtagatgggattttgggggtagaacagaaaggatttgctgatggatgggaggatatgagcagtgagagagtgagtgaattcaaagatggctccaaggtaacc

SEQ ID NO: 120430 - DNA, 547 bp, Homo sapiens
taagggagggtgacagctgggcatggttgctcatgcctgtaatcccagaactttgggaggcagaggcaggaggatagtttgagcccaggaattcaagaccggcctgggcaacatagtgagactctgtctcaacaaaaaataaaaaattagctgggcatggtggcatgtgcttgcaggccgagctacttgggaggctgaggcaggaggatcatttgagtctgggaggccaatgctgcagtgagccaagatagcaccactgcactcctccttgggtgacacagcaaaaccctgtctcaaaaacaatcaaacaaacacacaacaaaaaataaatgaataattaaaaaaatttaaaaaatgttagaaaggaagggtgaggatgtgagatggcttgttaccagacatggtctttttagaaaagtgtgaacaggccaggcatggtggctcacacctctaattctagcactttgggaggccgagatgggtggatcacgaggtcaggagttcgagaccagcctggccaatatggtgaaaccccgcttctactaaa

SEQ ID NO: 120431 - DNA, 641 bp, Homo sapiens
gggagactggctgagtcttctggtcttcatctttctcccatgctggatgcttcctgcccttgaacattggactgcaagttctttagcttttggacgtttggacttacaccagtggtttgccaggggctctcagaccttctgccacagactgaaggctgcactttcagcttccctacttttgaggtttggaactcggactggctttcttgctccgcagcttgcaggtggcctgttatgggactttaccttgtggatcatggtgatcatggaagcaaatgtcagaagagcaaagcaacgtagaacgctcagccacctcaggaagaaccttgaaaagtcacctggatatatttttgtgaacaagtggtgtcccaggacagattttcagctgaattctacaagaggtgacaaagtagggctggtatcgttgatactgaaactattccaaaaaattgaaaaggaggcactcctgcctaactcattctatgaagccagcatcatcctgataccaaaacctgaccaaggtacaacaaaaaaagaaaacttcaagccaatatctttgatgtacataggtacaaaaatcctcaataaaatactggcaaactaaatccagcagcacatcaaaaagcttattcacctcaatc

SEQ ID NO: 120432 - DNA, 709 bp, Homo sapiens
agaggctggccctcctgatctgcacccaggcggcttctacaccaccctgcagcaggcctggccaccggcctcagcgcttctgggagaaggtcagccaggtggaagatggagagggcttctggactgagccctggaggggggctaggggccaccagcaggcagatgagccctgggacccagctggccaacccacctgaccacggtgacaaggactgcttgggaaggataagcccaggttcgggaaagcaaattcaggctgcaggacagctgcccgggccccccacaagcctggcaccagcccagggaagactgaggagcctcactccatggggactgcaaacacctgaacacagcgaacctgaaggtatagggcatcttcaggctgctactgaggcggtcctgccgcactcaacccagaacctcatcactaaaaggaacctcatggttcaggctagagtgcagtggcgcgatctcggctcactgaaacctccgcctcccaggttcaagcaattctcctgcttcagcctcccaagtagctaggagtacaggtaagtgccaccacgcctggctattttttttttttttttaatttttatttttagtagagatggggtttcaccatgttggccaggctgatctcgaactcctgacctcaggtgatccacctgccttggcctcccaaaatgctgggattataagcgtgagccac

SEQ ID NO: 120433 - DNA, 348 bp, Homo sapiens
gtctcttccaagattattgcgtcagcaaaggaagataggctagtctgctcaatacacatcacaacattatagagcttgtcaaaaacaaacaaacaaacaaaacctttctactctgttccttgcaatgatcttccatatttccccaaaaaacctttccccccatcatctccaaaacaagaaacttccagtcacaaaagtctaaattcaaaaggataaagtatttttaataatagagtaaaaaaacgggtcaggagtggtggctcatggctgtaatcccagcactttgggaggccaaggcgggcagatcacaaggtcaagagtttgagaccagcctggccaatatggtga

SEQ ID NO: 120434 - DNA, 514 bp, Homo sapiens
caaaatacaggcattatgcagttgagttgtgttaagtgtggactgtaaaacaggatagtatttgttataaaatatgtttttgtatgtgtttaatatatagcttcaaaaggacatgtatgaagaaagatgtctcagcacataggtagttataaaccaagggtttgagagactgactttagaatctagaatgagtaagaaagtgatggatctgtacattcatttgtattgaagtttgattttgctttcagtttcgttaattaagccccgggaatcagggacctttcctggcaccctctacagtgttagtggcctttgtggtaaaagaagttatctcagatactcatttcatgcaattacaggcaaactggaaggcaccttaatggtatgcaagatgtgaaatgaattactatgttgcattccactctgcccccactcatgtacaattatactttgtttaaaagtgcatagtttcagtggtatttattagctagcaaataaaactttaaataaataa

SEQ ID NO: 120435 - DNA, 143 bp, Homo sapiens
gacagtgcaagacttggctctttaatggctttcaaataatgagtttgtttcctagcatcctgagaggtttttttttaaaattgatttttaaaaaagtatcattatggggccgagcttggtgatttacacctgtaatctcagca

SEQ ID NO: 120436 - DNA, 591 bp, Homo sapiens
aggatgggtttactggggcctaacccattgtaagttgaggggcatctctgttactaagtgtaaaatgttatgactgattcttcttgattgttctccatctctcaattggaaagtatatgctgtttattattttagactgttactagaaacttgatttgtaagcatcctgagtatgttagaaatcatttccatatattctttgattacctttatatagtagttatatttatgtgaggcattgtggcatttagaaggcaaattacatagtattttttacatagcgtaaattctgagtaatttacactactgacactctgttgtaggttgcacaactatgtttgctttatgagtccacctttatgagtggatagaattgtttcccacataatccacctttatgagtggatagaatagtttcccatgaaaacattttaatatgttttttatgttttctaaatataaaatcataattctgtaggatttttataactcatagtttaaaaaagcagctcatcaaaattgtgctgctttataaataagattatctgattaattgtaggtacgtggattctgtttgaaggtaacatttgt

SEQ ID NO: 120437 - DNA, 333 bp, Homo sapiens
ccttgctgtttaaacaaacaaaccaggccaggacacggtggctcatacctgtagccccagctacttggggggttgaagtgggaagatcgcttgagcctgggaggttgaggctgcagtgagctgtgactgcaccactgcactgcagcctgggtgactgagtaagaccctgtctcagaaagaaaaaaaaaaaaaaaaaaaaaaaacccggtggggggggggaaaccagggggggggcttcaatttttgaccccagtgctttttttgcccaaagggggggggcttttctacttttaaaaaatttcccattaactctttccttgccttgaggggggt

SEQ ID NO: 120438 - DNA, 474 bp, Homo sapiens
accaaactcagaggtctatacagagtaaaatttctttcagataaaaatctagaaatggtaaaactcaagtggcaaaatgcaaatgagtgatcctcagatctgggcctaggaggaaggggcggactgcaaagggcagaagagtacatagggtgaggagaaccttctctatcaggattgtggtagtggttacatgctgtttatatttgtcagcactcatcaaattatacactggaaattggggatcatcctatttgtattatactgcactaaatttgtttaaggaaaataataatacacaccaaaaatattcacggctcaagaagtaatatacttcctgccgggtgcagtggctcaggcctgtaatcccagcactttgggaggccgaggcaggtagatcacctgagatcaggagttcaagactagcttggccaacatggcgaaaccccgtccctactaaaaaggcaaaaattagct

SEQ ID NO: 120439 - DNA, 356 bp, Homo sapiens
gatgggaccttagctccttctttgcttgtgtctggcagcagcaaaggatgaatagaggaaagccaggcagcaggtccactgctcacaggaatcctggacaaccccatgtaaatcctcgagtgtgattcaggcatttctcctggtgtggggagaatctacggagaagggcaggggatgcctggcattgttttcattttcaaatgtgacagagaatcccgtggaggcaggagatggacaggtgctgcctgtccatgatttcagggctgggtggaggccgggcaacacgtcaacattcttttctgttcttgggcattaattattgctgtctttttttaaaaaaaaaaagtttaaataaa

SEQ ID NO: 120440 - DNA, 371 bp, Homo sapiens
cttgaactactgacctcaggtgatacacccatctcagcctcccgaagtgctgggattacagatgtgagccacgacacccggcctggtcattctttttacttttctagcttggtgatttccctcttctgtaaagcgagggagatagaatcaatcactaaggtaccttttttctagaatcctatgcatctgtgctttttgaataaaagcagaggatcatatttccctggccatttcttctgaaacagccactataatatttaagtttgtaggctcagtctcagaatacaccgttaaggctgaaataaagacctttttttttttttttcgaaaagtcttttaatacatgaaacacctactaaaacaaatgaatt

SEQ ID NO: 120441 - DNA, 228 bp, Homo sapiens
tgctgggccagcccaggagatttcattcctttcctattattgtccaatttttcctctgcctagatagccaataaaatctacatcacaaagtggttctgccctgtgtaactggcttttttttgaaggagttttgttcttgttgcctgggctggagtgcagtggcaggatctcggctcactgcaacctccatctcctgggttcaagctattctcctgcctcagcctcacg

SEQ ID NO: 120442 - DNA, 341 bp, Homo sapiens
aagagaaaatggacacctttgtctatgactggtgggcaggacaacagacaaccttggtagtgggaattcatcaggaccgcctgcacttccccccattgggtttaacagccttataaagatataatccacataccaacaagtcacccacttacaatgtacaattcaacggcttctcgtatattcacagttgttcaaccatcaccacaaacaattttagcacatttttatcaccccaatcttcccattccccaagacccaggaaaccactcatctattttctgtctatgtatttgcttattctggacatttcctatgagtgaaatcacctagtgtgtggcctg

SEQ ID NO: 120443 - DNA, 633 bp, Homo sapiens
tgtatcataaacaagagaatgtaatacatatatgtattttttaaagaataagtaaacaaaggtgtatacatgtggatattcacctgtcaagcttgagtaacaaatatcactggcatgttaaaagctccctgtgtgctccttcctggctgaaatctctctcccccacatttgtgttaaccattaccttgcttttctttatactttctccacttcctgtataggttcctaagcaatatatggttctgaaaaacagagtagcaagcccaagccttgttatgtggggaaagggtaatgttgctatcttagataaaacctttcagaagataaactatactgtctctgggtcccaacctggttttaggttcccttctggggaagtcaaagggcaaggttataaacgagccctgtgacttctgccaggctatgctttaggctagttattatttatttatttatttttgagatggaatcttgctgtgttgcccaggccggagtgcagtggtgcgatgttggctcactgcaacctctgtctcccgagttcaagcgattttcttgcttcagcctccccaagtagcagggattacaggtgtgtgccaccacacccagctaatttttttttaatttttagtagag

SEQ ID NO: 120444 - DNA, 577 bp, Homo sapiens
agaatgctagtaggatgtgcaagccacactgagcaggtttcctttctgctattttattttttagggctctacaattgggctgacaaaataattttagactacgtaagaactcaagaaaacaaatgactttcatggcttgaagctcctgcgtagacccaaagagctttcaactgattcctacactttgacaactatgcctgcactctagcgtagggatcctacaaactaatgtctggcatgttggaaaaagtaactggacagtgatgtaacctcatctcaaaccagaaacctgcatgcaaaaacctcacagaggggagatggccaactcttcatttagtgatgccttcagacagacctgcatgggatatctctgattgttctctcagggattctagtcaatacattaggaaactttaaaattactttagaagtggcaattactgaagcatcattaaaaatgcattgagccacatgtgtaagaaaaactgcacccgctggcctactgctattctaaatggctttgttactcatacttttggggtacaaccaggctgacgctgcctgaaagagcactgca

SEQ ID NO: 120445 - DNA, 884 bp, Homo sapiens
tacatgaagactaatgttttaatgaatgataagatagttagggctcggcatggtggtggcccatgcctgtaatcccagcactttgggaggctgaggcaatggatcacttgaggccgggagttcgagaccagccctgccaacatggccaaactctgtttctactaaaaggtacaaaaattaactgggcatggtggtacctgcctgtaattccagctacttgggaggctgaggcacgagaatcacttgagcctgggaggcagaggttgcagtgagctcagatcacaccactgcactccaccctgggcaacagagtgagaatctgtctcaaaaaataaaaactaaaaaaaaaaggatagaaacacagagatcatggagttgatttctttcattatgaatttgaacaaactaaagccaaggaagttcaagtaactttctcaaggttacatatccttgaaaagagctacatctaaaatccagttcttctaaaacccagtccagtgtgctcagttattacatataatgaagtccttcacttttgcgcttccttaccccctgttatctggcagctgagtacctacctactcattcgtcatgcaagatataccttaaattcttatttctttatggtattttctgcatcctgcttttgttggactttgtatttatgttacagcaataataagatttttccctgcatatttgcttatatgtctgtctcccctagcagagtcatggttttggtctgggaacttacacatttttaaaaatccgtatcatttagcacagttcttgtcccagtgtaggtactcaataaacaggtaacctgaaagagttgttgtagtgagaatgctaccagatgaatgggtattctttaaagtattttc

SEQ ID NO: 120446 - DNA, 292 bp, Homo sapiens
caagcagaaggaaaattaaaccacatggaaacttggccacaaggagtttagagtactggaagtggtaactatctgggcaaatatataggatttaaaaaaaattattatttgaatatctttaaaagacaaatgactgtttaatataaaaatgatgacagttgccaggtgtggtggctcgtgcctgtaatcccagcactttcggaggccaaggcaggcagattgcttcagcccaggagtttgagaccagcctgggcaacatggtgaaatcctgtctctccaaaaaaaaaaaaaa

SEQ ID NO: 120447 - DNA, 460 bp, Homo sapiens
catccaggccacaccgatgcaagcggtgggctcccaaggccttgggcagctccaccactgtggctctgcagcatacatcccctgcagctgctttcatgggctggtgttgaatggctgtggcttttccagggcatagtgcaagctatcagtggatctatcattctgggatctggaggacagtggcccttttcttacagctccattagtcagtgctctagtggggactttgtgtgggggctccaactccacatttcccccccacactaccctagtagaggttctcaatgagggctctatttccacagcagacttctgcctggacatccagacatttccgtgcatcctctgaaatctatgcagagactcccaaaccttgattcttgccttctgtgcacccacaggcccaacaccacatggaagccaccaaaacttggggcttacaccctctgaagcaatggcc

SEQ ID NO: 120448 - DNA, 618 bp, Homo sapiens
aggcctcgtagacctttatagaggcaggcaggcaggcaagagctgggggcttcatcggatgagcaggggaccacgtactacgggcggccccaggagttggtttgaggtggaaggctgaggactgcaggattctaaatagtatggggattgtgtggggagtgaggcattagctgcttgggcccttagtccagccttgttggtggctgctgcagctctttggctcactcactctgtccttcgtgcctcagtttccctttgcataatgagatacggtggcagagaagaacgccagtgccacatccatgactgatagcttgaggacggagatgaactggagggtagaaaaagaggatgcctgagaaatttatacctaccaggtcacatcttcgaatcccaggaagttatccctggattcatttctgcctttgatgcaagtctgtggttcttttcagtacactttgtgtgatattgattgtatgtatcaatacttgacttgctgagtggttaaagtgttttggtttgtgggaggcatagtccttgttgtcttggtcagttaattttcagttaatctcccaatagccattgcttcgcctactcttcaattgggagattagttga

SEQ ID NO: 120449 - DNA, 449 bp, Homo sapiens
attcttcatgttttgtagagacagagtttcacatatgttgccctgactggtctcaaactcctgggctcaagcaatcctcccacctcgtcctcccaaagtgttgggattacaagcgtcagccaccatgcctgccccaacagtagattcttaacatatgtcaatcgttttcactttcccagcagcaagaaatacaagcaagcatgtgtatgatcagagaggcacaaaaatcccaggccagggtagtgaagagggctttgcccagaggaagtttctggcttttatttccgacattctttgagattttctgtgtcacacagagtagaatttcccacttggcatctccttgataaggtaggtttgtatttcttgaaccagttacctaaaattttcgagactgagttttttcatctataaaatgggaacaactacttcacagggtgttatgagaa

SEQ ID NO: 120450 - DNA, 404 bp, Homo sapiens
tgaaacaccacaaatgagaattaggaaaacttagtaatgaggaaatcacactcaagaattagaaacaaaggaaaatcattctggaaatgactttactagaaggcacacgagggagataaactcaaaggcagctacacatggcataacatctcagccaatgatagtccgcgtaagtgacagcagtcccacaggattgcaaaagtgcattttcactgccccttttctatgcttcagtgtgtttggatacacaaatcctcaccaccgtgttacggttgcctactgtcttcagtacagtcacacgctgtccaggtttgtatccccggagccatgggctgtgccatactgctaggcgtgcaataggctatgccacccaggtttgcaaacatgggtggcatcgataaaca

SEQ ID NO: 120451 - DNA, 557 bp, Homo sapiens
agtgtgagactccgtctcaaaaaaaaaaaaaaaggaaaaagaaaaaaaaaatttctttttcaccaagcaaatgctaaaatgtttaagaataaataagtaggaataaaagaaaaccgaaagaaatatcacttccctgcttcatttctctgaaatgtggtcactactatgcacctctaactattgtctttcactttgctctatccacataggtaacaacattgactcaggaagtttctcagttgggtaaagacatgagaaatgtgatccagcttctggaaaacgttctgtcacctcagcagccatcacggttttgctctttgcacagcacctctgtgtgtccctccagggagagcttacagaccagaacgagctggagtgcacaccagccttgcctacacttgcaaacaggcggggctgcttatacccaagcacaactttgtagcagtaatatcacctcagacatttggagtgtggatccctcctctgtggggagcagcccccaacgaactggagctcatgagcaaaatcctgcagacagtgaactttatcattctcca

SEQ ID NO: 120452 - DNA, 523 bp, Homo sapiens
agggtggggacagcaaagttgaaggcagtgtttagagatatggaggagaaccttgcagaggaaactgaaaaaaagcaactggggtggaaggtgaaaagccagaagagtgtgatgttgtggaaggcaactgtattagtctgttctcatacaactaataaagacatacccaagactgggtaatttataaaggaaagaggtttaactgactcacagttctgcatggttggggaggcctcacagtcatggcagaagatgaaggaaaatctaaggcacttcttacatggcagtgggcaggagcgagcttgtgcagaggaactcccatttataaaaccatcagatctcatgagacttattcactaccatgagaacagcacgggaaagacccacccccatgattcagttacctcctgctgggtccctaccatgacacatgggaattatgggagctacaattccagatgagatttgggtggggacacagccaaaccatatcagcaacacaagatatgtgtggatgctgccg

SEQ ID NO: 120453 - DNA, 305 bp, Homo sapiens
tggtcttcaactcctgacctcaagtgatccgcctacctcagcctcccaaagtcctgggattacagcttgattatgaagaggacattagacaaacgccagtgaagaagcatcctacaaaatactcgaccagagctcctcaaaactgttatgctcatcaaaaacgtctgagaaactgtcccacccgaaaggacactgaggagatatgacaactacatgtaatatggtatctgggtaagattctgcaacagaagaaggatattcggtaaaaataaggaaatctgaataaactatggatgttggttaat

SEQ ID NO: 120454 - DNA, 1018 bp, Homo sapiens
cagagaggcacagggctgagcaggtgaagggagtacaccgctgtggtttgacctgctcaatatcccttcttcctgaaacagaatctatcttttcttcttggggagccacccctccactacttttagcccttggcttaggttcttcttttaagactcagttctaccaggaggtaacctctggtaaattctcaaatcctagtgccagggttaggcatgcgatcaaggcaatatatccaagaagcggtatgggaggcaatttgagccaatgagatgcaactcaatacctggagcccctgggccagagacttggagtttgtatatctgcaattgttggggttttgccttctctccaagaaagcctgagtgaggatgaagacaacaggataaagcagaaacgagagggagagatggattcctcctgacaccatttgagctcctccttctccagctgagcgtgagctagccctgcattttcccgttgcgtgggctcgtaaattctctttgtgcttgagtgggtttgaggtgggcatctttcacctaaatacaatggcaaactgagagggtaccttctgttatctcttcaccagcagagtggaaaagcaacagagtcctccttgtgacctgaattatagatttcacagctcttttcaagggttagcctctgtgttgacttttggtcttcccaactcaggtgcttgatttaagctctagtctgaaattaattccacattttgtaaaataaggaggaaacaggagctggtgaggaagcatcaacattttacaataagatcgatttatataaaatttgctaaacatctgccagtgtatccactgccgagcctggattatcatctccagcatggagtactgtctttttcttaactgcatgggagccattctgagaaacagtaggaaataactttgttaaaagatggagaagagtcatctggacaatggaaattagtattctattacctttcaagtttgatgagtatgggtttggggtttagtaagtagt

SEQ ID NO: 120455 - DNA, 493 bp, Homo sapiens
aactagcagtgtgattttgggcaattcatgtaaaagctctaggtctcattttctgtatctgcaaaattgtttttaaatatgctttagcactagaagacttttcctcaaataaaaatttcaaaagagtcccatatataaaaaagataaaagcaataatgaggttctcattctactcaattcttcagtgaagaaaatgcccctagaagtaccttcttagagcagggtatgatttgaaaacactaaactagctgacccacagaagttgaatctagcactaatattctatgatttatccatttaataaatactcattaaatgtatactctgtacctggtactgaactaggcactgcacattcagcaataaacaaagcagatgggctccctgagatatttatgctaacatgtagtattcagcccattattaaatattcacttaaaatgaacaaaaaaagattaaaacaccacctctggtccttttatagagtatagaa

SEQ ID NO: 120456 - DNA, 549 bp, Homo sapiens
ttaatcaaataattgtactgctgtttatgtagtttataactgaaatggatactgtgaaagaaaggaataatgtactgtgcgagaataaggcaaaggaccctgatgggctggggaagacattattgaggaaatgctatttgagctgttggtcaactagttgaaagaggttgaaggggccacaggggaaggtgttagagagagagagattattccagacagagtagacattactgtgtaaagtccccatgacagaagggattatggaatgtttaaggaactaaaagaaaggcagtgtggcctaagcactgaaagcagtggtataaaacataactggagaggtatccagaggccagaccaagcagagccttataagccatgttacagattttagtttttatcccaagaatgataggatactgcttaagggttttaagctggaagggaaatctgattgcagggtgaacttactagataaggacaaagtagatgcagggagatcagttaggagattgttgcagtggtttacgcgataattgatgatagctcaga

SEQ ID NO: 120457 - DNA, 572 bp, Homo sapiens
tgtgtgaacaagtgccatacaacagattgagcctcgtataaaggcctgagactgtgcaagggttccccgctgggcctcagctgtgcttgcaattagcaataggcacggagtgattattgttggggtagcggatggcaatgcgaagtgacaagttttatgggggaagttgggagtggggatgctctgcaagtttctctttctttcttttttctttccttttttcttgttctgcaaaatacccttccttgggaggctgcaacctcctgtttcagtgaaagctatttttctttttccctcgtcattcaaaagagtcttaacaaaattgtttgaaagaatatttttctcagtgcttcagaatgcgggttttctaggtcagagcttccttgctgccctatttaatgtcagaaatacccatttgcctcaaattagcagagagcttggagttgagggcaggagattaagcacacaaaattactcagcaggtgacggtggggtggatttgggggttgagaagtctttaaaactgactacaagacattatatacttctgacaaaagaacatagtaatccta

SEQ ID NO: 120458 - DNA, 129 bp, Homo sapiens
gagggcctcctgggtggggggcgggacgccgggtccctaggggctggtggtcactcagggtggggcgtgtcgcccctcccccgtccacctgctctactcttcccccgcgtgccctgggctgacccttgt

SEQ ID NO: 120459 - DNA, 837 bp, Homo sapiens
aatccactctacttgggtagaaaatattttatctctagtgattgcatattatttccatatcatagtatttcatagtattatatttgatatgagtgtctatatcaatgtcagtgtccagaatttcgttcctaccagttaagtagttttctgaacggccagaagaccattcgaaattcatgatactactataagttggtaaacaaccatacttttatcctcatttttattctcactaagaaaaaagtcaactcccctccccttgcccaagtatgaaatatagggacagtatgtatggtgtggtctcatttgtttagaaaaccaccgcgcccggcagttgagcttattttcatattttcctgcagaatagtcttgttctttctcttcaagagtgtgtcttagctatttttttgccctttggtctttcatattccagagaatatattaaatatcccaagcaggcatggtggttcacacctataatcccagcactttgggaggctgaggtgggaggagtgcacaaggcgaggagtttgagactagcctttgcaacatagctagactccatttctacaaaaaatacaaaaattagccaggtgtggtggcacatgcctgtagtcccagcactagggcggctgagacgcaagactttgtttgaacccgggaggcagaggttgcagtgagccaagatgggcgccactgcattccagccctgggcaacaagagcaagaacctgtcttgtctccaaaaacaaaaaacaaaaccattatattgctagctactttaagaatttctgattctgttactggagctgacttgtggtaaccatttatatttccg

SEQ ID NO: 120460 - DNA, 339 bp, Homo sapiens
gtttattaaagttgttaagaataaagcctactttaagagataccaagtgaaatttagaagacgacgagagggtaaaactggttactatcctcagaaatgcttggtgatacaggataaaaataaatacaacacacccaaatataagatgatagttcgtgtaacaaacagagatatcatttgtcagactgcttatgcccgtatagagggggatatagtctgcgcagcatatgcacacaaactgccaaaatgtggtgtgaaggttggcctgacaaattatgctgcaacttattgtactggcctgctgctggcccgcaggcttcccaataggtttggcatgga

SEQ ID NO: 120461 - DNA, 309 bp, Homo sapiens
taagtggcagggggttgagaattcaggctctgagttaagtctgattcctcatttaccagccatgcgaccttgggatattacttaatcatgaagcctcatgtctttatctttaaaatgagaataccttctaagattgttggaaggattgggataattgaaattatgaatctaaagcacttagtattagagcactagggggtgctttaaaaatagtcatgcccaggctccaccttggaccaactgaattagaaattctgaggtcagggtctggcattgactgattgttgttgttgttgtttttaaatattt

SEQ ID NO: 120462 - DNA, 204 bp, Homo sapiens
tgcctcagccttctaagtatctgtgattatagatgcccaccatcatgcacagctaatttttgtatttttagtagaaacggggtttcaccatgttggccaggctagtctccaactcctgacctcaggtgatccgctttcctcggcctctgaaacttccaggattataggtgcgagccaccatgcctggcccttccatgacttcta

SEQ ID NO: 120463 - DNA, 345 bp, Homo sapiens
gttttcctgtccagctcaccaccactggactttcttccctgtatgtaagctgccaatcaaaccccacctctcatttgctggctctgggtctcttcttcagccccttgaacctggtgccttccctattgaggtgaataggagttcggcacaatagcactccagaacaactctgctgctccatacagcttcacaatggaaaggaaatccagaaatcagtgcattgcgtctttccagtgtgctatggtcaaagagcactacagcaggaatagagaggagagacattacgtctgcggctcacattatgtttaatcttcatttaatctttgcaacaaccctagtaagaga

SEQ ID NO: 120464 - DNA, 254 bp, Homo sapiens
  misc_feature (38)..(38): n is a, c, g, or t
gagacaaagtctcactctgttgcccaaaagctggagtncagtggcgtgatcacagcttactacaacctgcacccccctggatccagtgatcctcccacctcagctccccaagtagctagtgggcgccaccatgctcagctaattactttttgtagagatggggatcgtgctgtgtcgaccaggctcaagcagttctcccaccttggcctagttctaaagcacagggtgggccactgcacctggcgcggatgggt

SEQ ID NO: 120465 - DNA, 301 bp, Homo sapiens
tcagacacgctgagactgaagtacgtactgcacaagcagtgggcatcaggcaacgtcagtctaaagttcagcaaacaggtcatttgctcacgtgggcattcattcagtcactcattcaactacttcctgaggccgggcgcagtggctcatgcctgtctgtaatcccagcaatctgggagccaaaggcggccagatcacttgcagtcaggacttcgagaccagcctggccaaatggtgaaaccccatctctactaaaaatacaaaaattacccagacgtgcttgcttgaacccaggaggtgg

SEQ ID NO: 120466 - DNA, 509 bp, Homo sapiens
aatggagttatactggagtcaagttcctgtattttactaaaattagtattaatctgaagtagatcctgataaattaaaatgcatattgtaatccctggagcaaacactaacaaaataactttaaaatatacacttaaaaagaaaaagggaatttaaatgctacactagaaaatacttaatacaaaagaaggtagtaaaagatgaacagaagaacaaaaaggcataaaacatagaaaacaaattgtgaactgatagatggaaatccaaccacagcaataataacattgaatgggaatagaatgaacatgccaatcaaaaggcagagatcgttagactggattttttttttaagctttgactatatgctgcctgtgagagacatacatactttagaaacaaagatacaaataggtcaaagcaaaaggatagtagatttgctatgcaaacaaccgtaagggagcttgaggagaaatgctaacgtcagactaaataatttttttgtttttttg

SEQ ID NO: 120467 - DNA, 657 bp, Homo sapiens
aatcaattttagaacatttctatcaccctacagacaaatcccatacccattgtcagtcacttccccgtttcactgcaaatctgtcagtcctatgcaaccagttttgcctatatgggtttgcctgttctggaaacctcatataaatggaatcataacgatatatggtcttttgtgactggcttttacttagcataatgttttcaaagttcaactgtgttgtaccatgtaatagtacttcaggtactaataaatgattattattcatttattgctgaatattccatcatatggctataccacattttactcaattgatgggcattttggtggttctactttttggctattatgaataatattgctattaaaatttatttacaagtgtttgtttggacatatacttctatttctcttgggtataaacctaggagtgaaattgctgtgtcatatgcacactatgtttaactttttgaggagctacgtaaactgttttccaaagcaactgtaccattttacatttctgtttgtagcatctcaaaaaaagaaattataaacagctattttaaagagatgcaaattatgctaagtgaaaaaagccagacttaaaggctgtgtaaggcatgattctatttatataacattatacaaaagaaaatt

SEQ ID NO: 120468 - DNA, 331 bp, Homo sapiens
taagacaggccccaactagtacacacgcagatccatgcacacccacacacatgcacatgcagacttattgtcatagcttgtatctcttatggacaagatgcagagtgagtgagccagcagatggacaccctggaggttcggagccatgtcactccctatcagccctctccaaacatccaggcaggatctgggagggactgcccttgagatgggtgggctccatgaatttccagctgaagcaacacgtttctgtccccaagggatgaagaagtttcttcagctgctctgtagatatgtcatgtcgagattgaattcaggtatagttttagct

SEQ ID NO: 120469 - DNA, 244 bp, Homo sapiens
cttcattgattgactcattcaacacatagttatggggcacctactgcatgtgagacactgttctaggcactgaggacacagcaatgagcaaaacacaaaataacatatctgcccacgggcacggtggctcacgcctgtaatcccagcacttcgggaggctgaggcgggcggattacttgaggtcaggagtttgagaccaacctggccaacatggcaaaaccccgtctctactaaaagtacaaaa

SEQ ID NO: 120470 - DNA, 733 bp, Homo sapiens
cacatcttcaaggattcacttttactctctgttgtaaattttctatcccagcgatgtcccaccacttttatataatagtagaatggcttatctattctgtagtagcacaaaagagttggaagacatagaaacaccagatgcattttctctatatcttttggaacagaaaaagtagacaaaatgttaaattttttctttgaaatccatatgactctgcttcaaagaatcaccatttccaagagagaaaattcatgattgcgttacaagcattcagacagaaacactttatgttgtcaaaagctgcatttcaactaccaatatcatcacagtgactgcagtgtcctgttactttcgcatgactaaatcatacaacgaagcaatgatttttaattcttttaattctttttattttttgtaattgattagcccaaaaactctacataaccatatcaaggatgtagatgtggccattcaatgtgacgtgagccttttaataaacatgttttcagtttgcagagttagaaaagtattggctgtgttaaacacttaaccttacactggctaagaaatgccttattagtctttaatttactagtcagattatctgataggatgtctcaggagatggcatgattttcacaaatagtctacaatgtgttgttaactttttcatccttatagcttttctaaagcctatcaacagttttcttttctctctttctcttttttgcag

SEQ ID NO: 120471 - DNA, 196 bp, Homo sapiens
atgtggatgatctagaggagcttatgtgctgatagcctccaccaagtcactgatatcctaagacctacctacccagtggaatagggctttgatctcaggccacttctcccaccagtatggtttccctgggggaagcccctcctctggcagggtcaggttcatttcatgggctctgtgggaagtgagagtgcaggga

SEQ ID NO: 120472 - DNA, 1246 bp, Homo sapiens
tacataaatgtaattatacattttgtacacataaactgctggcgggaatgtcaaaaggtacaattaacttgaaaaagacttttagcagttccttaaaaatttaaatatacacttatcatatgatttagccatcccagtcctaggtatttgcccaagagaaatgaaagcttatgtccacataaagacttgtaaatgaatgctcatagcagctttacataatagcccaaaactggaaccaacaaatgtccatcaacaggtgaatggtataaacaaactgttatattctataccatgcagcactactcagcgataaaaaataatgaatgattgatacataaaacaacatggaagaacctcaaagaagccagggcatctgggtctggagatttcttttatcaggagattttaaattatgaatttaattctttaatggttataggatattcagattatttcatcttggttgagttttaatagtttgtggttttcaagaatcagattatttcttctaagttgtcatgtgtataagccgaaagttacagtatttcctcattatctttttaatgactgcctgatttatagtgatactcttcatttcattcttgataataatgatttgtgttttttctttttgtcagtctttctacaggtttatggattttcttgattgttttttgaagaaccagttttttgtttatgtatttttctatttgcagtttcattgatttctgcttttggttatttcctttcttttgcctgctttgggcttattttgctattctttttcttgtttcttgtggtgggaacttaggttattgtgctgagacctttcctcatttctaatatgctatcttcctaggtattccctgggatgtaggagacagctcttggagacacatggggttggctatctggcttttggagagactttgtctaccacaagaatagagtaaaagcagactctttcaggaagggaagaggatggctgcctctttcatctttataagtagggaaaattaattttccctgtcccttgcctatgcagtatttggccacttacatagccaaaatcccatgagtttcttatcaggttgctctgggggatatggacgagtgcaaaggtgggcaggtgcacttgtttaccctgagtaataagaaatctatctctgactctgaacatcttatgtgcatactcaagataagaaaaataaagatgaatattaaaaagcaaactttttatgagtgg

SEQ ID NO: 120473 - DNA, 268 bp, Homo sapiens
acacaagagatacccactcgacagaattaaatccgcacacaagagatcacgcactcaacaggacccatgcgcagacactctgcgtcactcggagacacgcaaggacgcacacttgcgcgagcaaggctctaggcgggggtcgcaattgcagaaggcgcggccacgcgcgctaggggacgcgcagcccacagacaggggcagtaacacaaaggggggccacctgcaaggccgagagcgcccacgcagccgccagggagcgcggacaccg

SEQ ID NO: 120474 - DNA, 808 bp, Homo sapiens
cccgtgtccaagtgtccaagccatgcctctggagttgagtgccacctcctacctcaccttgttgaatagaaaatgaatgagtgacagtatgaatgaatggacacctgttaaaagagccatctattacagctaaatgaatgaagggcatagacagtcctttggttgtttttccaactagaaatctctccctgtgttctgtgatggcctaagtctggccctgctcaagtgagggacttcctcgatgggctggtctcattcttgtgccctccaggacagcagggcagagggagagggaaatgggaggggctgagggacaacgtggctcttctgggagcctctttaccctgtgaaatttcctctggcagctttcccccttggcctgcagcctgtgccggcccctgcccccaactcattggctttggttacagggacaggcccagagtcaagaacaataaagggaggaggggcctgcttcacagggtcaggggtcagggagggggtttgaagggtgaggagattggctctgtgtagcatccggtttcaaacaactctgtttagaaatagaagagaagccctccggaaaatggaagggctctggcaggcctcccagctggccaaggaacagcaagttcctgccaatatgtgacggaagtgggggatttgtggggagggaggagggaagagggcactggagggagtagacacaacctagcaacattttccctgctaaaaaccttgctctgaagtaaacatggagggttcttattcttcctggctgtgtgcactcgggccagcctacttcctgtgg

SEQ ID NO: 120475 - DNA, 356 bp, Homo sapiens
aaaaaaccctgattaaatcaaatgtaggggccctaagacattctgcgggttattctaaatcacccccttacttttccagagaagaaaattaggccagggaggcccagtgacttgcccaaagtccccgcctgtgactggatgcagttcctaggaagcacggcctccttctgagcaacagaaaagcaggaagcctcaccagggagctttctcacccattcaccggcacgctccagcctcttcctgaccttcttacctgtgacatgacggcagggtctggagtcagtgcaagctgtctgggtgataccagtccacacagtccccaggcaacacacactgctctccaacacctgcagcac

SEQ ID NO: 120476 - DNA, 291 bp, Homo sapiens
gcacgagggaaataattgacaaaagatttcactggtctagcaagatatttgaatatctagatacaaaaggcccaacaaatactaggaaaatacattgcaagatgaaattcaccattacatgtagtcatcagactttctaaagtcaaagtgaaagaagaaaaaccttaaaatcagcaagagaaaaacatttagtccctgtaaaggaaaccaaattaggcttacattgtgattctcagcagaagccttagaaaccagaagagatttgtgccctattttcaaggtgcttaagga

SEQ ID NO: 120477 - DNA, 371 bp, Homo sapiens
gacattcctgtgtcttttcattcttataacccagtgccaggcacaggacctggtgcataggtggtgctcagaagtacctgttacaggaggctgggcacggtggctcacgtctgtaatccaaccactttgggaggccgaggcgggtggatcagctgaggttaggagttcgagaccagcctgggccaacatggcgaaactccgtctctactaaaaatacaaaaattagccaggcgtggtagtgcatgcctgtaatcccagctgctcgagagactgaggcaggagaatggcttgaacccagaaggcgaaggttgcagtgagcctagatcatgccactatactccagcctgggcgacagagtgagactctatctc

SEQ ID NO: 120478 - DNA, 515 bp, Homo sapiens
tccccagtgaaagcagagttgtgtatcctctggtttgtttctcaggagatgtgttttaactaagttaataataataataacaacagctttattgataaatagttcacataccctataatttacccatttaaggtatacaattcagtggtttttaatatagtcacagatatgtgcaaccatccctatggcttatattagagcattttcatcatctcaaaaagaaaccccatacacattagcagtcaatccccatttttccttcccccaatcactggcaaccactaatctattgtttttttctttttcactcaaacagatttctgacagatccactttctatgtctatagctttccctgttctggacagtggatatcaatggaattatacaataatgcggtcttttgtgacttaattctttcacttagcataaactaaggaaatttttttaagtttgtctttgaagccagatggctgagtttgaatcctggctccacatcctactccacttacctaa

SEQ ID NO: 120479 - DNA, 314 bp, Homo sapiens
tttgttaaaatattttatatccttctaatttattgtgcttgttctgatgattactgagaggggtgtatgttaaaatcccacatcatggttgtagatttatgtatttttccttgatttcttcttaactgcctttccccttccttaccctccctcttgtgtctgtctctctctccactccctgatatgttattagatgtatacagacatccagcttttttataactcaatattttatatttaatgttcctctttatctccggcaatacttttttttctctaaaagtctgtttcatttgaatattaatgaaacctac

SEQ ID NO: 120480 - DNA, 475 bp, Homo sapiens
ggtcaggcttaaagaggtcggggtggggggtagaagctgaaggcccctccactgcatccccttctgtaacaacaagctctggggatcagagagcaccatagagcttcaggttcccggaatcatcaacacaggcccaggagggccctggagagcatctaaccctgaatctctgtctcccatggcccctcagggaacaataacatcttcctcataggattgtggtggggccagatgggataattcacttaaagtacctggcagatagtaagcactcaatctgtgctgttatccattatccccattcgactgtaggttccaggcagggaaagcctgtatgtctctttgttcattcccctagctgttgtatttgttgaatgaatgaatgaatgaatgaatgaacaaatgaaccccacactctcagatgacccttgctaagaatgatgtggaaggggcgaatctgataggcctgagtgtt

SEQ ID NO: 120481 - DNA, 296 bp, Homo sapiens
aacatttgtatttattatttcaaagtccactcaaacaaaagtttaacatgcaaggttagaggtaaaattaagctcactatctgtattaggcatcattttaaatgaaggtaaactaaaataattcaaattagtttccatcattcagagtgcaacaccaccccaccccaaaaaaacccgcagcaagagaacagggttatattatgaaaggaagccctcaagctcagtaaaatgtcatctttgtgctcactctggaatggctgacagtggtagctgcagaaccatctctacaatgtatt

SEQ ID NO: 120482 - DNA, 637 bp, Homo sapiens
gtgtttcagtcctggtgttggtgctaaccagttgtattgggcttgttacctacgaagaaaactcacctttgttaaatgcccagtgtgtattgggcacggctttcttttttaatttatgtggttttctttagaagcccatacgtgtccaagggttatgaaggatgctaaagttagactcttccacccatggcccccagcctgtgatcccattcccagtgttatctattgttaccaattttgcataatacttctagagtaccaggaactttaaatatattatgtcagttaagtttcctggttattgctccaatttaatttaatttaatttaatttaatttttttgtctttttcaggatttagggcaggaaaggcaggctagtgtatgtactcagtctgcatatttgctccaatttataaccctattttacagtttctgaaattgagcttagtagctacttgcaaataactaattagtagtggagctaagattaattcaccctttctgtactcactgaataactataatggtaccatgctaggctttgaggatgggatcatgaggcacatagatccttcctgtcagtctagtggaggggttttcttttttttattaattttttttctttaattagggata

SEQ ID NO: 120483 - DNA, 695 bp, Homo sapiens
agggacaggcagaattgccaggtgggggtcagtgtggaaagaaacaaattaacaagccctttggggttcccagagaatgtattgcatgaacaagaattttttttaaagtcttcttgcaaaaattacatagggaaaccaggatttgaaaaacccagtcaacagcttgctaccacagaagagacatttcatccagaataactggagttagatagctttggggatgcctccacaaacatttgtttcatgtggtagcctgtcaacactgctgcctggcacagaaggagaaggcacagtgcaataggacaggaatattgccacccaatttccactgcggatacacagtctctggaggataactggggatcctgctgactctcacttctctaacacgccaatgactgaatacattagaagttcgagaattctaaagggaaatggcttaagcttattgaaaaaagtttcattgtgactcactggcaaaactactttagtgtatttaaaaattccacactcaacaatgatattaaatgtcaaactcagtaatactgaatcctttctggaataaagcagaaaataaataacagtaaatcttggaatacaagtaacagtgaatcttggaatttgaccatatgtatcaatgggcttaaacagctataagtcatgagacccaacaaatctaggaatttattctgagg

SEQ ID NO: 120484 - DNA, 503 bp, Homo sapiens
tggggcatagtagcagagggagcaagagggccaaatgtatgttttaaaaatatgacttatggatgttgggtgaaaagtaccagtggagaaaacagagcctgaagatagtggggggctaggaggaggccgaatgataaggccctagagtttctaggaagagcatcaagaatagagtgcaaagatgagagctgcagttctcatgctatgttgtgtactggaattattgggggtgcttgttgaaatgtgactcctgaggtttgtttctaagactaatattagcatttctgggctgcatctctaacaaatactctggtgattctgtataggtgaactatggagcacactttaagacagagaagtggtatctcatcctttctaagactgaggtttggatgaaaggctaagaggcgagatgcagagacagcctccctctcttttatttcctccctcacttttggcagaaaatatgtacacctactttattaaaaagattgaggccatgg

SEQ ID NO: 120485 - DNA, 640 bp, Homo sapiens
ataaggcagtctgcagttatctgatttcacagcaacacctgcatatttatctactcattaccaattggatgatggaattttttcaagcacatttcaaaaatctgccaacttcaagtataaaaaaataaactttgtggttaatttttcccttaacaaagtacagctgttgagaataattgttcaagatcttaccctgtaatgtcaactgcagcagaacaaagagtatttaattagcaaatctatccagtaattcaacacctattatataaaatgccttcgtgattttattcaggataatttgctaagagggttattactgacattcagatggaatttaaaattcctacgcaagtcgagtcataatagcagtaatgatctccccaatcaggagactcggtgtcacacaaggctctcttgcaatgcagcagccgatttcctgacttcttaattcctgggctcagctcagtgagagcccttcacgccgatatttcagtcagcaatacatctttaatgggactctattaaaataactagaacaaaaatgacttttttttggttaaaaagaatgacagcactgccatcatatcaatcattgcaggctttgcagaacagtgccgttaggggaaaagaggagggggaa

SEQ ID NO: 120486 - DNA, 438 bp, Homo sapiens
atagaaaactagtatcacttaccataaatagaaggtaactataaaaataagtaaagttggccgggcacagtggctcacacctgtaatcccagcactttgggaggccaaggagggtggatcaccttaggtcaggaatttaagaccagtctgaccaacatggtgaaaccccatctctactaaaaatacaaaaattagctgggtatggtgctgcacgcctgtaatcccagctactcaggagactgaggcaggagaatcacttgaacctggaaggcagaggttgcagtgagccaagatcacaccactgcaccctagcctgggcgacagagcaagactgtctcaaaaaaaaacaaaagcggagggggggaagttaaaacattgttagtaaattctgggtgaatggatggtattgcctaccaaaggctctaaatttgaggccta

SEQ ID NO: 120487 - DNA, 517 bp, Homo sapiens
tgcagcctcctttcctgtctcctcatctccacaacctgtaaatcctggagggcccccaaagcccagtccttggtccctttctcctctccatccacactcacttcctaggcgatctcatcctggaggtggaatattttctgtaaatgctctctccaggctgacaaccccgacactgatttttccagcctgggccctggccatgaactccagacttatccatccagctgtttactacttgatgtctctgcgtggaggtctcacagacatctctaacttagcatgcccaaatatggactcctgacttcacatcccctcaccccacacttcccaaccttccagtctttcctcatggcagtaaaagatgaccacatcatccttgattgctctttctcttacatcccacattcaatttgttaactgtcaactctcccattaaattgtattcagaatctgttgacttcaccccacccaagtccaaaccagcgtggtctcttgcctgctgcagtggtctcctcgc

SEQ ID NO: 120488 - DNA, 785 bp, Homo sapiens
agctggaggggaggaggagggcaggattccccactcaccttctctgataccgccctggtagtaggagtcaagaggggtgcctcgttataaccaggtgaaggtgggagtctaggttccccactcagtgtttgctgaccggatgggaatgaggcccgtttttctcatggcctaggttggttattgtctaaaagttttctgtcttcctaggctgccctgttcctgctgtcctaagagagcagcctttacttgggactctttttttttttatccaatagttgtctgcagccattggtgtttctggcttgcagccgagtccaggatatctgagccaaaaataaaactcaagaaactcaccaccatgttgttcctcagatcccaaggcccctagccagtgtgccttcttatctctacctttgagaatctttttgcttgccttatatgtaatatcctctgtttttagctgtacttagcaggcagaatagggagaggcacgtctactccatcttgtccagaaccagacattataccactgtagagttggggttcgcatctcctagtgaacagtaatgccaatccagatgggactatttgatattggtagattatttccaggtgaactcattttctttatttaattgaaaggtgttgtccagttaaggttgtatggctgctgttgcagtgttactggaaagaatttcctgacacttacatgaaaacatcttttcctaatcctaatcagatctcatcagatcccatttaataaatggctagcaatttactctaag

SEQ ID NO: 120489 - DNA, 235 bp, Homo sapiens
ggggtcgcgaggtggggtgatcagagaaggtctctgagggtgtaacattccagctgagtttgcagaagagcgagactgtttctgcagcaggtcaggaggagaatgttcctgggctgagggaacagcaagcacagatgccccaaagtctgtttgatgagcagagaagccttccctctctccaatcatttgttaaatgctgtcagatttatatctgaaaattatactgcttgcctcc

SEQ ID NO: 120490 - DNA, 301 bp, Homo sapiens
ctgggactagtgcatgtggggaaagtcagtaaagactgcctctcaagtacagctaactcattactaatacaggtacaaataataggggtgctggaaggagccaatccatttctaatgcaggtaaaaataacaggggtatgtgtgagggaaatggcagttaaacgtgtcatatgttcgctttaaatctagtcactacagagaacaaagggaggttgtaaattcttcccaccgtgaagaggcccaagggcctctgacccatactcagaaacagtgatggcctgagcacatgcatgtaaaaagc

SEQ ID NO: 120491 - DNA, 423 bp, Homo sapiens
agaaaccacactgtctgtgggctaattattccccattattgaggcaagaggcctctgagtacccaataagctgtacattactacatggttttttaccgtgtggctggtaagaactggcactgttcctggtctgtgtgagtgctaagcactattccttctaatccttcccgacagttctttcccaggtctccagttagtttcctcatacccatgtgtgctaatcagaattctgatgaatatgtgccaggaactttatataaattatttctaatccggccaggcacagtggctcacgcctgtaaacccagcactttgggaggccgaggcgggtggatcatgaggtcaggagttcgagaccagcctggccaacatggtgaaaccccgtctctactaaaaatacaaaaattagccgggcatggtggt

SEQ ID NO: 120492 - DNA, 569 bp, Homo sapiens
agatttctgtagtctgacctaaggaattggtaggaaaggcaatgagaagttggatgggggagagattttggaggcaggagagatgacccctggtgtctagttgaatgaacatgagaaggagagagtatatcagagaactcctccccattttgaacctgtgagatgggatttagttatgccatcaagttaggaaacacaggagcagggaagagatagcagagaggatatggcaggtgaacccataagcatgaatttcaggtccttacagggtaacaggaaatgttgagttgtttgcttgggaggtagttctggcatttagaagagagatctgggctagaaggaaaagtgggcttagctgcccttgtggtcgggccatgagagtggatgtggtgtccctggggtgagcatacatatggccaggagagggagggcccagggaaggggtgcaccattgtggcagtgaggaagggaaccttccttcagtagacccacaggtagctccaactggcaaaaggagccagagagcagagtagcaggaggcaaacccagagcgccctgccacagtggat

SEQ ID NO: 120493 - DNA, 474 bp, Homo sapiens
tagttgggattacacgcacgcaccaccacacctgctaatttttgtatttttagtagagatggggtttcaccatgttggccagcctcatcctgaactcctgacctcaggtgatccacccaccttggcctcccaaagtgctgggattacaggtgtgagccaccacacctggttggtaaatcttttctataaagggccagatagcaaataggttcagctttgtgggccatattgtttctgttgcaaccacacaactctgccattgtagtgcaaaagcagtcatagacaatacctaaatgaatgagcatttaggtattcctgtaaaaccttatttgtaaaaataggcagaaggccagactgagtttgcaggctgtggtttgccagcactggtctagagttcccaaaggatgcatccatctactatgaaaaatcctcttatgacttgagccctgtctaactttctgactttatcttgtt

SEQ ID NO: 120494 - DNA, 389 bp, Homo sapiens
gtccgtgatgagatgtaagtggtacatgacatatcttcattccctcgatataccagtcttttcttcgggctgctttcaagattttctatttctctggtttaagctgttttactctgctgtgcctgggtatggttctcatttgaaagattttacgctatggtttcttttagtggtatttggagacaatcttggcgctaggggtaaatatcgtaatcttaaaacttaaaataattgcccggtgcagtggctcacacctgtaatcccagcactttgggaggcccaggtgggtggatcacctgaggtcaggagttcgagaccagcctggccaacatggtgaaaccccgtctctgctaaaaatacaaaaaattagccaggcatggtggcatgcc

SEQ ID NO: 120495 - DNA, 322 bp, Homo sapiens
ggtagaggatcccatggagatgtgctgaagactcggatcagccggatttgatgaaattattgaggatctcgatttagtgtgttttaggcattaatgggagtagactgtaagagtttaagaactcatagggattaagtttgtggagacaatgaagtatacactaccattttgagcaacttagctctagaggaaaggagaaacatggaatggtggtttaaggagaagttgggttgagagaatgtttggttgattgttcaaagtgaaaggcttgaacatgttttgttttgatgaaatataacacatgtaataagaaagcacatct

SEQ ID NO: 120496 - DNA, 258 bp, Homo sapiens
gcagggaggtatgaggaaggggctcaaggaagcctatgctgtagatcttgatgggggcagtggttcaacaggagtataattatgtcaaaatcaatcaagctgcacaattagattttgtgcactgcatatcacttctaccctaatttttgaaaaggggatcaattgctggcctccaagcagggcctgccacatgcaaagcagagtgatgcagtttcctccttcaccccagagattggacgcagtaatagtagggccatg

SEQ ID NO: 120497 - DNA, 483 bp, Homo sapiens
  misc_feature (424)..(424): n is a, c, g, or t
  misc_feature (427)..(427): n is a, c, g, or t
  misc_feature (429)..(430): n is a, c, g, or t
  misc_feature (435)..(436): n is a, c, g, or t
  misc_feature (444)..(444): n is a, c, g, or t
  misc_feature (447)..(447): n is a, c, g, or t
tgcactggtattttacaggtttatgtagtgtttaattaaacacatgtgacaaacataaccagcacacactagtttgggagcaaatatactgcctcttgtcaggaatacaacttgactggtgagacacttgagtgcattacagagtagagtttgcagaaatgcttgaacatattacagaatagagtttaggaaaaggaggatatctgctccaattaatcagtcaagtgaaggttaaggttaagagagcttccacattaagctgtgtatgcagaagacaaaaatacacaaagataaacaacaaacctggaattggaatggggaaataaaataagatttgattactttttaaaatacaattgtatgttgctaacttccaacaagcatgtattattagattttttttttttttttttttttgggaaanggntnntggcnntttttccnagnctaaggtatagaatggggataatagtccccggggcc

SEQ ID NO: 120498 - DNA, 424 bp, Homo sapiens
gagcctgtgaccaaatgacacacttgatggcttcctgaaggagctttctcaaaagcaatagaatttccttgcatatttgaatctgctcttgcagcagtttgaagctgtgagcccagctctgtgaagcagaaggttagacattaccacagactccaaggcttggaaacactgcaggacattttgtaaacagaagtgcagccttaggaacacatcttcagcatacgggggaagttccagcacatttcacaagagggaaaagtaatgcaaggaaaggataatttcagtcttctgtgttgattacccttctccttgccctctgtacaagggggttagcaagggcagctggtcgcaagactgcagctgttcttaattgttgattttagctttgcagtggtcccttgtgggaaaagatgccacatctgta

SEQ ID NO: 120499 - DNA, 610 bp, Homo sapiens
tgagaaaggatctcactctgtcaaccaagctggagtgcagaggtgccatgatggctcaaccgcagcctcgacctcctgggctcagttgatcttcccaagtagcagggaatggagtcatgtgccaccatgcccagctactttttgtattttttttatagagatgggatttcaccatgttgctcaggctggtggccaacttcttagctcaagttatctgcccacctcggccttccaaagtgctgggattacaggcatgagccactgcacctggccctggactgtcttcttaatgccccagaaggtgactagcagaatagaaatgttcttatgccggctgggcacagtggctcacaccttgtcatcccagcactttgggaggctgaggcaggcggatcatgaagtcaggagatcaagaccatcctggctaacatggtgaaaccccatttctactaaaaatacaaaaaattagctgggcatggtggagggcacctgtagtcccagctactagggaggctgagggaggagaatggcgtgaacctgggaggcggagcttgtagtgagctgagatcgtgccactgcactccagcctgggcgacagagcgagactcca

SEQ ID NO: 120500 - DNA, 792 bp, Homo sapiens
acacagggctttgtaaccagaagaaggaggtggacgtttcttctaagtgggagtcctaagggatctgattgctgatttttaagagatctcaaacattttgtgggccattacaaagctcatgtcccctatgtctgtggggcctaatgattcaaacagccgtgaccaggcctgcctgtgtggcccagcctggctggcattcaagtgaataacatcatctccatctcactgcacagaagtatgaactgcggtgtcagcaggtttccatgacaccaccggtgatgtagagcacacatctctcccacactctgctggttaccaggccctggcagtacagaccaggcctcctgggttgccttcctccttccggctcacaggttcctcttcactcccatgctctgctccccagacctctggcccagaaggagtgacccagagcctgaggcaggagaaattttgaggcggagactggagctgaggatgaggcccaggcccggctagagagaaaacactgagaagggactgaggcccccacatgctggaatcttgtgaaaagaggtgaaggcaaagctggggatgagagagagaagacggagcaggagattagcaaggaaataaggtggggaaacagctgggaagacagacatgcatctggaagattccagaaaaggccatttcatccagccctgctccagcagtttgtatttcagcagcctcacgggacacctggcctttcctttctgacatcgttctccatccatccagcacctcttggagatcacaaggggctctcca

SEQ ID NO: 120501 - DNA, 317 bp, Homo sapiens
cgaaagagaaaaaggctggagctcccgcccccggggctgtcagatggcttgggtttctgcgacgcgattggctcgcggagggcagaaattactcagcaaacatgactattattagctgcttagcaacagctcaccaaagtagagagaccacccaggtaggcaacccagtgtgtgcatcctcggcttcggggcagcctctgagagcgccaaccttctcgcatgcaatacttccattaaggaatgctccccctcctttctctcttattccttttcttttcaacagtgtcttctttttgtgggatgcctttgcgcgcaca

SEQ ID NO: 120502 - DNA, 421 bp, Homo sapiens
  misc_feature (47)..(50): n is a, c, g, or t
atacgcgtagctaggattgcaggcacccaccattgcacccagctaannnngtaattttaatagactaagaagtaaaaatgttcaaatttttcctacggcctcctccatttttcctacaacctcctccattgtaaaagcctatacttacaattctaaaacctctctaaagctaaaagcaagtgtcaaatcaattgtcttttgaaaagaaaactaagcagcctggggggtcactgattttgatccataaacagtttcacatactacttctgttaatgctttcttgctataatgcatcagtgaaaataaaaacaactatgaaatttttttttgagacagagtctcactctgtcactcaggctgcagtacagtggcaccaaccatcatggctcactgcagcctcaacctcccacattccaacaat

SEQ ID NO: 120503 - DNA, 343 bp, Homo sapiens
atggccaggagatactggccaggtggtcattgtcctttcaatattggcacagtgaacacagtgatggagaagccatgatggctgggatggaggctacaaacaggctcccactttaatatcaaggtcgatccagcccttgtcatgactgaatgttcactctatcagcaatagaggtcaatgctgactacctgatatggcaccagttttggaggagatcaactagcaactttctggccagttgattacattggactcctttcacctgtgaaaggctgtgattcactttgaccagaatttacacttgtctacatttgcctttccagcctgcatgacctcagctagc

SEQ ID NO: 120504 - DNA, 574 bp, Homo sapiens
tggctgaattctgctaaatgggaaatgaataatacaagtaataaataataaaagaattttatttttaatgtggattatggtgttaagggaatgctttcttgaaagaagtaatttgaactggtctttgaaaggggaaagatacagatatgtagagaggggggaaggtcatctcacttcatggagtgggcttggagggctggagaaaagacagaagaaatgatgggaatgtgtggcctatatgaagaatagtattaggttggtgcaaaagtgattgcggtttttgttattaaaagtatggcaccaacctaatacaacacccctttctcccctctcaccattcttactgcctctgtttgttgttgtatgttttttgtttttaagcagtggagctcttcaaacaaaatcttcacagatgcataaaataaaaacaaaaagtataactgctttagtttaatgcaggggcaggaccctgggccctgcttctcagctcctttttacttccccaccctctagtcctacctttacaggccttgagatactgtctcagcatccctaggattccacagagcagttt

SEQ ID NO: 120505 - DNA, 211 bp, Homo sapiens
ggaaaacatcatggaatggcccagatcaaagtcccctccaaggccaaaaaaccctgacagacaccatcccaagtcccacagcaaggtaatgactgggcttgggcatggtgacataacaacatgttagtggcatgaaactgagccagatcctctcaagagcacatgacgacagtctacttcaggggccctatctcactcaggctgtcggccc

SEQ ID NO: 120506 - DNA, 793 bp, Homo sapiens
gggacacattgcgcggaaagaacttactggcatgtatttttaaggtatattttagaattttctatgcatctagctataaagctatgaaaacaatcaaactacttaaatctgcttggaaacatttaatgtgttaagcttatgatcagggtgagtaatgaggttttaattttcattaaagtagggtgtgtgtgctttattaggatgctcttaatatacaaaatgctgaatttatttgcatgttgccattccctgttgcccccattaaaaatataaatatattggattttctaagtatataactaacatagggaaatatctaaaatattatcaataggcaatggagtaaataaattatggtttatgtatcttatccctctcagtaaatagcagtatcttttgtcttgttgctcaggccaaacttggaaaaatccttaatccatgtctttctctctcatcctatatctaacctatcagcacatcctggtgacacctcttcataaaatatccctaatccaaacacttctcaacacttctaccacaaccactctggtgtggggatgccaccccatcctctcttgcctgggctctgcagactctcctaactcttttcctggcttccactctcaccctctcttctggtttccagatagtagccagttgtccttttgaaacatgtggaatcgggtcatctctctgctcaaaactctaaaggtttcctgtcctgttcaaagggaagccccagatcctgaccctggcctgctggagcctgcatgatctggcccctctacctctc

SEQ ID NO: 120507 - DNA, 383 bp, Homo sapiens
taggctgtcttctcaacccaattcaaagaagtaagatataaaggtaggctttgaacaaaaaacactgtcagacttggccattcttctccaagggtcctgatcagaaactatcaggattgaaacaccaatgtctaattctcctcagaacacaacattcctccctttactgcttggataggacagggcctccagggtcatctgggatgctcttctttctaaaatgcagaaggaagaatgaatgacagaatgagagcaagaggtggcctggggctttacttttggcaagatgagtttagtcaagagagctccagcaagttggagtggagaagaggggagaaggcccatctcttctgatacgcagtgtatttggtgtagtggactta

SEQ ID NO: 120508 - DNA, 381 bp, Homo sapiens
ctaaggaacttaatgagcaacttggatccaattcttcattgtctgtcagaggaaaggcatccatgcttggtaatgagcctttggatgctctacccggctctgtggccagaacaaagcgccttgttatctccctgacaaggagcctactttatggtgttggacaaaacacctagcacgtcattctcccaaacagcacaaactcatacccaatgaaactgggggagcaacgggtggttctttctactctcagaaacctgtttatttccatcttggtggtgtggagagggtgttgtatgttgcacattgtgcaaaggcctgggacatgatggccgctgctcccactcacccatctcatcagcatgttgtagacatctgcagagt

SEQ ID NO: 120509 - DNA, 337 bp, Homo sapiens
gttaatcttccctagaacctggcatttatttatttgtttgcggaaagaagcgacaaagttagtcaaaactttttaagattataagaatagaataaattatccacaaacattttggacattattattttacttgatttgcacaattagtctttggaaaatgtggatgagaaatgggaagcacatgtagttttttatacattttttattaagaaagtactctgagttccagtacttggatggtgaccttatttttcttttgtttgggaagatatggctatgtattaaatggtcattttcccctacactgaaaaccataaaatcctgtgaaagttctata

SEQ ID NO: 120510 - DNA, 319 bp, Homo sapiens
gacactgtcaagagcctgagttacattttgtttgactcctgatacttatctaaatgctaagcttccctgggggaagaaattcagagatatatgcaaacatagtctaaggggatgggaaatgccatcacacatattaccccaaatttatagcagttttatataggatgtcagtaaaggaaatgagaaaggcaacctaaacccttcaaaactatcttggcttcatcctgctgggaaaagctgaacaggcttcacttgataatatgtccatttgtgtatgctaatttccaaggctttgaaagctaatacaaaatctttttca

SEQ ID NO: 120511 - DNA, 133 bp, Homo sapiens
tccagctaaacaaatgaacgattatcgagacaagtcaccccaaaaccgctgtgcagcttgggaaggaaaagagctaatcacatggagggttctatattcgcttcccaaggcacacactgtccccacatggcca

SEQ ID NO: 120512 - DNA, 275 bp, Homo sapiens
ggtaagcaactttccgtgtctggggttccttgctctgctacatcacaagaggatgccaagaaggaggctttggagagtttatggaaggaggttctctaaaggaagaggaagaaatacttttgtaagcatactgcgccaaggagtgggtcattttagtagttcactttcatttttaaacacaaatccacatttcataattttaaaataaataaaaattaatagaaggtctgttacttcctacctcctgccccataacattcctaattgtttcccag

SEQ ID NO: 120513 - DNA, 456 bp, Homo sapiens
aggtctcattcactacctgcttttttttgggaagacttctgtgatggttaattttatatatcaacttctctgggctaagtacccagatacttggtcaaatacaagtctagacattgccgtgaaggtgtttctttaaatgagattaacgtctacaccagcagacatggagtacagcagaggaccctccaccgtgtgggcgggcctcatccaagcaggtgaaggccttaaaggaaaatgactcaggctcccaaggagaagagtctgcctccagctgcctccaggctgcctttgggctcaagctgccactcccactcccactcccaggggtcttcagcccgccctgcagattgcagacttgcagcccccacagtcacatcagccaattcttcaaaataaaccttgaaaatacatcaaaatctctaggatataaacacatcctactggttctctggagaa

SEQ ID NO: 120514 - DNA, 502 bp, Homo sapiens
ttttccaaccacttcagcagaatctgtgtttaaaactaaacagtgaatatgcttaacacaatctttcttcatacccatccaggaaggctgtcagcaccttgaattggccttcatgattagcccggtttcagtgttttaagagccctgtaaatcataaaaactttattttattaagcaatttgaattttatctctgatttcaaaaagattttgacctattatatgacaaactacaaattcgtgatgtttccactacttctgggaatacaaatattatcacatacctaatacagataataatgtacctccacctccacataccgccctatgaatcactgctgaatggcaaattttcacctatttaaatgaagagagagaagcaataaaataaacaacaaaaaaaacactcttgtgatttattcctcattcgtatgctctggaaaaataacacatattagaaatggggcagagaggccaggcatggtggctcacacttgtaatcc

SEQ ID NO: 120515 - DNA, 380 bp, Homo sapiens
tcaggagaagtaaaaacatatccacacagaaacttacaaatgaatgcttataacagcattattcataatagtcaaaagttgaaaacaatccatgcgtccatcaagcgacaaagcaaaagtaaaatgtggtatatccatacaatggagtatattcagtcctaaaaagaaatgaagtactgatccatgctgcaatatagatgagcaattaaaagaagccagacacaaaagggcacattatttgattccacttatatgaatacagaaatccacagcaacagaaggtaaattaatggttgccaaggactgactggagacaacagggtgtgaccactaatggaaacgtggttttttggggggtgatgaaaatgctctgcaggtga

SEQ ID NO: 120516 - DNA, 2717 bp, Homo sapiens
  misc_feature (801)..(801): n is a, c, g, or t
  misc_feature (948)..(948): n is a, c, g, or t
  misc_feature (998)..(998): n is a, c, g, or t
  misc_feature (1509)..(1509): n is a, c, g, or t
  misc_feature (1700)..(1700): n is a, c, g, or t
ttttttaaaattctgacagttttgttgactttgcactctgatgaaagcgtaaaatcctaggatgaaaagctctacctacatatcaaataataaaatagttataccctagaagaagagaaactcactgtctcctgctaaagaaataccttctgtctatgcaacttttctttccccctttctatacctctcttataagggcaaagcatttatagcctctgagttctaagaaaccatgggagcacggtgatctgctggtgagataaccgagataacagggcccatggtccaggtgccaacaccgaggacccttgttcctttatgtgagcccctgcatctggcccactgctgggtttcaaacatagtattattgaacaacctcaaattgctatatttaaatcaactctttatcaactagtcctgaaaattaaggcctacagacatcaacaaaacgagcgacagaagaaaggcatttccaagtgatgtaactgggtgactcatctcacgaaagggcactcggaggcctaccagtagaccacctttctggcttttggcatgccctgacatcagccttgctccctccattaatcatactacgctcacatagaagccaaaacatgtcacgcttctgtttgaaagctgtctttttgttcttagcaacatgtcatgtttgggggaagttataatatactggccagtggtgtcagtaagtcgggaaggctaaggagctttgatgtcaggtctttaccatttaatgtttttcaaagtattgggaattctgagaatattgtggtcaggtgtaantaagatttgcatgtcggttctttttttgtgatttagatcagcataaacttctccctccaaaaatcctttcagataataccaacttctgttctttcgcctgtccctgctctgggtgcttctccctccatggctagacttttttcagcngctcagggtcccaggagggggtgggggcaggctgggtccatttcacagtngtcagaagttgtacagaatctgttggggttggggttgaggcagcgtaggcttgggagccctacaacttgagagccagaggttcctggttaaagttttcagctgggacacattacttacccattcagaaacctcaaatgagggcagcccgtctgactgttgttttctggttaacttgaatccttgagctaaggtattccttctatttttactttcttaaattatcctggcatggatgtgtttgctagttccaaattttgtttaaataatatgtcttctacttatgttgtgaaactcaaagtgtggttgttcgttggttacgtcttccgatgtcttcagggtgacctaagtcttagagaacattggttactaacaagaaagttgagtttgctttgggaacaagaaagcgctttagggttgactgtccttccattccacctgtttttgccttttgtaagaaattgaagctgtgggctcattactacgtatttggtagctcttcagcaatgtgtngatcagcttttcccaaatgggtaagagtctaaacttttattttctcttctgcattactgttctttcagcttggtaccccaaaaaatggccagtggggtgtcccttatcctcaaaatcagtcattccatttcagaaacaaagtgaaagaactttgctggttgtaagttgggcttcccagggttcttggtggntggatctttattatgtgtttggatttcacagggcccctgcttccaagggagcagcagttccagctcacagctctgatcagggtcaaaacccgacttacatgcatcgtctttatatggtttttttcaagaccaagttcattcatttgctagtctttctttctttcctttctttctttctttctttctctctctttttcttctctttctttctttctctctttctttttcttctttctctttctttttttcttctttctttctttttctttcttttgtagctttgaggatatttaggacttaagtttctgggcagcttatttcctttttcattctctgctcttgtaagtaaaggtaacttctgagtagctcaaacatatgttggaactatggatctttagacctgaaagaagcacggcagctttccaatccagttttcagacattatgtttcatcatggtccccgttcttcaaattaaatttaaccacaaacctcgaaggatgactgataaaatcagagctgcaattagtagtgtgcgtgggtgtcagttctaatggaagcctgctaatccactgatgggaagcctgagaaccagaactaagtgagttagccagtgttactggggcaggacagggagtacagccaggaggagaaattgggctcatttaggtagaaatcagattagtggcagctggggacggggctgtagggagggagtaggcagcaaaggggcccgagggaactttttttgggggtgataggaatgtttctatcatgattgtagtgtggttgaatgactgcctgtttgtccaagctcactgagttgtaccctggaaattggtgacttttaatgtctataaattatgcctcaagagaactgacaaaaagaaaataataaagtggctcaaaagttgtaaggaacctcctaaaacattcaggtctttcattaggggaggggggagcattttctatggttttaaattcagtgtaactgtatgaaatgattccttaaaaaatac

SEQ ID NO: 120517 - DNA, 458 bp, Homo sapiens
gtctcgaactcccgacctcaggtgatctgcccatctcagcctcccaaagtgatgggattacaggcatgagccactgcgcccggattaattggccttttagttaaaaatattttttttaaggggcaagcattaagttcttttagtactcagtaaaatacaggtaggtgtatatcagtatgaagacacttgaactacaaacttctctacccaaagcttcattttgttccagttgtcaaagtggtgatcaaaatctgttagcttgggttacctctggctgttgggtacctgcttttctgtttgaggaagactggaacatgtactaggtgatgagtaaaggtgcgtgttttcagtactgataagtgtccaggtttttaacctgatagtgactgaagatccgaagtcatttccctcctttcggctatcaagaagttaactcatacattcattcattcatttac

SEQ ID NO: 120518 - DNA, 514 bp, Homo sapiens
tcattagctttacaaaggtggctgcgttttagggaagggctattttcatttaaactgtaaactaaatgtctcccaaagttagcttggcccaaatccaggaataattaagggcagcttagaggccaaaggcaagagggggactggctagatcagctctcccccgctgtcctaattctctcactgatacaatttttgcaaaggacatcttacttctctatcaaactatgactctgaggaggagatctttttgctcattgttggccattatgggctgtacaatgtgttccttgttctgaagaaataatggtcggctttccaaatctgtgcactgtctcttgttctactttttcatttttttaaatttaattttgtttttgtgagacagcatctcactctgtcacccaggctggagtgcaatggtgcaatcatagctcactgcagcctcgacctcgcagactcaagcgatcctcccatctcatcctcccaagtagctgggattacaggcatgcacgac

SEQ ID NO: 120519 - DNA, 627 bp, Homo sapiens
ggccccaagcgcgaggagcggggcggggcgagcgcgcgtgctcccggatcctcggcagtgtccggcgcccccttcccttcgccaggcccgtttggcgccttcactcgggaagacgtcggccaggactttgcgctttggagacgtcttacttcggcagcactcgcacactgcgagatccgacacgggcagcggggacctagggagccggggacgctgcctgtcgggtacggttccgcagctaccgcagccccgtgggccatggttagtctccccccgacaccgctccctctagagctccgggcttcggaagcggctgcacgtgggcatggctggagaggttccgctggcttggggcagtcgccgggattccgactggttggtgtggggtgtggcctgtgctatccagctcccagctgatcctaatgtgcggcacagcggaaaccaccggtccacatcagtgcttctcacttaaaggggcttacgaatcgtcgggggtgggggagctggacttggaattttttaagagatgaggtctcactctgtcacccaggctggagtgcagtggcgcgattacggctcactgcagactagacctcctgggctcaactttaatgtaaattgggattg

SEQ ID NO: 120520 - DNA, 777 bp, Homo sapiens
atagtccagatactactcttttgtcagatatgtggtttgcaaatattttatttctgtagtttgtctcttaaagggatcttttacagagcaaaagtttttaatattgatgaggtccagtttatcagtttttcctttaacgtgtcaaacttttatttagtgtgagatctaagaactaggttgggcatggtgttgcgcacctgtaatcccagtgactcgagaggctgaggcaggaggattacttgagtccaggagttcaagaccagcctgtgcaacatatcaagacttcatgtcatattaaaagaataataataataataatcaaaaacactttgcctagtcctagattccaaagttctttttctaaaagttttatagttttctgttttacatttaagtccatgattcatcattagttagtttttatatgtggcatgacatttaggtcaaggtttatgttttgcctatgaatgtcccaagtaattcacttttattttttatttattattatttttagacagggtcttgctctgtcacccaggctggagtgcagtggcacgatctcagcttattgcaacctccacctcccaggttcaagtgatcctcttgcctcagcctcccgagaagctgggaccacaggcatgtgccaccatgcctggctatatatatgtatatgtatataaatatatatgtgtgtattttgtagagacagggttttgccatgttgcccaggctggcattgagctcctgggctcaagcaatctgcctgtctcagcctcc

SEQ ID NO: 120521 - DNA, 225 bp, Homo sapiens
cagagacacaaaccaatcctagtctgtgtttccaatgtcattggtcaatgtcacctacatatatcctctgctgatgtgacagaccagcagagtctgttggtatgtgtgaccatctttctccagtagtctgcattcctatacacttcttaccacatgtacattgactgcaggattgctgtaagtgttataaataccactggtaatagctcttatccaatgacaaat

SEQ ID NO: 120522 - DNA, 251 bp, Homo sapiens
ctcagcctcccgagtagcgggattacagatgcccaccaccacgctcggctactttctgtatttttcgtagagacagggttttgccatgttggccaggctggtctcaaactcttgaccccaggtgatccacctgccttggcctcccaaagtgctgggattacaggtgtgagccaccgtggccgaccaaaaaatactttattactaacaagtgcttctgatcatctgagccttcagtaaatcataatcttttt

SEQ ID NO: 120523 - DNA, 482 bp, Homo sapiens
acatcagtgactgcccttgaccacttcggcacactggtgagagtcaagcttcaagcttattcccctgtcaaatgagaagaacactagagtcgtgtctcctgcttctgacccacctgggctgcacctccacactcggtggcgttaagatgcaccacactcaggggagtcattagggaggaaacagccacatcgccttgagtttctgaaaaccaaatgaatggcagtgctttcactgacaatgacaattcagtgcagtaaagataaaatacaaagagttggagcttccaaactctccccacagttccaagctctccccacagtcttagtggaattgcgatgggcctttggtctgctggtccagttaatatgctccaagtagcataggcagcagtctgaacccaaacccacttggctgccgtccttcccagaatgcctgttccgcaagcctgccatttggcttgttctccctgctgtgcggtgcc

SEQ ID NO: 120524 - DNA, 227 bp, Homo sapiens
atgagctgtaagccaaccttttccttcctaacttaattttccaaagaatagtaacttacccaccaccactgcagtcactgggccgggaagacaagcactcttgccttgaatccatgccttgagccagtagccttgacccagggtaaagcagttatgtgcttgggtcacctgggtcatgtttttgaaattgcctcaagcctaccttacaaatccttcctggaaccctg

SEQ ID NO: 120525 - DNA, 256 bp, Homo sapiens
caactgctgtgtttcagaaatcagagctctgagatggaaccggctgtgcactaaccttatagccctgattaattccctccctttgtttgcctcattatcatgattaggttctgcccgtagcatagcaacggctaattgtaggctggttgcagagtgcataattcctgctattaaaattttatcgaggcttaattgtgctcctttttgctgcggcgaagcttcaaagtttcagaagagaggggatgtggttagtggg

SEQ ID NO: 120526 - DNA, 308 bp, Homo sapiens
agtgtaattagcaaggaatcatggagcatgaacatctattgtgtaaaggagcaactatttacaaaatcaagataaaagaacccactaatggctactaccgacagagcccaggtctgataacatctcccagcataaaggcacactgatttaccccttgttttaaagaagcagccagagcttgccaacaaaaatatgtgattgatctaattagctcactgaactgaggaaaacagtgtgccaaaatcatgtgtactcacagattactccttccaggacaaagcagtgttgcataaaagcctatccttcaa

SEQ ID NO: 120527 - DNA, 847 bp, Homo sapiens
agcggttggagaccagccaggccaacacggtgaaactccgtctctacaaaaaatacaaaaattagctgggcatggtggcacatgcctgtaattccagctatttgggaggctgaggcaagaaaactgcttgaaccaggacccaggaggcattgccgtgaactgagatcatagccactgcactccagcctgggcaacgtagtgagaccatgtctcaaaaaaataaaaaagattccatatgatcctgttgacttctagctatgtccatgatgagggcaaaattcttaatctactcaaagatctatagtcctgacccaagacatgacatagcacattgtgtgaagcattgaaaccatttaggttttctgtaatctgctgagttgtattgaactcctgaaatgctggagttggaaaaaccctaaaaatagcaaactgtttcacaaaattatgcagaattaactgcaggagcttttgaaaatcaaagattcttgggtctcatcccaggcctgttgaatcagaatcttcaggagaataaggcatttttccagtgttctgccaagatgtatatacggggctgggcacagcagctcacgcctgtaatcccagcactttgagaggctgaggcaggaagattgcttgagcccaggagttcgagaccagcctgggcagcatagcaagagtccatctccactatttaaaaaagaaaaaaaaaaaaacctggccgggcatggtggctcaggcctgtaatcccagcactttgggaaggctgaggtgggtgaatcacttgaggccaggagttcaagaccagcctggccaacatggtgaaatcccatctctactaaaaatacaa

SEQ ID NO: 120528 - DNA, 942 bp, Homo sapiens
cctaaacattgacatgccaaaggaatttaggacttcctgatctccatctccatcctcccagacttggcaaaactttacttctaaacacataaacactgtccacctccaaggaaacatattccagagacttctacctcaaaagtcagtataagccagatgcggtggtatgcacatgtagtcccagctactcaagagactgaggcaggaggatcacttgaaatcaggagtttgagactatagtaaactaaaattgcacctgtgaatagccactgcactccagcctgggcaacgtagtgagaccatgtctcaaaaaaataaaaaagattccatatgatcctgttgacttctagctatgtccatgatgagggcaaaattcttaatctactcaaagatctatagtcctgacccaagacatgacatagcacattgtgtgaagcattgaaaccatttaggttttctgtaatctgctgagttgtattgaactcctgaaatgctggagttggaaaaaccctaaaaatagcaaactgtttcacaaaattatgcagaattaactgcaggagcttttgaaaatcaaagattcttgggtctcatcccaggcctgttgaatcagaatcttcaggagaataaggcatttttccagtgttctgccaagatgtatatacggggctgggcacagcagctcacgcctgtaatcccagcactttgagaggctgaggcaggaagattgcttgagcccaggagttcgagaccagcctgggcagcatagcaagagtccatctccactatttaaaaaagaaaaaaaaaaaaacctggccgggcatggtggctcaggcctgtaatcccagcactttgggaaggctgaggtgggtgaatcacttgaggccaggagttcaagaccagcctggccaacatggtgaaatcccatctctactaaaaatacaa

SEQ ID NO: 120529 - DNA, 170 bp, Homo sapiens
ggtctgtgtccccactcaaatctcatgtcaaattgtaatccccaatgttggaggtggggcctggtaggaggtggttggatcatggggatggatttcccttttggtgttgttttcatgatagtaggtgaattatcataagatctggttgtttcaaagtgtatagtacctct

SEQ ID NO: 120530 - DNA, 577 bp, Homo sapiens
tttaggaatttacactcagacagatccatataaacactaaatgatatatatttacaacactactcactatagcattatttgtaataccccaaaataaattatggtatgccactcaatgggatacaaggcaccagtaaaaaagaatcaaggtattttatatgtcgtgaactgaacaattgccgagagataatactgggaaagcaagtgtgctcatgctgtattactgattgtgtaaaaaaagaggaatacaattcgcctttgtaagcataaaaatgtctctagaaggatacactaataactggtaaaattagctgcttcatggaaccattagaatagaatgtcaaggatcagaggggagagaggcttcacttatactaatttatatcttttaaaacagaactgcaggaatgatttccctgttaaaatttgtttatataacataaggctattactagcccttctcggggctgttgtaaggatcgagtcagaaagcagatgtaaagctctgcacacagcaccagtgctcgcttattgctattttacaagggggagaagttcagcaagaccagcctgggta

SEQ ID NO: 120531 - DNA, 375 bp, Homo sapiens
ggcaggaggagggaatggcgggagcagatgtacagagacagtgacacccaaggcatggttggtaattgcaggccgactgtgactggatcgtgtgatatgtcaggatgcaaagagactgaaaaggtaagttggggccagatggtggagagggttgaatttaagctatgttaaagggatcagatttatctatagtaggatgatctcatgttcccatttcccagggtagttttgcctgttgtcccagggtgattattcatggtggcccctttcatgctcaagtatccctgtttggataagttatgtggtcctgcaaccctaaaggctttgtggaacccccaaaggtttcacagagggacagggtcaggctagccttga

SEQ ID NO: 120532 - DNA, 214 bp, Homo sapiens
ctcaacctgtcatatattaccccataaatatgtcttaatattatccatctttagaaagaaaaaaacactctgatacatcctacctccatctctacttttttatcccccattctctgtcaacctgtctggttgattttctccccaccatatcactgaagtgagacttataacatttctagtgacctacttcttgccagtggtctgagggttcttt

SEQ ID NO: 120533 - DNA, 238 bp, Homo sapiens
catgtgtcctgtcctccgggagttgcaatctagttggagaggtgagacccacctgcagggaggttgagctgtgaccactaggagtgggagggacaggatgtgcccaggggttgacagcagggcctgggtgcttccctgtaggatctggggaggtggcatctgggggtggctgccgtcttgcgggggctgccggcagcccccgcaagacgaggaaatagaaaccgtcttgcgggggctg

SEQ ID NO: 120534 - DNA, 1074 bp, Homo sapiens
gggctggtgtattccaggtgcccaggagccactgagaacagaagacttgttgctgctctagaggacctatggtagggcagacagaggatgatacagctcagcagcttgtccctacgtgtggcatgaaaggtgttggagagagaatagtggagtatgtgtccaacattccagcacttcagagagctacccccaagggactggcttctgtttcacctgacttggagcacaggcaggagtggacatactctaaaagcccactgatgggaaagggcaccaggttggaggcctctgaaaacaagagagctgggtggcttgcagcagctccagagaacctgaagtaccacagacagatagcacagggagcaaaagattatgagatcctgaaaaaggaaacgaacaagttcatcttgagaatttatacacactggtcgagaagaagcatcctcaggaaaggttcaaaaggcatgcagaatctctagtcaggccgatcagtgaggatctttctctgtacagagccagaccacaaagactgggaggggtgatattttttcaaatgcttggatcccaacatgatgttaaaagacacacaaagaaatagggaaacatggcacaatcaaagagtcaaaatatccaggaacctactttaaggaaacacagatatcttcattatctcagaaggaattcagactaaccaccataaacatgttcagtgacccaaggaaaatgctgcatgaacaaaatggtatcaacatagagattgaaaacgtaaaaaggaaccaaacaaacattgtaacagatgcaatatgcttctttgaccaaattgaaagatttactagaggagtttagcagcagtgtttttcaaggagaagaattagtgaacttgaagccaggtcatttgaaattatccagtcagagaagcaaaaagaaaaaaaataaaaaaagaatgaagacagcctagagtactaatgggacagcatcaattttatcaatgtagattgtatggaagttccatatgttggaaagagaaaggagcaaaaagcttatttgaagaaatactggccaaaacttcccaaa

SEQ ID NO: 120535 - DNA, 556 bp, Homo sapiens
gggctggtgtattccaggtgcccaggagccactgagaacagaagacttgttgctgctctagaggacctatggtagggcagacagaggatgatacagctcagcagcttgtccctacgtgtggcatgaaaggtgttggagagagaatagtggagtatgtgtccaacattccagcacttcagagagctacccccaagggactggcttctgtttcacctgacttggagcacaggcaggagtggacatactctaaaagcccactgatgggaaagggcaccaggttggaggcctctgaaaacaagagagctgggtggcttgcagcagctccagagaacctgaagtaccacagacagatagcacagggagcaaaagattatgagatcctgaaaaaggaaacgaacaagttcatcttgagaatttatacacactggtcacacattccaactcttttgtctccccaaggagaagccaagagttgaggattttctcctgctggtttcatgctgagggagggggagggatcgatggtgagtgcctgctaatctaaactgtgtcgagc

SEQ ID NO: 120536 - DNA, 422 bp, Homo sapiens
aaccgagctcttaccccgggtgccgaggccgaggctgtgcccgtgcagcctcttcaggcgcagatcttgatctccagtcggcctttgcagccccggcctcctgcgtctcgaaggcctgcacgggcccagcctcggcctcggcctcacagcggactctccacgcccagctagctctcgcctcactgcggcctccccagtccaaagctcctgcctttcggccacttcggcaggtccagctcctgcctgccagtggcctctttaggcccagctcattcctcacgtcggccattccaggccctgtttttcccttccggcagccccttggccttgtggctcaggataagtttgattagcttgaaagatccaactggacacagggcaccaaatcactaccaatgaactaaacacacatgcttgcacac

SEQ ID NO: 120537 - DNA, 406 bp, Homo sapiens
taggaaaaaattatagtatggtacatagttcccgacccatttctttctgtcttctgcttccttgaaatgggcttttgcattaatttggtatagatgaatttttcttttctccctttcagaattacctagggattgttttccttccctagctcctgtttgagagccaggtatttcaagtgcattatgttctgagcccctatgaggaaaggaagagcacagctgggatttgggcagcagtgatgaaaggatctgagctctgtactttctcaggttattcttcacatattttgtgtcaggatcactccctcttgtcatgggaagtattctttttcaaagaggatatccctgaaatttgaatgattgctcccatttcagctacaggacctgatgcaccattgctatcaga

SEQ ID NO: 120538 - DNA, 638 bp, Homo sapiens
ccgacgcctttgaaatgttgatttttcggcagaaattcctcatgcttcacattactcagataactcaggactcttttagacatcagcagtgactttgaaagatcggttcactggctttagatcacctctgcttctaacagccttggaggtatagcttttcttcctatccagatgttctgagaccacagaaaacagggtatgttattgatggttcgttttttttttcacactttcaatggagttttgttttgtttgagcgacgcattacactttgtatacagaaatatgcatcattgaataatatttatcttactgcaaatgttgccatctgtttatcatggaaagtgttaaaatagataaataaaagtagaaataatatacgtaggtatagatatgtttgtaatatgaattctaatatatctatgtattcactttccttccggtcttttcatactttagacgttctcttcagtttatcaattcattttttaaaaatcttccagaagggtgggtggtcaaaggcttgctatttttcacctaggaagccagccatggcgtaagttcttatttactggtgactgttcaagtttgattcatggttttaatagaagaggaaatttggtggcttgagttaaagc

SEQ ID NO: 120539 - DNA, 408 bp, Homo sapiens
cgactgtgaggactgtgaggcctcctgtgtcagcagatgtgcatgtactctctgtactgatcccctggaaaggtggcctgtttgaaagcagtcctgcccaggcctgcagtaatgaagattaagcctcagagtactacaggttacccattttgttttgtttagcccctttcatcaaatgcttataaaattctaggagcttacctagggtttattgttgataacctcaaacatatgtgaatcatccactccaaactagggcagttttcttctcaggccctccaagggagttcggtgacattggcacattgtggggatgaataggctgaaatgccaggtacacagttagtggaaagactccaaaccaagcaaaggttgaacgtcaggtaactggagtagggggtgtattag

SEQ ID NO: 120540 - DNA, 434 bp, Homo sapiens
gaatcaactggaatgtggtgaagtggagaacagaggggtggaatggaattgaatgcagtggagtgcactggttttgaatggagtggaatggaaagagaagaaatataattgaatggagttgagtggagtggagaggaattgaaaagcaatggaatggaatagaatggaattgattaaaaccgagtggaatggaacggaatggaatggaatggaatggaatggaaacgaatggcatcgaataaaatgtggtgaagtggagtagagaggagtggaatggacgggaatggaatggtgtggaatggaattgaatggagtggagtggattggagtggaatggagtagagtggaatgataatgaatggaatttaacggagtgcagaggagtggagaggaatggagtggaatggaatggaatgggaaggaatggaattgaa

SEQ ID NO: 120541 - DNA, 338 bp, Homo sapiens
gattaggaagtagggctttaaggtagtgattcagtcatgaagggagagtgttcacgaatgagtttaggatccttacacaaggactggatggagtgggcttcccctgttttgcccttccaccttctgccatgtgaggacacagtgcatctcctcctgaagacacagtgcacaagataccatcttggatgcagagaccagaccctcaccagacaccaatcctgctggcaccttgatcttggacttctagcctatggaactgtgagaaatacatttctgttcttcagaaattacccagcctagtgtattttctatatagtagtacaaactcattaaggcac

SEQ ID NO: 120542 - DNA, 489 bp, Homo sapiens
ggagaccttgaatcaggatggccaaagatttttccaacctgggccagtggttcacaggagcctttgggtatcgaatgtccatgtcattttttggccttgcttttttagctttgcagttcaaaggggatcccgttttcaaaaataaaattaggttaaacccccatttatggaacctttggttatgggtcccaatcccagtgaaatttttataactcctcacagggaactcctcacaagacgccaatgtgcaaacagggttggcaaacggtattttagctgattttgtcccccagctatgactgtgtgagagtgaagacccagattttcatgtatcctgaagttaaaatttatccaatcctgtttacccaactggaaattacaaactgaaaaaaattgtccctttgaaggattttttttttttttcagaatcagaaatgtttcaaaaaaaaaaaaaggaaagcctgataaaaaaaaagccttgaaagggta

SEQ ID NO: 120543 - DNA, 797 bp, Homo sapiens
aaagggtccatagctttcactagcctcctaaatggggttgatgatgctaaaaagttgaaagccagtactttagagttgaaaagttggattcaatgatgggaatagattgattgtttccaaaagggttctcttaatatgtctgaatagtaattgctgtgcttctttgtgtagtaaaattcttaatgtggcctgatagctgtacagaacatttgagattgggactgaaaatcttggacatatgtccctcggtagccattagattatctaattgccattagtgttaaggtgagcataaagcaaattattaactgcatggccctaagaaagtcaccttatctcatgggatctgttacctcatttataagacatttttaaaaggaggaatgtgaccttgaagatttccaaaactcctagtttggattctctagaaaagtgagatcaatgctggacttggatggagcccttttgtggcagaaatgaaccaggctttgcatagaaggaaaaagacagagtgtccaaatgaggaagaggcccagaggatccaagaagcctcttcctccataaatgggaaacacaagcctgctgtggcaaagagccagtgtaatcagggcaggatgagggctactgtgacactttttaacatccaggactctgagggaacagaggctcaacctctacttttcaccctgggactgacttgccagaacacaagttgtccctcagtgagtgaatacaccatctcgcctgcactaagaacttctgattctcataggagaaaatgctttgggtcttcccac

SEQ ID NO: 120544 - DNA, 328 bp, Homo sapiens
ggatgggaaggacctttctccaggcggatgctggctgtggtgtctacccaaggccgagctctgacccgtctttggggctgtcggtctgagttttccccgtgcaggtcggcatggctcaagtgcacagcccctccatactcatcagcaactcgatagaagctacttaggttgttgcttaaggggcccatggtctctccttgaaggtattctaagtggtcctcctaggctgagccaggttgccaggtgcccagagccaatccgtgtggctcttgacagaactcctgttctctgtgtgaagctccgggcggggaatcccggtctgacccag

SEQ ID NO: 120545 - DNA, 389 bp, Homo sapiens
gcctcccactggtggggcctcactcaggtccagcagtgagtttgggcacatggagaggaagtttcaactctgtacctgtcctggtgacatgggaaaggagcgtttcattcctgttaaatatgaaccattaagcccaataagctcattagaccatgggtgataatcttcttcatactttcctctgttatctgaatcgtaaaacaaccctactaattataatattaggcagaggcacttataacccagtaagcatatggaaactcttctactggggagacaggcaaacagcgaaaacttgcatggctaatatctttgcatgggaaacttcagatctcaaatcatgtctgcctcagtctagagtaaccaccccaaagcagagatagagacaa

SEQ ID NO: 120546 - DNA, 929 bp, Homo sapiens
gcgcgcgcgcgggcgggagcggagggcaacggggcggcgcgggcggccgggcgcagggtcgcgggaggtgacgcgcggcgaggatggcggcgcggggccgggggctgctgctgctgacgctgtcggtgctgttggcggcgggcccctccgccgctgcggccaagctcaacatccccaaagtgctgctgcccttcacgcgggccacgcgcgttaacttcacgctggaggcctcggagggctgctaccgctggttgtccacccggccggaggtggccagcatcgagccgctgggcctggacgagcagcagtgctcccagaaggcagtggtgcaggcccgcctgacccagcctgcccgcctcaccagcatcatcttcgcagaggacatcaccacaggccaggtcctgcgctgtgatgccattgtggacctcatccatgacatccagatcgtctccaccacccgcgagctctacctggaggactcccccctggagctgaagatccaggccctggactccgaagggaacaccttcagcactctggctggactggtcttcgagtggacgattgtgaaggactccgaggcggacaggttctcagactcccacaatgcgctgcgaatcctcactttcttggagtctacgtacatccctccttcttacatctcagagatggagaaggctgccaagcaaggggacaccatcctggtgtctgggatgaagacgggagctccaagctcaaggctcgcatccaggaggctgtctacaagaatgtacgccctgcagaagtcaggctgctgattttggaaaacatccttctgaacccggcctatgacgtctacctgatggtgggaacctccattcactacaaggtgcagaagatcaggcaagggaaaattacaggtgtgtcattggctctgccatcatgacaga

SEQ ID NO: 120547 - DNA, 444 bp, Homo sapiens
gccaggccagaacacagagacagcgtggtgttcagaaactctcacaagaaggaccattaccagcgccttcccactaaggatcattaactcacttcctctttctggcttcctgaattaggtatgggagaatttgcccacaccaggggcaaaaatgaagatggatcgaaggtggattttgctgggtaaaatgagaggcagttcccttctcacacagtcacataaagtggttccagggtcttcccaccaggaaagcaacaagggagatcaaggaggatctggcctggccactggaaggcccagttccagcctcagtccactgagcagcctccatttcctcatctgtaagatggaccaaatgcctctggaatgagatgtgaagtctgttccagctccaaccttctatgtccctgtctcttcctctccccagcgtgctgcaggaagata

SEQ ID NO: 120548 - DNA, 769 bp, Homo sapiens
agcggactctctgcatcatgctgctgctgctacaggatgggagaatggtggtatcagtgattcaagactgtttttcctacatcttcagtgcctttttcaatgctgtggagttaaaaccagcataggtctttctctgtgcttacctgctgggatccactatgatgtctaccactgaggctgttcctcctctcaagactcaagaccctctttacttcttttaactccactagaggaaggacagcagtaaaatgttcaatgccgtttgtgtctgttcttggcagtgacattcagttctctttataaaacaagggagtagaaagagagtagaagtgacatcttcacacacacataccgtttgctagatttgtcaaacagctgatttcaaactgttaatatgacacagaatcaatttttttgagtcaaacttttcattatacaatagaattgaaaagttaatatcagaataactgtctgttagtaagattttatttaaaaaatttggttgcatacacacctaaacattcacttacattgttatagcatatgacattgtgatgtaaaatatatttcttactctagtcacggtcataaacgatcgaaagccatgacttaagggcattatttagtgctgagctgtctaatatggtagctattttatttaaatgtaaatgaattaaaattacataaaattaaaatcagtgtcttaaccaaagcggccacatttaattgctcaataattacttgtggcaactttattgtatatcttggg

SEQ ID NO: 120549 - DNA, 301 bp, Homo sapiens
ctcctcgcctttgcttctgctgccccctcacatggcttgggcattgttggtaatgaccttgctagactgcaaatgtccttcagtatcaactgaagccccagtcctgggaagcctccgtggccacccagcaccggcacttcctcccccttcctccccctgcgttctccactccctgcaggtcctatgcctgtgacagggagggaaccctgtgctggggtgaccccagcatggacctcagtggggctcaggctgaaccaaaggtaggtggttctgggggtagtgcctgaggtggttgtatgga

SEQ ID NO: 120550 - DNA, 355 bp, Homo sapiens
ggtagggccctctccagcaccctaaggacagtgcgttgaaccccaggccagtcagcccagcgggaagagctgagaagggaccagaggccagtgagggaggaaagacccacagtcctgcagggcgcagagaacccctaagggctggctcctccagacctgcaggagaacaggaaggagagaggcaggagacgtgagcctgcaacagagctgactcaggcaggggcgggatcctcccggtcaaggggaggagaggagggctcctcagaagggggaagtagcgtcagtaaaggagaggcggggacgggatggaggctcttctgaagcaagcagcagatccatgctggaagggtagggt

SEQ ID NO: 120551 - DNA, 396 bp, Homo sapiens
agttctgactctggacagaggtgggaggctgggtagacagagggtggcaccgggtcacctgagccccagagcagctttgcttgagcccaaagtcacattaaatccctttgaggagttcccttggcttctgtctctgacttctctctccccaggggctcagaacccaccaggggaacctggggacatccacacccccctccccacatatttctttcactatctctgcccccattcctcacctaaaattccctcccccttgaaaattaccttgtaggctgggggcagaggcttacgcctgtaattgtagcatcttagtaggttgaggcaagaggatcgcttgagcccagaagtctgagaccagcctaggcaacatagttttctctattttttctctac

SEQ ID NO: 120552 - DNA, 322 bp, Homo sapiens
ccgtgtagtgaggcaggcatttcacaccttaattgctttaacgtcttgaaaggtgaaaggtgacctgtgagtctaaacagttggaaaatttagtgtgcatatttgaaatgctttacataaagttgaaacacttcacagtctccttgattaatttctttgttgccgtgctgctttgtattaatttaatttagtgacttttatgtgaaagtaaatatgtaagtcagtggcattatgtttattagattattttcctttaatattttaagcagactaaatgcggcttctgtcaaatgagtctttaataaataaattgctgtctgtg

SEQ ID NO: 120553 - DNA, 98 bp, Homo sapiens
cgcgcgcggcggccgcggcgccggctccgccgggagcgcacgtgcaggcgccgggcggaggagagggaggcgggagccgggccgcgggaggaggggag

SEQ ID NO: 120554 - DNA, 235 bp, Homo sapiens
tgcagccttaacctcctctgctcaagcgatcctccctcttcagcctccttcagcaggcaggagcagaggaattacggaggcggttgctaattttttacatcggggttagggaaggcctccctggtaacaggagatttgagcagagaccggaaggaaggggagtcaactgtgtcgatcgtatctgagatgagaaagttctaggcagagggaacagcaagtacaaatgattgcaatg

SEQ ID NO: 120555 - DNA, 498 bp, Homo sapiens
tgcctgagcctcccaaagtgttggaattacaggtgtgagccactgcgcccggccaggaaaacatctttaaggagggatgtgaacttggctttgaagaatgggtgggatttggaaaggtaaaaggaaatagggatggctttacgtaagagaatgaatgagagcagaaacataaaaggggagaatttagtatagttattcttgggacagtgagtttaacaggttggccctccttcccatgtgggaggtaagatttgttaggactttctaggaagggtgttaaaattaccagttgctgtagtttgaggtttaaatactgagtaaaagagagtgaaattgaagttttgatttaaaaaaattgtgtcatagaaattaatttgtaatatggagtggagaaagatataaagagtttgggaatccagtaagaaaagtgttgcatgaatacaggttcaagttatataagacctggtgatgtgataccatgaagaccaaaaaaaaaaa

SEQ ID NO: 120556 - DNA, 204 bp, Homo sapiens
gaatgtgcagcgtcactggagagactggtggtggaaagtgcttgccacaacaagcgagccacttgcgggagacaggatgaaactggtgggggatgagagctgtatcctactgacttgcagaagcagctgcaggcctgctgggcagactgccaaaggcaggcaacagcagcagtggaaggccaggtctggtcactgccccatcat

SEQ ID NO: 120557 - DNA, 245 bp, Homo sapiens
gtctccagcctcatcctgtgaatagctcctcttctgtttccctctgactaggccttcagctgacttctttgctggaattttctaatcttgtgacagcagggaaaagctggatgtggtccatctcttaacacagacactcctccctgtcttgaccagctacgtattccactgaccagcctcatcatctctgccctcaacagtggaaatgatctctttcccacagatgttctccctccctccttcct

SEQ ID NO: 120558 - DNA, 267 bp, Homo sapiens
aaagaaataaggtattttacataaagattaaaaagaaattaaaaccattatttgaagataatggcttaaacagaaactctgcaaatccttagaataagaaagttcaggccaggtgtagtggcttgtgcctgtaatcccagtgcattgggaggctaaggtcggaggattgcttgagcccaggagtttgagacaagccgggtcaacataatgagatcgcatctctacaaaaaattgaaaaatgagccaggtgtggcagtgcatgcctgt

SEQ ID NO: 120559 - DNA, 455 bp, Homo sapiens
attattattcccatttcacaggtaacaaaacaggttaaatttattattcatacacttaacaaatattgaacatcttgtatgagctaggctttattctagaaatttggtattactaattttaaaatggataaaattcctatcctcgtggactgacattctaataagaaacttctcatttattacaagacataagaaattagtaattaaaattatatgttagaacttgatacattctttagaaaaaaagaaaaggtagaacagtgtaaggaagatctgactgctggagtgacagcagggaaagtgtagcaatattactcatgtcatgtttctggcttaaattctactttatctgcaacaggattccatccctgccttcctgtgtattatcttgtctgttaaacctttgctcattcctttatgtttagctttttgaatcattgtgttccaagtttgtc

SEQ ID NO: 120560 - DNA, 454 bp, Homo sapiens
tgttgaaagggctgtgagagattagctagtccaatcccattgatttacaaaggaagaaataaagttcagggaggcttacccaaagttatataattaatggaggaaccagaagtagaatccaaggtcttctgctgctacaatgtaatactttctccataataccagtctgtccccgcttagacccccctagacttttactctaagagctccattaggattttgcaaacacgtagtgaacctaaattggatagcaatttctggctgccaatcctgctacattttaggtgcatgcacatgcgtgcagggggagtgcatttcatgtcattatcattcaggaagaaaggctttggctgtcaagaggtgctcagtgatgcaggccctttctgttttggcctttaagggcctgattgctcccagctcccagctggttatgagagtgtgaattctgccatcc

SEQ ID NO: 120561 - DNA, 633 bp, Homo sapiens
agcgggaagggctcatctgacttctggaaacctatgttaaaatacagtgctttgaaccttgatcatgggctaattaggttggaaatgaaactagagaccagatacacccaaggaaacttttggtagttattttactttataagtcacaggaaatgcttgtgtactttcctgtgttccttaaatagttgcacttaaattacctctttgaaactgaatgaagagacagagagtattttttttctttccagaaataatacttgtttatacctgtaatagcaatgaaattttgtttcttttgagacagagttttgctctgtctcccagtctggagtatagtggcaggatctcagctcactgcaacctccacctcccaggttcaagtgattctcctgcctcagcctcccaagtagctgggactataggtgcactaccatgcccggctaatttttgtatttttagtagagaaggggtttcgccatgttggccaggctgatctcgaactcctgacctcaggtgatctgcccgcctcggcctcccaaagtgctgggattacaggcgtgagccactgctcctggccagcaatgaaacttgaggctatgcgaatgaaggattgttctaagagtgtaaactata

SEQ ID NO: 120562 - DNA, 5768 bp, Homo sapiens
  misc_feature (179)..(179): n is a, c, g, or t
  misc_feature (339)..(339): n is a, c, g, or t
  misc_feature (4757)..(4757): n is a, c, g, or t
cccagacccgcccccacttcccccctcaccctcccctccggcagcctctcccatggccactgctgcgggctgtgagcagagccccgtccttgagcagattgacctcatctttcagtcctgcagctgggctgagcggggagtcagctcagaagacactggcctggggatgagactcgggncatgcttcagagggaagaaagagcttctgaacagacaatgctgtcttaaaggtggcatcttggtgctttctcatgccttgttttctttcatcctcagaatgtgtctgggggtgagaggacgggtgtgactgctgaaacttcctttcttggtgattccacntcactcctttctgatccctgagcctgtgccacgccctgtgtgatgtgccggggacaccagggtgaatacttacaggccctgttccccttccttcatgaaacagcctccttcgggctgggtcactgggcactggggcctccctggtcttccaggattgcaacttcacagaatcccttttccataaggcacatgaaagtgactgtgacccgcaacgggagccttgacaaccagccaattcagaacacagaccttgacatcggaaggccccgagttcaaatcctgccttgctccctttcagctggaaagctgtggtcaaattacttagcctctccaagccagttttcccttctgcaaaatgaggttacacaagctgccacctcacagaatgagtgtgagaattaattcttattttccacaccctcatttgacagggggagaaacagaagcccagagagggaaagggcttggttaggatcacaccatgagttgggggttaagtcaggatggggtaggtcccctctttctctgggtgttcctctcccccatcccttatctcaacataaatcctccccagttgcccaggttgtccaggcgattcctggcacacgtcctggggcctgccctccacctttagccctgctctggcttctgcagcagcagagtcctgggtgaccagcagtggcccctggccctctgagtggtggtggagggtgggggtgcactgcagcaagctcccagcccagagcagcctggccatataagggaaggagctcagggaggcctcctggctcaggcctggcgagaaaacccagacagccactgtttattttctcctccccagctcacccacgcctctccaagcctcccaacagaagacagaggtcccccacagccagagacatttcctgaagacatggggaacacagaggcagaaacagcccatccacccaggagctgtcccccacactgccgggagccggcacccagagccgccaggtaaaactgaggccacctggttcaacatcacctttcacagaaggggaagcagccacagaaagaagggcctcgttaagaagtggaacctgggacccccaagcggtgtctctcatcctgactggggatccagagtaggagggagcctttggtggggtaagtggaatggggtggggggggggcggggtggccatagacccctcttctcagtaaggccctcatgtgaaggaggcaggggttgggacaagtgctaagtatgcaagactcaagggaagagctgctggagccaggagaagcacctccctcccggcccctctgcccctcctcatagcccagctgcactgactcctcctccaggaagccttctcagcttccccaggggtgggaacctttttgtcctccaggtgtgcttggctgtcctttcttgggctctctctctctctctctcctcatcccacttgagtctgccccctattcaccttgtgaggggaattttccttctactcaatctgaccgaggtcctccaggtcaaggacagcgaggctctcagtcccacttccccttggcacatagaagaggcagtgcgctgaagggacaggtgaaatgattagaccctgcccccaaaccaaggcctggccaattggacagggcatgagacattcagcgtagaggttaaaacgagggccctgggttaggaaccccagctcagttctcagctctgtacccttggaaaattcccttcccatggagctttgtggatgcacaaggacttgcacaaagaaaacattcaatatccaggactataaaattccacaaatgattgtgcttattacattcattatcacgatgattattccagacacaaaggaacagaacgaggcaccaacagcaaggggcaagcagattcaagggccacagaggagatggaggcaaacaccttcccctggtcagaggctgtgcctcagcccttctccctgcatcagtttctccttcagaagcatgggactacctcccatctagttctcgtttctaaacctaggggagatgctatctttgctgcaataatcttagcctacatcttggaatggaaatggccttggtggaaatggtcttcaactcctctggtccaagctcaggccctgtgaccctggaacaatccccttcctggtcctccatgtaggagcaataacattcccttgccagcagcaccagccattctgatgattaaatggtatcggactctgttttccaaactcagtcattcagatgccccctattttatttcttccatgtctgcaaatgattataatatttttaaatgtaggatgagtcctttttattacacatagaaatagctactgtaaatagcaaactctaacactgtgcctaattaggaaataaaggtaaccataaatacagtaaaaatgaaacaatgttattatggtttaacctgatagtgtggcttgcaaggccctgggcctgaagcctgggcaataagtgagagttagaaaggtgtcaaagacatgatagcagcaaactgaggctttgtaccccacggtaaataggactgaaagcaaattcacagggagcaactgatccattccacaacagaatgctccctgtcaattcgctttccattctgttgtgtcctgtctcccagcagagactacaaactccccaaaaccacttacccaccagctgcacgtgagaagccaaaggtagtttatgtgaaagggctttggaaataatcacgcaccaagtgaaggcagaggacacaccttgtcagcttagttctcagcagcaaatcatctcttttccaggataaccctccctgattcttattgaaatctctttgctgaccacactaagctcttctctctcaggggcagtgggagccgtggagagtggaatagaccagctgtctgtgacctgcgagggagtccaatgtcggaatcactccccagccaaatgcacggttttaaaaaatctatttatttatttatgtagagaccaggctatgagactggctaatttttcgtatttttggatagagacaggatttcatcgtgttgcccaggctggtcttgaactcctgggctcaagcgatccacctgcctcggcttcccaaagtgctcaggattacaggcgtgagccactgtgcccagccaccaaatgcagttgaaaagagtttctgcaagataattccacagaagaggaaagcagttatctggctgggaataccttagacagaggctgtcctctacacaggctgtcagaactgacctactgacctgcctgctggcatgatagaccagagggaaacactctttccactcttcccagactgagtgtaagagacagacttttttttttttttttgagacggagtctcactctgtcacccaggctggagtgcaatggcaagatctcggctcactgcaacctccacctccccgggttcaaaccattctcctgcctcagcctcccaggtagctgggattacaggctcccgccaccacgcctggctaatttttgtatttttagtagagacagggtttcaccatgttggccgggctggtctcgaactcccaacctcaggtgatccgcctaccttggcctcccaaagggttgggattacaggtgtaagccactgctcccagccttttttttttttttattagagacaagggctccccatgttgcccaggctgatcttgaactctaggctcaagcgatcctcctgcctgagcctcccaaagtgctaggattacaggcatgagcactgctcccagctctgtttttgtttttttaaggaggtatattttttctgttctctctcagccctgaagaaaggctacccatccccttcagacattcctgaaaatatatgtcatccaacatcaaggccaccacagtgaccactaagcaatgcaagaaggtcctctggggtgccctgagatcttggcagggcaggaagagtgagaaggggctttgcctgctcacctgaaagttcccacccaagccgggcccagaaaacaaaatgaattatctacatggtcatccaatcagccaccaaatggcattacctaggtccatcatcatgtaccaagccacaggtcagacccagggccccccaaattaacaagacacaggcactgtcctcaggaagtggagatctagccaggtcagacccacacacaaataacactgatactagagataatgagattgggaattatgattcagccattcaacctgggcttatgtggcatctacaccacctggccctgatttcagtagtgagcacagttgacagggtcccttcccttcacaggtgagccatgtagtccacaagtggaggtggtcgtaagtgaaaaccacattaccagcatggtaaagggttagaaagagggcaccgggtgggngagaacatgaagcagggggtgctgatggctaaagaagtaaaggaggggctgggcactgtggttcatgcctataatcccagcactttgggagaccaaggcgggtggatcacctgaggtcaggagttctagaccagcctgggcaacgtggtgaaaccctgtctctactaaaaatacaaaaattagccaggcatggtggtgcacgcctgtagtcccagctacttgggaggctggggcatgagaattgctttaacccggaaggtggagtttgcagtgagccgagatcgtgtcactgcactccagcctgggcgacagagggagacctgtctcaaaaaaaaaaaaaaagtcaaggagggtttcccagagtggccacttgattagagacctagcacaggaggaagagatgggcagggagagtgacggggagcagcacagtccctgggagcccgaagtgggtgggcacagggctccctaggagaatggaaggacatctatgagctgtagcccaagaggaagaggtcactggggctagatgcggcagaccctcgcaggctttgggaagggcttcagaattcagcctgaggacaatggggagcccttttgggatattaaacttgagtaagatatgagcatatttgcatcttgaaaaatcattatgggaagatggctgggaagagaggaggagtggcagaagaaagataggttggagacaattgattgctcgatgatataaaatgttaagtaccatgaatgatgctgttaggctggaatgcgccaagcataaaggtggggcatggcatcaaaaggtaggtcaacatattaaataattccatgtattgaaatatccagaaaatatatagacagatctatagagatagaaactggtctgcccaggactaggggttgtctaaggataaggagcttcttttttggatggtgaaataacctaaaatatattgtgccattgtttgcacaactttgtgaatatattaaaaacctgttaattgtactcac

SEQ ID NO: 120563 - DNA, 3659 bp, Homo sapiens
  misc_feature (179)..(179): n is a, c, g, or t
  misc_feature (339)..(339): n is a, c, g, or t
cccagacccgcccccacttcccccctcaccctcccctccggcagcctctcccatggccactgctgcgggctgtgagcagagccccgtccttgagcagattgacctcatctttcagtcctgcagctgggctgagcggggagtcagctcagaagacactggcctggggatgagactcgggncatgcttcagagggaagaaagagcttctgaacagacaatgctgtcttaaaggtggcatcttggtgctttctcatgccttgttttctttcatcctcagaatgtgtctgggggtgagaggacgggtgtgactgctgaaacttcctttcttggtgattccacntcactcctttctgatccctgagcctgtgccacgccctgtgtgatgtgccggggacaccagggtgaatacttacaggccctgttccccttccttcatgaaacagcctccttcgggctgggtcactgggcactggggcctccctggtcttccaggattgcaacttcacagaatcccttttccataaggcacatgaaagtgactgtgacccgcaacgggagccttgacaaccagccaattcagaacacagaccttgacatcggaaggccccgagttcaaatcctgccttgctccctttcagctggaaagctgtggtcaaattacttagcctctccaagccagttttcccttctgcaaaatgaggttacacaagctgccacctcacagaatgagtgtgagaattaattcttattttccacaccctcatttgacagggggagaaacagaagcccagagagggaaagggcttggttaggatcacaccatgagttgggggttaagtcaggatggggtaggtcccctctttctctgggtgttcctctcccccatcccttatctcaacataaatcctccccagttgcccaggttgtccaggcgattcctggcacacgtcctggggcctgccctccacctttagccctgctctggcttctgcagcagcagagtcctgggtgaccagcagtggcccctggccctctgagtggtggtggagggtgggggtgcactgcagcaagctcccagcccagagcagcctggccatataagggaaggagctcagggaggcctcctggctcaggcctggcgagaaaacccagacagccactgtttattttctcctccccagctcacccacgcctctccaagcctcccaacagaagacagaggtcccccacagccagagacatttcctgaagacatggggaacacagaggcagaaacagcccatccacccaggagctgtcccccacactgccgggagccggcacccagagccgccaggtaaaactgaggccacctggttcaacatcacctttcacagaaggggaagcagccacagaaagaagggcctcgttaagaagtggaacctgggacccccaagcggtgtctctcatcctgactggggatccagagtaggagggagcctttggtgggacacaaaggaacagaacgaggcaccaacagcaaggggcaagcagattcaagggccacagaggagatggaggcaaacaccttcccctggtcagaggctgtgcctcagcccttctccctgcatcagtttctccttcagaagcatgggactacctcccatctagttctcgtttctaaacctaggggagatgctatctttgctgcaataatcttagcctacatcttggaatggaaatggccttggtggaaatggtcttcaactcctctggtccaagctcaggccctgtgaccctggaacaatccccttcctggtcctccatgtaggagcaataacattcccttgccagcagcaccagccattctgatgattaaatggtatcggactctgttttccaaactcagtcattcagatgccccctattttatttcttccatgtctgcaaatgattataatatttttaaatgtaggatgagtcctttttattacacatagaaatagctactgtaaatagcaaactctaacactgtgcctaattaggaaataaaggtaaccataaatacagtaaaaatgaaacaatgttattatggtttaacctgatagtgtggcttgcaaggccctgggcctgaagcctgggcaataagtgagagttagaaaggtgtcaaagacatgatagcagcaaactgaggctttgtaccccacggtaaataggactgaaagcaaattcacagggagcaactgatccattccacaacagaatgctccctgtcaattcgctttccattctgttgtgtcctgtctcaaaaaaaaaaaaaaagtcaaggagggtttcccagagtggccacttgattagagacctagcacaggaggaagagatgggcagggagagtgacggggagcagcacagtccctgggagcccgaagtgggtgggcacagggctccctaggagaatggaaggacatctatgagctgtagcccaagaggaagaggtcactggggctagatgcggcagaccctcgcaggctttgggaagggcttcagaattcagcctgaggacaatggggagcccttttgggatattaaacttgagtaagatatgagcatatttgcatcttgaaaaatcattatgggaagatggctgggaagagaggaggagtggcagaagaaagataggttggagacaattgattgctcgatgatataaaatgttaagtaccatgaatgatgctgttaggctggaatgcgccaagcataaaggtggggcatggcatcaaaaggtaggtcaacatattaaataattccatgtattgaaatatccagaaaatatatagacagatctatagagatagaaactggtctgcccaggactaggggttgtctaaggataaggagcttcttttttggatggtgaaataacctaaaatatattgtgccattgtttgcacaactttgtgaatatattaaaaacctgttaattgtactcactaaatgtcctccttctaaattaagctgttcttgacaagaaaaggaaagaaacaaagaaaagaagagaaaaaaggtcaaggtttggtcctgggtgctcaaatggcaggccacagacaggaaacacagttgtgaggaattacaacagcctcccggccagagctggagaggtggagcccaggtcccctctaacaccccttctcctggccaggttggagtcccgccacaggccaccagagcggagcagcgcagcgccctgtctcccagcctgaggtgcagtgctgcatctctggtcagttgggagtctgagatgaagcactgtagctcaggaagagagaagttgttctgcagccatcagcctggaagtggtaagtgctggggggttgtggggggccataacaggaaggacagagtgtttccagactccatactatcagccacttgtgatgctggggaagttcctctacacaagttcccctggtgccacgatctgcttcacgagtctgggcatgtcctgactcctctgtgtaccccagtgtgtccatcttagcatgaggcgttagcatttccccagcaccctgcctctgctttctctttctgagcccatggcagacacagctaatcagtaaaggcatatattctttttttttttgagacacagtctcactccatcacccaggctggagtgcagtg

SEQ ID NO: 120564 - DNA, 2421 bp, Homo sapiens
ctcggctctaccttgtctcatgcctggccaattggacagggcatgagacattcagcgtagaggttaaaacgagggccctgggttaggaaccccagctcagttctcagctctgtacccttggaaaattcccttcccatggagctttgtggatgcacaaggacttgcacaaagaaaacattcaatatccaggactataaaattccacaaatgattgtgcttattacattcattatcacgatgattattccagacacaaaggaacagaacgaggcaccaacagcaaggggcaagcagattcaagggccacagaggagatggaggcaaacaccttcccctggtcagaggctgtgcctcagcccttctccctgcatcagtttctccttcagaagcatgggactacctcccatctagttctcgtttctaaacctaggggagatgctatctttgctgcaataatcttagcctacatcttggaatggaaatggccttggtggaaatggtcttcaactcctctggtccaagctcaggccctgtgaccctggaacaatccccttcctggtcctccatgtaggagcaataacattcccttgccagcagcaccagccattctgatgattaaatggtatcggactctgttttccaaactcagtcattcagatgccccctattttatttcttccatgtctgcaaatgattataatatttttaaatgtaggatgagtcctttttattacacatagaaatagctactgtaaatagcaaactctaacactgtgcctaattaggaaataaaggtaaccataaatacagtaaaaatgaaacaatgttattatggtttaacctgatagtgtggcttgcaaggccctgggcctgaagcctgggcaataagtgagagttagaaaggtgtcaaagacatgatagcagcaaactgaggctttgtaccccacggtaaataggactgaaagcaaattcacagggagcaactgatccattccacaacagaatgctccctgtcaattcgctttccattctgttgtgtcctgtctcaaaaaaaaaaaaaaagtcaaggagggtttcccagagtggccacttgattagagacctagcacaggaggaagagatgggcagggagagtgacggggagcagcacagtccctgggagcccgaagtgggtgggcacagggctccctaggagaatggaaggacatctatgagctgtagcccaagaggaagaggtcactggggctagatgcggcagaccctcgcaggctttgggaagggcttcagaattcagcctgaggacaatggggagcccttttgggatattaaacttgagtaagatatgagcatatttgcatcttgaaaaatcattatgggaagatggctgggaagagaggaggagtggcagaagaaagataggttggagacaattgattgctcgatgatataaaatgttaagtaccatgaatgatgctgttaggctggaatgcgccaagcataaaggtggggcatggcatcaaaaggtaggtcaacatattaaataattccatgtattgaaatatccagaaaatatatagacagatctatagagatagaaactggtctgcccaggactaggggttgtctaaggataaggagcttcttttttggatggtgaaataacctaaaatatattgtgccattgtttgcacaactttgtgaatatattaaaaacctgttaattgtactcactaaatgtcctccttctaaattaagctgttcttgacaagaaaaggaaagaaacaaagaaaagaagagaaaaaaggtcaaggtttggtcctgggtgctcaaatggcaggccacagacaggaaacacagttgtgaggaattacaacagcctcccggccagagctggagaggtggagcccaggtcccctctaacaccccttctcctggccaggttggagtcccgccacaggccaccagagcggagcagcgcagcgccctgtctcccagcctgaggtgcagtgctgcatctctggtcagttgggagtctgagatgaagcactgtagctcaggaagagagaagttgttctgcagccatcagcctggaagtggtaagtgctggggggttgtggggggccataacaggaaggacagagtgtttccagactccatactatcagccacttgtgatgctggggaagttcctctacacaagttcccctggtgccacgatctgcttcacgagtctgggcatgtcctgactcctctgtgtaccccagtgtgtccatcttagcatgaggcgttagcatttccccagcaccctgcctctgctttctctttctgagcccatggcagacacagctaatcagtaaaggcatatattctttttttttttgagacacagtctcactccatcacccaggctggagtgcagtg

SEQ ID NO: 120565 - DNA, 3746 bp, Homo sapiens
  misc_feature (179)..(179): n is a, c, g, or t
  misc_feature (339)..(339): n is a, c, g, or t
cccagacccgcccccacttcccccctcaccctcccctccggcagcctctcccatggccactgctgcgggctgtgagcagagccccgtccttgagcagattgacctcatctttcagtcctgcagctgggctgagcggggagtcagctcagaagacactggcctggggatgagactcgggncatgcttcagagggaagaaagagcttctgaacagacaatgctgtcttaaaggtggcatcttggtgctttctcatgccttgttttctttcatcctcagaatgtgtctgggggtgagaggacgggtgtgactgctgaaacttcctttcttggtgattccacntcactcctttctgatccctgagcctgtgccacgccctgtgtgatgtgccggggacaccagggtgaatacttacaggccctgttccccttccttcatgaaacagcctccttcgggctgggtcactgggcactggggcctccctggtcttccaggattgcaacttcacagaatcccttttccataaggcacatgaaagtgactgtgacccgcaacgggagccttgacaaccagccaattcagaacacagaccttgacatcggaaggccccgagttcaaatcctgccttgctccctttcagctggaaagctgtggtcaaattacttagcctctccaagccagttttcccttctgcaaaatgaggttacacaagctgccacctcacagaatgagtgtgagaattaattcttattttccacaccctcatttgacagggggagaaacagaagcccagagagggaaagggcttggttaggatcacaccatgagttgggggttaagtcaggatggggtaggtcccctctttctctgggtgttcctctcccccatcccttatctcaacataaatcctccccagttgcccaggttgtccaggcgattcctggcacacgtcctggggcctgccctccacctttagccctgctctggcttctgcagcagcagagtcctgggtgaccagcagtggcccctggccctctgagtggtggtggagggtgggggtgcactgcagcaagctcccagcccagagcagcctggccatataagggaaggagctcagggaggcctcctggctcaggcctggcgagaaaacccagacagccactgtttattttctcctccccagctcacccacgcctctccaagcctcccaacagaagacagaggtcccccacagccagagacatttcctgaagacatggggaacacagaggcagaaacagcccatccacccaggagctgtcccccacactgccgggagccggcacccagagccgccaggtaaaactgaggccacctggttcaacatcacctttcacagaaggggaagcagccacagaaagaagggcctcgttaagaagtggaacctgggacccccaagcggtgtctctcatcctgactggggatccagagtaggagggagcctttggtgggacacaaaggaacagaacgaggcaccaacagcaaggggcaagcagattcaagggccacagaggagatggaggcaaacaccttcccctggtcagaggctgtgcctcagcccttctccctgcatcagtttctccttcagaagcatgggactacctcccatctagttctcgtttctaaacctaggggagatgctatctttgctgcaataatcttagcctacatcttggaatggaaatggccttggtggaaatggtcttcaactcctctggtccaagctcaggccctgtgaccctggaacaatccccttcctggtcctccatgtaggagcaataacattcccttgccagcagcaccagccattctgatgattaaatggtatcggactctgttttccaaactcagtcattcagatgccccctattttatttcttccatgtctgcaaatgattataatatttttaaatgtaggatgagtcctttttattacacatagaaatagctactgtaaatagcaaactctaacactgtgcctaattaggaaataaaggtaaccataaatacagtaaaaatgaaacaatgttattatggtttaacctgatagtgtggcttgcaaggccctgggcctgaagcctgggcaataagtgagagttagaaaggtgtcaaagacatgatagcagcaaactgaggctttgtaccccacggtaaataggactgaaagcaaattcacagggagcaactgatccattccacaacagaatgctccctgtcaattcgctttccattctgttgtgtcctgtctcccagcagagactacaaactccccaaaaccacttacccaccagctgcacgtgagaagccaaaggtagtttatgtgaaagggctttggaaataatcacgcaccaagtgaaggcagaggacacaccttgtcagcttagttctcagcagcaaatcatctcttttccaggataaccctccctgattcttattgaaatctctttgctgaccacactaagctcttctctctcaggggcagtgggagccgtggagagtggaatagaccagctgtctgtgacctgcgagggagtccaatgtcggaatcactccccagccaaatgcacggttttaaaaaatctatttatttatttatgtagagaccaggctatgagactggctaatttttcgtatttttggatagagacaggatttcatcgtgttgcccaggctggtcttgaactcctgggctcaagcgatccacctgcctcggcttcccaaagtgctcaggattacaggcgtgagccactgtgcccagccaccaaatgcagttgaaaagagtttctgcaagataattccacagaagaggaaagcagttatctggctgggaataccttagacagaggctgtcctctacacaggctgtcagaactgacctactgacctgcctgctggcatgatagaccagagggaaacactctttccactcttcccagactgagtgtaagagacagacttttttttttttttttgagacggagtctcactctgtcacccaggctggagtgcaatggcaagatctcggctcactgcaacctccacctccccgggttcaaaccattctcctgcctcagcctcccaggtagctgggattacaggctcccgccaccacgcctggctaatttttgtatttttagtagagacagggtttcaccatgttggccgggctggtctcgaactcccaacctcaggtgatccgcctaccttggcctcccaaagggttgggattacaggtgtaagccactgctcccagccttttttttttttttattagagacaagggctccccatgttgcccaggctgatcttgaactctaggctcaagcgatcctcctgcctgagcctcccaaagtgctaggattacaggcatgagcactgctcccagctctgtttttgtttttttaaggaggtatattttttctgttctctctcagccctgaagaaaggctacccatccccttcagacattcctgaaaatatatgtcatccaacatcaaggccaccacagtgaccactaagcaatgcaagaaggtcctctggggtgccctgagatcttggcagggcaggaagagtgagaaggggctttgcctgctcacctgaaagttcccacccaagccgggcccagaaaacaaaatgaattatctacatggtcatccaatcagccaccaaatggcattacctagcgcctataataggcgtctaggtttgct

SEQ ID NO: 120566 - DNA, 2563 bp, Homo sapiens
  misc_feature (179)..(179): n is a, c, g, or t
  misc_feature (339)..(339): n is a, c, g, or t
cccagacccgcccccacttcccccctcaccctcccctccggcagcctctcccatggccactgctgcgggctgtgagcagagccccgtccttgagcagattgacctcatctttcagtcctgcagctgggctgagcggggagtcagctcagaagacactggcctggggatgagactcgggncatgcttcagagggaagaaagagcttctgaacagacaatgctgtcttaaaggtggcatcttggtgctttctcatgccttgttttctttcatcctcagaatgtgtctgggggtgagaggacgggtgtgactgctgaaacttcctttcttggtgattccacntcactcctttctgatccctgagcctgtgccacgccctgtgtgatgtgccggggacaccagggtgaatacttacaggccctgttccccttccttcatgaaacagcctccttcgggctgggtcactgggcactggggcctccctggtcttccaggattgcaacttcacagaatcccttttccataaggcacatgaaagtgactgtgacccgcaacgggagccttgacaaccagccaattcagaacacagaccttgacatcggaaggccccgagttcaaatcctgccttgctccctttcagctggaaagctgtggtcaaattacttagcctctccaagccagttttcccttctgcaaaatgaggttacacaagctgccacctcacagaatgagtgtgagaattaattcttattttccacaccctcatttgacagggggagaaacagaagcccagagagggaaagggcttggttaggatcacaccatgagttgggggttaagtcaggatggggtaggtcccctctttctctgggtgttcctctcccccatcccttatctcaacataaatcctccccagttgcccaggttgtccaggcgattcctggcacacgtcctggggcctgccctccacctttagccctgctctggcttctgcagcagcagagtcctgggtgaccagcagtggcccctggccctctgagtggtggtggagggtgggggtgcactgcagcaagctcccagcccagagcagcctggccatataagggaaggagctcagggaggcctcctggctcaggcctggcgagaaaacccagacagccactgtttattttctcctccccagctcacccacgcctctccaagcctcccaacagaagacagaggtcccccacagccagagacatttcctgaagacatggggaacacagaggcagaaacagcccatccacccaggagctgtcccccacactgccgggagccggcacccagagccgccaggtaaaactgaggccacctggttcaacatcacctttcacagaaggggaagcagccacagaaagaagggcctcgttaagaagtggaacctgggacccccaagcggtgtctctcatcctgactggggatccagagtaggagggagcctttggtgggacacaaaggaacagaacgaggcaccaacagcaaggggcaagcagattcaagggccacagaggagatggaggcaaacaccttcccctggtcagaggctgtgcctcagcccttctccctgcatcagtttctccttcagaagcatgggactacctcccatctagttctcgtttctaaacctaggggagatgctatctttgctgcaataatcttagcctacatcttggaatggaaatggccttggtggaaatggtcttcaactcctctggtccaagctcaggccctgtgaccctggaacaatccccttcctggtcctccatgtaggagcaataacattcccttgccagcagcaccagccattctgatgattaaatggtatcggactctgttttccaaactcagtcattcagatgccccctattttatttcttccatgtctgcaaatgattataatatttttaaatgtaggatgagtcctttttattacacatagaaatagctactgtaaatagcaaactctaacactgtgcctaattaggaaataaaggtaaccataaatacagtaaaaatgaaacaatgttattatggtttaacctgatagtgtggcttgcaaggccctgggcctgaagcctgggcaataagtgagagttagaaaggtgtcaaagacatgatagcagcaaactgaggctttgtaccccacggtaaataggactgaaagcaaattcacagggagcaactgatccattccacaacagaatgctccctgtcaattcgctttccattctgttgtgtcctgtctcccagcagagactacaaactccccaaaaccacttacccaccagctgcacgtgagaagccaaaggtagtttatgtgaaagggctttggaaataatcacgcaccaagtgaaggcagaggacacaccttgtcagcttagttctcagcagcaaatcatctcttttccaggataaccctccctgattcttattgaaatctctttgctgaccacactaagctcttctctctcaggggcagtgggagccgtggagagtggaagatcgtgagagaggaagatgtccg

SEQ ID NO: 120567 - DNA, 3037 bp, Homo sapiens
  misc_feature (1336)..(1336): n is a, c, g, or t
acttgaggatcccggcaggaagactaattgtatccagtgtcaaatcaggattacaggcgtgagccactgtgcccagccaccaaatgcagttgaaaagagtttctgcaagataattccacagaagaggaaagcagttatctggctgggaataccttagacagaggctgtcctctacacaggctgtcagaactgacctactgacctgcctgctggcatgatagaccagagggaaacactctttccactcttcccagactgagtgtaagagacagacttttttttttttttttgagacggagtctcactctgtcacccaggctggagtgcaatggcaagatctcggctcactgcaacctccacctccccgggttcaaaccattctcctgcctcagcctcccaggtagctgggattacaggctcccgccaccacgcctggctaatttttgtatttttagtagagacagggtttcaccatgttggccgggctggtctcgaactcccaacctcaggtgatccgcctaccttggcctcccaaagggttgggattacaggtgtaagccactgctcccagccttttttttttttttattagagacaagggctccccatgttgcccaggctgatcttgaactctaggctcaagcgatcctcctgcctgagcctcccaaagtgctaggattacaggcatgagcactgctcccagctctgtttttgtttttttaaggaggtatattttttctgttctctctcagccctgaagaaaggctacccatccccttcagacattcctgaaaatatatgtcatccaacatcaaggccaccacagtgaccactaagcaatgcaagaaggtcctctggggtgccctgagatcttggcagggcaggaagagtgagaaggggctttgcctgctcacctgaaagttcccacccaagccgggcccagaaaacaaaatgaattatctacatggtcatccaatcagccaccaaatggcattacctaggtccatcatcatgtaccaagccacaggtcagacccagggccccccaaattaacaagacacaggcactgtcctcaggaagtggagatctagccaggtcagacccacacacaaataacactgatactagagataatgagattgggaattatgattcagccattcaacctgggcttatgtggcatctacaccacctggccctgatttcagtagtgagcacagttgacagggtcccttcccttcacaggtgagccatgtagtccacaagtggaggtggtcgtaagtgaaaaccacattaccagcatggtaaagggttagaaagagggcaccgggtgggngagaacatgaagcagggggtgctgatggctaaagaagtaaaggaggggctgggcactgtggttcatgcctataatcccagcactttgggagaccaaggcgggtggatcacctgaggtcaggagttctagaccagcctgggcaacgtggtgaaaccctgtctctactaaaaatacaaaaattagccaggcatggtggtgcacgcctgtagtcccagctacttgggaggctggggcatgagaattgctttaacccggaaggtggagtttgcagtgagccgagatcgtgtcactgcactccagcctgggcgacagagggagacctgtctcaaaaaaaaaaaaaaagtcaaggagggtttcccagagtggccacttgattagagacctagcacaggaggaagagatgggcagggagagtgacggggagcagcacagtccctgggagcccgaagtgggtgggcacagggctccctaggagaatggaaggacatctatgagctgtagcccaagaggaagaggtcactggggctagatgcggcagaccctcgcaggctttgggaagggcttcagaattcagcctgaggacaatggggagcccttttgggatattaaacttgagtaagatatgagcatatttgcatcttgaaaaatcattatgggaagatggctgggaagagaggaggagtggcagaagaaagataggttggagacaattgattgctcgatgatataaaatgttaagtaccatgaatgatgctgttaggctggaatgcgccaagcataaaggtggggcatggcatcaaaaggtaggtcaacatattaaataattccatgtattgaaatatccagaaaatatatagacagatctatagagatagaaactggtctgcccaggactaggggttgtctaaggataaggagcttcttttttggatggtgaaataacctaaaatatattgtgccattgtttgcacaactttgtgaatatattaaaaacctgttaattgtactcactaaatgtcctccttctaaattaagctgttcttgacaagaaaaggaaagaaacaaagaaaagaagagaaaaaaggtcaaggtttggtcctgggtgctcaaatggcaggccacagacaggaaacacagttgtgaggaattacaacagcctcccggccagagctggagaggtggagcccaggtcccctctaacaccccttctcctggccaggttggagtcccgccacaggccaccagagcggagcagcgcagcgccctgtctcccagcctgaggtgcagtgctgcatctctggtcagttgggagtctgagatgaagcactgtagctcaggaagagagaagttgttctgcagccatcagcctggaagtggtaagtgctggggggttgtggggggccataacaggaaggacagagtgtttccagactccatactatcagccacttgtgatgctggggaagttcctctacacaagttcccctggtgccacgatctgcttcacgagtctgggcatgtcctgactcctctgtgtaccccagtgtgtccatcttagcatgaggcgttagcatttccccagcaccctgcctctgctttctctttctgagcccatggcagacacagctaatcagtaaaggcatatattctttttttttttgagacacagtctcactccatcacccaggctggagtgcagtg

SEQ ID NO: 120568 - DNA, 533 bp, Homo sapiens
gaccccatctgcaactcaaggcacctcacaaacacttcaggtgctgggaaagaccattccatgacacagctcaggcctatccacctctcacggaatcctcctccactccctgcaatcctctcatcactccaacgggagcctttgtgctttctccggtgtctgggccttggcagaggctgcccctcggttcgcttggcttactcctacaggtttcctaattccactcaactgcaccaagcctccctggggtgggttcctgggccactttcactagcgcccctcgctgtgtgctgccagtctcttagctggcatccagacagatgtctgcggcctccaaaaaccactcacaccaaaccaaaaaccactcacaccacaccaattatgttaacttgcattcagcagcttggcacgtactttagtgttcttttcctataattaacccgcactcaaaggaaaagctgcaagttttcctacagccaatcacctgtctaaagatcagaaattacatatttaatcagaaaatattaatgagg

SEQ ID NO: 120569 - DNA, 4510 bp, Homo sapiens
  misc_feature (353)..(353): n is a, c, g, or t
  misc_feature (689)..(689): n is a, c, g, or t
  misc_feature (744)..(744): n is a, c, g, or t
  misc_feature (1216)..(1216): n is a, c, g, or t
  misc_feature (1809)..(1809): n is a, c, g, or t
  misc_feature (3078)..(3078): n is a, c, g, or t
ctgattgatacctggtatttaaaataacatgtttaaaaaagattcctgaattttgttgtatctgtgagagataccctagggaggatcataagtctactatgatcataattgtgttcctggtctagtctatccctttaatgttgggagttgagaatgggagaatataaaagaattcttttggttcaggtaaaaaagacatttttagaaagttagcatgggatagtgaggaaaaaaaaacaaaacaggcttttatttagaagatttgtgttcaaattctggctctacatctaattagttatataactttattaactttaccaaggctcactttactcatttgtaaaatgtggatnataataataaattcctaccttacaacacagctttgtatttggtgagctaatgtatgggacatatagtaggcatttaatagctgatagtgaaatctgaacctggggttcattggaccttcttaagaaaattttggtagatagatatataaatataagtatcatgtttatgtaatatatgtattcctctcccccctttatatctgcatcccatgtcttgtttccagtaggatttaactggtatgtggttgataagttaacttttaaatgtatgtaatagccagagccttttaaagttatcttaaaatgttcactgtaaagcttcgttaatagctgctntaaatctgtttgtcaagtgctttccactctcttccagtttctgctaatgctactnctattgcttactacattatccaagttggaaaccttggtatgatctttcctgctttctcttttctttgtaattctgctgtctagcaggctatttctatgcaaaactaatactgcataaaatattgtcaatgccaatgtaaggtagacagcttagcaagtacatggacttgaaacaccagagtatgctaagcagcactctatagctgtaatgtattaccctttgtcaacagatttctgagacatcaatgaaactcctaatcatgtccgtttatacgatataataccaattttacagtttttttctgcttaattctcattcttattttcgaatggtagtagtatcaatggcagacttctgtaaaactaggactgacatacttagatgatgagatcttgttattccataagcggtaggataccagatgtggtaaacaaataacctctagcagcctgaatggaaggatgtggtaggntggattattgttcagcaaatattcattccctaacctaccccactcccaatagccccccacccaacctatgagagcagtctgtttcgtcatccaattgctattggacttggtcgtgtgacttgatataaccaatggaatgttagcaaatatgccactagcaaaggcttgaaatatgcttgtgcagttggacttggtctttgcacttctattgtttgccgtgagaagaacatgcttctagtagctgctaattcaagaaggatgaaaagcactggctctggacctgatctgcagcttggtaccaagcccagtgtagtccagcctacagccaagtcccagataatgagcatatatgtgagcaaggaagatatacttgttgtatgctgctgaattttgaggtggtttgttactcagtattgtggcggtagctgacaaatacagaaggatactcatttcttttaaagaccttctttaggcactgttttggaagctgcagctttccatgtagcatcaagaactttattgttcaatggcacctattttaatgccagttttgtctctggttactggcaaaactgttcaggattgaaagctcnctttaaagaaatgcttacaattcagatgggaagaagagtgctggttgaccctggctatctccacaaacctgtctgtacttggaagttgtttctaggaaaatataatggccagtggctcctttttttgttgttggatcagctagttgtatgtccttagtggtacaaagggcagtgaatacacaaagatagtatctttaattatggaaggagcctattaaaattccattttatcttaagaagtaaacatgtaaaggaatctggaggaggccaaacacctctttaaaataatgattgtcttgggctaattcctttactgtgccttcagcatcattagatgccaatcctactgtgtaggttcatttgcaaacaaaactgattagagactggaggctgtgtgcatgagacctccctaaagcagaggtttcagaaacctgcacattgtttaaactggttaccctcagcactacttttatttattttctctctacatgggggggaaaaagaaggttgtttatttcaaagggtattagaacccattcttcaaaagagaataccgaaaaagagaaaaaaagatattgtgtaaaagctcagaaggttttcagaatttcccttttttgcccattgtaaacatgatctttccctttgctctgagctcccccctctggcattaatggtatatttctctttctgttactacaaacttcaaagctcccctccaagtcattttgcaaactgtaaagtaatggtgggggctgcttttatttcccagagtttgtggtgggggtggactgagaaatgtagaggaactgttggcaacatttattaacttttaatttggtgcagaaaaaatcggaaaccaagtaccatacaccattgatgttgcttcaaagatactttgagcttgtttaaccaattttttaaagcttgtgtgccggactgaaatgaggtgccttttatacagacctcaggattgtgctgtcataatagataaatccatatgtctctttgtttttgtaattaaagctttatccttcctcttttttgtcttcaatggctatctttgttctgatagagaccgattgctttattgtaagtaaactcctaactattgtgtgatattctctttaaaaagaagactggtgatgcctaatttatttagcaccatctaggaatctgattttcagtgtggcttaattttccagaaaatagtctctccccttttagcattaaagattgtattttaacatctttaatggaaattttataaantacatttctcagatttggtccttttgtcacaatatactgagcacattcagactttttctggtgactgaaggactgtcattttgaacctggttaatcgatgctttggttgcacttttgcacactaccctttattgaatgtattgtgatacgtcagaggtcatcttgtcacatgtgaaggcacggacaacgttccatcgtgctgaaccagtcccagacttccattaaaaaaaaaatcatacttgttcactcttcataccctctgtcttttttttccttgctttttgggggtaggttatcatgtctagctattgatcgtgtctgtttcagacaagctcctcttgctaagttgctcaactattgtggtataagctgcaaaggcagagaaccaaggtggttagaattgtgtgtagaataagcgaccagaaagcactctgtggcatcatgcacatgaattctcagctatggattgtataacataaggacattttgcccctggaaatgtcccttttttcttaattctctcttccttagtttctgctattcttagtggtccaggctgccaggtaaattaggtattcttctgttaacaatggcagtcaaatgatacctaaaacacctttattgtagaattctctatcctagtcccatccatctgtatttgtgttacttaagttttagctattccatgaagatccatttctgggaaaaatgctccgttatctagtgatctgttaatttctagaagtatctaggttgagggtaaagtttttgccgtttattttgccacctagattgtgctgaatggataagtgaatgaatatgtttcttttgatactgaagcaagtgggttttttcttttattttttgtgattaaatatttggttagtttcttttttcctcttaatttgttcttacttgtcctttattccttagagccacataaggaagggcagggggaaagaatttgaattatctcagtgtttttttttttttgtttttttaaaggagatagaatttgctcttgctattcatttcaagaaattggtgatcttgcatcagccggcttgtttttgaaagatgtttttcttggcatccatgcaaactaacgatatgaactgtatcaaacccagagtggcgtgggccttccttgtactgccttctgacttcttcagctgctatgtctgtacttgccctcctatgtgccctgagctctgccctctgactgagaagatctagaatttgactgtcctctttaggccagagctatcattactcatataaatgatattctttttgagatagctttctcctttcctcttcatttggcatcaaaactaataaatgatgaaactaacttcctttccagtaattagaacctttctctttttctcttttttgtctctcttttcctgagtgaaggcagtgtggtgtt

SEQ ID NO: 120570 - DNA, 358 bp, Homo sapiens
ttgctgggaacaaacaaatcctacccaaaccatagcagctgccaatgacaaaatgaaaccaagtttcatagggccctctctgctccacatgtaggcaactctgcaggcatttggagcacctgttagcatggactagaagtctaattggccctttcttcctgtgcagagatcctggtgcaggtggctctccctgcttcacccctaggcatatcttcaggcatttggagcacctgctctcttggttcagcagcctgagccacccccacccttcctgtgcatagactgtggtacagtagggccccctccactgcaagcagatctccagacattcaaatcaccttcttgcttggttcagcag

SEQ ID NO: 120571 - DNA, 294 bp, Homo sapiens
tccagcacaaccaatgccaaggccaatcatggccaaagcttttcacctgactctgaagattctgaatgcattttctcactcagtcactcccctctccccacctccccttccaatccttcctacactcctacaagaggacagacagggactgggacgctgggagtatctcctatgtgccagctactggccctagttttcacaccactgcatttctgttcttttgttaagagacagggcgttgctctgtcacctaggatggagtgcagtgttgtgatcatagctcactgcagcctc

SEQ ID NO: 120572 - DNA, 411 bp, Homo sapiens
aaacagagcacgaggtgaagattcataatattgtaaaaatgtttaataaatgcccaatggtagaatagttaaacaaattatgggatacttgtaatctaagttatacagccttaaaaatgatgtttttggccgggtgcggtggctcacgcctgtaatcccagcactttgggaagccgaagcgggcggatcacctgaggtcaggagttggagaccagtctggccaacatggcgaaaccacatctctactaaaaatacaaaaattagccgggcatggtggcgggcacctgcaatcccagctacttgggaggctgagtcagggagatttgcttgaacccgggaggcagtggttacagtgagccaaggtcacgccattgcactccagcctgggcgacagagtgagactctgtctca

SEQ ID NO: 120573 - DNA, 266 bp, Homo sapiens
ttctccccccaggcataattttttctcagaatttaaagattttttattatcatttatgcagttagatagtttttttaaaattattaatgcagttagttgagtttaagactggagtctcagaatgttttgttattttttggacttgcagatatgagcaaattagtcagcttcattaagccttagtttttactttttttttttttttttttttgaaatggtgtctcgctctctcaaccaggggtggagtgcagtggtacaatctcagc

SEQ ID NO: 120574 - DNA, 607 bp, Homo sapiens
gagacctcctgtctgggctaagtcagcctcagggcccaccagggtcaaacaggctcatccccagccttcttaccaaggagactgtttgggataactcaagaaccctttttcacctatttcattcacatgtagaagataggtctctaaatgaaggcacaaagtctctaatgtacctcagccccagactcttaaaagattctcatcacccctgctaccacacattcttaacccctgattgcaccacagcctgttggccaccactgagtgcattacatgacatgtcacagggaaaagtagccacagaagacttcacacagttctgggagttagaacttgcaggggctcctcccctctgccaatggctcttttgagcctccagcaatcattaaaatctcagttaggcccagtttcacaatctgtaaaatgcaaccaatactaacctgctgacaaggaggccaagtacagtacccacctaggataagcagatttcagccttggccagccaggtctcatgcttcactgagaccactcttctcttccctcggtgacagaatgtaccttcgacaaactcaacctacgcttcacacaggaccactttacaggagga

SEQ ID NO: 120575 - DNA, 166 bp, Homo sapiens
aatgctggatgggggccaaagccctcgtacacactggactttggagatttacagtacaagggctggctgaaggaacactctgaaactcaggcagccaacccaaagttatacatgaccaataacagacaggggatgaggactctaggaaaagaggcaaatggctaag

SEQ ID NO: 120576 - DNA, 150 bp, Homo sapiens
ttgtcttaactcttactctcctgatgatccctttattcttaaatgttgctcttactttcagtgacattgtgttgtgttagtggttgtttttcctgaaaccactcttactctaattactggcttttatttctattagccatgaccaaccaa

SEQ ID NO: 120577 - DNA, 423 bp, Homo sapiens
ttttcgttctgcagtttcactagaacacatttccaccctacctggtgaaaaaatagaggcacagggcagggagagctctccccgaagtcagccgcgctctagagacagcaaggagggcagggcacagccgatggggctgggaagtcgattccatcttccgacctgccagcatcatgatttcataaccaggcacagaatgcctcagaacgcagattgagcacagtggctcatgcctgtaaacccagcaccttgggaggccaaggtgggttgattacttgagttcaggagtttgagaccagcctggacaacatggtgaaaccccatctctactaaaaatacaaaaattagctgggcgtggtggcacacgcctgtaattccagttactcaagaggctgaggcagaagaatcacttgaacccgggag

SEQ ID NO: 120578 - DNA, 347 bp, Homo sapiens
ggggtctttcctatgcaggtgggggttgatgacttacccaagagtcacctctggaacccagttatcttaagttgatagcagtctatctttgctttgcagaagatgtggggaacacttgtcctgcaagcccaggttcgtagcagtgttggcttccccagaaccttggcttcagagcactgtgcctcctttaggaggcacaagaaaactcccacacggttcttccctctgtcccttcctgagccccctgagtgtttggctcttgtggagttgctgctattactaagttgatcccactgccctcctgagtctcctcagggaaggaggggctgtattgtagcccgcattct

SEQ ID NO: 120579 - DNA, 300 bp, Homo sapiens
tcagctcggtaccagtgctactccacaaacagtccacaaacagagtgctacctcacaaacaggacccttcgaagcacagttttctgtgtgatgccaaagaagctggacccacctgctggatagacccaatctacctacaataaaataatggctaatatgtattatgccagacattgttctaagcactttacatgtattaactcattaatcctcaaagaccttaatgtatatgccatcattatccccattttacagctgaagtaactgatacccaagatcactgtgtggtaaagcgcacat

SEQ ID NO: 120580 - DNA, 683 bp, Homo sapiens
aagtgggtgaaggggtgaaaaatgaaataaatattgaataaagcgcctgtactctggaaccagattgtgcgtttttagtttctgcctcactctgtcatactattgtgtaagcttgagcaaataagttatctctgaatgcttcagtttcctcatgtgtaaaatgggaataataatagtatttacctcatcgtgtaaacagccagtaagtagcagcatctctgcactggacaatttttcttttgtcaattgctctttttattcggtacctacagtgtcatctaaatagcctgtcccttagtgtatggagtcaggagactaagaagaaatttagggaaaataaggaaggataaaggaataataagcaaggatgaaggattgcctgcatttgagacccttgtcaatgtgtgttttctccaaagaaaatgtgtctcttttccaaagaaacatagatgtgtctctttggagaacttgtttccaaccttagatgatttttcagattcagtctgtgtgctaaactcaaatcttctcattttctaagtacatctgttcatgacttataatatgttaggaaggtattttgccctggtgaagaaggacttagttcttattcctacttaactaagggatagagaagaaaaaccttcaaattacaatgaaattgattgacctcaattctttttaga

SEQ ID NO: 120581 - DNA, 978 bp, Homo sapiens
gcacttggggaggctgaggcgggaggattgcttgagcccaagagttcaacaccagcctgagcaatatagtgagaccccccacatctcttaaagtaaaataaaatttaaaaaaaggataatgatgagtattgagatgctgctagtgtttagagtctactggaaacattttaaagagtagtaaaaacttttattatttcaatgtctacatttacaatatggtagaaattacattctttgcaataattaaatgtatgataaaaaatttagattaaacatagacagaggagggaaaacagcttttcaaaattgtttttgaacgtatacacaacagaaaatttgaagatgggcactcaagcacataggacatttctacacaaatggtggctccagatagctgaagaagcttaagcagctgtaggagagatctccaaatccagggacagtggctgccatcagagtggtccgtttgtgggaaaatgggtcacagacatagaccatatcaggctatatttcacagaaaatcttcttctttttgttactttctgatgaactatatgctatatggaaggtaccattgagactccttgtgatgaaaataactctacttgaattgggggtaaactaaaattagaagggaaagcagaccccttgtccagccaggttgaagaaaatctaagccggtacagggtgaggttgagagagatggcagcgagaatctggaacacaggcctttcctaaatcaaactttcagcacaggtcattcaagggcgaatttcaaatctatgctatgtttataaattgtgtactctacgtaattgccgggtccctggaattccctactctgtgcgaaactaatctcttactctctaaaacaaacccaagtcctaagcccacaacccctgtttgctctttccttcctagtcatcagaaccctcatgactcagactctccaaggaggcatttaaaaaaatgttctcg

SEQ ID NO: 120582 - DNA, 125 bp, Homo sapiens
cagaatgtggtgtaacaaacccaatgcccagctcaatctcaccactgccaaaaagttcaggcgatttagccacaataggaaataccctcattgttcttacatgatggaacactatttctacgttc

SEQ ID NO: 120583 - DNA, 350 bp, Homo sapiens
ttcatctcttttggttcctctccccagaataaacaaacaaacaaacaaacacttctcatagtttatcaatggtaacaaatggatattagtatgtggagagtggagggtagacagggagctcattacactagctgcagccaacacaagagttcccattatactttagccatagtaaaatattcgtagtcttttgatttaattgatccttccttaaaatggtgtgtgtgttgggtggggttgcagtcgcaaatacagacataccttgcagatattgtgggttcagtgccagagcaccacagtaaagtgaatgttgcaataaagtaagtgacaaaaattttttggtttcctag

SEQ ID NO: 120584 - DNA, 329 bp, Homo sapiens
aggcagtctcgagctgagcaatctgcactttcagctgttgctcctttaacttccattgctcttcatgggcagcactgaaggcactgtcataaagtttatcatggcttattttcaagttcctagttaattaagctaattttcagttgcatttctgccaagctaggccttcctgtatgtaagaattacatttctccttttacactttacttatttggttttggagtgacaagttcaccaaatccttgttctgtctgacacatataatgaagtttcttcacataaaatcgtgaattaatatttttgactaggatactgctgagaatacagct

SEQ ID NO: 120585 - DNA, 265 bp, Homo sapiens
ccaaatgccaggaagaggctgaaaagagccatcccccgtgaccttggtgagggctttttaggaggcagaagtgaggctgcagaatcaataagagagtttgtgaaatacagtcactaaaacccccaaatcttttaatccaggtttggtcaacatttcaaagaaaatagtaagtaacaattttaaaattgtgaggaaaatctttaaggggtaaaggctgttgacacaagtgcttttgagaatggtagtattggctagtattattttg

SEQ ID NO: 120586 - DNA, 383 bp, Homo sapiens
tgtatctggatgatgagatttgttaaagaaaaattattcaatcgttctaggtatagggaccactacaatgggattttgcagtgtctgagagagattgggttcaacagcatgggcaagtgggaattaatagccaaggagcagattagaaagtcagtaaattactaagaaaattactaagaaacatcaggagtaagggagattctggctacaccctctttaaacttattttaaagatcatgttgttgttactctgcgttttgtgatattttggcttaaaacagtgaaaatctgacctgaaattaatactgagcctagataacaaaataaattgaagaagagcatttaggttaattgcaaaacaaaaagtttagctagataaatac

SEQ ID NO: 120587 - DNA, 187 bp, Homo sapiens
cccgccctcaagtttgcacacaagacccattagtgggcataaagaaataactatacacgcctgaggattttccagatctaccctttgctttccatccacgaatcaatcacctgcacatctcagaacctaccctttaaacttttttttgttgttgttgttgagacagagatggagtctcactctgtgg

SEQ ID NO: 120588 - DNA, 696 bp, Homo sapiens
taattattatatttttttttgtagagacgaggtgtggctatgttgcccaggctgatctagaactgctgggctcaagtgatctcctaccttggcctcccaaagcactgggttcctgaataggtgtgagccccctgcccggccgggtttctgattttatgactgcggtcacctccacatctgtaactcttagaaaacactcagtctctgctcagttccttaggtagttcctgggaacggcctagggatcgtgttgagttttccggggctgccataccaagcggccacagaatgggtggtttgcaacaacagaaagatattccctcccagttctgggagtcttgatttcagccagaagtctgaaatcaaggcgttgatgggattggctccctccaggggctgtcaggtgagctcatcctgtgtctcccccacctgctggtggctgctggtggcccttggcgttccttggctcatggccgtgtccctccattctctgcccgtcctcacgtggcctcctccctggctgtctcgttattgaaatttcctgcatcaggctcagcacggtggctcatgtttgttatgccagcactttgggaggctgaggcgggtggatcacgaggtcagtagttcaataccatcctggccaagacggtgaaaccctgtctctactaaaaatacaaaaaaaatagccaggtgtgg

SEQ ID NO: 120589 - DNA, 507 bp, Homo sapiens
actagtccacggtttggctactagtccacggtgggctactagtccacggtggctactagtccacggttggctgactttcactttctgttccttcttccttatttcctttttaaatgaaagaggaactgcttagatagtgaaagtcagccatagtcatccaccgaatactactgcacctgtcttgctgtggatacagagcttcaccaagctgattttcatgtctgaaagtgctaagagtaattttcaacaatttacaaattttcttgttaatgatgatgaaactttatattttacattgctgatgactctcctgtgcttcattctttatagcagtgagagaatgtaacactaagatgttctgctttcttcataatcaaaatattggttttggtatcttaactaggtgccattattgcccaggtctgtgggcaattattgggatataagacaggttaactttgaaaatccattgcttaaaaaaaaaaaacaaaaaactaggccgggcat

SEQ ID NO: 120590 - DNA, 343 bp, Homo sapiens
caaaacaaaacattaccaaatatgtgtgtctgagtccagatcagattaattctgagtattttgtttggcttagtgttgcatgagatttgtccatgttgataatcttgtgaaggccttacctgcaatggatatctgaacgtggaagcagaattcctctctgctagttgtgtagccactactctgcagtgtaacctgggttccaggccctcaaattctctgtagtagagcctaaagaattaactatgccttcctagtggtagagtcagaatgagaaagagaggaagtctgctattgttttccatttctcttgaatatgtagtctgtgcttagaaagtatatatag

SEQ ID NO: 120591 - DNA, 612 bp, Homo sapiens
tggcaatgggaagaagggattggtacaataggactgtctgtggcaggatccatgggtcatgatgagtaacagagtgtaggcgacaaagctgagagctgaatccaaagtaccaccaaggctttgccctcgatggcgagtatgatggtaatgagactgactcaaacagaaaggtcagaacagaccgcagtgtatacagagacagtgcgaccacgtggtttacttggaggtgctgtgtgataatttcgaaaatggtatgtttacagagagttcatggtacttaaagatcaactattgagtatctcagcggactaagcataggacaggtatggtcaaataagaatacatatgttttcaattattcactcagcaagtattattacaaaccttccacatatatgaaccaatatgtttggaagtaatatgtaagatgtaaatctatacaaatctaagttacgatttaatataacagacccatcagctaagtgtaatagcagttgactagtttggtaaaataggagcttaagaattgctgctttgagagtctcagaattctacaaattgtttttaagtacatttatgctatataacaatatggattcaagctacttgcac

SEQ ID NO: 120592 - DNA, 858 bp, Homo sapiens
gattagtttgtaagtctgagtggactgagtggggaagatctgccttcaatgttggtgggtaccatccaacaggcgggggcccagagagaacaaatacagaaggcaaattggtctctaagaggtaggatagatttttcttcttttttaagattgagttttgctcttgttgcccaggctggagtgcaatggctccatctcagctcacgacaacctccgcctcccgggttcaagctattctctgcctcagcctcccaagtagctgggagtacaggcaagcgccaccacgcctggctaattttgtatttgtagtagagatggggtttctccattttggtcaggctggtcttgagctcccgacctcaggtgatctgcccgcctcagcatcccaaagtgctgggattacaggcatgagccaccatgcccagcctaggacagatttttcttctggtgccttggacattaaaaatttgactccatgaccgcaatgttgactctgtgtgtaagcattatatgtgtgcataaaaatgttgaaagttcctcaataaacgaagagacatctgttttttgtacacgtgcatttgtgaaggataaaatttctcaagacctcgtctctttgggagacaatgcagtggtaacgcaacagtttttgaaccatctcatcaagacttaggttttctgtcacagtattacagatgaccagttatataaagctaggtgcccacaattaccaagcatagtgacaaagcatttatacatttcactttttgacctatttctttatgaatgtttcatctgctcatcaccgttatatccgtgcaactgtcattggtatacctgagtgtttatcttgcaaaaatg

SEQ ID NO: 120593 - DNA, 1218 bp, Homo sapiens
  misc_feature (1)..(3): n is a, c, g, or t
nnnattccaaagaagaaactggttcccattcccctgtgtgtcttcagcttcattataagcattctgagaatagagggccccaggtaatcaagcaagacttagttcagttcctcacaaggcagaattgcaaattaaattaaatccagtgtgttgtgagctggatatcagtattgtggacaggttaaattccttgcttcaaccacagaaacttgccacagtagagatgatggcatcccacatgtatacttcatataataaacatattagtctgcacaaggctttcactgaagtgtttctagatgattcacatagtcctgcaaattgtcggatatcagtacaagttgccacaccagcattaaacctttctgttcgcttcccaatacctgatcttcgatctgatcaagaaagaggaccatggtttaagaagtcacttcagaaggagatcctttatttagccttcacagatctagaatttaagactgaatttataggaggatcaaccccagaacaaattaaattggaacttacctttagagaactaattggatcgttccaggaagagaaaggagatccatctattaagtttttccatgtgtctagtggagtagatggagatacaacatcgtcagatgactttgactggccacgaattgtactgaaaataaatccaccagccatgcattccattttggagagaattgcagctgaagaagaagaggagaatgatggtcactaccaggaggaagaggaaggaggtgctcattccttgaaagatgtttgtgatctaagaagaccagccccatctcctttttcttctcgtagagtaatgtttgaaaatgaacagatggtgatgccaggagaccctgtagaaatgacagaatttcaggataaagcaatcagcaattctcactatgtgctggaacttacgttaccaaatatttatgtaacactacctaataagagcttttatgagaagctttataataggatctttaatgacttgctactgtgggaaccaacagctccttcaccagtggagacattcgagaatatttcctatggcattgggctttcagtagccagtcagctcattaatactttcaacaaagatagttttagtgcatttaaatctgcagttcactatgatgaggaaagtggatctgaggaggagactttgcagtatttttccactgttgatcccaactatcgttctcgcag

SEQ ID NO: 120594 - DNA, 300 bp, Homo sapiens
ctctacacagttcagtcaattcggatcataaaaattgtcaccttgttattttaaatttgtaatgccagatctttttgtttattcagcaaatacttattgagcacttactctgtaggaggcactgttcctttatgtaagttttgtgtgcagacaactttagcataaccctttgtttcaaacaatttatgtattattaaattctgaaaccagggaagcattttaatgaagcgttattcgtcattatattggtttgatttcctgtgttcagtaaatttatagtcattaaattggcgatttatc

SEQ ID NO: 120595 - DNA, 366 bp, Homo sapiens
tgattgctgtctcaaggaaaaatcacttgagagtcacaggctacattacttgataaaacaaactatgattatttagacttgaatatttggcagaccttttctagaaaatgaatgaagtgaccctggcacttcaaagaacacaacagacagtattgatttccaatgatcaaattcaagctttcaagcaaaagttaaatatgggggaacctggctaactctgggtgtactgcctatgagttagctctgctgtgcaaggagaagaaaaataattttaaaaaatacaaaaaaaggaagaaaaaatttgggggcaacctgcatttatcaccacaagcttgactgcttgtcagtgattaaaggcttttctca

SEQ ID NO: 120596 - DNA, 645 bp, Homo sapiens
aagaacagcgagacaaaagcatcaggtaacctattaaggaaaacctagcagactaacagcagacttctcagcagaacaaaccagaagagattggggtcattttttagtcttcttaaacagaataactgtcaggcaagaattttgtatccagcaaaactaagtttcataaatgaaggagaaataacgtctttctcagacaagcaaatgctgagggaatttgtcaatactagaccaatgttacaagaaatgctaaaaggagttctaaatcttgaaagaaaagattgatacacaccaggatagaaacctctgaaaacataaaattcacacggcttataaaacaataacacagtgaagaaaagaaagtatctaggtaacaatcaacattatgactggaatagtatctcacaatactaacattgaatggagatggtctaagtgctccattaaaagatacagattggcaaaatgaataaaatcgtcacaaaccaaatatctgctgtcttcaggagacacatctaacacaaggattcttatagacccaagggaaaagggtggaaaaagatatttcatgcaatcagaaaccaaaagcaagcaggaggaactattcttatatcagataaaacagacattaaggcaacaatagta

SEQ ID NO: 120597 - DNA, 445 bp, Homo sapiens
tggtgttctgcttaaacatgtttcagtccatattttttggtagagaagtggaaggcaaggtattggagttgagtaaatttatgagcctactcagttcctatccctgattgttttcctcaccttcttaaggcagaagccagttctggcttgataacaactttgaaaatgttttggctcatcagaacattctattcttgggtaactaagtcaactttaggttaacattacaattaaatttcatcttcagttttatctaggcaagtttataaagctagcttctttcaggtaaaatgagaccatttggcttcttagctagttctcattttgggagggtgtgtgtgtctcttttattctgtatgttcagggttctaattacctagcagcttttaaataattggacaatgccagtttatgatttacaaagcagcaacattataggaggtaa

SEQ ID NO: 120598 - DNA, 270 bp, Homo sapiens
ttgcttttcctaaatgaagtgacttcacaagacaaattgataatttgggggtcacagttcagatgaaaaaaagtaagttaaatggcttacaaccacttttcctgtactacttccttccttcactacttccttcctatacttcttccttcctgcactacttccttcctgtaccacttccttcctgtaccacttccttcctgcactacttccttcctgtattacttcctttctgtactacttcctttctgtactacttcctttctgtactac

SEQ ID NO: 120599 - DNA, 287 bp, Homo sapiens
cagcactatctctcagaagctgttggatcccatcctgaaacctggttcatttgaagctcaagctaactgggatctggctgttttgcttttgagaagtaaaactacggaggttgaagtaaacaggtttggttttaagtatcagataggttggaaataaacctagatcacatttctcaatctggaatcaccatactatactgttagtgttccagaatttctcaagtttgagaaaccttggcctaaaggagtttgccagttatctcttctctgtatttctttgtgttttg

SEQ ID NO: 120600 - DNA, 856 bp, Homo sapiens
cgagctccggagtgactttcccttcctgtgaaggcaatccggccctttccggtggaggacccttccccctgggttgatcttgaggaacttaagagacggtgttttgactcgactcctttcccctttttcctcccggtaccaaagcggttttgtttgctgtttatactctaccccgtggaaaggcggctagctggctaaagggttttatgcctgggggaggatgagtcgctatttggtcgtgacttgtttctgtttaaaattattattatttaccaaatgaaaatgttgtacttaccagtccaaagtgcggggcttatattgttagaagaccacttaaaatgctcctggattctgacaaatattgcatgagaaatttgcaatcagccgtgaagcatgtttccccttctgaaagtttaacacgtgccgtatctacggctgggatctaacacatcccattcctacagggtaatttcctattgtgttttcaaatactactaaagtactttaaccaagagttttcaataatctttatgtattattgcctatctctatgcaaggtatcaatagttttctacaggttcgggactacactgtttaatatataaccccaacccttggtaccgcactgaccttcagtatttggttgctgaaatcttcaatgatgaaaggggtggtatgataattgacacagattagtaaaccgggtccttttcttccctactttcccgtaacatcctgtccccacccactccctcacctaaaccttgatgagaccagaaatgcattttaagttgcatgtattatttacattgaaatattacaatttgaaggttcatctaaatttaaggctatattc

SEQ ID NO: 120601 - DNA, 511 bp, Homo sapiens
ctgccctctggcagctgaggtgccagtgaccactgcttcactatccgcctcctagctctccaggtgtgcaccccacaggaccagcccttcaggcctccaacaccactcacactccagacaacagccccacattgcccagggtatcaacattccaacttcctatttctccctcttcccaggagagactccctgcacctgctgtgggacttgtgtcactgcttagtctctaattgttatatttatgtttacctgtgcaccatctgcctcctccagactgtaagctctgctctgagggcagagacctattttgctgacgttgtatccatttcacgttgggtgttccagtccaactccacactcattcattcactccctctacatcccctgagctggtccctatcaaacagtctgattggcactggagattcaaataataccaagccatccttgccttcaaaaatcacccagtctaatggtgcaacaagcaactgcgacccagcatgctgtaata

SEQ ID NO: 120602 - DNA, 400 bp, Homo sapiens
tttcaattaaaaattgtccatgatgggtcattggatgtgaatgcaaaaagaaaaaaaatgtccagtgatagcttttgtaaaattccgagtaaatcatgtgtctttttgaggataaacatttgttattgaagttccctcatttaaatagctttttggggggcataatttggatttgtagcataattctaatttgatttgacgtacaagatacaaatcttctttatgtgaaagtatatgacatcttaaagtgatatttttacagagtgattttccaaaagatttatttagaccaggtccatcatttccaagtgaagtgaaatctttattcattaactgtaaagtttctgtgggcttccacaattgctaacatgtataattaattcaaaacccatgcttttca

SEQ ID NO: 120603 - DNA, 277 bp, Homo sapiens
ctagcacatagtagtgcttttaaaatgttagctgttgttatttatgtctgctgtttcttgtgagctcccattatttcaatagcaattaacttcagaatgtggatgtattgatatttcccaccctgtttgagctccagttctgtatttgtagataactcccatgtatttccaacaggttgcttagcacagtggttctgaaacttcagcatgtacaataatcacaagatgcatagatttctggaccccatacccaaagtttgtgatgtctaggatagag

SEQ ID NO: 120604 - DNA, 415 bp, Homo sapiens
ctcttttaattctgcagaacctaggataggttctagtatatggaggcacttagtaaggaatgcatgcattcatgcatgaatgaatatgcctgtgttctcccgtgtaaatgttaatgttggatagatttccagaaatttgaattgctttatctaaagttagggacattctaattttatgatgtaccatctaactatccttcaaatggattttactaatggacattttcatcaaatatgtatgagaatgcacatttctataaattcttaccaatacatgaccttagttgtattatcagtcaatatgtgaaaaatatttctattgatttaatttgtatatccttgatgattggtaaatttgagcatttaaaaaatatatatattttttatatgtatatatatgtatacacacacacat

SEQ ID NO: 120605 - DNA, 255 bp, Homo sapiens
gcaggagaatcacttgaacctggaaggcggaaactgcagtgagccgagatcgcaccaatgcactccagcctggacaacagagtgagactccatctcaaaaaacagaaaataaaaagtagaatattgaaaccctcatacgttaatcatggagtataaaatggttaagctactgtgaaaaacaatttaatggttcctcaaaaagttaagcacagaccaggcacagtggctcacatctgtaatcccagcactttgaga

SEQ ID NO: 120606 - DNA, 311 bp, Homo sapiens
taaaaacccacacaacacacacaccatacaagctgcttagcattgttctcttttcatttaataaaacagcttagaaatttaaaaaaaagaagaatgattactgcaatacactagaaaataaatgttattaaactctttgctgttgcgacgatactaacagcaacaaaaaggaactcatattgattatactggaggttttagggtaacaactcatcagaaaacttaagaagtcaaattctctcctgcttttcttataaaaaggtacttacgtatgaccaaacagttgatggatataattcttaagaattcta

SEQ ID NO: 120607 - DNA, 464 bp, Homo sapiens
ccatgctgggagaacgactctctcttcagagctgtcagacagggacgttaaggtctgccaaagctgtctgctgccattttttctgatatgccctgcccagagaggttggatctagagaggcagtaggccttgctgagatgtggtggactccacccatttcgagcttccaggcctctttgtttacactgtcagcacaaaaccgcctcctcaagcctcagcaattgcggatacccctccacctgccaagctgcagctcatggcaggtcaatctcagactgctgcgctagcagtgagcaaggctccgttggcttgggacctgctcagccaggcacgggaggatatttcctggtctgccgattgcaaagacttggggaaaagcgcagtatttaggcaggagtgtaccactcctccaggtacagactgtcacgacttcccttggctaggaaaggaaaatcccccgatcc

SEQ ID NO: 120608 - DNA, 416 bp, Homo sapiens
aaatgggttgcgtaaaggggaaacgtttccaccaatctgggctaattattatacccaggtttacacatatctgaattagatcattagctgtaagctcagttcctggatacagatatagagatggtaaaaacaataggagaaaaacatccttgcttgaatgaaaaggaaaataatcaaaaatgccaggaatgtttatcagtgacttaatgaaatatgtttggtgaaatataatgacaatttaaatttagcagcatctctaactagatgtttacaaggctccatggagacaggtacagagagggcaggtaccacggcacacaggtacagatagggcagcccctgaatggtccactcccagcctggctctcatgggctgtgagcgcttgggcaagttattaggctgggcacttggaggc

SEQ ID NO: 120609 - DNA, 449 bp, Homo sapiens
tggctcaggtcatgtgcttctgtgagctccccctacggccttgccccgaatcccgtgatgcagcgtgacctgcctaggtgccggcggcactttcatgtgcggctgggaaagtcagatttcagcactaatcactggctgccgcctgcaatgagcccacggcttgagctctggggcccacccagctccttaaacacgcagaacctttgccagctgagccaggatcccagctgtggggggttgggggtggaggggtgcagggatcccaaaacccaacccggggccaggttttacacaggcctggactgagaagtggggctacaggctacaggtgcttgataccccaggggggccctggaacaggcctggactgagaagcggggctacaggttacaggtgctggataccccagcggttgggggggtggtgctggacacccagggggcagatag

SEQ ID NO: 120610 - DNA, 820 bp, Homo sapiens
caaataattattaagtgctgaattatgagcatagctctcttctagaaaaacggaggaataatctgtggtttatgtcctcaggcagcttgcagtctatctgagaaaacaagacataccctcaagcagataattgccatttacagtcattcctatgatctcagcactatgtgggtttaatcagccttctgctaaaaggaaccaggtccaagacattcagcatggcatggtagctaagcaagatccagtgtcttcattcagcactgacagagtcactgtctctgagcagtacttagctacagaaactttgaagccttctgcaatttattatgctgagtgcatctaatcaacatgtagaataaagatggagctccagagaagttagcacgcaatctgggtgacaggtgctgagcaaggacagcctcttcccaatactctccaagcggcctgctgtttccagggaatgatattatcattcttggcatctagaacaggactcaatgtaagattgtctaaggcagtcactggctacagttcatggaagcttcaggacggcacttggcatgagctctcagtgctatggaaaaaagaagctcttaggtggaatatttctagctaaaaaatgtatagttttttttgttgttgtttctgttcctttcatttttatttttagaaataggatttcaaagggcatttgtcctggtccctcaggaaagaacattttctaaagtgttcccatcaacaatgcctcaggtgttacaggtccctactcttggccatccagctctgccaccgtgcctggattctgcattttcaaagggac

SEQ ID NO: 120611 - DNA, 1235 bp, Homo sapiens
tggggtttcaccatgtgcccaggctggtcttgaactcctgacctcaggtgatccgcctgcctcggcctcccaaaatgctgggattgtaggcaagaatggttatcttggtaggcaagtcagaatctttgcctcacaatgatcatttaaatacattcagaacccccaaactgctaatatggttttatttatttatttattcattcatttgtttattcatttatttatttaggcctgaatcttacacagagaatttatatatagatattagctacatatactttgaatatgctatacatcgatattagcacctcacgtactttgcaattaagcttctgtaatgtcatgtgatttgtttttggaaaggaatagtggacaggagagtacaatttataatagtagcataactctttgtcctggtggtggaggtgggacgaggtggtgatatttaacctagattaaagaccaggaagggaggaattgcatctgccaaagtttcctccaacagcgatcagtagccctaagtacaaagaagccagatttagccttctgttgtttggcaaaacctcactcagagctttactccctcagacctttctgagtttaaccacagacatgatctttgctgtgctgagaaacttgtgtctacctggcctgtagggagtgtaaactagattaatacagattaacagactctgaacttaaaaaaaaaaatcactcctaagggtgtccttctaatttcaaaatatcaactcctaagaggtcagcagaatttggagatttgggtccttataagaatagctggtgctcttttcttgttcatgtctcaaaacaaagctgttgagagaactgctgcgatgaatcaaaccagaggagtttgtcatgctccccacagagagcccaggacatttgcctgatgtatggtgctgagctccaccttcagaggaactctctcttttttttttttttaaataactattattagcttgacaagaaaaaaaaagtgcccaacagttttagtgttaatcttggtgctctatggtgcattagcagagatatgaacaattaaatgaagacaaagaaaataaaaataaagtctgattaacttttgctcattttgtctttgaggctcttcaaaattgctttgaatgctatggtttgcagaaaaagggtgagcatgatggctgtcctatatgtatgtaatgattttaatatgaatccttgtgtctggactctta

SEQ ID NO: 120612 - DNA, 191 bp, Homo sapiens
gcactctagcctgggcgacagaacgagactcagtctaaaaaaaaaaaaagaaaaaaagaattatttgttgtgaaaaacttattttaacaagttctccaaagttttatttatttctaaaataaaagattagaacaaaattcttattatgggccgttcttacagaactttttagagtgccatttgctataatg

SEQ ID NO: 120613 - DNA, 492 bp, Homo sapiens
catcccacattgctgggattacaggcatgtgccatgatgcccggctaatttttgtatttttagtagagacggggtttctccatgttggtcaggctggtctcgaactcccaacctcaggtgatccacccacctcggcctcccaaagtgctgagattacaggcgtgagccaccacgccctgcctaaagagacatcttaaatacgcctttatttttagacaatagaaaaataagcttcccattatgcaagagtcctatggcctttgtgctttcctaccctgtgaactaagagtctaaatctgtgaaaagatgtccatgaggtagagttgaattaaaatagcaggttgcagaacaatatttgtacctcctcactttcttcttttctgcctctctcccttccttctctacttccacaaaagttgactgagcacctattgtgtgctaatatatgctaagttactggaaatgcaatggagagcaaagcgacaccagtgt

SEQ ID NO: 120614 - DNA, 662 bp, Homo sapiens
ggcattaaggcagcttctcggctttcaccccaaaaggcttcctcagtgttagaggcttgtccatttcagatagttataaatatgaagccatctaatacaatccacatgattttaaaaaatattttggttcatccaagttctaattagatcattaaatgctcagtggagctaacccatttcactgccccacccgtagccttacacaaaacttccagacaatgacatgtcacccttccctcagaatcacctagaaaccatcgcagttgcttcaggactggacaaagagcttctagagaataagcagaaagaagagaggtgaaaatactgaattcagggaaagaaaaagactagggagccaggaaggaggatggtggcagtgacctgtgccccagctcctttcaaggaaggcagaggcaacgctcatttatctgaggggcaaggctcttggatttgcagatttaggtgctaccctaacactgtttctctgggatgagagcaaagagtgaaataatttacagccacagacaaccctgctttctgcagtgcgctccatcaggagacgcttcaccaccctgtttccatagtctacaggagtctctgaagtcacatcagctgtaggaactcttgtgaggaaaacagcctttgtagccctcccctgaaag

SEQ ID NO: 120615 - DNA, 272 bp, Homo sapiens
catgagtaaggcaatatgcaaagatagacaaagctctgtcctctctacctccccaggtgcctgggattctcaaaccatggcctaggacatgaccaggcaagtctctcaacctcttgtcccttgtcgttccttgttccctcatcacaattctttctagttacctgcctcactcatgaaatcatggcatcatgagagatcagaggcaaagggcctttacaaaccagactacctaagaaatcagtaagaatgaagctgtgtgatacaggccaaga

SEQ ID NO: 120616 - DNA, 283 bp, Homo sapiens
atacaatttcccagctttccttgcagaaaagggtagttatgtaacatggttctggaaaatgagctgcaggccgacatcttaaagggggacttcccttgccagattaaaagagagagcctcactaagagaaactcagtttttccctttagtcctttagtccctcctattctctatgtctaaaatatagacatgaagcccagagttctagtagccactttgtaaccttgagttaagaagcaagagtaggggtcgggcacagtggctcacgcctgtaatcccagca

SEQ ID NO: 120617 - DNA, 335 bp, Homo sapiens
gagatagtatgtcctctgttgtttttccatatgtcatgcacttttgacccaaataatgataaaaagcaactgtgtgaatgtctgcatttgaagatactactcttgggaaatgggtcttctttctctcagcactgaatcttccatcatcctggctctaagctgtgctaatttgaaaataagggagaacaaagaagcttggtctggagatgaatcacagtatgaaagaacacacaatcaaatggcaaagaaaaggtggacatgcttaggctgattcataccctggtaaattaatggcacagttgcctcctgattacaaagatctacttccaaagaag

SEQ ID NO: 120618 - DNA, 770 bp, Homo sapiens
atgccaaccatgtggactccagctgtggtcaccgtgctccgttcgcccatggttctcctacaagtatggtctttgcccctcaatcatatctacttacacaagcagtcaagcagtcaacaaagaagaaatttcttttttcggagacaaagagatatttcacacagtatagttttgccggctgcagtttcttcagctcatccggttcctaagcacataaagaagccagactatgtgacgacaggcattgtaccagactggggagacagcatagaagttaagaatgaagatcagattcaagggcttcatcaggcttgtcagctggcccgccacgtcctcctcttggctgggaagagtttaaaggttgacatgacaactgaagagatagatgctcttgttcatcgggaaatcatcagtcataatgcctatccctcacctctaggctatggaggttttccaaaatctgtttgtacctctgtaaacaacgtgctctgtcatggtattcctgacagtcgacctcttcaggatggagatattatcaacattgatgtcacagtctattacaatggctaccatggagacacctctgaaacatttttggtgggcaatgtggacgaatgtggtaaaaagttagtggaggttgccaggaggtgtagagatgaagcaattgcagcttgcagagcaggggctcccttctctgtaattggaaacacaatcagccacataactcatcagaatggttttcaagtctgtccacattttgtgggacatgg

SEQ ID NO: 120619 - DNA, 596 bp, Homo sapiens
gacagcccattccctttgtacataactaatttcgaaaaggacttgtgactcaacgttggtcaatgagatgacagggaaagtagacagaaggcccctgggaaagctgctttgcctctaaaaaaaaggcactgaaacaaagcctggacacactgtagccaccttgtgcccatttgtgctacttttcataatacagacattacatccatcttgtatggattatgtacgtattctaggtgcaaggcactactctgagtattaactcatttagttctcacaagaaccctacaggcagacaatacagttatccctgtattctagaggaggacgctcaggcacagagaggctaagtcgcccaaggctactcactcgtaactggcaaagctggaaactgaacccaggcagtctggctccagcatacattctcttagccacgatgacaggtcagctctccatggaagctgctccaacccctcagtatgctaccttccttaaaagtattattctttactgatggccaccaaccctttccactttttaaaatgtccttcaagaaaatagactcctggtcaggcgtggtgcctcacatctgcaatctc

SEQ ID NO: 120620 - DNA, 825 bp, Homo sapiens
agcggagatgttccttccaaaaggctgagctggagttgggggttctctcatggcttctcttggctcccgtcacaagaactattctagcttaagggtataaaacaggatgtttgtcgccaggcgcggtggctcacgcctgtaatcccagcactttgggaggccgaggcgggcggatcatgaggtcaggagattgagaccatcctggctaacatggtgaaaccccgtctctactaaaaatacaaaaagaaattagccgggcgtagtggcgggcgcctgtagtcccagctactcgggaggctgaggcagaagaatggcgtgaacccagaaggcagagcttgcagtgagcggagatcgcgccactgcactccagcctgggccacagagcgagactccgtctcaacaaaaacaaaaacaaaaaacaacgggatgtttgtcaaaagctgccttttctaagaacagagagcgtgtgactcttctctcaccccaccatggctacttgttactgtgatctaaatttaattgtctccattagccacagggagctattgtctgaagagctgggggagcttatttacagttttatttcagagcaagataaatggtgtcccctaaataataatgtgacttaatggtagaggcaggactaaatcccaatttctttccagtttatgttttactactaaagttgaaaacaagattctctttttagagtgtaactatgctgttatgaacattatgaatactccaagaattagctcataatgttgtctttttttatttttttttatattttgattactgcctttctcttgttagaagaaggaa

SEQ ID NO: 120621 - DNA, 192 bp, Homo sapiens
agtcccctgagttctcaggaattcgaggtagagctatatctgtcccaggccacagtccccagagttaaagctgtagaaggtagaagaaatggggttttgtatgtaggcttctcagggacccagcaggagatgaaaagatacctgaggcttttgatcaggatcagctggaaaaggtagctgagcctctcaatg

SEQ ID NO: 120622 - DNA, 827 bp, Homo sapiens
ctgtgcttgggcaggactggatgaaggaataagctctaccctctttgtcattattaccgttgcccttggagtgggtgtcatcaccatagcactgtatttgagctatcggccctgcaaagtggacaggaggaaattgctctataggcagaaagaggaggacaaagaggaggaaagccagtttgctgttcaggaagagaaaagtacaactcatataattgacaactgtttgattgaatgagacttctgctactgtggtttcccagggagggaagaagggatagaggagaaaggaagaaacacaatggcaggctgcattcccctttgtgtacgtctgtcctgtaaaacggtgtttcaggcccccatgccccatgtcctgtgtgtccaatatgtccacaagctcaccattctctctctctctctcttttcttttctttttctttttctttttttttttttttgagatggagtcttgctgttgtcgcctaggctggagtgcaatgatgcgatcctggctcactgcaactgcagcctcccgggttcaggtgattctcttgcctcagcctccctggcagctgggattacaggtgcacaccaccatgcctgtctaatttttgtacttttcgtagagatggggtttcaccatgttggctgggctggtctcaaactcctgacctcaagtgatccggccaccttggcctcccaaagtgctgggattacaggtgtgagccaccgcgcccagccacctttctctttagagctcactctattcattaggaatctcagtctcaatgtttgatttgtaagaaggcctcttgctccttgccagg

SEQ ID NO: 120623 - DNA, 459 bp, Homo sapiens
ctgttctagctaatggcaccgctatgcaatagccatcagagctcccggatcctcaccaggtgatggctactgttttaagaactttacctaataccttcaacaaccgcatgagtaggtagcattaaccctatttgattaatggggaaagtaaggcttagaagttatgctgatttgcccatgatcctacagccagcaagcagttaagcttgctgtagaatccagggtgcgtgtcaaaagtcaacctcttcccatgtcacttcccagcctctccaaacttagaagctctgcagtctagattgttctcagagattaagctttacaactttattgtctctcaaatctatttccttctcttaattcccatagctacctgctgtttgggtgatgttttgcttttattagggcctccaaatcagcatagcacaacaactccagaattttactttgtttgaattccca

SEQ ID NO: 120624 - DNA, 476 bp, Homo sapiens
caagaggattgcttaagaccagcaagtctgggctgaagtgtgctatgccagtcaggtgtccacattaagttgggcataagtatggtgacctcttaggaacagaggaccaccagattgcctaaggagacgtgaaccagacaaggttggaaacagagcaggtcaaaactcctgtgctagtcaatagtgagataacacctgtgaatagccactgcatcccagccttgacaacatagtgaaacccaatctctttaaaaaataaaatctttagtataaaagctgccatcctctttaagtagcatttagtgttttgaatgaacgtggtttaattattgatgatctgttggaagatccttaacagaaaagttagtcaacggtatgaacaattcacatgattattctacatagtaaggcctgagtccttatgaatgaatatatgaatatttacatagccacattaactatgtcttactgatttg

SEQ ID NO: 120625 - DNA, 418 bp, Homo sapiens
gcaaccattaccagcacagcttctccagaactttttcacctttcaaaacagaaatggtaccattaaacgctaacttgccacccccagcccttggcaggtgcctttgtactttctgatccttgtgaagttgactactctgggcaccccttggagatagaaccacatgtatttgtcctttcatgactggcctagttcgcccagcgtagtgtcttcaagttcatctgtgttgtagcgtgtgtcaattgtatgtcaccccatgttttatttttccactcatctgttagacatctggactattttggccttttgtttgctgttagcatgggtgtgcaaatgtgtgttccaggctctacttttcagttcttcagcgtaatacccaaaagctgaattctaggtcaaatggtagttctaggtttaa

SEQ ID NO: 120626 - DNA, 368 bp, Homo sapiens
aatttaaccacacactactctgatctccttgagggtaagggctatcttttaactcttgtctttccagtgttcaacactgtgcctggcacatagcaactactcaaaaccatttaatggatgaaacatcatttctgctacttgcatgcagtcgagtgctaacggaatcacagaaaatggatctttcttggctcatttgacacataggaaaaccgaggcccagaggcttcaggcttagtaagttggcaaaaccaagactaaaacccaaggttcctgttttggaacaggtcaattttttcccattaaattttggaaggttaggaagctaggcaagtgctgccctcttgctggtggtgtttgggagacaggtc

SEQ ID NO: 120627 - DNA, 435 bp, Homo sapiens
cactctcttagctttaacccccatccacttatgtcttttattatacatatataacaattattattttctgagacaggtgtcgccctgttgtcttggctggagtacagtggtccaggctggagtgcagtggcacaatcatagctcactgcagcctctacctcctgggctccagcagtcctcttgcctcagtcttccaagtagctgggactagaggcacatgccactgggcccagcctatttgcaaaacttttgtagagacagaatctcaatatgttgcccaggctggtctcaaactcctcatctctaacagccctcccggcttggtctcctaaagtgctaggattacaggcatgacccactgcaccttgactgctttgtggtttttaacaatctgtgaatctacatagtctatgaattaggaatattgttttggag

SEQ ID NO: 120628 - DNA, 764 bp, Homo sapiens
gtgaatatgcaagtaataattgtcttactatgaaatattttctgtcatgtccaaatcttcttttatagatgcttgtaataaaaatttatttttcctttgttggaacctcttaagcctataaagtaatcaatagaattttaaatcttaacaaatattttttggaacttttaacatgacattttaaagcataaagggcagttttcattttggggcctagagtagttgtgtgggaacatcattttgtcaagttgcctcatacaggtaaaagttcaaactgcatttcagtatcacaaattaatggtgattggtagaagaaattaaaaagagaagttttagaaaaactttagagattgtacagtccaggcatcttcaggatacaggtgttatctatgactaatccctaaaaggtaattattcatccttagggaatacttacagaaacaaggttccttaaatagccctttttattattgggcagctcaaattgtcagaaaattcctctatttagaagtaaattttgcctcctataggttcttctcaattatcgaagttctgtctttaaaaggcaatgcataattaacctaatcctgtgtctacatgataaatcttagcattttgaaagcaattatcagatctcccctacaaactatctgtctgtcttctaatcttttggcagtttgaatcaacacatatttattaaatacctaattggtggtgccctgtgctgtgtactccgtaggcattgaggaatgcattagacattg

SEQ ID NO: 120629 - DNA, 152 bp, Homo sapiens
cctccaggaacccagggggctggctggtcttggctgggttcgggtaggagacccctgatgaataaacttgggaatcactggggtggctgtaagggaatttaggggagctccgaaggggcccttaggctcgaggagatgctcctctcttttcc

SEQ ID NO: 120630 - DNA, 362 bp, Homo sapiens
ctccaacttgggctgacaatggtcacacgaaaaaacaggtcttcatatttttatcttacagactgggaaacaaactcagagaagtaaagcaactaattccaaattatatttaattccaaattatatgtaaatagcaaatgaactatacaatacaggtttgtcttactacaaagcatgtgctctttccacgcagccacagcgcctctcacttggacagtggatacagctgtttcaactcttcctaaccacactcaggaatacccggcccaggggccagggttccttccctcccatcactcaaatgctccttcctgtgaagtcccccagctaacacggagaactgaccccaccccatcatgcat

SEQ ID NO: 120631 - DNA, 494 bp, Homo sapiens
tgtgtgatgcagtgtgaagcgagcgggtggggcgggggggaaagaattcaccctggatggctcaatggaagagacttaaatgaatgacttcttacagccatgtggtcaggggcagacagggacgttggagtgcccagaggctcccggtgagaagggatggaaggaattgctggagcccaagatgaggggctgtcatcgtggatcatggaggaaatgctctgacctcccccttggctatacctgtgttctgctctagccttcccctggtgaacccagctggaagccagccagcacaggagccctagagtttctcagggacacacatggacctggaggggcaaagaagaaccagtactgtggccaagagctggctgtgaaataaaaatgcctgccgccaaatcctggttctgtcatttactagctgtgtgacttaaggcaagctgtttaacctctctgtgtctcagtttcctcctctgtaataacaatacctacct

SEQ ID NO: 120632 - DNA, 282 bp, Homo sapiens
tctcagtttttatctattagctgtgtaatcttgatttttagattccttggctaaaaaaattgagaattagggtccttacctctggtaattgttaggagtttgtaggaaatgactgtgaaaccatgtaactggcagtgttgtagggtaccttcagtattaagttctcttcgcctctactctcacccagccagtttgtctctactaagactgtatttccttgttgaaagaaaggtcccagagtttttgagaggcttacattcacatttatgagaataaaattga

SEQ ID NO: 120633 - DNA, 398 bp, Homo sapiens
tttccttcatcttcctgtcttcttccaagtcctccaaactctccgacctctggctgttagccacttctgaacctgcttttatattttcagctatctttgtcacaacctggcaatgtagaaggaaaaaaagtccattttcaggggcaaacttcaagaaggcttcagatatttgcattaaaaggaagaccagtattaatagccaatgtgatggggaaaagtcattgaagacatttaatagcttcaattcgcatagtaattttctgtaagatcataacaaaaaggggtttaattggcttatagttctgcagtaggctgtaaagaaagcatagtaacttctgtttctgggaggactcaggaggcctctcaattataccagaaggacaagcagcaataaaatg

SEQ ID NO: 120634 - DNA, 257 bp, Homo sapiens
actgaataacaagttaaaaagtccttctggaatcgacaagcctttttgccctggaaggtggcatagttgcttcttaggggaatatccgtggtcagggacagaggccttgagaggctgggcaaaggtcctttcagccctggtttcattcgtctaaccagcattccactctaacagcctcctccattcaagcgcttactccattaacaaacattaatgggcacttactcgatgccaggcatggcactagccactgtgca

SEQ ID NO: 120635 - DNA, 366 bp, Homo sapiens
acaaggacaggccgctccagccacagtgtttcctctccccgccggcatcctgattccacgcatgcagactctccatactgtcccttgccctggcagccccaaagccccgcagtgcgctctgctggcagcccctgtgggctctctctcgctgctcctcctcccatgagctgctgtcacacacaatggccgcatccccccaggctctgagcccaggtcaaacccagccaccacctgagtcccagcgcagctctgcttcctctgtgactcgggccactccaacctctcccatcgcgaagccccctcgtgccctcctacgtgcacaccgtgagctccaacgctttcgtgcacgttagtcctgcccacttc

SEQ ID NO: 120636 - DNA, 142 bp, Homo sapiens
agctgtcctcaagcctcacccagtcatgcatcccacacagcaccccatggctgccatagctcgtgccacttacaaatggcattgagtcaaaacacaaaacgtccaccagccctcagagtcgagaaaccgagttccaatcctg

SEQ ID NO: 120637 - DNA, 516 bp, Homo sapiens
aactgtctctttacagggaagagggtgggaggagacaggccctgaaaatccctggtccctgctaactggggagtggctgcagcccctgtgttgggcagcccttgaggtcagtagtgggtgagacttgcccctccctccctccatggagtcctctaggcagcagtgttcctcatttctaccttccccacaatgggtcctgaggctttggctgggaagaaggggaaagaggtcggggcatggggaggatggaagttggaaattgcaggaagcctctctactgtctaggcctaaactagtatcctctccagaatataccagaagcctcttttttggcagtcattaagctgatgctgtattttgatcttcatctgactctgtggatcatctccactggggaagcaactgaaagctagattaattggcacccccaaatctccagaagcatcaagcacatgttgcttttataattagaaaaatggtgacttttcttttaacccagcagttcccttcccccat

SEQ ID NO: 120638 - DNA, 1039 bp, Homo sapiens
  misc_feature (976)..(976): n is a, c, g, or t
  misc_feature (981)..(981): n is a, c, g, or t
  misc_feature (996)..(996): n is a, c, g, or t
  misc_feature (1000)..(1001): n is a, c, g, or t
  misc_feature (1005)..(1006): n is a, c, g, or t
  misc_feature (1009)..(1010): n is a, c, g, or t
  misc_feature (1012)..(1012): n is a, c, g, or t
  misc_feature (1017)..(1017): n is a, c, g, or t
  misc_feature (1020)..(1020): n is a, c, g, or t
  misc_feature (1023)..(1023): n is a, c, g, or t
caacaggaggctgtctggacacactgattactcactcaccagcctccctcttttgtccaccagcccagcctgactcctggagattgtgaatagctccatccagcctgagaaacaagccgggtggctgagccaggctgtgcacggagcgcctgacgggcccaacagacccatgctgcatccagagacctcccctggccgggggcatctcctggctgtgctcctggccctccttggcaccgcctgggcagaggtgtggccaccccagctgcaggagcaggctccgatggccggagccctgaacaggaaggagagtttcttgctcctctccctgcacaaccgcctgcgcagctgggtccagccccctgcggctgacatgcggaggctggactggagtgacagcctggcccagctggctcaagccagggcagccctctgtggaaccccaaccccgagcctggcgtccggcctgtggcgcaccctgcaagtgggctggaacatgcagctgctacccgcgggcttggtgtcctttgtcgaagtggtcagcctatggtttgcagaggggcagcggtacagccacgcggcaggagagtgtgctcgcaacgccacctgcacccactacacgcagctcgtgtgggccacctcaagccagctgggctgtgggcggcacctgtgctctgcaggccaggcagcgatagaagcctttgtctgtgcctactcccccagaggcaactgggaggtcaacgggaagacaatcgtcccctataagaagggtgcctggtgttcgctctgcacagccagtgtctcaggctgcttcaaagcctgggaccatgcaggggggctctgtgaggtccccaggaatccttggtcgcatgagctgccagaaaccatggacgtctcaacatcagcacctgccactgccactgtccccctggctacacgggcagatactgccaagtgaggtgcagcctgcagtgtngtgcncgggcgggtccgggnaggnngganngcnnangggtntgngancatcggaacgggggga

SEQ ID NO: 120639 - DNA, 514 bp, Homo sapiens
acgcttctctttctggtcaaaatggctggtaagcaggccggtaagtaactgggggtcttcttggccggcatcgtcgcgcttcaccgtttatttttgctgcagcttgctccgttttctctcttctttgtaagtggccaagtttgtcgcggaagggaaattggctgcttcagtccagtgaaaaggatgtgcttccccactcgtttgctgtccccagggcgggcttgcctgtatagggttgggatgttaacccgctgtttgtgaaggtgcccgcggtggctctgacagccctggagttccagctgcccgtgctcggaagtccttccccttggccttagaaaagttaaagggcacaagaggataactagtggatgactttcaacccgaatgagctcagtgctttctatgacccaagtgctctatcgtgtgcattggccctataaattttcttgccattgcgacgagggagatattaatttcccttttacgctgataagataactgaggcaaagtgacc

SEQ ID NO: 120640 - DNA, 396 bp, Homo sapiens
cgaactcctgacctcgtgatatgcccgccttagtctcccaaagtgctgggattacagacgtgagccaccgcgcccggcctccacttctctttctaaacattacgtgcctcctgcacacagagtgccctgggcttcagagataggactgagagctgtaagaaaggaatcgtgacaatccttccccaaggaagactctagcctgaacctttggagttgagttgaattcaacgtaaatgaatcaagttgaactgaactgaactgaacaggggcagctgctggagactcacatagaaacccactccatcgttctgcttctcctagaccagtatttggggttggggaggtctgagctctccaaccagcaaggctggacacaggccaagttgccaatcctga

SEQ ID NO: 120641 - DNA, 662 bp, Homo sapiens
tgtctcagaggctgcgctccttccagggcccaaggactcacagcttcctccgctgccttcccggaccaacaaccccccaaaagttgtgatgcttttctttacccagtgctttggggctgtattagatctcattcatctccggtttcagcactacaaggctaaacgggttttctccgctgccgggcaacttgtctgtgtcgtcaaccccacacacaacctaaagtatgtgtccagtcggcgcgccgtcactcagagcgctccagagcaaggcagcttccaccctcaccatctctcccaccaccactgccaccaccgccaccaccaccacctccgccaccacgcccacccccaccaccttcaccaccaggaggcggggctgcacgccaacccggtgacgccctgcctgtgcatgtgtcccttgttctcctgccagtgggaaggccgcctggaggtggtggtgccccacctgcggcagatccatagggttgacatcctccagggagccgagatcgtcttcctggccacggacatgcacctccccgcgccggctgattggatcatcatgcactcctgccttggccaccactttctgttggtgctgaggaaacaggagaggcatgaagggcacccccagttctttgccaccatgatgctgattggga

SEQ ID NO: 120642 - DNA, 196 bp, Homo sapiens
tgaagcaatggagagcaaaacaccaccactcttaggaaccccctgtgaacatcttgaaacatttgtcaaaacaaacaaacaaacaacaccccagcaagaagggaaaaaaaaaatctatgatgatcaggtatcacagcactgagaaagttatactgtgtctggctttaataaaaccatgtaactttgaattattttt

SEQ ID NO: 120643 - DNA, 647 bp, Homo sapiens
aacaaaacaaaaaacagcaaaaagtaggtctcctccaaccggattacttaaagtctaaaatttatgtagtagtaccatctagtggcaaaagaggacactgctttgctatttgattatatgtgtctttgtagcagccagggaaataagtgtttatgggttagggaaatgtgaacactgtatattaaggaaatatttatttttaagtataatgatattattgtgtttgtgtttagaaagaatccttgtttaaatatacatattgaaatatttacaaagaagttgtatgatgcctgagctttattttaaaaataagtctgaggcagaggggtggaaatagaggaagtggatatgggtgtagatgagataaaactgaccatgaattgataaaaaaaaaaatcttccaggcttgtgtgttgtttcttccctctgtggtattttaacatctgagtcccgggtccagttcttccgtgtctgttcactactcttattccttacaaatgttcctatgctaatccaagttttatttcctatgcatttcaagggtttcccttattctccagacttttgtgtgtcactgaggtaactgttactgggttatctatataacctttataatcaggtatcatccacaggtgcaacctttgggc

SEQ ID NO: 120644 - DNA, 289 bp, Homo sapiens
actgcccacgctgtgggagctgagactggatgctgttctggagatcccaggatttactgagcatccatgctctgccatccgtctagttggagggagctgcctcccgttgaaagagtctgcccttctttagggaccagggctctgctcttcctgggaatttaccacatcctcttccaggttcccttcacccatcctgcggggtgggaggaatatatcattgttccccttgaggtgcccccctgcgtgggtcacttctcccgctcaccaggcaacacgggcatcttcttgg

SEQ ID NO: 120645 - DNA, 411 bp, Homo sapiens
gcttgcagtgagccaagatctcaccactgcactccagcctgggcgacagagcaagactccgtctcaaaaagaaaaaaaaagaaagagtcccattatttatgcagtcaatggtatcttattctattgcttagcctcactaacatgaaatgttttatcttaaaaaattctggccgggcacggtggcatacgcctacaatcccaacacttggggagcccgaggcaggaggatcatctgaggtcagcagttcgagaacagcctgaccaacatggtaaaaccctgtctctactaaaaatacaaaattagccgggtatggtggccagcgcctgtagtcccagctactcaggaggctgaggcaggagaatggtgtgaactcaggaggcggagcttgcagtgagccgagatcgtgccac

SEQ ID NO: 120646 - DNA, 403 bp, Homo sapiens
cagtctcgtactcctgacctcaacgtgatccacccgccttggccacccaaagtgctgggattacaggcgtgagccaccgcgcccggacactttacttaaaatgttctttattaaacatttttcaaagctgtgggtttttttaattttttttttattttttacaaaaagtagagactgggtttcactgtggtctccatctcctgacctcatgatccgcccgcctcggcctcccaaagtgctgggattacaggcgtgagccaccgcgtccggcttagttttttggtttttgacagtctagcctcactcttgtccaggctggagtgcaccagcatattcatagctcacagtaacttgaacacctgagctccgtctcagcctcctaagtggctaggactacaggcat

SEQ ID NO: 120647 - DNA, 131 bp, Homo sapiens
cacaccatctttagtcccacctccttgggaggctgaggcaggactgcttgagcccaggaattcaaggctgcagggagctatgatcacacctgtcgacagccactgcactccaacctgggtaagagtgtgac

SEQ ID NO: 120648 - DNA, 378 bp, Homo sapiens
tatgagtaagcattgaggcctcaatagttggcaaaaagcagatcttcctgtgggaaaaatactttgaataaggaagaaaaaggagatttgtattatataagtttggctgtctctaatttaaagaaagttaaactttattgcacaacgactactagttctttcttcttcttcttccttctccttctcttccttctcctttttctgtctcctcctacttctccttgtcctttttctcctcctcctcctccttcccttctccttcccttctcctcctcctcctctttctccttcccttctcctccttctcctccttcctctttttctcctcctccttcttctctttcctttctccttcttctcctcctccttctccccccc

SEQ ID NO: 120649 - DNA, 464 bp, Homo sapiens
aagataaaagtaataatggtacctaactcatagattgctctgaaaattaagtaaaatgatccgtgaaaaattctcagtgtctggtacatggttagtgcccgataaatgtaagcgattattactgttactattataatcttctaaacacttcaagacatctgaggaaagtgttcaaagccacaacagagtctgaagctgaggcagttagaaaaggaagaggacatttttgcagtaagatgtccattcctggttgaaggaagactaccctggattggaggtagagggaggtggcaaggatatgaccaagtggctcaaagatacctgtctgtcctcaacttgaacaagttatacatactaaactttcttcacctgtgctgagcaaaggtctctcctccagacatctttttacatttttagttgaaaagataggccagacgcagtggctcacacctataatcccagct

SEQ ID NO: 120650 - DNA, 321 bp, Homo sapiens
atatcaacaaagactggtagagctaaccccaaccatatgaacaaagactggtagagctaaccccaaccatatcaacaaagactgggagagctaaccccaaccatatcaacaaagactggtagagctaacctcaaccatatcaacaaagactggtagagctaaccccaaccatatgaacaaagactggtagagctaaccccaaccatatcaacaaagactgggagagctaatcaacaaagactggtagagctaaccccaaccatatcaacaaagactggtagagctaaccccaaccatatcaacaaagactggtagagctaa

SEQ ID NO: 120651 - DNA, 152 bp, Homo sapiens
tggtgttgagctcctgggcccaagtgatcttcctgccttggcgtctcaaagtgctggtgttactggcatgggccactatggtcggcccagcttgtcaacctttctttttcatgcctatttcttttgtattagctgtgtccctcttgttttgg

SEQ ID NO: 120652 - DNA, 380 bp, Homo sapiens
taggctgtattggccatatggtcttggtcacatctactcgaccttgctcttgtagcacagcagccctagacaatgtgtaaacaaatgggcatggctgttttccaatgaaacttatctaagacaagtggttggctgaatttggcccacaggaggctgtttgccaacccttggtatagagtagtgagcattttagggaagacacttcagatgtgacagtggaggagggggggccattcaacgcctccgggccattcaacgcctccgggccattcaacgcctccgggccattcaacgcctccgccattcaacgcctccgggcattcaacgcctccgggccattcaacgcctccgggccattcaacgcctccggccattcaacg

SEQ ID NO: 120653 - DNA, 492 bp, Homo sapiens
gcctgactgcctctgtcctagtactaccatgccccatctctaactactacattttttcctattgaattctccagtccatgtagcataagtcccttcctgaactcagtttatttttctaaccctggctgcacgttaggatcacctgcgaacttctaaaagaattccaaagcctgagccaagcacctagaagttctgactcattgccctggggtaggactttggcatcattattgttttaaaagatccccagatgattccgatgtggaaccatgttgagaaacactaatctagcctaacccagtgaggttacaaatgaagaatttcaccagagaggtcaaagtacttgatttcccacagcaaagaaattccatttactgggttgaaaactcccatctgttgactttaaatccagcataacaaatatgagcaaggttttagaaggttttggaaactcatctgcagaacagagcaaatacaggcctatctaaaagc

SEQ ID NO: 120654 - DNA, 208 bp, Homo sapiens
ctgagcccatttctgaacttcactgcttaatgaaccacatacgtctaaaaggatggttcagttccttaagtttagcgacctagtcagctagctttcaaacttttaactatttgaaaagcatgaatccaatagctacagaagataatttacaatgaccaaataacaacttaaactaaaacattctgcacaaaagcaagttgcctttgga

SEQ ID NO: 120655 - DNA, 213 bp, Homo sapiens
catcaccctaggtcatgagcatagtacctgataggtagccttcctaaagattcctccagaatctgtattatttgcactcattttataatgaccatgtattatttggtaattttaaaacaatctaaatgagtgctttagctaatatgtggtcattgtttggtttttaaatagagtaaaaaatcctgtttttttccacatcagcaactcaccttc

SEQ ID NO: 120656 - DNA, 181 bp, Homo sapiens
cattccagcccacggggcagcccacggggcaacccactcaggcccccttccaccctgtggaacctttgtccttttgctcttaacaataaaccttgctaccactcagtctttgggtccacaccgtctttaagagctgaaaccttgctactgctcagccctggggccatgccatctttaagag

SEQ ID NO: 120657 - DNA, 167 bp, Homo sapiens
taaaagtctcatccagatggattcccagagtgtgtgctgatagcctgtctcctacaccacccagtggctggtagtgactgtgggtgggatgagttgtgggggaagtctgtgatccttggcagatactctctgacttcagtccaaggtctttagaatactattgtgag

SEQ ID NO: 120658 - DNA, 310 bp, Homo sapiens
tagctgggaccaaagttgtgcgccaccccatacgtggctaattttttattttctgtagagatgggatctcacaccacattgccaaggctggtctcaaattcctgggctcaaagtgatactcccaaagtgctaggattataggcgtggaccatcgtgcctggccctactgtttgtttttgttgttgtttttgttgttgttgttgttttgttttttaaagacaggattgcactctcttgcccaggttggactgcagtggtatggtcatggctcactgcagccttgacctcccagctgaagcaatcctcctac

SEQ ID NO: 120659 - DNA, 318 bp, Homo sapiens
taagaagagtgttctgggcagaggaggagccatgagagggcaccagggtgggagaagcacagcccagcagggcacccggaggaaagctcgtgccacctggagccctgggggtaggagaagggccagcgagggtggtggggccagttgcagggccgggcagaccagtctgattctcagagcagtgggaaccattggaggtttttaagtagtctcaatttaaaaacaagatcactctgctgccacgtggagagcagaatggagcaggtaggagaggacagagggaggctttctggcagggatttgggtgagggtgaggac

SEQ ID NO: 120660 - DNA, 359 bp, Homo sapiens
ctggaattccacatggggtgagggcaaacttaaagaggctagaccccagctgagaggtttaaaggaatgtcttgatgttcagcacatcaccatactgatgtgctcagtgagctttgtcacccattcatttatttatataggcattcactcattcaacaaccatttattgcatgcctctatgcaccaggccctgtgctatgctctggggacgcacgacacttaagagacggttcctcccctgtgatcatgaggggctcatgaaccagcaggggagacagacaggtaaacaggaagtatggctagggggtaagtaccatagtagagggcgacatgggagtgcagaggaggggctccaactc

SEQ ID NO: 120661 - DNA, 680 bp, Homo sapiens
caggcatgaccctccaagccacagcaccagaggaactaagatttgggcctagctgtgctcctccaagcagctgtagtcctctgcctatgatttccctttgacttcctagacctgtgtgacctgtgtgcctccctaaaaaaaatgaatctcaagaaaaactaagtaattgggcaaggcccctttaatggggggtatgctagattgaaccctatattctgctattatggcccatgctaaagcatttactcttagaaaaacggttcccgttaacctctgaaactaaaatcctcttattaattaagtactgttctaattggaaacagactaagtttcttaaaagaatgtagggactgaatggccgttttcctgctgttgggacagcatcagaactaaaatttggctatggaggacattttactcctaactgctgaaggcagaactttcctgttcacagagggggcttagagcctgatttctggtggcgcaaaaggaaggtgcactgtaaggcaaaggaaggacccgcaacatgcctcatgaagaggatttctatttctactaggaggcgctttttggcttagaaataccatgtgctcaccagataaatggtagagagagatgcttactaagttactgcctgccacgtttgccgatcttttctaacagacctgtttctctgaact

SEQ ID NO: 120662 - DNA, 170 bp, Homo sapiens
cttttccccttccttggaacagtgtgatcctggccagcaagagcctgagaaggaagccttgcattttctttttgctaatgatgttttgagttttctctaagtagggaaagggattcattcctccttgttttcccatgggcacattcaagaagcatgagccctatctgtgt

SEQ ID NO: 120663 - DNA, 763 bp, Homo sapiens
tattttttttaagtggagagagcattttttaaaaagtggtcagaagcacggagggtagttttctggattcttctaagcttttgaaaaaggttacaacttctctgtttcaaaagtgcttgtccatcttatttctgcagatacagaaataaggaggaaggctattgggcttgttccttccttcattcagggtttacttagttttattttattcatctttccttttagtaatgaaggtttaaaatagccttggtaggctttttctctgagcacattcctaagttttctgcattgtatttttatttgtgagtctcttttaaacatcatccatgcagaaaatgtgagggactcctacatgctttctacctgtatttatagaccccagtagtagacttactttttaagaaaaattcaggctagactcttagccaaagctccctgcattgtttttgttcttatgtgtgaacacaaacttttcccatctcatatttatgttttgttgtcttttcaagatgcccactaattagtgaggtatttaattagtcaggacagctgaagagtacttcttttttggctgacagtagtgagcagataaccgttaactttctctctgtgccattcaacttgcagcttgttcttggttcgtttgttttaacggtttcccccattgaatcttcccgtcctctgaggggctgggagctctctacacctgggacccttgtcttccttcagcggtgcaagtgggacccatctcctggacctccaa

SEQ ID NO: 120664 - DNA, 249 bp, Homo sapiens
ggaaatgaaatccatgtttattatgtttattaccaaaaatgggaataatattaaagttataaaagcctgctgcaaatataagtgtagtttacatacaggaaacatttcagaagaaactgtatttgagcacattttgtaatttttctttcccaagaaaatgttcagctacttttctatgtcacatgtccaagaaaaaaaaactgaattcatgaaatatattgaatattttatgagcaagtttgagagatg

SEQ ID NO: 120665 - DNA, 260 bp, Homo sapiens
attagcctaagtcaacacagggtaaggatcatcagcatcactgtcttccacctccacaaggattttttcctactggaaggtcttcaggggtagtaacaggtatagagctatcatctccagtgacaacactgccttcttctggaatacctcccgaaggagttgcctgaggctactttacagttaactttttaaaaaaataaataccatactctaaggatagatagcataataaatacataaaccagtaacatagtcatttc

SEQ ID NO: 120666 - DNA, 543 bp, Homo sapiens
cgctgcagtgcgcaggagaccgcggtccgcgcccgagcgcgcccgagccggagcgggaccggggtcggtgcacctagcggatgtgcccggctgcgcgcgccagcgcagcagcccgagcagcggccgccgcccgcgcggcggggatgcccggacgccgggcacacggggctgggccccacggacggtaaccggagcgggggggccgcgccccccctcctcccccctcgccggtcccagagccgcagctgctgcgcccgcgcgctcccggggacattctaaccgccgccaggtcccgccgcctctcgcccccgctattaataccggcggccgggaggggggcgcagacacgcgccgcgcagccataaggaggctgactggccttagtaggtcaggcgcggcactggtgtcctcagcctgcagggggctgcgatggagagtggactcggagaccgagggccgtgtatgggatgaccttacaaaactcctttgcattctcctgcaagcagaccgcgagaagagaccaacgactgaagaaccttcacc

SEQ ID NO: 120667 - DNA, 821 bp, Homo sapiens
  misc_feature (413)..(413): n is a, c, g, or t
cctttttatcaatacaaaatatccttctttgtctctggtaacagtttttgtcttagggtgtattttgtctgaaattatcggagcagctttagttccctttgggttactgtttgcatcatatattcctttccatccttttactgccaacctaattgggtctttaaatctacagtgtgtcacttatatctagtgcttggatagcatttttcctttttttttttttttttttttttggaaagggggccccccttgtggtgccccgggggggggggggggggcccaacccgggccacctcttgcaggccggcggcgccgccgccgggcggctttcgacgaaatctcctctcccggcctttatcgcctttcttgagttgcgcttgggacccccgcggtggtttgcttgcgccccctcngttcgccgtgggctatattttttctcaacaactttttttggctaccagggccgggacattcctccccctgttgtgcgccaaaggtgatattcccctaatatacctccgtgggggcttcaaggcaggctccctcctcgctttggcgcctctccccaaaggcgtgctggggcgtgtaccggggcggtgaccgccttttgccccctggcgggggataacccattttccttatcctctctttattaaatcctctgggcccttttgggttagcgactgttgtttacccccccttcggccttggttattatattcccggggtcgcggtacttccaccccttttccctttgctttttgttttccccccttttctctttctctcacacgtgttctcccttttggttttcctgttcc

SEQ ID NO: 120668 - DNA, 345 bp, Homo sapiens
caagaagggtgggagaaagtggaattgggacacacaaagagaattgctaacagcgcggaggccccagttatcattggtgctactgcaaattcatagactccagtccgcatcagcctaggtgtcagagtagagaaatgaaatggctagactgaccagggacccagaaggagaaggaagcaaaagaaaggtaatagtaggagtaataatactaatgggagtcatagtagagagcaaatgaactgatggtttagaggctcctaatgaaataggaaaggcagagtggaactgatatatcagtgaaaacagaatggtcaggagactggaaagagaggtcctgataaggct

SEQ ID NO: 120669 - DNA, 341 bp, Homo sapiens
cctacctcagggttgttgtgaggattcaagagtcggttcatgtaaaatgctcagaacattccttggaacataataagtgctcaattagctattgttattattcactatatcccactcaagtcgacaaatacttgctcagttgaagtgtggaggttttcctggttgtcattctactaggggaaaaaaacagcacagtaacacccacatattgcaaaccatgattttagagaaataaaagcaggccaaattgggaggatggtaacagatcgttcctctctgccttggtctctgggtgagtttttcaagtacaccctggtttccacagaaaagcgcctgactcc

SEQ ID NO: 120670 - DNA, 212 bp, Homo sapiens
gctggttgtataacttcagtctccttttgcattctggaataacttattaattgtgcattctttccctttgcttgtgttaatcttggtagagagtacccaggtttatgaattctttcagatatttcgcttgaaaaatctacactatttcttgcatgttttctgttccactaattctgttagatatttatatagttacatcagcttgattttcc

SEQ ID NO: 120671 - DNA, 298 bp, Homo sapiens
tggtgtacccttttctcagttttgccaaggtgggtatatggaggggaaattgcttgcttcgctgttgttgctgctaaaggtaaatgagccttgttagattttcaagagagtagaaactcctactgtgataggcaggtgacaacatcctcaattagtctatacccacatcaaactgatagcaccaatctttgtaattttcaacatttatatataggataatgaacttttatttttatttatttacttatttttgagatggagtctcgctctgtcgctcaggctggagtacggtggtgcg

SEQ ID NO: 120672 - DNA, 912 bp, Homo sapiens
cgcccaccaccacgcccggctaattttttgtattttttagtagagacggggtttcaccgtgttagccaggatggtctcgatctcctgacctcgtgatccgcccgcctcggcctcccaaagtgctgggattacaggcgtgagccaccgcgcccggccctattgttttcatttaaagcactaaaatgtttcaatgtttgttaatcagtatagctatctttatcattcttcaccctccccctacatccttatcttttttgcttatgagttttatatcatgcctaacagattataaaactatttacctatgatttaatctagtacttttaatggttttattccttgcattgatatctttgttcatctggaatttattttgctgaaggaaatgaggcaatagacttaatgataaaattaacattaactgggtttgctgtatgtaggttctcataagcccatttaatcctcatgccaatgctataaggtaggttattttattcttctccttctacagaaaaggacattgaaacctagaggggttaaatcacttgtcattggccatatggtttttaagtaccaaagtaggaatttgaccctaagcattttatgtcagagtccatggtacttaattattaatattacagcttccttttcccacaagtctgcgtgctattgttccagtaccattttggggaatgatttctgtgatctcaaaagtgatttaaaatatcacctttagcatatgtacatattttttggattcagaatacccttggattccagtttttcatttttttatttggcttcatttaccttttagagactcagctttaatcctagctgatgtcacaaattgcagaaatcttgaactgaatgttgcgtttttaaaaaatcagttattcatcagctaattca

SEQ ID NO: 120673 - DNA, 197 bp, Homo sapiens
ggaaaggagggaagtgtttttctcaaaaacacattgtagtgttctgtggaaggcagcaagaaatgaagctgaaatggaaggcagaatatagactgtgaacagtcctgaaatcttaaccaacacaggtatttgaactttctgtgtttaatgcagggagaattcagagttaagaccacaaccttttgtgtgcatcctgg

SEQ ID NO: 120674 - DNA, 534 bp, Homo sapiens
acttgtgtgggacctcttgcgtctttcttttggccaatttctcccttttggaacaggagtatatacgcaatgcatgtacccccatagtatcttgggaataattaacttgtttttgactttacaggctcataggtggaagggactagacttgtcacagataagactggacttttgagttaatgctagaatgagttaagactttggggactgttgggaagacgcaattgtatttagcaatgtgagaaggacaagagacttgggaggggctggggtggaatagtatggtttggatctgtgtccctgcccaaatttcatattcaactgtaaaccccaatgttggagatgcggcctggtgggaggtaattggatcatgggggtggtatttcataaatgatttagcacaatccgttctggttgcaacagtgagttcttgtgagatctggttgtttaaaagtgtgtggcacctcttccccaacccctcttgttcctgctccagccatgtgagacaagcgtgcttccccttttccttctgtc

SEQ ID NO: 120675 - DNA, 732 bp, Homo sapiens
ggtgttaggaatgagagaaaatcaatatttctcacatctgcaatgataggggatctgctatggtctgggtcccaaagcccaaagtttctctttctatttatttcctccagtggtaatggtcttcaccctataccctgagtatggtaacgtttaccatcctaccccagtgtcttcaggcttttgttcagaaggaaaaataagagagtgggtctcggatccctccagtcaattcatcctgcagtggctgttccttggctctcctaagcctgccatgtgtgcgaagctttctctagtcccctgccttgtgaccaatctttctagtgagcgcctgtgagatgtattgctaaaagatgtaggtgggtgtaatttcccttgttttttatgctccagtatcagtatactctcagcctatcccacattcagctttgaaacattcattaaatattttacctgaattattattactagtttgtatagcgcccagaatctgcctcaggtaacaagagcttacattcacatctctccctggtagtgtctctcttgtcttaggtttaatgctagttttttgctgtgtgacctcaggtatctgatgggatgaagaaaaactatggttacatagattatatcgcttttcttcttgtcatagtgattggaggtatgttcctttcagatttttctatcttaagtagaagttgggagaaaaatgtacattatcatgtaaaataatatatt

SEQ ID NO: 120676 - DNA, 928 bp, Homo sapiens
atttctggtgctgggaaattctgatattttctcctcatctccattgtacattttagggattcttgaaacttgtgatgcacaaacatccacaccttccacataagtaaaatattttacttagatattttctagcagacactgagttctcatgagaaatcctcagtctctttatttggaacacccccaccccagtattccatatggagtagtcatgtgtagaatgtgattacttcattaatatgtcgaagtatgggtacattttgaacacatttgtgaacttgtaatccctttcttgatgaatagtacctgcggatgagcagatttgatattttctttggagcagtaagttagcactggtagaatctgttctgtaatcccaggtccctgggctccagtgtcaatgcttcctccttagatcctccctgaccctgtaaatttacctcagtctctatttcttaatccaatagctatttcaattgatcttcaattactttgcatgtggccagatattatttatgggttatattctaattcacatttttctgatgtaatttcagagagcctagaaaatataataaactccttctgacaggcaaacgaccccgtccacaacaacaacaaccagtttgtggcagggcaataggcccgcccaggaaaacacctcgcaacacgggcacactatgggacggcgcacgtgcccacaccagggaatccactcaacccaggggcaacagtacagtggaccacaacgaacgcgcaacccccgggccaaggacaaagtggtacggtaggagttctccagcgaaaacaagaagcccgtggggaaccggacggggttccaaacccccacgatgggtgctccagcggcaaccacgacgaccgcaacaacggagcccccaagcacacgacctaaactcgccggcagtgg

SEQ ID NO: 120677 - DNA, 368 bp, Homo sapiens
aaataaatgttcatttagaactgtctacattcttcagaatgtctacatactttagggacctaatgagatgcctttaagggtatatctcaatccgtatttgtgtagaggcagcactttcttctaaaacgtttaatagaatcaggcaaagccataagctaaaattcattttctacttcaatacacagcaggtagactctctccacacactttcgcctatttggaagatgaggcctagtaataatttgaaatgaccaaaggagaggcagaactcttacaccagagccaagatttctgcctgagtatcgaccatttcctccaccttgaatccagcatccccctcccaacattccgctaccatcacttctcct

SEQ ID NO: 120678 - DNA, 537 bp, Homo sapiens
atatttgtgtttcttatgtcttgaattttttttcctgataatgaagtagctcttaatatagcagagttcacaaaataagcaggcagttgctgcaaggtatccaagcaaccattggaaacacacaaacctcagggtgaagttaaaaacatgcactttaaagtcacattgcctagatttgagtcctagttctaccataataccaacttgggtaactttctcaacctctctgtgccttagttgcctcatttattcttgcaggttgataatattacctggtaagtggttgtatcaaatgaactgatatatgtaaagtgattgaatagtatctaggaagtattcagtaaatgttaattgctatttttatgcaaatgtcttcattttggttttactctcattagacatcactcagtccagggcctgaactgggaaactgggaagggtgacaataagaatatggtgaggaatgcacacacaaggaacaataaatcctctttgagcagctataatgtcaagggcaaatggatgtatagggaaaat

SEQ ID NO: 120679 - DNA, 402 bp, Homo sapiens
attcccatcatcctctcatggcctccaggtccagttcactctcctctgcttggcaccaaggactcccggcccaaggtgacctccagcttcacgttcaccaacttctgcctgatcacatgggacttctcactgcctccagatctcccaatatttcacccatatgtttgcaggagggcttccctctgctggaaatgtgcttccctggcctcttcatctagccaactgtccctgtgaaactcactttaagagctacctcctcctagaagtcttcctggattacccccacacaccagtcccctccccagctgggttctgtgcctcctctggcccctgtcatcactgatttgtggccctcactagtctgagagtgtcatgagggcagagaccacactccctaaacac

SEQ ID NO: 120680 - DNA, 314 bp, Homo sapiens
ctggtgttggggtggtgaggaaggtagagggttgagcagaggccagatcacgaagggccttgacatttgaactgtatcctgagcgtgatagggagccctgaaaggttgtaaaaaagaagtgacttacctggtccgggccaccctcgtgaactctagtcccacacttctgccagaccctgtgtctgtgttatttactacgtattcctagcctccagtgcagagtctggcacatgatgccttttcacgtcctttccttgtccctttcttcctatcagccactctgtcttgtccccggcctccatctccttgccttt

SEQ ID NO: 120681 - DNA, 525 bp, Homo sapiens
gtcagcaccataacaatcactattaccatcaccatcattcaccatcattaccatcaccatcactatcaccattatcaccaacaccatcactattaccaccaccatcatcaccatttttaccattaccgtcatcatcataaccatcaccgtcatcatcgtaaccatcaccattatcaccatcaccgttatcgtcatcaccatcattatctgcacagccaccatggagacaggcccgtggaaaagcaacaccccttagtgggatttgctcatcatgatgttggggggttatcttaactgcccccactgcaccaaggtcaggaatgagcagtttagggtgggcctggtggaaggggctccctggcccccaggcaagcaggctctcttgcttaagctgtataggtcccggctgtagccgaaaaatcaactccaagtgtggcatggtcgttggcccaacacggtgcgttggcccaacacggtgcgttggcccaacacggtgcgttggcccaacacggtgcgttggcccaa

SEQ ID NO: 120682 - DNA, 457 bp, Homo sapiens
cgaagctccctttatttaaaacattgatgttggctgggtgtggtggctcacacctataatcccagcactttgggaggccaaagcgggcagatcacttgagcccaggagtttgagaccagcctgggcaacatggcgaaactctgtctctaccaagaatacaaagataagccggtgtggtggtgtgcaccttcagcctcctgagtagctgggactataggcgcctgccaccacacccggctaatttttgtatttttagtagagatggagtttcaccatgttggccaggttggtctcgaactgctgacctcaagtgataaagtgctgggattacaggcatgagccaccacgcccagcccgtaccctgtatttcttgaagtgaagaatataaagtctgtatgggtgcagttcctgagtgttctgctcttccctaaagtttatatatttttttagcttaagt

SEQ ID NO: 120683 - DNA, 365 bp, Homo sapiens
gagacagagtcttgctctcttgcccaggctggaatacagtggggtgatcttggctcactgcaacctttgcctcctgggttcaagtgatcctcctgcctcagcctcctgagtagctgggactataggcgcctgccaccacacccggctaatttttgtatttttagtagagatggagtttcaccatgttggccaggttggtctcgaactgctgacctcaagtgataaagtgctgggattacaggcatgagccaccacgcccagcccgtaccctgtatttcttgaagtgaagaatataaagtctgtatgggtgcagttcctgagtgttctgctcttccctaaagtttatatatttttttagcttaagt

SEQ ID NO: 120684 - DNA, 439 bp, Homo sapiens
tacaacagggaaacccctccacagcctcggctgggcaaagcagtatttactgatgggctcactgggtcagtttctccagctcccaggtcatctgccagaaagcagcccgtggcccaaaactcccagctctgggcctgcccccatgccctctctcagtccaagttttccctgggacttctttctttccccacatccctggcacagtcccacctctgcctgagcactccatgaaataatacgcaactcatatccaggttgctgggagaccacagtgcactgtgaagtgtcggtgctcctggctaagcggcctcaattatccagaagccgtgcctgggaggcagcatgtgctctgcacttgtgccagcaccaaggcgtccccagaagctaccctctttgtgcttgtgcaactgagccagagggaataatggattttgctgga

SEQ ID NO: 120685 - DNA, 627 bp, Homo sapiens
tccctaaattagaacgtatatgaagtttttctcatgattaaaccaaggccgtatgtttttaagagttagaccacaaagttaatgtgacattctcatcacattatcccaaggttaatacctaccttcaatttgactcagcactgttgatgttaatcttgattaactggctgaggcagagtttgataggttcctccattgtaaaactaatctttcttcctccctttccatattatactctgtgaaagaaaatgaaaacgtgtagcctacacttaagaagggcaaagtattgatgcatgtcatcaagggtagagtatctacaggatttatttggaattattccatgtgataaatttgtctcttctctttcatttatttatctattcaatgatttattgattcctctattggttcacatatatttactttatacatttggttaaaacccagtactactttattttatcactcaaattgttctattagtggccattgcaagctctttcattttgctcctatgtcttctgacatacccttatcattgtgtgtgtgtgtgttttttgctgttttttctttaacatattcttatactctaatactacaggatgttccaggcttaccttgtatcta

SEQ ID NO: 120686 - DNA, 447 bp, Homo sapiens
catggagagatggggtttttgtcttttggtttagctttaggaagtttgtgttaatcagccttaggtttcctgcccccagaccccggtattttccttttgatccagctttgggaagtcagagtgaattggccttagatttcctgcctccagaccctggtgttttctcttttaggaagttagcacagagtggccttaagttccctgtttctagaccctattttcctgtctcaataggagctcacaataattgttctgttatcactgttctaatgtggagccatgtccaaggatgctaaaccccactgagctcctggtgacatagaacttgcctcatccaacatgtattgagggccacatttgcactgtggtctccgccatcctcatgggcctcttagtccagaggggagatggctcatcaacatgcccaacctcataggagttcaggat

SEQ ID NO: 120687 - DNA, 387 bp, Homo sapiens
ctaatgtagtgtggcacaccatcactggtgatggcagattgatggagggcagcgattgagccttccccttgaagtgtccattcttgcttgccgactctgcacctttgaacatagacctgttttccctttggatttatttttgtcagtgggaccatgattatcacagtcacataggattgaaaccatgaaactcatagtccctccctcccccttttagcacaatgtcctttattgtccagtcactttatcctcaccccagcctctgttatcatcattgctacacagactattgctaaaatttaacagacttctctcttgctgtctcttcctgtataccactgtcataaaaaaccttcctaaaatgttgctttgcacactgatctcaga

SEQ ID NO: 120688 - DNA, 420 bp, Homo sapiens
tgagtagctgggattacaggcatgtaacaccacgcctggctgatttttgtatttttagtagagatggggtttcaccatgttggtcaggctggtcttgaactcctgacctcgtgatccgcctgcgttggccttccaaagtgttgggattacaggtgtcagccaccacacccggccctgtgttccttttgtccatgaaatcattacttactcatatcgagaaacctagagaacagaggcttctgctcactggccgtggctccctccacagttttcagtcctggttcccagagccaccatcgctccagcagcaatgtttccctgggtgctagcagagagggctgagctgagcttggtccgttttcgtcagtcttggattatgctggagtctgcagaggtggctttcctggctaaatttgtgga

SEQ ID NO: 120689 - DNA, 141 bp, Homo sapiens
tgccatttacctgtgactcccatccccaggtaacagtaaataggttccgagagtttattttttagcataaaggaccaactacaaccttcctagcatctgaaaactgatggtcatgagacttggttctaagagacaataaaa

SEQ ID NO: 120690 - DNA, 475 bp, Homo sapiens
  misc_feature (10)..(10): n is a, c, g, or t
  misc_feature (14)..(14): n is a, c, g, or t
  misc_feature (22)..(22): n is a, c, g, or t
  misc_feature (37)..(38): n is a, c, g, or t
ggtgtagcgntctngaggatcncaggggcatgtatannaccaaagggaccccagaaaaagcttaagaacttagttgcagccataccggaatgggaggtcagacagagcagtctattggtggcaataagatgatcaaattataaacagaactgaaggccatgccagacaagggttaagtcacacagccttggacttcaaaaataaactatgctccaactgctacaaggcttttctttttctcaaggaggtaaacaagcacgggccgccagataagaaatattaaaacaactacagctcatccaactcttagacactgacttccagcccctgttccaccagatatacctttcattaaacaagatcctgatttcagtaactttctccagagaagaagaccaccgaccttagactggttctggttggattaaagagagtgtacccttgcatgccattgtgtcctgcaagacattttgac

SEQ ID NO: 120691 - DNA, 170 bp, Homo sapiens
tgatagcagtgctgggtgcttccatggctaaacataagaaaatagactctgaaaggtttctcaaacacatacccctttgaactcttcttagtttatgaaacaacaggtgttatgttcagtcagaaaaatggaatttgcctgtctggaaagggagaaacatagatgccaca

SEQ ID NO: 120692 - DNA, 510 bp, Homo sapiens
cggtacccggtgtttatcgatgcacatagaatcgatcggagatgatcctatgtggctatggcccaggctccgcctctcgcgaaatgcgacaaaaaagcattattttcagtattgggtctggaggccttgcctgctggtcttcggagagaggcagagggaggtgcctttgtggaccctcataatctgcgatctcttcttttgctctctcgcattcactgtcttcagcaagagctgatgtacctacatgtcaggttcttgtctggggaggacccataatcaggtttaggacaccgagaaagtggtagtgatgaggagggtgtctgtttaatgaatacagtcagaatcatttcattacttattttgtgttcttctcttaatttgttgagtattgttctttccttacttgttaattccaggaataggaattgttaaaacgactgttgaaaatgtcggtaacacagggaagcccagaagggctgcttagcggtggcatcgataaacagcgggtac

SEQ ID NO: 120693 - DNA, 536 bp, Homo sapiens
ctgccccatctctccaccgtcctaggtgtgccaagagtcaattgcctcattgctgaccctgtccagctggccatggccctcaacccccaaggcccttccacccacagaccatctcgctgctgagagatccaggacctgctcccacctggccaccctccccctccccccacatccaggccccagggctggtgtgtggcacccctgagaccacattgacctccatactgtctactacccataaggactccaagacgcccaggccagctgtctgggcaggactgattcctgatcacccactgataccaagtactcatccccaagattgttaaacaaggccagacactcctggcctcaagaggatgggactgaaaaacaaaaagaacactgaagacccagaggagcccctgatcgcctcccagagcacggaacctgagatcggtcacctgtctccctctaagaaggagaccatcatggtcaccctccatggggctaccaacctgcctgcctgcaaggatggctccgagccgtggccctat

SEQ ID NO: 120694 - DNA, 304 bp, Homo sapiens
tcctgggttccagctattctcctgcctcagcctcccaagtagctgggattacaggcatgcactttgacaccccggctaatttttgtatttttagtagagacggggtttcaccatgttgtccaggctggtctcaagctcttgacctcaagtgatccgcccaccttggcctcccaaagtgctgggattacaggcatgagccactgtgcctggccacgaaatgaagagattttactacctgaaccttaaaactgttcctgagaaatcaccaagaagactgaccagcaaatgaaaacctggaaaaaaa

SEQ ID NO: 120695 - DNA, 692 bp, Homo sapiens
caaacgaaggacacgctctttgctacttggcaggaagaaatgggcttagattaaaacttggccaccaagcagataatctgaatataaataaagaattctttattctaaccaccagacttacggtgagccctgggttaaaagattccatttgtaataaggcctgcttgcttgggtgaatcctgtattcattcaaaaacacaaaacatgactcatgcagtgaaatttgacttctaacactgctgattaccttaagagaaataagctaattgaggagcagaaaaaaaagccctgaacattttatttcagaatgtcttccctattattaaaatataaatatatataattttgttcattaacagaaaatagcacacttacatttagtttccactgcaatttagattcagaacttggtaaatctttaaccagacattttcacttaactaaaatctagtttctgtttgaattaatctggtacaactactcatggtcatggaagcagagacttcacgtcacaaatcactcattgttattctatccatgtcaagtaagacttacatgattttttaacccacagcaacatcactgcacaaaagtaattttcacagtctactattaaatcttctactagagcttctaaaagcaacaagttctggtctaatttgagtttatctcttctttctttcctagcttaa

SEQ ID NO: 120696 - DNA, 104 bp, Homo sapiens
ctccggctcaagccccgccccctgcccggcggctccagaggtccgcggctccaggccccgacccctgcccggctgcacaaggcgtcctctgggccaggccccgc

SEQ ID NO: 120697 - DNA, 533 bp, Homo sapiens
tggtttatcgatgccacccgcctttgttttcttggctctgagtcaccccaaaggtggatgcctggcaggggtggtatcaatccccaaggataagtccctaagaatctagttcttcctacctcttggcagctagccttctttgatgtccttggggtgttttatgtgaaactctattttctcctactgtcctacaccttcagtccctggctgtaagagacatgagatgaaaggtcctcccgtgttgtgtcttgtgccttgtgttcaggacagcatatccaagtgtgtatgggccttgtccaggcaccatttagtatggggctattttcctgatctgtcgccactggacacccatatcctgagcaaagtgagagctgaacccacctggctacagtgtcactccttggcagtccctggaagaattcttccactcagaactttgtgatgacttcacaaagacaacaaaaggaggaaagtgattcatagtggcatcgataaacagcgggtgataatcgaggcgcaatgggtggtgacat

SEQ ID NO: 120698 - DNA, 200 bp, Homo sapiens
ccactctctctcatccacttccggatgtggctacagacttctgccaggatggtgtagaaaaacagaaattagctggagtagaaataactatttttctctgctcctaaactattcccaaatctttaaaactcagggctacccatgaatcttcaactttgaaaccacccttcaaggctcctgaagtgcccaagggctgagcc

SEQ ID NO: 120699 - DNA, 242 bp, Homo sapiens
ccattcaagtttataacattcaaggaggtctttcctgtctgaaacacttttaaaggggacaaaacctatttcgtttttctcactcagatatcgggatgtgggtaggatcagcaccccacccaaactccaccattatagctgccatttgaaaactcctgttctgatgaaagggaaggtgatatgcaacgggagctagttcatcaggaattgcaactgtgagaaaaatggatgaaaatacaacc

SEQ ID NO: 120700 - DNA, 391 bp, Homo sapiens
tttctgacattcatgttttcttgatgcctggctttgtgaccaagtgcaattgctttcccttctattaacagtagtcatctggctgctgtctagtttctggtcttaactttttcatcaaaatttttttttccttcttttttgttttgtttttgagatagggtctcactcttgcccaggctggagtgcagtggtgcaagcacagctcactacagccttgaagtcccggggtcaagtggtcctcccacctcagcctcccatgaagctggtactataggcacgagccaccgcatctagctaattatttattttaaaaaatttttttttctagagatggcgtctcattatgttgaccggctagtacacaactcctgggctccaagcaatccttctg

SEQ ID NO: 120701 - DNA, 110 bp, Homo sapiens
agcctcccaaagcgtggagatcacaggcatgggccattgcactcggcctctctctggttttcatgtgaatagtttgctctgggaaggcaggaatgaaaacagaaagaatt

SEQ ID NO: 120702 - DNA, 472 bp, Homo sapiens
aaaaccaggtaaagggcacatgggaaactctgaattatgttttacaattgcacatgaatctaccgtgatctcaaaagaaaaagtttaatttaaaaatcaaagaaaaagaggtctaacactttactactaataataagagattagaaggtaaggagtcaagagtggaaaatgcttaaatttgagatgtgttcaaatgaaatgtaaacacacaacagtagatgactgtttagttataattaagagtttatgtaactacacattataaagtctctcctcttaaggttgtgttatggatacctggtgacagttgtagttatttcatcttcctcattctgtaccagaactttgaagagctgattcaaaattataggcagaaaactcatgattgcatgaatcttttccacattcaataagttctgtagtaaattggcagaaaaaaaggataccaattaaatttgaagcatgtcctaca

SEQ ID NO: 120703 - DNA, 582 bp, Homo sapiens
cctgcagctctctctgatgtatgggaccatgtaggtccacctacccttcaccaacagcaacaagcgcaaccacttgctcaacttctctcaggccccctcagctgcaagctacatgaagacagggattggctccaccagcactgccaagcccgctgtgctagggctctcaacattcagcagatgtgcctgggatctaaaaacatccacagttcctcaactgtaactgccaaatccaagaagcactaaaacacagaagttttctaaactcaattggcagtaaaacctcatccagcctcatttggtaaaatctgatctgatctaatatggggctatttatagtcttttctctctcctgctgtggctattcatacattttgctacagaaataaacatggtggcttatgccatgctgcttctgatcttccactacagagtaaattcaccagatcatcttttcaaaatccaaaaaattctcaattctgaaatacatctaggaccaagaacttcaaaactatgaaaatggaagtacaaagttactcattgactgctagcatcccatgttcaagcctccagccctttaac

SEQ ID NO: 120704 - DNA, 1307 bp, Homo sapiens
acagagctggctgggcagcctcaagctggagccctggggaacagcctgaaggctgggagcactgacaggccgcttctgagccccaggtgaggctactctttaaagacaggcattttacttgcagcaaaatgtaagtacatttcctccttgaaatggtatctacttctcagctgtaattcctaaagcctcctaatctttaaggctcccatctcacattgctgcatttttaaagtctagctcagcacacacagccaatctaacatttcatactattgatttgtataacatcatggaacatttcagaaaccaatttggaagcagattgaacttaattgtggttgtgacaatattacgtctaaaggtagataaaagtgaggagtaaaaaaataggcaatattcatttatatattatgaccatgtgacactaaacatttaaatattcagttctctcaaatgactaatttattattcttttcccagttgctcctcaccgtgtggtcacagactgtttcttgtttaacggcatggtggtaaccttaataattccttcctgtgtgtactgcgttatggccactctgtaaacccgtattctctccagaactaatctcctgtgtattatgtttctttattcttagtacttccagtgtctatacccaaattacaaatcccctctattctgaaagaccaaagaaaattttagcagatctgaactgggagttctgagttttgtctttggaattagggtgattttttttttcttttttaatgaaatgaaggtaagaataattttaacaaaggaaaaaaagaaagtttcatatgtctctggtgtaatttaataatatccaatttacaaaagcaggaggtagatttagctttagtataaagaccctagctgttcaaaagtagctcaaaatgtagtaagttgcttgtcactaagcaagtaatcaacaactataaggtagatggttgagtcatgtaccctcatggaggatacatcaacttctaattcatgtagaatttccagcagagaatacatctcagtagtcactgaagcatttaattagacattctagtacctatcagaatccaaagagtacagttgaattatatatattatacatgttctaataaattctcttttgaatcattcagttcctgagaagattatgtgttcagctgaactgcaggagaaacttagtttttactgatttccctaggggttggttttttgtttgctctctagaataaattgatcccactgctgtacatcaaatactcaagcgttagcacaaaagacattcaccctc

SEQ ID NO: 120705 - DNA, 479 bp, Homo sapiens
tcctttctctttgcgttttttgcccctacccttttttctcttttgtggccttaacatgattgtcaaatatttataaataggagtgagcatctttatattactcttactaataagatacatgcttaatttgtcattctttacctttttgggacttaatgaatgtttgtcttttgcagataaaatggagctgctagaaatagcaaaagccagccacccatattaacccctccattttccctataattaatggctttcattattgtggtatatttgttacaattactggactaatatgatacattattattaactgacatccacattttattcagatttctttagttttttgcctaatgtctttttctgttccaggatcccctccagaataccacattacagttaattgttatgtctccttagtctccccttggctgtgtcagtttcacatactttctttgtttttgatgatatagatgtga

SEQ ID NO: 120706 - DNA, 438 bp, Homo sapiens
aaatgtttgaggtgacagtccaattattctgagttgattgttacacattgtatacagttatcaaaatatcacatatgccccccaaaatacatacaactgttacatatcagtaacaatttttaaaataagtgttagtagcagattggtaaataacaggtcctattggacctactttaataagtagatgattatttgtaatcaatgtgtaactaaatatatttaaatagatgctactaaaatgtatgtaatggattaaacaatcttcagcagttttaatcaaattgttactctgcttagcaactctgtctttgaaataattatatgatatctcagttcagttttataaacaacataattcattttcaatcgagaaactgacattaataggactttactatacattaatatatctctttttttctttagacagggtcttgc

SEQ ID NO: 120707 - DNA, 241 bp, Homo sapiens
gggcaatacagtgagaccctgtctttacgaaaaaaaattaagttagctggttatggtggtgcatgcctgtagtcctagctactcgggaggttgaggtgggagaattgctcaagtcctggagtctgaggttgcaatgagctatgattgcaccattgcactccagcttgggcaacagagtgggagcctaactcttaaaaaaaaaaaaaaagaagaaaaagagttcctgtcattcattgagggc

SEQ ID NO: 120708 - DNA, 570 bp, Homo sapiens
agcatctttaggaaagaccaaaattgaaagccaaggcagagacaggggaggtagttttgggacagcagaacaggaccagggaaatcagagggaagcttcagagtggacaggtgtgagctgaaggaacttcccccttcatacacagcttgttgccttttcctaaacattgataggaatggattttattcttggctatatttgagtgagggtcccttgtaattagtcatgcctgaaataccagttatgtatggaatcaaccagactagaatttgagtctcagtgcttactagctaaataatcttgggaaaatcatataagttatctgtcaaatggtctaataatagcacctaagtcatgtggttgttgtggggattgaggcatcccagggatctgggataatacatgtaacatcctggtacagtgccttatacttggaaaatagtcaatgaatgttagatgctattatgatggctgtgaagctattacagtgtttatatgcatgtatctcctacctgcagggctggaaatatttttatctattacttgcctggagatataaagtaaatggac

SEQ ID NO: 120709 - DNA, 754 bp, Homo sapiens
gatttcttcaaagtatttttgggtagtgtaggtatcaaagttaggatttgaatctgggtttgccagtcactgacaacaaagcccaaatttcctccactacacaattgcatagaagaaacagaacaaatatgaagtatgtcagaagtaaccaaccatgagcactgtgtaatgctagaaccagaaaagcagaattcccaacctttctgtgttattttccactactttgctctttctcactgggctttggctgacttacccttcccactgttccctttacttagaatattcttccctccattgtttgcttgaccaactctttcttatccttcatgtctcattgcattagtcattttttggagagtaggggactttgctgaaatttttagatccttctactaaaagtcacatagcactatgtttttcttccattgaatgtgtcataattgcaatgatacagttacttgagtgatcaattgttttagtcagattgtaaactccataaggcagggacagtgtctgtcttatatacaatgttttttttttgtttttttttagcaactagcacagtgcctgacacatagctagctagttgatgttcaatcaggaaggaatgaatagatggcttatatagcttgctggagatctgttttcaagtaagatattttaaaattttattttataaaataattttgtccttatgttttatagcctatattatgaaatattgggaaaaactttatacttatgtagtagc

SEQ ID NO: 120710 - DNA, 206 bp, Homo sapiens
cagacaaagaaacaaaaaacatgtatgtgtatgcatgtatatatatatattatataatatttaatatgtgtatatataatctaaaagaagaaaaagtcgaaaagcttatttctgcctaaactgtttacaaactaaagttactataaatttattattaaaatgtaaataaaatttactaaaactacattgatgataccaatgtaata

SEQ ID NO: 120711 - DNA, 273 bp, Homo sapiens
cctcagcctcctgagtagctggtactccaggcatgcgtcaccatgcccggctaattttgtatttttagaagaaatgaggtttctccatgttggccaggctggtctcaaactcccgacctcaggtgatccgcctgccttgggcctcccgaagtgctggaattacaggcatgagccaccacacctgaccaatgaatatatttgttttgtggtaaaactctaagcaaagctgcatcttaggcccttggccataaagcgtctcctttccctgtcaca

SEQ ID NO: 120712 - DNA, 392 bp, Homo sapiens
cccagcctgggcaacacagtgagactctatctcaaaaacaaaaacaaatgagctcgattaaggcaagttacaagaggcatgttataaattaggaggcggtacgtgtagttattttgtgtctttgggttttccttaccataaataatatactcatgggccaaaaactgtaatgggaatttctacaaagaagtgagagtggccggaaaatctgagctagaaaaagaggccaggcatggtggctcacgcctataatcccagcactggaggaagccacaggaggaggattccttgatcttaggaatttgagaccagcctggcaacatagagagacctcatctctacaaaaaatttttaaaaaattagccgggtgttatcgggtccagccctactgg

SEQ ID NO: 120713 - DNA, 295 bp, Homo sapiens
tcttaaacctctgaagagaaaaatcttattaggaaaatctttatagttaagcagggctgactttgaagtgaggcacgtgcgctggctggtatcatcactccacttcaggagatgtgaacagttgccatcagatgttatctatgaacttactcattggattaatggttatttgcttcagaaaactaaagagtaataggagagcaattcatttgctggctttcatagggttcttgttttgaaaaaggtctgttgttgaactgagatccttacagttgcatttccttatacctgataa

SEQ ID NO: 120714 - DNA, 364 bp, Homo sapiens
ttttcaacagggcacagtatcttcttcatctcacagtctatctatgtgggtgtggcagaaggatccagagtaaaatctcaaacacagtgatctactggttagggatgataatatttaggaaattcagtacgcctataggataagaaagtgcgtccacaatttgttcactgatccctttcttgtatgaggtggctctgggccatgttctttctgttagggctgataatggagaacaatgacggatctttggaaggctctgattgaatgttacagttcaaggtttgacctcaagcagcagcatcctattagatggagcatactgctacctgcaggaataagatgacagtagcacctccctattccc

SEQ ID NO: 120715 - DNA, 458 bp, Homo sapiens
gtggtgaagataagtgaatatttatcctaatcttaatgaatttttatattctgtctttatggttgaaatcccccatatcgacttcatgactttcaacgtattaaaaattcaaaaagttagaaataagttgaatataagacagaatgttactaaaattttaaatttacaaactaaattacaaatactttaaaggggaacttctttctcttgccctaaaaacaaattaacttctatcccagctctgtttctcacagctatcatctttctaaaagtttcctgaggttttatttaatcacagggaaagataattttgaaaaaactaataaatctatgcctgagaaataaaagatttgtcttctgaaatattctgagttttgagacatgttcttcagcgtcatcagaaaatcaaagtgcagtctttggatagtgttcactaagcatattatgtaagcaccgta

SEQ ID NO: 120716 - DNA, 272 bp, Homo sapiens
agtcggagtcgcgttgaagccagcgtccggccggcagagcggcgtcggcggggttggccggggcggtgtggcgctagagcctgggcgggccgggggcaaggagtcaaggcttgggggcgggtgacgggcgggcggagggcttgcccccgtgtggtcctcggagcggcccgaggtccagcctcccagcggtcccggaggaggatgcgaccggggggccccgggcggggcggtcggcggcggctgcagcgctagcggcgcgggggctgggcggc

SEQ ID NO: 120717 - DNA, 618 bp, Homo sapiens
cagcccgagcaggctcaggcagggaaggcattgagacgttcctcctctgccgtttactcagtactatcgacttgtccttcttcattattcagcaagtaattctttccatgagctcccatcgatttccagattgaaatatttcttgatgagctttgtaatgagaatctgtttcaaacgaactggtgtctggttagagcatttcaccttgggccagtttcattgtggaaacagcatcaattcctctctagggacttctgggttccctcctcctgcctcttactggggacatctgtgcaccctcttcctggggtcctcctggggacatctgtgccccctcttcctcctcctcactggagatggacatctttgcctcctcctccttgtcctccctggggacatctgtgcctcttctcctggggtcctcatttcttctgatcctccctggggacggctgtgccccctccccctagtcctcactggggacatctttgcttttcctcctggtcctcactagggacctctgtgccccctcctcctggggtcatcattgaggacatttcagctgtcgcgtaagaagcttgcactcagagccaggcaagtggcagctgttccacaaac

SEQ ID NO: 120718 - DNA, 748 bp, Homo sapiens
ctgaatcatttttatgttaatgagttttgccaccatctgcttttttgtacattgttactataggatataaatatgggcaaatcttgccatttccaactgagatagggaagtacaaaaaagaaaagagttcaagaaccttctgtgacagtgagtaaacagtgaatttagtactagaaactatagtattctttttccctgactcagctaaaatgtagtttaggaaaaaaaaacaaacaattgaactgggctgttcaaattccaacactgtcaattaacagctatttggccttagtcctattgttctgatctttgtaaaggtcactatccacatctgcaaagaggaaacaaaatgacatgtgtataatagggtataaaaaagaacctgtcagacaatgtacatgaaaatgtttggtaaattgtaaaatacattatagtggcaggctttagatcacctccacccctccccaggccgggcgcggtggctcatgcctgtaacctcagcactttgggaagccgaggtgggcggattacctgaggtcaggagttcgagaccagcctggccaaactgatgaaaccccgtctctactaaaaatacaaaaattagctgggcattgtggcacacacccgtagtctcaactacttaggaggctgagggaggagaatagcttgagcccgggaggcagaggttgcagtgagctgagatcaccccacttgactccagcctgggcaacaagagtgaaactgtctc

SEQ ID NO: 120719 - DNA, 398 bp, Homo sapiens
agcccagcaactccagcccaacaggtctggcccagggctcctgccctgtggggacagtctgaggtagagtgaccagctcctcccagtttacccaggaccacctggaaagtctcctgtcttaggaaaccactcaatcccaggaaaatcagggcactcggtcaccctcatctgagatcctgtcttgccggctggtgggctgtgcagctggctcaccctgcaggctctaggcagttgggaagagcaatattgctcccagaagctcctggtctgatgggaggtgatagagacatccaaatccaagtgacagatgctcacttagaccctgttacagttcacatgacggacacagaggctgcgtctctctccactgccatacaccagctcccagaccccatctc

SEQ ID NO: 120720 - DNA, 423 bp, Homo sapiens
ttttatgaactaatagagtgagaactcagtcactgttgtggcagggcagtgggcagagggcaccaagccatttatgagggatccacccccatgacccaaacacctcccactatgccccatctacagcagtaggggtcacatttcaacatgagatttgatgagaacaaatatccaaaccatatcacatgctaaggggaaacatgcttaaggaaaagtaaaaggaagagcatcatgttactttgagaattggtgttgtaattccagagagaaggagcagccaaacctggatgagaagcaacaattttagcaaagactcaactataatatagcacctgtctagccatttctgcttacagaaaaattcctctgcatagcttagtctccaaaaacagtcagtggcatcgataaacaccgggtaccgag

SEQ ID NO: 120721 - DNA, 235 bp, Homo sapiens
cctgaagactttgagtgtaatttgttaatatctgatggctggattggtcataagggtggtaagcagcacttaatggattggagggtgtgccacaggatgaattccctacctgagccacttcttggtgactcagctttccatgctgtgaaatggggagaaatggaaaaattgcctttgctgagggatatgtggagaatttccatttttgctctaagaaaaccagaggaaacgtccc

SEQ ID NO: 120722 - DNA, 500 bp, Homo sapiens
cacgtgcagctaaaatgtattcttttgctttgtatgttgaccctcattttgcccttcagagcccacagacaatgggagacctttagccatttgaagagagatgccttaattctccctgggcctttgctttagggaagagaaggggaggtaatgtttgccaagtgtcttctgtgcaccaggcatttttctcatttttgatgtctcatttagtcatcatttaatcataagaatagcatttttctcatgtaaatctaactggcctgagcagaggttgaacctgtgacttgacctccttgttgccaccaggcagtaaaccattcagtactcgtggaccatgtcaaaaactatttgttcaactatcagacactgtacttagttttatgaggatactgcctttcctcaaggtgctcagagtccaaagaaggagacagacacagtattaggttaagtcacggggcctggatcacacagttagcaagtgctagtgaagttgggattta

SEQ ID NO: 120723 - DNA, 662 bp, Homo sapiens
agcggggaacaatcacttgagctcgagtcaagaccagctggggcgacatggcaaaaccttatctccccaaaatattcaaaaactagctgggcgtggtggcatgtacctgtagtcccagctacctgtgagggtgaggttggaggatggcttgagcctgggaggcacaggctgcagtgcaccgagatcatgccactgcacgccagcccaggaaacaaagtgagactctgtctcaaaatacacacatacacacacacacacagatttttttctgagatggagtctcgctttgttgcctaggctggaatgcagtggcatgatctctgcttactgcaacctctgccttccgggttcaagtgattcttgtgcctcagcctcctgagtagctgggattacaggcgtgtgcaaccatgcttggctaatttttgtatttttagtagagactgggtttcacccatgttggccagggtggtctcgaacttctggcctcaagtgatccacccatgtcggcctcctaaaatgcggggattacaggcatgaaccaccatgcctgacctgttctaccatctcttttataaatattggtctgcttctctttgaagggttcttattctagtagtagaataagatagaataagatcatgtttgttatctctgtattgaca

SEQ ID NO: 120724 - DNA, 107 bp, Homo sapiens
actccacatcagaagtagtggcagtccagtaccttgttagagatgatctataattcaaagtactttagatactctgttattgaataaatgaaaactcagtggctgct

SEQ ID NO: 120725 - DNA, 745 bp, Homo sapiens
tcgtacccacagatcacaaagacgtgaagtaattgtactgtgatgagttcatagatcaaaaggcacggcgagcacagtggcccatgcttgtaatcccagcgctttcagaggctgaggcaggaggatcgcttgagcccaggaggttgagtttacagtgagctgtgatcacgcctctatactccggactgggcaacagagtgagaccctgtctcaaaataaataaataaatgagcaaacaaacaaataaactctggattcttgtaaacggttttgcaaatgtgaaaattcagtataatagtgacttgggtaattcagtgttgatatcttttcttgttttgattagagaacaaggtgggcgtggggtgattgaaacagtccctgtttccagtgggagtggagttgatggcatggtggaaagggtgggctttcaaggcaggccattttgatgttgagggacacaggctctctggtgaccttgggtacattacttcacctatttggatttcagtttctttgcatgtcactgcctgatccataatagaagtacttttccaacctatcccctaagtcaaatgtcttctctttgagaacaaggtgtcccaaccttaggagtctgacatcattcagaaagtggagagagcctgtcattattctctctcatgcatctttatttcctctcctctccagctcctacattgtgctgtaaacacaggcctctgccttgaacacatgtttgccagatgct

SEQ ID NO: 120726 - DNA, 568 bp, Homo sapiens
gtgaattgatagttattttccctttataaggaatatacatgattggtgtaatgatgatttgaattaaacttaatatgcacaggacctttttttaggcaattaagatttccactccctttgcagtattttatgtagaagaaaagttagaatgttgcaaaactgacagtagtttggtaattatctataatagttagcatatggatgatcctgactctagcgtgcttggacctaaaatttaactgaaatttgtttcttgtttttttggaccttttaaaatgcacatgatcagaatcagcatagcctattacaataaggttttgttattagaagacagctgaagaaaaacataatcaacaaattcaggttacttttggattcagcttattcttaggaatatttactaagtggataaaagtacattaccaaatcatttgcaaagtatgcaaatattacagagagcctactatgtgttagacactggacatatagcagtgaataagtggggtcaggttttccctctctccaatcttatattcttttgaagggaatagacaataaacaaatagaa

SEQ ID NO: 120727 - DNA, 102 bp, Homo sapiens
cggagttggcactccaggctattaaccttcatgcagctgagcagtagaaatcgtgcctcctgaacagcctcccctgggaacagccctaccctagttgcctca

SEQ ID NO: 120728 - DNA, 382 bp, Homo sapiens
ggaccctccacgatctccacagctctttctccatgcagccttctcctctctgattccctgtcctgtggactctgctcctgggtctccccagaatcctagctttgtctccccagttcagggatcctactgggctctacctgggtttcccttggtattagtcagcccagtctgtcatacaaaacaccacagactgtgtggattcaacagcagaaactttttttctcactgttctggaggcttgaagcctgagatcagggtgccagcaagtccggtttctggtgagggctctcttcccagcttgtagatggccgccttcttgcagtgtcctcccatggcctctcctctgtgcttgcatggagagggcactccagtgcctcttcct

SEQ ID NO: 120729 - DNA, 360 bp, Homo sapiens
caaggcaaagggcatggctacagggaggggtgaaggattgggacaatttttgcaatatattatatagcccatactgctaatcaaatcaaagtttatagatctaacggaagcgtacgatttctgatttccttgatgaaacacttatcttttcagctttactgatgcccagtctctttttgataggctgggggaaagtcagagaaaccagaaatgggaaaaggttgaagtgagatcttgaaagggataggtaattattaacaattagctattgcatgcattgtataatttcagatgtacccggctcatctccttttataggacactgaagcccaaagcagcacagtgtatcacccacattcc

SEQ ID NO: 120730 - DNA, 461 bp, Homo sapiens
cacttggtcagtgaaggagtctttgctgagcgccaatgacttgcacagaggtgtgcgctctgctccagggatgtctttattcaagtcttaattctgtaactttaaacgttttctcatttttaaaaacagtcacatcttataatgtctgtgtggtgctttctaattgctcataaatgtggcctcctgtggtctggtccttatcacagtcctgtacggcagatgtccagcaataagggaactgagatgcagagatcatgccactacactccagcctggcgacagagcaagactgtctcaaaaaaataaaaaaaagaaattagccaagtatggtggtgtgtgcctgtagtcccagctactcaggaggttgaggtgggaggattatttcaacccaggaggctgcagtgagctatgattgtgccatttgagctccagcctggacagcagagcaaagaccccaaaag

SEQ ID NO: 120731 - DNA, 264 bp, Homo sapiens
ctgagtagcatcagaggccacggttctcagcaacacttctgttatgtactgagaaaccttgaaccggtcataatttctttgggtttcaattatgaagtcaaactagatgacctttaaagaatttcaagttctattatcttttgatttttacatttctcataggacccaatatggaactgagtacagctatttatatcaaaattattttgtcttcacttttttttttttttttgagacggagtcttgctctgttgcccaggctgg

SEQ ID NO: 120732 - DNA, 306 bp, Homo sapiens
cggggagaggggctgagacagacatattcctgaaaggaataattactgcgtgatagtggaaatatacacaaagactttgggagtaacagtgatggagggacccattgaaaacttactaacgtttacagctgttgttaaaattcatccaaaccagccaattatatctacattctctagaatgaaagtacaaaatgattacagtggatgttctaaacaccagtgttgacacaatccccttttcctactggaatggggatctaatggggaaagtgaaattctttctcaaaaccttatcggtgttgatac

SEQ ID NO: 120733 - DNA, 700 bp, Homo sapiens
attctggagaactcttttttacacaggctttgaacaaacctccctattgccagtcttctctttattatactgtgctaccaatttctgttttattgggtgtcctgaggtgtaaattgggttgcctttttgctttcacactgctgtgttaggagtttgctttctggagtctgttaaatcaattaccacttgcccatatgctttctagcttctaaaaattgtttttgttgccttttccattttctttttttttaaattcactctgatttctttctaatttttatggttttacttttttatatttaactttttaatttgttttgaatttactttggagtaccaaaacaacatgtttagtgtctttgtacatcgtctgagctccagatctgtgcttccaactgctggttagaccatgtggaccgtctctatgccccatgcatctgcattcatctagttttctggaggggtctcttccatttttttttaaactaatgggtttgtctttttattttttactttatttatttatttatttatttatttatttatttatttatgtattttcgagacagagtttggttcttgtcacccaggctggagtgcagtgtcacggtctctcagctcactgcaacctctgcctcctgggtacaaacaattctcctgcctcagcctcccaagtagctgagattacagtcacctgaac

SEQ ID NO: 120734 - DNA, 575 bp, Homo sapiens
atctgaataaaattttcttctattaatttttgaattattgtctcttctccaattgttggcacttccatttgtggaaccctattattcacattttatgttatattacttattactttattatatattctttaccttattttattatttattattgagctactcctgtctgccactattttaggtcttaatgttaatcattttgcttttactaatcccctgaataatttgcttcaaaaatgtaaaaatattacatttttaaaagtttgagagctcttttttccacagtgcttgaattttattaaagtttatattgtttttgtttttacttaaattgttttctgtcacctgcagctgttctatttctctagatgcttgttttgtaatctcaggcatagcaggctttgctctactgttcaactgctcctcaatgtcatacaggcagtgacatgtcctgggggccatgttagtctcagcccaagcagtaggccagctttgactgttagattcctctcatggcccaaggtctcacatgcagccagctgctagtcagttccagatgttctctgaaggagcag

SEQ ID NO: 120735 - DNA, 532 bp, Homo sapiens
aaaaaaataaataaataaaaataaaaaataacaatcaggaacctgtgccttggagaggttaactaacttgaaggagctcatagcttaggttgattccaaagcccgtgctctcagaaacattaacccctagttataatttcctgtggcaagaatgaaaaatgcaggttttcaggcttagaaggatttttaagcaagtttatcaggcaggagtagatatagtaagttgccaaaatgtgtgatgctacagaaccccatatgggccacttcagggggacctggtgaaggaatctcacatttattctaggagtctgggttattgtagaagagttttttttttttaatcctccttaggttctgaatccctttatgaatctgatggaagctaaggatcctctctttggaaaaatgcctgtaagcactacatacatgtttgtgcataattccagagggcttggaaaacctttgtaatccggtcgtggaccccatttaagaaccctcctcgagggtagcattttccaagtgcaggacacat

SEQ ID NO: 120736 - DNA, 177 bp, Homo sapiens
tccttactttattttgttttgaatctcatcctgagtcaattgtttgagttgacctttctttttagaatcttaatttttaaagccaccagtagccacttaaaggccatcagttaccacactggagcttataaatattttcattttcctaattttcaataaaaaagttggattgtatta

SEQ ID NO: 120737 - DNA, 745 bp, Homo sapiens
agcattcaacagagttgactgaaacatggatccctaaaatggctctacaactcgaaaaagttctgaacgtcaggtttagcttttgagtcatttcccccgctgtcaaggtggcaaatatatagcccaagaaggtggcttttgagtcatttcccgcaaggtcaaggtggtaaatgtgcagcctcagaacctcaaggataatgcgacagagctgcaaaatgaatggttgctccaaagatggaagcagcctttgtaaaactgccttagtgacagttaacttttcaacatcatacaatttttgttaacaccatgcaaaaacctatggtgttcagcagcatagcatactctataccgtaaccaaccctcttactgaagaaaagacatagtggataaattgcacttccaaaagttcttttgaatacctcaatgaactggcaacaacgtaagacctgttatagattgaattgtataccccccaaattcatacgttgaaatcttgattcccccaaatctcagaaagtgtccttgtttggaaatacggtcattgcatatgtaattagtttagatgagatcattctggaataggataagcccccaatccaatatgactggtgtccttataaaagaggaaaatgtgctagctgggtgcagtggctcatgcctgtaatcccagtattttgggaggccaaggtgggcaaatcacctgaggtcaggagttcaagactagcctggccaacatggtgaaacc

SEQ ID NO: 120738 - DNA, 1019 bp, Homo sapiens
gacaggaagattgcaagccagtctcactcatgaatatagatgcaaaaatcttaagcaaaatatttagcaaaccaaatctagccatgtataaaatagataatatatcattgccaagttgggtttgttccaggaaagacaagagtgatttagcattgaaaaatccacgtgtcattcagcatgttaatagattaaaggagaaataccaaataatcatataaacagatgaaggaaagttatttgacaaaattacgtgctcattcatgataaaaactctcataaatagtaactagtgaaaacctacagtaaactattgctgagcatttgctcagggccgtgcaattagttggaaagaggagagcgtgcaagagcacacacacatttatgaaagcattttggtatatgaagaggcaacatacctgatcattgaagaaatgattaagttttccataaactgtgctgagacacctgattatccacatggaaaaaatttaagtggatccctgtctcataccatgcataaaattaattccagacggattagaaacttagaaagtgaagggccaaattaaacttttattttttaaatgaaaagggaaactggccttaagacttcagaatggagaagtatgtattcaacaagacatcaaaaacgcataccataaatgaatgaatccgtaaatttaatcacattgatatcaataactcaatcaaacaggcattaaaaagagaaaagcaggccaggtgcagtggctcacgcctgtaatcccagcacattgggaggccaaggcaggtgcctcacttgagctcaggagttcgataccagcctggccaacatgtgaaaccccatctctactaaaaatacaaaaattagccagacgtggtggcgcatgcctgtagtcccagctactcaggaggctaaggcaggagaatttcttgagcccgggaggtggagaggttgcagtgagccgagattgtgccactgcactccagcctaggcaacagagcaagactccatctca

SEQ ID NO: 120739 - DNA, 410 bp, Homo sapiens
tggtgccgcttgcggactgctcttttgaaaggaatggatgtttgctcctttgccccctctctcttcctgctggctgggatgcaggtgcagtggcaggagatgaagccgcccccaggactcaggggtggaagccgtgggaggaaaaggacacggcctccaggcctgggcacatcactaggcccaaccatttagagtttccagtcccccttgtcgtaaggatcagctcagggatgggcccagtcagcaacagagctgggacttggccagacactgaggtccaggggctctgcttcagcaggtgctaagcagaagggacagcggtctggagctgttacgggtgctaggccgaagggacagcggcctggagctgttacaggtgctaagccgaagggacagcggcctggagcggt

SEQ ID NO: 120740 - DNA, 455 bp, Homo sapiens
cctatgtaacaaacctgcatgttctgcatgctgtatcccattagcttaaagtatgattaaaaaaaaagagtttagcactggggagcagaatacactcactcagctgctgtgtctgactcccctctgttgactcaccatccttctctcccaggatgctctctggccaatccaagttctacttctcttttagttccctaccaacttttcttggctcctctttcagattggtccttcttcaaagaaatgtaattgacttagatggcaggggataggcatacaactccccaaggagcccctggtctagtaggggccacagataatagaccttggcagagaatgtgaggggcattctaggggtcagttcaaggtgttacagcctacaacagggagcacttagccttgtgggagaatccagggaggcttcctggcagagatgactaggtttagtctggtga

SEQ ID NO: 120741 - DNA, 321 bp, Homo sapiens
aataaataaaatgcctatcctcaataacactgcatggagtggagaaagcagagaagtaacaagaacattacagcatagcttataagagttaggatggagtaaatacagggtgctgagggacacagaggtagagcacccaagccagactctgggtagtcatggaaggtcttctaaaggaggtgacatttatatggggacctgaaagatgagtaggtgtcacatcagccaggaaaaggggccaggaaaaggatcccaggacagagagaacgaatgcctgatctcccagaagcaaaagagaacaaggaattttccaggaactgg

SEQ ID NO: 120742 - DNA, 267 bp, Homo sapiens
tccaagtttcactgacattatatctaatataaatacatggccttgcctcatctgaggacaattgagatttcctttttagaagcagagagtcctaatccaaacaattgtacgttttaactagtataaaaagataactttagctaattccagctacttgggaggctgaggcacgagaatcacttgagcctgggaggcagaggttgcagtgagctcagatcacaccactgcactccaccctgggcaacagagtgagaatctgtctcaaaa

SEQ ID NO: 120743 - DNA, 870 bp, Homo sapiens
caaaaggctggtgccccagaagcaggcgagcgtggctaagaaaaaaaagctggacaaggaggaagaggaaataaggaagcagaggttgcagtgagctgagatcgcgccattgcactccagcctgaacaacaagaatgaaactccgtctcaaaaaagaaaaatttgcaaagggagggaacagcatggagctctctgttcaccggtctccaggacctcggattccacctttaatcctgaaaacccaggaaggcttctgtatccctacaatgaagcaggtttggggctggatctgcagggtggcaactcaatccatgcagaacagaagaagcatggacttttccattctggctattccattcactagctgggccattctgagcaaactacctcccaatgtgcctcagtttcctcatctgcaaaatgggctagtcgctggcattgtaccgagcagtatgagaccggaggtcatgggaagaggctggtaggcacttcatcccaggcagctgctcagggacatgggacacagggaggggactccgagctgctcctagctcagagaggctctagggacaggcactggaaggaaggggatgcagaatggtgagtggagctgggtctcagaacacagacatcttgaagtctgctatgtgctgatttcacacttgaccccccaacaccctgaggcattactgtcctcatttctcagatggaactacagaggcccaaggaaaaggggcttaggccaggacacccagctcttctccaagtgtctgtctcaggctagcttttgcaactctccattgggattcttcctagatctccatctgtacctgccaacccacctctgacccccaacctgttgcgcccagt

SEQ ID NO: 120744 - DNA, 267 bp, Homo sapiens
tgcttcttgaaatctgcagaggttgaggcagctgtctcaaactagaggacagagccctgtgggcaggtgggtgtgagaaactcaaacaccgcagtcttcacagacccacaagctattggcaggtgcaatgtgtttattggggcagatgtccatcccaggacttatcaactgtcatctatatttgggacaacctctattgaaaatgatgattttcacttcaattctgaggagtaggcaggaaagggaaacttttagaaggaggatata

SEQ ID NO: 120745 - DNA, 515 bp, Homo sapiens
agtgacagagttcacagatgttatcacactactatccagtctcattaaatttctaggtacctacttcaaactttgctttcaaataaatattaactctgtgttgcattttaaattaaataaaaattattatttttcacattggaaacttttaccccaagagtcagattgtctaacatctagtttaactttataagcattcaactttaacaaatattttacacaatgattttaactgaaacaatgaaactggggacattgttctatatttctaaatctctgccccatcccttttttatttttgcttcctctaaccttatgttccttaatcattctgatagtttgtgtacatgcagaaggaggtgggggtggctggtattgccaccttttctttctctggatcctgattacttcttgttttatttttccacttcatttccatgtttttcctcctcctactcagtgtcaaaaaaaagagtgctttttaatatgtttaaaaaaacactttgaaatgatac

SEQ ID NO: 120746 - DNA, 288 bp, Homo sapiens
tttttgacagagtcttgccgtgttgccaggctggaatgcagtggcacagtggcacgatcttggctcactgcactcactccatcttgaatgacagagctagaccctgtctcagagagaaaaataaaagctgcagataacacaaatctagacacttaagaatgcacataactagagttcgctgttctttttttctttaggttaaatttacacagcatgaaacacacatcttaatggtaccatttgagttttctcagatgcatacattgtacacttctcaaccctgtcaag

SEQ ID NO: 120747 - DNA, 687 bp, Homo sapiens
cgtggtggctcacgcctgtaatcctagcattttgggaggccggggcgggtggatcacaaggtcaggagttcaagaccagcctggccaagatggtgaaaccccgtctctactaaaaatgcaaaaaaattagccgggcgtggtggtgggcgcctataatcccagccactggggaggctgaggcagagaactacttgaacccgggaagcggaggttgcagtgagccgagatcgcgccactgcactccagcctgggcgacagagcgagactcgtctcaaaaaagaaaatcaaatacaatgaaaagaaaaatacaacataccaaagtttgtgggacaccacttaggtggggctgagaggaaaatttatagcattaatggatgtattagaaaaaaggaaaagtctcaaatcaattatataagctctcatctcaaggaatcagaacacaacacaaaaaaccaacgcaaaaaccaaaactttgaagcaaggcccgaagaacagcgacctggtctaacactcacgacgcatacactcacctaactttggcaaccaacgaaccggaggcgcggacacacatcttcactgggaacccagcggggtttgggaacacggctcactcaactgttggacaacacttctagcaggactgaccaggagtcgctacacactcactctcacggtcatccggaccag

SEQ ID NO: 120748 - DNA, 611 bp, Homo sapiens
ccacaaaaagaagcagagaaagtgtagaagtgaccgcaggagacagcaagcctctcccagtgcctgacagtgcttactctccgtcaggccagctgagaggctgtactgtgtatcctgaggaagttttgtttccccgtcatatgtaactttaaaataaaactccaggccgggcgtggtggctcacgcctgtaatcccagcattttgggatgccgaggtgggcgggtcatgaggtcaagagatcaagaccatcctggccaacatggtgaaactccgtctctactaaaaatacaaaaattagctgggtgtggtggcgctcgcctgcagtcccagctactcaggaggctgagacaggagaatcgcttgaacccgggaggcggaggttgcagtgagccaagatcgccccactgcactccagcctggtgacagagcgagactccatctcaaaaaaacaaaacaaaacaaaacaaacttcattcctgaaacagcttgaatgagacacttgcaacctacaaccccccaaatctaactaataggcagtctaaaattagataaattgtggtgtaaatttcagaggcagtttggtaaaaaggttcaattttagccttcatca

SEQ ID NO: 120749 - DNA, 308 bp, Homo sapiens
agcctcccaagtaactgggattacaggcgtgcaccaccatacctggctaattttttgtatttttagtggagacagggtttcaccatgttgcccagtctggtctcgagctcctgacctcaggtgatccaccctcctcggcctcccaaagcgctaggattacagggatgagccactgcgcccggcctgagaatttatgtattttaaaggagtttgaagaattttgatagctacccacccaaagcaacacttaaatgaaccatcccatctaagtgtccatattgcactacctagtgaggtactcgtgtaag

SEQ ID NO: 120750 - DNA, 283 bp, Homo sapiens
tcaagagagaggaaggttggtggtggccatggtcagatgctgtccatctcagtgtatccaggcagggacacaggcaaggaccatttcttactcatctttggggcttcacagccccaaagattctttgcaacctgagcagaagttgctttttatcgcttacagatttgacattttctaggaaggtgatgcaggttttaaaaaccgtatagttgagaagagtggcagcaataatcagataataagggaacaaaacccagttctttgcgttgtgtcggtaggtgcc

SEQ ID NO: 120751 - DNA, 423 bp, Homo sapiens
aaagcatttgtaaggacacgcagtctcagcactgctaatggtaactcccttttgcacaataagtagtaggactttatcgtgccaaggactgcagacccactgtggaaatcgacattaggggtgatccaggctatgtgattcactcacttagttcgccaacaagtggcatgtttctatcccactgttaatttaccaaacgtttaactgtagcttcagaggtgatttagttctgagggtctggacctcatgaatagattaatccataatgggtgaatgaataaatgagctatctcatgtccttctgagaaaagaaagagatctgagctagacactcagctccctcaccatgtgatactctatgccacctagagactctgcagagtccccatcagcaagaaggtttctcatcagattcccagcctt

SEQ ID NO: 120752 - DNA, 138 bp, Homo sapiens
gtccgccatcactcttttcttccggtacggtttcagttagccaggatggataagttctgaagatctattgaatagcatggtgactacagtgaataatgttttgtgtatttgaaaattgctaggagagtggatcttaaa

SEQ ID NO: 120753 - DNA, 252 bp, Homo sapiens
ccattttctgaagaggaattcaagcctgctgcaggaatttgcataagtaatgaggagctgaatattaagttccaagacaatggggaaaatttcttcacagcatgtcagaggtctttatggcagccctttccatcataggcctggaggctgaggaggaaaaaatgatttcatgccctggacccaggacccccttgctgtttgcagcccagggacttggtgctctgcaccccagcagctctggccatggctgaa

SEQ ID NO: 120754 - DNA, 1217 bp, Homo sapiens
caacatttaaagggacaatacatcatgacctgtggggcttatcttgggaatgcaaagctgcttttttaatatctgagaatcaatcaatgtaattggcaggattaatagaataaagggggaaaaacaatcctttcagcagatgcaggaaaagcgctagtgaatgggtaagcaaattgtgatgagcacatgcagtggaatactattcagcaataaaaaacaataaaaaattttcctacatggatgaatatcaaaaacaaagtgctgtacgaaagaagtcaaatacaaaagaccacactgaatgattgcattcatatgaaattatagaaaaagcaaaattgggcaaagttagtttcagaatcatcttagcaggcaaagctcacatcataggaaaatgtgttgaagccttacattacaaatatggccaaatccactttggtaacacagaggctgcaaatatgtattaaaaatatcatgtattaaatatgtattaaaaaagcaatgaagtttaatatttcactttttctttagtaattttcagaatacattaattgatctagtactctccagaggtggttgattactttcttttttggaacatctttatgaactcatggatttttacatatttggtgtgcatcagtgtattgctatcattattattacctttttaatgctcctattaccacatctttagccaatgcataccctttcaaattagtgcttgtgtccttttgacatgatcttaatcatttttgatagattccctgttcttgggcattcagtgaatgacaatagtatactgaaacgaattaagataaaaaccaattgcttagagctagataaaaatttacaagttaataattttatcattaaaataatatttataatgaagatgtctttcaagatattaatttgccaaatacttgatagttaaataaagaaaaagtcagtgaaaacatttttagtaagatatgtgtgagaaggatactgagtagcacttgcaatctggactggatggctatttttcttcatggagatggaaaggtgccacaacaaaggtagtgctaaggtgaatatttctcctctgtgatgaaaaataactcacaaaattggcttctttgttaattttttttcaaaaccaaacactcagatcatcaacagcaaacaaaattgtgaatgtttttactgcacacaataaaaatgctacgatgaaattg

SEQ ID NO: 120755 - DNA, 138 bp, Homo sapiens
cagagaaatcattctcatttgtgatttgaactaatctggcatccaagtgttaggcccacatcctcacctactgtggagattgcaacttatataagctgtcatcaccttaaattcaatctatcttgaactgattaatgc

SEQ ID NO: 120756 - DNA, 568 bp, Homo sapiens
tgctaccggtttctggggctactggttatgcttctgcctggtgtgagctaaagctcttttatctaaaagcaaaacaaagcaatccaggtgcctttgttttcatctcactttctggcataggatgctctaaacttgtaaacaagcatatctggaccaagcagacctgctgctaattgcacactcacctcgagcccaaaatgaccctgttacatccaaagcacaccaggtattcatgtaaaagtgctagtgtctgctataaagcacatcgctaaccttgaaaaggaagggagaacttagaaatcaaatcaaatcaaatcatactttgtttccaatggaaattcttaaagttgttacacgtacaaaacacattttcttcttatcaatcaaaaaggcccaatcaactagaaaaaaacgacttggagtggagatagagaagtctttttctgcttatacaaggtactggcctactctaaaatatactccaagagcttcaccttttcaataaagccagaagtgccttgtccatttctcccttcatcttcagccccatcagattctagaacatcct

SEQ ID NO: 120757 - DNA, 429 bp, Homo sapiens
cgaaaccccatctccaccaaaaaaatacgaaaaccagtcaggcgtggcggcacgcacctgcaatcgcaggcactcggcaggctgaggcaggagaatcaggcagggaggttgcagtgagccgagatggcagcagcacagtccagctttggctcggcatgagagggagaccgtggaagggggaggagagaggggagaggggattttgtattttttgtagagatggatttcaccatattggccaggctagtctcgaactcctgacctcaagtgatccaccctcctcggccttccaaagtgccgggattataggcatgagccaccgcgcccagccgattattagctcttgatacaatactttcagaatctgaaacggagagggtaaggaacttcagcgaagtcatgcagtgaccagaggacaacgcgtaagtg

SEQ ID NO: 120758 - DNA, 559 bp, Homo sapiens
accattaacgagtccccatcagtttcccctagccttgggccataacccaatgtgctttaaaaacgcatctgttagtatcttagcagtgtcacttgtgggatagtaatgtcactatcccacaagcgacactactctcgttcagtattacttaatgggacaaaaaacaaagcaaattatataacaacgactgacctgacctcctgcagcaaacaggccatgacagataatcaaattccactaaactttacgttcacctattttaactattaagagacgaaactgaggtcctttgcaatatcctcccctttccgagaactgattatttttaaagtattgtcacaggctatacttgcaagcagctttttaaatgcaattccaacatcagcacgttggggcactgacttgttttttggcagattaaagtaacaaattttattcgaaattcttctattcagaaaaataaaagcagggggaaggtattctgcttggatttcccaaacagacaaagttctttgactttgaggacctacagaagacatttgcagaaatggtgttttgc

SEQ ID NO: 120759 - DNA, 113 bp, Homo sapiens
ctatgaagaaaataaatcttttttctttataaattacacagtcttaggtatttattgcaatacaaaatgaattaatacaatttataatgtcatccaggttttgttctcttatt

SEQ ID NO: 120760 - DNA, 678 bp, Homo sapiens
ttctgtgtaaatttaaataatttctttaaaggcagtaagcttttatatttaatatacctttcactgtgcaatcacaacaggaagattttctaaattagacatctttaccttgaagaagaaacttgtctgtttcagtgtctttttgtagcaagattgaccaaaacaagtggtaaataagtctgtaatatttaactgtcatgaaatacctttgctaataaggaaatggcctcggtttggattaggtggagtttcgtgtgtgcgatgtgggggtgtatgtgtacatatatttctttttttttttttttttttgagatacagcctcactatgtcgcccaggctggagtgcagcggcatgatcttggctcactgcaacctccgcctcccaggttcaagcgattctcctgcctcagcctcccaagtagctgggattacagatgtgcaacaccatgcctagctaatttttttgtatttttaataaagatggggtttcaccatgttggccaggctggtcttgaacttctgacctcaggtgatccacctgccttggcctcccaaagagctgggattacaggggtgagccaccgcacccggcccatatttcctttttttatactggatagcaatatagggtcttgtctttcaccttttaagttcacagaacagtttgtcctgaccaca

SEQ ID NO: 120761 - DNA, 283 bp, Homo sapiens
atttgccacaaactaggaacaacacagtgtccaataagtaaatagataagttgtgatatacccataccccgtaacactgcatgcagccagtgcgtgaatctcacaattgttttgctgcgcaaaagaagccaggtgattctgtttatatgaaatttgagaaaaggcaaaattaatctgtagtgacagaagtcattatcaatggtttcccaagcctaaagggggtgttactaatcgcaaaaatgtatgaagaaactttctggggtgacggatattctttatattg

SEQ ID NO: 120762 - DNA, 844 bp, Homo sapiens
aggcagcctggtgtatttgactggcccagaggaggccagcgtggtgcagtgtgcgacagggaggtggaggggagaagcgcacatccatcctcggctcccacacccgcctttcccacacagatttctctcttcctgtctgatgttcatctgatcctctctgcttcctcatctgtaaaccaggaatcccagacctatctcagaggcatgtagataatattcttccgtgcacggtaatcctcaagacaaccccaatgaggcctaatactatcatcctacttcacgggggagcgcattaaagccagaggttcagcaactggcccaagccacatagctggcgggcagtctggctccagagtcttggttcttgactgcttgaaagctgcctcactgggaggaataaatgagagagggagtagttgagactgggaatcggctggatgtggatggcagcccacagggccatttcccttcctctttccattctctccagattcacactcaccgaatttagaaggagtgatgctgcatccttgagttccattccatcctttacaggggaggaaatgaacctcagggggtgagcgatttgcctaaagttgcacagcaaagagtggcagaggtgggactaggaccccagtcttccagctcagtgtcctggtagggagcagaggttggagctgcggcctcaggtggccaaggtgaggcatcgaacagaactgcatgacgcttcccgatctgccctctccaggtgaatccatatgcatgaccaatcttcctgtagcacggacctccctccctgagtcatgtgaggaattcatatttctgtgggttaacatgttgcaga

SEQ ID NO: 120763 - DNA, 385 bp, Homo sapiens
ttttcacactcttctgtgaattattttttgactttcaattataatgaagttattaatcttacaaaggctcgctttgtaaagagactaatctgaataaacttgcttgtatacaataagtgccatggcaaaaattaagagtacagttattatcagagactaaaataacaatttaattttctagaaatagaaaattaagaaaaataacttttaatgctgggatttgacattaagaaatgaatgacaaaaatgggaccaaataaaatgctgtaattggccagacatggtagctcatgcctgtaatcccagcacttggggaggctgaggtggaaggatcacttgagctcaggagttcaagactagcctaggcaaaacctggtctgtattt

SEQ ID NO: 120764 - DNA, 325 bp, Homo sapiens
acctctgccccactccctcccctaacaatgccacaacatctgtcaatcacatatagtattctgataccaaaaaataatatttaattacattaagttgctgaattgggggatttatctgatttactgttattgtttgaatatggtttgtttgtcccaccaaaactcatgttgaaatttgattttcaacatgatggtgttgcaaggtggggactaaggagaagtgtttggattatgaggaataatccctcataaatagcttggtgctgtgttcatagtagtaagtgagttctcactctcaagacactgaataaattctcatgaggat

SEQ ID NO: 120765 - DNA, 798 bp, Homo sapiens
aatgagtggggctagagttgcctccccaggaggggctggaggtcagggcctggtgggctctgcaggcttatcagttcagcacaacgtgctcctgcattcaagaaacagggcatggggctgctcactggcactggaggccgaaagaaggtgagggcaagtgagatgcagggacctcttctcacagctgtgctgacaagcacaaaaaggagccccccacgtccacaccaggaaaggggggatggtgcacaagatccagcaggaactttggagtcacactgacgtgggttcaaatcccagctctgccgctgagcaactgtgagatcttggcaaatgtttaactttcctgatcctctattgactcatatgctaaatgtgacttagaatgcttgtgtcgtaagactggcgtgagataaagtacggcaagtgggaaacacaaagcctgtgcacgtgaggccctcaacagaaaaagctgaattgctgtgtactggtagcctcctttctcttaccaggaagcccacgcctctggctaaaccctcaggctcacttgcccaccattaccaggtgcctgtctcccttgcctgtcttcccttgactcggggaacttcacctgctttccttccctagaaggccccagcgcccaccttgcttgctgtccttcaaatcaaacaacctgccctttcttctaaaaaggctttactgttatcactaaagggaaacaaaaaggtgcaactaaaactagccttccttaagcctgggcccaagtcccaaccctgatgctaacttgcagtgctaccttca

SEQ ID NO: 120766 - DNA, 306 bp, Homo sapiens
caggttcaagtgattctcctacttcatcctcctgagtagctaggattacaggcatgcaccaccatgcctggctaatttttgtatttttagtagagatggggtttaggcatgttggccaggcaggtctcaaactcctgacctcaggtgatccacctgccttgtgctcccaaagtgctgggataataggcatgagccactgtgcctggccaggaatggcatctcagctgtgatataaaggatgactggagctgatgagatggggaagggtgcgagtacaacaacatcctaggctaagggacatagcag

SEQ ID NO: 120767 - DNA, 266 bp, Homo sapiens
tcaaacgtaatgtacatgacaaatatttaccattttctcaattaaaaataatttttgaagtaaaattttaacaaattcttcagtcttaaagaaaattacaccagataatttggatttatagaaaagaatggaaggactgtaattgttaaatgtcctggtaaatataagattattgtttctttcttaatttcttcacattatataactttaacatgcatagaggccgggtgtggtggctcacacctgtaatcccagcactttgagag

SEQ ID NO: 120768 - DNA, 702 bp, Homo sapiens
acaggggctgggcgggccggcccagggcctgcctatggcctgaaagagaaaacctgccacggagcccgggcttctctgatcctcccgccaaactttgtctctcatttagctttctttgtgtctgaggatttagcaaaggcctcagggattcaacagagttggattgctgagaataaaattacggatttctccataatggacacacgcactttttgtttgtgctgtttcctttagaatggacgatgagtcaaaattgttcgtttatgcttcttcacagaaggatcttctgtgtcgtaggaggtggcctgcagcaatctggacattcagtggtcctcctgtgattaataggtgaacggatgagctattctgataagaactggggaacttttgccattcaaaagcaaatagaagaactgggagattcctcaacttagcttttcttttttttggttctaaagtgactgcgaatggaggtagaagagaagaaaagctttcaaaaacatcttccattaagaaaaatatgtatcttcatgaagacctatctgagtaaaattactaaaacataatggctttcttgaaatagaatggaatgaaaggcatattagggagtatgaaagtatgaagattttattaacatacttctagaagtttattaaatatctgcacaggaactgtaatttgagatcagtggtggaaagagaa

SEQ ID NO: 120769 - DNA, 455 bp, Homo sapiens
agaatacctgagatggtgtaaacagatatccaggtagacagaccttttgttcttgttttgagatagagtcttgctctgtctcccaggctgtagtgcagtggtgcaatctcagctcactgcaacctccacctcctgggttcaagcgattctctttcctcagccacctgagaagctgggatcacaggtgtgcgccaccatgcccggctaatttttgtatttttagtagagatggggtttcaccatgttggccaggctggtcttgaactctttatctcaggtgatctgcctgcctcggcattccaaagtgctgggattacatgcgtgagccgctgcacccagcccagacctgtttttaatagctttgcactaatgttctcatttgagggaagagatatctgaatgtttgtttatgggcataaggctacttccttcttttcttcaatatacatataaat

SEQ ID NO: 120770 - DNA, 392 bp, Homo sapiens
ccaagattgtactccagcctgggtgataaagtgagaccctatctcataaaaaacaaaaaaacaaaaaagaaaaaaggagaagaaagagacacagattagcatttgaatgggtggactgagtaaagcagatggccctcgtcagtgttggtgggaattgtcctatccattgagggcttaaatgaaacaaagactgaggaaggctgaattcaatctctgctgactgctggggctgagacatcaatcttctccggctctcagtgctcttccagactcagactggaatgtacactatcagctctccagttctcaggccttcaaattacacctctggctttcctgggtctccagcttgcagatggcagatcgtgggacttcatgggacttctcagact

SEQ ID NO: 120771 - DNA, 386 bp, Homo sapiens
ttggccaagatcacatagctactaagtggcagaaccaagatttgtatccaggttgtattagtccattttcacactgctataaagatactacctgagactgggtaatttataaataaaagaggtttaactgactcacacttccacatggctgcggaggcctcaggaaacttaaaaccatggtggaaggtgaaagggaagcaagcaccttcttcacagggtggcaggagagagagagaacatgagagaagtgggaagcactagacacttatcaaacaaccagatcttgtgagaacccactcactatcatgagagcagcaaggggcaaatctgctcccacgatctaatcacctcccaccaggtccctcccttgacatgtggggtttata

SEQ ID NO: 120772 - DNA, 283 bp, Homo sapiens
aaaatacaaaaattagctgggtgtggtggcgggcacctgtagtcccagctactcgggagactgaggcatgagaatgacttgaacctgggtgggggaggttgcagtgagccgagatcatgccattgcactccagcctggataacaaacaaacaaacaaacaaaaaacctagtggaagtcggagggtgagggaggcttggggcagaaagcaaaatggagaaagtaggagagtagagctgacgaagcaaacagaagctgttcagtgcagctagccgaattggagag

SEQ ID NO: 120773 - DNA, 189 bp, Homo sapiens
tgatgggatgttccatgtgacgggtgatgggatgttccgtgtgacgggtgatgggatgttccgtgtgacgggtgagatgttctgtgtcagcgggtgacgggatgttccgtgtgatgggtgagatgttctgtgtctgcaggtgatgggatgttccgtgtgatgggggagatgttccgtgtcagcgggtga

SEQ ID NO: 120774 - DNA, 594 bp, Homo sapiens
tattgacagacttgaatctttcttcctcaatatgagttaagttaatgaaaactaagggaaggggcagaggtagttattttctttggtgggtcttgactttgggcaaataagagagcttcaaagaacagcttcatccttttctttgggagaggtggagggttgagaagcaggagcagggagatcagaaagaccatgaggttgcttctttagcacatcaaagtgccacattttgggatattcgtttctgagctcagactttcctggacatttcacatgttaacagatgagctagtgactgtggagaggaaaatagagttagtagctgaatggtaaaagatcccattaaaccagtctctcattcctgagaataggccaacccaactaaacagtagtttctcattttaagagatggtattgtagatgggctctcaaaattagacctctatccatgacacaggcaaacagatctttaataagagatatttttatggaaacagatgaaaaacaaacattaatgtctgaggtggtctataaactagtttcttttagagtcatgggggcagtcagctgagagggccagtggcaatgtgatag

SEQ ID NO: 120775 - DNA, 700 bp, Homo sapiens
ggtgctgtgcttcctagctcagttcctgcattgttgagttgtgaagtgggactgacgcagagggccttctctgcccccttctgttccccattatctggcaaaatgagtaaatgaattcagtagtgtttaaaggatgcttgaaagtccacaattaactttataaaataatacggtatttaaatggaactagcaagtaccaagcaccctttgttcatggccagaaggacataagccttcattaacagagaatttctcatgctcaatcagaattttttcacttaaagtgacagttgagttgtattaaatatgaaaagctacagagatatcacaaactgtgccatttctgaaaagagtgattcagcctgaagtgacactacaaacaacatgacagaatttgaaaaatggtcaatgatgtaagtaggacttcctgaagtgaagaagggtcccttctcaaaacaagaaggtcaaggctactggtgcttttctgaaatgcagcgaggaattgttttaattttctttttttttccccagggcagcatattaatattatgaaagcatttggaaattagggaaccataaatgaccatagtccattttaatgacagtagaagagtcatcctaataatagatagtaaagaaatagattgtgacaagtggatcgatgtgggtttcttctgccattttccatctacactagaca

SEQ ID NO: 120776 - DNA, 566 bp, Homo sapiens
gtctaattcaaggaatgccactctaaaggaaagaaaaattataaacaagaaaacatagtaggctgtacagaagataagcaggtgatttgatagaagcttctagaggtggggaagaggcaagtggtaattttataaaatcaggtaatcaggaaagccctctctgagaaggtgacctataagttgagatctgaagaagaaagagtgagctatggaaagaggcaagtgaaaaactgaagaacactgaagaccagcagaacagcatgagcaaaagtcccaaggtgggaaatagcttggcatgctgggcatagaaaaatggccagtggggctgcctttctgatcacaccagaggtctgggatttattcaaggtaatgagaagccactggggttccactaaagtgaactacttttctcaataaattaagcttagcctttttaggtactaaactttaaaccatttttcaatgggagtttctttcacattacagtagtctcccctcataacaagagacacctcccaagacgccagtagatgcctgaaacctcagatagtactaaaccctgtatc

SEQ ID NO: 120777 - DNA, 472 bp, Homo sapiens
tgaagaaagaaagagggaggcggcagcagtttcttcagacagatctaggcgttcggtgactttcctatcacaggtcctgagccccagcactacacattcagattcaacaagtccggagtagggctctagagctggcacacttcccggctcctagaagattctaagatgggaggctcgtgagccacacccagagaaacaccatccggtgaccagagaacaggttaggatactgaacatcccctaggatacagtagggagtctccctacggtatcctacacacacacacatacacacacacacacacagatacagaggtaggtgagcgaggacctcactttgaaccaggctgaattaggaccaagtgcaacctcccttcacttcagacatgagcattcacttccatctctgtgctcacccccaggaggggaagccaccagtgccagtggtcatcaggaggtaggcaccagggca

SEQ ID NO: 120778 - DNA, 348 bp, Homo sapiens
agatttcagttccacacatctgaaagaataaatcacttgattcacaggtctctagcatgcatcagaattatcaagggaagtttgttataaatgtacgttaccatgtcaatcagcaaaaattctgactcaaggatctgtattttaataacctacacacacacacatacacacacacacacacagatacagaggtaggtgagcgaggacctcactttgaaccaggctgaattaggaccaagtgcaacctcccttcacttcagacatgagcattcacttccatctctgtgctcacccccaggaggggaagccaccagtgccagtggtcatcaggaggtaggcaccagggca

SEQ ID NO: 120779 - DNA, 317 bp, Homo sapiens
aatgtgaatgtacttaatgccacagaaatatatacttaaaaatggctaaaatggtaaattttatgttatgtatctatagtattttactaaaatctgaaaaaagttatggctcatttacactgatattttcctataattcgtattaaacattatatgttatgaaatactcaggttcaaaaagtaattcaagatgtgctactacttttattttaacaaatattttcatttggtcatacaaatctattcttttttttttttttttttttttttagggtaagagagggggtccggtgttacccgcgggggggttccccccc

SEQ ID NO: 120780 - DNA, 391 bp, Homo sapiens
atcatcaacacctcagcaacagtagaggaatgcagggaatgtggctcccaacatttggtgatatcaactgtcctgggagaaaccccaaactcccaagagtcaaacattggtttaaaaaaggagtttttttggggtgggggggtaggttgttgtttcgagtttattagtagtgtttgatgtttccaaacaccagttttaaaagggaagatgggttgggggacctcttccagtaagcgtgtacctcaagaaccaaacatacatgaattaagtccagataaggcaattcaactcatttgtatcttactgaggcacatccaaccaaggaagaatagagacttagttatattaggctctctcccagctctgagatgagtatattctttgggggact

SEQ ID NO: 120781 - DNA, 496 bp, Homo sapiens
gcagaccaccttaaataaaagagctcactccaagcctccacatctatgaattgggacaaaggccctcagaaacagttttctgaacttccttctaggaagttcctttctaaagacttcctctccaggacagcctgcaggagccatgggagcccactagcaccaggcgccagtgctgtctccactggcaaagcaagggtggtcagtgccactcagcaaataatccacagcaagcagcaggccagggagactggccagctgtcagccttcccattgtaggcagcacaggcagaatgggtgccaaaaccacatcaccaccagttactgcagtgcacacatgtgtgcatgtttcacgggccccagcagccaacaagaaacatggcaccaagaggcttctgggcaattatttctgaggtgccggtttgaatagtccaaaatccagcctgattcatttattgtagatcatgtaataattatgaataaaaaactacttaaaatt

SEQ ID NO: 120782 - DNA, 786 bp, Homo sapiens
gaaaaaagaataatttaaaaaaacaaaaaataaaaagaacaacaagaacaaagtgaataagtaaaatttaaaagaactgaaatggaagagatgggggtcataggtcaatgctggtgagattcatgagaagcagtgatataattcttcttacaaagaaatatctcaagattcattaatgggataatattccccattttccccagaataaccaccagttttaaaagttaactagattttggaaggcatttttgcatccttatctttttataattttcactggaataaatcactaactttttatcctgttaaatggggaccatcatatcttatttcatagggttaaagggttaccttcatggaaaagcattgcagtcctatgacctttctggatattgctgcaaacaatttttcaaaaacattttgcacattgccactacagcataaaaatagaagcatttctaaattaaggttcaaatctaacctacaggtcaaattttccaggttgctctattctattatttaattttaaattttttaaattccagttttaacaaaaaattacaagacaagcaaagatgcaggaaagtgtagcccatacaaggaaaagatataataaaaaccacctgaggaaatcttgatctcctagatatggactttacgtgagatattttcagtatgatcaaataactaaaagaaaccacatctaaagaactaaagagaagtgtaagagctacgtcttaccatacaaagaataagacgaaaattataaataagaaccaaatagaa

SEQ ID NO: 120783 - DNA, 262 bp, Homo sapiens
agcgccacattgcaaggtggctgcaaggccagacctagctgtgtggttattagcacagaggaggttcccctctggagagggaaggggcctttctacttcctaatgatgtttaatggatgactatcttaaccaaagggagaggggaaaagtcatttgtgtgtgtgcaagtctcaatcaagttcgaataaagataataagctaaagtatgaagaagttgccttaggtaggagtcctaccttctgaagtggctcatctgaaggca

SEQ ID NO: 120784 - DNA, 376 bp, Homo sapiens
  misc_feature (17)..(17): n is a, c, g, or t
ctatccgtgtccggggntgcgtaactagttagcatgccagtgcactccagcctttttgacagagtgagatcctgtctcacatccacttgggtgagctcttcatatttctactcaaacctgtctctcctgagtagctatgactacgggtacgtgtcatcatgcctgactaattttaattttttttttaaaatggaggtctcactatgttggccatccatggccaatataacagccatgtaacagtcaccgtgcctgactgcagcagttctcaatgtatgaggaaaatgggttgtgacactgttgtaatgaggcaagaaaagttaagaactgaactcaagctgctgaagatccaagatactgtgctctttatgctctg

SEQ ID NO: 120785 - DNA, 733 bp, Homo sapiens
ttacttggatcatgccatccctctcctcagaaaagtgccatatgccacttaaaaaaattaaaagaaattaaaaatttctgactaaaagggatttcacaacttaaattgggcagatcctggagtgtcacaagacacaatgtttgggaatcatttttctgaagtgtgtcaaacatgaggaacagaagaataatgcagtttattattataaacacctggcctaacctgtagggcagggaagggaatgtttgcgcacttgctgccatcaggaggagcagtgagggggtaaatgacagcaggagggaaaaccacagcacacctcgaggagggctccagcacagctgagctgggctgaggttctcaggtgcagtggcgaaggggtaaagcatctctcttttgtttttgttttgagacggcatctcactgtcgcccaggcttgagtgcagtggcgcaatcgtggttcactgcaactgttgcctcccaagttcaagcaattctcctgcctcagcctcctgagtagctgggattacaggcgcccaccaccacacccagataatttttgtatttttagtaaagacggggtttcaccacgttggctaggctggtctcgacctcccgacctcaggtgatctgcccaccttgacctctcaaagtgctgggattacaggcgtgagtcaccgtgcccagcctaaagcatctctcttaagggaagagggaagaataagggactgtgaaa

SEQ ID NO: 120786 - DNA, 326 bp, Homo sapiens
gttttttacctactcggttaaattgatttctaagtatttttgcagcaattttaaatggaaatttatttattttttaaagatggtttattgttatacagaaacactacagatttttgtatgttgattttttttatcctgcaattttcttgaatctgtttatttgttctaaaagatttttggtggatcctttagggttttccgtatataagaccatttcatctttaaacaggcacaattaaacttcttcctttccaattttgatgccttttatttctttttgttggcgaattgctctggtcagaactacgttgaatggaagtggtaaa

SEQ ID NO: 120787 - DNA, 326 bp, Homo sapiens
ctgccacagaatcctttttcctttcccattattactgaaatattggtgttccctagacttctgttcttacccttccatttttccttctggatgatctcattacctataacttcatctactactcaaatgctgattactcccaagcatttatctctagaccctcatctttctttttggctcctgacccacattttctacagcctaaggggggctctatcctagattttccaggcagtcactgcaaattcagcatgtctaacatcaaactcatctttcctacctaaactcctcctccttctcatttccctatctgggttaactatatg

SEQ ID NO: 120788 - DNA, 347 bp, Homo sapiens
atcccttgcaccccacgtgtcgcaggacagaacactcggcatcctgggggcttccttatcccacagccccaaattccgggaacagcatggatgtgggagggggcatggaatccagacctggattcttgtcccggacctacccctcacccttgtgaatttgagtaaggcatgtgaatttgaataagatccctaactgctttgggtttcctggtgggtaaagtgaattcaagtaaggtctgtgaatttaagtaaggtccctaactgctttgggtttcctagtgggtaaagtagaataacggccccaccctgcaggatgagtagcctgatgacgtgagagagggaaggat

SEQ ID NO: 120789 - DNA, 766 bp, Homo sapiens
catggtggcacgcacctgtaatcccagatactcgggaggctgaggtgggagaattgcttgaacctggaaagtggaggttgcagtgagccgagacggtggcaccacactccggcctgggggacagagcaaaactccatctcaaaaaaataaaaaaagaaaaaagaaaatttccataataaaatgaaactcttaaggaaaaaactgctttgaacataaagccaacccaaaaagtagctcttacctaaagtgaattttccctagtgccaaatgaaattcaaataaatcccaatcttctaattcacacaaatcttaagatttctaatactttaaaccagaatgaaaaagtcaggtatgccaaattaacaatcgaagagaaaattaatcccacaccaaagccaaaacattgaacttcctcccactctcgcattcacacacacacacaagcatgaaccacacaatgaaggattccagttgccccatccagacaactggacgcacatcacacacctcctagtcatccagggaccatcttggcagcctgtttctcatcactacctgccaccctgtgcctgtgttgtggacgaggaaggcacgggtagtagcctagctttttatttttttaaatctcagcaatagaggcaaggttatttctaccttacatccaagagtatggagcacaagactagctgtttattaataacatgcttattttccacaccaaccacacggttttccaatttcacaaagtaaatacttcctcatccct

SEQ ID NO: 120790 - DNA, 423 bp, Homo sapiens
  misc_feature (72)..(72): n is a, c, g, or t
cctgacctcaagtgatctgcccgcctcagcctctgaaagtgctgggattacaggtatgagccaccacacctnggccttctaatgacttgttttagaatgtggatgtcaatgtcacccaccttattctcaccaaatatggagctagagagccaagtttaacgaggttttcctttgacaccctgagagcctcgcgttgcatccacttctttccaacattattatttatgctttttacatagtaggcacacagcaggtatttgttgaatgagccattgctagattagaagtgggaaagactgacagtcgaatcgttaggagtcgtctgcagtcgtcaaggtgagtgatgacagtggcctgtatagggaaagggggaagctggagatgggatggatgtgccctgttggagagacagattccacagaa

SEQ ID NO: 120791 - DNA, 478 bp, Homo sapiens
ctgtccaagaacgacaaggggggtaggcacaggcttgagggatctgtgagaaaaaagacagaggatgtggcctgggaaaccacagtgccttcctcagccacagcagctgcattcattatttactgctgtctaatgtcatcagtctgttctaatagatgttgtaatgggatgaacagctttatctgtttcctttgtgtgatttgcacatatcctgtgggagctaaggatattggagtcaggtggtatgagttccaatgctggcccacgtcctttactggctgggtaactcagagcatgtttctcaacccatttgagcctcagtttcctcatctgtaaaatgggaacatgatatctcgtgatgttgtcgggtttaaatgggagagtgccatgtgactgcttaaacagatgcctagaacatgaaaagaactcaataaattatagtttagaaaaaggccttggccacgaaaagaggtaaaat

SEQ ID NO: 120792 - DNA, 267 bp, Homo sapiens
gtgaatctggatgaggcaagtggcctcagccggcaataaagatgtgttatgaaatttcccatgccagaagagacactcatagctgggattggccttttcaaaagcagttgatggtgatgagtgataactccccttttagttttggcatcagatggagtttgtagctcattggcttcattgtgttgcctgggtatctcctatttagacttaattggatggtttgcaccactgtcctaggtggttgctagtcttttcaaggactatcct

SEQ ID NO: 120793 - DNA, 467 bp, Homo sapiens
ggctgaacttcatggcgactggctggttgtggggatggtggagaaggggaactccaggtctgtacaaccaggtgactgtgggatgactgcccgaatggggaaagcatgagcaaagagtttcagaggcggctgacgagcgcaggtctggacatgctaaggttgatgtgactgtggggtacagacagaagttgtaatcatggggctcaggctcgagagacgggccagggccacagagaatgttccttagcgtgacagtgaagccacaggtatgcgcgaagctgtcagcgagggaaagaagggtgcaaagagctgagagccgaggacagaactgcagagaataccaggaaagaggagtccaaggagagcagagtgaggggcaggaggagctgcaggagcaactggtcccatgggagccatgagaggagaggagtttccagaatgagggagaatcaggccacagcaaacac

SEQ ID NO: 120794 - DNA, 257 bp, Homo sapiens
tttttttctttcttggggtctcaagtgaagcctgagaaccgggtctgtaagctcccaagtgcagattctcaggtctagcggtgacattggacaggacgagacatctccaagcctcggtcattgcctcttaaaatctcacaacgtgtttatgaggcttttgtgacatacttgcaaattctctttgaaaacgaaataatctgtacaataatcccccaagacacaggtttacctttataacaaacctgcacttataaccc

SEQ ID NO: 120795 - DNA, 409 bp, Homo sapiens
aggcaagaagaaaacacctatgtcagactgtgtgtgtacagtatttaaagggaaggaacatgtaatatatcagaaggtgtgctttaattgaggagacaaaagaaaatgaaccaagtaaagaggtttcattgttttaaaaaaatgcagtgagatttatgcctggttcctgctgaacctgtaaattgtttagagcagagaagctgtgtagatgaaatgcttttgagatatttttattcacagaaagttgaattagacgagaatagcttttggattaggacttatccaggtcttcctttagttccacacaattccatgtactcaacaaaagggtgcctaattaaattccgattgaagaaattcatatgaaaagcaatgtgcaacattaattctccgtatgtgcaaagtactg

SEQ ID NO: 120796 - DNA, 761 bp, Homo sapiens
gacaggataaacttccaagtataaatattggcattaagttgcttgcctggctgcatatataaatcaggctgttccttgtagaagaagatctaaaatttaccaacaatttctatttgaaaaatgaaaccaaagtctagaaatactactatggtccaccagtcaggtttgggtttatggtcaggggaaggatgaaggcttgacctaagtccataaaacattgggtcaatgtggtagctagttcctaagatggcgcctaacggtccttgcctcattgtatttatacccatcagtggtcccttttccatgttgtatcagagttagtctgtgtgaccatcagaatatggcagaagcgatggtgtgtcttttctgagattaggttataaaagactgaagcttctatcttaggctttcatttttcgggaagctagctgccacatcttgctgttaactaagcaccctatggaaaggcccatgtggaaagaaaatgagatttctagcttcagccagtgaggcatgagctcagccaaacaccgagtaaacttggaagcagaccctctagacttcagataattgcagcaaccttcagccagaaacatgcaactaagctgcttctggattcctcacccacagaaaaaaaaaatttacttataattgaaaatccctaaaacatcccaaacaaaaaaaatttgttggggggcgcccggcgccctgaaaaggttttaaaccccttcgggttgggggccggggcccccaggggtaga

SEQ ID NO: 120797 - DNA, 379 bp, Homo sapiens
ataaatttctgttgtttataagttactcggggtatggtattttgtcacagcagcccagacaaagatgcaagggatcaagttggctgagctgtcttttttctttcttcttctctaatctcccttttccatagagttaccattgacagaatacctgccatgtgccagaccctttatatccactattttattttatccatatttcccttgactctagacaaactgaagctcagagaggtaaaataactgccttggtcacctagctggctagcagttgagccagatttaagcccaggcccttgaattcctgaagcctgaagtctttctacaacactgctggtcccaaccctggccatgcagcaggataatctggtgaattact

SEQ ID NO: 120798 - DNA, 416 bp, Homo sapiens
cattaaaagggcagagtgggaggaggggatgtggcagccgaccactttgaaggccagttttctcaggcaacttagaccatttttagtcaaattttatcttagattcacagtactggtggttttcgagtatattatgttaccttctgaaatagttcctgtcgttttgaggggcttttctttataaaatagtcaactttggctataaaatgttactttagtgtaattccaactggaccagtcttatctgtagcatgcaagaagttcaagtttctcttttatttttaaaagtggcccatgatacctgtaaatcttgggaaatgactgagtactttgtgcttttattttgaagctaaacagttaacagaaacacaattttgtaaacagataatatctgtggtctgttgagttgctaggat

SEQ ID NO: 120799 - DNA, 354 bp, Homo sapiens
tgagacggagtctcgttctgcagccaggctggagtgcagcggtgcgatctcggctcactgcaacctccaactccctggttcaagtgattttcctgccttagcctctcgagtagctgggattacaggcatgtgccaccacgcccagcaaatttttgtatttttttttagtagaggcggggtttcaccatgttggccaggatatggattacaggcgtgagccacagcgcccggccaagaaaggctattttaaaacttgtacttgccttgtactggatcttaaagagaaagttttctgttttctcccattgattatgatgttagctgtgagcttttcatctatggcctttattgtgt

SEQ ID NO: 120800 - DNA, 382 bp, Homo sapiens
tatccgagttcggggttgggtagctgtaggtcttagaaatggcatcaaaggtggccttggcgaagatgcccagggtggcactgcagccccggtctgaggtgtagcaggcatcgataccagccatcatgagcagcttcttaggcacaggtgcggagacgatgccagtgcccctgggtgcagggatgaggcgtaccagcatagagcctgggtattaaaataatcgaccattttgtaggcagtgtgccagcagtgatgccaccgttagggcaatttctcaagcaccttctcctacatgaacaataatgtgcaatgcagcccattacagccactcagtggcacagactgttaatatccagtattgtcctaagttgagacaaataat

SEQ ID NO: 120801 - DNA, 438 bp, Homo sapiens
agaaatccacagaagacaaagtagtatggctttaatgaattgtcataaagcgaataccctcctaacaccaaccagaacactagaactttgccagccaccccagaagccttttacagtccccttctcataaaagtaattatcctgacctttatggcaatcatttccttgcttttctttaggaatacatgcttgggtgacaaaatgacaaatatcataggtggttgtttcttttgaaaaacaaatctttggccgggcgcggtggctcacgcctgtaatcccagcactttgggaggccgaggtgggcagatcacctgaggttgggagtttgagaccagcctgaccaacatggagaaaccccatctctactgaaaatacaaaattagccaggtgtggtggtgtatgcctgtaatcccagctactcaggaggctgaggcagga

SEQ ID NO: 120802 - DNA, 507 bp, Homo sapiens
ctttatcctatctttatcttatcccccactttctagtttctccaattgtcctcaaatgtctctaaaattacccaaatcaggatccagtcctggctcatgcatcacatttagtggatatgttggatctcttggatctcatttaatccagtatctttttattatgatactaggcttgataaagagcccaatcagttgtctgccctgtagaatgccacatattctggatttttggtttgcttctttatagtatcactgcagttgtacctctagtccctgactttacttcaaactggaaattaaatctaaaggtttgttgaatttaatgtggctaatacacatcttaggagttgtgacgataggttcatttgattgatgctgagggttcaggctaattcacctggctacactcaggaatgccaaaagcaaactccgggtagcaaaatcaacttaaaatggcccattttcagccaagtattgttacaaaataagtaaagttaaactcactcc

SEQ ID NO: 120803 - DNA, 374 bp, Homo sapiens
aagactaagagacagtgacatctgactttcattcgtgaaccccagatatctgagacaggtctcaagtcaatttagaaagtgtattttgccaaggttaaggatgtgccagtgacacagcctcaggaggtcctgatgacatgtgctcaaggtggctggggacagcttgcttttatacattttagggagacatgagacatcagtcattatgtgtaagatgtacattggttcggtttggtttggtaaggcgggacaacttgaggtatgggcttccaggtcttaagtagatgagagacaaaaggttgcattcttttgagtccttggttagccttccactgaatagacactttagtctggctcagttaatctgcattcat

SEQ ID NO: 120804 - DNA, 309 bp, Homo sapiens
ccctttcctgttgtttcattgaattgtcaaggaactctcatttttggcctgcaccctttgccctccactcgttgctgtctctggagtccaagaataccactgctccaagaggttacctgcctgcctaaaataacttctttcagtgcacaatcttctgcctaaggacctgtaatgctgtcttggtgtccagactccatcctggtttttgagcccttctctttccttctcagtgtagacagtgacccttcctactcatcagactggatgcatccttttctcccctctatatcatctcttagcaactcctcc

SEQ ID NO: 120805 - DNA, 376 bp, Homo sapiens
gctccagatagcatccacgtgctgctggccatgaggctcccgctgacttgctcagagttggaattagataatgaagcatgtaactgcatattcactttagctggctggtttaccgggaaggaaacgtcagaagtgaaactctggccagggaaatgtggatgcccagcctcatagcaatccagtcgtccagctggaagggagagttggtggtgatgagccatcttcaaatgccctgcatatgctgggcaaagcattctcggcctcacttcacagcataagtgtcatgttctctatttaactgaagctcagaaatggacaatgacctgctaaacctcccacatgtagttagtggtgggtggggatttgaacccaggtc

SEQ ID NO: 120806 - DNA, 397 bp, Homo sapiens
catgaaaatcttaaaaacttgctcccgattgacttttggtaaacaatgaaattaaggcagaaataaaagaaattatttgacataaatgaaaacagagacatgacttactaaaatctctgggatgcaacaaaagcaatgttaagaggaaagtttatagtactaaatgcctgtctcaaaaagtcataaagatctcaaattaatgatctaacatcaaatctagaggaagtggaaaaacgagaacaaactaatcctaaagctagcatcggaaaagaaagaactaaaatcagtgcagaactaaatgaaattaagaccccaaaatccacacaatatatcgacaaaaaaaaaaagttggttctttgaaagaataaatattggtagaacactagctagattaaca

SEQ ID NO: 120807 - DNA, 336 bp, Homo sapiens
cttttggggtctttgctagacaccgtggagaaaaaaagaagaaagaaaaacttaaacctatcacacacatacaaccatcaaaaccacataagccccttgaggaatctataaatataatagagaatatgagaaatgaaaaacaaatcactacaatcagagatagcgttacaagtgctttaagagtttgcagataatacattactagagtacaaaagggattaggtaagcttcacagggcaacagcatataagctatctgaaggccttcataaactagagatgaacaacatgagctaggacttggaggagcaaagaccccaaaaggggtaccgagctc

SEQ ID NO: 120808 - DNA, 158 bp, Homo sapiens
tgggtgttgttaggatctcagctcaaatgtcacttctccaaaggctctgaccagctaatgactctctccaccatcactctgcttaattgtttctccgccatctgaaataaactagctcattctcggtctccttcttctagaacaacagctttgtaatt

SEQ ID NO: 120809 - DNA, 153 bp, Homo sapiens
cttcaagaagaatcctcttgtgaaaatgttcatatgattttatgattctgcttccttccctgtccttgggaaagagtatattcaccctcagagaaggcgtgaggaatcaccaaaccagatcttttctcccaaatcagtcaagaaatgttcact

SEQ ID NO: 120810 - DNA, 408 bp, Homo sapiens
tcaccccacggtcacccagtgtgggcagggtctgtgtccagcaaagggagtcctggcccacgttccccagagacggtggcacctgggacgccgctccctgcacttttgtccctagggaagaatggatgggcctccaaagcccccaggaagatgctcccagaagtgggctggggtgggtggggggtgtgagtcacacacagaggaaggcctccgtgagccacagacacgcagcaacccttcctcagaaggtgcctggcctgccggcggccagatacaacaaaggcgcagcctgggccgctggctggacagaacaaaggcgcggcccgcacactggactgctgttgaatttcccaggaccccacggaggcccagcaactgcggggtgagcgcccacggcaggggcctcca

SEQ ID NO: 120811 - DNA, 1009 bp, Homo sapiens
atgactggtgttcttataagaagatataatttgggcacagacagagggaagatcctgtaaagacacaggaaggagagggtagccatctacaagcagagaggccttagaagaaatcaaccctaccaacatccctatccaggacctttcagcctccagaactataacaatcaaaagtgtggtcatctgctgtagtccagggaatcccagccttgcttgcaatagatggaactacttctttgggcttgcctgctgatcgcttccaagggacttcagcagctctgtttcagctggctcaaaggagaccttgctcagggagactcaacgtctgctggtataaagaaatgaggcatgctggcacaggttcaccccacagggcttggtgactgaggaccacagaaaccattttaggggctgagatgccaggcagatgccagcaccatgcttttgaacttcccagcctccagaacttttctagggaatagacatggacatcttcaaaaggccactgttctgtctgccacagaggacttcaaggccagaggccattactgatacatgaaagatcacttctatcaccagcaggaacagcaagtacccagaaacagggttcagatgagagatctgcatctgcaatgtcactgatagctccaaggcaggatacttaaaacaagcatactgcagcggggggacatatgagtccacaaaacagcctagagcagcaggaaaatcacctccaacttacttctgccttccaaattgtcgggtgaaggaagctggagctcatgaagattcctaatctgccacagaattgatgccaagagaagttggatcattgcgtggactttttcaaacgggcccccgtccggcaacactgtggtgaagacaggatggcactgttcccacaactgttagactgggattaaatccagactatgggaagggttgcatgtatggcactgaccagagaatatagccagatagattgcacaaggcgcctgagtttatatcg

SEQ ID NO: 120812 - DNA, 395 bp, Homo sapiens
tcttctgcggtcctgcctcgctgcatggtgagaccaggtgccagggacactgaggcacaagcagcctcttagagtgggaggagactggctggccacagagggttagggttagttcccttggaggccacatccttgctggcagaaaggttctctcccagcgtctaccatggagttagaacaatgacttgagcgcttggcagttcacccacacttacccgctgagacctctgtagataacagcccaaaggagatgaacaggagagaagagaaaaggccatctgcatcctccccatgagctccagagagcacgagtggtggtgagtgactttcatccaccctgatcccacctcacaggacctggctctgagcacagactctttttaatggaagggagg

SEQ ID NO: 120813 - DNA, 161 bp, Homo sapiens
gcccacttaccatctccatttcaatgtcaaacagggatctcaaacttcacaagttcaaagcagagctctggaatgcctgtcccaaacactgtagggtctcccaggtccccctcccctcactttctttctttgtcctgatcgagaagcatggagtacctgga

SEQ ID NO: 120814 - DNA, 419 bp, Homo sapiens
gttctgagctccgagggcgggagcgtggaccctgagggctcgttaattatgccccactggcctttcaacctgcgtggtaactaccaggctaggttttcctaactcgagccaaacagcaagtttctgacttgattatcactaaaagagaaaaatttcgatcttttctaatcagaagggagtaattttctctttttaaaaatattcgtatgtacattaaaaaaacggaaatgcacaggattttatcagtggtactcctcgagtagtagagttttcatctttttatgtatttctaaattttctacaatttacacacactgctctgtaccagtaaaggagtattaactctacagcttccagtttatctgggattactatcttgtgtttactgacttaactttaagactatggtatctttagca

SEQ ID NO: 120815 - DNA, 415 bp, Homo sapiens
gactaattgtcttataggatcgttttaattttgaaataactataatctgggataagtaattcatcacatatactttaatatgtgtaagtgtcatgtggttgaggactttctcatccttgtttgaaactgtctaggggctctgtgtggtggttcatgtccgtagtcccaacattttgaatccaagcactaggattgcctgagcccaggagttagagaacagcctgggcaacatggtgaaactcccatctctgtaaaaaatagaaaaatttgtcaggcatagtggtatgcacctgtagtcccagctactcaggaggctgaggtgggaggatcacctaagcttaggaaggttgacgctacagtgagcagtaatcatgccactgcactcgagcctgggcaacaaagggagaccctatct

SEQ ID NO: 120816 - DNA, 280 bp, Homo sapiens
actgttcaaatccttcctactccaagaaaccttcccaactccccacttcacagcccccgctgtatttgactcccaccatatcccactatacatgcaacacctcctgcctcacacccatcagcaagggccgtgttcctgtgcgtgtggcacaggaaccaaccagaagcctctccatcccaggcagggaccagatccctgcctgacctactttctgtctctagcagagttagcacagcactgtgcgacagcaggtacccaagacagacctggagcaagaact

SEQ ID NO: 120817 - DNA, 229 bp, Homo sapiens
ggtcttgaactcttgacctcagatgatccacctgcctcggcctcccaaagtgctaggattacaggtgtgagccaccgcgcccggcctctattagtctctttaatcctcactgtaacttagaggggtcagtgccactattttccttattctaccaatgaagaaatgggctcagtaatgtgaagtgactgctctgggttagtcatagagtggctgagttgaaactccctct

SEQ ID NO: 120818 - DNA, 336 bp, Homo sapiens
taagtacaatagtagaagaagctataaaatgctgtgttggctgggtactgtggctggccgggtgcggtggctcctgcctgtaatcccagcactttgggagaccgaggcaggtggatcacttgagttcaggagtatgagatcagcctggccaaaatggcaggaccctgtctctactaaatatagaaaaattagttgggtgtggtggcgcacgcctgtaatcccagctacacaggcggctgtggcaggagaatcacgtgaacccagcaagcgaaggttgcagtgacctgagatcgtgcactgcactccagcctgggtgacagagcgagactgcctctc

SEQ ID NO: 120819 - DNA, 584 bp, Homo sapiens
gaggagcgtctgtggggccttaacccattgtatttcgaaagcagccatagacaatatgtaaatgcataagcattcctgtgttccaataaaactttactgaataggcagtaggccatagattgctgaccctggctctaaaacagcttaaatagctacttgtactaaagaaacagcttagtggcaaaactaatatatataagaatctttaggctgggcgtggtggctcatgcctgtaatccaagcattttggaaggtgggaagattgtttgagcccagttcaggtgggaagactgtttgagcccaggagttcaagaccagcctgggcaacatagggagactctgtctctacaaataaagaaaattagccaggcatggtggcacacatatgtggtcccagctacttggaaggctaaagtgggaggattgcctgagcctgggaggttggggctgcagtgagctgtgattgcagcatgtactgtgcagagggagactctgtcaaaagaagagagagagagagagagagagagagaaaagaaaggaaagaaagaaagaaagaaagaaagaaagaaagaaagaaagaaaga

SEQ ID NO: 120820 - DNA, 424 bp, Homo sapiens
aatctataggttccccaaccatctctttctatccttttgaaatttatggttgaaaaatattgactaagcaaaagtctatattttttagtcattattttaactgctaggacaaaagaaaataaattatctcttatttatcctaattctaaaaattcttaagataattactagctcaacatcccaattaaatacaagaagggaaagatggaggctttttgcatttatgggaaatcagtcagcattagcaagtctcttaaagacagaccaggtttccatgaaacccgtaaataccattataaagaattttaacagcattttctgcaaatattttctcttatatcagggtcaagtttaaattttggtggattgttagaatttttccaaaaaggctgggcaaggtggctcatgcctgtaatcccagcat

SEQ ID NO: 120821 - DNA, 379 bp, Homo sapiens
tcagcttcaggctctgaagggttaaatgtcagctctgggacaagagaccatttcaggaaatggaatttgattcttggttttgttgccccctcccctccagcgtaccatactttccccgcatttacttacgtttcaggtgtcaacatggtgactcacccaccctcagggcagaagggctacccgctgccccagtgaaattcggtttgaatagggataacctggtccctccatgcagcccggaaatggctgtcaggacctgccaagggcttagtaggttggaatgctagtggacgtggccacatctggatctcatccccccgcccccgtcagaggggattggagagatgagggcagctccccaagagtcagtgccgcctct

SEQ ID NO: 120822 - DNA, 205 bp, Homo sapiens
aaatcagctggccgtggtagggtgcgcctgtcagctgaggtgggaggatcacctgagcccggaggccgagtcccccagactggccacaccgcggctattcagccttaggccagaggctttcctgtctaggtttcagagtccccatctgtcacgttagcatgtcatgtctgtacatgtgccaggatgtgcccagagcactttgtga

SEQ ID NO: 120823 - DNA, 347 bp, Homo sapiens
gatcttattttcctataaccacagaggtgaatatatggcccagagttggacaaactacagtgttcccttcccagccatagtgattggttcagagtagggcatgtgacccaagcttggccagtcagggtctatccatggacttatctgccacagcaataagaaaagactgttgctttcctagagtggaaatgcagataagttgagtctagggctaccactagccctttttgcttattgagagatagagtgacagagtcctgacaacagtatttaaggctctgaaccaaacaatacctaaaaccagccttcctacctgacatctccagttacatgaatcaataaattct

SEQ ID NO: 120824 - DNA, 338 bp, Homo sapiens
tgatgatgtctaggtgagaggaaagggccttcggaactaagggtgaaaagcagaggcctgaggggcctgcctggactgggtccctctgattcccagcctattgatcaccacaatcccaactcccaaaaaaaccctcctgaaagactcagaagctgaaaggacagatcaagaaaactggagaagtgatcacggcgtactggaatgaaaaacaggcatggagcacgtggggtctgggtgaagtcgctgccctgtttctctgtgaccttgggcaagtcacttcccatcccagcagataaattgtgggtgataattaccagcctccaaaggtgcctgcaata

SEQ ID NO: 120825 - DNA, 310 bp, Homo sapiens
tagaggaaggaggactgtaagtaagaggtgcttgggcatcctggcagttggggaggcctgagatgggcacgcggttgggtttgggagcggaggagcaggctgcgggttaagaagcccagacacaggtagaggggagaacacttcgtcatttttgtggctaatcggaagtgggagaccctcagggaggttgaagatggaaaccctacaaagggcttcaacctgagaagcctgaaagacacgtatagctgagttggacacaggcgacccgccagggtttgaagcagcacccggcctctagctgctatgccgg

SEQ ID NO: 120826 - DNA, 176 bp, Homo sapiens
tctatgcctataccctggggtctctaccaaacccaattcctgggtagagaatgctcaccttaaagaaatgctggaaatccagagacccttacactggttcataattaagaaagcaatgctgacaaaatcccaacaggagccccatgcagaggatcttggctggctatgtcttttag

SEQ ID NO: 120827 - DNA, 535 bp, Homo sapiens
attagctgggcgtggtggcgtgtgcctgtaatcccagctacttgggaggctgagacagaagaaccgcttgaactcgggaggcagaggttgcagtgagtcgagatcgggccactgcactccagcctggcgacagagcaagactccatctcaaaaaaaaaccaaaaagatgctggttgcagacttactgtgaatgggttttgcaactggactgttgacctgcagtttgaagttggtggcctgaggaaatggcatgcttccctttggctagcaggggatgcctagggcgggcactctaatcctccttcccctccaacttccagaggcctgtcacagttgactctttatatgctagggcctggcctcacgccctggagcttccctttggctcagaccctgcaaagggtaagacccttaggtctgtgtttcagagctctcggcttggaaagtgggggagggggaagatggtcttagattatggggaaaacccggaatggttcacagaactggaatgtcggctcttcagcctctgcggctt

SEQ ID NO: 120828 - DNA, 417 bp, Homo sapiens
tccagtttcccccaaggtgtgcatatttacatatcattttgttttgttttgtgatcataccatacataccactactctgcaatttgttttttactttaaaaacaaagtgccaataaaattactcaaaaactaggaatagaaggaaggtacacaacgtaacaaaggccatatatgaaaagccctcagctaacattacactcaacagtgaaggattaaaagcttttcctttaagatgaggaacaagacaaagatgcctgttttaatgacttctattcaacacagcattgaaagtcctagccagagcaattatataagaaaataaaaggcacctgaattagaaaaggagtaaaattatctctattcacagatcacaggatcttacatgtagaaaaccctgggctgggcgcagtggctgac

SEQ ID NO: 120829 - DNA, 198 bp, Homo sapiens
aggtaatggcactgactttgtaaaaatgatacgcttagctcttcttcatcagcatcatggaggcttggaacagaaagcagaaaaataacaatggcattcttcatatcttagcaaataaaatcatatttggaaggactaagtaagatcagcaggcttcctcgtgtacctaacaatatttttaacttgcagccaaaactg

SEQ ID NO: 120830 - DNA, 441 bp, Homo sapiens
ctggctacctatcttggcgttagcttacattgacatttaacactcaaatttactcagtaacaccagctatcatgttttccactaaaactccacagcattctggcaacttttctattttagagcaataaagtaaattgttagcatccctttgacatataaatatttctacaaatagtaattctctagcaattcatttggagtatttaaaactcaacattcatagcacattttatgtgacaaagaacttatgttcagaacacaaaaataagtcttatgtcttcattaaaaatgggtgaagaatttgaacaaacatttgcaaactaaaatacaaatgaaatacactcaacatcattaatcatcaagaaaataaaattatgagataatcctaataatcactacatatgcaccacagtgattaaaatttttttaagttaagccacg

SEQ ID NO: 120831 - DNA, 308 bp, Homo sapiens
gtgtttctgagcagagtttgggacagccatcccaggaccacagacccagcaaactcatcccttcttctcctttcatcttattaccaggactcagggccacccagagctggccgctagcctcacttctaggcaagggggggaaagttctttaatgactaagccatttggggaaatgggtggggtcgaggtgtcttgggcagtattggcacttggcagaatgcccacagctattaaacagtgtattttgtttacatcctcaacattacacattgtttatatcacaattgcatccctcaggcacgtatttt

SEQ ID NO: 120832 - DNA, 869 bp, Homo sapiens
  misc_feature (619)..(619): n is a, c, g, or t
  misc_feature (665)..(665): n is a, c, g, or t
  misc_feature (687)..(687): n is a, c, g, or t
  misc_feature (734)..(734): n is a, c, g, or t
aaccgagcagagcttagggggtggggcctcggagccaggccatgtcggggctcctcaagaagagggccagtgggactgctggggtcgggctggaggggatctgattgggggaagcgtctggggactgcttggggcctgattgggggacgtcgcgaggatcggcttgccttgcgcccactgtgactgtgcgagccacgacagagacacgggcgctcgtgagcagtgtgcttcgtggagtgctgcatccagagtacatcagcacggtcgcacacaaaaagcagacctacatcagccagtcagtccgtgcagtgactatcacttcaagactacaacttcacagtcagctcttgcactgtacctgtcaactaagctacccttggatgtccggtcctggaaccaggacgtccaagatcgcgtagcagatgagcgccagacgcgctcgtctcaggttggcactctattcctcaaggaaacaaaccgtgacagcgccacacgtattcaggaggcgttccacagacccccatgatggggcagcacatctcagtcgacaagcacgggagatggtcgtctagacacagccattttgtgcagaagtgcgcgtcgcgtccgacgtctattncctgaatgccctaacccaattttgtgcgcagtgttttgcgagtacngacgcgaggcgagtctggcatngtcacaagagagtgtttggaagacgtggcaaggaatttgtcgtgccncaggaggccttgacgttggacccacaggacttccttgtcataacacttgacgtattagaccttccgcgcacgccactctgagcacaccgaacatatggatcaaagatgcgacagcacatctattgggaagcctca

SEQ ID NO: 120833 - DNA, 810 bp, Homo sapiens
gataacataatagtattgtggttattattattatttttaaaatcatcattttttaaagagagggtctctgttgcccaggctggggtgcagtggtatgagcatggcttgctgggtacaagtgatcctctggcctcactgtcctgagtagctgggactacaggtacacaccaccatgcccagctaatttcatattattttttgtagagatgggggtcttgctatgttgcccaggctggtctcaaactgctggcatcaggtgattctcttgccttaaatcctcatcttcaagcctatttaaaactgaaaacccttatcctgaatttcttatcagtaaaataaggaagaggactaaatgtctttgctgctttctctgtgctctgctctagctgttatataatagccactccctcatgatttccttctcagaatcttattattataatgtataagcaataatgttgcttgtggataagactttatttaatgcgtctacctctgggggcaggaacttcagggctcacgctggatgacctgattgaccctaggaagttgctctgtaccctcttccagaccatttgtcccctcctgagcaggatctgaacataacagctctgggccttgagtcaggggtcatttagggtcttgataaccaagaatgtatagactgggatgagttagacttggtggagagccaaccctctgtgtggaagtcctaattcttcagtaggtgataactgattaatacccatgtggaaaccagaagcaataaccaccagagagtagtaatgatttggcacaccaccccctttt

SEQ ID NO: 120834 - DNA, 580 bp, Homo sapiens
gttaggggaggcagggcaatgttggaatcttaaagagtagagaagactccatcaagatagcacttgaacaaagtctcagcagtgtgggattgaaccttctggacacctgggaggagagaattccaggcagagacagcaagggcaaagcccttgggctatgagcatgtaagagggctccaggaacagtgtggtagccagtgagggctgaggcagacccaggaagagtgagagacgggatgtaagcatgtggtcctgtagactgtatagagccttgtgtgaactttggctgccactctgagagggggccattgagcagaggagtgatagggtcaggcgtgtgctttaggggattggtgagcaaaggtggaaacagaccagttaggaggccatttgcagtagctcaggtgagaagtgcaggtggcttgtaccagtgtgccagaagttagaattttgagaactggttagattctgtacttaccttgaaggtaaaattaataggatttgttgacaggctgactatatgagaaattaaggcgtcagggttgatttctaggtatttttgtctgagcagttgagatga

SEQ ID NO: 120835 - DNA, 299 bp, Homo sapiens
catgtctgggaccacaggcacaagccacaatcagccaatctgatgccattttacacacagcataaaccccatcgctacagacctgagcaagccaggcctggcttgctcaggtctgggacagaccacagacatctggcttcaaaggccatagtattgtaatgactaaaatagagaacacctcctgagtgaagaaagatgcactgaaatgaagtgatcaaagcacagactctggaaccagagtcctgtgttcaaaccctaaatctgtcacttactagctgtgagaccctgggaaaggcact

SEQ ID NO: 120836 - DNA, 1054 bp, Homo sapiens
ccatgttggccaggctagtctcaaattcctgacctcaagtgatcccctacctgggcttcacaaagtgctgggattacaggcatgagccaccgcacctgggcagaaatgctattttagaagtgatctcatgtgatactatgtttttcaacatgatgtcagaaattggtaacctgctgttttatcagttaagttctgtcaagccccagcctcacgccgtgaccactccttgtctgtgaaacccagttctacagaagtcacaaagccattgtcttagtctgctcagtactgcttagtctgctgccataataaataccacagactggattccttgaacagaaatgtatttctcacagctctggagactgggaattccaagatctgggtgctggccaatttggttcctcatgagggctctcttcctggctttaaggtggctgccatcttgctgtgttctcatgcggtgaggggatggagagagcacaggctttctggtgtctcttgttataaggtcacaaattccatcatgagacctcacctttgtggcctcacctagccccaattatctcccaaaggccctacctccaaatgctatcacattagagcttagggcttcaatatatgaattctggcaggacacaaaacattcagtccattacagccattcattcatacacgtgtttggggttttcagttacattaagcaacatgttttgcagctacttggtttgatagtgccaaatctacccggaaatgatttcagccctaaggaaaacagctcctgctacagtggaacacacagtagacaggcacgagagaataaccaaggattagaccgaggcgttgtcatgcgtttggctcattaagccatgcatgttaggcttggagctctattttgaggtgtgttgagaccaaatccttctcctagatcccagtacttaagcctggcaggaaaaaaagctgagtacactgtggttttagagtgtaccttttgataaatagtttgcagcatgtccctgaaaggggaattttttcctttgtcttgcaaatgtcaaat

SEQ ID NO: 120837 - DNA, 387 bp, Homo sapiens
aaggcagaagaccagctgacataaccctaggagactccgtgtactactgggcaatgtctatgcttcacccaagcaggaaagaaaaccagattttaaattcttgcatctgtcccatcacatcctctactagacatcaagtcccacgagggcagatttcacctgccgtggccactgctatctcctccaatgcttggacagtgcccagcacatagtgggccttcaatgagtgtgtattcgacaaattaattccaaagttatatttgtgactctcaaaaaccttcctaatctgactcagcagacgctctcccgctcctgcctcctttgtgtgttcagctcaccctacacatgctctttttactcccatttccttcgtcctatctgcagctt

SEQ ID NO: 120838 - DNA, 429 bp, Homo sapiens
atccttagaagggctccctttcatcccctacaggaagtaccattcccagcaggccttccatgcaggagccatgcttaatatactggttcttcaggaacacccagagaaggaacctgcccccatcaaaagctcagagagtccttgtctagacacaatgacagtaacttagctgaaataagccacagagagggaaacaggacataggagaaagggcacagatactggagtcagacagttctggatattcatcctggctctgccatgtaccggttacatgatttgtagttagttaactcccctatgcctcagttcctttgtatgtacaatgggaataataacaggacctagtccatagaggtgttgttgagaaacagaccatgagagaaccatgtaaaacatgagaaatgaagtaaatgattctttattatt

SEQ ID NO: 120839 - DNA, 865 bp, Homo sapiens
ccatcgcataatacaaatataaatgttgatatcagtactttgttcagtatcattttctctattgcacatcacctagcaatcctccttttaggaatggttggctcaacaagatctcattaaccttgtgttttctttgagtggtgcactatactaacagctataaagtgcatttcctgttatttgtttcctatgtggcagtctttcttaacttgtcaatactttatttccaagtctttatagaggaagtgactatagtcaaagaagttaaatgttatcttaaaatacacttaaaaaaatcctggaagtacctgaaccattttagaaatattcttgtcatttttactctttaaaatagtacattcaaaaaaagagtgttaataataacacttaaagatatattcttatctttaagcaatattggcttcaacagcagtcacatcagtgtcttgtgctttatttggcctgatgtgggaatggatggtgccaattgtaaaaaaaactttggttaatttatttagtcagtatctagatagaactctataagactatgatggggcttttgtgtaatattttctattgtaaaagcaaaagaacacatttcttgtgcatttaggtaagagaaaaaactcacatatttaaaacctgcttttttgcgggagggtggagataatacacaggtaaatttttattttggtttgttttgcaccaccttctttccatttttggtcagctgttcaggctgcatttccgggataatgtatttaccatgcattttagtcattgtacctctcagcctccagctggccttcccccagggtatctttgcacttgcaggtcagaaaagaccaagttatgaatgtgatct

SEQ ID NO: 120840 - DNA, 244 bp, Homo sapiens
atcagccggttgtggtggtgcgtgcctgtagtcccagctactcaggaggctggggtgggaggattgcttgagcccaggagatggaggttgcagtgagctgagaccaggctgagagcctggttgacacactgaggcccatctaaaaaaaaagcagaatggttttttcaatgaaaccttccagctgctgtaccactatgtattaagcagtgaaatgggacacatccaagagcctcttgtgcttttc

SEQ ID NO: 120841 - DNA, 327 bp, Homo sapiens
tttcttttatctctacaaatattgtgacttgtaattgtcacttataaattcattctggctatactgaatcattccccaattatccgagtcatccaaatatttgatgtgcatttccacaaatcatgtactggcccccactacaagtgattggggataacttgtagaattaattatatgctttatatctccattcaggtcaccaatacattgaagagagcagggcccagaacagcttatatggatcaacgactgacagagctgctggggttggtgcaaagccactgacttttgctattacccataacaaagtatgttcaaatgtaggtc

SEQ ID NO: 120842 - DNA, 490 bp, Homo sapiens
ggcttatccacaggcatcatatggtgaatatccaaaaagagaaatgtaaggatattgtggcaaggctcggcaaaataggaatagcttttcaacaatctttccacgaaggaaagtcagtgttttcttagatctctgtaggtattttacaaccagagagcttctcagcaagtagcacttgtaaactcagagatgaacaagaagaagccaaatcacagcttccgaataggtcaaattagcaaaagagacttgccattaaaagcctgacactgagcgtctgttaagggaaaatcagttgtccaagtcacttaaagacttgtacctcaattttctcataagtaatttaacagatcattcttaagaattgctggataggccgggcaggatggctcacgcctgtaatcccagcactttgggaggccaaggcaggcggatcacgaggtcaggggattgagaccatcctggctaacactgtgaaaccctgtctctactt

SEQ ID NO: 120843 - DNA, 235 bp, Homo sapiens
ggtggatgtcctgcccttgctctgtctttaccctggtcaagtcccttcccttctctggtaaaagaccaggaaggacaggaaggcagcactgaccgcctccaatgtgcctcctacactggcggcctgtgtcaagatgtgtcactgagcatgtcgccatgtccttgtgcctgtcacccccatgtcaccagttcccagtgtctctccaccctgagagacagagcgagactccatctca

SEQ ID NO: 120844 - DNA, 450 bp, Homo sapiens
ctcctggattagaagcttaggctgtcccccagccctatgctgaggacttggaggcaaggtggtttcccagctccatacctaggcatgcctctaggcacttggtagccacctactggattctctctcagcactcgtgcttgtgcttgctaagtggacctggctggtctggccttgcccatcatggcccctactccaggtgcagagcaaagagctcaggccactgcccattccgtggatctgccttttggctgtggaaacagagagcttctgcctctgtaaacaagcatcctgtaaacaagaatcaaatatatacccagccacgtgggctgcagcaggctcttacctgcaagtaccacctacgggcttacaggttgaactgcacagccccatataaaacctgccaaaagaagtgcacagggctatagaagcaaagccaagaccccatctagc

SEQ ID NO: 120845 - DNA, 753 bp, Homo sapiens
tactttataagcatattgaggggaggtaaatggttatagagaaacagagaatgggaaaaagtataataaactacaggatatttgcacaaccatgacactaaaagatttgacttgtagttattctcttgggtaccctgaggttaacacgtaatacccattcaactaagcctctataaacagttgggttttccgcaatcacagccactattcccacttcagtgggcagcagtgttcagagaaaagccagatttagctcttgtgcaataaacaccagaaaccaaaagagctaggaaagctgtttacgtctatgcccaccaggaacccttctctgctataaccgcatgaatgaactggtaagaatgaggtctcaacaaagcttcaagacggacgttgttaactagttgctgccctccaagtttttggcaagacagattaatgaaaaacaggtaacttatttttatacaggctcagtatatttacaagcagaaaggaattctgtacttttcaaagcatttagctaccaccttatgtagtatttaaggtagacaggaagaacaatcatttccaagtatttctatgcactctttacaaacattatctcatttaaattctcaaaataatcaaaagggtaggaattatcaccccattttacaaacgcagaaattaaaggacagaggggatgaataatctgcctaaggttccagagcaagtaagtagcagagaaggcaagaatcatcacttcgttctcaggca

SEQ ID NO: 120846 - DNA, 724 bp, Homo sapiens
gggagtctgttttgtacttgttttcacattaatcaaagagaaggctgcaatgtaccttcacggttctcttaattaattcctgtaactcaaggtacctcctcagctctcttcctgcagcactgaagaaagaccagcaagagtgttctgagcaagcctcagaacactcagagtaaatgacaagagtgttcttgtcttgccgttggttttgttactttctttttgattaatgtggaaaccagtacaaaaaagactcactggagttttctctaatcagagggaggaggtttcccactctgctcaggagtataatatcatccactcttctcattaactttttatcagagatcttgctacctagttgtaacttgcaagcgacattcggcactcttctcttgacagtgcgcattgcagacctctcatatttagatctgttttctgaaagagcatgtgtccttttcctcagactactctaatcaaaatctaatcaaggtttttaagcagaagagataaagtggctccatggcactgacttaagtatccaccttggccacttgcccctgctccgctcattctgttccattcagtaataaaaattttcccatcaggcaataagaggtcaggtagcacttctcaccgctggaacaaggctttggagttaggggtgtgggtccatttgaaggatgaagccaattgttttgactgatttcagtttatcagtctgacc

SEQ ID NO: 120847 - DNA, 371 bp, Homo sapiens
agttaacattctgtggtaactgaaacttgaactgtgttgctcgggggacaactgtgataactgaaatttgtgaatattgaaactatgggccgggcacagtggctcacacctgtaatcctagcacttcgggaggctgaggcgggtggatcacgaggtcaggagatcaagaccatcctggctaacacggtgaaaccccgtctctactaaaaaaatacaaaaaaattagccaggcgtggtagtgggcgcctgtagtcccagctactcaggaggctgaggcaggagaatggtgtgaacccaggaggtggagcttgcagtgagccgagatcccaccactacactccagcctgggcgacagagtgagactccgtctc

SEQ ID NO: 120848 - DNA, 883 bp, Homo sapiens
gtgacctaagacactgatctaaactgaatgtacatggctaatggtttggatagacagatttttttaagtgggcaaaagtggaggttgtgttgactggaagctttggggaacagtgatacggatgaatttcccagaatggtcccagagtatgagaataatatcccacgtgaatgctaacctaaattcccactcttcagaggaggctatcaacaatcaggtacacatcaaccatatggctgtcatgtagtctcttttcctatcaccccacttattgcccaagtgatttacttgtaaactgtgaccagggtggtaggcaatgatagaggtgatacttgagttctgtagtatagacttagctcaccaaggctgacctctggatactgctgctgctaagtgtcccatatgtcaggggaagtattcttgtattcttgcaagtattttgtcatggatgaggcagagatttgtcttcactgagataaacactctagatttcgatatgcttcactttcttacatgctattgctagcaggaccatctgtgaacttactgaacgctttatacctcatatctcaacattttttggacccatttctatacattatacagaaagggtaaggtaatgcatgggtgaccatgagactcggtagtcctaatgtgtaccacattccttataagcagaagtctgaatttttggaagactcagttaaagtggcatgtagtcatttagcaccctcttgaagtactgttcaattttggacgttatagatgagctgaatagtgactaagaaaaagcataatttcttctgtagacaaaatgcattcgttaaagaaaggagaggtaggaatggagtggtacctctcatattacacttaataatagcca

SEQ ID NO: 120849 - DNA, 957 bp, Homo sapiens
aacagagacttgcttttttaacattgtgaattccactaggcagacacacaaaacacttaaaacctcatgacaagtaaataactaaaacagaatggagtcagatcagaagagactcttagggtacaaagtcaatgtgtatgaaggagacagtagagttaatattaaactttgaaattctctcccaaacaacttcattcttcctctttatttttggataagaatactttttaaaaattaagcaccatataaaacagctggctcacattgaggatctgtactgtatcaaagtatgcatattttgcttaccaaatagtattaagcaaggattgttactcttattctaacatgagaactagaagaactcacgcagtaactgatccaagcctccatcttgtgatcctttggtatcttgtactctttaagaggaatggcaggggtaattcctaagaccaagtaaaggatgtcttggtttttgggagctgagtatatcaattcactcttcccttaaaatgctgtgtaacaaatcatcttgaaacttgttgtcttaaaacaataaccattgattttatggatcaccttggcatcagagcatcaaggtaggacttggctggaggggttctgcaagtctcagctgagctcattcatgtttctgtggcaaactgcaaggggtgaggagggcatggaggagcagctgatccagattgagttcaggtgaggatgattatgctccacatttcttttatcttccatctgggccagcagtttggcccaagcaagtccttctcatagagatggcagagagcaagagggagcaagcttagtcactcaagtacttttctgagactatttttattacatgtgctaacattctgttggtctaaacaagtcacatggctgatcccagtggctgaaacttacaccttacccacagtggaggaactagaacttacatggcaa

SEQ ID NO: 120850 - DNA, 234 bp, Homo sapiens
tgctgggattacaggcgtgagcaaccgcgccaggcctaggatgtcttcttaagtgtgcacgcaaatcatgcaggagaaattaggcagagtgcgtggaagccaagtgacttgtttctcaccaggaggaaaccccatctctgaggtcagttggtggcttctctacccaggtgtctgttgaacccagagtggtgtcacacctcaggatcggtcccccaaattctgtgcaatgaaagg

SEQ ID NO: 120851 - DNA, 333 bp, Homo sapiens
cacacatgaatgcctgatttcagagtgagtagtgttgggagcatggttctgggaggtgatgacatctcttctttcctaagtctttgaatgtgtcccatgagtgtcctgtgcttcctcaagggaatagctgtgagctgcctgattgccctaggccattgcatggcctgtgtgaccatgcttctggcatcattgcccctggtatcattgcccctggcatccttttctctttgcccagtattccaaggctcaggtcgcctctgctcctgcagcctgccttacttcttcagcctgctgtgaacaccttccatactgggctgagtaaggaggctgtag

SEQ ID NO: 120852 - DNA, 181 bp, Homo sapiens
ggagcggtctgggcatgctctcctccctgtcctcatctcctccactcctccctgtcctcatctcctccactcctccctgtcctcatctcctccactcctccctgtcctcatctcctgcactcctctctctcctcatctcctccactcctccctgtcctcatctcctccactcctccctgtc

SEQ ID NO: 120853 - DNA, 292 bp, Homo sapiens
ccaggcttccttacatggtgtcccgagagtagcaagggggcaaagggaaactgaggcctagatttggaagttgcacagtgtcatttttgccacattttataggccaagaaaactcaacaaggttaagcgaaggaatacaaatccacctcttgaagagagaagtggtaaagtcacattgcaggacttgtgtacaaggatgaattgttatagccatttttgaaaacctagatgtattttctttatttcctattgaattcattgtggcaggatggaggcattggagcaagcaggg

SEQ ID NO: 120854 - DNA, 857 bp, Homo sapiens
ccccaggctcatgttcctactggacctcctcatacactttgccctagccaccctggaattctttctgggcctcagatgtgctgtttcctccaccgtgagccttgttttctccatccatagccggctgcctctcatcttccagggctcacattgaatgccacggcttcagagagcctgtgctgattctccctctccacgagcccctctacccattcacaatacatgttcattaaataagcaaaaaccaacaaaaataacagcaaaacctgccctaaatcaccttccttctcatcacctctcaatgagaatcaaagtcaaggacagtttactgagtaatgctggcaataatggacattgtagtaaatcatgcatatgatgaagccaaaatccacagtttaaagtagagtggaacggatgagaaaacaacccaaaaccctgattatgttatttctgatcgctagttggtggaccttgctttaaaacacctccatcccattcactttttgtcagagaaccctatttgcttccttcatagtaatggtcacagactatcttatctttgttctttggctttgtcctctaaatccccagcatctagcatatgttcagctcttggtggacatacatacagagcctcagcacttgctgttccctctgccaggaatgcccttctcccggacaccctcccagcgggctgctttgttccttcctgcaagtcatcacccaaatggcaccatcactcaaattcttccctcacttccctgtctctgggccctctccagcccatgccctgctgtatttttctccttgccctgttcttgtcactgcttaacatgttaccagcgcagtagagttac

SEQ ID NO: 120855 - DNA, 288 bp, Homo sapiens
gaaggcaaaaatgctttctacaatggcgttccttcctatttgactgggcacctacgaatttatgctgtgtgctagaaatagactaaaacattcttacagcatgttagtgtgtttgcgtgtttgctgaagatcacttcggtataaaccagtttgttaggctctctgggttagggactctgcattttcttcctctcctaccgagatggtgttccactggtccagcccggcaggagcagcaggcagggcacagctttactggctgtttgctgctttgctttagtgcaatgt

SEQ ID NO: 120856 - DNA, 189 bp, Homo sapiens
ccttgctggggggtggtgctgcctgatttatgagtggaggataactatagccagcccattccacccacagaactgatggagacaaaatgagattatgttttttcagaacttggcagctgccaggggttggtgagggacccattgggccttcctgaagagccctggctgccagtgctgtctgagtggatt

SEQ ID NO: 120857 - DNA, 289 bp, Homo sapiens
gccagcgtctctctgagtgggatgctgtgatctatagaatgtcttcttgtgcagtgcacccctgagaacccatacttggtggctctgcttgctctgactcgatatgtagaaatcagtctaagttgtacctcctctaggtaacctgacatccattcacccagacacacatctcctctgtgctcccttagtacctgggacctgcctttagcttagttgcctattgtagaccttaagaactctggctcgggagtcaaactgataggaagtggaattgtggttcactgctgtg

SEQ ID NO: 120858 - DNA, 733 bp, Homo sapiens
ggtaaataaacatggaataaaaagtttgtactcagaaatgaaaaatgccaattaaattagtgataccacattgtatatctgaaatagctgagaatgagtatattctttcatttattattgtataacaaattggcataattgagttttatagtacatatgaaacaaaaaaagttaatgctattttgccctgtaatcccacaattaaagctttttgaaaggaaataattcaaatgagcaataatactgtacacgtataggtctatttagaagggcattatgtagttttaaaaaatcactataatgtagaaacgagttagtatgaaactttaggacacaaaatgagatgccagtcaattataagtaagaggtctgtgtgggtaaaaactgaaaggtaatagaaatgagaagaattctggttggtaagaataagatagttatatatcttaaagctttcagtgaaatcttaaccttttaattttttttttagcctttttttgttagttttgagagagagtcttactgtgttgcataggctggagtgcagtggcacgatctcagctcactgcaacctctgcctcctgggttccaataattctcatgccacagcctcccaagtagctgggattacaggcctgtgccatcttacctggctgatttttgtatttttagtagagatggggttttactgtgttggccaggctggtcccaaactcttgacctaaagtcatccacc

SEQ ID NO: 120859 - DNA, 875 bp, Homo sapiens
tctgtaagaagggtccgtatgcaggggaagggggaatgacacgaacccccccaaaaatgaagagctcccagaatagaagaatgcaaccccagaaaagaaatatcagcatgctgtatctgggggggcagggtggggcggggaggcctcagacagcctcgttgagttaacagaatggcctcttgtttctgagagcaatccagaaaagagacaagagtcctagcaccctgaacattcccattttccaacactgcctggaaatatacactttcacgtgctcaggaagggcaccaaagtagggagtttggctgaatatgaaggtctttcaaagctgagaataagagtgatgctatatggtggctcacgcctgtaatcccagcactttgggaggctgaggcgggcggatcacgaggtcaggagatcgagaccatcctggctaacacggtgaaaccccgtctctactaaaaatacaaaaaaaaaaaaaaaaacggaagaaaaacaagaaaaaaattacccaggggggggggaacgccccttacaccaagaaacaacagagggggggaacacagaaaagggtgtgcaccccgggaacggaacacatgtgatagtggaaccaaaagttgacacatgtcatccgagcgtgggggcgaaggaaaagtcctgtgttcaaaagactgacacgaattaggcaatattgcaacgatttttaacaacggagtaaattgaattatgccatgggatgggaagccccctatagaaaggatctgacactggaaggacgggggaaaaaaaggtagagagggagaagacactatgaaggacacgggtagtatgagatgagtgtaagataggatagtaagattaagaggagagataaa

SEQ ID NO: 120860 - DNA, 406 bp, Homo sapiens
atctcctcctacgcaataccaaagtcttaattcaacagtcagtcaggagaaatagagtcgcagaatcaaagggtcgtcacagccgggtgcagtggctcatgcctgcaatccaagcactttgggagactgaggcgggaggattgcttcagccaaggagttcgaggccagcctgggcaacatagtgagaccctttcttctaataaaaaaaaagaaagaaagaaagaataaaagacactcagttggggttttggttttccacaagttgaggttgccaacctcatcagattaacctcgaaccctgacaactaaggaaagagagtggaggaagcaaagagcctctgccacctgtgtgagcctcagattcctcctccataaacccgagagactgatgtgtacctggctgcat

SEQ ID NO: 120861 - DNA, 351 bp, Homo sapiens
ctgaggttggggagagctggtggtttggaggaactacagggaggcccaggcagctggagcacaaggagatggggtggagaggaggtcgggaatcccaccctaccccttcccagccgctcctctgccaccaccctggaacactgccagggtccccttgaggggccgcctgcctccacccctgcctgatggggctgctcacagcacaggcagaagggtcctgtcagcacttaaggctgcccacttccctcctccgctcagaaccctccgcggctcccgtctcactgggagaagagctagagtcctctctgtggcccacaaagccctttaggacctggcctcgctcactctctg

SEQ ID NO: 120862 - DNA, 906 bp, Homo sapiens
ctcactgggactctaaaggtacagtttatttatttatttatttatttatgagatggagtcttgctctgttgcccaggctggagtgtaatggcgtgatctctgctcaccgcaacctctgcctccccggttcaagcaattctgctgcctcagcctcccaagtagctgggattataggcatgtgccaccacgccctgctaattttttgtgtttttagtagagacggggtttcaccatgttggccaggctgatctccaactcctgataaaggtacagtttaaaaggtacctcttttggagtaataaaaatgtatggactcaaatttgtcagaatgttaaatgggcaaaaggtggaggatactttctgaggaagaaacaggctagagagtgcacaagtaaatttaatgcttcaagtagaaaaagagttagaaagaatacaagggaaaaattacatctgatttccttttctgctaaccgaaatttagcctctacttccattatgcatccaggcagcagccacagttgcattagcaatacctgtgacggtctcaccagcagaaattatgactttcagtattttaatatcacattcacagtggctccaaatatcttgaaaagtttactctcagcatgactttgaaattataattgttattatatccaccacattaaatacagaatcacagaagttattatatcaaatatttgttgcttttaaagttttgcttaaaaacttcaatttctagtactacagtttcaatataatttattgcctttgtcatctcatggctttctccttcttcttcctttagcatttataaactttattttgagaagtgtctacaaagtttgtcagactgcaaagaagtccatatctcataaaagaccaagctttaaaggtggaagaaga

SEQ ID NO: 120863 - DNA, 1900 bp, Homo sapiens
tgctggaattacaggcatgagccaccatgcctggccttctatgtgttttttatagttgttttcacggtcattgtgggtatcacattatagataatgtgacttaccaccattcactgccatcaataccattacatggaatgagatatggaaaccttaatttcagttgggtctctttccccacttttaaatagtattgttttgaggattaatgctattacagtttttgtatcagttatccaatatgacttatagaacttatcaagggagtgatgctctgttgtatgtacccatgtttctgctatttccattattttttccaagattccatcttttattacttccattagccagtcttcaaaggcagttctgctagtgagaaattctttttgtttttctctttctgaagatgactttattttccctttattcccaaagaatagttttatttgtgctatttggggttcgctcagcttcttgaagctgtaagtttgtgtcttttgccaaacatggaaaattttcaaccattatttcttcaggtgttctttcagcgtcactcttttctccattctaggcctctaatgatacaaatgttgagtcatttgttactgttccacatggacctgaggcatggttcatttttcagtctattttctctcttttgttcagatttctctcctttgtcatcttcactctactgttgagcccatctaatgattatttttctcctattgtattttttaggtctataatttccatttgcttttttttccttgtaacttgtttccttgctgagattttctattgtttcgtttttgaaacagtagaacttgtaattgcttgtcaaatcatttctctgatggcagcattaagatccttgccagataatttcagcatcttactcatcccagtgttggcgttttctttccttcatgtaattttcctggttcttggtatgacagataatttttggattgtgtctcggacattttagttattatatcaggagactctgtactttttaaaaattttaacttcagtagtaacctgttaaggtatagcatgtaggtactagcatatatttgtgagctgtggttccagtgaccatttttcagaggctttatggtgctgttttggtttgttgcttttatctcagtccactggggctcgcactggttcctagtagtgctgcttgaggggccttctccaggctgagctgcgcagagtgtgtttgggtgagggaagaggacccccactagattttcgtgggctggagagtgcttcctgagccttgtgcctgttgtggcaggctcccccttgctggtgttcctggcagtgctcctgaccacattgtgtccctgggctgtggaacacttgcaggaaaggtgaacactgccaggaccaattatagcagaattcctcctgccagtacacagcagcactgtggctctggaccagcaaggagagtctcaagcatgggtttgtttctttttgattttaagatttttcttctgccttcaggttctggtattattgttctgttttattcacctttatgtttcttctagtttagttttagtttctttgtatttgatgggatttttttccttgcatttctaattactccttagttgtgtcatgtcttcctttttttcagttaccctcattcagaaatttcccatttctaatgatttgttattttttaaattctttttagctcagtttgaaatttgtttacagttttcatgttttatttgcatattgtttcatgtactttgattttctgtagggacaccattctcatgtatatgcacatactttttctctaataattacactgtttcactctgttctgttatttatttatttgtgtgtgtgtgtgtgtgtgtgtgagtgaaatgag

SEQ ID NO: 120864 - DNA, 313 bp, Homo sapiens
atttttcctatatattggtgtcaaagttattcattgtgtatgctaatttgaccattacacccccactaaaaaccatcagactattacccaataaataaactacaagttttaaccacagtcttcagggtagtagatttattgccttcttcactgttactccttataccttccctgtaatacaaagttacttatcacctgagtgcaacccttaattgctgcaactttactcccactgctgtcatatttactttattttcattcccttggtactgaattttcctctcaattttataaatcttttgtaacattaaac

SEQ ID NO: 120865 - DNA, 701 bp, Homo sapiens
ttgacaagtgatcgtcgcaagctcattcaaaaaatatttattgaatgacagttaaagagcctttactgtattttaatttccaataaacatatatgtgtcacatatttttaaaaatatggagaagttcagcgtttttgttttgctttactttggtaggttaatgcctgatgttcatcttttccagttcaacaggctgggtgagtggtatggtaccataaaaaggatgatcagctggaaatcaagaccttcaatctctacttccattccctctaacaaacagccatggcatgttgtcatttaattctgagagagcttcatttccacatcttcagaaagacagaacaatgctagatgtacttgcatgtattccaatagtgattgcctttcagaccttcctcttctcccatttgaatagacattagcctcatgagtgacctccgcacctgtactctccccatacacgattctgcatatagccaccaaatgtaactttctaatatgcaaaacataaaaaaaaacttcctggtttttttgaacacattcatctcaattgagcaaggaatcatccatccacattgtatccccagtccacctttcccgcatccttttcaattttttgccaattgcccatatcccaaaacctccaatgagcttgggaagtggggtacgactcgaattcgtatctggcatagtgttctgga

SEQ ID NO: 120866 - DNA, 677 bp, Homo sapiens
gaagaagaagttcaaagaaaaagaaagaaaaagtcactgaaattaatgatcatttttaatgttgtcaatttgacatacggaatttggtttatttgtttctgttggcatacaattttagatgcctcccatttcctgtctgtcttgattttaactttctgaatcatgtaaaatatttacatgattcagaattcaaacttcaaactatgacagtcacttgctgttcactatcaccagaacagcaagagagatatccacatccatgatccagtcacctcccatcaggtccctcctccaacactggggattacaattcaacatgagatttgcgcagggacacaaatccaaaccatatcatagatacacttagaaagtcttattcacctccctatctcttccatcacattcccacctcactccatgtaggtaattattttgtattagtttccggtttatccttttttgtatttttctggaaaaaataagcaaatacaaaaatacatatataaataattttttttctttttttcccattttccatacgcaaaaggtagcatgccttacttctttatattctgttcacttaatatatacagaaaatcatgatatcagttcatagagatatgtctttttcttttttaccactgtatagtaaccaactttgtgaatgtaatattgtt

SEQ ID NO: 120867 - DNA, 209 bp, Homo sapiens
taactgatgcatatttttaaaggacaaattttgggtgccaaccaattcttagcaatagaaaaatttcacagcaggaggctctagctctatgaacttgatccttgcagcttcctctttttatgggcacacaggtacaccaggaaacactcgatggactgctgcactaccctggtttcaactggaattttgttacagtgagtacaccatga

SEQ ID NO: 120868 - DNA, 155 bp, Homo sapiens
tgctgggattaccggcgtgagccactgtgcccagccccctcttatattcaatgtattcctttgaggtcactcactttggcacgtaattttctatttttctggttggtgtttgcccacccttcccaaacaaagaaatgcctttattcggccacctc

SEQ ID NO: 120869 - DNA, 421 bp, Homo sapiens
ggggtgctatgtctcttggtattgccctgagttttgcaagcagcttgcatacagaccatacaccatttacaagacaaaaaagaggaagacccaatagtaaatatgacaatctctgccctcagagaacttacagtttagcaggtgggacagacaaattaaaagaaaggacatcttccagactggaatgggatcgggctcaggaaaggcttccttgaaaacaaaataccatttggctgagatctaaggagcaacctgactttgcacgcttatgtatttatgttatgtgttttactttatggagaattttctgagtagagaggtaaaaagagatacaagaaaaatggtaaaaaagcacagaggagaaaaagatagcaagtgattccattctgttgggacataaatactaagaaagaagcctttg

SEQ ID NO: 120870 - DNA, 912 bp, Homo sapiens
acatgtgaagctgccagcaggacaattgttttttttcccatggatcattaataaaccattctggcctggcaattccatcatcttcctcagctttgtcagacggatcttcctcctttttagtataaagctttaaaaatggctgggagtggcaagagggagggaaaagaagaatctacttccatttaatgcacatgtttttccctaagctgaaaagtggctccctgctttcagatcatcttggcagccagaatacaaagggttcaaggcttgccatgggtgggaagtggctcggctcctagtatttgcagcaaactacagaccaggcctgatatggagacgaggcaactagtgcagcagatggcaaatagtcctgctccactggggctccagatatgcaccatcttcttccttcagccaaggcagcctcattcctgctatgcctgagtacagaaagcatttctggttttttagaaactccttttttaggcaaagatggaagaaggcaaagcaaatattatatgggaaactcaatctagttatagacgtttctttgtcaaacaaactaaaatagagcttttcctttgttggttagaaaaatttaggaatggaaatctacatttctccaaagagcattgagtgcaaagataaaaaccaaattataaatagaagtgagtatgacccattcagtttccaaggacttgagcatacagccttcataatactgaattatagcctttcatagatagaagggatctagaggttatatagtccaatccaaacatttcacagtaaatgagaaaactgaggcatgaagaagttcatcacttgatgtgcactttcacatggtaaatttcatggtagagccagtctccacattcctactgtattgctcttacctttatccccacagtg

SEQ ID NO: 120871 - DNA, 307 bp, Homo sapiens
cactagtgggaaagtaattgatacatttttggaggccgtctttcagttttaagtgcatataactctttaaaccacatgttctctttaaaggatttattatgaaaaataaaatttcacaaaaacatacagaaatatctacaacctgctgttagatgtacaaaattaaattgtataacaatgttaaaataattcctatcacgttatcttctctccctttttcaaaagtatctctatcttgcatatatgtcaacatattgtgttggtaacagtgtgtgtgaggcaggagactcctatactttatgtaacg

SEQ ID NO: 120872 - DNA, 453 bp, Homo sapiens
ccactatcgatgcacaagatcttttggcgtgctggtggaaaagagaagataatggcagtaagtccaaaagcagggagtagcacagacaaaaatatcagtaaatttcaaacacatatggagagcgagggacctagcaaatggaacctgcctgagatcaccacttgggtgatctcacctaacaccctattttacagatgagtcaggcaatggagaccaagaaaggttaagtaaattgcccatgaacacaccagttaagggcagacacgagcctaaatcactggcatattaaccttggtttcaatctccccttgctactcaatccaacataacctttggtgcttggctaattcacacttgtgatttgggtctcccagcatcattagttcacctgctcttcacttcctagccactcacattatgtgagtggcatcgataaacaccgggtaccgagct

SEQ ID NO: 120873 - DNA, 371 bp, Homo sapiens
tacggttattctgcagaaagataagagttacctcttattaatcctatctactgggaaaatattttacacttttagattcaaagccagccacataaaatactaaatctagtggaaatcttacataaaaaaagatgacttttctagtaataaaacatttcctatcaaaatgaagatttttaaaaatagaataattctagtggttagaatagattatttagttgatttttgtttagttcatattattatggtcaacccctatttctttttttggacagctatttcttcctttttttttttaatagagacaggcttttgccatgttgtcctggctggtctcaaattcctgacctcaagtgatccacctgctttgg

SEQ ID NO: 120874 - DNA, 361 bp, Homo sapiens
agttttattatacacttctaataatgtgaagatgttttgtaattcagtagaaattgagtttctgtgtgtgtaggagggtcatgttatgaatgggcacatgtagacacacacgcagagggaggatccactcagtgtgttttgttaacaatgtttggttctgagccattgataatagttgcattggtatctaaaccctgatttgccacagtataacacaaagatgtgttggctgtgtacctttggctaaatggaatagaataaagttcatttggggatagaagggggaaatgattttaacttatcaagggaattgaatgctatgtattgcttgctttatttcctttttttttttaaataaaga

SEQ ID NO: 120875 - DNA, 320 bp, Homo sapiens
ctggatcataatggctctttaataacctgaaaatgttgacataaacccatggcttatggcattacctagagtcatttagatactgagctaattcaaaatttgttaggcaaatgtgtataccattatgataggatatttaagcccttagtaaataaaactgtacttatattttgcaaatataaatgtaacatcaagcagctatgcttagtcagttttctaattgggaaatatccgtgaattataaagcatgacttaaaatatttaatttgtaattagcgtagaattacaaagataattcataaactcactgtttacagatg

SEQ ID NO: 120876 - DNA, 293 bp, Homo sapiens
ggccaaggcagccaccactagcagggtcctcttacacaaaaacccttgatagtaacaatggtaggccgggcgcggtggctcacgcctgttatcccagcactttgggaggccgaggcgggcggatcacgaggtcaggagatcgagaccatcctggttaatatggtgaaaccccgtctctactaaaaatacaaaaaatcagcccggcatagtcctggctactcgggaggctgaggcagaagaatggcgttaacccgggaggtggaacttgcagtgagccgagatcgcccactgca

SEQ ID NO: 120877 - DNA, 420 bp, Homo sapiens
ctccagccccaggagccagggtttattgaccagaaaagacatatgagactgtggcccgcagccctgcttcctgatgcggggcagggtgagcggaggggtagggaggcaggcgggaagacccccaccctgagcgtctacaggggttcccatatcctctgctcagctcccccaggcccctgggagggagtcctccccactccacacctctggcctctgacttccacctgtacctgcctctttctctcagactgcgattacctgaaggggtccaggcagggtgggttcatggcctggtgcctccaagtgaaggccacaccacttcccagccctttgctcctggggcctggagcagatgtgtctgagtcagcttctctttgtagcctctgtcgggctgacagtgacttcaggaatgctctcctc

SEQ ID NO: 120878 - DNA, 305 bp, Homo sapiens
caatctactccatagggttgctgtgaggattaaatattatgaatatgaaaattctataaaaaatgttgagacattcaaatatcagggattgctgtcacatatctttcgccttcaaaaatgcttttgcggcatttttgttcactacttcaaaataagactctgaataagctaaaaataagtctgttaaaagtgcaaccaccactttgaaaagtataaatcaccacagaattgctgcctacacctgcccctgactcctccaggttctctaatgtctccacaagggcaaggattctcttacacctata

SEQ ID NO: 120879 - DNA, 278 bp, Homo sapiens
gggctgaaaaccttgtcattacccttaattcttcacttcctttcacttgccatatctgattcatcggaaaatcttccaccttcaaactagacaggcaaaaagcaaatgggaagaaaaaatggcatgagtgacaatacgaaccaagaccgtgagcatgacgtatgtagaagtcaaaaagaaacagacgccattgggaccaaaggccctatttggaaataataataaatgtttccacagggaataggttacattcataacatgaagataaggtaccaaag

SEQ ID NO: 120880 - DNA, 473 bp, Homo sapiens
ggatccgatgtataggaggggggagctgatctcaggggtcaggctgtatcaggtcgatgggtgataactgcaccttctctccaccatctttaatattggtgcacctgagggctcaggcttttgttctgttctcttctcttagaaaccctttgaactaggttttcaaaaccatggccctactgacattttgggtcagacaattctttatatgtggggctatcctgagcattgtaggatgttcagcagtatccctggtctctaatagcctctacctattagatgccactagtaattcattccccgattgtgacaaccaaaaatgtctccagacattgccagctgtcccctggggaaaaacaattgccttcagttgaaaaccactgacgtactctttgcaatcttggggatatcattcagagttacacctttaaatacatgaatacgatattgattaacatatttattttactaac

SEQ ID NO: 120881 - DNA, 295 bp, Homo sapiens
ggtgctcatgttttagagactaaatggaggaggagatgaggaaaagattgaaatctctcggttcaccagatggtgtagggcccagcattgtaaattcacacgttgactgtgcttgtgaattatctggggatgcaggtcctgattcagtaggcccaggttgggcatctctaacaaactcccacgtgatgctgatgctggtcctatgaactatactaaatagtaagaatctatggagccaggctgggcatggtggctcacacctatgatcccagcactttgggaggctgaggcaggc

SEQ ID NO: 120882 - DNA, 634 bp, Homo sapiens
tggggattacaaacatgagccacgatcacccagtgggtttctaggacttcttgactctgtgtctgtgttcttaaccaggggtcatcagctttggcccatgagccaaatctggcctactgtctgcttttgcaaataaagttttattggaacacagctgtcttagtctgcttgggttggtgtaacagaatatcatagactggatgtcttcaacaacaggcatttatttcttacagttttgaaagctaggcagtataagatcaaggtactggctgatttggttcctggtgagggtacactccttctggctgcagacagctgtgttctcacgtgtcatggagagagagctaggtttctggtttcttcttagaggacactaatcctgtcatgagggacctaccctcatgactgcatctaagcctgattatttctcaaaggcccagcctcctaataccatcacattgcaggcttaaggcttcaacatacaaattttagggggacacaaactttcagtctgtagcaacagctatgcccattcgtttatgtattacctgtggctgccttcctgctactgtgacctagcggagtagctgtaaaggagaccaaatgacccgcagagcctaaacatttagtatgt

SEQ ID NO: 120883 - DNA, 198 bp, Homo sapiens
caaagaacagagaagttattgtgcagtgacatgtaataatcaaacataaattgaccagaacaggaaagcccaggtttggaattaagcaaatctaactcttttgggttagtctaactctttttccatgaggcggtatgaagaaaacttagcaatccttccccaccactccccaaccctgttcccagaggaagcatgagc

SEQ ID NO: 120884 - DNA, 381 bp, Homo sapiens
atcatgagaaaaacaccagacaaatacaaattgacagacattctacaaaatgtcccattattactcctcaaaattgtcaaagtcatgaaaaagaccaaaaaactgtcaaagtccagaggacactaaggaaatgattccttagatgcaatgtagtatcatggactgcatcttggaccagaaaagggacattggtgaaaatctaaatactcttaagtttagttacaagcaacataccaaagctggtttcttagttttgacaaatgtcctatggcaatataagatgttattataaagggaactggatgaggggtatatagaactttctgtaaaatctgcaacttttctgtaagtctgaaattatttcaaaataaaactttaact

SEQ ID NO: 120885 - DNA, 235 bp, Homo sapiens
catttttacatctgtaaaacggaaatattcataataataaaacacctccataagaatcaaatgaaataaagtagaagtgctttgtaaaagataaacaattcaataactgtacaattcagtaactgcaaggaggtattatataagcatagatttttttttttaaaactaggagttgtcaacccaaatgtccatcaatgatagacaggataaagaaaacgtggcacatatatactgt

SEQ ID NO: 120886 - DNA, 682 bp, Homo sapiens
gaccgggaagggaaagaaattcttcaagaaaggatctacagagtattggcatatcatggaagctgcatttgtagaatcttcataggaattggttgggatgtaaaaatggtgaggcctaatcgttgttttttggtacttttttttttttttgagacggagtttcactcttgttgcccaggctagagtgcaatggcgcgatctcggctcactgcaacctctgcctgccaggttcaggtgattctcctgtctcagcctcccgagtagctgggattacaggtgcatgccaccacgcccggctaatttttgtatttttagtagagatggggtttcatcgtatggtcaggctgctctcaaactcctgatcttaggcgatccgcctgccttggcctcccaaagtgctggttggtccctcaaagtgctgggattacaggcgtgagccaccacgcccggcactgtactttttatttaatggatttcctcctggagtaacagcaacaccacacagcaacagcaaactaagtttggggccagaaccacaaattaacatcatttttcattgctaccatgtttaacatttaaaatgcttcactgaggcagttcttaatacatactatttttggataaaccaccaggcagataccaaaaaatattagcacactattctggtcatcttaagaaaaga

SEQ ID NO: 120887 - DNA, 391 bp, Homo sapiens
  misc_feature (110)..(110): n is a, c, g, or t
gctggaattaaagacacctgccattatgcctggctaatttttgtagagatggggcttcaccttgtttggccaggctgttcttgaactcctgactcaggtgatctggccanctcagcctcccaaagtgctgggattacaggcgtgagccaccacgcccggcactgtactttttatttaatggatttcctcctggagtaacagcaacaccacacagcaacagcaaactaagtttggggccagaaccacaaattaacatcatttttcattgctaccatgtttaacatttaaaatgcttcactgaggcagttcttaatacatactatttttggataaaccaccaggcagataccaaaaaatattagcacactattctggtcatcttaagaaaaga

SEQ ID NO: 120888 - DNA, 414 bp, Homo sapiens
gaaatctgtcttgaagcattaggtgtcccatttttgtgagttggaattgggacaggctaagtaggaagtgaggagggtggggagagctgtgctgtaggtctgtttgtcccttccttgatgtagccttcagttagccctttcagcttttttccccatcttgtgccgggccttcctgggtttcagtacttggatgtagggctgcagttatgtcagtggtgggtagattgaccaggaattaaggtctagggtccagcccatgtgagacttgactcactgatctacctttaggcatgtcttccttccagtctcatcctttttaaatttttttttttttttttgagacggtctcactctcacccaggctggattgcagtggtgtgatctcgaccaactgcaacctctgcctcccacccg

SEQ ID NO: 120889 - DNA, 165 bp, Homo sapiens
aaaagagttcaccccagactgtgcaaatgaagatcatgtaatgaaagaaccattctggatgctggggctcccagaaataccaagtgggggcccctcactcagctgaaggagcaaggggaggagatagtgttactggagactcagaagaggggcaggaaccgcagt

SEQ ID NO: 120890 - DNA, 217 bp, Homo sapiens
ataaataaataaataaataatctccccctctccccaaaaaaaacacctatggtgacaagttaatgagatagtatctaaggcttggacaagttgaaagccacttgtcccagatcgcataggcgcagttgggatcttcatgtagatcatatgaatggaaatctcctgagttttcctatgtagcacatggcccctctttctgtatggtaacaggaggcct

SEQ ID NO: 120891 - DNA, 327 bp, Homo sapiens
tatcagctcttttgtgatttgatttcacatggtctctgccttaaaaccattaaaagtcatgaaacttctgctatgcaatagcacttttatttgtcccaagatgtggttagaaatatactgggtagatcataaaatgcaaactcaggaaagctagctgggcatggtggctcatgcctgtaatcccagtactttgggaggccaaggcaggcagatagcttgaaaccaggagtttgagaccagcctggccaacatggcaaaaccccatctctactaaaaatacaaaaattagctgggtgtggtggtgcacacctgtaatctcagctactt

SEQ ID NO: 120892 - DNA, 229 bp, Homo sapiens
atagcctctggaggtatagcttgttcactgtacttacactcaggttaccttacactcaggtaacagaaaagcctgatggttccttttttattattcaaagccaaagctgatgattccatacagtgaaaaacacttgcaaaatatatagtaagaaaatgaacggatgtcacatttagattccagaagactttacgaaacatactgggaggtggggaaacgtggcgaaaag

SEQ ID NO: 120893 - DNA, 808 bp, Homo sapiens
acgcctcttaggggagttattagagctgagcgtgcctggtgtccctcaaggccaggttgggcgactctcgcagaggcccctcgacagatgtcagtcagaggctaggactctgccacatctttaaggacttggacacctctgggcaccgggctaagacggcgtcccaaagttaggtggcccgtcgcaggcagcccctagtagtctggcctcctcgcccgcacaacccttcacccacaggccaggtgcaatcccgatgcaggctcctggcccgaccctctacgcgctcaggcggacagctaaggtctggctgagtctccggcaggggcgtttggaatgtgaccggtcacccactctcggccctgcatttgcttgtgcatgcaagtccacaggtgtagaggcacccgaaccgtgtgcatcctcccggccacagcaccctaggcacgcacacgcatgcacatgcacgtgtgcacacggcgcggcatgctcacgcgctctcacgggcggactggtatccaggcgtggccgtgcgcacacacacgcacatgcatacagctactagcgtctactcgcgctcccccgtaggcacacacaaacagaactcgcactcgcgctcccgcccacacgttcctcgcagggtgccgggtggaatccgggctccctcaactttcccacccgagaaccccgcgcggagccgagggcagctctggggcggcgtccgacggggcctggcgaggggaccccgcgtcacttccccgggaggctgtgcctgagggctcctctgggttcgcagtcgcattggagttggggg

SEQ ID NO: 120894 - DNA, 430 bp, Homo sapiens
ctgagcaaaggctgtaggttgctactctgatggttgcagaaggcctgccttcaagggcttccaaacctcccaggtttcagcctgtatttgcccaggacctcaaaaacagttcatctcactgtgacccatccgtagcacactcattactactctgtcctttttctctcctttatctgttcactgtttcttaccctcctaagaattttcactgtgcctctccacctatcgtaaacatcatctctactagaccatcagctttctttccctctactttttgggtttgatttgaaatacatacagtttcttatcacaaaggatactggcctgactccgtcatccttccacacagctttctgagccaagtctgctcactgaggcacggccccaccatctccagccctcacctccacaatcgccatggggtcctgaa

SEQ ID NO: 120895 - DNA, 534 bp, Homo sapiens
ggagttcgagaccagtgcgtggccaacatggtgcaaccctgcctctactaaaaagaatttttcaactcctttataatcttgtgagactaccatcgtacatttagtctgttgttaactgaaatgtcattatggaatgcttgactggatactaatatgaaagtctattatttaaaaaatttaggattctcatactctaaaaagtcactatccatatttctacagtttgaacttaaattgaaagttaaagctctaccagtaggaaaacaccagctagtgacctgaccatttataaaatttggctccactcaaccgcctccatgattttaggttaccgtttatttcccatccatctgatcagtatctttatcagtttcttgctgatttttaattttctcactcatagtaattttatttacatagtatgcatttgaaatagaatgagaacaaagcactcccaattttctctagtgaccaaacatgataaaacacaaaccaggatctattaaagtaaatgagaactcgagactctgaatt

SEQ ID NO: 120896 - DNA, 602 bp, Homo sapiens
gaataaccaaaaacaagcctcgaaaagaacaagagtggaagactcacactttctgattttaaaacttactgcacagctacagtaatcaagacagtatggtactggcatgaagacatatagaccaacaatggaatagagagtccagaaacaaacctctgcatataataaggtcagtgattttcaacaagagagtcaggactatggagaaaaatggagaaaagaccattttttcaacaaataatattggaaaattagatgtcacatgcaaaagaatgaagttggacccttacctaacaccatatacaaaaagcaacccaaaatggattgaagacttcaatgtaagggctaagaccataaatctcttagaataaaacatagggcaaaaacaaaacattggatttgggagtgatttcttgggtagacaccaaaggcacagacagcaaaagaaagaagacaaattagacttcatgaaaatttaaaacttttgtgcctcaaagaacacaatcaacagagggaaaatatttcttgcctacaaaatgggaggatattttaaaataacatatctgttaagaagggatttatatccagcatatataggaaac

SEQ ID NO: 120897 - DNA, 225 bp, Homo sapiens
acactctggcaggagaggagatgctaagaaagtatacagctgtcgtatatcttgagctaaactgtctgctccttagaagaaaggtggcaattacaactgcaatgtgttttttaatccacctgtgtgcctgagaccgtgctcctaagaggtgcacatgcttgtgaaatggcctctccagggccctcctacccccatacattcctataccactgtaataattcagat

SEQ ID NO: 120898 - DNA, 557 bp, Homo sapiens
gcagtggggatggacatgaggaaagaaagctgcgaggtgtttctgaaactgaatcaacagcagccaagacacttatggaaatatgggagtgggtgaagagagatgactcaattaccaagtctaagggacatggaaagagcagaaacccctgctggaggagaaagtgactcagggtcagaggaggccgagtgaatacggaagacagtgtggctaccctggcaagtggctaggataggacccggagaatgttccaacccaaagccttgctccaagcacctctcaaaccttccccaactcatgatcacctcctcagaagctacttgataaggaaatacctgaaaagaacaggcaagcatagagccaatctacccttgagaagctccactggctacccaaagtgaccctccgtgaaggctgaggctgttgcagggttagagaaacgcccgctccaccttgaggtcccccagtaggggatatgaagagctaccttcctgccctgagcctgccactcactccccctgaaaccttaaaagatgatcctctctcactttgggagg

SEQ ID NO: 120899 - DNA, 622 bp, Homo sapiens
atggtcttgatctcctgacctcgtgatccgcccgcctcggcctcccaaagtgctgggattacaggcgtgagccaccgcgcccggccacttttgtctacttcttaggaaagaattaaaattgttcgctatacacttttggaaacagtcccaatggggaagaaaatgggtctggaaatcatgtttactactacttgtctaatattcttaaccactgaacttgcaagttatggtaacctttttttagaagtgtgttaagaggaacaaaaatttttctggtgcagcaattatcacctgcagatggcctaatattagcattgagttaactccagaaacagcctgtgagctgtgaaatggagttcagatagatagtgacaattcacagaaatgcctggtatattcatataaataaccaaatatcaagataccagctgatgcttacagataactctactaataacttagctaaaaatcctataaaaatttggtgttaaagaaaatttaatttgatctgaatataacgaagcctcttaactaatgcgtagaatattaacgatttgtatatacatactcatataaagaaggcttgaaattcaatttattgtgacttataatctgattagaa

SEQ ID NO: 120900 - DNA, 709 bp, Homo sapiens
actatttcactgttctgtattttaggtgttttaacttttcttttgagtaaccacagagtaacacatgcctttttgttcacaaatctttgtaatgtttttgagtacttccttcagacagatattctgaagtagatttacagttctcatgggttagtattatcaaattgttttccaaaatgactataacagtgtaatatacttattgtattatgtgtctcagtgcctctgtgtctcagtgcctcctttgaaaagtggggagaataatattgtctacgtcatggggttgacatgagtattacatgaattaatatatgtaaagcacttagaatcattttggcataatgtaaacactcaataaatattagctattgtttttactatttcactgcatcttctctggtttttaaagtattcttataagaaatcttaaatatacagacaaaagtaaaattactcatatagttatcatatgccatatttgttgtagatttttttctttaaaataaataaaattttatggtaaaatggagcttccccatctcccttgcccatctttcaacttatgccttatccagaggaaacaacttatggatagagtatttatcatttaggttttaataatttgactacacatttgtacatccataaacatagggaattgttttgttggatttaaaattttgtttgagtgatatcataatgtattatg

SEQ ID NO: 120901 - DNA, 261 bp, Homo sapiens
catcctgagaaggtgagggacatggggtcaagacctgattctggctgattgaggagcatctgtcttcacccctctcagattcctcctctacttcctcaccagcctcatgggatgagtatcaccaagatgcttttgaactctcaagatgcttttgaactgcctgggtgggccaggcagtggctcatgcctgtaatgcaagcactttgggaggccaaggtgggaggattgcttgaggtcaggagttcgagaccagactgggca

SEQ ID NO: 120902 - DNA, 531 bp, Homo sapiens
agaagaaaggcagaaaaacgaatattcagttttctagctttagcaatgtgttaatttcaagttagaacagtttgtatttttttttctttctcttgagtaatcatgggcaatacagtatgaaatgtatcatagatgtttaatgaaaaagtgctgggattacaggcgtgagccactgcgcctggcccaagctctttgttatgtatgatatagtgatgtttaacaaaatcagaaagaaactacaatcaggttgaattaagtaaaaaatttgctgtttttaatatactgcataggagcccctatttaacattgacagagtgtaagtcaaagatagacgaatgtgaccttccccaatttctaatataattgttacattaaataatattagtaatatgttttatagaaatgatgtcatatgatactacgttatattatcagattatgagaaattttgttccaattatttttcttagcacagggtagatatattgttatcttgagtcttattttcatgtaatatttttcctctttttt

SEQ ID NO: 120903 - DNA, 201 bp, Homo sapiens
tctacgtggcactgtgtctagtcctggaggtcctgaaagaaatcgtccatgtccccagccctcatatggttgatcatttccttggtaatttctgatatggttatgctctgtcagaagaggaataggtcctctcctctttcccagttggatgcaagggaaagcctcagaatgccatcttgtggccaggcgtggtggctcatg

SEQ ID NO: 120904 - DNA, 596 bp, Homo sapiens
ggctggcggatcactcgcggttaggagctggagagccagcccggccaacacagcgaatccccgtctccaccaaaaaaatacgaaaaccagtcaggcgtggcggcgcgcgcctgcaatcgcaggcactcggctagctgaggcaggagaatcaggcagggaggttgcagtgagccgagatggcagcagtaccgtccagctttggctcggcatcagagggagaccgtggaaagagagggagaggagggagaccgtggggagagggagagggagagtcatttgcagcttttaaaagccataattttgaaagacttgacattaaaaactcagaagtgttattgtgcaatttacgcataggctattgatcttttcatcagattatgaatacttttcagatacctgtctgttgaaggtctgtgtaggtgcttctcttaatagaggtaatattggctagtttttagaaatttaacttcaacctcaatctcaaatatttaatactgtttttcttccagtttgttgttgtgtttcttgagcatggtgtttcaaaactagtttttttcctaaatcagtgtcctaatgaatctaaaagttttagatca

SEQ ID NO: 120905 - DNA, 183 bp, Homo sapiens
aaaaaaactgactcgccttacacattgaggtagtactatgaggatccaaatgaggctaaaatgcttaaaaagccacaaagtactagatgaacttatgtcattatgaatgtggtactcatattgattttcttgtattatatgtgaagtgtgctccagtatctccacctaattatgtttggactg

SEQ ID NO: 120906 - DNA, 393 bp, Homo sapiens
gggaattaggagaataatcctgaatcccctaaaccatactcaattctggggtacagaatcatttagaaagccacagaaattaagtaactaggaaatttccaagttgttagtataactggtgagacctcaattcattcacatttactgggtgacttttcctcaaggagctcacatttagtaagggtttcgtattttcctcatacttccttcctatatattattaagtccataacctcaagtaccaacaaagatgggaaatagtcaagaaaattatccggtacaagggttggtaaatcaggtgctatgtacaaaagtaaaaaaacaaacaaaaaaaccaaccatgagctacccaataaggcaccagagaacacaaggttgaacatattcagtgca

SEQ ID NO: 120907 - DNA, 315 bp, Homo sapiens
ggtgtctttgggcctgaatgtttgagcctccctacaggagatggctagagcctagccctcatgctctggaagttagttctggtaaaagctttgcagttggcgctgtggatgccctgtgctacttaacagtggttcctcctttagaacttggaagacacgtgccaatagggaggaaggttctctgctaagatgcatttatttgtgaacacctctcacagtgtttttttcaaggatatacctgtggagggaatttcccatttcagttttgggggaaacctggtgagttgcttctcagatgtttaggtcacacactga

SEQ ID NO: 120908 - DNA, 139 bp, Homo sapiens
aggtccagagacccccgttacagggaaattcctctcatccccttttcctctaactggcttcactccttcctgttacttgcactcttagcacctagtaacaccagcagccagaccttagcaggcgtgcagctgccgttag

SEQ ID NO: 120909 - DNA, 1242 bp, Homo sapiens
aaaagagccaaaaatgtgctcccaggtgcaaaaccccagccccatcagaattgcttctcagcactttgggtaactgttttgcactaacagcttcctccttgtcttttccctgggaacatgggagcactgacacagaactcaactggtccagccctttgggaggcccaggtgggcagatcacctgaagtcaggagtttgagaccagcctgggcaacatggtgaaaccctgtctctactaaaaatacaaaaattatccagtcgtggtggtgcatgcctgtagtcccagctactctggaggctgaggcaggagaatcacttgaacctgagaggtgaaggttgtagtgagccaagatcgtaccactgcactccggcctgggcaacaagagcgagactttgtctcaaacagaaacaaaacaagaaaaacaaaaagaacttaaccagttctccccagatctcagcgtgcatgcatatatagagtttagtaaaatgtgtttcaaaaaaagaaggataaaagaaagtttgaagtaagatttgtaaaagaatgaacactttaggttttgtgtgtgagtgcaaaatgtaaacacggcatttgaaattttttggtattgaaatccttaatgcctgttagtttctttatggttttatacaattgagataggttctgaagtttttttgttgtttgcttttagaaatttttaaaaatacaaaaaaaaagcgcagaaacattttcatctgggttactgtgtttatagactattctatgactcaagacaactaggacaccatcattttccagataagaaataacagttcaagttcattagggaaattatcttcccagtccaagcaagcaataatgttatcaacttacaatattggacaatcttcatattctatgagatgcctttaaaatttctttggatttaatgctgctcttggtcagttgttcaaatgaaacattgtaatttcatgttaacgacaagagtctcacgggagtctctttagatgctgcaggaactgagaggatagaagacctctctatacatctacattgcccattggagtaaagcactttacagagagatggatgccgctttgggatttggggtctatgtaatgctgatttttttcaaacctgtttggaaatattacttctttgggatggctgaaataacttttgacctgacacatctttctgtacttcctgtggccaaaaaagcaagtgagactttctgtttccca

SEQ ID NO: 120910 - DNA, 171 bp, Homo sapiens
taggtaaacaaatcaaaacctaagttaggagtataactgttagctggggttcacccaatcacaagcagccagctcatcacaccatgcccaaataaggcaaatgcctagctgtagccaatcaggtgatttttcttcttctgtgtctggcacataaaggcttgctgtgcacac

SEQ ID NO: 120911 - DNA, 802 bp, Homo sapiens
ctcttggccagcagttggaagggatcccagggacgggctcagctactcagggcagcagccaggcatcggtgcagaggaaagccaacagatttttctttaaaaatgtgaaactagcagtataaaccagtgttttgaagtacaaaggtaaatagcagaagatatcagtgaacgcatgtaaagtggctgtcttgtgggagaggaaactgaagacatagtggagactattgtttttgttttgcaacgtttggggctgactttccagaattacccaagattgacctgtgggagatatctgggccccctgtgccttgcaaagcttcacatgggtgatgatgttgaagaccaggtgcggatcaatgggggctccatggcaaatgagaaacagaggaagaagaactaaccttcctacccaccagtgctcactggcactcaacatagccttgctcttgtttctggaggaagggccattgggatcaacttaagaacatggcagaacagagatgcttgctgaattagttggttggaagcacaaaattattttagtagttgttgcaaattgcttcacttctctgggtttaagtgtagaactcaatggtaatgtgaatagacttgatctccataggatcattgtggggactcaatgagatagattctgtagagctttgggcttgattggtgcacagtgttcaatgagtgtgctgggagaaactcttctcctcacttctggtgtttccttccaggaggagagaggtccctctgggtagcacccctggcctctctgtctgctccctgggttctgcct

SEQ ID NO: 120912 - DNA, 400 bp, Homo sapiens
gaggacatctccacttgaccccctaaggacaaggttgacaggacacaccgcctgtcatcattcttgcactggacacatctacagggcttccctgcaccgacctctgaggcaacatcctatcacacagccaacttgacctcactactacataccacagtgcctataagtcaacactgtctcaacaccacggggtccacaagcacgtttctgctaagtgaactgcaagccgtagaactaccaaccttttcagctttcctaagccaactgtgtgcccttcagcgtgacatgcctgtcctggccgtgctgagacttcaaaccagttaagggagctgaaatgcttcaccacgcctagggcatagcggaatccaacactggaacactgtcaacacgcagagtcatc

SEQ ID NO: 120913 - DNA, 533 bp, Homo sapiens
  misc_feature (49)..(49): n is a, c, g, or t
  misc_feature (90)..(91): n is a, c, g, or t
  misc_feature (95)..(95): n is a, c, g, or t
  misc_feature (106)..(106): n is a, c, g, or t
  misc_feature (129)..(129): n is a, c, g, or t
cgcaatcggctcggtccgagggacagcatccttggcctgcagtctctanagtagcgggactacggcgggtacatcaggcccagacaggtnnaganaaaaattcttngtaaatatgtggtctgctgtgtngcccatacgggtcttgaactcctagcctcaagtgatcctcccaccctgacctcccaaagtgctgggattacaggcgtgagccaccgcgcccggcaatatgtaaccctttcaaaatgaaaacaccactcttagctcatgggctgtaaaaaataacaacaaaacaggcgcctgctcatactttgcttgtagactatagtttgctggtctttgttctatagttatttccactagagaggaagagattcagagatctaatgagattctaggtttttcttttttgtttgtttgtgtttttttttttttttgatcattcttgggtgtttctcctcgcagttagggggttagggcgtgggggaacccctcttagagttcgccctgtgcgggctttgcaacctttggcacgt

SEQ ID NO: 120914 - DNA, 332 bp, Homo sapiens
tcagcctccctattacttttccctgcaccaccacaaatgccattagcccaggcctcctgggataagttttcccaaatggttttccccagtacattgcttcccagatcacagcttgactcagcattttctcctctgctgcttcggattcttgaaaacccctcacctcaggattgatgtcctggggtatatgtgggagggggtggagaataaggggggttggttatggagggcaaggtggagcaagtggggggtaagagaaactgtgagcatccccctgacaccatgagctctaccccaacctcagtggctcatacttggtgacctgggggtcc

SEQ ID NO: 120915 - DNA, 429 bp, Homo sapiens
gaacaaaggaacatctgatgttagagagcagctgcaggtcctcttggcccatctcaaagcttgtaagttatccttcaagttgacatttaagattttgaagatcacatttgtttttgttttgttcaagctctctctttaaccatggcctgggatgacttttaagcttttaagaggctcaaccagtggtcaacttctcttgagatggcccagagcgggggtcagtgaattcctcactcttggcagcatctatttctccaactctctccacattttttggtttgttttttgtttcattatgaggttctaaaactgcacagtcaagatgctgtggggggaggaagtaagtgcctgttcttggaacctgtgcagcgttatgctagcactggccaagacttatcagactatggttattaataggtgttatgggtt

SEQ ID NO: 120916 - DNA, 838 bp, Homo sapiens
gcagcctgccaccatcttggaagtggctcaccaccgtcttgggagttctgtgaacaaggacccctggtaacattttggcgaccacgaagggacatccaaagctatatgaagaatagagccaatattacaacaaataaccttcatgcctgcaaaaactttttcagcttaactaatgcttgtgatgtttaacgcctgtcttttcaacttggtctactgagtcttcaatactggtgactgagctgcttgaagtgaactctggacaaggtggagagcatcttcttgatttaagatatcttgcagtaagggaagctctgtcctgagaagcctttacagaggcacaggaagaggccaggacctgaagcctccccctcccccaagagtcacataagtgagcttggaagaggaacttcagcaccaactggcaatgtaactagtgctgcgtgaaagaccctgaaccagaaccacctaaataagccccttccagatacctgagccttagaaactatgtaatataataaagacttgtttgggggcaatttataacccagaactggataaccaatacagttatgtttttaacaaacagctggctggggtgaagagtgcaggttgaaacaacaaaaataattttccccgtagaaatgtacctcacccatatgaaaaattatacttgcaatcagattctcagcagcagtgctttaaagtacatttgtatttatttttaattgacaaattaaaaattatatatgtttatggtgtaaaacatgatgctttgatataggtataaaccgtggaatggctaaattaagctaattagcatatgcattgtatcatatag

SEQ ID NO: 120917 - DNA, 956 bp, Homo sapiens
ggaaggccgaggtgggaggatcacctgaggtcaggagtttcagacaggcttggtcaaaatggcgaaaccccatctctactaaatatacaaaaattagctgggcgtggtggcgggcgcctgtagtcccagctacctgagaggctgaggcaggagaatcgctggaacccaggaagtggaagctgcagtgagccaagattgtgccactgcacttgaggctgggccacagcgagactgtgtctaaaaaataataataataaaaactggcccacaaacttcctggagaattgaccgtgggctctcctgagtgaataggagctacttccctgctttcgttgcctgaggtttagaggtgggaggcccccatgatagggaaaacagccaccagggaggccgaacagctgatacgggatcaaggcccggggtacatcaaagggcttttccttcctctcaggctaaattaccatcacgtcagtagctccatcacttgcataagcggagggtaaggttactcaagcccagccatcgatccctttcaggctgaacctgtgtcctcatcatccaaagtccccatgcttgcatacgtctcccacccttcagtttggagcactgactttcatcgttggcaagggcaatggggagttctctttggcctctgatttgctgaattgccttcaatacatggcttaacctctctgaacccccatccccatttccgagtcttaggaagaactgtggcagggcgcggtggctcatgcctgtaatcccagatctttgggaggctgaagtgggctgaagtgggaggatcacttgaggtcaggagttcgagaccagcctggccaacatggtgaaaccccgtctgtactaaaaatacaaaaattagccgggcatggtggtgcacgcctgtaagcccagctacaagggaggctgaggcaggagaattgcttgaacccaggagg

SEQ ID NO: 120918 - DNA, 255 bp, Homo sapiens
ggaaaatcaccaccatcaatgagaaacatctgccttgactgttatttgagcaagaaataatttattgtttcagtcactctgcggttcaagttccatttgtgtcagcagctgtacacctaagagtcactaaaaacagttttatgttaattgttggaagaggacctgtacatgagaacatgtatataatatttaattgcattttgtaaattaaagaaaccaaataaactgctaaaaactccttctttggagatctct

SEQ ID NO: 120919 - DNA, 151 bp, Homo sapiens
ctgggaaattccaatgtccagccacagttgagaaccactaatctaaatcacccaacacaaaaaaaggaaaagaaaccccctaccatttccataccagttatactcaactcaccaaaaagttatagaaaatgctcaacagaggggctgaaaa

SEQ ID NO: 120920 - DNA, 309 bp, Homo sapiens
actctttgattcatgcctttattcctgaaacaggatttgttttgacttcctgattacaatcagggcatatgtatacacagatgggaagagaaccgtggaaagagtaaaacctcaggcacgtgctggggtgggagttccactcctgaggtcagaggagctggaagaggatctccagctgaggcagtctctggataggaaatgaagagctcaggaggaagtgcttgcttgggaaccatctaacagaggaggaagaagaaattcacatatttcctattaaaaagagattgttttggttcaagatcattgctt

SEQ ID NO: 120921 - DNA, 336 bp, Homo sapiens
gcacgagataaagcaagacatgtttgtgcaagtattggaatattttattccattttatccttactttctttaagttattgaaaaatgtaaaaaggaaagtactgatacccacaatgaaaatgtgtaagtatcagactccttaaaaaaaaacaaacaaacaactttttattatgaaaaattgcagcagcctgggcacatggcgaaactccatctctacaaaaaatgcacagattagctgggcgtagtggcacgtgcctgtagtactcagaatgctgaggtgggaggattgcgtgagcctgggaggttgaggctgacagagtgagaccctgtctaaaa

SEQ ID NO: 120922 - DNA, 828 bp, Homo sapiens
ggctaagagtagtggctgtagtagcggcaggtccacactttgacaacaggtgagcgggacagccacggctgctcccagaccctcgcctcccagcccagaaatctcccctgcattgggctgcctctcattccctccccaccctcatcctgtgaagtgtccagccactgtcctggccctgtgtgggggtcagcaggatttcttatgaccctgtgcccacccagggagctggcctcaaccatttagctttgactgaagtgggtagcgggacgcctgctgggctggggagttgggaagcttcgttaatcatgctttcagagcactttgcgatgcagagatgaaagaagtctgaggagagcaaagtacagccattacaatctccatcttcctaattgaggaaaatgaggttatttccaaatcctctgtgatgcgatgggaaatgtgcttgataggccctcacttacagctctcccctaccacggctgctcagagctgaggtagccagggtgctatgtgtgcagagcacccaggttacagccccgccacccagacatgccccagctgccctgcgtcactcctgatgcatcagccccaagaagggcaacctcgacaaaacatcaaagttgggcacctttgagcggcatggaagttctcctcctctgcactgagtaattggaacaaaacgacccaggcagtcttgctgtaacatcaaagctgcatataataacctcacagatgaatttaagagtgaatacattcacagccactgctcaagtttgaagtatgctgcaatgtttttcagcttcagaaccaagcaagaagaagaagaag

SEQ ID NO: 120923 - DNA, 490 bp, Homo sapiens
ggcaattcacaaaaggaaacataaaaatggccttaaaaattgctaaaataaatatttaagcaaaaaagctcaacttcactatggtttggggaaatgcaaattaaagcaacaatatgtcatgttttcacagtcacattaataaaagtttaaaagacggaagtagaggtaaataggaatttgaggaaaaggagccctctcatagtggttcattggaatgtgaattgctgcagctttcaaaaaaaaatcttacactatccacaaacaatgaaagcatagatatcttcttagctactaatcccactcctaggaaaaggagtattaattacaataggttctttattgcagtattgtttatataagcaaaaagagcaaacaaccttgacatccttctattagcagtaggttgaataaatcataagacgtctactatgaactattttgcagcaatcaagaagacttaattagatctctgtttagtgatttgaatggg

SEQ ID NO: 120924 - DNA, 278 bp, Homo sapiens
agggccacaggtacacaaggagcctccgcaaggccttgtcctggcaagtcgtgtttcatggaaagttttcttgagaaagctaaatctgaggattctgggacatgagtgttactcatggccagcgtcatcatacggagcctgggagcaaattgttttttcaagaggtgtatgtaggctattgaattttgactagaaatggctttagtggtcaacattaattttgctttatatccagcagcatttcttatttttatcagggatataagtgaaggaaaaat

SEQ ID NO: 120925 - DNA, 785 bp, Homo sapiens
aacggccgggacgtgcgcgcatgcgcgctaggactccgctccgcctacgctgcaggcggagagcaaccgccaagcttggtgggagtcaaggttttcacatcctttctatgagtttcgccatctatagcttttatcaacaattgtggtttaatcaattagaaatattaaccaggagaaaatgtcaaatctaaaaatgaaagaggcggccctcatctatcttgacagaagtggaggcctccaaaagtttatagatgattgcaagtactacaatgattcaaaacaaagctatgctgtctatcgattcaaaattttaataaatccctctgatgttgttgaattagatgctgagcttggaaatcacattttacaccaacctttaaaagctgctgaagtctttcaatcagtctgttttattgctgttaagactctctcattaattggacaattgcagactgaaacgcaaattaatatagtgctgaaattaacacatttacctcccctgccaagttatggtcttgatctttgtgagtttccacttgattatacatctcagagattttatatgatgcaaggaattgtgattgcaatgacaactataaccaagtatacacaaggggcaagatttctttgttcagatgaagcatgccctctttcaaaaggatttcagtatataagagtgcatgtgcctggtgctacagaatctgcaacgataagaaatgactttttgtgtaatctatgtgcatcttcacttcaagaagacagaaaatttagagtacttggtggta

SEQ ID NO: 120926 - DNA, 280 bp, Homo sapiens
cagaaacgaggactgttctgcacatatgcatcaggacgcataatggggctttgttcgggcctgggcagacatggagggcaatgcctgagctctcttccagtttatctccacgtcctccaagctcaaatctggcagccctggagtggtttgaagttgaaactccacagagcagtggacttaatgctccaaagatgcgttgacattcagccattgtccctggcccccaagtgtccgtgggagttgctgagttttcatggagatgatccacgtccctgggtgt

SEQ ID NO: 120927 - DNA, 241 bp, Homo sapiens
ctgcccaaggaggatgccccacaaccacttggagggagatgctttgctgagagtccctgtcctctgcatctggagagcttggctcagagctgaggtgggagggagggctcctcttccaggtcgctcagttggacaccggaattgaccagcctgcaggctcacccatggagtacacactgtgtcctagtcaagcctgaggggcagtatccagcctcaacccccagcagaggctccagacaaa

SEQ ID NO: 120928 - DNA, 772 bp, Homo sapiens
atttcacacatgttgtccaaattcgagtgctggaggaattagcacatcctttgtggctctcccagaagaggactcttagaagcttgtgcctggtttcttacagactttgcctcatgtaccttttctctttactgatttttactttttaggtttgttgcagtaatatatcatcactatgagtacagctgtatactgagtcctatagtcctagcaaatcaccaagcctggaggcagtcttgggacccatggcacagcactatccttagaagctagttttgtcagtttcactttccatcttctatacctttgctgacatggtttcctagccccataccacctgttgccccatagcctattgagtaacttttcagtgcttggccaggatgaaaccttgctcaagatgatccctgatttccttattgttcctggctggaaatggctctggaatatcttgactttgattatctgaattattcagtttgattaatttatggcattaatcgaccttatattatagttgtgtatgcacatcacctcttctatttcattttaagctatttgaatgtgtagaattgttttattgtttttgtgccacccagagctgcttggtttctgaatggcttatgcctttgagttcagtgaaagtgcatataccacattaagtggtttttgataagaatgccattaaaatagatgtgactttgtaatttccgtctgacctcaggagctatacaaaaacttagaatatctgaggggaagtgttgaaaatata

SEQ ID NO: 120929 - DNA, 188 bp, Homo sapiens
atatcacctccctaactcattgagccataccggagtccctggaccatgggacagatagattgtgcactctctgtctttgaaattctctcctccctttacttcccacctctctgatctagtttctgccatgttctcttcctacctaataattcctcctcagtccccttcactgcggcactttctcccag

SEQ ID NO: 120930 - DNA, 735 bp, Homo sapiens
caaaaaagtttaatgtttatgagatttgttatggctgtccactgccttcacagtgcagaagcatggcaactgacatcatcaggcctcttcatattcctgctctgtgcattacatcatgatgctgctgagttggcaatgtcagcaggcagtgtcaaaagtctgagcattcctagaaaccattcctacaccaggagggctaacaacaactcacctatctgtatacatgactttaaccccataattatatctctaatacactttctcctagccagatgatgaaaattctcaaggccatttcattgtcaattgacatgagaactatgatagagagaagttggaatggaaaagtgagtgcccctaatgaattaaggataaaatatatttttccaaattttacataaacatacgtttatatgaacacattactaggatctctcccagggtcttggaaggggcctatgcatgtgatacgctatgaaattatgctacattggtttcatggtaaatctatctgtgacattgcctatgaagccacccacaccagcaaaatctgcagtgtttattacaaatttagctcaaacccagattatgaattcctctctcaggcaaaaaagaatagtttttggaagcctaatcatccttcaagagctagaaaagtgaaaataaatataaaaataatttgcatatcagatcacagaaccattgaagcaaaaaaccaaaaaagttcttattcca

SEQ ID NO: 120931 - DNA, 717 bp, Homo sapiens
gcagattcttgagccatatttcaggcctattcaatcagaaactgaatttggggctttgcaacccgtatgttagtaagtcctccaggcgattctgatgcacgcttgagttcgagagccattgtactgcatcagtctccctgcagttcctcagatctatcttgttttcccttgcccctatatttttctcctgtctggaatgattgttatccattttttcttcctcataaattagctcttcaaccttgcagacttagtttagtcaagtttctttctgtttcttcctccttatcacccaccctgctcccaggctgacttcaagacctgtcttaatctccatgctgcatatgtccgtacacacttgcatcatagaccattttacatagtacttttttagcctgtctcctattagtgaatttaggttcttgtttttcgtctttgtatttccatctatctggcagtatctgattgttttgtttatttttaatttttttaattaaaaaatttttaactgttttgtttgggttgtttcatatgtattaagcatcttccaggggccggcacagtgattaggagtgacagagtaggtaaagcagacatcgtctctgtaataaatacacatggtgataagtgctctgatgaagtaaaatagagcactgtggaaacacagaggagggggtggaaaaagtcagggaagtctgttcagaggaagtcacatgt

SEQ ID NO: 120932 - DNA, 183 bp, Homo sapiens
gaatgaaggtttcatgtttgagttgtttaactgtttaaattgcagagtccagaatgtactggatggtcagtatttattggtggaatgaaggagtaaacttcctggccaaaggttatagcttattaagtgatgagctagaactttttgatcataattgagagagggtatcctaccatgatagaa

SEQ ID NO: 120933 - DNA, 310 bp, Homo sapiens
aaggctgaaacgtgcatgtatataccagcctctctgggcacactctctctgcatggtagccagagcaggttctggctgctcttcaggctaatcgtctggcacctggactctggccacaacatcctctgatgtgcagaatccacttgaacatctgcaaaaaacttcaaggggaggagttgttttttgtttttttttttttgtttgttttgtttttttgccactttacgaattggccacatgataggttgaggtgagccgaggacacaaaccttacacaggtaggcagcactaagctaaaatggattaaaaa

SEQ ID NO: 120934 - DNA, 464 bp, Homo sapiens
cacagaatatcagaactgaaaagtacctaggaagttattgcacttgacaccatcattttacaaataaggaaaatgacatcaagttagataatagaattcttcagaactagagctttgagattttgactgtaagttcgttttcaagtttaacatttggtaagggcataagagaaggaatgcaaacattcatataacaaaacagtttggcaaatcatcagggggaaaatccatatcctaagacttgccatggatctaaatgactgttcatttagctctatgttctttttttttctagaggaagtctcactctgtcgcccaggctggagtgcagtggcacatctcagctttgcaatctctgcctcccgggttcaagcgattctgctgcctcagcctcctgagtaggtgggattacaggtgcacgccacaaaacccagctaatttttttgtatttttagtagagacgg

SEQ ID NO: 120935 - DNA, 207 bp, Homo sapiens
gtagatgttaaatcagttcaacttttctattaagtggaaaaacctcttacatggattcaaagagtaaaatctaattgctgcttctttgagacacctaaaacacagtaatacacaaacggatgaacaaaagtatcctacacaaatgtaagtaaaaggtaggtcagaaactcgatacaggttttaggggtaaaaaaaagattgaattaa

SEQ ID NO: 120936 - DNA, 342 bp, Homo sapiens
acgtttgccaccctgcgaccccgcccagctgttgtttttccactttcgtaagcaggctctttactgattttttatgtatttcattttagttgattttcatgtcttcccctcctgtccatcccatataacagtatctgccaaaaaagcctactccttttatgcttttttctcttatttaattgcactaatacgacatttaatatcagtaatagttgatagtagaatttgtcttgtcctttaataggaatgcaaagtgttgtgctattatgatgtatgcagctattcctacttttactaaggatttttttttttttttgagacggagtctcgctccgtcgccca

SEQ ID NO: 120937 - DNA, 337 bp, Homo sapiens
gacatgcaggtgactgttgcttgaaattgctaaatgacaaaaataatagctcatttttggcaaatgagctgaaagtatcttgacaatttttctgattaggcttagattttattcataaaaggacaaaacaactacttgaagtgaaaacttcagatgacttcatcttgtttcatgtaactgaccatttgttaggcacagtcataattttgggaataagaaccatcatatgacagataaaggtcataggagttcttcaacaaaacagtacacagccccttcaggtgtcctgaactgagctacatatgactctggacaccgggcaggtccatctggaaac

SEQ ID NO: 120938 - DNA, 166 bp, Homo sapiens
gtactgttttctcttccaactgcttccctttgcctgcaagaggaactcagataagatggatgttttgcttgacctgtttgatatcctgaactttctgtagctcttatttttcttcaatctgttcattataaatttagcttggcgtttctgtttgatctcttcaact

SEQ ID NO: 120939 - DNA, 781 bp, Homo sapiens
ccagcctggagtgcagtggtgcaatctcggctcactgccacctccgcctcccagtagctctcccacctcagcctctcgagtgagctgggattacaggcgtgcaccaccatgcccagctaatttttgtatttttagtagaaacggtttcaccatgtttgccaggctggtctacgaactcttgacctcaggtgatccgcccgcctcggcctcctgaagtgctggaattacaggcatgagccaccacgcctggctggatataccccgtttcgtttctcctttcatctgtccgcagacacccgcgttgtttccaccttttggctgttgtaaactgatttgtttttagagcaaggtattcatacctgagcaacaaggggtctctgggtggcgggaaatgcttgaagggaggagagccagggggtctgtggagaaatcctgtaatgggggaagtggcttggaggaagcagagcacacagggctgaagatggctgggccaggaggggacaggcccagtcccacctggtgaagctgggtttgtttcctggctgggggctggggggccagtcagcagaggggtggccctgttagaggacagagtcagagccctcttggtagacacggccgttcagagctggagacaagacgagcgaaccagaggggaatcatgagccagagtcatgattccgcacacaggggtgggaagcaacttccctagacctgggacggaaaggcgggctgttgggaatggctgtgggagagaaccaggggcagtgaccaggaggag

SEQ ID NO: 120940 - DNA, 543 bp, Homo sapiens
gcacgagattgcactataatataaacactgccagtattttatgtgaatggggaaattcttgatttttttgaaaaataattatacctaacagccaaaaactagaatcatcccaggtgttcatcaacaggaggatggatacaccacagtgatatgtgcacacaattgaatactattaacattcggcaataaagaggaatgaattattgacagtcgcaacaacatggatgaatctcaaaaattttaagttgaatgaaaagatgccagttcaggcacaatggctcacgcctgtaatctgaacactttaggaggccaaggcagatggatcacaaggtcaagatatcaagaccatcctggccaacgtggtgaaaccctgtctctatgaaaaatacaaaaattagctgggcatggtggcatgcagctgtagtcccagctactcgggaggctgaggcaggagaatcacttgaacccaggaggcggaggttgcagtgagccgagataatgccactgcactccagcctggtgacagagtgagcctctgtctca

SEQ ID NO: 120941 - DNA, 267 bp, Homo sapiens
ccgggaccgagggccacccggagcgcagaggcggcaccacccacacggatcccgtgggcacctagaactccgcggagggcgcgacggagctcccgctcggcctcgcgccccggcaggccccgtccgggtgctggagtgagactctcgcgctggcctctggagcgcggggtgggcgtcccgtcaccctgcgcccagcttccccggcccgttcccgcagggccggcctcccggcgccatgcccggcctgtactgcccctccagctggac

SEQ ID NO: 120942 - DNA, 196 bp, Homo sapiens
tctccaagctgtgtacagagaaccatgcaagtcgccccaaccagggaaaaacaactgccatttcttttaaaggggaaccaatgaaggtcttgtcctgatgagctcacaaaagcaaacttctccatgtctgtcgctcactcagtgggctgaagcagagccttcacgctaagctttggagacaaagcttcttagagaa

SEQ ID NO: 120943 - DNA, 354 bp, Homo sapiens
ttcagtggagtaagggatagctaaaacgaccagaggagtgaggagcaaggggttggatcctgaggaggaactgcaagagtgagaaggattaagacaagaaaaaggacagagactgggtcccattctctcactttctccagtgcctagcatagggctttgcacaatataaagactcatgagtgaatcagcaaaaaagcatatctgttgaaattatatgttcactttacaaagcattacaaaatgtgaattatcagggaaggactccttttccctcatgatgatcacaatttaaaggaaccaaaattagagtagttacatcaataaagaaacctacagataacatacacacacaca

SEQ ID NO: 120944 - DNA, 397 bp, Homo sapiens
gaagaaagatgatcacacaatttctatgagtggagcttgccctgggcctgctggacagtcaacagccagttctggacagtcaatggccagcgtgaaagagaacacaggcttggaaaatagcagtcccagcaaagaacaagagaaggtagaggctgccaggtaggcattttgttcttcacaaatttgtgcagagctggctctgggagtggaagccaggttccattacagactcatggacaactaactgacagatgctggaatggactggatgactagtgggggtcaaagggccagtatgccccataaattattttacaatgtcttgaattcacccatgaatttatttattcaacaaatatgtattaagtgttggctctgggccagcctgtataaatac

SEQ ID NO: 120945 - DNA, 776 bp, Homo sapiens
agcggggcgctcgtttggcgcgcgcgccctaggcggcggatctaagctaacttcttggatcttttcttgtttctccttggtttttgactttttctggaccctggtgtctacgatttccgagatgccgtcttctttgttgggcgcggcgatgccggcctctacatctgccgcagccctgcaggaagctctggaaaatgctggacggctcatcgaccgtcagttgcaagaggaccgcatgtacccggacctttccgagctgcttatggtgtctgccccaaataatcccaccgtttctggcatgtcagatatggattatcctttgcaaggacctggtttgctgtccgtacccaaccttccagagatcagttccatccgaagagttcctctcccacctgaacttgttgagcagtttggacatatgcagtgtaattgcatgatgggtgtgttccctcctatcagcagagcttggctcacaattgacagtgatatattcatgtggaactatgaggatggaggagaccttgcctattttgatggacttagtgagactattcttgctgtggggcttgtgaagccaaaagcaggcatctttcaacctcatgtgcgacacctcctggttttggagacccctgtagacatagtaaattcttggactcagactatgactaatttggcaaaacaggttcatggaggttcttaactgatagtatagtctgggtggcattgaagttgcttccagataccttgatatactcattcctactgattatacttaa

SEQ ID NO: 120946 - DNA, 1138 bp, Homo sapiens
tcctcttcccagccctctgagctggaagcgtcagctcatgggatgaatggcgccccggcatggatgaaagccacttgccccagctccctccaggagtgtgcatggcagagctggggctgccacgtgaacccaggcctcaggaccctggcacagcccctgcacccacacttgccatttctccgcacccctccctggactccgccaggttagggtctcccaggccctggcacccagttcaggcctggagacacctcctctccttcctgcagggtgactccgacagcccttgcctgccaggatggagcctggactctggagggcatcgtgtcctggagcagcaccagcacctcctgttgtcaccaggcgtggatgcccgcatcatgaaattcatgcctgggaaggcgtggaggccgagaccaccccccctaccccgcatctgtgtaaaacacaaataaagccattgagagcaactgcaaaaaaacaacataataatctacacttcatctacaaatatctctaacatcttttcatcaatctacgtctacatatccaaataactaaccaaccatcacatagctcgaatgattaaccaacgatcagcaccaaacaagaagccgaggcggcgcgctatccctataaaaattatctccacggtaggcagcagcacattatatagtcaatagtcagacacccaccattctttttcagagacaaacgagtgccgccaaataagacgcggatgatcatcaatataaccaaccagcaagcgccacccggcgcgcgctttatacaacaacaccagtcccggctagtggttgcgacaacaacaccctcgctcctcaggtccgagaagttactcttcgaagcggcgagcccctcactacttgctggtggtgtgcacgacacaaacatctgagtagagacgacgacaaccacaactcccccaggcacgagaacctaaatggcaagacacctacgtggacgtcgaaataactactaattatcgaatcggacattatcttaaaagctgatcaatgacacaacactagctgaaatctaaagtaacgtctgagtcgaaaaaaaatataggtgttaccacgaacgagaaatattctacgcgaacagaaaactttacgcg

SEQ ID NO: 120947 - DNA, 1308 bp, Homo sapiens
gggggaccctgggtggtgggcaggctagagttggggggaagtttaaaacaatttttattaatatataaatagagacttgggtctcactatgcggcccgactggccttgaagtttggcctcaagtgatcctcctgcctcagcctcccaaagtgctaggattacacagccctcgcccctcgggtcccttctgcccttgtgggagttgccagtcctcctatcctcccagtacaaagctggcttccacttctgcgggggctaccacatcagcgaggactgggtggtcaccgctgcccaccaggggtcaggaaaagggtcggaaatgaactgcaggctggggaaccagcacccccatcccccggccacaggcagagccgcctctgcaggagacacccaccccaggccgtgcaccccacctccaccctcgcaggccacccagacggcagcttggggaaacctgggaggtcccgtaccctcactgtgcaggcacccccatgagcccaggcaccgcctgccaccctcactctccaggaagagccaccgcgtggtggccgggatcgtgtggtggccagggcgtctgaccttggctctcacccggaggccatccaggtgctgaggatggctaacgctaaggccacacagccagggagaggaggtggctcgtgacaccacgatgggacacacccacctctgggagaggagggtgactccgacagcccttgcctgccaggatggagcctggactctggagggcatcgtgtcctggagcagcaccagcacctcctgttgtcaccaggcgtggatgcccgcatcatgaaattcatgcctgggaaggcgtggaggccgagaccaccccccctaccccgcatctgtgtaaaacacaaataaagccattgagagcaactgcatacacctttacctctgtgtcctcaccaaggcaggtgggctgagcatgatgtggctgaggtggggggacagatgctgtcacggggacaacctctgtagaggtaagatcaggagggcttgcgaatcacccagccctactcccttcttcatacagatggggaaaccaaggcccatgttcatatgcagaacggtcagggctgggagcagcaccaggggttccaagcaccctgaagcttccatctgggctgcgggctgctgggtgggggagccacgaagggggacacacttgcccagggcaagggtcttctccaagcccctccctcccaactcagaggccaggtccaggtataattccatgtgcacttcgggagttccgcaggctgggatgagattcttttaagcaga

SEQ ID NO: 120948 - DNA, 1568 bp, Homo sapiens
gggggaccctgggtggtgggcaggctagagttggggggaagtttaaaacaatttttattaatatataaatagagacttgggtctcactatgcggcccgactggccttgaagtttggcctcaagtgatcctcctgcctcagcctcccaaagtgctaggattacacagccctcgcccctcgggtcccttctgcccttgtgggagttgccagtcctcctatcctcccagtacaaagctggcttccacttctgcgggggctaccacatcagcgaggactgggtggtcaccgctgcccaccaggggtcaggaaaagggtcggaaatgaactgcaggctggggaaccagcacccccatcccccggccacaggcagagccgcctctgcaggagacacccaccccaggccgtgcaccccacctccaccctcgcaggccacccagacggcagcttggggaaacctgggaggtcccgtaccctcactgtgcaggcacccccatgagcccaggcaccgcctgccaccctcactctccaggaagagccaccgcgtggtggccgggatcgtgtggtggccagggcgtctgaccttggctctcacccggaggccatccaggtgctgaggatggctaacgctaaggccacacagccagggagaggaggtggctcgtgacaccacgatgggacacacccacctctgggagaggagggtgactccgacagcccttgcctgccaggatggagcctggactctggagggcatcgtgtcctggagcagcaccagcacctcctgttgtcaccaggcgtggatgcccgcatcatgaaattcatgcctgggaaggcgtggaggccgagaccaccccccctaccccgcatctgtgtaaaacacaaataaagccattgagagcaactgcaaaaaaacaacataataatctacacttcatctacaaatatctctaacatcttttcatcaatctacgtctacatatccaaataactaaccaaccatcacatagctcgaatgattaaccaacgatcagcaccaaacaagaagccgaggcggcgcgctatccctataaaaattatctccacggtaggcagcagcacattatatagtcaatagtcagacacccaccattctttttcagagacaaacgagtgccgccaaataagacgcggatgatcatcaatataaccaaccagcaagcgccacccggcgcgcgctttatacaacaacaccagtcccggctagtggttgcgacaacaacaccctcgctcctcaggtccgagaagttactcttcgaagcggcgagcccctcactacttgctggtggtgtgcacgacacaaacatctgagtagagacgacgacaaccacaactcccccaggcacgagaacctaaatggcaagacacctacgtggacgtcgaaataactactaattatcgaatcggacattatcttaaaagctgatcaatgacacaacactagctgaaatctaaagtaacgtctgagtcgaaaaaaaatataggtgttaccacgaacgagaaatattctacgcgaacagaaaactttacgcg

SEQ ID NO: 120949 - DNA, 1402 bp, Homo sapiens
gggggaccctgggtggtgggcaggctagagttggggggaagtttaaaacaatttttattaatatataaatagagacttgggtctcactatgcggcccgactggccttgaagtttggcctcaagtgatcctcctgcctcagcctcccaaagtgctaggattacacagccctcgcccctcgggtcccttctgcccttgtgggagttgccagtcctcctatcctcccagtacaaagctggcttccacttctgcgggggctaccacatcagcgaggactgggtggtcaccgctgcccaccaggggtcaggtgaggcttgagcttgaggagttggggcccaccaggtgtcagggaatgacactcatcccccttcccaaccccaactacaccctgcaaccaacaggaaaagggtcggaaatgaactgcaggctggggaaccagcacccccatcccccggccacaggcagagccgcctctgcaggagacacccaccccaggccgtgcaccccacctccaccctcgcaggccacccagacggcagcttggggaaacctgggaggtcccgtaccctcactgtgcaggcacccccatgagcccaggcaccgcctgccaccctcactctccaggaagagccaccgcgtggtggccgggatcgtgtggtggccagggcgtctgaccttggctctcacccggaggccatccaggtgctgaggatggctaacgctaaggccacacagccagggagaggaggtggctcgtgacaccacgatgggacacacccacctctgggagaggagggtgactccgacagcccttgcctgccaggatggagcctggactctggagggcatcgtgtcctggagcagcaccagcacctcctgttgtcaccaggcgtggatgcccgcatcatgaaattcatgcctgggaaggcgtggaggccgagaccaccccccctaccccgcatctgtgtaaaacacaaataaagccattgagagcaactgcatacacctttacctctgtgtcctcaccaaggcaggtgggctgagcatgatgtggctgaggtggggggacagatgctgtcacggggacaacctctgtagaggtaagatcaggagggcttgcgaatcacccagccctactcccttcttcatacagatggggaaaccaaggcccatgttcatatgcagaacggtcagggctgggagcagcaccaggggttccaagcaccctgaagcttccatctgggctgcgggctgctgggtgggggagccacgaagggggacacacttgcccagggcaagggtcttctccaagcccctccctcccaactcagaggccaggtccaggtataattccatgtgcacttcgggagttccgcaggctgggatgagattcttttaagcaga

SEQ ID NO: 120950 - DNA, 620 bp, Homo sapiens
ggaacaagacaaggatgcccactgtcaccactctgattcaactggaagtcctagctacagcactcagtcaagagaaagaaataaaagtcatcttaattgggaaagtggaagtcaaattatctctgttcactgatgatataatattatacctagaaaaccataaaccctcctagaaaagactcctagacttcagtaaagttccaggatgcaaaatcaatgtacaaaaaccagtagcatttctgtacactggtaatgattaagctgagaagcaaatcaaagactgaatcccatttacagtggctaccaaaaaaacactgaagaatgcatctaatcaaggaggtgaaatatctccacaaagagaagtacaaaacactgaagaaagaaatcatagatgacacaaacaaatagaaaaacatcttgtgctcctggaatggaagaatcaatataattaaaattaccatactgcccaaagcaatctatagattcaacccaattcctgtcgaactaccaatgtcactattcgcagaatttaaaaaaaaacttaaaattaatatggaaccaaaaaaagcctgaatagccaaagcaactctaagcaaaaatataacaaagctagtggtacc

SEQ ID NO: 120951 - DNA, 681 bp, Homo sapiens
ggcccagggggcccaggagagtataaaggcgatgtggagggtgcccggcacaaccagacgcccagtcacaggcgagagccctgggatgcaccggccagaggccatgctgctgctgctcacgcttgccctcctggggggccccacctgggcagggaagatgtatggccctggaggaggcaagtatttcagcaccactgaagactacgaccatgaaatcacagggctgcgggtgtctgtaggtcttctcctggtgaaaagatttctggaaggagttatttatgagtgaagagctggagaatccattcgcaaactgatgcatgaaagtgattagcaagagaaagttgtgagacaaaacagagaagctgagaggccagaaacctctacccaggacgctgagctcctggcggatccgatgagtccctccaggacaccgtccaccctgggatgaaggcagaggagttggaaggaggcgaggccgtcacgggacaacaggaccctatgaaggtgggcccacagcaaaaggagagatgattctagagcatccagtcttctagggcagcaaaacaacctaaattttctaagaggccacccagctgagggtgcccccggggagggctgaggcgtcagggtgacggctccactgcccactcacctgcgacctcaaagcccctctcctccttg

SEQ ID NO: 120952 - DNA, 806 bp, Homo sapiens
ggcccagggggcccaggagagtataaaggcgatgtggagggtgcccggcacaaccagacgcccagtcacaggcgagagccctgggatgcaccggccagaggccatgctgctgctgctcacgcttgccctcctggggggccccacctgggcagggaagatgtatggccctggaggaggcaagtatttcagcaccactgaagactacgaccatgaaatcacagggctgcgggtgtctgtaggtcttctcctggtgaaaagtgtccaggtgaaacttggagactcctgggacgtgaaactgggagccttaggtgggaatacccaggaagtcaccctgcagccaggcgaatacatcacaaaagtctttgtcgccttccaagctttcctccggggtatggtcatgtacaccagcaaggaccgctatttctattttgggaagcttgatggccagatctcctctgcctaccccagccaagaggggcaggtgctggtgggcatctatggccagtatcaactccttggcatcaagagcattggctttgaatggaattatccactagaggagccgaccactgagccaccagttaatctcacatactcagcaaactcacccgtgggtcgctagggtggggtatggggccatccgagctgaggccatctgtgtggtggtggctgatggtactggagtaactgagtcgggacgctgaatctgaatccaccaataaataaagcttctgcagaatcagtgcaaaaaaaaacaaacacaacaaaaaagtagtgccatatagtgagtcgtattacaagtcgac

SEQ ID NO: 120953 - DNA, 295 bp, Homo sapiens
attgtgagtaagctcaaacatgtgaagaggctgtggatcatgaggccccagatggagacagagagaacaggggaggtggaaaaggagagacagactaggagaaaggggaggagagagagatgagatgggagagggaggcagggagagacacagagagagaggccaagagtgccaagagcaccaaggcaccagacatatgggggaagaagccatcttggaagtttatctccaatcccatagagcccagctgatgtcaaatggatcagagatgaacttacccagctcaacctttccc

SEQ ID NO: 120954 - DNA, 834 bp, Homo sapiens
gaagggactgtcccaagcctccgttctatgccagcctccctcccactgcgtcgttagctttcatgacagtgcgcgatcccttcgagtctcctagtgctcctttttcccagactgctctcctcaagggagagctgggaacggtgggatgtacagggtgttaggtaaggaggggaggtgggcggtcagcctgggcgggacttgcccgagctggcaccccatgtgcacgtggagagaacttggcctctggcctccagggtcctccctggcctctccttggtggggatggttgtgagccatggcagcccctgctgagtgcactgttgggtagagtggggatgtgactctcagagccgctccctggtatcggagcaggccctggacctgcttctgtgaggtgcacggttaggaatggggcgttccttgattgtattaggcattgtagaggggcttgtcctgaggggtttgtgttcccatattactggcctgtgggtgcctattttagcgtgttactggggtgattctctgctgggcctgtttgaggggctgtgtctggtccattcggggtgagaacaggtcacttcgtggtggaggttcatgctgtgttcctgctcactgtcgcagcacctggcaggatagggtctaccttgggtacagagtctaatggggccatggggcctaactttcccagccaccccattcttctgacagcagattcccactagctgggccttgctccaagtctgcactgcagcagggcctggttttgtgaccatccatggccatgaccatccaggtgctgaccatggggaatccagacactcaccctaaccccct

SEQ ID NO: 120955 - DNA, 754 bp, Homo sapiens
ctcgctattcatcggcccatttgagtattttgttttcaattagggagatagctgggaacggtgggatgtacagggtgttaggtaaggaggggaggtgggcggtcagcctgggcgggacttgcccgagctggcaccccatgtgcacgtggagagaacttggcctctggcctccagggtcctccctggcctctccttggtggggatggttgtgagccatggcagcccctgctgagtgcactgttgggtagagtggggatgtgactctcagagccgctccctggtatcggagcaggccctggacctgcttctgtgaggtgcacggttaggaatggggcgttccttgattgtattaggcattgtagaggggcttgtcctgaggggtttgtgttcccatattactggcctgtgggtgcctattttagcgtgttactggggtgattctctgctgggcctgtttgaggggctgtgtctggtccattcggggtgagaacaggtcacttcgtggtggaggttcatgctgtgttcctgctcactgtcgcagcacctggcaggatagggtctaccttgggtacagagtctaatggggccatggggcctaactttcccagccaccccattcttctgacagcagattcccactagctgggccttgctccaagtctgcactgcagcagggcctggttttgtgaccatccatggccatgaccatccaggtgctgaccatggggaatccagacactcaccctaaccccct

SEQ ID NO: 120956 - DNA, 271 bp, Homo sapiens
aaattctctgcctactctagcctagagtgatctttaactccagtaagcaccttagcattgctgtttgaccatttattcaaacaacaatttttgagtgatcattaggcagaaagtacagtctctgcccttcagggacttacaatccaatcagggaggtgaggtaattcctgttacaccggctcaactagcactttgcctccacatctggtatgaggccctgcctaagcagacagtacaatggaaacaggacaaattgactcccttcttggct

SEQ ID NO: 120957 - DNA, 381 bp, Homo sapiens
ctcttcatgaagtagatgggatctcagctgggcagtgaaatgtgagtggggtttggtcagctggtggaggttgcaggaaaattatttacataggtgaagagtaagcgcaatcaggtatctaggaaagaatgaggggttcagagtatacgaaaccaatttgagctataacacaaggagggtaggattcatgtagaagagttgtaggaaatattgctgatgtaatattttgtactcaaacagttctgtggattggtgacagattttttttttcaggtaagtaaactattacccctggatattcatctttctgtgtagctggttgagaaacaggggagtaacagtaaagaaactgttttagaataaatctggtgacagcagaag

SEQ ID NO: 120958 - DNA, 537 bp, Homo sapiens
tttccatgttgttggtagtcaagttgatgtctcctggaggtagtggcaacatccagccctgggaggagagtgcgtgcaggtacctttgtcctacattcctctgctgttaatttctcattcctgtggcaacgaaggaatgcatttaaaaaacagccacaacagcggcaatagcccttcctccacccaaggcaatcgtggacctagggagttttttgtgccacataacatgtagccttccgctaaactgacaggtttgagcgtatcgattttgagcgtatcgaaagcacaacttttagccagccattttgtcctcgcatgactacggttgcttatcctgtttagacagacagcaacatttaaaaatcgaagttcctttaaacgtattttgtttggcagtccaaatgtttctatgcagaaaacagtatttgtactattaactatgaagagtgtatggataaatgggagacatttctaataaaggccttcgttaatggttccctctgtttgacatccatggtgcttctgaatacagaaagc

SEQ ID NO: 120959 - DNA, 637 bp, Homo sapiens
gataaagtgacttctaaaaattaatactcccacctaaaattgagatttcaccatccaacagccattttaactctttaattcacctcatttccacgtgtgatatacgcagactcttttgcctgtttccacttccccatctctcatcaacactctcaatccactctagtctggaatgtacagctccccactgctgaaatatcttcaggtcagtttaacaagacgttccacccagtgaaaaagatttagtgttcacggtattaaatttagtatccaagattagcaataactcattagaatagatctttgttagtcttccttatttctaatcgagaaacgctttaaataaaaactatataatatgatgaacatccagaatacaaaacaggctgggcgtggtggttcaaccctgtaatcccagcactttgcgagactgaggcgggtggatcacttgagctcagcaattcgagaacagcctgggcaacatggcgaaaccctgtctctaccaaaaatacacaaaattagctgggcatggtggcatgcacccaagatcccagctactcaggaagcagaggtgggaggattgcttgaacccaggaggcataggttgcaatgagctgagatcgcgccactgcactcc

SEQ ID NO: 120960 - DNA, 228 bp, Homo sapiens
actattaagctggatagctttgaaagcagtgaatataaatttatatttgtggctcacacactttggaatcctagcaccttggaagggtcaggtgggcagatcatttgagctcaggagtttgagaacagccaggacaacgtggcaaaaccccgtctctacaaaaattacaaaaattagccgggctttgtggccctagcctgtagttccagctacttgggaggctgaggt

SEQ ID NO: 120961 - DNA, 476 bp, Homo sapiens
  misc_feature (11)..(11): n is a, c, g, or t
ctgatacaatncgagctcggttccccttttggggtctttgctttgttctttgattgttccagtgagccaagctcctactgcccatttcaggaaagtgaaaagcaataaggaattaaccaacctaacactacagctgtgctgaccataatttaattttgccctattcagaaataattttactgtggtgatcacactattgggttcaacatccactagcagctacatgaatttatagcaggtgtaagagatttaacagaatattgattgaaatttacttaagtctgctggtatttattttatttaaagttatatttattctctctttttattagaaatgcttttctcttatgaacacataagaaaatgataatttgaattttcttgttgtttagatatcagacatttctgaaacattctcagcatttataagagataacagacacatttgattctaagaggatatcctctagaattgt

SEQ ID NO: 120962 - DNA, 125 bp, Homo sapiens
aatatttacaggttgtcttgtgcctgttttactaactgtgcattggggatggagggtagcaaactgatcactgtcttttcagatcatgggctacacaaccataaggagccacatctaggactaaa

SEQ ID NO: 120963 - DNA, 369 bp, Homo sapiens
ttacttttttacgttaacaatctttagtaatattctccatactagccaatttacaaaatgtacattatcttttttgtactcaaaaatgtggagcatttgacttactaggaaaaatgtgaaaacaactctctacaaggataaaatagaaaattcaaaggatttatgcataatcattttgtaccagtgcctcttactaccttcggaatgtccttcatgaactcttagctgtattcatctcttagtaaggatatatccttttttaaaaatcaactttaagtgtaattcatgtaattaggccaggcatggtggctcacacctgtaatcccagcacttgtggaggccaaggcgggtggatcacgtgagtatggg

SEQ ID NO: 120964 - DNA, 299 bp, Homo sapiens
atttttaagttgctaaaattcagcatgtcagtagcaacatggctggcagctgtatctctactacagtgaagtttgccagaaaaggcagttctaatacagatttaatcaccccaatagacgcctgtccaactcactgcccagcctcaaacacaaggcctccattatagagccaaaggggccattactaccaaatcatacccagcctttgtatacagttaaaaagttacactggggcctcagacccactgaccattacaacattaatacatccagggaggggtcaaggatgcttttttttt

SEQ ID NO: 120965 - DNA, 442 bp, Homo sapiens
tgaaataactggggctcagaaaacatttattgattgaaagtaatttaatttgcacatggattttaaaattatagataagtatgcaaatattttatgataactgtataaaagacctgttaaatgcttgtccaataaagtgtactttcttcccagcatagagaaagaaaggaagagaggaaaagaaagaggaaaaatggttttcctcatctcctggggtaataattgaagtgagtgttcactccatccatgaacactgtgatattatcagataatagattaccttcttccttcccttccttccttccttccttccttccttccttttatttttccttttttctttttttctctttcataaagccatatttattaattctaccaaagtccacaatcctagattctacttaagccaagaagattttgttctctagggaatgtacct

SEQ ID NO: 120966 - DNA, 210 bp, Homo sapiens
taaaaggctaccaggtcttaatcaatgaacccaaatccccacagtgtgaacaattatctgtgcatgcactaaagagcttcattctactgtaaggagaaaaagcaaatatattaacaggtattaaagaaagcccttggccgagaaaaaatgtatttcttctcctttcttttttcatttttttttgagacggagtctcgctctgtcgcccag

SEQ ID NO: 120967 - DNA, 328 bp, Homo sapiens
aaataaataccttaatagaatttccagtgtgtagaagcttctttaaagttgagcctgaaagtttaaaataatgaattataaatagagtatataaatgcatatcaaagatctattttaagaaaatatgtacttatgacaaaaatatactttttaaaaataaaaggaagaaggctgaccttcagaagcaaagcaatgtcacagagggaaagacgttttcaagataaaagtaccttaagtatgtatctcttcagaattcttttaaaacagtcaaaatgactgatattaaggtaagccaaatgcccacagtggattatgcgcatatatctct

SEQ ID NO: 120968 - DNA, 763 bp, Homo sapiens
ctccctccacagcctcatctctcgctgcttcctcttgagcatcctcaggccatggcctgacctgtctccttgctgtcctcagcaggccctgaactttccctgaccttgggaacatcagctgggaccttcccccttcccagcatggcagtctggggagtgatttagagcaaggactctggagtctgccaaactgggatttaaattctggctcagccgcacactcgctgtgtgacatcacttcttttggcctccattgtctcctctgtaaaatgaagagaacagaatcaaaagagatcatctgtgcatatgtcaaggctgcatgctgggccttgcctatatatccataaataataactgcagttatcatgaacactaagcatcatgcctcgtgaaccattatacaatattgctgatctgaagtttatatttcagcgtatattcttgatgttaagtattatcttagcggtaaactcctatgcatgcttcagtgcccagctttgtcaccaccgcctccgggaagcctctcttcattatcctggcaggatctggagctccttggtggttccccaacataggttgtcctttaaacagagcaacctatgaacaagatctgcccctggccagacagggggaaacttctcttctgattccttctgtccacttgccacctagcacagacaggcacagggagaacaattcctcctcctcccccaacatgtgtcagtcctgatgcaactggaaatctccctcctgccacattctg

SEQ ID NO: 120969 - DNA, 409 bp, Homo sapiens
aaaagttttgtatgtatttttggtttctcaaaaggtaccatttattcatttgcaagtctgtatttcaataacttcctgtctgccaaagatctagtttaatgctgtaaaataatcctacacatcacaacccatctgtgtttcccagagataccataacaaagcatcacaaactgaatggcttcaatggcagaaatttattgtctccaacttctggagattataaatttgaaatgaaggtgtcagcagggctggttccttctgacagctttgaaagatgatctggcatgtgcctctcttctagcttctggtggtttggtggcactctttggtgctcctttctttgtagatgtgtcattccaatctgccttctccttcatatgatgtcctctctgtgtgtcttcacagtttc

SEQ ID NO: 120970 - DNA, 417 bp, Homo sapiens
  misc_feature (39)..(39): n is a, c, g, or t
ctggtgttgctcgctctagcaggatccccttaccacccncgatcacgggttcaagcgattctcctgcctcagcctcctgagtagctgggattacaggcgcatgccaccacgcctggccgatgtttgtatttttagtagagatggggtttcaccatgttggccaggatggtctcgatcttctgacctcgtgatctgcccgcctccgccttccaaagtcctgggattacaggtgtgagccaccgcacccggccagaagtttattaaaaagctctagaagagtaggaaagaaatgaaagtgcacttgggagagatccaagtgggcaacttgaagaacatgtgtccaattttgatggtcttttcaaaacaccaacttgttattttgttgatcttttgtatttttttgtttcaatttcattt

SEQ ID NO: 120971 - DNA, 517 bp, Homo sapiens
gttttcaatttatgtaagccatatagatttgaatccatgctctacgactaatcttaatctcactgaacccaaagattcctcatctgtaaataggaatattgaactatccctcatgatttattatgaggattaaatgaaggctaatcaagctagcttttgttttctaaaaaggcggcttatgtttgaggattcaggagtacctcatggtacctcaaagacaagggaaaagaaagaactaaaaccaaactggatgcccctctaataatgggctatgtcacatatgttttcttctttatcccttgaatccagttcctctgcctctccaaaccacaatgtagaaatcatagttgagtcacctatacagaaaatgatttttcttttccaaattccttgataaaaggtgggttcttctagctagggcacctgcccacacctgttcctggatgagagaggaaaataatcctgcaggaacacaacagaaagctggttttcctaagccaccaccaagagcatacag

SEQ ID NO: 120972 - DNA, 710 bp, Homo sapiens
attctatagttccatttttttttttctgtattagtgagagtcctttatttaatcttgaggaccatatagatggcattattatctcaaggatctatgcagaaaagacccggcatgtgaaaccttgctactgacagctattcgcaaaaactttctgaaagtgcttgaggatgagttgacttatctgtcagcaacttcaacttacttggaattggatttggtaaatattctactaataacctaaccaagcgatgaaagctttgcagtctcagcacatgaacagagtgactgtttccatgagaaggtgtgtcacagtctccttctgcatttgaaatgcaactgaaaaaaaaagagttgctaactgtggcaagtaagattttctgtttggctgtcaggagagagcttgtatgtttcgctagtagggcgcctgtgtccatgtatgtacttacttcctcctgtctcttctactgagtgcattgagataggctaaaagatcaaaactcatggcaaaattatcatttggacctatggatcttctttttcttatttctcaggatgtattagcactgtaattatgagaatttatcttgagaaataagaaattataagccgagcatggtggctcatgcctgtaatcccagcactttgagaggccgaggcgggtggatcatttgaggtcaggaatttgagaccagcctggccaacatggtgaa

SEQ ID NO: 120973 - DNA, 414 bp, Homo sapiens
ccttcgtgagtacctgggaggctgaggcaggagaatcgcttgaaccttggggatactgaggtgggaggatcatctgagcctgggaggtcgaggctgcagtgagccgtgatcgtgtcactgtactccagcaattggggagggaataggaaaaaagttattagtgcttagaggtctgagactaggaaaaaaaaaggacaatggtggatctggctatgcctacctcacaggattgttatggagaacaatgagatttgtgttaaagtactttgaaaagtatagtgtaacacaaatataatgtcttatttttactgttcatctgtggtttattttagggtagatacaacaagaattgaatactccattcctttaagagaaaactgggcactaccatattttgcatgccaaattgctgca

SEQ ID NO: 120974 - DNA, 422 bp, Homo sapiens
ctggtaatctcaagatcagggcacccacagattcagtgtctggtgagggcagctctgggcttccaagagggtgctttcttgctgtgtcctcacatggtagatgagatgggaggtggaggggcaaaaggcactggggtacacctttcaacatcttttgtaaaagcactaatccactcataagggtggagcccttatgacttaatcacttctaaccacctcttaataccaccaccttggggtttaggtttcaacagatgaattttgaggggagatacaccttcagaccatagcaggagggacacaattcagatcataacaatcgggatgttttacactgcaattaagcaaatgccaatgaacagtgatttgaatagtaaagacattaaattgtcttatatgaagggcagtctgggattgggtag

SEQ ID NO: 120975 - DNA, 463 bp, Homo sapiens
gaatggataaagaaaatgtagtacatatactccatgcaacactatgcagccataaagatcatgtcctttgcagggacatgggtgaagctggaagccatcatcctcagcaaactaacacaggaacagaaaaccaaatgcctcatattctcactcgtaagtgcaagttgaacaacgagaacccatggacacagagagggaaacacacaccagggcctgctgggggtagggatgaggggagggaacttagaggacgagtcaataggtgcagcaaaccaccatggcacacgtatatctatataacaaacccgcacgttctgcacatgtatcccatttttttcctttgtgttagaaagaaaaaaaaaatccataagcagcttcaagccttgagccctgaaacggttacattttaataaatattgcaggggtcggggagtggcatgcacagagtagcaacagtagcttt

SEQ ID NO: 120976 - DNA, 573 bp, Homo sapiens
taccccttgtccccaagaagtatgtggacacgacaggcacatggaccaatgatggtcatgtcaagcgtgatgaagtccatggtcctgagggacacttggaccacggcctgcatgagagggcctggaacccaactgggcggatctagaaagaattcctctggacttgattcctgaacttgaaggtagagatggaaggagaagagttctgggtagcatgttcctggcagaagaagcccactgcaagagcaaaggcactgaggaagcctggtggtcactggaaaactgggattcaagtagctgaaatcgtaagggtgcagcctagggagaagtgagacccgtggtggggggcagagccaaatctctgtatccaaacctttctatatgaaagatacagtgtctgtgtctcacaagaatctgttttcttcgggtgtctgttatttgagtgctaaccagaacagaatttctaaagatggtctttgaggccaggtaacaaggctgaggctaagaagaactatggaaggtctgttggcaggagagatgtatgattagatctgcattagcagaaggaaagtt

SEQ ID NO: 120977 - DNA, 291 bp, Homo sapiens
gttgtcaggaggccgtgcactgagcacactgcctgacacatggtcaaaacccaggtttgtgctgagctctgaaggacatgagcagacagagaaaggaactcgcaagcatggcttctgaggaacgggtgaaggaaggcccttggttgggaagagacagagctgcctccgaacacaggctggatggtgcagaaaaaggcagagtggatttgttgtgtggctccaatagggacgactgggtccttcaggagactgatggatttcagtgaaagagaagcaaggagtttctaattg

SEQ ID NO: 120978 - DNA, 631 bp, Homo sapiens
cgcaggtgggctcccgtgcttccaagagctgaatggtgttgcatttcctaaccgtcttacctgcaccctggagatagatgggggactttgccgtttcttcagacaagcaggactgtgactcacaggccggagagcatcacctctgagtgctggcggagcttcaccaagatcagggtttgcagagtcttgcctgcacttagacgcactttagacccacagagagccttcgagttttctgggggtgggcagtggggggattgcacaaaacccgtgtgttgtttgggcgtggctgttgattggagagctttgtacctgtagctggaggtggtcactgctgctcagggccgggtgatcaccattagagtcatgaggtctccatcctctgttagtgatacttgcaaaggaagtgacaccttatccttggctatgatgttgaagtagttaatcaaactctgagtttatgaaaaacatgggggatgggggagggagctagtctccctcccccaaaactccagccatctctagggtacagtggtggctttgttggtggcagggtgtgtctggggaagtaagagaacgaaggtgtgggaggtggaaggaccatggtaacccgcctccttgcgtggaggga

SEQ ID NO: 120979 - DNA, 159 bp, Homo sapiens
tagtgtttttatgttaaccagaatcatagctattaggtacataaaattaatggttattaaatagtccatctccacgctgttaatttaaaactaaaacaggaattcaagctgcctatgagaatttaaaaataatgtaattgtttgattgatttctttggt

SEQ ID NO: 120980 - DNA, 274 bp, Homo sapiens
tatgtgtatacaagcaaatacgaatgtacgggatctcctttctctttcacacaaaggaggcctcgtctaacactattctggttttacttagcaatacatcttagaggtctttccacgtcagtacataaagaagtccctcactctttcctatagctgcagggtattccaacacatggatagactgtgatttatttaaatgttcccactgaatgggcatttccccagtcctttgcaatggtaaacgttgcttataaatcgccttgcagctccacct

SEQ ID NO: 120981 - DNA, 190 bp, Homo sapiens
taaaacctgcccatatagacatgcaccagcaaagtgatgtgggaagttaccatggccctgggggaagctgcagtatggggagggaacagacaggcttgtgcatggtcataggggtcatctcgctggaggtcttcaccagtcgggcatagtgcatcagtgcaaaagctacagtgtgggcccccaggacacc

SEQ ID NO: 120982 - DNA, 859 bp, Homo sapiens
acttttatatttcatcctgggcctcgataataacagcagctatgtcactcattgcagcaagcataaatccttctactttctggttttccttctctgcttttctttagtaaatgcataatataagttttgccttgtagaatgtgcctccttcttggatttattttccatttctgttatattgctgtatgtgaatctttttatcctttattaattaaattctatttttactataaaacctatacctcctttttaaactttaaaatatttcattattagcattattattattgagacggagtttcgctctttcacccaggctggaatgcagtggcgcagtcttggctcactgcaacctccgccttctggtttcacgtgactctcctgcctcagcctcccaagtagctaggattacaggcacccgccaccacacccagctaatttttgtgtttttagtagagatggggtttcaccatgttggccaggctggtcttgaactcccgacctcgtgatctgcccgcctcggccttcccaaagtgctgggacagtagttaaaccgtccctttgagcagactatattttatatacatacatttgagagtaaaatcagtgtttggagacaacttaaatgtatagaagaataggacagtctgagcagaaaaaaataggtagaaagcttcagcatattctgtatatgttaagggtagggactggaaatggtatataagaaaccaaaaaagaatcatgaggaattcatgatgattgaaatttcaggcaacatggaaagtgatcaggagtaacttcaggattttaagtctgggaaatctgaagaatcattgacaggaaaggagaaaaagagaaa

SEQ ID NO: 120983 - DNA, 507 bp, Homo sapiens
ttggccaggctggtctcgaactcctgacctcaggtgatccacctgccttggcctcccaaagtgctgggattacaggcatgagccaccgcgccccgccttcaatatatatatcttctgaaaatcctcatttgtctctttccacccccattttgtttatcagatgcccatttgcccagaggtcccttaatcctgacaaaagtctccgtagcattttcccactggcatttttttgaagagttgagcagagctttaataagaatgaaatctaatgcctttctgattctgcagccgagttcaatactgtgtgtgtcataatataaatttagttcaaacaatgtcttgcagattggttctgagcttgagtgtagcaacacaatgatggagtctcattcactcatgatgtgtcacaaatagttaactattcccacactcaaatatcaaatgactcacttattatgacatctgtattcgcattcactcacttgcattccagtatcctttcttttg

SEQ ID NO: 120984 - DNA, 139 bp, Homo sapiens
gatttgaatatactgacatttaaaaataacaatttttcttatttgctctatgcttttcaagaacatttcttatttgattgcatttattatagtaaaataacaagtagtttgttcccaaattctataataaatgcaatgt

SEQ ID NO: 120985 - DNA, 760 bp, Homo sapiens
ttcaggataaaattagaaattactcaacatgcaaagagacaggactgtaagactaacatttaaaacaagaaaatcatccaaattatctaaattttggaatgagcagacaattacaatgaagcagctattataactatgctcagtgaggcaaaggaaaatatgctcataatatgcaaaaagttgataattctcagcagataagggcaaatgataaaacccaatgtaacttctaggactgattaatacactatttcaaaggaatatgtggctctctcctaaaaattaaacttcactacctaccaggtcactgttgatttcatttgagaaacttgagtttgggtttctctaaaggaacatgtcatagtagaaagaaacagtcctgaaacagcaattgaactaaagatttagaatagtaaaaaaaagcaacgagttgttgcctaagcaaattgaccttaaacaagtctatttatcttatttttcttagctgaagaagggggataataatggtattcctaatattccaagcatagtttctataacatggtaacacttattgtattatctgtaatgataatgatgattgtttttaattgtgttctgaaagtgcttctttttaaaacaggagtatctagggagatgacacatcctagccgggttttggatgttacctaagaggacagaggccaggacccaagagtaaagtaagcaaaagagaaacttccaaaggcatagatcctatttctaaaactcaactcagaat

SEQ ID NO: 120986 - DNA, 443 bp, Homo sapiens
aaggtcttcgcagtgtcttcgggttctgtggtttcaccaaaatagttctaactgtggatttctttgtatttaccatactcaggatttctctttcctgaaccagagggtttatgtctttcattaacattattagtctttctcattttgagtatttgccctgccatttcttttttctttttcaggaatatgaataaatacattaggcctttgttttgctttgtttctgtgtgctgtcttcagggtactccctcaggttggtttcccagttcactaattttcccttcatatttatattaactgctttgtaaactatctattgagagccaggtgcagtggctcacacctgtaatcccagtgctttgggagactgagatgggaggatagcttgaggccaggagtttgagaccagcctaggcagcatagtgagacatcatttcttaaaa

SEQ ID NO: 120987 - DNA, 447 bp, Homo sapiens
atcacagcgtgtcttttttctgccaagatggacactgggcaccatggtcacaggcttcttgggtgctactaatagaaggctctctcttggctttctctgttgggcagaagtctgtgaatgccattatagctaagactctcccattctggccaggaaaggaagctggaaggacttggactcactgatttgtgctgacacccattcagccctgccgttggaactctttaatgtgcttttcagtgagctagtgtttcagaacctcatgacagggcaggctgatttctcagatgcatacttctctgacctctggcttcccctagctcactgaggctcgttctgcctgttgatgaggctctcctggcagatttgacactggacccaagagggcagaagaatcagctgttaagctggtacagggctcaaagataaataagaagacactcagca

SEQ ID NO: 120988 - DNA, 385 bp, Homo sapiens
ctctgggttagagacagataagtctaagtgggaatgttggcctcatcacttaatgaaaagtttccctaaaacttggatttctcatccataataatagcatttacttcacagtattcttatgagaaataaataagataaagaagaaaagaccctgatacagaataagtaagcaataaatgttactgtttagtgtttttaatgttttcttttcttcctgaacaaaataatcttaattctatacatgtactttgcaataaactggaatgtaccaaataatacatgatacctatttgtctatctggtattaaactggcagactcaccaaacaatgccagccccttctctaagatgaaaaagacacagaagcaacaaacatttcagctaa

SEQ ID NO: 120989 - DNA, 415 bp, Homo sapiens
aaaccttacaccacccaggtactctaaaaccatttaccaaaaagagtgagagtgagcaaaagtggcaacacgttaattggtgaatgtaggtgaagtttacatgggtgctaattgaactattcttgcatttttttctataggtttaaaatttttcaaaataagtgggggtaaagatgaaatttggatatgaccctttcctgtttaatagtgttgcctgaaggttaacagttgaactctttagcctactagttaaggatccttatgattcagcccctgtttatctttccagtcttatctttttccatcacatttctcaaactagtttaaatgttagctatgccacactacttcctatttttcagattgctcatgttctctttcaccctcatgacttcgtacacattatatgtgccct

SEQ ID NO: 120990 - DNA, 500 bp, Homo sapiens
tgtcaacatagaatcatatcacaaatcttctaatgttttgctggtttgacagggaaggactatatctttatgttttttgttataatttttttaaattaaaaaaaatttttataccaacgaggctggtctcaaactcctgagctcaaggagtttctctttatgttgttttagtctgcatttctccgatcactaacaaagttgatcacttttacctacgcttttaagacatttcttctggaaaattcatgttcataagcttcgtccattttcttctttggttgtttatcttttgattaatggtttacaagatttttaacaacaaatacttcgattattgatattatcttacatatttaaaacctcctctttctcaagatccggaaaatatgtatctatgtgttcttctaatggttgttagttttgcttttcatatttagcactataatacatctattatttctttgtgtttatgttgtgaaataaaaatttaactgaaaaac

SEQ ID NO: 120991 - DNA, 229 bp, Homo sapiens
tagaatgtttttcagtgtcacattctttgtacagcaaaatactggaagtaacccacatatctatgaataaggacttgattgaataagatggtcatctgtgcagtggaataccatccagctaggcatggatagatgtgcaacatacattgtgaaggagaaaaagtcagtggcaaactgtagtatcctagcccccttttttgttgataggtaatgcctggctaggaaatga

SEQ ID NO: 120992 - DNA, 394 bp, Homo sapiens
tgccccaagtctatgttaagtcctgcctttttggtcttgtccccaacctttccttctgcccccacaactttctaagggtttgtcatcattggcatgctaataaaattgtcgaaggaaggtaattccaaactggactggggaaaggctggcttatttgtgtggaatagagttgttttaaatcactggtaagaattgatttaatgtttactttcttctccctgagatttgatatcagtattttatggtatgtcctagaaacatacaggtttaagtttaaaaggtgaagagggccaggtgtagggggtcatatctgtaatcccagcactttgggaggtcgagggaggaggatcacgtgagctcaggagttcaagaccagcctaagcaacatagtgag

SEQ ID NO: 120993 - DNA, 820 bp, Homo sapiens
agaaaaattatgataaataagtaaattatcttatattagcaagtaataattagtatggaaaaaacagagagattgtgagtgttgaaggaatattgaaattttagatgggatggtcagggtaggcttcacttagaaggtgacatttgagcaaagagtttaatgataaggaagcattgtgaatatcttgggaaagagttttgcaggcagggataatagccagtgcaaagaccctgaggcaagaatgtgctttcggctgcacaaggcctagttcatgcatccaaacaagaggttggagcagtttatttcctctctctttgaggtcaggatggattttgggaactgaagtggactgagccaacaaggcagggatcaatatccagcagctataaggagaagtggggatgccaaggctgagactaggactgggcctgagaacagtagtatgaactctgccacttctcactcaaactatcgtctagcttttctctttttcctggatcttctttgtgcctaatcgatatgttatttgtaagcatgaaatctgactttatgaactctgtgataatgtacaatgttttcaagttgtttcactaaaggagtaattataaagtcttaattgcttatcttttatatcaaagcattgaaataacatttaaatagatcaaagtgtttagagaaagatgcaaattggctttatcacaagaatgtgggagaatctggactttgacttggcatataagttgggttgcctgtccagtaccaccttaactcctgaaaaataggggctcctgctcaaactgaggctgtacctatcacaaac

SEQ ID NO: 120994 - DNA, 575 bp, Homo sapiens
tacagtgtctacccaccatattttgagacaaatgagacaagtagactgaggggcggtaatatccaatgaaggaaaggaagcttgctgctcggcccaactcaaagcctctgaggattcaagaaagcttgagataagactgaattgcttttgcccactctaccttattttcaggaattgaagtggtcctatcaccaaaaaggactaagaagctgacactgtaatggtactctaaatcctcaagtctctcctgagaagacagtgtagcccagtggttagaaccatggtttgaattctgacttcactaccagttagcagtctggtgatgaagtctttggaagacctaattattcatcggaacagtgtggacactattattgttatacaataatattgttagaagaatcaatagacgaatgcaagggaagtgctggtcctgtaacaagtgctcgttttattgatttattgattgattgacactcagggtcttgctctgtcacccaggctggaatacagtggcacagttacagctcactgcagcctcaatctcctgggctcaagcaattctcccacctcag

SEQ ID NO: 120995 - DNA, 784 bp, Homo sapiens
atattatggctgaggaaacagccagtgagaaatctctatggtaggaaacagttcagtgggttttaggaacagaaagatgaacagagtaggtaggcacagtggatgcttgtataaaatgacattggaaaacattctagatagaaattcttcttcaaagtaagcattcctgtgttctaacacttaaacagtgttaataatacaagacattggctccaaaattacattttattaaatgttataaactaagaacgggtcagtcaggaaaacaactgtcttttgcaatcagtttttgcaatctgtaaacagtagattatatgtagtggatttgaaagctctaggatggtgttttttttctcctcaacaattggaagtattattttaattgtgtgtgaagtgttagcaatcctcagaacacctcagcacattagttcagtgtcttctactcaaaaccagaggtacttgaatcctggaggtactccaccttccaggatggagactggcaaacagcaataaaataataatttcttaccttatagcaacaagctacttaattcagaaattcctcatctgaaaaactcaattctcttgagcagtatcttgacctcttattgcataggcttaggagtcaaatagtctgggcacaaatcctgactttcccattttctagctgtgtcgttttgggcaagtcccttcttccagtgtcctcatttatttcctctgtaatcaggatgatgtacttatcacaggcatttagaaaagcatcttgcaaacaataaatctttaa

SEQ ID NO: 120996 - DNA, 388 bp, Homo sapiens
aatgttaaagaaggggaaaacatcacgattatatatgaaacttctagtcatccacctgcagtgattatcctgaaaagaattgatctagccaatgaagttactatgtgttcaaagaagggaacatttactttgtatcatgtcactcaaaatgattcaggggtatatgtaatcagtgcttccaatgaggttggggatgattctggacagattgcaatctcagttatgagtaggttgaatttactcatccctattttctttaatccttaatgcctctgggccacctttaattaagcctagccctgggaaattggtcccctaacatttctgtaattcttttgttaattaattgtgaccttttaaagacacatcaaacctgcttctctacttt

SEQ ID NO: 120997 - DNA, 450 bp, Homo sapiens
cattctggccttctccccttgcttacatgtaacctcccactttaatagtgagaaaccaggctcctgtcatttgtcatccatttgcttaactgtctagttccaatatacatttattctctatcaatatcagaatcgctatcccatttcctgtaggaaacagctacaccacccagatcacatgagttgtttgcagtttctcttcctttcagtcttcatgcattttctttgtttctttttctttttctttttctttttttttttttttttaagagagagggggtccggctcttttggcccttttggcccgggtgggggtgggggtgcagggggcgcgacccgggctcaccggaacctcaattcccagggcacaaggcagattcctccggcctcagcctcccgagtagcggggaccacagggcaccggcaataaggcccagataattttgggtc

SEQ ID NO: 120998 - DNA, 437 bp, Homo sapiens
cctcccaagtagctgggactacaggcacatgccaccacgcctagctaatttttgtatttttggtagagacagggtatcaccatgttggccaggatggtcttgatcccttgacctcgtgatccacccaccttggcctcccccaaagttggaattgcaggcatgagccaccacgcccggccgactttacattttaagagcataaaactacttttccctgtatggtttttttttcccccccaagagacatggttttgctctgtcacccaggctagagtgcagaggctcatgatcacaatcactatagcctcgacctcctggacttaagccatcctcccaccttagtctcctaaagcactgggattacaggtccccatctattataagatgtaattgcacttaatttgtagacatccttcaagtgatatgtgggtgaccat

SEQ ID NO: 120999 - DNA, 389 bp, Homo sapiens
attggacctaggtgtagaactggatttaattataatccaattcattaacccatgcctggcccgctgtgatagtttcctgttgatgctgtaacaaattactgcaaatttagatacttaaaacaacacgaatttattttcttacaattctggaagtcagaagtccaaaatcagttacactgggctaaaatcaaggtgtcggcagggctggttccttgccttttccagcttctagaggctgcctgcattccttggctcttggccccatcctccatcttcaagaaaagaagcatagtatcttctttcttctctgcctctgtacgtacatcgtgattctcctgccaccccttttcatttacgagaaccttttgtgattactttgggcgaagatt

SEQ ID NO: 121000 - DNA, 444 bp, Homo sapiens
acattcaggatcagctctcccaggacccaatctaaaggatccctcaagagtgtgtggctgggcccttcccctcttccagtcattaggccactgttgagcacctactgtgtgcactggggacactgaggccccaaaaggagacaggacttgagtagtcaagtgaccagtgaccagtcagctggtgtcaaggggccctggaactcaggtctcccaccgcccagggctctatctcctctcctgagctcccaagctgggagggggtatgagagtggtgcctctctatcccccagctgtcgggagcctttgaagagcccagcggcggtgctccccatgttgccccgcggtggagagggctggtttatttctcctgccccacagagccctgacctgtgtggcctccgtctctggagaaccccccacttccccactctcctggccgccaca

SEQ ID NO: 121001 - DNA, 438 bp, Homo sapiens
tttgtcaagattgtgctgggttcagggttataatggggaatagtatacacatagacataggttctgccctcatggagcttacaatttggttctcatttcttattatggtaagcttgtattgcctgtcagtatttcactgatttgattgaatatccttacttcccatcttctgtcacagaatcttcctcattcatccaaaacgcaacatgtccaaatcttagtgaatgctttcagtgctttgggagtggttacattccattaagattaaatccaagccaagcaagtaatacttacaagcatgcacaggagaatatgagatgaggagagaaatcctcatacttagttaatttcttgccaagtagagaaattttcagtagagccttaagttacctcagggatggctgaagattctaaatatgagattccaaagtccaccgt

SEQ ID NO: 121002 - DNA, 461 bp, Homo sapiens
cagccacatagaacccctttcttgtgcctagtagaagtggtcatcattggtcatctctttgctttggtcatgaggtcccttcagtttacattgtctttcccattttctcccaaacatctatcaagcttgtccaacctccagcccagggaccacatgcagccaaggacggcttggaatacagcccgacacaaattcataaactttcttaaaacattatgagattttttcacattttttttttttagcttatcagccatcgttagtgttcgtatattttatgcatggcccaagacaattcttctcccagtgtggctcagggaagccaaaagattggagacccctgatctaaatactccatgtacatgaaggtcactttcactgctgtttcttcccagaaatgtctaggtccttcaggtagaagtaatctttttcttcttgtaattatttttatgttcttttta

SEQ ID NO: 121003 - DNA, 347 bp, Homo sapiens
ggcatgcaccaccatgcccagctaattttgtatttttggtagagacggggtttctccatgttggtcaggctcgtctcaaactcctgatctcaggtgatccacctgcctcagcctcccaaagtgctaggattacaggcgtgagccaccatgcccggtgattgctttcttttctaatattttcactgccatctcacttttaaccttctctaagagcagacacagcagctgagcctgacacccatttcagtcaacttctctattccactcaacatacccataacacaaagagactaaatacctaaaccaccaccatctaaatcccatgagttggtcacaatatgtggaga

SEQ ID NO: 121004 - DNA, 695 bp, Homo sapiens
catcttttattttcccatttagattccccatttgtttgagattcagtgttaactttattgttttcttttaaaacagaattctaattattcatttaccagaaatgtcactattaaggttttctttcttctgagttcaaatatgtatgtcattcagtaaaacaataactttactttgagaaaaatactgattgtcaacatacatccatagtattcagataaaatatgtatataaaatgtgtcaaagttgtaattttactgtttttctacatattctcttatcacactactgactggattttaaatcataagcagcacactggtttggattaaataactctctgtcttagatgaactattactcaaaacatttttaaaaattgtcaaatggcttcttcctaccactatcctttcctgtttcttaactcttatccctaaactttctgactttatttgatacagtcattatcaaacaacatatttttgataaagttattattacaaaacataaactatattttgtttttaaaattagtcaatttgttctgataagtttatatatggcaagataactcagtattctacaacacattttctttattctaaggagcttaaaatagaaaaaaaaatagggctgtctttacaaagacaagagagtggaaatttctaatctgaataggcttgatgaaataatgtaa

SEQ ID NO: 121005 - DNA, 438 bp, Homo sapiens
catgaagttatattatgaaacggatttcatgaagtaaatattacattagttacatattcatatttcatattctgttctgagctaattattgcatatgataatagtttttttgttgttggttttttttttttgagacggagtcttgctctgttgcccaggctggagtgcaatggcgcaatctcggctcaccgcaacctccgcctcccgggttcaagcaattctcctgtctcagcctcccgagtgcctgggattacaggcatgcacccccacgcccggctaattttgtatttttagtagagacaggatttctccatgttgatcgggctgatctcgaactcctgatctcaagtgatccacccccctcggcctcccaaagtgctgggattacaggtgtgagccaccgagcccggccaataatgatttttttaagaaaatata

SEQ ID NO: 121006 - DNA, 435 bp, Homo sapiens
atagctcaggatgaccaactggcaacagaaaaatctgcatacgtattttctagatgtgggcttatggagacatatggggccatacctgtcttgtgagctacgttctctcatgcttaggtttcaagcggggtggttgacaaaacatacccagctcacgtaactaacgataagtcatttgcccgggtggtcctttaaggccaaccttgacgtttcacacatgtgagcctgattgaccagtgaatggagaacactcttcgtgggtctgctgaggaagaagaacttggagagactaatcaccattttcctactaggttcttaatggctttagaaactgagtttctctctagactttgatgagaagcagaagaaaaagcaaccaggaaagaacaatatagtgctctgatatgtctcagagccaactaccatgaataccaa

SEQ ID NO: 121007 - DNA, 284 bp, Homo sapiens
agaatttagcatgtcacccatatgtttgatttaaacacggccaaacaatgtgtttgctgagtgcttgactgacagcccagatgatttagcaggaagcaatttgtgaatgaaattagataattttagaactgagagggaccatatctgtcatctagcctctgattttaacagttgaggaaataaagttccaacgaagttatgattttcacccaggcaaaatagggagtaatgaatgagctgagacccagttgcaagcttccttatccagtggttttcccccttaa

SEQ ID NO: 121008 - DNA, 240 bp, Homo sapiens
catcatagtgcatgaggaatttgaaaagacccacaaatattaatatgtctagaattatgtggacttattgatttaaaatcagtaaaaaacggtttataatagtaattgatggatactattcaccaatctttgatacctaaacctacctgttacggggtatgggatcttttgaaaagtttcacctataccacttaagggtccctctgagcaataaaggacaggactgtaatgacagcacac

SEQ ID NO: 121009 - DNA, 851 bp, Homo sapiens
ctgacctcaggtgatccgcccacctcagcctcccaaagtgctgggattacaggcgtgagccactgtgcccggccagtggtagtcttttaatgtggtctccgctctctaacttcctttttagctacagaggagagcataagagaaaacatcatcatcgcttctatttactgagtgcctagtatatactaagtgctggaattattatatttaatctttgcaaaaagcactactgaatacacaaacctcgagagcaggtctgcgtccgtttctctcttactatgcaaactaagtctagtacagtgcctggcacatggcacgccctcaacgccgtggatatgatcatatccattttatacataaggaaaatgaggctggaagagttcacacaggtctcagtgtaagtagcagagtcaggatttgaaccaaactgttccgcaccagggagaattttctggcgtctaaaagcactagtgaggagaggagaaagttttaaaaagtaagattaaagaaaaaagtaactacttgtctgtgtggaagctgaggtggaagaagggcttcatggaaaccctctctgatgaaatcatccctcgtttttgaacagcaattttggcttttccagtttctgtgtgcgctgttggtgcaggtgtgttactcttcttattttgcagatgagcaaactgaggcacataagttacatgagaaagtaggagatagaggactggaacatgatacttcgaataaagaatgtctcagcccctgggcaaccgcagggagtcgctgagaaacaagtttccccgggagtagactcccagctcgctcaaatccttcccattccacatcgtgtctggagg

SEQ ID NO: 121010 - DNA, 255 bp, Homo sapiens
aataagtttcttgagcaatgcagcaatatccagcaattttagatagacatttaccttttgacctagaaatctcacttctacgaatccatcctaaagacacactttcagctggatgtggtcgctcatgcctgcgatcctaacactctgggaggctaaagtggaagaatctcttgggctcaggagctcaagaccagcctgggcaacataggaagaccctatctctaaaaaaaataaaaataaaaacggcacacagtc

SEQ ID NO: 121011 - DNA, 411 bp, Homo sapiens
tttttgtgatgcatgtgacaaatcaagttattcaacagttctagtctttatattctttaaagaaaatgtctgtatctctgtgacttacatttattatttttggaagattttttcttataactttggtatttcacttgaaatatttggtgtccttcatttgcttttctttttcttcagtacaggcaggtagagttcaaatgtcagtagctgagatgacaaactttttctaaaccttaaaaataatgttgttagaggaaaggttggaaataatttgtgagtagattttaatttccgttttttaaagacttaattttttaaagagtcatttaaggttcacagcaaaattgagaggaaggtacagagatttcccctgtatcccttccctacatatgcataccccccccccttttt

SEQ ID NO: 121012 - DNA, 181 bp, Homo sapiens
tatgtaacaaaacttcacatgtaccctcaaaccccaaattaaaaaaaaaatagccaggtgtggtggcacccacttgtagtctcagctacttaggaacctgaggtgggaggactgattgaacctaggaggttgaggctgcagtgagccctaattgtgccactgcattccagcctgggagaca

SEQ ID NO: 121013 - DNA, 333 bp, Homo sapiens
tgtgcacctgtgatcccagctactcaggaagctgaggtgggaagatcccttgagcccaggaggcagaggttgcagtgagctgagattgtgccactgcactccagcctgggtgacagagcaagagcctgtctcacaaaggaaaaaaaagagtaggggcaggattcccactgaggatctgctcatctgacttctggaacaaagaagtggacaatgaaagaagtggagctcaaggcccctgccttatggcccagaaactctttcttggactgggctggggactggcgtgtcctagctggctgcacctcacagggcacacatgggggagactcagca

SEQ ID NO: 121014 - DNA, 372 bp, Homo sapiens
taatgattacctaaccagctactgtgtctggtatatgacccataaaggaaaaaagtggtcacaactgaggtcatctcagaaagaatagttttcctgtgtagttgagcgtaaattgttctccaagatgatatggagaagtggaagaatgtcttttttttggctttaggaaatacattattcattctctacagaaggactgattgacttttttcctgtatatgaggaacggattattaggcaaagatattacgtagtaaagtttacttaaactagggtaagattttggactgtgcctaatgatttggaagcttacttaatcactattctcaatagctacctaatgcccaagagtgtgactttgtagctaggatg

SEQ ID NO: 121015 - DNA, 722 bp, Homo sapiens
acacatgtcgggacaacctgtctgcagaaaggagctacccaccatgggtctcctcttcgctgagagccagacagatgttgggataacatgtctgcggaaaggagctacacactacaggtctcctgtccactaagagctggacactcatcgggacgatctgcctgcaggaaggagctacccacttcaagtctcctgagagctgttctgccactcaatgaagcttctctctgccttgctcgccctccaattgtccacatacctccttcttcctggatgcaggacaagaacttgggacctgcccaatggtggaactaagagagctgtaacacaaacaggggcaacgtccccctgctcgccatgttgcaggtgatgaggagagaagagaggcagctcttcggggagccagacctaggggctccccaagccagggctgtgacaccctctttggggctctgcagttcctggtgtctccaagtttctggatgccaccacattccccttgtctaggtgctggtgcctgcagcagaagccacttgtggtacatctgatctagcctcagccttgcacggaggcagcacccgtgccagggcatggagctgcctgccccaccgcagcagccactgtgcactggcctgcctgtgcacagtggccagaccccaagcttgctcgttcacaacccctcgccagtgtgcgcctggctcacccgtggcaggcatgggatc

SEQ ID NO: 121016 - DNA, 233 bp, Homo sapiens
atattcccgaggaagccactcccaatttccccatgaaatatgcaaaaatacagtaaagaatgatcaacaactacccttgaaagaccaaggttaataggcaacggatttccagaaagactcaaggattttataattactgagacaatcttagagcaaaattgagattcttaatatctctttagtctatacttaattattttatacaaaagtcctgtttttcttattctctctcc

SEQ ID NO: 121017 - DNA, 376 bp, Homo sapiens
taaaagagacattccaaaatgctggccaaatagagttacaaatgaacaaagactgaaaacatttgactactcatcaccctctctggaaacacttctaaaagatatactcagtgagggaaaactgaatctaaagggaagaagtaaaattcaagaagcaatggggagcaaaagaccataagcatcctggtaattctcatcactgaatgtaagaggaaaaaaaagtatggatgggggttaaaaaggagcataaataaaaggaagatgtgaggaagatgaaagttaaagtgtttaaggttcaggaaaaggaaactgatattattggattcagacaatcaaataggcaatgtttaaaagatgggggaggggaaccatgata

SEQ ID NO: 121018 - DNA, 181 bp, Homo sapiens
ttattaaagaaaataataaaatacacaggtagagttgtctttctacatttcatggtctgcaaatgtgtttgggtgtttaatacaacctagaaattctttgatgagtgccaagtaatttctttctccaattccactagtgattatttttaaatgtctaagttctcgtcaaaattttgaaaac

SEQ ID NO: 121019 - DNA, 468 bp, Homo sapiens
gcacgaggttgacaaagacaaagagagaatcttgaaagcagcaagagagaaacaactcatcacatacaagggattctcaataaggttcataactgatttcttatctgagaccatggaggccagaatacaatgggatgacatatttaaagttctgaaagaaaaacactgtaaaacaagaattctatatccagcaaaactgcacttcaaacttgagtgaaaatgtaagacattctcagataaacaaaagctgagggagtctattaccactaatcctatcctagaagaagtactaaaaggagtccttctggttgaagtgaaaggacactagactgtaaatcgaagctatatgaaggaataaagatctccagtaaagaaatctacatgggcaaacataaaagcaagtcttattaatttttggtctgtaacttgactctttattttctgcatgattaaaaagacaaatacata

SEQ ID NO: 121020 - DNA, 126 bp, Homo sapiens
tgactcctctcctagttttctctagccactgctcattctcctttaccaactctttttttcctgggggttgggagggaatgttgacattcccagggttttgtcacaggatagcttctcattctacat

SEQ ID NO: 121021 - DNA, 347 bp, Homo sapiens
aactgaggcaactgcatggtgggcttgtcacagccttccagcagctcatggtagagcctgaaccaagcagagaggtaagaactagaaaccagttaaaggtcaagagcttcacttcatgatagccaaaaggtggaaacagctcacctgtctatcatcggatgaacagatacacagaatgtggcatatctatacagggactattatttagccataagaagaaatgaatggccaggtgcggtggctcacgcccataatccaaccacctcgggaggctgaggtggatggattgcttgagcccaggagtttgagtttgagaccagcctgtgcaaaatagtgaaacctcatct

SEQ ID NO: 121022 - DNA, 278 bp, Homo sapiens
gtcaaggccattgagatccggcaaggatagaggttacaggaagggagtgctggggacagacactcaggaagtggactggtcaggccaggcgtggtaactggttggttgtggggggcaaggtggggaagcccaagatgatgtctgggctcctggcctcggataggtggggcccaggggagaagcacaactggagcaaggtggtgagttcaggctcagacatgaacctgggaaggcccacagcctggatgcacacatggcctggggctggatgagtgtgg

SEQ ID NO: 121023 - DNA, 480 bp, Homo sapiens
aaaacccatttctacaaaaaattgctgggagtggtagtatgcacctgtagtttcagttacttgggaggctgaagtgaaaggattgcttgagcctgggaggtggaggttgcaatgagctaagatatcactactgtactccagcctggatgacagggtgagaacttgtttaaaaaaataaataaataaaacataacaaaaacaactcttatttgtctcccagcaggggagaaagatggcagcaacttttattctattttattaaacagctatgttgagatagacttcacatactataaattctaccctctgaaagtgtgtaattcagaggtttttagtatatcacaaagttgtgcaaccattaccactacctgattccagatcaatttcaaatggatatctaatttgttaggagtgacaaggtcaccgaagacaaataagtggggtgaggtgacaacattgctagtttacctgcagtgatca

SEQ ID NO: 121024 - DNA, 249 bp, Homo sapiens
gagctcggcccttggtgcacgcaccgtgtagggccaacgcaccgtgttgggccacgcaccgtgttgggccaacgcaccatgacagagaccatttctttgtttccagtgctttctgcataagaggactaaataaacctgtattgaattaatgaaaaactgaggtcaagaattcttttttgaatgacctttcagggtctccaaacagtttccagtttactgggggaagttgtgtatgtatgggactcactg

SEQ ID NO: 121025 - DNA, 327 bp, Homo sapiens
  misc_feature (217)..(217): n is a, c, g, or t
ctatcaccctcattcaatgatgcccaattcatgaccaatcatttcgcatttctatcccagcttttcaccttcccccgatcattttgaagcaaaccacagagatcacatcaattcaaatatacatattttgatatccctaagagacaaaaatgattttttttttagagacagtatctcactttgtcatcaaggttggagttcagtgagccaagatcgnaccattgcactccagcctggcgacagagtgagactccatctcaaaaacaaaaacaaaaacaaaaacaaaacataagctgccatgtcgttggtaacctaatctcaaaagtg

SEQ ID NO: 121026 - DNA, 282 bp, Homo sapiens
ggatccccggtgtttatcgatgccacacatatttattatttcttggtttttcttgggagggagtttgctctgttgccaagactccgtttcaaaaaacaaaacaaaacaaaacaaagtttctaaatatatcctgggggacattaagtgacctattctcctgagataatattcgtttactctccctaactgcagtatttggtaataaccatgccacaggttggccttttgctttcagaaaacattgaatagcttagtccaaactttgcatactcatgacatgta

SEQ ID NO: 121027 - DNA, 327 bp, Homo sapiens
tgctcctttctggttccatcattatcccaaagactcacttggaacattccccttccaaatcaaggcaaaaattaatgagctatcattttccccataaatcttttgtgcagacactactgaatcagtgttcctccttgcttccaatcctaagggattctatatggttgaagtagtaagttccctgttcctggaggtgattaagcagaggctgtacgaacatttaattggttgttgtaaaaatgaatcccgcattgaaggttggctcagacaacttctaaagttccttccaatcccggattccatgatacaatgtgtttactgcaattg

SEQ ID NO: 121028 - DNA, 189 bp, Homo sapiens
gttggccaggctggtctcgtactcctgacctcaagtgatccacccgccttggccacccaaagtgctgggattacaggcgtgagccaccgcgcccggacactttacttaaaatgttctttattaaacatttttcaaagctgtgggttttttaattttttttttttttttacaaaaagtagagatggggtt

SEQ ID NO: 121029 - DNA, 384 bp, Homo sapiens
catgttagccaggctggtcttgaactcctgacctcaggcaatctgcctgcctcggcctcccaaagtgctgggattacaggcgtgagccactgtgcctggcttcaaaataggaatatgaatcaagaacttagactttctgcttgagaaaattatgagaaaagaaattgcagatataaagctgaagaaaagcttacttaagtccattttcttaccactactgaggtaacaaacaattgaaaagcagtgggtaaaattctaagtttttcaacaaagcttagcattttaaggaaaaaaaaaactgtattacaacattagagtttgcttcttcagatattcctcaggttacttttcaaattaatgtcttagaagcgttatgattgtata

SEQ ID NO: 121030 - DNA, 358 bp, Homo sapiens
gatgggcagtatcacgtgaggtcaggagtttgagaccagcctgaccaacatggagaaaactgtgtcttctaaaagtacaaaattagccagacatggtggtgcatgcctgtaatcccagctactcagaaggctgaggcgggagaatcatttgaacctgggaggtggaggttgtggtgagctgagatcacgccattgcactccagctggagcaacgagcgaaacatctgtcatcaaaaatgaatgaatgaatgaatgaatgaatgaaatactactatctccctgatacatccccaccctaagcatctgatcagacaggtagtgctggtggacagatggacagacacctaccccatatgtc

SEQ ID NO: 121031 - DNA, 499 bp, Homo sapiens
ttttctcaatgcgtaataaatttatgaagcattgtcacttgggacaaaagcaaggacactgtcaacatcaaaaactaaacgtgtaacagctcaagtcccatagcagtgtaatgggtgaataggggcacccacagccttagacagtactctgtgtgcaacaaactgaggcaagaaatcacaaaaaaagaggagagtcaagatggtcaaccagacacagtcaggacgatcttttgcccacaaagcagaccatcaagtagaacagcacactataaacagatctttggaaagcaggcactgacagtggaccgagaaaggatgcaggctgaaacgggagaaaggtgggaaccccacccaggattgctgaggaccaggactcatttctggccctgggtggttcccagggaaggggtgagtaagataggcatggagaggtccactgttgccatggtcctccaggatcctagctgcgggagatcctacagcccccatggacacttga

SEQ ID NO: 121032 - DNA, 717 bp, Homo sapiens
agctttgttccgttgctggcgaggagctgcgttcttttggagaagaggcgctctgatttttagaattttcggcttttctgctttgctgcaggtctgttggagtttgctggaggtccactccagaccctgtttgcctgggtatcaccagcggaggctgcagaacagcaaatattgcggaatggcagatgttgctgcctgatcgttcttctggaagcttcgtctcagaggggcacccggctgtatgagggactcagggtgcttccacaaatattagaaggtgaagaggagccagtgtctgtagattacatggtgagagaggaagcaaagggaggaagaggtgccaggctcttttcaacaaccagttctcttaggaactatgagtgaaaactcattcacttccacgagaatggcaccaagccgtttttagggatctgcctctactatccaatcacctcctaccaggcccccctccaacattgggaatcagattttaacatgagatttggtggatgatatccaaatgatatccatctaaatcatagacaccttcaggagacatttgacagtgtttggagacgtttttgcttgtcacaactggaagtggtgctactggcatctagtgtctagaggccagaagggatgttggtaaatatcttacaatgcacaggacagaggacagccccactctgccactcaacacagactcatctggtccca

SEQ ID NO: 121033 - DNA, 800 bp, Homo sapiens
ttcggtcagttcctacaccccataagcaactactgtcttgattagaaatagaattttcatttacttcagtcaacataatttcttttagattagcccatgttgtatatatttgtagttcatttctttatcgttgagtagtattttatggtatcgtatatcagaattcatttatctgttccccttaactcttctgagtaaagatgctacgaacattcttctacagatcttttttgtgaacataagtttttatttctattgcttacatacataggagtaaaattgcttggtcattgggtagatttatcttcaacttaataaaaaatcatttttttttccaaaatggctatacagttttaaactcctaacattaacgtatgagagtttcagttgttccacatgcttgtattgtttggtgtcgtcagtctttaactactatagtaggggtaaagtggaatttcattatggctttattttgcttttctctgctgactcctgatattgagggtttttgttatgactttagttttgtaaaatgttaaattaggttgcctttttattactgacttattaagattatttatatatattctagttatggatccattgtcaaatatatttattaaattctcctagcctgaggtttatattttcgttttctcagtgatgtattttgatgagactaagtacaatttatctttttttcttttatgtttagtacttttgtgtcctaagaaatctttgcccaagtcatgaaaaatattattctgtatttgctttagagagcattagaattatagatc

SEQ ID NO: 121034 - DNA, 392 bp, Homo sapiens
agctgaacctcgagactgctcgccaaatgaggctggtctcgaactcgtgaccttgtgatccgcccaccttgccctcccaaagtgctgggattacagacgtgagccaccgcacctggctgctattttcttcttaaagtcattagtaatatctgccagaacagttttagtggagtgagagagccacagctggaatctagagaaacaggaagtgggaggtgaggaaatcaaggaatgagcaagttgtattctcctgagatagctgactatggcagggaaagagaagtgtaagggtgtgtatgagaaggatcagggttaatggtagtatgttcttaggttatggggtgagactgcctcgccaaatgagactgccacgccaaatggggatcctctag

SEQ ID NO: 121035 - DNA, 430 bp, Homo sapiens
tgtgaggactggttaacattgggcttctcctgttgcatccccttgcacagatgctgatatcagatggtcttgtagctgttaataccttgtttacatcagcttatatttggggttcataggatatctttcatctttttgtctagttttattgtagatttttaacaaattttggtttggctttcctaatttttttgagggagaggaggagttttgggcgattcagttttaaatctactatctttttttgtactttcttttttttttttttttttgagagagagtctcaaaattagtattattattcaattcaattaaaattaattaattaccattctccattataaggaaccaagactccctggagaattggctgttcccagggctaggttagggaactttcaagttgaccctggggattcgcccttgtcgt

SEQ ID NO: 121036 - DNA, 408 bp, Homo sapiens
ctgcagtgagttatgatcacaccacagcactccagcctgggcggcagagcgagaccctgtctcaaaaaataaaataaaagttgaatcacccacgttttagattatgagcttattaaaacttaaacaggctgggcgtggtggctcacacctgtaatcccagctctttgagaggctgaggtgggcggatcacgaggtcaagagatcaagaccatcccggccaacatgatgaaaccccacctctactaaaaatacaaaaattagctgggcgtggtggcgcacgcctgtagtcccaactactcaggaggctgaggcaggagaatcgcttgaacccaggaggcggaggttgcagtgagccgagatcgcgccactgcactccagcctggtgacagagcgagaccccacctcaag

SEQ ID NO: 121037 - DNA, 290 bp, Homo sapiens
cactccccacagggtgtattgggggctgggggtaagcacgtgtcatggggcaccaacgctggtcccctcaagccaagactccctggtgtggactcagctgtggcgagaggacagtttagcactgggaagttcatgccgcaacatggccttcttctgtagctgtgggtctagggccgtggagacctcttgggtgtttctcctgattctctgccagcctcctggggctgtgtgcacaggcgttggccacttagctcccttctagcctgggccgaggggaaggctcatgtcct

SEQ ID NO: 121038 - DNA, 354 bp, Homo sapiens
gaaattaaatatagtctattttgggctttccagatctaaaaaccctttaaatgcatgtgcacacacacaaatatatacacagctagttttctgccatttattcttagggatggacacagtaaaaacatctttattttttacatcttatatgccatctgtctagaattttactagatgaagcatcaatgttaccatctctgaaatccatatgttcttattgaaagcttaaaatttgtcttctctgtagtcatttatcatcttttcaggggtctacagtttctcaaagattaataatactaccagatcttctagtagctactttgatatttctttgtttgagcctagttaaaaaaa

SEQ ID NO: 121039 - DNA, 717 bp, Homo sapiens
ggtttttattttattaaaattgtttaaaacactcttactttgcaaaataaaaagttgccagccctgtttttctcccagtcctgtgtctcgaagctgcttctttgtccgatgcagatataaataaggcgctcttaccttatgccgcttcaacaagtccctagctgcgctgagctatgattgcaccacttgccctccagcctgggtgacagagcgagaccttgtctcaaaaacgaaacaaaacaaacaggaaaacaagttcctagctgaacttacctcctctgtgagtgtaggggtgccaagtaggggccagatgctggggatacaagagaacagcagagacacaatttgcaacttaccatgcttctcagggagaagttttttccagcattctatgggagttccagttacttcctcaccaatgcttggtattgtcatgcttttcaattttagccattgtgaagtgatatcttctagcattttttccttactgcttctctaatttcagaatcttctagtattttaaatttgcatttctctgttggctaatgatgtggagcatcttacatacttattggccatatcatcttttgtgatgtgtttgttcaagcttttggccatttttaaattgggttgtttgccctttaatgattgattatgagtttttttctgtattttggatactagtcctttataaggtatctaatgaaatattttctt

SEQ ID NO: 121040 - DNA, 370 bp, Homo sapiens
tagggagcctgcatgcttgtggatctggtccgtcgttatggtacgtctatgtcgtgggatacttctggctgaagcattgctcagtaaattgctgataaatgacttccatctggaatatacttggtcagcaatttaggaagccatgcagatttattttcaagaaactcaaactacttttcagacccattacccttgtgccaactaagtaaaatcccccctgctcctattctttgggagtcctgaaccgtagcataaaggaattcacaaaacacttgcaggaattaataattgcattctcgctcttattatgcaaagccttattagggcagagaaattaaggtttccataaattacagttccagaaggtccg

SEQ ID NO: 121041 - DNA, 176 bp, Homo sapiens
gttaatatggcttagtgataattgagtttaaaaagctaggggacagataaaatctcaggtcattcataagttttcagattgtgcacaagcatttacaatgatcatggggaaggagtaggaatttctcaggttaacagagaagtgcaaacagtcatgagacagaccaacagttttct

SEQ ID NO: 121042 - DNA, 587 bp, Homo sapiens
catggtggctcacgcctgtaatcccagcactttgggaggccgaggcaggcggatcacgaggtcaggagatcgagaccatcctggctaacatggtgaaaccccatctctactaaaaatataaaaaattagccgggcgtgatggcgggcacctgtagtcccagctactcgggaggctgaggctggagaatgtcatgaactcgggaggcagagcttgcagtgagctgagatcgcacgactgcactccagcctgggtgacagagcaagactctgtatcaaaacaaaaacaaaaacaaaaacaaacaaacaaaaagccctctgttatttactgtcctgagattaggaagtcaagcctaagaaacactctccaccaggtttcacctgcagtccctaggaaaacaagcaggtatacacttagacttctctgaaactcttgttcctaattatagtctcaaccattaatattaatcataactgctaacccaaagctttaaacagtttattgcatttacttgcacacagaaacttattacaaacttccttttttccttaattaatttcaacaaaaaataaaaacttaacgcgctgca

SEQ ID NO: 121043 - DNA, 500 bp, Homo sapiens
ccctggtgtggttttgtgcctggagatgtaaggttctgaactacaaaggaagcaaacaaaatgaagagatgatgcaaggaggcaaaaaagatggaggcattaggaaaggctttgagggcaggaggcacggggtcatcttctaaaataacctattggaatgcatgttttaataagctttgaagatcaaagagattaacaagaacaagaggaaaacaagggtaaattaggcactattgatggcctgacaaggacttttttctccctttctgcttacaataacctctcattttaccatgtggctagttggtttgtttacttgtttgtttacacttactcattactagctttccctataaagcaagggaaaacactctgtccccaggggccagctgcataacatgaatagatgaaatagaccagaccagatgcaatctgcagtcatgggaactctgaactgaagagaacatgccctcatttaaaggcatccaaatgaaacattt

SEQ ID NO: 121044 - DNA, 445 bp, Homo sapiens
ggaagcagttatatgtatttgtctcaggtgagcctcagagggatgactgtgttctgtttgtcctttgtcaacaaggaatttccttgtgggcaaattgtgagggagatatgtagctttttatgtttgtaactatcttatttaggaataaaatgggaggcaggtttgcctgacacagctcccagcctgacttttcccttggcttagtgattttggggtcctgagatctattttcgtttcataaacttcagtaggatcactctggctgctgtgtagagaatagggtagaaagaagagaccagttaggagactacagaagatgtgattaaaatttggatatatatcggaggtagaactgaggatcttgggcccgtgctacagaaagagaatagagctgttattaattgagaatgaagaaaactggaggaacaggttttggtttcttttt

SEQ ID NO: 121045 - DNA, 673 bp, Homo sapiens
agcggcttaatttaagattcagcatttatatttcaggaagtgacttgaaccaatacaggatgtggaggtctgatttgacagtaatctacataaagaaaacctggggtttgtgttgaccacacagttggcttgatgtgaaccaactgtgtggttcctctgctgaagaaattaatcctatataacaaatgccccaaacctaatgcaagtgcaacctgcattaacagaggattgtccagctcttaggaagttatagtccagctgctcttcactggtagaccacatcttaaaagtaatattaattcttcagagagggtcagccaagatggtcagtgggtctggaaaccatgtaacattagaagcctggtgaaaaagaggagtcggggacatcctttctatccaagaacatttaaaagggatgtcatgtaggaaaaaacagtagttttcctgtggttaagttggccgaaataggttaaatagatgcacattttagctaaatggacacgagattcttttatttcgaactaccagtactattcagcatgttatgggtttcattaggatgtagttaattccctggtttcagaagtgttccaacatagaattcatttaacagatctttaatgagtactattatgtgtcagacactgttctaggtgctgaggatagactgaga

SEQ ID NO: 121046 - DNA, 538 bp, Homo sapiens
ggagtgggccatttcctgcaggccccaatactcccatgccagtctagctcagcaggcagagaagactaacccttcgtggggctgggtgcggtggctcacgcctgtaatctcagcactttgggaggctggtcttgaactcctgagctcaggtgatctgcccgcgtcggcctgccaaagtgctaggattacacccataagccactgcgctcagcttaatttttaaatttttaactttttaaattgtctttagagatgagatcctgctctgtcacctaggctggagtgcaatggcttggtaatagctcactgcagtctcaaactcctggactcaaatgatcctcccacctcagctttctgagtagctaggaccacaggtgtgcaccacctgtgagacagagtcttgctctgttgcccaggctggagtgcagtggcgtgatctccactcactgcaacctctgcctcccaggttcacgccattctcctgcctcagcctcccgagtagctgggagtacaggtgcccaccaccacgcccggctaa

SEQ ID NO: 121047 - DNA, 838 bp, Homo sapiens
agagaatgggatgatatatccaaggtgcagaagaaaaaaacttgctgccaaggacattatgcccacaaagctatccttcataaatgaaggagaaataaaagtctttcccagacaagcaaaagctcagggaattcatccccactagatcagccatacaagaaatacttaagggaattctatacctagaagggaaagaacaataactaccatgatgaaaatacatgaaaatattaaaaaaaaaacaacactgttaaataagatttgagataaaaactcaaatgttaccactacaggatactaccaaaccacaatgatgaacaataagagagaaagaaaggagcaaggatatataaaacaaccataagtcaaccaataaaatgtcaggaataagtcctcacatatcaatagtaactttgaatgtaaatggattaaattttccacttgaaagatgtagactggtggaatggattagcaaaacaaaacaaaacaaaaaaagaaaacatgaaccaagtatatgctgcttacaagaaactcatctcagttgtaaagatacacgtcttgaaagcaacaggtggaaaacatattctatgcaattagaaacaaaacaagcaggaacatgggaacacttgatatgttatgtaaagcaaatattattagatctaaagggagtgatagactccaacacaacaatagctggggacattaacaccccattctcagcatcagacagacatctagacaaaaaattaacaaagaaacattggatttaaactgtacattagactaaatgtacctaacagacatttacagaatatttggttgaacagctacaaaatac

SEQ ID NO: 121048 - DNA, 212 bp, Homo sapiens
ccattttctgttgaaattttccatttttttatccattttaaaaaaaggtcatttcctctaatttaacatatttttgatagctatttgaaagtccttgattgcaaatttcaacatctagtcacttacagttctgtaatctgcttctttcttgattgtgagccgagactggaccactgcactctagcctgggcaacagagcaagactctgtctc

SEQ ID NO: 121049 - DNA, 169 bp, Homo sapiens
ttgggtcacaagtcacagatggaaaggcatgggccacagtgggggactgggtcccttcttggcaagaacccaccgggacacagtccctgcctgtcattctgccttgctggctgcaggcccaggaccaccggccagaagccatgagagatcagggcaggacacgggcagc

SEQ ID NO: 121050 - DNA, 592 bp, Homo sapiens
acctggctaatttttttgtatttttagtagagaaggggttttaccgtgttagccagaatggtctcaatcccctgacctcctgatccgcccacctcggcctcccaaagtgctgggattatgggcatgagccacagtgcccagcccagatttttgtatttttagtagagacagggcttcaccatgttggtcaggctggtcttgacctcctgacctcaggtgatccgtccgcctcggcctttcaaagtgctgggattacgggcatgagccaccgcgcccagtgataaaatataactttctcagcagggcaccaatgccctgtgcatctgcccctaatccccttcttgtcaaccctgcaggcgctctgcactgttcctgcaataagaagcatcttctctaccttctggcctttgcacatgctgggaccaccaccaagaaggctcttcttgacctcctctaccagctaattcccactcgtcctttggatctcagccaaaacttcccttcctgctgcccctagaccagggtgtttcttccattacccaccccacagcaccacagcacctgcttttttttttttttttttttttttttt

SEQ ID NO: 121051 - DNA, 242 bp, Homo sapiens
catgggagtcaggcccctgcccttgagtgggctttgtcgcttacatgaagtcgggctgttcatctttccttgttgtggcattggaactcagccaagcagcagcgatttaggaggggcagtagccgcagggtgccgggtttaatgggaaagatgctgtttacttagaatatgtgttcatttggagtggctttggggcttaccccaggccaccccttaggaccaccactgattaggggtcagaa

SEQ ID NO: 121052 - DNA, 265 bp, Homo sapiens
gtgtgtcgagtaaggaggactacttctgtcatttgggtattggacttctatatccttgctggtctcaaaactcctggcctcaagtgatccgcttgccttggcctcccaaagtgctggtattacaagcgtgaaccaccacgcccagccagaagtaagttttatataaagaagagatcttaaattttttgctaacttattttatattttagcaaattatcattggtgtgcttagaataacattaatgatgaggctaaaatttaagtg

SEQ ID NO: 121053 - DNA, 207 bp, Homo sapiens
cacgtggtatcttttttcgtccaactgcttattttagaaacatactgattttggagtgagaattatttggaaaagtcgttaagatatttagcctttcaggctagtctataggcaaaaacatcgttctgagaaggcaacaatttctgaggatttatgttgatgacaatcatgttgaaatttgtgttagttaattgaaccattttcata

SEQ ID NO: 121054 - DNA, 104 bp, Homo sapiens
aatgaaagggagaatgggacagaagaaatacctgaataaacaagagcaaaatacttttcaaaattggcagacggcgtacatttcagattcaagaagtttagtta

SEQ ID NO: 121055 - DNA, 227 bp, Homo sapiens
cccagccccatacccagctccaccaagatcctcacttctttcatcatttgcccatttttccccaggctatgtttgatcttgctctgaggccttctttcttgggaggtatagcgagagtagctgcagaaacctctgggtggcaccctgcccccacaggattaccaaagaatgacatgtgtggaagaggctcaggcctgtgttggcaggaagaagtgactcatttttca

SEQ ID NO: 121056 - DNA, 192 bp, Homo sapiens
tccatgatgtgcaggaggctatcatgcctacttacatgatattctgaaggaccatgaaaatgtttcaatttttttaatcaagagcaaaaatgaattcctctataggcacaagtgtgtttgtattaatattatgaatataaaaacaaggctagccatggtggctcatgcctgtaaccccggcactttgggagg

SEQ ID NO: 121057 - DNA, 252 bp, Homo sapiens
gatttgagtttgcttttgcgaggtgcctgggcatttgaatcaggtaccgccttaaaacaagttcaaggcttgggattccctgatatcctacatcatttgagcaggaaggtctctcgtcagatatcccactttgtgtgggcctgactttgtatattaactttctgtgctgtaaagatgttttaaaaattttatcagtgttttgttttgttttgttttctctaggaggttgacccaaataatatagcctgtttt

SEQ ID NO: 121058 - DNA, 480 bp, Homo sapiens
cagggatagtacccctaagtttatttagtagttccttaaaaaatagttatgtcaattcctctgctgtactgattttctctcctgaatttgttctaccccatttatggattaactgaatacatctagcagatttagtctgaccaggccagataagaatctttggctgctttattctaaaatgcactatgcagtgtttcagaaagtacacccagtgtcacataagcttttttagaggccacagaacccatgatctgttaatactttccacataggctatggttggttctgcatccccatcctttacttggtacttgggcttctttgtgcacaaggacaggaccttataactatccctgttgttggattcactgtaattgagggtttgttttctctgtatcactcttcagcattacattgttaatcacagcaagtctgtccctttgatcatcatcttgctctgtatgtaactaaagtatcttt

SEQ ID NO: 121059 - DNA, 766 bp, Homo sapiens
aaggcaacaaggatatgtgccactttcaggcttggcccatagaaaccttacatgagtaatcctttttctccatatggagttttggagtttaatagagcaatttctgagtcctggtggagccacaagatggaaggaaactagatccctgaatgaccacatgggaagctgtctgctaagtaggaatatctacattaggctttgcagtagtgaaaagtatgttttgttaagccattgggatctgggaatttgtttcattgcagctaaaattacttgccttatatggaaatatagctggcaagtccgaaggcttattttatggaggggaaaaactgtgggtcattgaactaagggatgccaggcataaagtatagataccatatcaaaaacaagggacttaagtgactgtgtgcataatgcatgctatacactaaaacctccagccctcttcccctactttgaccacagaatgctgtcaggatctctgtgttccaagcctgaagtgggaagaggcttctctagggactctaatctccagccaagaagacagattcaaagattctgataatgggagttttctaacacatggtctgatcaagtcaatgctaacgggctgcattgcttggttgagagcttccagtgagtttcctcattcctcacttttattcatacaagcaacaaggattatcagacattaggaaaggttctgatatgaaatacagagaccacaacaaacaaacagaaggaatgcaacttagaggaagaagag

SEQ ID NO: 121060 - DNA, 398 bp, Homo sapiens
  misc_feature (238)..(238): n is a, c, g, or t
agccccagtggactaggataacaagcatcgtcctacaatttctaatttggctttgaatcactgttcctataatctccagcttgccttctttcctccagctgcttattttctccaactagcatttcacaattccttcctacgttcgttcactgaatacattcaggctgaaaaccaagtatctgctacaatgctgctgctacaacactgagcaagacttgggcgggttatggacacactnccactaagtgctatgaaaggagtggagtgggctggccatgggaagggtggcaatgtgggctaagtggtagaatttcttaccaaccatttaacttctttctagtcccatattcccactgtcttaaatttgtgagtttatataatggtctatactacctgta

SEQ ID NO: 121061 - DNA, 235 bp, Homo sapiens
catgaaatcaccccctcaatcaagataatgaacagaaagctggaggctgagtgagctacacctagtccagcagcctttaccaggtccaaggtaacaggatctttatctataatcgtctctgtgttcctggggcagataactgtgagagaactaacagcaaggtgacttgcaagctaagaaataaacagatttctttcttttctccttttcgtttttttttttttttttttttttt

SEQ ID NO: 121062 - DNA, 766 bp, Homo sapiens
atgcaatgcccagtttcacatatgtttttgcatcactgtctctttttttcttgagcttattccagagtgtcttttaatatccattccatgatcaaatggctgaactattaaaatgctgtccagaagtgtaaagcaatatgaagatgctagaaaagttgaagagacacatatatggtagtccaagaccattacacttactgagtccattactaaaaatgatgttcacttaacatcaaaacactcaggattacccaagcacaatatactgatttgcacctctgcctttgttcatgccccttgttcaggagaactgctttcatgtgctactgtccatagatcttctctatccttacagattaatttcttccttttgaatgctatgtttccatactttgacattccttctgcaccattcagaccatattttagttcttttttatggtatctctcacttttgattgtcaccccttaagtcaaagacaattttttcatctgtgtcttctcaacacccagcacagggctatgtttggtaaaaattaggtatccaagatgtactaaatgaaaaaatcaaagaagcaaaaatttttgaaatttcaaatgagcttataaataagctctgttatgtacttattgtaagaagtttgaaaatagagaaaagtattaaagagaacagaaatctctaaaaaatcccaaaataaccacctcaggggagttcttaagttagaagccacatctctcatggtacccctgttgatctgcaggtctc

SEQ ID NO: 121063 - DNA, 609 bp, Homo sapiens
gatacaaatagacatctcatgttcatggattggaagacttaatattgtgaaaatgtccatactatccaaagttatctgttcattcaatgcactccctatcaaaataccaataacattcttcacagaaatggaaaaaacaatcctaaaatttgtgcagaaccatggaagaccccaaatagcaaaagcaaatcctgagcaaaaggaataaagctggaggcatcacactaccagacttcaaaatgaaggcaatagtaatcaaaccagaatggttaaaaacataaaaacagatatgtagaccaatgagacagaacagagaaccccaaaataaatctacttatttacagacaactgatatttgacaaaggtgccaagaacattcataggggaatgataatctcttcaataaactgtgccaggagagctagatatcaatacacagaaaaatgaaactggactcctatctctcaccataaaaaaggtcaattcaaaatggactaagaacttaaatgtaagaccccaaactatgaaactaccagaagaaaacacaaaggaaatgcttcaggacattggtctgatgaaagattttatggagaagacctcaaaagccca

SEQ ID NO: 121064 - DNA, 451 bp, Homo sapiens
tgtcagccacagccctcaccacacctgccttctttttggggtgttctcaactttcctgatgagacaaagcctttccagctcactctttagcaggtagagggggcagttagagcatgcaccgtgctcctggtactactgccgaaccacgtaagcttgccccagccaaaagcagattctgtttgctgggcaccccctgccagtccctgagctcagtgctttgcaaatataatgcaatttaatcttcactaaatccagtgattgcaattttccagatgaggaaactcagggaggttgagagacttgcccaaggtcacacagtgacctggattcaaaatcctcttgatctgattctggagcccagctcttcatcactcttccgttcagtccctttccacgcccctaaacaggatgtaatgtggcaggaagacaagttgagacctgtgtctgagct

SEQ ID NO: 121065 - DNA, 255 bp, Homo sapiens
gtgtgctcttgagcctgtgtttagatgttggcgtggctggtggcatcactgaatggctgtgctacaggggtcttagtacacagtgagcgtgtgtatgaccgctggtatctggccatgtgtttgtcgagatgctacagccacgccaacatctaaacacaggctcaagagatcgagaccatcctggccaacatggtgaaacctcgtctctactaaaaatacaaaaaatagctgggtgtggtggcacatgcctgtagt

SEQ ID NO: 121066 - DNA, 559 bp, Homo sapiens
catggtggtgcacacctgtagtcccaactactcagaaggctgaggtgggaggatcatttgaggccagaagttaaggctgcagtgagtcgaccctgagccacttcactgcagcctgggcaacaggaaagaggcccttcttaaaaaaaaaaagagagagaaattttaaactatttttaacatatcccacacattggaatactactcaccaataaaaaaggaatggaactgattaaatcatccaataacagagatgaatctcaaaaaacatcatgttgagtaaagaagccagtcactaaaagctacctgttatatgagtccacgtatgtgaaaaatccagaaaaaacaaaatcatagtgacagaaagtagatgagtgggcctgggcccaaggtgggagtggtgaccggctacaagggagcatagggcccttctaggtgatggaaagtgttgtcagacttgtctaggagttggctgcatgcccaggacttttaccgacattcaccaaagtgcacacttcacgcaggtgtattttatggtgcacatatctcaacaaaactgttt

SEQ ID NO: 121067 - DNA, 593 bp, Homo sapiens
gggttggtgttcatctgcttgcagaggaaagccaggtacttcaacttatttctgtagaaattgccagaaatgttgatgccctcacagcgtacgaccaccaccttccagcccaacattacctgcttagccacgatggccgccaggcggcccaggagatggcctcgaccatggaggactgggacctgcacctccgccatcttcggcagccgcctgggaaagcacatctttttattgttctaatcgttaacagataaggaaagtgccacaggcactggtactagtaacaatagctaatatttctatgacatgtattgtcacttaaaaatagtattaaggcaaaaaattagccgggcgtcgtggcgggcgcctgtagtcccagctactcaggaggctgaggcaggagaatggcgtgaatcggcgaggcggagcttgcagtgagcctatatcgcgccactgcactccagcctgggcgacaaagcaagactctgtctccaaaaaaaaaaaaaaaaaaaaaatagtagtattaaaggccgggccctgtggctcatgcctgtaatcccagcactttgggaggctgaggtaggtggatcacc

SEQ ID NO: 121068 - DNA, 213 bp, Homo sapiens
cagcaggtgcgtaacagtaatggagaaaagtcactgatacatgagtccaagatgtcatcacagtacccttataaggtactgcaggacatgttaaaaatagtgtggccaatctcaattacagtaaatgaatgctatcttattaatattatatgataatattaaatgatgttagtaacatttaatgtaatataaatagacaaaactgaaaatgtc

SEQ ID NO: 121069 - DNA, 309 bp, Homo sapiens
gatcctcttccccaactgggtaccgagcacaggaaatgccatcaaatctacagtttagcatggaagacaaacagatgtaaacttgtcatcttgacttatgatcatggtagaggtctgcatggaccactgtgagagatagagaggggagcaccacttcagccttcgagaattaggatgccttctcaaagcagctgaccttgggtacagtcttgaggtttagacgtttgtggggcaggggagggtatttaggaagtcccactaggcagagggaacggtgtatgaaagtttcatctgactacatatgagagt

SEQ ID NO: 121070 - DNA, 375 bp, Homo sapiens
ccctccttcaaaaccgtctcaaatacatcactgtgccataattctgctgctgtcaataagccagtggcagtgtttggcctgctgtggctgatggagtgatttagtaatcgtctattggcctccttctgtggcccacagcctgtgctaggggctccggctgtgtcagtgaatgaaacagtcccaaatacctgccctcctgaagctgacatccttgtgaaggttttcctaaaaattcttcactctgaaggtttgtggtgcacttcttcattttgcttatcactgaaggaggcagagaggaggctgttactatctcaagaactttgcaaaaggagtttggttttatgtttagaggcttcaagcatacattcactcatt

SEQ ID NO: 121071 - DNA, 346 bp, Homo sapiens
ggagaatgagaaggaccagctagagagatgcaggagaaaacctaagaggtattaactaagaagcacaagagtgttttttcaatgagcattaagtagttaactatgttgaaaactgctggggggaaagataactgagaagtagctacgtaatctggcaatatggagaactggtgcctttaacaaaagtagttttggtgggagtagtagaggcagaagccttactgaagtatgtacagaattagaagtagggaagaaaagaaactacaggccgggtgtggtggctcattttgggtggctcccagcactttgggaggccgaggcaggaagatcacctgaggtcaggagt

SEQ ID NO: 121072 - DNA, 818 bp, Homo sapiens
cgctcctcgtcaggaggagggagagcaacgggacttgctggttgggccctaacctccacaacccctccttctcgcctcgctctttcggcttttcccctcagccctgacgtacgaccgggagcgcgcccgcaattcacgctcagagaaagccgaagatgagaggtggccggggcaagagaggcgggaacaaagttgccggcactggcgtgctcgctcccgccagggccggcaggccgcaccggaagtggcatgatgtagaaaccgctcggcttccggcgagggtgggactccgtgtgaagaagggttaaagaaaggagaggattcgtgtgccgcccactgctgttgcttgagactctgcccgtggtggcgcgcctgtcgtgcttgttgcttgcgtccagcgcgcagtgccggttccggctctgcagacgccgcactgcctgcctgttgagcgaaaggtcacagtgagaacaagtgtttctggagactgcgagggaaataatgctgttggtggccttctggagtaggcagttaccccccgtgtaccttcagtcaagccctgggagtggaacagctgcgaaaggagagaaaacaccccgcaaaacagggtggagatggcgttggtttaacttgtctcacgtacgccaaagttcgaggccccattttttttttttttttttgagactgagtttcgctctcgttgcccaggctggagtgcaatggtgcgatctcggctcaccgcaacttccgcgaggccccttcttatcctaaaaaacacacttgggaatcacagctcaagcttcggtaacactatttacttt

SEQ ID NO: 121073 - DNA, 602 bp, Homo sapiens
tcactacaccatgcacacttcacatcactccaattaatctgaagaacagtgctacgagatggtattccatacccccattttataagtgaggaaactgaggctcagaaagattaagtactttccccagaatcatccaatttgttgctccaaataaaatccaggtaagagccaggaacagtggcatgcctgtagtcccagctattcaggaggctgaggcgggaaaatcatctgagcccaggagtttgaggctgcagtgagctatgataatgccactgcactccagcctgggccatagagcaagtcctgtctcaaaacaaaaagcaaacaaccaaaaaagcctgcaagtatgtctgactctgaattagaactctgataatgaggcttttttcatcaagtgcctaccttaacctaattaacacaacttaatgcagcaaacaaataaactattgcaatactagaattgggaggcaggccggttgtggtggctcacgcctataatctcaacactttgggaggccgaggagggaagatggcttgaggccaggagttggaaaccagcctgggcaacatggcaacatagtgaaactccacctctataaaaa

SEQ ID NO: 121074 - DNA, 346 bp, Homo sapiens
tgacttctctctttttcttataccctacatcagtccagcctttgcacttgaccttcagtatatatcctgaatctgaccacttcccattatctctattgctgtcgctccagtccaacaaagaattacttctcagcctcctaactgaaaagaggaggacttctagtcttctcttcttgcactctgtactgtcaggatatgcttggttatgctatggtaaccctcccaaatcttcgtgatttatcccaacaaagtgattaaagggatttcttgctaaagccacttgtctgcaggtcaacacctccaccctgtctctcctcactctttggacctaggctgtggtggcctg

SEQ ID NO: 121075 - DNA, 227 bp, Homo sapiens
ggattcctaccttggccagagtggaccagtgctaaggagggatagacaacactctgtccaggtttgtgaatgcacagctctgtttcttcagattttgtgtttgtgttgactgttattgggataaaagtcttctatccagagaattcattaattgccggatctttattgtaagacagttggtggatgtcacttgggcagccccagtgagccatacttacagttttcac

SEQ ID NO: 121076 - DNA, 558 bp, Homo sapiens
ccttcctctctacgacatttttagctacactcgccttctgtcacacctccaaaataccatgcttcctcctaatgctgggcggttctcctgcctcagtaactggaattacaggtgcataccaccacacctagctaattttgtatttttagtagagatggggtttaaccacgttggccaggctggtctcgaactcctggcctcaagtgatccacctgcttcagcctcccaaagtgctgggattacaggcatgagccaccgtgcctggccagcaacttgctttctaatgtagaaaaaaaaaaaaaagtcatctgaccaggtccagacttggacggggactatacaagggcatgaatacaaggatgcatcattcattaggggccaccaatgtgacagtctacccacatggagcaacaggccttctgaaactctagaacacaattctggtctttaagactacaaaatagctgaagcatgtaatctttctgcctgatttggctacttctactctggacacattcctgcttgagaatcttctataactctttttttctttttttt

SEQ ID NO: 121077 - DNA, 496 bp, Homo sapiens
acatgcattctggatgctccggcggcgtcactcactacggcatcggaatgaataggagttctcacttgtgtgttaagaatgtgcacttaggcctgttaaaaaattatgattacccccaaaatggtgggcttgtatgaccttttacatttttaaagtaaagccttccatctggttaaaaaataccttttataaaagcccctttacggtgtttgtgttccttagtaaatgctagatttgttccttagaaaatttgctcttgagcaagtctattttgacctgatgtaattgaatccaaagggagaaaaacattaaattaatgaaattttattgaaaagacatcttatttatatgtaatagtttggtgtcttaattattattattctcccaagttatattatagttttaaacttaattttcaaaaaaagacaactttcagtcacctaattacatgcaatgcagcttcttttcagaagtaataccttatttaaagtaattc

SEQ ID NO: 121078 - DNA, 360 bp, Homo sapiens
ctcttttcacctttctcttctcaaggtaaacttcctctgtgaaacctccgctgatgccctgcagcaaggttgaccacttcctgagtgttacttcctctcttggtgcatatgtctggttgcactaaccaggctgctgctagcccaaaggcacctttgtgcaaattagaaaaagacaaccatccccatcccttcttcaagatactttatagtacttccaactgttggcaaactgtcttaataaagatacaaatctttgatttctctaatgtgcatggtgccctacaagggttgtgcagtgcatagccgtgcagttgcatgtgatagatctatgttataattatttgtttaattgtctgtatt

SEQ ID NO: 121079 - DNA, 1565 bp, Homo sapiens
ggccaagctgatttcaaactcctgacctcaagtgatctgcctcctcagcctccaaagtgttgagattacaggtgtcagctaccgcgcccagccccatcagccccctttaatctcttttctgcactatctccttgcaaagcaggctgttaaacatctctctgacctccattggttaaataatactaatattttaagtcatttgattattcagaatcctttcgatacaaaatttaaaaaggaaactaatttaagttagccttaaaagtgaattgatttgataaccaaaagagcaatgggagaatggcctttggtcagctagtgtccttgtgcttctctctgctttaaccttgctgtgtgctggcttctcttatgacagcaatggctcccataggcatttacacacagcttgtggaaaaataagggtgtccttctttcattaccaaggagcaattgtgtgagtaattttgctttcaagccaatccatgaaacagagaggattaggatgacaagtgaattattaaataactttcagagaagttgttttttatacaatacactaaaaataatataaaaagtacctatttattgaaatctagaatcaactatttttaattttgttcacacttgttttaactcctggttttaaaagacgaatattccacataaatacgagatgttgactcacacaggctcccttccttttacaaagagtgtgatgggaaaatcccaggactgtacaggagaacatccctcaaaaactgggaaggagctgagagaccaaagaatgacttgggcaattccagcttgaggagtagatgagttaattaggattcaccaaacaggacattctcgggcagcatcaggagaactctagagatccacccaccacacgcctctaagctgcttttaagctcgattttgtggctctttggctgccgcatgtgatgagactcttttccttggtatgttcccagatacactctaggatgtttgggttctcagggacacctgctcctcagctgagcaccgtggccttggctcatttcccagcttttagggttcaagcagcgtacatacagccttaagtaaactggtaggagaaacatcaccctacaaaggaacatattatttttactacataggcaagcttgaaaaaagcatagagatgattctagctgcaagaaattgaaaatcagtttcgaatagtaaggacaaacgattatctgacagtctatgttattttcagacccatgtatattccctgaggggatgatgtctgtagtttgaaagattcacgatggaattctacttctggctatgggggacttacttttatcacaccaacactctcgttaaaaacatgggtaaatagtggatatttttcaaaatcatctatttgaaagtatctaagaaacatcaaagcaactggatttagagaagccaagattcaagatagaaagccaccatgtttgggtgagtctagcctttaagaccatctataccttgaagcgtttgccaattcgtaagtaacacaggctgcaagcccacccagaaagaagaggcta

SEQ ID NO: 121080 - DNA, 289 bp, Homo sapiens
ggttgcagatgctgactacagcaaagcaaatccctattgctgatatgattttgacatgatactacacaagttaccattactggaactggctacaggggaataagatatggatctagttaggaaaatgaagcaaaaggtagggccttcatctcacaaacaggaagccattcaatcattaaatctagggcagatactcagagatggactgtggccatgacaatgtgatgctgagtcacctggccatgcatggatcttcttcaatacctggtaagaacaggactggtcccag

SEQ ID NO: 121081 - DNA, 433 bp, Homo sapiens
atctgtgagaagtatgcgttgagatcctctgtctgaaagaaattgtgttcaaagtgttctattacactgttatttggagcatgccattggaaaacccacccccaccccccctcaaaaaaacagaacagtaaaccaaaatgtgggccatgaaattagcaacctgggactcaataatacacttgggaatattcttccacaccgtccagatttcatttgatgttgttcacattgcaagagtaaaacttatttagagctacagaagacaaaaccctgaagagttaagaacaaacgcaaggaaataatttttattgtttaaagcccggaatgactgtaactttcacacaaggtacgcatctatgtttttgggggaggtgatgtagttacagctgactaatatttttaaaataaataaataaatttggcctttaaaact

SEQ ID NO: 121082 - DNA, 373 bp, Homo sapiens
agcacgcggctcatctgcttgggtgcccggcttctcttagcttgtggcctgtgtgctcctcattttctggctacctcatgaatccattaaataatattgtctttcctcttttatccaatattgacagttaggtttcagggagaacatgagtcgggtatctagctgaccacactgccagaaatagaagtctcacctgtgtgcacaccaagctggagtacactggcgcaaccacaactcattgcagcctaggcctccccagctcaggagatcctcccacctcagcttcccgagtagctgggactataggtgcacgccaccatgccctggcaatttttggtatttttagtagagattgggattttgccatgttgcc

SEQ ID NO: 121083 - DNA, 808 bp, Homo sapiens
agcgtggtgaattccagcttcttcctgaccctgagcccacccccaaggtggccctcaacctttaagagtgggagagcaaaattgacggcttcgagcgcttcaccaagaagatggaccacagggcactcagctcaacttctcagccaatgagttgacatgcaagcagattatggtgacgggctttaagaaagagcatcagaaggtggccagctcttcagcctcagccaggtcttggagctggaccaggccatcacttcaccagagatgccttcaacaccgtcggtgagctctttgccaatcagcccagccaggaactggacccagtcatggacctgttagtgctgtctctgggacaccaggtcatcatcctggacatcatccacatacacaaggaagctcttaccaaagtcatggagagcaggcaacatgtggcagaagggaagacagagatgcagaggctgatgacatcagaatcacaggaacaggatttctttggacactgtggctgaaattcaccacttccatccaattccagtgagaaacatggactcacagatgcagcatttcttgcaacaagagatactattttttcaaaaggtcacccaggaattgatagtgttgaatgactagatactcgattgtgcactgtttccagttcaaggatgctttctacagcagaataataacactagcaaagagatagtgccaggtattggcggtagtacaaggatggctttgttctcaattgaaactcggctgaacatagaattgtgtaggaaacagttaatatggcgatagaatagaaaca

SEQ ID NO: 121084 - DNA, 686 bp, Homo sapiens
ggcagtgatgctgctgtcgatctaaggatcccggtgtttatcgatgccttctgacgggctttaagaaagagcatcagaaggtggccagctcttcagcctcagccaggtcttggagctggaccaggccatcacttcaccagagatgccttcaacaccgtcggtgagctctttgccaatcagcccagccaggaactggacccagtcatggacctgttagtgctgtctctgggacaccaggtcatcatcctggacatcatccacatacacaaggaagctcttaccaaagtcatggagagcaggcaacatgtggcagaagggaagacagagatgcagaggctgatgacatcagaatcacaggaacaggatttctttggacactgtggctgaaattcaccacttccatccaattccagtgagaaacatggactcacagatgcagcatttcttgcaacaagagatactattttttcaaaaggtcacccaggaattgatagtgttgaatgactagatactcgattgtgcactgtttccagttcaaggatgctttctacagcagaataataacactagcaaagagatagtgccaggtattggcggtagtacaaggatggctttgttctcaattgaaactcggctgaacatagaattgtgtaggaaacagttaatatggcgatagaatagaaaca

SEQ ID NO: 121085 - DNA, 630 bp, Homo sapiens
agggagcaatgcagatgagtatctaggttctggaagagcaaccccagcagagaggacggctgtgcaaaggccctgaggcaagcgcataccagatatggggctggagaggaggaatgaggaggagagctgtagaaagacagggcctcaggggggctaaggactactgtatggactctggcttgtactgcttggtgggggccgctgatgggttgtaagcaggagagagacaggtttccttgtcattctctgccaccccatcccatcattcttcctggtaatctcccttgatatcatttaataaatatggctcaaagccctctcagacttctggtgatgagttataaactcaaacaatcttaagaaaaccggcaagtcccacacctactgccccccaaaatcagtattagaccatcttccctcactccaaaaagcaaggagttgaatcttttttctcttaagagctgctgaccaagagaagaaatagaaaatgttaattaataagccaggcgctatggctcatgcctgtaatcccagcactttgggaggccaagacgggtggatcacttgaagtcaggagcttgagaccagcctggacaacatggtgaaaccccttttctactaaaaatacaa

SEQ ID NO: 121086 - DNA, 384 bp, Homo sapiens
tttctgtaaatgaagttttattggacacagctatacccattcattccaatattgtctatggctgctttaacactgccacagcaaagctgaatagatatgacagaaactctatggcctgtgaagtctaaaatactagctggaccattacagaaatagtttgtctacttctgatctgtatactgataactccaaaaatctatatcttcatcactgacctatcttctgagctctttatttacttatcaaccggacatccctagcctagaagtacttcagtcttatcacactcaaaactggattctaaggtaccagctgctgccattctctacctcataccctatgccctagggatgcccagggatgtggcatgcatgctgccattct

SEQ ID NO: 121087 - DNA, 354 bp, Homo sapiens
tttctgtaaatgaagttttattggacacagctatacccattcattccaatattgtctatggctgctttaacactgccacagcaaagctgaatagatatgacagaaactctatggcctgtgaagtctaaaatatacttctgatctgtatactgataactccaaaaatctatatcttcatcactgacctatcttctgagctctttatttacttatcaaccggacatccctagcctagaagtacttcagtcttatcacactcaaaactggattctaaggtaccagctgctgccattctctacctcataccctatgccctagggatgcccagggatgtggcatgcatgctgccattct

SEQ ID NO: 121088 - DNA, 778 bp, Homo sapiens
cgcgcgggcgcccccgccggaaggtcagttgcaaagcggtcggtcttgggcctgggaccagaagccccctcccgaccgcgctacggagcccggcgctcaggtcccgcaggccgcctcgatgggacctccggaggcttccgcttcttctcttccccctgtgctctcttaggcggctccacgggtcgcatctttcagtgcccagatagactgaagtgcggccaagcggagttcattcactattcagccagtacttgggggtcgccgtggccgggcgcccttctaggctccgcgcatcccgtgaagaaggacggagccctgttctcacggaggatacactttagtaggggagtgtttgcgtgataggcagggaaagggaaagggaaaggaaggcgttgtggctgccattgatgtgctgtgctgctcccagccttctgcttaaggcctggacagagttgggtgggtatcgccgtgaatggcctgtccacgccactgccttcatctcgctgaagatccaccagctggccgaatttccctggagtctcattccaggcgttggctgggggctgggaggctggcgccagttgagaagccgagcacccagccccacttaatgagaagttaattggatcctcgaggacccaaggtccccggtggcatatagatctccagccttgggcaggctctgctcagtccctggatgaagaagcctggaggttcctgagatatatcagcaccacccaggttgtgtttcaggctcaaagaagttagagaagaatgt

SEQ ID NO: 121089 - DNA, 424 bp, Homo sapiens
atggctgaagaggcctcaacgaacttaccatcatggcagaaagcgaagcagaagcaggcaccttcttcacaaggtggcaggagagagtgagtgccagcaggggaaatgccagatgcttataaaaccatcagatctcatgagagctcactcattattgtgagaacaacatagagaacactgcccccatggttcaattacctccacctagatcctcccacaacacctggggattatggggattacaattcaagatgagatttgggtggggcgcaaaacccaaacgtatcagcacccttgtcaaaggttatttgccaatatatgcatgagtttatttctgagctctctattctcttttattggtttatgtgtctctttttatgctaacacaatactgttgatttctatagctttgtaatatagtttg

SEQ ID NO: 121090 - DNA, 407 bp, Homo sapiens
aagtccaacccaccttcagggcattcgctctacttccttagataaagcctctgctggggttaagatgttctgtctccgctgcccccactctgcaggctttctcctcccgctggctggtgcagagaatgggggagccattaggagccacagacactgagctattctacatggaattctttttattgtttgatctatttcacatgtacaaagctttgaccttccagttctaagaattcctacttagaactggtaggttctaagaactcctacttagaactggtaggttctaagaacctccctggaccgattctggcacatgtctcttctgaactcacagagcttgtgccttaacaatttagagtcaactgactttgctgtcctctctaatgtgttaagtttcagtccgt

SEQ ID NO: 121091 - DNA, 316 bp, Homo sapiens
ggacgacgttttctcacacgtcgtgaatgcgatagacctgtactcctgctctggagggaaagggatgacgaaacccctgcttcttagggctccattcagcacaggagttcctgctgctttctagcacagttgccaatccacaaaagcacctttatggaggcattcaaactcttcatgtgggtgccaagaattcgataggctccttttcattgctttatttactatcttttcacaaactatgtgagtttttctctttctttaacaaaccaaacattcaaatactccttttttacatttcactttaactatgtgacat

SEQ ID NO: 121092 - DNA, 680 bp, Homo sapiens
atggtgtctcaccatgttgcccaggctggtctcaaactcctgagctcaagtgatccacctgcttcagcctcccaaagtgctgggattacaggcatgagctgtgggattacaggctgtacctggctgataatagtttgttaatactatataaaaaaaattttctgtaatggaaattgatttatttcccaatttttgtaggttttagataaactggaatatggaaacaaagtaaattttagcttaatgagtttcagctgtgttgtttgagtagcttgaaacagcttaattttaaattttattctgataacacagaaccaaggagaccatatatattcaatggtgtgtatgtgtgtgtaaataattttcaggtccaaattgtttaagcccttggaagtgtcaagagtctgacatggccgacctgcctggtaacatccttctttactacacagcaaaggtcagagtaaatttgtgaactgtccatctagttataactatgttgtgaactgcagttccttttctattccttttgtcatttcattgggtaattaaaaggaggggtttgaattgccatcaaaataatcatgaattttcaaaggaaggtgagaagcagtaaaaattaaggtatacctcctccacgagggtccaaatattatcattatgtcatccctgtggtactaatg

SEQ ID NO: 121093 - DNA, 1769 bp, Homo sapiens
cttttttaatttttatgtttttgtttttgtttttttgcatttcttcttttctcctcagttcattttcgattctttgtttttaaaataacaccattggcctggcgtggtggcgccacctgaaatcccagcattttgagagtttgagatgggtggatcacttgagcccaggagttcgagactagcttgggcaacatggtgaaaccctgtctctaccaaaaaaatacaaaaactagcaggacatggtggcatgtgcctgtagtcccagctacttgggaggctgaggtaggataatgacttgagcccgggaggtcaaggctgcagtgagccactgcactctagcctgggtgacaaggcaagaccctgtctcaaaaattaaattaattaaataacaccataatttatgggtgtgtatttatttatagctttagccacatataaactcttaaaatgttatagtgtattttattacttctaagtaacctatgattttatttttacttcatcttaactcacttattgaagaggttaatattttaggtagttgaaatgttttcctgttttaattgtcagtattaatttctagttataaatttggactaaagaatgtgacctgagcaatttcttcattttggatattactgaagttttatttgtgaccaatatttgaaaccatttcatggttcctgaacaagaaagcatggtatgtgcttcaaaatacaacattcaacttatagctgtattcagtgttgttaattgtattttgaaagtaaaaactaaccattggtttttgtctacctgatatatatgtgcctgatagtatcttgttgtcccctgctatgttttggtttctgtcaatgtatcatattttaaatcatagttattttataaaatgtgattgtgagttattatttaaaccatgccttctttagaggttggaccttttatcagtgtgaataactctttttgtcccttggatatcaattaaattgaattctaatttttttttttaaccttacctcaggtgctgtttggctcctgcagccaaatacactgatgatttaattaaaatgtttatctcccccaaattttaagaactttatttgggttatttggaataatgtataaaatatctatatagattattatataattcagggggaagcaaattatcagaacaatttcatgttatacaaataacatcagaaaaatatcttaaattatatggcatattctattgattcatccacaaatttataagtccttaccacctttcattatattggtactaggcattatagtagtgctaggcactatagtaatgctggggtataaacaagaataaaacaaaataagttccttatttcaggtaacttacagtataggtcagtggttcttagcttgctttttaattatgaattcctttgaaagtctagtaaaataatccaacaccattattccccattgcacatacccccagatgttttagacatattttcaattgctccatggaccttaagaaaacttggttggtgtgcagtttggtgtattatgggtaagactggacctggtgttagaaaatctgcatttgaggctttgttctgacagtgtctagtgtaaacatgggcagaccacttaaacctctctttagtcttctctgtagaatgatgataataccatctaattagcaggattgttgttttattcagtgagacagcatatgtaaataacttagtaaaataaaaagcaacgtgtttataatggtaaaaaaa

SEQ ID NO: 121094 - DNA, 333 bp, Homo sapiens
tactactactaaattcgcggccgcgtcgacagggaggtgccgggaaataaaggggctgggagtcagagggatctgttgcctcaggaggcaaaggagcctaaggagagagctcacggaacctgtcacatggaaatgttgaaaaccgggatgtggcaacgagagcccaccctcctggtaacagggcttgcaccagcagctggagagtcaatgtcaagggcagagggagatacagtctccattactggagagctcccatttgagggtgacacgggcctcagctcaagaagggatccaggtcacgtcgacgcggccgcgaatttagtagtagtaggc

SEQ ID NO: 121095 - DNA, 435 bp, Homo sapiens
tttttagacaagtatgttttttccctcattgagaaggaatgtgtgagttactcagtgtaaaaatagacattctcctccatttcataacttgagcactagaattctaaagaccaaaaattaaagcactcaaaaagaattcctggctgggtgcggttggctcatgcctgtaatcctagcactttgggaggccgaggcaggcagattgcctgaactcaggagttcaagaccagcctggacaacacggcgaaaccccgtctctactaaaattcaaaaaattagccaggcatggcaacgtgtacctgtaatcccagctactagggaggctgaggcaggaaaattgcttgaaccgctcagacagagcaagactccgtctttaaaataaataaataaataaataaataaataaataaataaataaataaataaaaataaaaa

SEQ ID NO: 121096 - DNA, 256 bp, Homo sapiens
gcaccatttgacactgtagtcccaaaatatactaaatattaccctcatcatataaaagcattgcttccatttatgttgctgtacacccttgaaatgaaaatgtcatctcttggacggggaacttgcatgagaattcggacatctcaggtctaatcctgcttgtgcagctgatgtatacgtgatcttgatttctgtttatgcaggtggtctaaagctttctgctcttttcaggtccacgaagactccttctcactta

SEQ ID NO: 121097 - DNA, 649 bp, Homo sapiens
gtgagactctgtctcataattaattaattaattaattaattcaggctgtgggatactgctcagcaacttttaaaaaggggcaaactttaaacgttttagaaataaaacaccctgaatgactcttgagaattactctgagtgaaaaaagccaatcctaaaatgttacctattgtatgattctatttatataacattcttgaaatgacaaaattatagatatgaagcacagattggttcttcatattgtcagggcctgtggatggtgtggggctgaaagtagatgtggctataaaaggtcaacatgagggatcctcagggtgatggaaatgtgtatgttgactaacagtgccagtattctggttgtaatattgtactgtagttttgcaagatgttatcattggagggaactgagtaaaggatacatgagctctttgtattatttattatgtgaatctataattatctcagaatgaaaagtttatacatgagctgtttattatttcttattatgtgaatctataattatctcagaatgaaaagtttaaaaactacaatttggcagcttttcaaaaagttaaacatagatcctgtgacctagcaattctacttctagatatatatcctagaaaactgaaaacatttgtctgtg

SEQ ID NO: 121098 - DNA, 151 bp, Homo sapiens
tttgtttaaattcaaaatgtgatggttaaaaccattttgcttttaaagaggtgtgtgatttaaacaatcagtttcaagttgtataaataagtgaaaatgagcccaaatacttttttagtcattatcttttacagttaaaatctatatataa

SEQ ID NO: 121099 - DNA, 400 bp, Homo sapiens
cggtgagctccgggggcacgtgggtcctccctgcgccgggctgagcggcttcctggggcactgcgggttgttgcaggtatcccttctcccgttttctctggcctccgcatggcctttggtaaggctgtgcacaagctgggggctctatggtatcggtcaccacctaattgcagagcctggcttggtggtcctggagaggaggaggaaataaggctcccagtgggaggctcatggtaccagagtcctgtccactgactccagtgtcctgtccactgactccagttctctctgcacttggccactgtcctgccctctgggacaccctcaatgtgaggaggcagctggtgggtcttaggtgggctgaggagaaaagcagtcactgcagtacccgcacagaggg

SEQ ID NO: 121100 - DNA, 301 bp, Homo sapiens
cagtggtgcgatctcagctcactgcagcctccgcctcctgggttcaagcagttctcctgcctcagcccccagagtagctggcactacaggcgcctgcgaccacagccagctaatttttgtatttttagtagagatagggttcaccatgttggccaggatggtctcgatctcttgacctcgtgatccacctgccttggcctcccaaagtgctgggattacaggtgtgagccactgcgcctggcctaaggagataattatttaccacattgtagtgaattcagtcaggcagctaatttctctc

SEQ ID NO: 121101 - DNA, 271 bp, Homo sapiens
gtgatggggaagctgagaggccccagggcaggtgggtggtgggcctgtagggtgaggtgttactttcacactcaagtcagaacaggtgtgctggggttttgaccttctgcagcaaaatttccctcctcagaaacttagtatggtgttcggtttcaggattaatagaacaaaatgccagctgcacagcatgtgttcctgtaatatttttcattatatggctttgattatccttttgtgaatctctcacaactttaagttgttagttcttaga

SEQ ID NO: 121102 - DNA, 362 bp, Homo sapiens
ggctcatctcagacctatggggcggggagagggctggagattgaatcagtcaccaatggccaataatttaatcaatcatgcctaggtaattaaacctccataagtcccttctaccctacagggttctgtaaacacgtggaggtcccgggagagtgaagcactcagggcatggaaactctgggggtaccctcctccacccccgctcaatacccttccctgggcatctcttccatctggctgttcctgaattgcatcctttataataagccagtaaatgtaagtaaagtattttcccgagttctgtgagctattccagtaaattatggaaactgaggagggggtcatgagaacacccgattttt

SEQ ID NO: 121103 - DNA, 475 bp, Homo sapiens
cacatttcctttccaaatttcttcttgcccatgcaccatttcctcttttatgattgtaacaaatagccctcatcctaattggtgaattggaagaaatgactctgagaataattaactctttgttaattgtaaatttggaaaggcatggaaagagacctttttcagcctatgcaggaatttaatctagcacttataagtacaaaatggctttcgtttagtgtgtattttaaaagcgatgtccaaactggtgagtagatgccaatttcttaatattcaaaaaatataatattaaaagcctttctccattatcaatatagtggaaattctttgcaatataatccccaagatttctgactttctacatactttattatatttatttatttatttttgagacagaggttcactctgtcgcccaggctggagtgcagtggtgtgatctctgctcactgcaagctctgcctcctgggttcaa

SEQ ID NO: 121104 - DNA, 321 bp, Homo sapiens
cacagagcggtatgctttgtctttctttcttgtgcacttttatagtttatagactgatggttttctgttcatttgacttaaccaaatgtgccaggccctatcccaaagattagggctataaggctaaatagggcaataatagacttcgtgtcatattgttgaggatgtaaaggggatgacctcaccctgggggacttcagggagaaaaaagggggaacattatgcacagacttggagacatcaaatgcaggagacacacaaggagtccaaaggctaaagtatgacccaggtgctgatggggaccagatcaaggtgccatga

SEQ ID NO: 121105 - DNA, 295 bp, Homo sapiens
tttctctatacttgtccgagctggaaagtggcctgggcactctcaagtcgaccacgtgtcctgcatcccgggggcctagattagcttttcaatttctcaccagaataacagcagtttacttggataaacaatttaaagtcagagctatcaaaaggagatcataaatcatttacaggtttacagaatactaacagagaaactagcatctaagagttaaaggaagaaattggaatataggttttttatgtcttcctagcattgtcatggatttgctattatccagacatatgacttt

SEQ ID NO: 121106 - DNA, 180 bp, Homo sapiens
aatgctggcttagttacattaaagagaggaaggctgggatgaggcccccctctgagtttctaaccagtaactggagtttgagtactgaatcagagtaactgggtcttggacttcaaaggccgcagtggttttcattcattgccagctcagttcttgcaaaggtgagaccatatatataga

SEQ ID NO: 121107 - DNA, 359 bp, Homo sapiens
ctatttcagggtggcagggacccagttgtgaggcttaattatcagagacaaagttggctcaatttctgtgatagaccacagagatgcagtagcaatcggagggtactgacacttagaaatctgtggaggcttattactggcttcctatgaataaaatagatgggtggccaaaaatgacatgacttgattaatataatccagaaatcactatctctgatggaaaaaaatgcaacttcacagaggtgctggtataaatccataggcagaacccatacctaagccagtttacagatcctgagccccttgagtgaggagagagtcgaggaactattgggatagtatcctgaaacttgacctca

SEQ ID NO: 121108 - DNA, 788 bp, Homo sapiens
agagtgctgggattatagtcgtgagtcactgtgctcatccctattactatcttaataattcatgttagaaaggagatattaatggctgctttgcaaattatttatgaaatgttatctttttattaatttgtttacttacaaactactaaacaaaaagcactttttcccatcagtatttagagtcataatctatcttgctaaatgtcagacgtatatatttaaatatcacatcctccgtttcatttactatgtgactaataaaaacttaatagacactaattgttgtcaaatttgccaagaaaagactctcacaaatcttgttagtttttaacattctgttcattttggagcatataatgtatccccagcagggactgtgcttagaagcaccagggacttcttggaagaaaatatagttggcagatcttgggtcaaccagaatcatcccttgcacagattgattctggacatactgtaggtaatagccatatttttatactgtcagaatttatgtcgctttgtgatccaattgttctagacattttgtctatcaaattatggccatctacagagaggaatacagtaacagcttgatttctcacgttagaccaatagcacaaaaaagctcattccaacttttccatttttttctgtgaaggtttgggaaatttgctggtaaacctcatctagtgaccataatggtggatatattagcctatcaggaaaaatagttttattattttcttaatttagagctctcctctctcctcctgcccacacacctccca

SEQ ID NO: 121109 - DNA, 341 bp, Homo sapiens
cctgggaggcggaggttgcagtgagcctagatcacgccatggcactccagcctgggtgacaagagcgaaacttcgtctaaaaaaaaaattagccaagagtggtggtgcacacctgcagtcccacctgctcagaaggctgagatgggaggatcacctggccccaggaggtcgtggctgcagtgagccaccactccagcctgggtgacagagtgagacctgtcccaataaaagaaaaaaaaaagcccaacagtatatgctcccttatatggaagtacaaatctattaagtattcttgcaaaaacaaacaaaccaaatctgttgtctctgactttaattaccag

SEQ ID NO: 121110 - DNA, 131 bp, Homo sapiens
agaggagatttgaatgagtcttgaatgatgacaaatgatcagttcttttagtgggtacatgtcagttcagtataaacatttgagttatggacacactgggttcccaaactgtaagttcaggatctaagact

SEQ ID NO: 121111 - DNA, 474 bp, Homo sapiens
tcctgcctcggcctcccaaagtgctgggattacaggcgtgagccactgcgcccagcccctgtagagaattcttacttccaagtgagaagaccttggttcttgggggagcagaatatctgacctgcattttcaggggcagaatgcaagccactctggcactgactctcagagtattgtggtactggactctccctttcaatactctggctccgctaatgcctgtggcagttgggacacaggttgcccgtgccagagttgctctcttcctcctctaatatttctcactttgtcatcctggattctgaatcccagagatcaagactagctgtagtccagcagaggagcaataaatcattgctcccacatcctttcctccaggtttcctgccctttaattaccacatagccactgctgaggctgcatctctgtgctgtgtgtcctggggacaaaagcccttgttgatgggatgtgtgc

SEQ ID NO: 121112 - DNA, 497 bp, Homo sapiens
catttctgtaccttaggaggaagaaaggtgatcaaaggacgggatcaagaaaatagctagacaactggacattatacaaataaaaactttttgtgcttcaaaggacacagaaataaagtgaaatgacagctcacagaatgggaggaaagatttacaaaccagtatctaacagactctagatccacaatatataaagaactctcatagctcaataatacaaagacaaataacccaactgaaaaatgggcaagggatgggaacagacagttctccaaagaagatatctaaatgaccaataaacacctgaaaagatgctcaacatcatcagtcatcagggaaatgcaaattaaaaccacaaacagatgccacttctcggaatgaaagcactggaaattaacatgtgttggtgagaatgtggacaaactgaactctcctgccctgcttatacgctgctaagtgggacagtgaaatggtacagccactgtgggaaaggaaag

SEQ ID NO: 121113 - DNA, 467 bp, Homo sapiens
gaaatgaatttaagggcatctaactcaacagaaagggaggcgggcctagtgaggttaagctggtaggtcgttagagatggagctggcctccatttatccatttgtaactagaccttcaaagaccatctaggagcattagtataaaaggtaaaaatgatcttaggattctgttgttatttttgtgattaaaaaaaaaaatccttcagagtttctttagggaaaagagggatcaagcttagtaaccagggtcttgtggtcatttttaaatgttatcttttacaaatactcaaatacaaatttctgccccaagtgggagcagaacagcacaagaaagagagaccactcaaaatccttctgcatctgccccagcccttaatctttcctaaggaaatgttgagcctagagggagctcttaagggtaccttttcaacccagtggcctgagattccaccataaagcatgtgggg

SEQ ID NO: 121114 - DNA, 293 bp, Homo sapiens
tcgtagagatgagatctcactgtgttgccatggctggtcttaaattcctgggtgcaagcaatttgtctaccttagcctcccaaagtgctgggattacaggcacaagttatcacgccctgcccatttcttatattttacattttttgtatgttaagtattttggtggtgactgcctgttgtcctagacacccaggaagctgagctgggactacagccatgtaccaccactactcttagataatttttatgttgccagcgctggtcttgaactcttggctcaagccatcctccca

SEQ ID NO: 121115 - DNA, 610 bp, Homo sapiens
cctcccttctcccaaagtagactgtatgcaccacaggatactggatacctttttagtttatgtaactctacaattacccatcttaaaatatatggccccatccaacatatccaacattatttttcacaattcctcagcataaaacctcagaaatgcctctttcatgctctgtggtattccctgcctctaagcatttttcaagatctccccattgtctggaacattctccatcctttccatctgaatcctgaaagtgcctcaagattcagaaactctacctcctctgtcctccagttattccagccaactctgctcactctctaccctaaactcctacagaatttagaatgcatatcattatgcatgtggcaattaattatttttgttgtttcatttaagttttaccttcccaattacacttgagcagaggatctagcactgtatacggctgattaaataagtgcctgataaatgtttaaaggaataaatgaaagataaaccctttttaaaaaaaagcaggagcctcatcttttacttacagtacttcatttggaacctccctcctgtttgccaagcaagtaacaggcactcaataaacatttcttgacac

SEQ ID NO: 121116 - DNA, 247 bp, Homo sapiens
gtgaacaagacagccaggctctgcatgcatcagatgtacatcaagttagaaaacaagcaaataaaatgatacatagatatacgtaagaaattatggaaagtactgtgaaagcagaagcttgcaatagagaatatggacaggggggtttgaatgggaagacctaatttaaatcatatgatcagagaaggtctctctaaggaggtaacatttataatgaatcctgaacaataaaaaggaaatctgcaat

SEQ ID NO: 121117 - DNA, 329 bp, Homo sapiens
  misc_feature (304)..(304): n is a, c, g, or t
ccgttttagcaccgtggtacagccattctcatccaaacccctgaagccgttatagcaccgtggtatgccacacacacaaaccatacatgcatacgcacaaataccataccatcccactcacactatacatgtacacatgcacacagacacaccataccacaaacacacgcacaccaccacatacagatacataccatcccacttacaccatacatgtacatacataccccacacatgcacacattcacacagcatcacagacacaccacatacagctgtgcacacactgtaccacggtgctatnacgccttataccacggtgctaaacg

SEQ ID NO: 121118 - DNA, 812 bp, Homo sapiens
  misc_feature (787)..(787): n is a, c, g, or t
cacattccacaccatgcacacacacccaccacaccacacatgtacttacgcatgtaccacaccacatcacacgtgcgcactccgcaccatacatgtacatacacaggtacatcatgcactcacataccacacatccacatacacacatgtgccacaccacactaaactcacaccatacatgcacatatccacatacacacaggcacacaccacacagaacatgcacacaccatagaggcacccacacacaaccaatcacgtatgcacacactcgcaccatatatatgcacatacatagattcatacatcacacatcacagtacaccaccccacacaggcacttatgcaccatatgtgcacatacactcacaccacacatgcacaccaaacatcacatacacactcgcaccatatgtgcattgcgcacatacacaccacacattacactacacacaccacaccacatacgcacacatgtccactcatgcgcagacaccatacagatacaggtgcacacatataccacacacacattataccacgtactatgccacacacacaaaccatacatgcatacgcacaaataccataccatcccactcacactatacatgtacacatgcacacagacacaccataccacaaacacacgcacaccaccacatacagatacataccatcccacttacaccatacatgtacatacataccccacacatgcacacattcacacagcatcacagacacaccacatacagctgtgcacacactgtaccacggtgctatnacgccttataccacggtgctaaacg

SEQ ID NO: 121119 - DNA, 153 bp, Homo sapiens
ttagaaaaatattccaatatgtaacagtatatatactcagaaatgcatatgtctgatttaaaatgatttattctttagttttaagcctatgtatatattttaaaaataatttcttattttaggttcgggggtacatgtacagatttgttacat

SEQ ID NO: 121120 - DNA, 875 bp, Homo sapiens
catggtggctcaaacctgtaattccagcactttgggaggccgaggagggtggatcactggaggtcaggagttcgagaccagcctggccaacatagtgaaaccctgtctctactaaaaatacaaaattagctaggtgtggtggtgcacgcctgtaatcccagctagttgggaggctgaggcaggagaatccctcgaacctgggaggcagaggttgcagtgagctgagatcatgccattgcactccagcctgggcaaaaaagagcgaaactctgtctaaaaacaacaacaacagcaacaaaaaggaaccatgaactatttattgtcttcccttcctaccatctttgtttcctatgatcttgggctgtccaccatacccaagaacttgcttcatctcactagtggagaccacagaatgaggatagtgaccttgggtattgggtcatttcacttgaacagaaattttatggacattgtaacaagggaatacattttagaaaggttcacttcacggaattttgagcaaagaaggcaatttacttttatcagtgattcttggtgaagagaatgaaaccatctccatgaagagcggagaacgattttgcagaattcacagtcacaagcattttcacacgggttttcaccctggtcaaaggttccttctcattatggctgtttataatatcacaaatgacattttattagcctataacacagcttagccttataagattacattacatgaaaacaccaagtgttccttacagatttgccacgtgtgatggcacatactttatcagggaaactgatttttaaatttgacccttaaaacttgtcaacacgtctttttcttcaagctctagtgttccttaagaaaa

SEQ ID NO: 121121 - DNA, 433 bp, Homo sapiens
ctgtgggacaactacaaaggctgtaacatacatgtaatgggaatactggtggttttggggaccagttggaggtggccaggtgggtgctatctgatggttttactgcctttgccacatacaactgtttcctcatgttgatgccattttcataagttggagttctgcgtgtggggagacacatgagccattgccatctcacttagactcttcctaattcacacaaacttaaactctagtggtgtttcctgagcttaagagaaaatgaagaaagcatttcacatacctgttttggggtcctccccatttttcctaactctgcacagaatttagaagcagggagttctttctatatttactaacataacacacatccgtaccccgcacatcctatggcccgacatccgtactgcccggatcctctaatcacccgcac

SEQ ID NO: 121122 - DNA, 297 bp, Homo sapiens
acaaaggtagagaatctgtctgatggcggaagcaaatgaatgcccatcacatgcactttcctccaacagagcaactcggatgctgtgaaacaatgctaagtcagtctcagtgtctgttgcagtaatattgtacatactgtaggtcttaatcataggaaattacatgcccattgccctgtgcatggaccggagcgcacttatggggggccggtagtcctcctttcagacatcttttttttctctgccccaacaagtggcctttccatagaagactgcccagagaaccctatggcaacc

SEQ ID NO: 121123 - DNA, 446 bp, Homo sapiens
aagtaggtacctaacaggcactcaataaataacttagactaaatgtaattttttaaaaagactcatctgctaaaacagtgctttttatcctttggtgtgtcatgggtgcctttaaaactgatcaaatgcacatgctgctcatctgcatacccacctgaactccacttactagggtggctttccacccaagttgagaaactgtgttccaaacatttaaacttggagatgtctcctcctagctttactctcaggacctggatcagcccccacatttcatccctggactctgagagcaggtttcaaatcagccttcctgccacttcttcaaattattatctgagtcctctttctaggatactaaacgaatcatatttcttcactacttatacacctgaatgagacaaaccctctcagacagaggtaaggcctgctatacgtggcttcct

SEQ ID NO: 121124 - DNA, 413 bp, Homo sapiens
ggcagcgagggtccttgggagtcactcagaggcatgtggaagattcacgcgggttaaagctgagctgattatggaatgaaaactcactgtgtcctctctcctctctcctggtctgcagcattacttaggaataatgtggcctcaacttccttctctttctttattatttttttcttttttgagatggagtttcgctcttgttgcccaggctggagtgcaatggcacgatctcggctcaccgcaacctccgcctcctgggtttaagcaattctcctgcctcagcctcccgagtagctgggattacaggcatgtgccaccacgcctggctaattttgtatttttagtagagatggggtttctccatgttggtcaggctggtctcgaactcccgacctcaggtgatccacccacct

SEQ ID NO: 121125 - DNA, 236 bp, Homo sapiens
aaatgcctacttatgagttaaggtccagatcaaacaaatgccatctctcccatgaggcctttccctacttcccgagggctcgtcacccttgcctttgtgttctctggcccatcactttgctttcgaagcattaagtagtaataaaacgtatttctgaccagctgggcaatatagcgagacccccatatctacaaaaaattttaaacattaggccaggtgtggtggctcacgcctgt

SEQ ID NO: 121126 - DNA, 229 bp, Homo sapiens
ggacatttgcaaaagcagaactgactggtggaaagtgtgggaatgaactgctggaaatctggtcctcatggaccatgtgtgtttgatggatatgagacaaatttggagagaagttttgcaaatattttctttcattggacattctactctctgattccctgggttcgactactctagggacctcatgtaagtggattccagagtgaatatgagaagagactgctgtttg

SEQ ID NO: 121127 - DNA, 252 bp, Homo sapiens
gtttctcctgtgctgtcactcaacaatcaacacagaatacttctgtgacctctggtcaccaaaatttgtgtggggatttttccccaccaacaatcaatcagttcttttctgcaatggatagtagctgggtgttctctaattcaattctcacactacctggagagcctcggatcccacgaggactgagtcccatgagactgagccccgcttaggatgctgattgcgagccccaggtggtttttactggctata

SEQ ID NO: 121128 - DNA, 782 bp, Homo sapiens
tacattggagtagtttttaaagcaatctgtggaaactttgctaaggagattgtattgtcatatgctctgcagtttagcctgcatcttttgccatcgtttatggcaaacagagttaacatatttttctgtgaagagccagatagtaaacatgcaaggctttgtaagccatacagtctctactctgtctttgtagtgtggaagcgcttaatacataagccaggtgttctcaaacaggggccatttcgtttctcatacctacaccccagtaggcatttggcaatgtccagagtcatttttggttttcagtatgaagggtgggtgctgctggcgtctggtgagcagaggccagggatcctgctaagcgtcctacaatgcatagtacaactgcccccaccccccaaaaaaagtctcatccagaatgtcagtagttctgaggttgagaaattctacctataagcaaatggacattgttgtgttccaataaaactttatttacaaaaaataatcagaaggccacatttggcctgtgagctatagtttgcttatctctattttaaatagctttttgctatatgataatatagttttctgtatttgttcctgaattgtctcattcaccccaaatatttttccaaattttcttctattttatgcctttaaacctttactaaatacaaataatacacagaaacaatagcccctgtgtaactaccacctaataattaagcatgttgttttattgttttgattaaaaatttataaaagaaataaatcatttcaga

SEQ ID NO: 121129 - DNA, 246 bp, Homo sapiens
tggttagggaaggtttctctgagaaggtgacatgtaagtaaaacctgaaggaagggaaagaatgagttatgggtatttgggagaagagccttcatgcagcgggaatagcaagtgcaaaaacctggagatgggcttatgcttccctatgttcaggaaaagccagtgtgactggaggagagtgaatcagcagggggaggagatgaagtcaaagaagttggcaggagaagatcttgttataggaccctg

SEQ ID NO: 121130 - DNA, 451 bp, Homo sapiens
agagacagaacagattagtggttgccaagggctgggagtggggagaaatggggagtttaggtacagagtttccttttggtgggacgaaaatgtgcagaaacaagatagtggtgatggttgcacaatactgtgaatgtactaaatgctattgaattgtacactttaaaatggatgaaatggtaaattttgtgttatgtgtggtgatacaatcaaaaagtactgtaagatcactggaaaatattttcggacaacttggaaatacttagtatatatcttctgtacttttatgcataccaccctttagtacatataaaaacttttttttaaacaagtttgagatcacattatgaatacttctttttcagcctttttgttttccattattatagcttagccatctttccacttaactaaaaaaattgacctcatctttctttagcagttatgagta

SEQ ID NO: 121131 - DNA, 674 bp, Homo sapiens
gagaacaaaagatattccttctcatcaaatataagttgttacaattttcggttctttggctcttacaaatgtgcagtaatttttaaaaactaaagtaggatgagctttttttggtctctttgggagtcttattttttttcattgctggataagtgaggagtataattttaatacgttaaattttaattgttacatcatattggatgtgattttttgtggcagagctcccaaatcttgaaaataaatttgaattataaccatcattaccatttttctattgttacagaaaagtaataaacgttgataatccctaaatgtaattggagtgaattctttatctaatttgttcttgaaagctgatggatgaagtatcttcttttgtgctctccaaagagctctttaagcttaacactttctttccctgtgtgtatttttccccctttggaacatcaggagaagtgaattgtcaatatgtagaaaaagtgacccagtaaatgagtaattcaatttaatttcagtaaaaatccatcattattatgaagattcaatacatgataactatttttaaatgaactatatctggccccttaaagagaagtggccaccagagagaatagaaatgaatttcagatgaagcattcttgcattatctattcaaatatccgtctcttcca

SEQ ID NO: 121132 - DNA, 450 bp, Homo sapiens
ctctctttctccaccgcacgagccatttcaaaggcaagaataggcccctcctgaccccgctcaggcaggcctcagggcaagtgggagtcactggaagactcaattcctctctctgcgtttccacccgaggcaggtccagtcaccagagagagaagcagccacctcctttctcacggcagctggcaaagcaccgggtggaggacagagccggtcggcccaactgtagcttcggggctgcccttggctggtctctgggcagagcccggtgctgagggcttgcagtgggaaaggcacagcttgaggaatgggcatcagattcccacctgcggccccggaggggaacgggtcaaatacccaggcggccacacagacgtgcgggccaggaagggtcaggccccacagtccgcagggagttgcaggaagggagtggcgtggattccacaggcccca

SEQ ID NO: 121133 - DNA, 191 bp, Homo sapiens
tctgaaaatatgtggatatgcatgtgaatgactgtatgaatagggaaaaatattctgttgtgtactaaaaaatagataaatctttttacatgagtcagtatcctacaatttgacatttattttggcaataaagtatcaattaggatataaggaagagccatgtaaaaaagttaataattacatacactcgt

SEQ ID NO: 121134 - DNA, 364 bp, Homo sapiens
cgccgcgctgcttctgctgctgctgttgctgttgctgctgctgctgctgggattgcagccgccgccgccgccgctcgccctgcctcctcccccgccgccgcgcctcctccctcactcgccggcgcgctcgcctcctcgctagatggtgtgcgagccgcccgagaattagacacactccggacgcggccaaaagcaaccgagaggaggtgtagtgtggtgccagggggagggaggggagggagggagggaaagcgaagaggaggaggggaggcaaaaacaccgaaaaacaaaaagagagaaacaacacccaacaactggggtggggggaagaaagaaagaaaagaaacccacccacccaccaaaa

SEQ ID NO: 121135 - DNA, 468 bp, Homo sapiens
tccactcacaattctcttccatctctgcctttgtcccccacctacactgtcattcccaggacccacaaaacaccagcatctcttaagacacacacacaccaatcagggaagctatttcatcctccactgggatgcacgatgcagacccaggccacgaacctggtcattgcctgacattgtgagggagtggagagccctgctttatgccgcacggtggcagagaactggaatattgcacgccgggaaagtccatgtgttctgtaattatgcctcatgacattcctttgcagttaatgagtagctgccggtttccagtcacaagggtggagcataggagtggagaggtggatgtataaagaactgggatgccagaagaggaaagagcatctccctcccctaagctatagctatagctaatttttgtatttttagtagaaacagggtttcaccatgttggccaggctggtc

SEQ ID NO: 121136 - DNA, 693 bp, Homo sapiens
ctggcaccagaagagagaaatgtgtgtaagacagagggaacgccgagtgttaagcccttgcggtaggaaagggcagagtgttctgcagcgcggagaagactggtctgactgaggcacaacgaacaagagggagagtggaagaggggaaggcagaggtgaattcggggcagagtgcgcaggcctcatggggcatgggagagcctggcctttgttcgaccgaaatggtaagatacccaggggctctgggcagggaagtgacactgatacaggagtgctgggaagggaagagcgtggtccctttaaatgacacagaagcagggaagggaagtgctggggagagaaaggcgggtccctggctaggactctacccccacggacctaggtgaggacaagcactcctgccttcccccaaatgttgcatttcccaagaccacgctggcccaccacaccagcatcctgggcctataaaaacctgagaccctagtgggcagacagaagtggctggatggcaagaggaacacattggtggaaaaagacacaagcggctggtcatggagagcaggccggcagaagagcatcccgacaggcaccggcaagccagcaggccatcaaccaccgggacgaggcggagtttggccagggccgctgagcggcccaactccaagggaaatctatctcccttctggctccccc

SEQ ID NO: 121137 - DNA, 548 bp, Homo sapiens
tcacagctactcaggaggctgaggcaggagaaccacttgaacctgggagatggaggttgtggtgagctgcgattgtgccattacactacagctgcactccagcctgggcgacagagtcaggctctatcttaaaaaaaaagaaaaaagaaaagcagaatgttctacacggatgtccctgcctccttggtagctccctacctccttacccaggaaggaggaaggtggctgctgagtggcccagagcaggaagctgggcactgaccttgactggagcctggaaggagagaaggaagaggtggggaggcctcacagagcaagctgcgctatgagattgtgaatttttgaggtttggcgagatgccctgcacggcatgatcaggaaccttttatgtgctgtgtgactttaacccagggcttttacctctctgtgtttcattgtccttgtctgtccatcaacagggggttgtggggagggataaaaacaacacctccccagaggtttcagtgagctgagatcacaccattgcactccagcctgcacaacacagt

SEQ ID NO: 121138 - DNA, 729 bp, Homo sapiens
attgtcagaaagatatgttgaaaattcccatgtgtagaaaacaaacaacgcactgctgaataagccatctaccatagaaggcataagggaaataggaagatatttcgaactgaagaaaaaaatatgtcaaatgttttgagatgcagctaaagcaatgcttcaagggaaaacattagctttaactggtagtattaaaagaagaaaggactaaagttaattctctaagttcacacactacacagctggataaagaagagcatattaaattcaaagtaaatgaagaaggtgatagcaaacattagagtagaaatcaatgaaacaaaaaacaaactaatgaaaatgcatgaaaacaaaaattggcttctttgaaggattgagaaaaatggctaatctctagctagattcctcaagtaaaaagaaagggtaaacaaattgcctgcatcagaaaaaaagagggactatcaacaaagattgtggagacgtaaaaagaataatgatggattattatgaacaattctataccaatgaatttgacaatttaaacaaaataaaaaaatacttccatatataaactacctaataaacacaaaaagaaagtataaaggctgaatattcatattaattaaggaaatttaacttttaattaaaaatattcaagcagggtgggcgcagtggctcacacttgtaatcccagtactttgggaggccaaggcaggtggatcacttgag

SEQ ID NO: 121139 - DNA, 287 bp, Homo sapiens
acaatagcagaccggctcatgtgtcagtcatcccctcatctgtcattgtgtttaagaaataacaaagtgatttcattaactctgactaaatcaaaataatatttaagctaaagaacctgtcttggctgggtgcggtggctcaacacctataatcccagcactttgggaggccaaggcgggcggatcacgaggtcaggagtttgagaccagcctgaccaacatggtgaaaccctgtctctactaaaaatgcaaaaattagccaggcgtggtggcacgtgcctgtaatc

SEQ ID NO: 121140 - DNA, 999 bp, Homo sapiens
ctctacctcccgggttcaagcgattctcctgcctcagcctcctgaatagctgggattacaggtctggctaatttttgtatttttaggagaaacggagtttcgccatgttggccaggctggtctcgaactcctgagctcaagcgatttgcctgcctcggcttcccagagtgctggaattacagccatgtgtaatcccatggtggcaatgttgagccaccttgccctgccaaccattttactttctttctgtgaaaccgaatactcttaagtacctcatgtaagtgagatcatccagtatttgtcattttgtgtctggcttatttttagcatagtatttccaaggttcatccatgttgcagcatgtgtcagaactaacttcattcttaaggcagaataatattctcttatttgcatgtatctaccacattttatttattcattcagcgacgggcagcagcctgtagatagttttgttttcatgtattgaatggtcctttcccccagtggagtgagtaaatgcatccggaagcagaattctgttgtttcccattcatcactgtgtgccaggtgtctgagaagggggtcttataggagcccacgcagaaaccaagctcacctcagtctgggtgtggggcagtcagggaaggcattctggaaaatgtagctgactcgaaataagcacctattgaaaatagtgtgctgagccctggaacattaaaaatgtgttcctatgtggaaatcagaaatgtatgggtcccagaagagaacttgtgggtcagcctgctttccagagagtgccgaggccctttgaatggtgaacattatgcaagcattcttgtatggccagtggccagcagggaggagggcagagaatgactgtgcctccgggaagccggcgtcaacttcccgacacgcttcaggatcatctctttgtatagaaccatgggatggatcgctgcaggacctactggaaaaaggaggtcatctccaggactcttt

SEQ ID NO: 121141 - DNA, 139 bp, Homo sapiens
gggctgtacaagtgtcctctcctgcttaagttatttatataggtggctgaaaacgctttgcttgtacaaactagaaactattagattaggccagcagagacagccagaggcaatcttttaacaaagtgagtgggattca

SEQ ID NO: 121142 - DNA, 301 bp, Homo sapiens
ttttttttgaatctggaaatgtctttcattattgtaaagaataattttcctgctgctaacactgaggcagactgaaacatacatagaagtttaaatcattgcttatgttattctttgaattatatatgttctcactgaacttaagtgtgtgtgtgttctcaaagatgatatttctgaagtgcctacaaatgtgaaccaaacttcactaaaccatgctatgtgacttctgtggccactattaaaaagccacagtcattaatatcagtataaatgtcgacgggccgcgaatttagtagtagta

SEQ ID NO: 121143 - DNA, 399 bp, Homo sapiens
cccttgaatctgtggttggctgggtagaagtacagctgcactgaggactatttccaactagctgtcttttggcactgggaccttaactttaatttgtggggtctgtactgtcaacccaaaaggaagaggatgaagcacaaaatacgatttaaagagtttacctgagccaaagcaaagacagctgccgaaaagacttagacccaagtaaccttggatatgagctccatttggcctttgttatgtgcaggtttgtatttaaaggtttcagaaaaggggggtggggagacagacagtaggttgatacaaagttgttagaaattctcactgatttacagaaatagcattgattagtgactggctagacacctttaagctacaggtgtggattatactgtctgg

SEQ ID NO: 121144 - DNA, 372 bp, Homo sapiens
ggtctcgaatacctgaccccagatgatccacgcacctcagctccaaagtgctaggactacaggcatgagccaccgtgcctggcctcattatttgcatttctgattattagtgatcatgagaatgtttttttgtttggctacttctgtattttcttttaagaaatgtatgttcctgtcctttgctaattcaattggattattcgttttttgcttgttgattggtttaagttccttatggattctggacataggacctttgccagatgaatagtttgcaaatattttttctcccattctatatgttgtctgtttactctgttgataatttcttttgctatgcagaagctctttagtttaccactgtgatctctt

SEQ ID NO: 121145 - DNA, 576 bp, Homo sapiens
agagctacttgtggcaacagcaagtggtttcaagaaatgaacacgtagctcaaggaggaggagtcacattcctcccgtgaaagttcttttctcagtcttttaaatttaccattgggtgatttttaacagccttattgaggtgtgattgccgtatgaaaactgctcatatttaaaatgtgccctttgatttctgaactttgatgtctgcacacacctgtgaagccatagtgacaaccaagaagacccacagatctgtggctcccacggggtccacaggcccttggtcaccaccccccctcctgccccaggccaccagtgagctacttttttcacgataaattagttgtattctgtagaattccgtaggagtaggatcacatagtatatgtttttcccttcggcttttttcacagtgtaattatgttgagtcacgcatcaatggtttgctcatttgtgttgtggcgtggcagtcggtagtccttcagcacgctgagggtgtgtgttgagtcacgcatcaatggtttgttcgtttgtattgtgtggcagtcggtagtccttcagcacgctgagggtgtg

SEQ ID NO: 121146 - DNA, 284 bp, Homo sapiens
gcatattttcgggcttccccacctcaaaaaaaaaaaaaaatccgtgacatttcttttcctggatggcaaaatgaaaacatttcatgaataaatctacaaataaaatgatatcactttaaagatgtgaaaaatctaggtgtactttgaaaaagattttcattttaaataggtagccagaagcagatatgtgcaattgaaatgtttactattcatctgatttctttttctaagaaacacaaaaatcatgacattagaaagaattcaattaactctcctcagtgtgt

SEQ ID NO: 121147 - DNA, 407 bp, Homo sapiens
  misc_feature (348)..(348): n is a, c, g, or t
ttttgggtctttgctatgtgatacatgcagtaaatggtgatgtacagggtataagtaatagcacaacaaaggccagattggctgggcatggtggctcacacctgtaatccccacactttgggaggacaaggcggaaggattgcttgagcccaggagttcaagacctgcctgggcagcatagtgagacccctatctctacaaaaaatttttaaaaaattagccaggtgtggtggtacatgcctgtaatcccagcactttcggaggccgaggcgggtggatcacaaggtcaggagatcgagaccatcctggctaacacagtgaaaccctatctctactaaaaatattctntaaaaaattagctgggtgtggtggcaggtgcctgtgggcccagctacttcggaggctga

SEQ ID NO: 121148 - DNA, 291 bp, Homo sapiens
gtgttagagtaaggctagctgaagggaaaataagcttttaaaaaatgtcaacttctccaaaaggattcattgaccactgagaaggtcggaaagaagccagtaaaatgaaaagagctgaagggcgtaggttccagaacattcacatctgcaaggctgattcactgctgtctgtcgaggacgatgtccggactcccaggtgacagcacctgaggaaacgctccagagaggggtgatatttatttccttatttgtgtggttttttaaaaagatagggtcttatctcgtacacac

SEQ ID NO: 121149 - DNA, 529 bp, Homo sapiens
ttactatctggccttttacggagaaagttcactgtcccctgctttagtaaattgtctctccaaattttctatccaaataactgtaacagcaggaaaggcaggtggcctcatgagaccaggagggtagcctaagctgcaagccataaacaatatatgtcttagggtttgtatgtatgaattttgcatccgggagccaaatatattagtgtgttaatacaaaaatattttctcggctgggcgctgtggatcacacctataatcctagcactttgggaggccgaggcaggcagatcacttgaggtcaggagttcaagaccagcctggccaacatagtgaaaccctatctctaccaaaaatacaaaaattagccgggcgtgttggcatgcacctgtagtcccagctactcaggagactgaggcaggagaattgcttgaacctgggaggcagaggttgcagtgagccgagattacgccactgcactccagcctgggtgacagagtgagactctctctcaaaaaaaaaaaaaaaa

SEQ ID NO: 121150 - DNA, 275 bp, Homo sapiens
ccttcatatttataataatacttaaatatggaaatgaatacatcatctcaaataacactgagttcattcttggaatgtctttttttttttctgttagagattttctttcattttctttttatttttccccaggatgctatcatgcctacgtttctcctggttagtttcacaggatattttccaaagagaacttgaataaaacagacttgattaccactgttttattctcaaaataagctaatggctattaagacttgttccttgatttgaggggg

SEQ ID NO: 121151 - DNA, 234 bp, Homo sapiens
ttactggggagagtgagcagcttccagcgcatgaaagacagagaacctgaattttagcagagggacccacaggttctggctctggtacccccacaacctccgagaccaccatgagtagccgggcagagccacccccatcactctgttgttcaggctggagagcagtggtgcaatcacagctcactgcagcctccacctcctgggctcaagcaatcctcccacctcagcctccca

SEQ ID NO: 121152 - DNA, 355 bp, Homo sapiens
actggaacaatgaagctcctgctctgcccatccccacggtctagagcaaagagtctcagtcttggctgcacatcacacttacctgggagcttaaacaactttgatgcctgggtcccagcccaagagattctgatttaattggttctgggatgaggcctgggcatcaggcattttaaaagctctcccagtgcttccaaagtgaaaccgaggtgagaactactggcttggagtatgactactcaaagcatggtccatggtctggcaacattcatctcctgggagtttgtcacaaattcagaatctcaggccctactctagactttctgaattataatctgaagatccccagatgatc

SEQ ID NO: 121153 - DNA, 409 bp, Homo sapiens
gattttctgtctactataccatcaatgactgacagcagagtgctatctctaaatatacttgaagatttatctatttctgttttgttctattagttttcactttacgtgttttgaaactaggtaattagattaaacagatctatatttagattatgtctactcaataaattgacctctttatcattatgaaatgtctctctttatccctggtaatattcttttgcccaaagtcaacttttcctgatattagtacagctaactactccagcatttttatgattagtgtttgcatatattttctttcccaacctttggctttttacctgagatttcatatttaaaatgggtttcttatacacatcaagtaactcagtcttccttttatctaaacaatcttttaattgaattt

SEQ ID NO: 121154 - DNA, 389 bp, Homo sapiens
aagaggcttggccgtgtcacaaaactttggtttagtgatctgaggcaccatttataaccaagatctcattctattttgtcaaacccttccctatacctcatttataacaacacggaagaggtgtaggagatggtgtgaaggaacagggactagattgatagggagacagaggttctctcacgtgaacatcacagggtaattcaagcacatgtattttgggacatatgtattccagggccaacataaactataaactcattcactgaagcaagccaagacataattactaattgtttaaaaatttaaaagttattctagtttcagagaaataaaagtgctaaattattatgagatgtaagagagagaactaaagggaaaaaggagagaat

SEQ ID NO: 121155 - DNA, 312 bp, Homo sapiens
tcatgatttaaaaatttaaaaagaggtagttcccaatgtgtagtatttgaagtgtacagattctccctagctttttgaaagttattgaaaatgttttaagactaaaaagagaaataatgaacaaaactagattaaagtcagttgttattgttgtccactgtgtcctgaaccccacccctgccttttattctactcaaatattagacctagtttagataatctatttgtaacatgtgaattcctagatgatttttttcatctattgctgaccacaagagggcatccagtgaacatgttctaagcattcttcca

SEQ ID NO: 121156 - DNA, 285 bp, Homo sapiens
gtgctgtgatggagcaagtacgagggaccgtgagaacaatttggaatagtatctaacattcgactggaggagtcaggccaattctatttagaagaataatccgacttagttggaagcagaagaatatctagaaattatctggtcaaaaagggaacagattgtgtgttccaggcaaagaaaatagctcattgacgagagctcgataggttcaggcaagtctagacagctgaaaagttgagttttgtggtgtagaagatggtgagaggtgagacttgaggtaagtaa

SEQ ID NO: 121157 - DNA, 906 bp, Homo sapiens
atttagcctacatgggaatgtagacttagagaaggtgagagagggagaagggaagagacctgtaagatctataaaacctaagagatacgatgagtggaggtgattaattaatgggaaacagcaagcctgggaggaagctcttcatcatgtgtcccacatcttcctgtccccccccattggtcttaattctgtaaatggggggaagtgagtaccaactgggtttggcaggaagcacttttgactccttagttttagttgttaaatgatgtggaactttaaacagttcaggaggtggagttagtgtggttggaaaggcaggcagtgaggtgtggaataaagaacaagggctttgataacttcattcctcatgttgttcctggataagtcatttcatctttcttagccttaaatttcccaactgtaaatgtggaaataatgtccatctcctagggttgatatgaagggttaataagatattttaaaagcctaatacttagaaagtgctctgtaaatgttagtataaatgttagcttgatccttggacagttaaatctggaggtgagattggagtagatgatttctagaagttccatgtttgctttagaagccttagtttagaccaggtgcagtggcttatgcctgtggtcccagcactttgcgaggccaaggcaggagctcaagaccattctgggtggcatggtgagaccccccatctctacagaaaatacgtttaaaaaaattaggcagatgcgatggtacgtgcctgtggtcccaactacttgggagactgaggtgggaggatcacttgggccagggaggttgaggctgcagtgagttgtgatcgtaccactgcactccaggatgcactccaacctggtgacagcaagatactgtctctttaaaaaa

SEQ ID NO: 121158 - DNA, 359 bp, Homo sapiens
atttctctcccttaattatggcaaagttattaaatttgagctcatgtattgagaataaaatcagctctttcatgcctctctcaccttgacctttccctcatggtattcaaagtcaatgccggtaagtacagtgcttgtggctttgtgatagccgattttttactcactttttctaagcattaccataaaacctgacatcatgccttcagtctgcctgttgtggagattgtaataagtgggggttggcttaaagcgcattagtagattttgagtgtagtttacttgctcaagatgatgagcaaagtgatctatcattgaatccatactccttactgaaggtaatagttcaattttgtttt

SEQ ID NO: 121159 - DNA, 659 bp, Homo sapiens
ttacaaatcaagctagcaaactgctcaataaaataggtgttatccttctacctagactgacaaatatatcttttcaatgtcttggaagaccaggtacaactttagaactcctacaatgttcatagtccttccacagaaatgggtggtttaaagagagacatcatcctgagccctggtaatcaatttgccttcctcccccctgcctgctccatcctacatcaagaggggccttgtgatatgtggacacccaagctcgctctctgtctctctctctctttctctctctctctctctctctctctcacatacagacacacacacacacagagctatcccttaaacaaccctcgtgcagagattgcacaaccagtagcaatgacagccttcaggaagatggcttcaaggatccatgcaaactgcagataccagttcagggccttctggacagcgaatgtgggttcccacataaccaaatcatggtctaaaaatgaaaagagagtaagactggaaggcccaaaagtcacctcaccccataggcatggctctgaccagagaagaatgacagcagagtaccatctaaggcccaggacagaggccagttgtgttcatatactaggtctatattttagttgtagagctgaaaaaaattggaggaaaat

SEQ ID NO: 121160 - DNA, 410 bp, Homo sapiens
ttgccatggaaagaacatgtttgtcaggcttgggttaaaatcttttgatctgagagctaaagggtgagtaagaactagctaagaaaagggggaggagaaaggaacagaaggtctgaggcaaggggaatttggcaattttgaggaaccaaaagaaagttgtgtgactggagccctagggtgaagtagatcgtggtgaaaagtgaagctctgggggaagaccgggtatgattggtagaggtgttctctttaacctcatggcacggggaagccttgaacaaggatttaaatggggaggtgaggtaatcaaatttgttttgaaaagacccctggggctgtgctgccgagtatatccctgagaagggtttgtgaggatagagaaactaatcaagacattttttgcagtgctctgg

SEQ ID NO: 121161 - DNA, 451 bp, Homo sapiens
ccttttccatgctccatcctttggctgcctctgcttgggcacttgtcccttagatccattccctgaagattcactcagtttggtcacagtccagcccttctgcctcttgcagacagcctactctgatcactccagcctttgctaacctctgctttctgagaactccaactgcacgcagcagtgaggggatcatgtgttcctgggatcatgtgtcccaggacagtaggaatgtcaaacatcctgcctgtgctgtcctcacctgcttcttccaggatgggtcagatggtccctgttacacagacaaaatatgagtcatcagaaaggctagtgtccctctccttctagatggtgcagtctgtctgggcagcaagcatgcttttcctgcagagtaggggctagaagcacaggctccggagtcagagggacctgggaccaggcacccagacacact

SEQ ID NO: 121162 - DNA, 338 bp, Homo sapiens
ccttcacctgcagctctggccagctgagctgctgcgttttaggtgttgacatcacacattatttaactcagatgacctgtatttgttgagtctctcgaaggttgcctagaacacctgatgctggtgactgagggcaaatgaacagctacctggcagtcaggcctggagcagccagacacctgcctctttctatcagctcagattcccaccctcaacagttcactccaggggaaattttctgacccagtggcctggagcccttttataccagctcacgggagctggtggttaactttttggaaattttgcaagctggttgttaaaccacagccactact

SEQ ID NO: 121163 - DNA, 203 bp, Homo sapiens
caactttttgctttctcccttttctcctgtcttataaactagggaaaaggggaggtgggggagaagctgggaaggacaacaggagaagtggtggtctcaaaaaaaaaaaagggaaaacgctattccagcataggttgatgagccctgaaagaaatgaggccagtggtaagtgagtccgggcttacgggactccgctgatctag

SEQ ID NO: 121164 - DNA, 375 bp, Homo sapiens
taggtgacagagcaagactccgcctcaaaaaacaaaaacaaacaaataaaataatctgcagtttatctttggtggatcccttcccctttccctcgcagggtcctgttgcacagcaggcgtccttagggctacctcatggcactcctgagcactgcagttttcctatcttttgggtccctgcataaagataaggaggagggttatctagtctgagacccagcctgcataattagcccgctcaaagcctcccacctccctaattactgttatcatggatacacccactcagcaggccattcctacattcctatttccccctcctttgcacagttccctagggggctggagaggtgatgtgggaacccaaatcccttc

SEQ ID NO: 121165 - DNA, 227 bp, Homo sapiens
tgaatactccattaattactagcattaaattgagaataccaacagtagtatgtatgtatgcatttatgtatttattttgagacagagtcttgctctgtcacgcaggctggagtgcagtggcgcgatctcagctcactgcagcctcaaactcctggacccaagtgactgtcctgcctcagccttccaaatagctggagctacaggcatgcactaccatgcccagctgc

SEQ ID NO: 121166 - DNA, 396 bp, Homo sapiens
cgtgaaagcaggagactgtgcaaatgaggatgtcactgagttccagatcgcgtggatttccagaaagagcacgggcagccctagtgaaggcttctgtggagaaactgatggtccaccaggaaggagggctctggtctgggcacttttttcatgttggagtcagtataaagatggaaaccaggccgggcatggtggctcacgcctgtaatcccagcatttagggaggccgagacgggcagatcacctgaggtcaggagttcgagaccagcctgacccacatggagaagccccgtctctattaaaaaaacacacaaaattagtcgggcgtggtggtgcatgcctgtaatcccagcgacttgggaggctgaggcaggagaatcgcttgaacccgggagg

SEQ ID NO: 121167 - DNA, 371 bp, Homo sapiens
ttaacaggcaattcacttgtttggatccaaattgaagactgtcacacctacaggagggcagtggatcttatctcaattattttctttagtttaagcctcagctgcaaactgctttcagtttctcttgcccatatggtacaggggtcagccagagacttggactgagtttaaacacggaatcatgggttccctttctctagctgtctccaggttttccccatcccctcactctctgactgttcttgttgctcccagtctccttttccttgttcttctggcttgaaagatggcagattttttaatttgcattttagctgcctggtattaatgctgcaactttggctgtcctcaaggtaaaaccacacacacaa

SEQ ID NO: 121168 - DNA, 259 bp, Homo sapiens
tcaacagccctgaggtggaaattaacccacctgacagaagaaagctaacttcagaaggagacttgcccaagattacacagcttgaaagtgccagaattacctctagtcctcagttcccattaatacgacagaggccataacacttcatcctaagggaaagaggggactaggtcacacgggccctgaaatccgttccaagacacccctgtccctgcagaacaatccctccaagaattagttctcaccgcaggtgaaatgg

SEQ ID NO: 121169 - DNA, 379 bp, Homo sapiens
acgctctctctgtggggtacggcaggtgcaggtcttggctgccttctctgctgccctgcaagcaggagttgtcactcagggctggggaggatctgcattatagcttctgtactggtagaccatgggtgatcagtggagagtttcagcagggtggtttctgtgggcatgaaccagcctgcatactccctccctatgttgcagtttcccctaacccatggcaacttactcagctggcatgtatctgtgtgggtgagttttgctttcctttgccacaccagtgtgagggagtgcagtccgaccccctccacccaccaactgccattgcaggcagagccttggcagacacagccagccttctccaaccagcagcctgcccttg

SEQ ID NO: 121170 - DNA, 728 bp, Homo sapiens
tgctgtggctcacacttgtaatcccagcacattgggaggccaaggcgggcggatcacaaggtcaagagatctacaccatcctggctaacacggtgaaaccccatctctactaaaaatacaaaaaattagccgggcgtggtggcgggtgcctgtagtcccagctacttgggaggctgaggcaggagaatggcatgaacccgggaggcggagcttgcagtgagccaagatggcgccactgcactccagcctgggcgacagcgagactcacatctgaaaaaataaaaaaaaagtagtacctattcacttgaacacatcagggatatggtctcatttaaaagaggccatcaagaactcggatcctttctttctaagccatcttattagtatgttgcttccatcctcaacatcataacatgctgctggaactccagccatcatcacctagttccaagcagaagggattagagcaagtgacaaaagagcactccttccactaagtcagttctcagagttttcctggaagccccacacaatgacttctgccacccctaacttcaaaggagctgggaaataatagtgttctagctggtcactcaacagaagggggataatgtggattggagaggcaactagcaggctacactctagtcactaggtaaagaccacttttcctcaaaccagcaaacgcatatcaaaaatgtgggagaaaaaatgcattcacaatagca

SEQ ID NO: 121171 - DNA, 372 bp, Homo sapiens
attaacactggaatcatagactgagtaaagcagattgctttccccagtgttccttccccagtccattgcaggccagaacaaaaggcctggaaaggtagaacttgctccctctgcctgactacttgagctgggacatcagtcttctcctgccctcaaattggggcttacaccatcaagtgcccctggttctcaggccattcgactcagcctggaactgtaccaccagctttcccgggtctccggcttgcagatggcagactatgggacttctcatcttccacaatccatgagccaattcctcataataaattccctataataaaggtcttataatgtatgtatttatacactattggctttgtttctgaaggt

SEQ ID NO: 121172 - DNA, 147 bp, Homo sapiens
gaacacattgcgtgtgtgtgtgtgtgtgtgtgtgtgtgtttagggtgagggaccaacagtaacaccccacccagcaagtcacaactaaaatcctggagagttctttactcctttcctctccctgtttctcaggcacttcccagcaag

SEQ ID NO: 121173 - DNA, 386 bp, Homo sapiens
gtccccttgtgcagctgttcctgccccaatctgccctcactccagatgccagctgtgggcatgggcaggtgctcactgtggcagctccctagggttgcaggggccatgcccaggctgtgctttctgggccccagaccctgcagctctgaaactgccccctttcttgggcccaggctctgccctggctcccagggccttgtggccagctgcaggcctcaccccgcctccaggagacacccagcctcggcgttccttggttttcttctagagagacccactcctcctctgccctcccgggagatgccacgcatggcccttgcccccgggtgccttccccagaaccgtcacccaccccgggctgctctcatctgccaccctcaggcagc

SEQ ID NO: 121174 - DNA, 278 bp, Homo sapiens
aaaatgaaagcaagtttattaagaaagtaaagaacaaaagaatggctactccataggcagagcagcagcagggactgcttgactgagtacactatggttatttcttgattgtatgctaaacaaggagtggattattcataaattttccaggaaagggtcagggatttctcagaaccctcagttcttttagactatataggttctccttttagaccatatagggtaacttctggacattgccatggcatttgtaagctgtcatggagttagtagaagtg

SEQ ID NO: 121175 - DNA, 716 bp, Homo sapiens
agggatgtgctaggcaagagagcagaggaggctttgcaggcagtgtgctgaggagttaatgaatccaaaggctctctatctcagagcacttgaaatcattactgagcacgggcctttattagtgacttaacacattgtggtagttcctgcccagctccaggctgagccagtgccccgagcaggcaaagagactgtccattaagacagtctatggctcttgacatgttaatcagaaggttccattctcaagttgcctgatcccagggggaaagagagacagaaaaggaaatcaaggcccaagggaaatttagccctgaactgagaggtgctagcaaattagcagctcagactgcctgtgagctgcacagaggcccactcaggaagctgcacagtggagctggtgctgcacgggggatcctggatttttagaatctccctcaagcccactcttgacatccctgttctcctccccagcctctctggcagcaaagcgcttttcctccgtaggagagaatatatttccagatctttaggaggttagttagtttaggggtaaaagaaagtctcatttatcatataatgcagtgagacaatcataggaattttagtatttgtcacccaaacatggacgtaaaagcttgttgaattaatcatgagtgatgggctgttgaattagtccctgtgcttctcatgattttatcttattttgctgctgc

SEQ ID NO: 121176 - DNA, 259 bp, Homo sapiens
cagcctgggcaacatagggagacactgtttctattaaaaaaaaaaagtttcgtggaacttaccattaaaacctactcggacccagagtgttttttgtgggaagatttttagctatatagactattcagtttatctgttcttggttgagagttactggtttgtgttacacaagtaattttctcaattcaactaaaaatgccatttctccctttgtttctgaaaggtatttgcgtaggtatagaattataggttgacttca

SEQ ID NO: 121177 - DNA, 190 bp, Homo sapiens
acaaatgaagtaacatttcccttttgagagtctccattaatatctgcaagtgccgtaaataaaggcaaatatttccgaaacagatacgttaaaaatatcttaccatgactgcagagggcttttgcgctgaccttcagacgtcaatgtacggatgtcaagtttacagtgccctccaatttcaccactctgg

SEQ ID NO: 121178 - DNA, 364 bp, Homo sapiens
ggatttagaggtgaagtgccctatccaatgtcatgtagctagtaatgatgaccaggctgggatccaaacccagctctgcccaaacccaaagctgctgtatgttgccatatatccctccctagggcccttgctcctggctcagttctgatgagaaagtcagtggacttatttctcccttagtccaaagcagggagcaaagtagacactagctaacaagactcattggttccaaaggttcaggacagggcgtgaacagaactagttgtcagagttggaaccataaaatgcttagggacacaggcaaacagcgagcactgtaaatacaactggctgggcatggtgtctcacgcctgtgatcccagca

SEQ ID NO: 121179 - DNA, 646 bp, Homo sapiens
taagtctttgagtacctggatgtgtgtttgatatccttcagcattgtttttgtgttttatagttttcggtgtacaagtctctcacctcctttgttatatttattcctgggtattgtattcatttggatactattatacatggaagtttttcttaatttaatttttggatagttcattgctggtatgtagaaacacaatggattttgtgtgtaacatttattgcctttaacagtcatttactttcttttttccatgtgcaagctgaatcacgtgggtaaataagaaagtggaaagtggaacactaaagaacttgatctgtaagatgtctgatttccctgaatgtgaaaactatgaaatatgtttttagcatagtgttgaactattatcttactatacttgggctattccatttctggtatcacgttacatatatttggtcattattaaagaaggtagatcatttcattttctttaggtttggagagaagtgtcaatacgtaattcattttcaaagttacaattattttgcaacttaattttgatgttacacagaaagcctcagggataaaccatatttatcgcagagtctggtacagagatccatgaataataaagataaaattagaacagaagctaatttgaatat

SEQ ID NO: 121180 - DNA, 676 bp, Homo sapiens
tagtttattagtaatttcctctttaaaaatacatatatatgtatttttacatttatgcattaaaaaatatatatgtatctttacatttatatattaaaaatacatatatacgtatatatgtgtatatatatacgtgtatatatgtgtgcatatatatgtgtgtgtatatatatatgtattttttttcccccaaagttgttatttctctaggatagaggtctggaagtagaattgatgaaaccaatgggtatgtacatctaaaagtttcatagatactgccaaattacctttgcaaaggctgtgctaatttattcccattaacactgtaggagaatacttatctccctatactcttgccaacactggataaaaacggtctttctaactcttgccaatctgatgggcaaaagtattatcttgttttaatttgcatttctctgattactaatgatgatctggcaacctttctttcattctatcataaggagtcagactattccttctcactgaagagcttttctactgaataagcttattttaaagagctccattaattctcgataagcataatcttattggtgctcctcaattactgtgctactataaatttggtttacatttaaaagatatgttgatgagtttgtttattcactgcctgaccaaaaaaaaaaaaacg

SEQ ID NO: 121181 - DNA, 437 bp, Homo sapiens
agtataaacatattctaggagtaagatatagcataagcaaagagaagcactaatcatttttgtgggtttctgagtcacacgtgcctgacattttagaaggtctaagaaaatgtagaataagaatgggaggataaattgaggcttgctttccaaggttcccgcttcagttccctattcctttgtaacaaactatcctaaaacgcagaaggcttaaaataacaatttgttttttctcaaaattctggggattggctgggctcagctaggcgattctttggttggggtaatttatgcagctgcattcagctggtagctcatctgggcctccaagatgtgggtacttcagttcttcctgtctgtctctttctctttctcatcctccctcctctctctccacgtgacctctcatcattcagccatttggcccaagcttcctg

SEQ ID NO: 121182 - DNA, 460 bp, Homo sapiens
ctgtcaggctttctcttagaacttctgtgagaatcaggtgaaataactgattttaacgtgttttatgaattgtcaaataatataacgtactagcagtgatactgcctaaggaatgacacatgtaactttgtgaggacagggtcatattgaaacaagatattaagaatcaaggccaggcacagtggctcaatcctgtaatcccaacactttgagaggctaaagcaggaggatcacttgaggtctggagtttgagcccagcctgaacaacatagcaagaccctcatctttacaaaaaaatgaaaagttagccagctaactatggtggtattcacctgtggtccccagatactcaggaggctgaggtgggaggatcacttgagtccaggagtttaggttacggtgaactatgatcatgccactgtactgcagcctgggtgccagagcaaaaccctgtctctct

SEQ ID NO: 121183 - DNA, 289 bp, Homo sapiens
ctaagagtagcagaagagattgttatttaagtaggagattctaaagaatatcatttcttgctgagtgagaccttctccattgtttttcagtatttccttttaagttttactttattaggagacaggtgtatgcagttgacatgtttcaaatattgatttaaattgtgaagggatttgacattaaaatgaatattttagtgaatattctggagcacttagttggaacctaacgtatttgtgtaaatgctcctgtgtccacctgttgcccacatctactcatccccacgtc

SEQ ID NO: 121184 - DNA, 648 bp, Homo sapiens
gaaaaatataaaataaatagcaagatgatagaatcaaacctaaccatatgaatagtcacactaaatgtaaattgtctaaacactccagtttaaaggctgaatttgtcagattggatataaaagcaagatccaactatatgcttgcctacaagaaatagtttgtaaacaaacaggttaaaagtgaaagaatgggaaaagatataatatggtaacctagtcaaaagcaacttggagtggctatattaatattaaagtatatttgagagcaaggaatatttccagggataaagaaggtcatttcatttataatggtaaagaggtcagttaagaggacataatgatgttacatgtttatgcacctaataacagagcttcaaaacacatgaaacaaaacctgatagaaatgcaaggagaaattgagaaatccagtcataattggagattttagtaacccctgtcaataattgatagaagtggacagaaaatcatcaaagatatagtagacttgagtaactgttaagcaacttgacctaattgcatttatagaacactctacctaaaaagagtagaatacgtatttgttcacaagtttatccaaaacatttgcaacgataaactgtattttgggccataaaggacttttttttt

SEQ ID NO: 121185 - DNA, 590 bp, Homo sapiens
caatgccacagtagaataaatctgcatgtatttttactggtctacaccttggcaacaatacacatctccatgatgggacagaactgaaataattttgccctgtgtgtacatggctgtttgtttttaaaaaattttctgactcaactgtgactgactacataatactgggactgacatcctatcatttggatacatggatatttagaactgaaagctcatgagagacaatatggagggcaataaactggcatgaaatgccttatgtttttccataccagctaaaggctcttgatcctctttttctcttggccttagaatgaggtgactgagtgaagtgaaacgaaatgcaagtttcatttcaacttaaaagctggaattctcaaatgccaaataattggagatttgctttctgaggtttgatcacaaaacattttgtaaatagcagaaaactgaccacactttatgttgttcactgtgttggaatagaatttaaagacaggaaggcctgcagagagcttcaggttagtttctcagatgtcttgcctcctgtttccttcaaaatgatcaggagagattttaatctctatggt

SEQ ID NO: 121186 - DNA, 300 bp, Homo sapiens
tggattgcaggcatgagccactgtgccccgcctatgagtacagtttttagatgataatgattatattatagctcttggaagatgttttatagtcctaaccatggcaaaatggggggactcggccaggtggggtggctgatgcctgtaatcccaaagtgctggaattagaggcatgcactaccctgcccatccttcaaaaccaatcattttaaatccagtagttaatctgtagtatagggtggttttaattaaattaaacttacagccaattttgaacgtgactgctacggacagggctaa

SEQ ID NO: 121187 - DNA, 806 bp, Homo sapiens
ttaaacctcatttcataactaagcaaaattcaccttagtagaataatttaaaagctctttacagatctttaattaggtcaaatttttacgtggtctttgggttaggaaaaatgtataaactattatactatgacccatttagctgcttgattatagaaaatattgtaaaacagcccttttaaaaaactgatttaatatacaatgtgcaagatttgcttctgtggtataatacaatccaactttcataatttgaagtttgataagctgcatcttgatgccttcccctgtgtgcaaggaatatagaaccccgcactgtaatagcatgtaagtgtgtgttcttgtctctgaaagcacagtgatataaccttttgccattgccaacaagcatcatgttaaattaattgaccttggttcacttgcactatgatgcaattagcaattatcttcagacgtcaacattttggttacatatcctaaatagaaaaagatgcctgacccaaaattctgctaggaatgtagaaatatattttttttggcaaattatttttcctgctgtgaatatctctatactttggttatgcaagataaatttgtattagagagccaaagtaaaaacccatattaacgaccagtaataaccagaatgatcagggataaaaggcacaggtgtaagggaaaaatatctttggacacatagaaagttatagtgaatggctaaaataaatatgcccttctttagtactaaaaaaaattgctaatgggaccaaagggattaggaagcaatcaattgatctctctgggatcta

SEQ ID NO: 121188 - DNA, 565 bp, Homo sapiens
ctctttgaaaagatcgctctggctgctgtgttgagtggattggtaagggataggtggtgaagactgaaacagggtatccagttaggaagctatcacagtgatccaacccccagcttctgttgaggttgaagaacatgcatgcccaacctaaatatatgttcaaaggtggttattactgtttgaggtgatgaaagagttttggagatagaagtgatggttgttcaacatcatgagtgtaattaatgccacggaattgtatccttaaaaatgcttaaaatgcgctgggtgcggtggctcacgcctgtaatcccagcactttgggaggctgagatgggcggatcacttgaggtcaggagttcgagaccagcctggccagcatggtgaaaccccgtttctactagaaatacaaaaattgggcgggcattgtggtgggtgtctgtaatcccagctatttggaaggctgaagcaggagaattgcttgagcctaggagtggaggttgcagtgagccaagattgtgccactgcacttcagcttgggcaacagagtaagactctgtctcacaat

SEQ ID NO: 121189 - DNA, 735 bp, Homo sapiens
ctaaaggttagagaaagtgcttgttccttctttcctcaatgagagcagagcattctctgtgggaagcatatgaacatttctggcttggtcctagtgcttggcctggggtgctgattattttctgcttgggtcttggcttcccctcagggagctgtttcttatcccttgggtctcttgtgttcttttttttttttttttaatttatttttattttttagggtgatgaagggtttttttcccctttctttttttttctttttgtttttttagacagagtctccagccggggtggcacagcgagacacagtctcaaaacaacaacaacatagaagaaccaaaaccactttaaaacaagaaagaaacggattcatttaataaggcgtacacattacactttaaccattgtgaccataccatcttaggcatttgtgtccaagataaaatataacatgcttccacacacatttgtttaacgaacgcggtattcctggtgagaaaccacctgaaatgtccttccaagcgggccacagagagaaccaccctgggtcgtatactctataccaacgagaatacttcttcaacgacataacactgtgacacagacctactgatacacaccctaactctttgactttcccgggacccatttactgcctgagctgcacaacaaggccgactacaaaaactccgcccaaggtgggttcccactttttgctgcaaccttcggacgattac

SEQ ID NO: 121190 - DNA, 857 bp, Homo sapiens
ccctttgctttcactagaacctcaacctggaggcctacccctgtgaattcagcagatattatgacatgcccaaactgctgactgagtgtgctccagtggctccttcgcactgatggccaggtatgcttctgacaggaggactgatggggatggatggtgggggacagctggagcagagcagcaatccatactcattaactggggacacaataatccattaaaggcttagagcaatcctaaatgtgagtgtaaatgtgaatgaacgccagataaatcaactaattgaagaggcagctccacatctgaaatttcaaatggagctttagatactatcatattcactttcaacagtttccttacttggaatttacaagatgccttcatatccttttcccatttaattgtccttagtccaatgtgaggtgcttattaatatcccataatagaaataaaaatactcctgagttgttcaggtatcaaggggtggagctaagatttgagcccacatcacctgactcctaattttacatttcttccacatcttgccataaaagcatgaattgaagtacctgtgatttgttgatgtgcttatacttatagctgataagtacagagttatacaaagaatcatggaacctgaggaaactgaggcttgagttgattcaactgaaatgtacaagcaaaagtgctttaaaatgatgagatcctagctgagtgttgtgaatcacacttgtaatcccagcaccttgggaagccaagggagaaggatagtttgaagccagtagttcaataacagccagggctataaagcaaaaccctatctctacaaaaaaaatttaaaaattagctgagtgtgg

SEQ ID NO: 121191 - DNA, 450 bp, Homo sapiens
gtgatctcagctcactgcagacctccacctcccatgttcaagcaactctcctgccgtcagcctcccgagcagctgggactacagatgtgtgccatcgtgcccaggtaatttttgtattttccgcagagacagggtttcaccatgttgcccaggctggtcttgaactcctgagctcaggtgatccgctcacctcagcctctcagagtgccgggattacaggcatgagctaccgtgcccagcctaaatgtaggcatagtttctataatcccttacttcatgagtcatggggttcagcagtcacggggccagcggtcacaagatgtgtgacttccctaatggtttctatggataacatcattattgtacaacctaagattggtcttcctaaatattttttatactgactccacctggacttgtgactcatgactcaaccagccctactgccca

SEQ ID NO: 121192 - DNA, 180 bp, Homo sapiens
tcttaaaatcgagagcaaaatcagcaaaacttgactcctgtgtccaaccttatctcctatctagttctccctcattcactttgctgcagccatcctggccttaactcaacaagtgccaaattctcccacttttatgtgctatttctctctctttccacctctacctctacctctcttcat

SEQ ID NO: 121193 - DNA, 739 bp, Homo sapiens
ggggtgagggggcaggtaaaagtttaagttgcatgtgttatgcagattagaatttcagttacagctaagcatacttgtaaaactttaggacagcatttctcaaatttgagaacctaagaagcactgagaatgtttatgaaccagtttgaataacatttaatgccattattttagattatcagtctctactagtgccagggtgagcaacacattgcaattcaaggcactgaaataattcagtgtttagttatgagttggttattcaggtgatctagaatgtgctttttatattatcttgaaattaaaacaaaatttttaaatgcttatgtagaaatactggcctccatgggtcagcagagcccagtttaagaaaaactaagctaagaaatatctgaaatatgtttggttttctgcaatcaagctgttcgtaaaaagaatttatatgttttacttatggtcacattttagtgtaaaagtattgaagcaaaggatattgtcattataattctcaattacctactaaaatgatggttccattggctctgttggaacaatttaaaggtatttatttaaccaaaagtctgtttttttaaaataatttgttagtcttaacacataccaattttgtatttgtttgatgtgctgcaattttttcatcttttcccattatttataaaggctttctgtatatatgagatcaagattttagtgtgtgtgtgtgtgtgtgtgtgtgtgtgtg

SEQ ID NO: 121194 - DNA, 460 bp, Homo sapiens
ctttcttttttacgatccttccctctcccccgccagtactgtgtatggtaattggagtgatagggcatcttcttagagtctaggcagcaggcgggacgtctgggtggctgccaggtctgtgcagagggaagagaggggtagccccagggaggagctgcaggacggtcccccctccacctgccccccgatggcagtaggggtgcctccatgctatatgctctgcatggtgcagtcaacacacaagtcctcaaaacacgtcccacagaagggaagagggcagcgtgggattaacagaaccttatcttgtaaccctgttggtcacgtgagctgagatgagtgtgacagctagtggcttgggtacggcacgagcctggcccgcttctgccacgccgtcctgtcacagctgatttaccctgagggcccagagccaaggatgattagtgggcggaaggagggagag

SEQ ID NO: 121195 - DNA, 261 bp, Homo sapiens
cagccatagtaacttcatacccagaacaggccccaagacattaaacctgtgtgggtttggaaaacaatactaacagacactgacaaaaatattctatcttctatctattctgctaagggcccacttacctttccaaaaattcacttgttcttcttaagtggcctttctccaccctcttctaagaatttatttgtcctcccagaatcgcccttttgccccccacatcccattaggatggtaaattctttctttttttttttg

SEQ ID NO: 121196 - DNA, 530 bp, Homo sapiens
agttcacaaataattgtcttaaaaattataattatctttgaaaggaaaaaaaatacaacaacaaaacaaacaaacattaagcatgtaactcttagaaggagaccattgacaagattgttgaggagttattccgggcacaggcgctacctgtacctgaagcagtggtattcattgtttcctgataattggtcctattccacaaagttgccagcagtgaaagaataacaatttattttaaagtctgtgtaaattattgataggcatgtgacttctgtttcttctgagaatcttcaggttcaagatgccagcttctgtgacccatttaactagaagttcctatgtctgaatttatttgttcgtcttttggggaaggttgggttgttagactggggctgttattatcaaaaggccatgctatgaaaatctgactttagacttttgctttttcccacttacccaaaatcggatttttcagaagttttcctcagctatcttattcaggtatttacagacttgctaaatggggacca

SEQ ID NO: 121197 - DNA, 150 bp, Homo sapiens
tcagctcgccgctgccagtggaagctgtggtagtagatctgcctcactgagtgcatgggaattgggggctcaccgctgcctgctactccccactctgcacaaactcttctgcgcagcgggggcagaagaacatcaacccagtggcctgag

SEQ ID NO: 121198 - DNA, 409 bp, Homo sapiens
gacagaacagcaaggctgttcaagcgtttgccccagagctgaggtatgtgactcgtgggtccactcaaccctttcagcagaaatctacaatgaagatggggttatctaggaagcgtctgtgggaaaactctctgattttatagcttgggcctctataacttgcaaaagagaccaacaaggctcttgagaatctgacaccagcagaaacactgccggcctggagtgaagggggcagagatgagataaagggaaggaagggtggccccgaaggtggggctgtctcgtttcagagcatgggtcattccagcaggcccagaagaaagaatctcaggccacagaggattcccctcaggccttgaaaccaaatgaattttgccctgctgggctttggacttgcttgggacgggtg

SEQ ID NO: 121199 - DNA, 403 bp, Homo sapiens
gggtgcaggagaagcctggaagggtgggttaggggctgaatgttcaaataccttgaaagctgggctttgttctgtaggtgagagcgaaccatcagaagttcttttggagggcgtgttattctaaaaagcctgtttttattatgtacatatttattttttgagacggagtttcactcttgtcacccatgctggagtgcaatggggtgatcttggctcactgcaacctctgcctcctgggttcaagcaattctcctgcctcagcctcccaagttgatgggatcacaggcacccacaaccacgccccgctaatttttttttttttttttttttgtatttttagtagagatggggtttcaccatgttggccaggctgctctcgaactcctgacctcaggtaatccac

SEQ ID NO: 121200 - DNA, 530 bp, Homo sapiens
actgggcacccatcctttcttttataacgtatacatgtgttaacattatttagctcccacttctaagtgagaacatgtagtatttagttttctgttcctgcattagtttgttaaggataacggcctccgtctccatccatgttcctgcaaaagacattaccttgttctttttatagctgcatagtattccacagtgagcaattaaagcttaatcccacaaggaagctctgagaaatgcatgcaaaacatacacctcagaattgtccaagcctagcagcaaggaagctcaggttttcatacacctgcataggagggttgctggctggaggctgtcccatagggactgttgattcactggtgcttctagattgtcataagtacaggcagctctccaccactgcaggcaaagagagccttagtcacaaatgcagatagctgccattggaaatgaggtgaattctccagagatgtggatggggaactgactccatctgctactgtctatcccttgtgccaatcagatgctccct

SEQ ID NO: 121201 - DNA, 534 bp, Homo sapiens
cagaaagactctatcctgggctaccagaaaacaggtcataaaatcttattgatacctttaaatgaatatgtgttcgccttgctaacaaggtaaaagtcggtagcaaagagcctgagtttgaacactgagattcacacgtgtagcaacagatactgacaatgttaattacactaattaacacaaaggcagaaactaataaaaaatatttaggaagcaatggctctctcttattcaaaattatagagacagatggactttgcccacttaggctaatcaatccataaacgtttacagagcactatgacatgtaagtaaatgaggatacctggtctgacaagtacatgccaatggaacagaatatcagaaactagaactctcctggaagttaaggaatataaagtcaatgaaaatataagattatctaagattgcaaagagctactgtaatgaagggaggtgggacagaaatattctaaaggatagcaaacaatatgaagcagaattagaagttgatctgggatatacaagtggcaga

SEQ ID NO: 121202 - DNA, 469 bp, Homo sapiens
tccaaaggtaaccaatattatctgcttcttacttatccttccacatagcactgtacttattttcacacgatgtaagtgtatttataagataaattcctggggaaggaatcgctgtgtcaaagggtttgttcataattttttacagaattttttcatagaacttcccaaggtgaatacatttcatttttgaataggtatcatgtgcacacggtacattaaaaaaatgtaaacagaagtcaaagtatttgttcataatttacagaatatgtttttcatagatcttcctgaggtgaagaatacatttcatttttgaataggtatcgtgtgtacatggtacattttaaaagacaatgtaaacagaagtttccacacactcttcccccaaccaccaagttcctttcacttcctagaaaccaccataagcaacttattatgtacctttccccatctgtgtgtgtgagcgtgtaga

SEQ ID NO: 121203 - DNA, 812 bp, Homo sapiens
tggaccttttcctgaataccatggctatgtactcactatttggccaaatgctgaaaatgaacatatatttgcctccgtcaaaatgttttgtaaatgttcactcagacattgacataaacaaggcagaaaggttaatggataaaaaattctttttctttaaaaaaatacatacacatacgaattttctctcttttagttgctaacctgctttttagattagtccatggttatcttggaagaggtgtgggagaacaaggtgagagctaaggaaggaattctatgcaaagcgtttctgattctcttagtattttgtggaacagcatgagacatgtcttccagttgtgtaggataagtacagcccactgaacactgcttaccagcagtttaccacaagccagttataacatcaaaaacatcggaaccctttcttttcttctatatttgaataatgataaatgccttcatgctgtgtgagcactattgaagtgtgtttctctgcaggtaaacttggcagtgtcttatataactacactcgatgggagtattacttaaacagtgtgaaatacattgtctgataaaaattgtatcacaatttggaatgacgtttatgcaagtggatagtctgccagttattttatagtctaaaaaaatgaacctgtaaggctacagtataaaatccaagtctttatagttgtatatttgtagtgaaaacaaccgtgggggaataatataagcttaatcatttggtgattagtctaccaactattaatgatgagagataacctatctgttctttatttctaaaataagat

SEQ ID NO: 121204 - DNA, 455 bp, Homo sapiens
tctaggacttcaaggtgtttgttctgaaaaaccattattttggttttagtcactatggtgtgctgaatataaactcccaaagatatccatgtccccatcccctgaacctgggagcattaccttacgtggtaaaagggactttgcaggtacaattaaggatcttgagacggagggagtatcccggattatccgggtggatgcagtgatgaagtcacaaaggtctttacaagaaggaggctgaagctgatatggccagaaccaggggctgccagccacacttagaggctgaaaatgaccaggaaatggattctccccccagagctgccagaggaaaccagccctgccaacaccttgacttctgcccagtgaaactggtactggccttgtgtcctcccgaactgtaagataacagatctgtgtggttttaagccacacagatcggtctctggtcattt

SEQ ID NO: 121205 - DNA, 633 bp, Homo sapiens
gtcttcttgtgctgggagctcagcagcgatcataacacagcaaatcgctgggttggaaaccttggcaggtgtttcctttgattctagacttcaggggctgtggctgtggttgcaaaacctccactgatgatctgatccagagatctaaggccttgaggatagaacatccctcatcctagcaggaaataatgaaaccttctaaccttaaagccctttggaagaaatgaatataaacatgtgagtctctagcgttgctgcgatccttcatattttacggcacgcattctcatttaatcctcaataacatgaaggagcaattggtcacatcagccctaagttataggcaagaaaggcacttgtcccagatcttgtggtgaggaccagagcttaagctagacgcagtggctcatgcctgtaatcccagcactcagggaggcagaggcaggtggatcacttgagctcaggagttcaagcccagcctgggcaacatggtgaaaccctgtctctacaaaaaaaaatataaaaaaaattagccaggtgtggtggcacacacctgtagtcccagccactcgtgaggatgagatgcaagtatcacttgagcccgggaggcggaggctgcagtgagccatgata

SEQ ID NO: 121206 - DNA, 406 bp, Homo sapiens
gtgcagtggcacgatctcggctcactgcaagctccacctcccgcgttcacgccattctcctgcctcagtctcccaagtagctgtgactgcaggcgcccgccaccacgcccggctaatttttttgtatttttagtagagacaaggtttcaccgtgttagggagaatggtctggatctcctaacgtcatgatccgaccgcctcggcctcccaaagtgctaggattacaggcgtgagccaccgcgcccggccgagcttttatcattgttaacccacacagcagagggagccattgaaagcgagtgatcggtttggatgcaccttctgaagtgatcgctttggtccctgtgaggagtgcagattgtcacagggccaggggaagacagaggccagtgaggaggcatttgca

SEQ ID NO: 121207 - DNA, 123 bp, Homo sapiens
ttcactcttccttcctcctgcagtggtcatttattgagcatctactatgtgctagggtctgtgctacatgctgggatacagcagtgaaaaaaccaaggctggtctttggtctctaacttagag

SEQ ID NO: 121208 - DNA, 297 bp, Homo sapiens
tttctcataccagaaaataatgagtctacctagagggtttacgaaatgctttaggaccatgcttagcatgggaaaacagtgaatagttaacatagtgagcactaattatgtactaggtactgttttagttgctgaagatacaaaaaagatgaagtctctgttctcatagcatttattttccagtggaggaggacaaaacaaataaaaatgagcatgatgattcgtgaaacttacaaacataatttctgagcaggttagtgagccatgattgcaccactgcactccagccagagtgac

SEQ ID NO: 121209 - DNA, 486 bp, Homo sapiens
cctgcagtgtgccctgtgagcacacacactggcgcttgttcagacacaattgggggtaaactccatgccacttcgtttacttcctcctcttgttccataaccatgtacccctcatgggcctcggcatcggtggataccaggtcatgctgttacatagctacaagaatttgaaaatgagttaaacttttctctgtgtttcattataagactgataagttcttattgtttttaacatgtaaacaccagtgacagtcaggagtcccttttcccttcctctccaaccgtgctctcttctgagcctctgccagcccatctgccttcgcacatgtatgtactgagattaacacagatgcggcgtggcctagcatgtgcctcttccaccaagcagtgggtgtcaaccgccgagtgcacatcggaagctacccagccatctaatcggccaccaggcgtcccggcagatggccacccctggacgtctgctctcaa

SEQ ID NO: 121210 - DNA, 149 bp, Homo sapiens
tgaaggtttcctttcccttctgccccccataccagtccatctatttagtagatgtcctggtttctacccaggatatcatggaccaggggttctgtcttccagccttgagtacaatggtgcgactatagctcactgcagtctcaacctcc

SEQ ID NO: 121211 - DNA, 230 bp, Homo sapiens
caaaccttgccttctgttcatgtttctgtgtaatctcctcgccttgagggtgtttggaacttgggactttctgctaatgaacagaatttagaagtgatagggtctcacttctgtgactaatttaccaaaagactgtagcttctggcttgttcatcctctcttgctctttcactcactctgatttgcacctgctgccataatgggagctgccctgtggagaggcccatgtg

SEQ ID NO: 121212 - DNA, 181 bp, Homo sapiens
ttttattttaacctagttttccagtttatatccagttttctaaatgtcccctaagataggttgcagacttctcaggttggtttgtaggaagttatgatgaaaacaccgaattgccgttttctatttattaaggatgtgccgtgtctagggggaaagtctcatgtgagttattttatactgt

SEQ ID NO: 121213 - DNA, 521 bp, Homo sapiens
tggacaataagggcgaaactccatctcaaaaaaacaaataaaaaaattatttatgagtttctaataatttaaggcttaaattaaagccattataaataatatgaagaattgagtgctctatataagacaatctttgcaaaagactactggttctctcgcaaaccatttgtttactaacatgacaacagtcacatgagaaaggcaaataaaatcaaacccacaaacttccccacctccccttatcaaagacacacacctgaatagcgtgatcagtgacacgttaacttgcattgggacattttaaattacctactacagaagtagtttatttctcaactgtaaatatactgaatattcgtgagaattcattgttctgagtttgctttaaaacgtttttataatttacaaaacaccacacagtaaaaatgttgatagaaaatatacaaatataaaattacagagcacaaggacagaattttggtacaaagagccaagactaatttagcaaatggtaagacttt

SEQ ID NO: 121214 - DNA, 493 bp, Homo sapiens
catgatttatagtcctttgggtatatgcccagtaatgggatggctgggtcaaatggcatttctagttctagatccttgaggaatcgccacactgacttccacaatggttgaactagtttacactcccaccaacagtgtaaaagcgttcctatttctccacatcctctccagcacctgttgtttcctgactttttaatgattgccattcgaactggtgtgagatggtatctcattgtgattttgatttgcatttctctgatggccagtgatgatgagcattttttcatgtgtctgttggctgcataaatgtcttcttttgagaagtgtcagaaataacagtatttcttttacagagtttatataaaagttcaataagatcatgggtaacacatttagtacagagtctgcatcatgtgttcaggaagtatttacttgctatgataattactattaacaataaagatcttaaataatttcatatatagaatgtctt

SEQ ID NO: 121215 - DNA, 924 bp, Homo sapiens
acgttctactctggccaccacgatcttggcagcccacacctgatcaggacctaaagcgtgaagggtgtgaatgaggagaaacgaggaccgcctgctaccccagcgtctggccccctggggactgaaggctggctctggagctgtacctcggcaactgctataaggctgccgaagccgccgccactaaggcggccgccagcagcctgaatgcaggttatatgtcccttgaaggagttgagtaaatacaggcagtatgtgactagtttaaaattagactttgaaagaaactgtataagagaacaaggtttcactccaatcacccaggctggagtgcagtgggatgctctcagttcactgcagcatcaacttcccgagctcagccggccaacacttatggaaaatagaaagaacctatgttgaaatattgggggcaggttcccccaatacaggaccacataagaagaaatcttgatctctgtagacaaattgaagaggcaaaaaagtcctgttgtgtctgacaaaaattaagtcgtaaatagagaagcaagagctgaagaatgacaccagaaaacctgaggacaaactggctggaagagacgggctctcactctgtcacccaaactggagtacagtggcacaatcatagctcactgtagcctcaacctcctgggctcaagtgatcctcccacctcggcttcccaagtagctgggactacaagtgcacaccaccatacctagatatttttttgttgttgtttttggtagagatggtttctcattatgttgcccaggctagtcttgaactcctgggcttgagtgatcctcctgcctaggcctcccaaagtcgtggaataataggcatgagccgccacattcagcctatttttaaaaatattttagaaacaagcacttctagagaaaaac

SEQ ID NO: 121216 - DNA, 181 bp, Homo sapiens
tcaaagcactcactaagggtcaagtccatactaagctggtacccgcctcaattattttatcctcagagccaccttggaggcaggaacaataagtatctccactggaaagatgaagagactgaagttcagagagtaagtggtgggtagccagatttcagcccaggcctgcatggctccaaag

SEQ ID NO: 121217 - DNA, 413 bp, Homo sapiens
ggctcactgtatgctctcagatcaagggaaaggacactacggttgtggttgccgctattccaccctcagtgtcctcatccgtcatgtgtgttgaacacactctgtgtagccccatgttctgtgggaagcctggagctcctgaggcctctatggggcaggccctgctcgagcagggtagtttgcacagccaggctttcccaccttccctcaccctgagctgttctgcttggtttggtgacatattaaaatgtttgcacaccacttacctggtgtaaagggcttgggacatgtcaatctccagtcagcatcctctgttcactcacccttcccaagctctgtgccacaaacacacacacgcacacacacactatacaatacatccacacacataatacacaaccacaacacacata

SEQ ID NO: 121218 - DNA, 233 bp, Homo sapiens
ggcggggccttctggcagtttctgggagctgcgaacgcgccgccccggggctcggcggccggaaacgctggcttcggagccttaggcgccgcggcctttccttgttttccgcccagtccacgccgccatggccaagtggggccaggggaacccccactggatcgtggaggagcgggaggacgggaccaacgtgaacaactggcgctggcgcggctggcggcggcctccttccg

SEQ ID NO: 121219 - DNA, 574 bp, Homo sapiens
gttctctctcctggcactctcatcccctgtcctctacaattctcagttcagaactgagtgtgttgtattcttagactagacacagggagcctgctgggagctctcccagtccaggtcctacccccgtttcagcacgtagtttgtacttgcttattagcctgatgtcccaccagagggataggtccttgtctacttagcacacctttgcatctcttgcacccagcacagttcctgccactggataggcatatggtaagtgtgtgttgaatgaatgaatgaatagatcaattaaggattctaccgttcaagaaaggagacacctttacttataggtagaagttgatatatgctatgagaatcatacaaatagactataaagtgtttctgaaattccaaaaatggataaggagaatttatttgaggactccatgagattttacagtggagaggacgctgaagatgaaccttaaagaatagggagcatttggacatgagtgagctggggaggaggaggagcgtgggtgaccaacaaggagtggaaagtggaagaatgtgaagtttccttcaatttctg

SEQ ID NO: 121220 - DNA, 500 bp, Homo sapiens
cccagaagtgtcccaggctcaacaagtcccagaatggaacctcattggctatgaggtcgattcctgagtcaattgtaatggctagataagggaagcaatgctatgattggtctggttggagccatatgcccactcctggagtctgcttctcccaaacacatggactgacacttggtattatgttgtacctacccactcccccaaaaatattgggatgatatttccagaaggagggagaatggatgcttgtcaggccataattaaatatattcacctcaaatgaaatattcaccggcagtttctactccatatcattcataattgcaataaggatttgccttctagaccagaattgtgcaatagaatttttttctgatgatggaaatgtgctgtccaatacaatagctgctaaattttttattgtatttagttagaaataatgtagtcaactgtggctaagctagaggctgctgacttagaaacacagtcataggccatta

SEQ ID NO: 121221 - DNA, 442 bp, Homo sapiens
cttggatatggagggagtgagagggattcagaatggtgatttggcagtgcctggtatctggaggctaacaataaagaccaataaagactgattgaagacgacgcctgcactgaaatctatccccacctggctgatgatccttgcacacctgtgaaacacaggacttgggttatcaactctgcatggttgctttgatggagatggagctccttgtggacttaaggttttttcagccttttgttcctttttcctattcttgattcccgtaccatccttttgggcatgtgtaggatttgaagaaaattccttcagcagaggcaggcaggagtgttggacttgttctcagttacatgtggattgagataaaattcaaaccttgctccttctgctcttcctttcttccatggtgttctcaaaactgtacttctcatctaaatatggt

SEQ ID NO: 121222 - DNA, 493 bp, Homo sapiens
ctgggactccaagcatgagccaccatgcccagccataatattttaactttttaaataaaaagaaatgtattcatatataacttgtataataaatgcttttaaaaagtgagctcattaggtctagccatcctggtagtctctgggtatcaatggttctcatcctgggcagtgcctcagaaccaccagggaagcttttttaaagtatgcagcctgacactgcactccagcctgggcgacagagagatcccttgtctcttaaaaataagttttttttttttttttttaaattgtgctgcctggacttttctgcagatcaattgaatcaaaatctctggagacttccatcttaagctcttcagatgattccaaagtgtggccaggattgagaaccacatgtggagaaaggaatagactgtgtccttcaaacaattaccagtagactcccaaagagaatttgataaggatccggtggaaggtcctttgaggcatatta

SEQ ID NO: 121223 - DNA, 474 bp, Homo sapiens
tcttttaggtttaggggtctatcaagaaaaatcagaaagctgctttatgtgtgaagggacattgtgcacaacctgagcctggctgtcaggttatctgacgttaggatctggggtttaggggaaaggatgcctgcgtttgtgcttccccttgcgggggagttgcagactggctctattgccagccagctcgcacaccatcttcccgtggagagagtgcagatccctgaaaggagcaggcaagaaggggccgggtataagcctgaccaaaggtgggcccttggacttaggtggcaagtggtaagcatgggcggggaaggcgatgagtgactgtctgtgtgtacatccgtgtgtgtgtgtgtaggggcactgagaataaagtgtgagtgagggcttggagctctggaaatctcggcagttctttggtggctggggctgcagttgctggagcagtaggtgggctggaggttcggcttt

SEQ ID NO: 121224 - DNA, 584 bp, Homo sapiens
tgtggttttcattcacatttctctcacccatgatggtgaatagtgagagagagagagacactgtgtgtgtgtgtgtctgtgtggcatttagttgttgcttgtttgtagtcttgtgttctagtctaccagtaatatttccttagactttcactgtcattgatgatcttgacacttttgaagagtgttcactagttatttgattgaatattccttagtttgagtttgtccagtgttctctcatgattgaaatgagattatgcatttttggtaagaataccacaaaaataatgatatgttcttctcaatgtatcattacatgagattcatgatgttgatatacctcaccgatgataatattcacattgattacttggttaagttggtgtagggtgggtttctctgccgtgaaggtagtatttttctctccgtattttataagtatctcggggtacttttgagactgtgaaagtcctttttctcttcaaatttttgcctgctattagcatctactggtgaggcttgtttgtgacatttatggctatggtgtttacctagccataggctggagtgtagtggcacgatat

SEQ ID NO: 121225 - DNA, 747 bp, Homo sapiens
ggctcaagcgatcctcccacctcagcctcccgagtagctgaggcacgagaatcgcttgtacctgggtggcagaagctgcagtgagcagagatcacgctactgcactccagcctgggcgacagagagaaactctgtctcaaaaacaggaaataagcattggtatgatgttgttaactatagatcttatttgaaatttattactttttcttttactagtgtctgttttgtgttccaggaacctgtgtggcatttagttgttgcttgtttgtagtcttgtgttctagtctaccagtaatatttccttagactttcactgtcattgatgatcttgacacttttgaagagtgttcactagttatttgattgaatattccttagtttgagtttgtccagtgttctctcatgattgaaatgagattatgcatttttggtaagaataccacaaaaataatgatatgttcttctcaatgtatcattacatgagattcatgatgttgatatacctcaccgatgataatattcacattgattacttggttaagttggtgtagggtgggtttctctgccgtgaaggtagtatttttctctccgtattttataagtatctcggggtacttttgagactgtgaaagtcctttttctcttcaaatttttgcctgctattagcatctactggtgaggcttgtttgtgacatttatggctatggtgtttacctagccataggctggagtgtagtggcacgatat

SEQ ID NO: 121226 - DNA, 747 bp, Homo sapiens
cctgaccttgtgatctgcccgcctcggcctcccaaagtgccgggattacaggcgtgagccactgcgcccagcccaaagtttccttttatctctcaccccacttctaatgttaacagctcacattactataaaattatcaaaaacaggaaataagcattggtatgatgttgttaactatagatcttatttgaaatttattactttttcttttactagtgtctgttttgtgttccaggaacctgtgtggcatttagttgttgcttgtttgtagtcttgtgttctagtctaccagtaatatttccttagactttcactgtcattgatgatcttgacacttttgaagagtgttcactagttatttgattgaatattccttagtttgagtttgtccagtgttctctcatgattgaaatgagattatgcatttttggtaagaataccacaaaaataatgatatgttcttctcaatgtatcattacatgagattcatgatgttgatatacctcaccgatgataatattcacattgattacttggttaagttggtgtagggtgggtttctctgccgtgaaggtagtatttttctctccgtattttataagtatctcggggtacttttgagactgtgaaagtcctttttctcttcaaatttttgcctgctattagcatctactggtgaggcttgtttgtgacatttatggctatggtgtttacctagccataggctggagtgtagtggcacgatat

SEQ ID NO: 121227 - DNA, 657 bp, Homo sapiens
tggactgggacaacctcgggacccgtttatagcaccatggtactggacatgttaagggtgaggtgtctaagtacacttccaaatagagacgtcaagcagacagttggacataaaagtctggagttcaggtaaagaagagtaacggaaatgaacacgtgagactcttaagggcacacacagaggttacagccattagaatgaatgagctttctttcccagggagtgaacagagacaaaaagtagacaagatatctgaggacttatccttaagaactccaaaattataaacatgtagagtctccacagcaactagcaaaagataaaatgaggagtgagatgtcccaaaagcaaaagaaagaaaatggttcaagaagatgagagaggtcaggtgcagtggttcatgcttgcacttccaccacttagggaggctgagacaggaggattgctttagcccaggagttccagaccaacctggataacataaagagacccagtctctaccaaaaagagaaatgatctagcagagtcaccaaaagagtatccagtggggattcaaaaaagcttcttgccaaagagcatatgatcccaacaacagagatctcaccaaaggggcataaccacggtacggtcaaccgggggcgtgcaggtgacctatgc

SEQ ID NO: 121228 - DNA, 380 bp, Homo sapiens
caggagtctcccttccagcagagaggcctcttgtgcactctgtgctcgcctgggggccttttctggcactctgggcacacctggagctcctggggactgggaccacaggcagggtgactctccactgccccgagcctcctgcccctcaccaggccctgttagcatcacctcgggcacctggccacagcaggggccagtcagggcaccccgggatagcacgcccaggccctgtgcaaggcctctggcacttaggagaggcttttgcccctttgtcctctgagcagaagggttggcaaagagggaaggggacaggccagttctgcacctggcctttctccagaatgaaggcctccacctcccgtccgtccccacagaaagaa

SEQ ID NO: 121229 - DNA, 212 bp, Homo sapiens
aggggaggggttcctgcagcaaatggccactcccaggaagccaggctgatcgaggaaaagggtttgtctgtttgccttttaaaggagacggcccagggaggactcggtggacacagaagctccaagacttttcttctgatgctttcctttaaatttctttttttttttttttgagacagggtcttgctctgttgcccaggctggagtgcagt

SEQ ID NO: 121230 - DNA, 561 bp, Homo sapiens
ggaatcaacatgcaaagtttcagtacaattctgggatcccagaccccctaaagcccaatccaaagacctcaaatgaacaactcctgggcccagttcctttctcaaccttctgcctcaggtgtccaatgtcccagaggctctttcctgattaaaaccaccttcactgactgatagaaagttgtttccaggttataagagaatacaatttctcttgaagatttttcattttaactagaccccaaattacagttgataatggggtgttacatttttcggtccacagaatcagtgagaaacgtttaaggggaaagtgaggggcaaaattggtaccctgatatcccatctgtgggccctcagactgacagactcacactgtggccctgaagagggcatcaaggctcatggaatctccaggtttctgccaaggagggttccagtgcatggagggcacacggagtgtgcgcctgtggaggccactgtcttcacctccaacactgagtaaatctacaatatcctagccactagccactgttttaggctctaggctgtaggaatatgggg

SEQ ID NO: 121231 - DNA, 699 bp, Homo sapiens
ttttgcagaagcctcaagataacgtactacacataaattctgcactgagtttccatgaattaacagactcattaaaaaccatcagttaacaacccctggagcacgcagttaactttggaaaaatggatagatgctttcttccaagatcaaaagacaaaagacgtcccaaagaaaggtgaagagggaagaaatgcagaagctcacatcaaatggcctggctccctgagcaatgtttctgcctatgtactatgtgccaagcaggccacagcgcagtttagatgttccaatccagtctaagtggtgtggccgagccaggacaggcaccacaggaactcagaagggaaggtacagcctggcctcggacggtgaagaaatgcttcccatggggacagcgcatggtctccatctcagaaaggggcgaatcaggcaaagacagaagaactcactggaaagaaaaccctgcacaggccaggcgcggtggctcacacctgtaatcccaacactttgggaggccgaggcgggtggatcacctgaggtcgggagtttgagaccagcctggcaacatacaagatctcatcccccccagaaaaattttgattagctgggtgtggtggcccgtgcctgtagtcccaggtacttgaaagcctgacgtgggaggatctcttgagcctaggagttggaggctgcagtgagctatga

SEQ ID NO: 121232 - DNA, 203 bp, Homo sapiens
tttagatcccacttccttcatgcctttgcctggaaaaatatatttatgtcttcactgattcatacaacccagtgcatttcatgagtagctgcctactatgtgccagacatggggctccacagtagaactacagatctgcctgggattgacagagttcacaccctgtgttcaaacgcttctctttcatgaagtttcccctcatt

SEQ ID NO: 121233 - DNA, 280 bp, Homo sapiens
catggatgatgcctgtgtgttgctgaagacttaagctgtttattatcagtattctcaaaatgttattaggctatgttgagttttagagtttcagagaaaatactttataaaatggaagcctcctgtgccagggaggaagaggaggttctctgaaggatggtgccctgtcccccagaacagctacaggcataccttatcatctgcatcgtttcaaaaccaaaggtacagatgcattttgatgtcttggggaagttttaaagggaacatgcaatacttcagc

SEQ ID NO: 121234 - DNA, 103 bp, Homo sapiens
tcaaaaagagtgagagataatttgcccttctggctttttgttcattgtttgggccctagggattggataatgccagcccacactggtgaagtcagatctctgc

SEQ ID NO: 121235 - DNA, 686 bp, Homo sapiens
gcgcacgtgtgtgttttgtgtattattgtcaggaggcagggatggtcatggaggtcccaccccaaggctgcaacctacaaatgacacgtctcagccctggtctttggccttgacttacaccagatcagtgggaaaaagaaacatgtaggtaaagttgatccttgaacaacatgggtttgaactgaacgtgtccactgatttgtggattttcttccacctctgtcattcctgagacagcaagaccaaccctcccactcctcctccttctcctcagcctagtcaatgtgaagacaaggatgaagacctttctgatgatccacttctacttaatgaagagtaaatgtattctttcttccttatgcttttctgaaaaacattttaacatctaaaatatgtgttaattggctatattattgataagacttctctgttcagtaggctattagtagttaagtttttggtagttaagtcaaaagttatatgcagatttttgacatgtaggggagaggagattggctcccctaatccctgcattgttcaagagttaactgcaattgaaaataaaagcaatgctaaattgttacacaagtataagcaactagaataattgttttttctcctgatgactactctgatggttttcaaataataaattcaataaaatttttttatttcaggtgcccctg

SEQ ID NO: 121236 - DNA, 217 bp, Homo sapiens
gtacagacaccagctgttccccacatccgccttatggggtgacctgggcccggctggcagacaagagcaagacggtgcaggaaactctgtctgacaggggtgtccaatttcccacccagacacctgcctgcagtgtgaggcagacaggaaggggcaggactcagcctctcaggatgtcagtttattattttcctgttggagccttgaggagcctcaa

SEQ ID NO: 121237 - DNA, 760 bp, Homo sapiens
cgcggtggctcacgcctgtaatcccagcactttgggaggccgaggtgggcggatcacgaggtcaggagatcgagaccatcccggctaaaacggtgaaaccccgtctctactaaaaatacaaaaaattagccgggcgtagtggcgggcgcctgtagtcccagctacttgggaggctgaggcaggagaatggcgtgaacccgggaggcggagcttgcagtgagccgagatcccgccactgcactccagcctgggcgacagagcaagactctgtctcaaaaaaaaaacaaaaaaaaacaaaaaaaaaccacaacattgctgtcttacaacctactctttccggtacccaatactccacaatatttttcatctttataattaggctactaaccacctaagagaactgttcataattgatgacagtaatgaaggtgcctcagaaacaatgaacaggttcgcttctgattgctgcaaagtacctgggtagctccgtcacctgcaaaggcagaggaacaatacccagggtctaataattgcttactcaaactaacaaaaggagaaaaaaaaagaggaagtagagaaggggcagcactctaaattatttaatgtgattcccatgcttgggaaaacactgaattcatgcaaccagcaggagctggaatgctcctcagtataaaaggcaccatataaaaagaattactgaatccaaatgcaatattcattttcatttaacatccaactacctagaggattgaggtaatga

SEQ ID NO: 121238 - DNA, 287 bp, Homo sapiens
cctggccaacacggcgagacccccatctctataaaaaataaaaaatattagctgaatttagtggcatgcacctgtagttccaactacttgagaggattgctcctggtgggaggattgcgttagcccgggaggtcgaggctgcaatgaaccatcattatgccactgcactccagcctgggcagtagagcaagaccctgtctaaaaaaaaaaatccacagaaggttgaaggtaaatttaataaaatatctcaaaaaacagaattaaagaaatatttaaaatatgaaaaa

SEQ ID NO: 121239 - DNA, 449 bp, Homo sapiens
tctctgcccttcactaagaaagaggtgtgtcatggcagataacaacaaccagtgtataccaaaactgtcttagttggcttgtgttgctgtaacaaaatactaccgatgggatagcttaaacaacagacatttattatctcaaagtcctggaggctagaagtccaagatgcaggtttctgccaaggtggttcctgtgagggctcacctcatggcttgcagacagctgctatgtcctcacatggtttctcctctgaattctcatagaaaaagagagagagggagctttctggtgtctcttctgataaggacagtaactatattggatcagggtcccacccttatgacctcacttaaccttaattacttccctataggtgccacctccaaatacagacatactgggggttagagcatcaacatagacattcggtagtagagggatgcgattc

SEQ ID NO: 121240 - DNA, 166 bp, Homo sapiens
atgggagttaaattctaattgttttaatctaatagccaacaaacaaatttggaacaactagaggacaataaaaacatgtctaagttctaaattgatgcagaattccattgctatagggattcagagaatggagaagaggccaagaccaaggagctagacccaatgg

SEQ ID NO: 121241 - DNA, 619 bp, Homo sapiens
ggaaaaaccaaagaggatttgaaacattaataaaaactctatgcaggatagaaagagaagctaacaagaataggaagtgatttatttcaggataaaacaatattaaagagaaaggcccactaataaacaaggtcatacgactctaacaaagcccatctttaatggaaaaattaaatccatttttaaaagctaactttagtggttgctttggcaacacataaaatttattatactaaaaaaattttatttatttttttatactaaagaaattaaaagtgctgggattacagacgtgagccaccgcacccggcctagaacctctttatatgtgtctgcttatcagtcgtccatctaagcttgaaaattttcaaggatagggaattgaaggaacattaaggtagccgttttaagtttgaaaagatctttctaccagctgggccaacatggtgaaaccctgtttctactaaattagctggccatgatggcaggcagctttaatccttgctactcgggaggctgaggtaggagaattgcttcaacccccgggagggggaggctgcagtgagccaagatcacgccactttactccagcctagccgacaaagcatgactctgtctc

SEQ ID NO: 121242 - DNA, 419 bp, Homo sapiens
agtacggcagagcaggacaaagaagggtggaattgaaattgacagtcaataatttgacaactgatgcagatgggttctgtaaggctcagatgaaagcaggaggagttttagtacagttttacattacctggtcagaaatccagcagcctagagtagtagggagagaagtggggttgcagcagcagtggcagggagcttctcctctgggctggtaagttgcttttatactcttgtttcacaaccaggaggtggctggaaaaatgcatgtgttctgcagaaggcgtacctatcagcatcaaagataagacaggaatatgcactccagaggatttcccacccacggtgcctccctgcctggatgcttctggaaaccctagtgaggtcagataggctcccatctgccccacagcaatgagtgt

SEQ ID NO: 121243 - DNA, 275 bp, Homo sapiens
tttggcctctgcatactggattcagctgcccctttctggccactcagttctcatttgggcctgaaccagctcagcctgcattgcctcatggtctgtctgaacaaattggcaggtcctttctctcctgatattgctctgatctgacccttcctatgtcgccccccagctcctactcctgtccaagccaggcctggcttgctcaggtctgttcgggggtttgaggcttttggacagcatacagagacacagatgtgttataaaagaaactctgtata

SEQ ID NO: 121244 - DNA, 301 bp, Homo sapiens
ggcaagggaggaacaaattcctaatgaaggctgttgagcagctggatccaggtctgcttgaacccaaaagttccataatcttggacttggttgctttagacaatatatcttctaaaatttaatgcaattaatcatgtatgagtcagatttctataacttacaactaggagttctaattaatgtcctatgaacttgtttagctgtaggatgtcaagggagtcagtatattttctcactgaccttttccctaagggtctcactgggtgcatagttatgtacactcatacacttccactgcagc

SEQ ID NO: 121245 - DNA, 596 bp, Homo sapiens
taaagtgatgggattacaggtgtgagccaccatacccggcctaaagcaacccttgaggtccctccacagccaggcggctggatccacactaacccccaccccacggcacccccaccccaccgtgaggcttctccccacaagggcattggccgaggcttcgtggctgtggatgaatgaggccaacatggtggaaagtaagtgatgcagagtcagaggcagttcctggaagatgcactcgctgttcccaaaacgccaagccacacccactcctttagggatggtagacattggggtctcggttttattggtcatcctgagaaggccactggagtaatagaaagaaatggaatttgaagttgaaaagtgtagatctgccagcctgggcaacacggcaagaccccacctttacaaaaaatttaaaaattagccaggaatggtggcacgtgccagtggtcccagctccgagggagactaaggatacaggatcgcttgagcctgggtgctcaaggctgcagtgagctgagattgcaccactgccctccagactgggtgacagagtgagatttgtctcaaaaataaaaaaaggaaaaaaaaaa

SEQ ID NO: 121246 - DNA, 359 bp, Homo sapiens
tgttaaagccatttctacatgataaaaaattttaaaaagaaaaatatcctctgttcgaactgagggtcagtatttgccctcctcaaagaaactgtaggaccaaatccactttgtttcaatcagcctttacccaatgactttttacagagaacagtttgtgagacccatcaaggtactcttcattatgtgtctgttatagcctgtaatacccacctcactatccataccctattaatgagcacgcttcgcgcttcctggcccatgaccctgtctgcactcccttccatgatgctctctggaacttttgctctatgaccaatactaccctgcatccataataccttggaatggtctttctg

SEQ ID NO: 121247 - DNA, 736 bp, Homo sapiens
gggttataagagtgtttgcaagtgtcatgatggccacaaataaaaaatgttaatatgcaacaaataaaaagcaaataagtaaatcatatcaacagagaaattcatctttgattaaaaaaaaaagaaaaaaagaaaaaaagaaagaaggaaagaagaccacaaaccaccaggaaccaaatattaataacaaaatagcaggagtaagttcttacttatcgataacaacattggctgtaaatggactaagctcttcagtcaaaagacatagagtggctgaatggataatcaaaaaagacccttgatttgttgcctacaagaaacacacttcacgacttcacctataaaggcacacacagactgaaaataaaggaataaaaaaaaaatgccatgacaatggaaaacaacaaagcaggagtaatagtatttacacaagaaaaatagatttcagaccaaaaatataagaaaaggcaaacagggtcattatataatgataaagggttcaatttagcaagaggatacagtaattgtaaatatgtttgcatccaacgttggagcactcagatatataaagtcaatattattaggagtaaagggaaagatagacctcagcaatagtagatggagacatcaacaaccactttcaacattggacagaccttccaggcaaaaaatccacaaagaatcatcagacttaatctgcactgtagataaaatggacctattaaatatttataga

SEQ ID NO: 121248 - DNA, 296 bp, Homo sapiens
cattcatctgctgtgtgactttgggcaagtgtcttcacttctctgagcctcggtttactaatctatcatcacagttttttgtttttttttgagacaaggtctcactccgtcgcccaggctggagtgcggtggcacaatctcagctcactggagcatccgcctcccgggttcaagcgattctctcacttcagcctcctgagtaagctgagattacaggcgcacgccaccacgcctgattaatttttgtattttttttggtagagacagggtttcaccctgttggccaggctggtctt

SEQ ID NO: 121249 - DNA, 198 bp, Homo sapiens
aagcatttctttgtaagaccttgaacctcatagctcactcatgaagaatatttttattttattttcattcttttttgagacagggtcttgcccgggctgaaggacagccgcacaatcacagctcactgcagcctccacctcctgggctcaggtgatcctcctgcctcagcctccagagcagctaggactacaagcgca

SEQ ID NO: 121250 - DNA, 1672 bp, Homo sapiens
ttcccgggttcacgccattctcctgcctcagcctcccgagtagctgggactacaggcatgagccaccgtgcccagcctcagcttttggttttattgatttctttcttttgtatgtttctgttttttcgttttttgttttggattcctgctctcaatgtttattattccctttcttcatcttgctttatatttactttgctcttctttctctgttccttgagacaaacttggttactgactttagatattattttttaatgtatatattgaatgctataaacttccctgttaacactgctttgtctgcatcctatatgttttgatatattgtatttatattgttctttagttcaatccatgttttaatttctcatgagactttgtttgttacctatgtgttatttgaaagtttcttgtttcatatccaattgtttgagggaattttccagatttttttttttcatttctaatttgtatgatctcaggatgcaccttgtatttttttctatgtttaaataattaattgaggtttatttaataagccaaaacatgatctgtctttgtgaatgctacatataattgagaagaatatgtattctgttgttgcttaaagtgttctatcattatatgaagttgtttgatagtaatgttcaggccttccatatcatttgtgattttttacttgttttattaatttcttagcagtgttcaaatctcaaactaattttagatatgcctacttgttttttcatacctcatttattgtcttattcattttgaaaacctttgattaggtgcgtatacctataagattattatgtgttcttggggaaataactgtcttttcatgaggtttctctttatcctttgataatctttcctgttctgatgtctattttgtttcatattaataaatattttcaacctatttctttggttagtgttttatgctgtatctttctccacccttgtacttttaatcattgtatgcctttatagtttgtgtatgtatgtatttcacagtaagtaggtgggtggttgggtttttaggtaggtaagtaggctaaatagataggtgggttggcttgtgttttattccatgtgacagtgttcatccttttactggtggtgtttagaccattacaatttaaaaaaaaactttatttgggcaaaacttatataatttactcattttaagggtacaattaaattatttttagtaaatttagtgagttctgcaactaacaccattattccagttttgtaatgtttttaccaccccagtaacatttttcataccactttacagttaacctttgttcccatcctcacccccaggcaaatactaatctactttcatctatgttgatttgccctttctggaccttccatacaattagaatcatataacatatagtattttatgtctcagttcttttacatgggttaattattttgaggtttgtctatattattatatgtatcagcctttcatttagtttatttgtaaataatattcaattgtgtcaatatgtctcattttctttctccattaaacacttgatgggaatttaagtagtttctgtgttttggcaattatcaattatgcgtctgttgacattcatgtggaaatatttaagcggacgtgctttcatttctcttatgtaggatt

SEQ ID NO: 121251 - DNA, 890 bp, Homo sapiens
ttcagatcttgctaactctccccaactgttccctgcagtggagtcagggaaggcaaccgacgcaagagtcaggagagctttcgggtgctaccgaagcctgaatgcatccttgagagggaggaagaggtcagcatcaagtccaaagggaggatgttgagtagcgtaaggagacctggtttatccttcatcacatacacaaacctgcaactaccatatgacccagcattttcattcttgagtgtttatcccagagaaatgaaaacttaacgttcttgcaaaaatttgtgtatgaatgttcatggcatcttgttcatgatagtaacaacacagaagtgcccagatgtcctttaatgggtgaatggctaaacaaatggtggtgcattcataacataataccacacaggaatgaaaaacaaagctgatgcacaaaacaacctggatgaattcccagagaattatgctgaatgaaaaaagccaatctctgacgtatagttacatactatattatactatttacataatattctttttttttctttttttttttgagatggagtctcactccagcctgggtgacagagtaggactctctcaaaaaatgtctttgatgagcagtaaagttactagtttcattaaatatggacccttgagtacgtgtcttcttaatatggtgtgatgaaaagggaagtatgcgtgaagcagttctgcaaactgaattttaaattatcttgaggaaaatcacctgtaacattgtcagcaagctgtactgctcactttttaaaatttacaacattatacttagaagaataactaatagacaagctacagttttttacacttgggtattgaccagatatgtttttctaaataaaatgggcttatcctttcaa

SEQ ID NO: 121252 - DNA, 792 bp, Homo sapiens
ttcagatcttgctaactctccccaactgttccctgcagtggagtcagggaaggcaaccgacgcaagagtcaggagagctttcgggtgctaccgaagcctgaatgcatccttgagagggaggaagaggtcagcatcaagtccaaagggaggatgttgagtagcgtaaggagacctggtttatccttcatcacatacacaaacctgcaactaccatatgacccagcattttcattcttgagtgtttatcccagagaaatgaaaacttaacgttcttgcaaaaatttgtgtatgaatgttcatggcatcttgttcatgatagtaacaacacagaagtgcccagatgtcctttaatgggtgaatggctaaacaaatggtggtgcattcataacataataccacacaggaatgaaaaacaaagctgatgcacaaaacaacctggatgaattcccagagaattatgctgaatgaaaaaagccaatctctgacgtatagttacatactatattatactatttacataatattctttttttttctttttttttttgagatggagtctcacctgtcgccaaggctggagtgcagtggcacgatctcggctcactgcatcctccacctcctgggtacaagtgattctctgcctcagcctccagatagctgggattacaggcgcccgccaccacacccggctaatttttgtatttttagtagagatggggtttcgccatgttggccaggctggtctcgaactcctgacctcaggtgatccacctgccttggcctcccaaagtg

SEQ ID NO: 121253 - DNA, 378 bp, Homo sapiens
attccagcactttgggaagctgaggcaggaagactgtttaaagccaggagttcaagatcagcctaagctacataatgagagcccatctctaccaaaaacaacaacaacaacaacaacaaaaagccaggcatggtgatgtgcacctatagtcccactactggagacgtcagattgggagaattgcttgagcccaggagtttgaggtgcagtgaactatgaccacgctccagcccaggcaatagagcaagaccttgtctcaaaaaataaaaataaatgtaatggacaaaaacatattgtacactatttgttgaaaaatcatagcacactttctatatgagagatgctggatctcttgtatcaccagttttacagaatcac

SEQ ID NO: 121254 - DNA, 724 bp, Homo sapiens
attccagcactttgggaagctgaggcaggaagactgtttaaagccaggagttcaagatcagcctaagctacataatgagagcccatctctaccaaaaacaacaacaacaacaacaacaaaaagccaggcatggtgatgtgcacctatagtcccactactggagacgtcagattgggagaattgcttgagcccaggagtttgaggtgcagtgaactatgaccacgctccagcccaggcaatagagcaagaccttgtctcaaaaaataaaaataaaaaaaatacctatgatagaataaatgataaagggagaaattttaacatacaggaagcccccaacttagaatagtttgacttaaaatttttgactttatgactgatttatcaagatgtaaccccatcataaatcgaggagcatctgtatatctaatctaggtttcagatggcaatatcagaaaaaaattgaggcaatagtcaaagataatcaccgagaattttccaaaacacttcaaatacacattggtgtgtacagaaagcccaatgagtatttgaagtgattgttccccgctagacggggaacaatcacttataccaaagccttatgaaatggatgaaattttgttaaataggcaaatgtggaattcctcacagattaaccagtattttttaaaagtagtcattcctactataattaactataataaactctgatagtggtatgtcttct

SEQ ID NO: 121255 - DNA, 715 bp, Homo sapiens
ctaaccttttagaaatatgaacttgagaaagagggagcatcacttatatttaaaaaacaagagataaaacttctttgtccaggaaataattatagccattaacacctgagctcacccactcagggatggaaatgaccctcacctcagataggaccatgccactgccctcccgtaaggaactgaaaagaaatgccaatgtcaggagttccaactaaaattgaaaatacacataagacaagccatagatagaactggtttaagagtgcatgtatcttctaaaattaccacattttacttcataagtccttcttatccttgcagaaggaaggaaaatgttacttgaaggtttatacttgcggaaattacaggtagttttcattttgcatatgactcagtagtggataaatttggccaagtccagagacaaaatgccataatttgcacttaagtggaaatgaatgcaaatgtccatttgatgtaaattttacttgcttctctgaatacgttttaaagtttgcaaactgcagtatctgtgcctgccaaatattatcattttctggtttgttactggagtaggaggccataataaaagaagaacctgctgactactacatcaattttttaagtcaatttggaaaaaaaaatctttatcctcttcctttaaaatgaagtataactcctacatgttctaacagtgtttccatcctccataccc

SEQ ID NO: 121256 - DNA, 428 bp, Homo sapiens
tctgtaatgggggtgctagcgtgcatatataaaaagataagtatttttaaaaaggaaacaaaaaaaaacccctggaagtctgcctgatgtacagacaagtttaaaaaccacttgcttctgtgtatatctttccttccccaggaaagtggttcccacatctgcacacagacatgagaagtgccttcaggacacgagatctagtcccatgatcctggaagtttgtgccttgtcaggacacggtcacagccaactctcaaggaaaaaaagatgaatgacattactggttgttcctgagccataaagtggtagaattcttctgcttctagaagcctagacaagagactcctgctttcaggcaattttaaagtaaaagttgcttgccacccttggtcagctctgcagccagcatagctcctcctcaattatca

SEQ ID NO: 121257 - DNA, 325 bp, Homo sapiens
ttaaaatatatatatgttgaccctatcacaattgttaatttaaaaaatatttttaataaaatgagtctctgtttaatggaattttagttggaattaggattttctgtgggcaatagaaagcctcacatgtcagcttagattaaaagataaatttatttctgtctttaaaaatattgaaggtccagtgctgatacagtagtctcacagtcatcagggatcctattatagtaatataatagtaatctataatagatctataatagattactattctaccattttcagcctaggcttatacttcatggcccaacattgtccccattct

SEQ ID NO: 121258 - DNA, 832 bp, Homo sapiens
aggctaaatccagagatgcataagcggaagaggatttgttctggatcacaccaagtgaatccatggagggaaacctctgaggctcagtcactcatcatgaaagcatctcagatgcaacaatcctgactcagtatgctgttttcacaagggtcatgtggcatagcctgggagtacaatgtccgtgccttagtcccttatactctccaaataacagtcaaccccttagattacctaccatcgtagtttttttaaaagccgtggaagaggggaaatgatatttttactaaatctggggtacgtatcttcctggataccctgtatcttagaggctttgttaatagagattacagacgaaatgacggtagttgacttctgggtggggaaacaagttcattgaatattaaagcaagaaaaaaaaaaaggaatttaaagattattagtccaatttatcactggcaaataaggaacctgagtctgggagacctgtccccaaatcgtacacctctataacaaccctgctggattagaattagatcccactttctttcagccataccaaatttgaggttttagaggcgaagtgttctgtaggtatctttcctaggagccctattcagagctaaattgggctattcatcatttgagcctcctttcagcttgagggcttagagttgaggttttaggtcaagggtccatacttagcatagcctaaaacatactgggcactcaacgcacgttaattaaataaatgttaaattcatgtggtttagtttacatgtattctgagtgggtttctgagtgtctggaacttccaaatattttacttaatctt

SEQ ID NO: 121259 - DNA, 765 bp, Homo sapiens
aatgtttctcttaataaaatgatatattttgttttgaactttggaattccattgtggcttggcactaaattataggcctagcaatcctaaatctcctatgtcctcaatatctagaaacaagcaggaactgtttgtcagaaattaaacaggacttatttgaatgtgctttaaaaaaaaaatcaatgaattcaggggaatgaaaatacatgttagaaattaaaatgtggttatctcagctatagttaagaaaattatcaaatgtaaatgatcccttttttgctggatcttataaaatatgtgatacttaagtacactgaagttttaaagttagctgcttatattgtacaaagatatttttggctctttaaaggttattttcctatattaagaaaaggtttcttatattgaaaacttttatggtgactcaggttttgtgtctatgtataggcacacataaataggaggtgtttttctttgcacatttgttttgcacagctaaaataatgaggttaaataatgcccaggtatgcaggtcaattgacctttttaatagcttaacgaaagcatttgacaaatggacaaaagaaatcacattgtatttctttgtatctctccattcctcttacccttccccaaccctctactaaagaatatttcttatttagtcaggaaatcttatgtaatatttttggacggtccataggaaaagcaagatgaaactctcaggcagacaacataaagcagctcccatatctgctagaaagg

SEQ ID NO: 121260 - DNA, 225 bp, Homo sapiens
cacaggccaatttatcattcccctctgagacatgggctgtatatacagctatcatatcaggaagcctgactaggtccccatgtgctgcctgcacaagataacatacaaaacatggcatgagtccagggaaaggcctgttctagaaatttacatcaacagaacataaatagtccattatagtgcctgagcaatttaactggatgagtcctatcacaaatgaaggat

SEQ ID NO: 121261 - DNA, 220 bp, Homo sapiens
gggtaagcagctaatccctcggtagaactaagtacacattaatacaggctaaattttgctaaacaaaaactatcaaagtggaagagctctatgtaactatgttaaccttgagctgaaattcatattggagctgaattcaaattcattcatggaggacgaagatttatgtggcacggttaagtgaatgggcactagagacagactgcttgattcacatcta

SEQ ID NO: 121262 - DNA, 517 bp, Homo sapiens
ttgacctccccccatccttccctctctcagcctcctaaaatgctgggattataggcatgagccactgtaccaggctttaagccagtcttgtattctctagataaaccccatttggtcatggtgtattatttccttgtatatattgctgcatttcatctgctaatattttgttgaggattttcatgtctgtgttcctaatgggtgttgatctttaggtttttgtagtgtctttgtgtggttttggtattaaggtcatgccgggctcctcaggaagtgttctctcctcttctagtttctggaacagatcgtgtagaattagttttgtttattctttaaatttttggtataattcaccagtgaaaccctctgggtgaattcaatttctttaatacaggatcattatctatttgatctcgggtgaattatggttatttcctaggagttttctagttttaccttcacatttggattataccaccttgaattaacttgtgtgtgccgtgaaagagggaaggat

SEQ ID NO: 121263 - DNA, 246 bp, Homo sapiens
tacttgctaggtatatgcagaaactagacttcagggtaactgaacataagacatggaacatcctaacaccgctgacatctaaccttcacaaatgtttttgttctgctttgctttagtggctgtgataggattgcctggacagaaactaataaatgaagaaaaacaagattgtctggacttcacatactatttatctcctatgggtccaagatacaacatgtgtgactctaggctcttctcccttct

SEQ ID NO: 121264 - DNA, 3726 bp, Homo sapiens
agcggggcgtcgcgggagctctctgatccactcaggggtcagggcatcactggtctcgcgtgcgcgtgaccaggcccggtttccggtgccaggacctttccgaagcgtcgagtggcctaacggtcacagctgtcgcccatcggagaggcaggactactgcgagcagttttaccgcgacctccggaggccggcgtgacaggctctgtcactaaaataggagtagaggtttaccactcttaggtgactaagcagtatcacaaataaaccctccagcaagtttaaaaataattaggtccaactcagaggaagtggagtttctcctgttgcacaaaaatgatgtctaacagctccagtgaaatcgatgtgataaaaacaagaatacctacttacgatgaagatgacaacactattctttatgcgtatgaaacaaaacctgaatttgtcaataaagaaccgaatattgtatctgacgcatcctgtaatactgaagagcaactgaagacagttgatgatgtccttattcattgccaggttatatatgatgctctgcaaaacctggataagaagattgatgtgattcgtagaaaggtttcaaaaatccaacgtttccatgcgagatccctgtggacaaatcataagcgatatggatataaaaagcattcttaccggcttgttaaaaagcttaaactccagaaaatgaagaaaaatgaggtttacgagacattctcctaccctgaaagttacagccccactttaccagtgtcaaggcgtgagaataattccccgagcaaccttccaaggccatccttttgcatggaagaataccagcgagctgagctggaggaggacccgatcctcagccgcactccgagtccagtgcatccctcagatttctctgagcataattgtcagccgtattatgcatctgatggtgcaacgtatggttcttcttcagggctctgccttggcaaccctcgggctgacagcatccacaacacttactcaactgaccatgcttctgcagcaccaccttcagttacaaggtcaccagttgaaaatgacggttacatagaggaaggaagcatcactaagcacccttcaacctggtcggtggaagcagtggtcctatttctaaaacaaacagatcctcttgcattatgccctcttgtcgacctcttcagaagccatgaaattgacgggaaggctctgctcctactcacgagtgacgtgttgctgaagcacttgggggtgaagctgggaacggctgtgaagctatgctactacattgaccgacttaaacaaggaaaatgctttgaaaattgaaaaaatccttgtgcaaatttagattgggccaacttctagaggcaccaatgccttcttagtgtggaatcatttttctgccctttagtcgtttttgttttgtagaaagtatctctcaaaatatattatagctagaattgtagaactatgttatagtccagtctacttctttaaaaaccatttaaactgctagatagtattagaatagtccaatagaaaattcattctttataggtctttaaaaattacttttattatattgtttacaaatatatttcatgcaagaaacagaaaaaaaaaaaaaccctttgattctggttcatctcgatacagagaaccaaaacagctaagagaggtattatcagggttgacaactcctatgattgaatctatgggaattattcctcagaagagaatttaaaggtgtacccatatatatctctttctggagtattttatctgtctgatgttgcagtattctacaagtttccagaaagagaatagccatataaattattttcctttctgctattatttctctatatgttttatttattcagatttagagtaaaaaataagcatataaacttttattatgtgctcttaacagttttaagataaactataggatagatagaatggttattttatgcaagaaatattgtaccgcaagggtggtttggatgaagtctgactactttttttcaaacaaactattatattaaaactgtcatattttggctaagtttggacctataactacactttcattgtttgcatctctctatgaagatacgtctgtccaaacttttaaaaggcataactgtattttatgtgtttattctttatatagatagtattttatattttattctcacccgaagtattcacacaatctttttaaaaaaaatttgaaatggcattttgtattgccacagaggtaggatgagccatatattagtgaaatgttttattttgtaaaatataaatggattatttgccatcattagtacctctcaacttactttttagaggacaagaaacaatctgtagattggtttccatacagggaagttctccgtcctatgcaatgtttctaattaatttgcttaattctgagccattaatcctgctacactttgaatgatacattaattcagactaatctttgggggctttattttgtaagttagaactttcaagggaaacatgttcaacactattattttgttataaatttataactttgttattacattgtgtaacaaatataaggtttacgagctatgagaattggtgctatcaccattagctatttgctgtaatgtcaagaaaatgttcaccagatgcaagaatgtaccttttctttttagaaagccaaatgtactttagacatgaatgcaactatttaaagaatagcttcatcaatgttattccttacatgtcataagattcttacttaaacttggtcttctttcaaattgtttgtatgaagatgctgtacccacttgaacagtcctcaggtgtttacataaatactatgttttacagttttcatattttaaaatattaataaagttaaatcacaatagttcattgaaaaaaaaaaacaaacaaaaaaaaaacaaacacaaacaaaaaaaaacacaacaaaaaaaaacaaaaatataaaagaaacacacaatataacaatattacaccaatgacctcccacaataacaaccactatcacaactatataaatataaaatactttttctcatctattactcataatttcaatacatctaccataacttgaaagtatttatttaaaccaaacgcacacccaaatgagagcaaaataaatgatgtcaaactagtaacgtcatcttaccagataaatatgacatacacaacacacactctagggggccggacatacaagaaaaagtggtaaacaaaaaacacaaaagagcaacagtagaacaaacatactcatacacccaccatcacacccctgcaatctacaacactacatgtctcctccaacacaacaaaacacactattcccaccccaactaccacccacatctcccccaagtcccaacccccccactaccacaacacataattaaaacccacaccccactcaacacaacatccccccccccccccccagcaaaaaatagctcgcacgaggccgcccgcctcagccgcatcgcggagcagaccagcgacaggacgatgagaagagcatcaataggagaccgataataaggcgcgagccatcacagtaacgtgcacgacgagttactagcggcacgagatagggcagccgagtaagcacagcgagccgcagcaagaaagcgtgcgcgctagaccagagaacaatagacgaccgccgcctcagccgcgctcgacaac

SEQ ID NO: 121265 - DNA, 3440 bp, Homo sapiens
agcggggcgtcgcgggagctctctgatccactcaggggtcagggcatcactggtctcgcgtgcgcgtgaccaggcccggtttccggtgccaggacctttccgaagcgtcgagtggcctaacggtcacagctgtcgcccatcggagaggcaggactactgcgagcagttttaccgcgacctccggaggccggcgtgacaggctctgtcactaaaataggaaccgaatattgtatctgacgcatcctgtaatactgaagagcaactgaagacagttgatgatgtccttattcattgccaggttatatatgatgctctgcaaaacctggataagaagattgatgtgattcgtagaaaggtttcaaaaatccaacgtttccatgcgagatccctgtggacaaatcataagcgatatggatataaaaagcattcttaccggcttgttaaaaagcttaaactccagaaaatgaagaaaaatgaggtttacgagacattctcctaccctgaaagttacagccccactttaccagtgtcaaggcgtgagaataattccccgagcaaccttccaaggccatccttttgcatggaagaataccagcgagctgagctggaggaggacccgatcctcagccgcactccgagtccagtgcatccctcagatttctctgagcataattgtcagccgtattatgcatctgatggtgcaacgtatggttcttcttcagggctctgccttggcaaccctcgggctgacagcatccacaacacttactcaactgaccatgcttctgcagcaccaccttcagttacaaggtcaccagttgaaaatgacggttacatagaggaaggaagcatcactaagcacccttcaacctggtcggtggaagcagtggtcctatttctaaaacaaacagatcctcttgcattatgccctcttgtcgacctcttcagaagccatgaaattgacgggaaggctctgctcctactcacgagtgacgtgttgctgaagcacttgggggtgaagctgggaacggctgtgaagctatgctactacattgaccgacttaaacaaggaaaatgctttgaaaattgaaaaaatccttgtgcaaatttagattgggccaacttctagaggcaccaatgccttcttagtgtggaatcatttttctgccctttagtcgtttttgttttgtagaaagtatctctcaaaatatattatagctagaattgtagaactatgttatagtccagtctacttctttaaaaaccatttaaactgctagatagtattagaatagtccaatagaaaattcattctttataggtctttaaaaattacttttattatattgtttacaaatatatttcatgcaagaaacagaaaaaaaaaaaaaccctttgattctggttcatctcgatacagagaaccaaaacagctaagagaggtattatcagggttgacaactcctatgattgaatctatgggaattattcctcagaagagaatttaaaggtgtacccatatatatctctttctggagtattttatctgtctgatgttgcagtattctacaagtttccagaaagagaatagccatataaattattttcctttctgctattatttctctatatgttttatttattcagatttagagtaaaaaataagcatataaacttttattatgtgctcttaacagttttaagataaactataggatagatagaatggttattttatgcaagaaatattgtaccgcaagggtggtttggatgaagtctgactactttttttcaaacaaactattatattaaaactgtcatattttggctaagtttggacctataactacactttcattgtttgcatctctctatgaagatacgtctgtccaaacttttaaaaggcataactgtattttatgtgtttattctttatatagatagtattttatattttattctcacccgaagtattcacacaatctttttaaaaaatgaaatgttttattttgtaaaatataaatggattatttgccatcattagtacctctcaacttactttttagaggacaagaaacaatctgtagattggtttccatacagggaagttctccgtcctatgcaatgtttctaattaatttgcttaattctgagccattaatcctgctacactttgaatgatacattaattcagactaatctttgggggctttattttgtaagttagaactttcaagggaaacatgttcaacactattattttgttataaatttataactttgttattacattgtgtaacaaatataaggtttacgagctatgagaattggtgctatcaccattagctatttgctgtaatgtcaagaaaatgttcaccagatgcaagaatgtaccttttctttttagaaagccaaatgtactttagacatgaatgcaactatttaaagaatagcttcatcaatgttattccttacatgtcataagattcttacttaaacttggtcttctttcaaattgtttgtatgaagatgctgtacccacttgaacagtcctcaggtgtttacataaatactatgttttacagttttcatattttaaaatattaataaagttaaatcacaatagttcattgaaaaaaaaaaacaaacaaaaaaaaaacaaacacaaacaaaaaaaaacacaacaaaaaaaaacaaaaatataaaagaaacacacaatataacaatattacaccaatgacctcccacaataacaaccactatcacaactatataaatataaaatactttttctcatctattactcataatttcaatacatctaccataacttgaaagtatttatttaaaccaaacgcacacccaaatgagagcaaaataaatgatgtcaaactagtaacgtcatcttaccagataaatatgacatacacaacacacactctagggggccggacatacaagaaaaagtggtaaacaaaaaacacaaaagagcaacagtagaacaaacatactcatacacccaccatcacacccctgcaatctacaacactacatgtctcctccaacacaacaaaacacactattcccaccccaactaccacccacatctcccccaagtcccaacccccccactaccacaacacataattaaaacccacaccccactcaacacaacatccccccccccccccccagcaaaaaatagctcgcacgaggccgcccgcctcagccgcatcgcggagcagaccagcgacaggacgatgagaagagcatcaataggagaccgataataaggcgcgagccatcacagtaacgtgcacgacgagttactagcggcacgagatagggcagccgagtaagcacagcgagccgcagcaagaaagcgtgcgcgctagaccagagaacaatagacgaccgccgcctcagccgcgctcgacaac

SEQ ID NO: 121266 - DNA, 3436 bp, Homo sapiens
agcggggcgtcgcgggagctctctgatccactcaggggtcagggcatcactggtctcgcgtgcgcgtgaccaggcccggtttccggtgccaggacctttccgaagcgtcgagtggcctaacggtcacagctgtcgcccatcggagaggcaggactactgcgagcagttttaccgcgacctccggaggccggcgtgacaggctctgtcactaaaataggaaccgaatattgtatctgacgcatcctgtaatactgaagagcaactgaagacagttgatgatgtccttattcattgccaggttatatatgatgctctgcaaaacctggataagaagattgatgtgattcgtagaaaggtttcaaaaatccaacgtttccatgcgagatccctgtggacaaatcataagcgatatggatataaaaagcattcttaccggcttgttaaaaagcttaaactccagaaaatgacagtgtcaaggcgtgagaataattccccgagcaaccttccaaggccatccttttgcatggaagaataccagcgagctgagctggaggaggacccgatcctcagccgcactccgagtccagtgcatccctcagatttctctgagcataattgtcagccgtattatgcatctgatggtgcaacgtatggttcttcttcagggctctgccttggcaaccctcgggctgacagcatccacaacacttactcaactgaccatgcttctgcagcaccaccttcagttacaaggtcaccagttgaaaatgacggttacatagaggaaggaagcatcactaagcacccttcaacctggtcggtggaagcagtggtcctatttctaaaacaaacagatcctcttgcattatgccctcttgtcgacctcttcagaagccatgaaattgacgggaaggctctgctcctactcacgagtgacgtgttgctgaagcacttgggggtgaagctgggaacggctgtgaagctatgctactacattgaccgacttaaacaaggaaaatgctttgaaaattgaaaaaatccttgtgcaaatttagattgggccaacttctagaggcaccaatgccttcttagtgtggaatcatttttctgccctttagtcgtttttgttttgtagaaagtatctctcaaaatatattatagctagaattgtagaactatgttatagtccagtctacttctttaaaaaccatttaaactgctagatagtattagaatagtccaatagaaaattcattctttataggtctttaaaaattacttttattatattgtttacaaatatatttcatgcaagaaacagaaaaaaaaaaaaaccctttgattctggttcatctcgatacagagaaccaaaacagctaagagaggtattatcagggttgacaactcctatgattgaatctatgggaattattcctcagaagagaatttaaaggtgtacccatatatatctctttctggagtattttatctgtctgatgttgcagtattctacaagtttccagaaagagaatagccatataaattattttcctttctgctattatttctctatatgttttatttattcagatttagagtaaaaaataagcatataaacttttattatgtgctcttaacagttttaagataaactataggatagatagaatggttattttatgcaagaaatattgtaccgcaagggtggtttggatgaagtctgactactttttttcaaacaaactattatattaaaactgtcatattttggctaagtttggacctataactacactttcattgtttgcatctctctatgaagatacgtctgtccaaacttttaaaaggcataactgtattttatgtgtttattctttatatagatagtattttatattttattctcacccgaagtattcacacaatctttttaaaaaaaatttgaaatggcattttgtattgccacagaggtaggatgagccatatattagtgaaatgttttattttgtaaaatataaatggattatttgccatcattagtacctctcaacttactttttagaggacaagaaacaatctgtagattggtttccatacagggaagttctccgtcctatgcaatgtttctaattaatttgcttaattctgagccattaatcctgctacactttgaatgatacattaattcagactaatctttgggggctttattttgtaagttagaactttcaagggaaacatgttcaacactattattttgttataaatttataactttgttattacattgtgtaacaaatataaggtttacgagctatgagaattggtgctatcaccattagctatttgctgtaatgtcaagaaaatgttcaccagatgcaagaatgtaccttttctttttagaaagccaaatgtactttagacatgaatgcaactatttaaagaatagcttcatcaatgttattccttacatgtcataagattcttacttaaacttggtcttctttcaaattgtttgtatgaagatgctgtacccacttgaacagtcctcaggtgtttacataaatactatgttttacagttttcatattttaaaatattaataaagttaaatcacaatagttcattgaaaaaaaaaaacaaacaaaaaaaaaacaaacacaaacaaaaaaaaacacaacaaaaaaaaacaaaaatataaaagaaacacacaatataacaatattacaccaatgacctcccacaataacaaccactatcacaactatataaatataaaatactttttctcatctattactcataatttcaatacatctaccataacttgaaagtatttatttaaaccaaacgcacacccaaatgagagcaaaataaatgatgtcaaactagtaacgtcatcttaccagataaatatgacatacacaacacacactctagggggccggacatacaagaaaaagtggtaaacaaaaaacacaaaagagcaacagtagaacaaacatactcatacacccaccatcacacccctgcaatctacaacactacatgtctcctccaacacaacaaaacacactattcccaccccaactaccacccacatctcccccaagtcccaacccccccactaccacaacacataattaaaacccacaccccactcaacacaacatccccccccccccccccagcaaaaaatagctcgcacgaggccgcccgcctcagccgcatcgcggagcagaccagcgacaggacgatgagaagagcatcaataggagaccgataataaggcgcgagccatcacagtaacgtgcacgacgagttactagcggcacgagatagggcagccgagtaagcacagcgagccgcagcaagaaagcgtgcgcgctagaccagagaacaatagacgaccgccgcctcagccgcgctcgacaac

SEQ ID NO: 121267 - DNA, 3506 bp, Homo sapiens
cttctgatataataaattcttttcttgcccccttcctcaattgtcagtttttcattctcatattaatgtgaattttaaaaatctctgcttaatttaagacttctgaaaccccttgaaaagttggtgataaataaaaacaatttaaataaataaatatagctcccccctgcccccagtgttcagtttggctgttacagaaataaatcattaactacttttaaaatattagcgaaccgaatattgtatctgacgcatcctgtaatactgaagagcaactgaagacagttgatgatgtccttattcattgccaggttatatatgatgctctgcaaaacctggataagaagattgatgtgattcgtagaaaggtttcaaaaatccaacgtttccatgcgagatccctgtggacaaatcataagcgatatggatataaaaagcattcttaccggcttgttaaaaagcttaaactccagaaaatgaagaaaaatgaggtttacgagacattctcctaccctgaaagttacagccccactttaccagtgtcaaggcgtgagaataattccccgagcaaccttccaaggccatccttttgcatggaagaataccagcgagctgagctggaggaggacccgatcctcagccgcactccgagtccagtgcatccctcagatttctctgagcataattgtcagccgtattatgcatctgatggtgcaacgtatggttcttcttcagggctctgccttggcaaccctcgggctgacagcatccacaacacttactcaactgaccatgcttctgcagcaccaccttcagttacaaggtcaccagttgaaaatgacggttacatagaggaaggaagcatcactaagcacccttcaacctggtcggtggaagcagtggtcctatttctaaaacaaacagatcctcttgcattatgccctcttgtcgacctcttcagaagccatgaaattgacgggaaggctctgctcctactcacgagtgacgtgttgctgaagcacttgggggtgaagctgggaacggctgtgaagctatgctactacattgaccgacttaaacaaggaaaatgctttgaaaattgaaaaaatccttgtgcaaatttagattgggccaacttctagaggcaccaatgccttcttagtgtggaatcatttttctgccctttagtcgtttttgttttgtagaaagtatctctcaaaatatattatagctagaattgtagaactatgttatagtccagtctacttctttaaaaaccatttaaactgctagatagtattagaatagtccaatagaaaattcattctttataggtctttaaaaattacttttattatattgtttacaaatatatttcatgcaagaaacagaaaaaaaaaaaaaccctttgattctggttcatctcgatacagagaaccaaaacagctaagagaggtattatcagggttgacaactcctatgattgaatctatgggaattattcctcagaagagaatttaaaggtgtacccatatatatctctttctggagtattttatctgtctgatgttgcagtattctacaagtttccagaaagagaatagccatataaattattttcctttctgctattatttctctatatgttttatttattcagatttagagtaaaaaataagcatataaacttttattatgtgctcttaacagttttaagataaactataggatagatagaatggttattttatgcaagaaatattgtaccgcaagggtggtttggatgaagtctgactactttttttcaaacaaactattatattaaaactgtcatattttggctaagtttggacctataactacactttcattgtttgcatctctctatgaagatacgtctgtccaaacttttaaaaggcataactgtattttatgtgtttattctttatatagatagtattttatattttattctcacccgaagtattcacacaatctttttaaaaaaaatttgaaatggcattttgtattgccacagaggtaggatgagccatatattagtgaaatgttttattttgtaaaatataaatggattatttgccatcattagtacctctcaacttactttttagaggacaagaaacaatctgtagattggtttccatacagggaagttctccgtcctatgcaatgtttctaattaatttgcttaattctgagccattaatcctgctacactttgaatgatacattaattcagactaatctttgggggctttattttgtaagttagaactttcaagggaaacatgttcaacactattattttgttataaatttataactttgttattacattgtgtaacaaatataaggtttacgagctatgagaattggtgctatcaccattagctatttgctgtaatgtcaagaaaatgttcaccagatgcaagaatgtaccttttctttttagaaagccaaatgtactttagacatgaatgcaactatttaaagaatagcttcatcaatgttattccttacatgtcataagattcttacttaaacttggtcttctttcaaattgtttgtatgaagatgctgtacccacttgaacagtcctcaggtgtttacataaatactatgttttacagttttcatattttaaaatattaataaagttaaatcacaatagttcattgaaaaaaaaaaacaaacaaaaaaaaaacaaacacaaacaaaaaaaaacacaacaaaaaaaaacaaaaatataaaagaaacacacaatataacaatattacaccaatgacctcccacaataacaaccactatcacaactatataaatataaaatactttttctcatctattactcataatttcaatacatctaccataacttgaaagtatttatttaaaccaaacgcacacccaaatgagagcaaaataaatgatgtcaaactagtaacgtcatcttaccagataaatatgacatacacaacacacactctagggggccggacatacaagaaaaagtggtaaacaaaaaacacaaaagagcaacagtagaacaaacatactcatacacccaccatcacacccctgcaatctacaacactacatgtctcctccaacacaacaaaacacactattcccaccccaactaccacccacatctcccccaagtcccaacccccccactaccacaacacataattaaaacccacaccccactcaacacaacatccccccccccccccccagcaaaaaatagctcgcacgaggccgcccgcctcagccgcatcgcggagcagaccagcgacaggacgatgagaagagcatcaataggagaccgataataaggcgcgagccatcacagtaacgtgcacgacgagttactagcggcacgagatagggcagccgagtaagcacagcgagccgcagcaagaaagcgtgcgcgctagaccagagaacaatagacgaccgccgcctcagccgcgctcgacaac

SEQ ID NO: 121268 - DNA, 3577 bp, Homo sapiens
agcggggcgtcgcgggagctctctgatccactcaggggtcagggcatcactggtctcgcgtgcgcgtgaccaggcccggtttccggtgccaggacctttccgaagcgtcgagtggcctaacggtcacagctgtcgcccatcggagaggcaggactactgcgagcagttttaccgcgacctccggaggccggcgtgacaggctctgtcactaaaatagataaaaacaagaatacctacttacgatgaagatgacaacactattctttatgcgtatgaaacaaaacctgaatttgtcaataaagaaccgaatattgtatctgacgcatcctgtaatactgaagagcaactgaagacagttgatgatgtccttattcattgccaggttatatatgatgctctgcaaaacctggataagaagattgatgtgattcgtagaaaggtttcaaaaatccaacgtttccatgcgagatccctgtggacaaatcataagcgatatggatataaaaagcattcttaccggcttgttaaaaagcttaaactccagaaaatgaagaaaaatgaggtttacgagacattctcctaccctgaaagttacagccccactttaccagtgtcaaggcgtgagaataattccccgagcaaccttccaaggccatccttttgcatggaagaataccagcgagctgagctggaggaggacccgatcctcagccgcactccgagtccagtgcatccctcagatttctctgagcataattgtcagccgtattatgcatctgatggtgcaacgtatggttcttcttcagggctctgccttggcaaccctcgggctgacagcatccacaacacttactcaactgaccatgcttctgcagcaccaccttcagttacaaggtcaccagttgaaaatgacggttacatagaggaaggaagcatcactaagcacccttcaacctggtcggtggaagcagtggtcctatttctaaaacaaacagatcctcttgcattatgccctcttgtcgacctcttcagaagccatgaaattgacgggaaggctctgctcctactcacgagtgacgtgttgctgaagcacttgggggtgaagctgggaacggctgtgaagctatgctactacattgaccgacttaaacaaggaaaatgctttgaaaattgaaaaaatccttgtgcaaatttagattgggccaacttctagaggcaccaatgccttcttagtgtggaatcatttttctgccctttagtcgtttttgttttgtagaaagtatctctcaaaatatattatagctagaattgtagaactatgttatagtccagtctacttctttaaaaaccatttaaactgctagatagtattagaatagtccaatagaaaattcattctttataggtctttaaaaattacttttattatattgtttacaaatatatttcatgcaagaaacagaaaaaaaaaaaaaccctttgattctggttcatctcgatacagagaaccaaaacagctaagagaggtattatcagggttgacaactcctatgattgaatctatgggaattattcctcagaagagaatttaaaggtgtacccatatatatctctttctggagtattttatctgtctgatgttgcagtattctacaagtttccagaaagagaatagccatataaattattttcctttctgctattatttctctatatgttttatttattcagatttagagtaaaaaataagcatataaacttttattatgtgctcttaacagttttaagataaactataggatagatagaatggttattttatgcaagaaatattgtaccgcaagggtggtttggatgaagtctgactactttttttcaaacaaactattatattaaaactgtcatattttggctaagtttggacctataactacactttcattgtttgcatctctctatgaagatacgtctgtccaaacttttaaaaggcataactgtattttatgtgtttattctttatatagatagtattttatattttattctcacccgaagtattcacacaatctttttaaaaaaaatttgaaatggcattttgtattgccacagaggtaggatgagccatatattagtgaaatgttttattttgtaaaatataaatggattatttgccatcattagtacctctcaacttactttttagaggacaagaaacaatctgtagattggtttccatacagggaagttctccgtcctatgcaatgtttctaattaatttgcttaattctgagccattaatcctgctacactttgaatgatacattaattcagactaatctttgggggctttattttgtaagttagaactttcaagggaaacatgttcaacactattattttgttataaatttataactttgttattacattgtgtaacaaatataaggtttacgagctatgagaattggtgctatcaccattagctatttgctgtaatgtcaagaaaatgttcaccagatgcaagaatgtaccttttctttttagaaagccaaatgtactttagacatgaatgcaactatttaaagaatagcttcatcaatgttattccttacatgtcataagattcttacttaaacttggtcttctttcaaattgtttgtatgaagatgctgtacccacttgaacagtcctcaggtgtttacataaatactatgttttacagttttcatattttaaaatattaataaagttaaatcacaatagttcattgaaaaaaaaaaacaaacaaaaaaaaaacaaacacaaacaaaaaaaaacacaacaaaaaaaaacaaaaatataaaagaaacacacaatataacaatattacaccaatgacctcccacaataacaaccactatcacaactatataaatataaaatactttttctcatctattactcataatttcaatacatctaccataacttgaaagtatttatttaaaccaaacgcacacccaaatgagagcaaaataaatgatgtcaaactagtaacgtcatcttaccagataaatatgacatacacaacacacactctagggggccggacatacaagaaaaagtggtaaacaaaaaacacaaaagagcaacagtagaacaaacatactcatacacccaccatcacacccctgcaatctacaacactacatgtctcctccaacacaacaaaacacactattcccaccccaactaccacccacatctcccccaagtcccaacccccccactaccacaacacataattaaaacccacaccccactcaacacaacatccccccccccccccccagcaaaaaatagctcgcacgaggccgcccgcctcagccgcatcgcggagcagaccagcgacaggacgatgagaagagcatcaataggagaccgataataaggcgcgagccatcacagtaacgtgcacgacgagttactagcggcacgagatagggcagccgagtaagcacagcgagccgcagcaagaaagcgtgcgcgctagaccagagaacaatagacgaccgccgcctcagccgcgctcgacaac

SEQ ID NO: 121269 - DNA, 3683 bp, Homo sapiens
gggaatacacgatttggcttaggggccggggctctcctgaggagagagggtttgctttgcggggaagagcgagtcttgacttcgcagcctccaatttcagccgcggtgtggaggggggtgctttgggtggtccccacagcctttccggagtgcccgcgcgtgtaagcttttgagatttgacaatttgtgaagtgcttggtgctgactttcggggacgacaggatccttttacagtcattctcctgtcaggggaggcaggagtagaggtttaccactcttaggtgactaagcagtatcacaaataaaccctccagcaagtttaaaaataattaggtccaactcagaggaagtggagtttctcctgttgcacaaaaatgatgtctaacagctccagtgaaatcgatgtggaaccgaatattgtatctgacgcatcctgtaatactgaagagcaactgaagacagttgatgatgtccttattcattgccaggttatatatgatgctctgcaaaacctggataagaagattgatgtgattcgtagaaaggtttcaaaaatccaacgtttccatgcgagatccctgtggacaaatcataagcgatatggatataaaaagcattcttaccggcttgttaaaaagcttaaactccagaaaatgaagaaaaatgaggtttacgagacattctcctaccctgaaagttacagccccactttaccagtgtcaaggcgtgagaataattccccgagcaaccttccaaggccatccttttgcatggaagaataccagcgagctgagctggaggaggacccgatcctcagccgcactccgagtccagtgcatccctcagatttctctgagcataattgtcagccgtattatgcatctgatggtgcaacgtatggttcttcttcagggctctgccttggcaaccctcgggctgacagcatccacaacacttactcaactgaccatgcttctgcagcaccaccttcagttacaaggtcaccagttgaaaatgacggttacatagaggaaggaagcatcactaagcacccttcaacctggtcggtggaagcagtggtcctatttctaaaacaaacagatcctcttgcattatgccctcttgtcgacctcttcagaagccatgaaattgacgggaaggctctgctcctactcacgagtgacgtgttgctgaagcacttgggggtgaagctgggaacggctgtgaagctatgctactacattgaccgacttaaacaaggaaaatgctttgaaaattgaaaaaatccttgtgcaaatttagattgggccaacttctagaggcaccaatgccttcttagtgtggaatcatttttctgccctttagtcgtttttgttttgtagaaagtatctctcaaaatatattatagctagaattgtagaactatgttatagtccagtctacttctttaaaaaccatttaaactgctagatagtattagaatagtccaatagaaaattcattctttataggtctttaaaaattacttttattatattgtttacaaatatatttcatgcaagaaacagaaaaaaaaaaaaaccctttgattctggttcatctcgatacagagaaccaaaacagctaagagaggtattatcagggttgacaactcctatgattgaatctatgggaattattcctcagaagagaatttaaaggtgtacccatatatatctctttctggagtattttatctgtctgatgttgcagtattctacaagtttccagaaagagaatagccatataaattattttcctttctgctattatttctctatatgttttatttattcagatttagagtaaaaaataagcatataaacttttattatgtgctcttaacagttttaagataaactataggatagatagaatggttattttatgcaagaaatattgtaccgcaagggtggtttggatgaagtctgactactttttttcaaacaaactattatattaaaactgtcatattttggctaagtttggacctataactacactttcattgtttgcatctctctatgaagatacgtctgtccaaacttttaaaaggcataactgtattttatgtgtttattctttatatagatagtattttatattttattctcacccgaagtattcacacaatctttttaaaaaaaatttgaaatggcattttgtattgccacagaggtaggatgagccatatattagtgaaatgttttattttgtaaaatataaatggattatttgccatcattagtacctctcaacttactttttagaggacaagaaacaatctgtagattggtttccatacagggaagttctccgtcctatgcaatgtttctaattaatttgcttaattctgagccattaatcctgctacactttgaatgatacattaattcagactaatctttgggggctttattttgtaagttagaactttcaagggaaacatgttcaacactattattttgttataaatttataactttgttattacattgtgtaacaaatataaggtttacgagctatgagaattggtgctatcaccattagctatttgctgtaatgtcaagaaaatgttcaccagatgcaagaatgtaccttttctttttagaaagccaaatgtactttagacatgaatgcaactatttaaagaatagcttcatcaatgttattccttacatgtcataagattcttacttaaacttggtcttctttcaaattgtttgtatgaagatgctgtacccacttgaacagtcctcaggtgtttacataaatactatgttttacagttttcatattttaaaatattaataaagttaaatcacaatagttcattgaaaaaaaaaaacaaacaaaaaaaaaacaaacacaaacaaaaaaaaacacaacaaaaaaaaacaaaaatataaaagaaacacacaatataacaatattacaccaatgacctcccacaataacaaccactatcacaactatataaatataaaatactttttctcatctattactcataatttcaatacatctaccataacttgaaagtatttatttaaaccaaacgcacacccaaatgagagcaaaataaatgatgtcaaactagtaacgtcatcttaccagataaatatgacatacacaacacacactctagggggccggacatacaagaaaaagtggtaaacaaaaaacacaaaagagcaacagtagaacaaacatactcatacacccaccatcacacccctgcaatctacaacactacatgtctcctccaacacaacaaaacacactattcccaccccaactaccacccacatctcccccaagtcccaacccccccactaccacaacacataattaaaacccacaccccactcaacacaacatccccccccccccccccagcaaaaaatagctcgcacgaggccgcccgcctcagccgcatcgcggagcagaccagcgacaggacgatgagaagagcatcaataggagaccgataataaggcgcgagccatcacagtaacgtgcacgacgagttactagcggcacgagatagggcagccgagtaagcacagcgagccgcagcaagaaagcgtgcgcgctagaccagagaacaatagacgaccgccgcctcagccgcgctcgacaac

SEQ ID NO: 121270 - DNA, 3439 bp, Homo sapiens
agcggggcgtcgcgggagctctctgatccactcaggggtcagggcatcactggtctcgcgtgcgcgtgaccaggcccggtttccggtgccaggacctttccgaagcgtcgagtggcctaacggtcacagctgtcgcccatcggagaggcaggactactgcgagcagttttaccgcgacctccggaggccggcgtgacaggctctgtcactaaaataggaaccgaatattgtatctgacgcatcctgtaatactgaagagcaactgaagacagttgatgatgtccttattcattgccaggttatatatgatgctctgcaaaacctggataagaagattgatgtgattcgtagaaaggtttcaaaaatccaacgtttccatgcgagatccctgtggacaaatcataagcgatatggatataaaaagcattcttaccggcttgttaaaaagcttaaactccagaaaatgaagaaaaatgaggtttacgagacattctcctaccctgaaagttacagccccactttaccagtgtcaaggcgtgagaataattccccgagcaaccttccaaggccatccttttgcatggaagaataccagcgagctgagctggaggaggacccgatcctcagccgcactccgagtccagtgcatccctcagatttctctgagcataattgtcagccgtattatgcatctgatggtgcaacgtatggttcttcttcagggctctgccttggcaaccctcgggctgacagcatccacaacacttactcaactgaccatgcttctgcagcaccaccttcagttacaaggtcaccagttgaaaatgacggttacatagaggaaggaagcatcactaagcacccttcaacctggtcggtggaagcagtggtcctatttctagaaattgacgggaaggctctgctcctactcacgagtgacgtgttgctgaagcacttgggggtgaagctgggaacggctgtgaagctatgctactacattgaccgacttaaacaaggaaaatgctttgaaaattgaaaaaatccttgtgcaaatttagattgggccaacttctagaggcaccaatgccttcttagtgtggaatcatttttctgccctttagtcgtttttgttttgtagaaagtatctctcaaaatatattatagctagaattgtagaactatgttatagtccagtctacttctttaaaaaccatttaaactgctagatagtattagaatagtccaatagaaaattcattctttataggtctttaaaaattacttttattatattgtttacaaatatatttcatgcaagaaacagaaaaaaaaaaaaaccctttgattctggttcatctcgatacagagaaccaaaacagctaagagaggtattatcagggttgacaactcctatgattgaatctatgggaattattcctcagaagagaatttaaaggtgtacccatatatatctctttctggagtattttatctgtctgatgttgcagtattctacaagtttccagaaagagaatagccatataaattattttcctttctgctattatttctctatatgttttatttattcagatttagagtaaaaaataagcatataaacttttattatgtgctcttaacagttttaagataaactataggatagatagaatggttattttatgcaagaaatattgtaccgcaagggtggtttggatgaagtctgactactttttttcaaacaaactattatattaaaactgtcatattttggctaagtttggacctataactacactttcattgtttgcatctctctatgaagatacgtctgtccaaacttttaaaaggcataactgtattttatgtgtttattctttatatagatagtattttatattttattctcacccgaagtattcacacaatctttttaaaaaaaatttgaaatggcattttgtattgccacagaggtaggatgagccatatattagtgaaatgttttattttgtaaaatataaatggattatttgccatcattagtacctctcaacttactttttagaggacaagaaacaatctgtagattggtttccatacagggaagttctccgtcctatgcaatgtttctaattaatttgcttaattctgagccattaatcctgctacactttgaatgatacattaattcagactaatctttgggggctttattttgtaagttagaactttcaagggaaacatgttcaacactattattttgttataaatttataactttgttattacattgtgtaacaaatataaggtttacgagctatgagaattggtgctatcaccattagctatttgctgtaatgtcaagaaaatgttcaccagatgcaagaatgtaccttttctttttagaaagccaaatgtactttagacatgaatgcaactatttaaagaatagcttcatcaatgttattccttacatgtcataagattcttacttaaacttggtcttctttcaaattgtttgtatgaagatgctgtacccacttgaacagtcctcaggtgtttacataaatactatgttttacagttttcatattttaaaatattaataaagttaaatcacaatagttcattgaaaaaaaaaaacaaacaaaaaaaaaacaaacacaaacaaaaaaaaacacaacaaaaaaaaacaaaaatataaaagaaacacacaatataacaatattacaccaatgacctcccacaataacaaccactatcacaactatataaatataaaatactttttctcatctattactcataatttcaatacatctaccataacttgaaagtatttatttaaaccaaacgcacacccaaatgagagcaaaataaatgatgtcaaactagtaacgtcatcttaccagataaatatgacatacacaacacacactctagggggccggacatacaagaaaaagtggtaaacaaaaaacacaaaagagcaacagtagaacaaacatactcatacacccaccatcacacccctgcaatctacaacactacatgtctcctccaacacaacaaaacacactattcccaccccaactaccacccacatctcccccaagtcccaacccccccactaccacaacacataattaaaacccacaccccactcaacacaacatccccccccccccccccagcaaaaaatagctcgcacgaggccgcccgcctcagccgcatcgcggagcagaccagcgacaggacgatgagaagagcatcaataggagaccgataataaggcgcgagccatcacagtaacgtgcacgacgagttactagcggcacgagatagggcagccgagtaagcacagcgagccgcagcaagaaagcgtgcgcgctagaccagagaacaatagacgaccgccgcctcagccgcgctcgacaac

SEQ ID NO: 121271 - DNA, 2584 bp, Homo sapiens
aatatggaagcattattaattatcgttaagtttcttctctccataggaaattgacgggaaggctctgctcctactcacgagtgacgtgttgctgaagcacttgggggtgaagctgggaacggctgtgaagctatgctactacattgaccgacttaaacaaggaaaatgctttgaaaattgaaaaaatccttgtgcaaatttagattgggccaacttctagaggcaccaatgccttcttagtgtggaatcatttttctgccctttagtcgtttttgttttgtagaaagtatctctcaaaatatattatagctagaattgtagaactatgttatagtccagtctacttctttaaaaaccatttaaactgctagatagtattagaatagtccaatagaaaattcattctttataggtctttaaaaattacttttattatattgtttacaaatatatttcatgcaagaaacagaaaaaaaaaaaaaccctttgattctggttcatctcgatacagagaaccaaaacagctaagagaggtattatcagggttgacaactcctatgattgaatctatgggaattattcctcagaagagaatttaaaggtgtacccatatatatctctttctggagtattttatctgtctgatgttgcagtattctacaagtttccagaaagagaatagccatataaattattttcctttctgctattatttctctatatgttttatttattcagatttagagtaaaaaataagcatataaacttttattatgtgctcttaacagttttaagataaactataggatagatagaatggttattttatgcaagaaatattgtaccgcaagggtggtttggatgaagtctgactactttttttcaaacaaactattatattaaaactgtcatattttggctaagtttggacctataactacactttcattgtttgcatctctctatgaagatacgtctgtccaaacttttaaaaggcataactgtattttatgtgtttattctttatatagatagtattttatattttattctcacccgaagtattcacacaatctttttaaaaaaaatttgaaatggcattttgtattgccacagaggtaggatgagccatatattagtgaaatgttttattttgtaaaatataaatggattatttgccatcattagtacctctcaacttactttttagaggacaagaaacaatctgtagattggtttccatacagggaagttctccgtcctatgcaatgtttctaattaatttgcttaattctgagccattaatcctgctacactttgaatgatacattaattcagactaatctttgggggctttattttgtaagttagaactttcaagggaaacatgttcaacactattattttgttataaatttataactttgttattacattgtgtaacaaatataaggtttacgagctatgagaattggtgctatcaccattagctatttgctgtaatgtcaagaaaatgttcaccagatgcaagaatgtaccttttctttttagaaagccaaatgtactttagacatgaatgcaactatttaaagaatagcttcatcaatgttattccttacatgtcataagattcttacttaaacttggtcttctttcaaattgtttgtatgaagatgctgtacccacttgaacagtcctcaggtgtttacataaatactatgttttacagttttcatattttaaaatattaataaagttaaatcacaatagttcattgaaaaaaaaaaacaaacaaaaaaaaaacaaacacaaacaaaaaaaaacacaacaaaaaaaaacaaaaatataaaagaaacacacaatataacaatattacaccaatgacctcccacaataacaaccactatcacaactatataaatataaaatactttttctcatctattactcataatttcaatacatctaccataacttgaaagtatttatttaaaccaaacgcacacccaaatgagagcaaaataaatgatgtcaaactagtaacgtcatcttaccagataaatatgacatacacaacacacactctagggggccggacatacaagaaaaagtggtaaacaaaaaacacaaaagagcaacagtagaacaaacatactcatacacccaccatcacacccctgcaatctacaacactacatgtctcctccaacacaacaaaacacactattcccaccccaactaccacccacatctcccccaagtcccaacccccccactaccacaacacataattaaaacccacaccccactcaacacaacatccccccccccccccccagcaaaaaatagctcgcacgaggccgcccgcctcagccgcatcgcggagcagaccagcgacaggacgatgagaagagcatcaataggagaccgataataaggcgcgagccatcacagtaacgtgcacgacgagttactagcggcacgagatagggcagccgagtaagcacagcgagccgcagcaagaaagcgtgcgcgctagaccagagaacaatagacgaccgccgcctcagccgcgctcgacaac

SEQ ID NO: 121272 - DNA, 3493 bp, Homo sapiens
agcggggcgtcgcgggagctctctgatccactcaggggtcagggcatcactggtctcgcgtgcgcgtgaccaggcccggtttccggtgccaggacctttccgaagcgtcgagtggcctaacggtcacagctgtcgcccatcggagaggcaggactactgcgagcagttttaccgcgacctccggaggccggcgtgacaggctctgtcactaaaataggaaccgaatattgtatctgacgcatcctgtaatactgaagagcaactgaagacagttgatgatgtccttattcattgccaggttatatatgatgctctgcaaaacctggataagaagattgatgtgattcgtagaaaggtttcaaaaatccaacgtttccatgcgagatccctgtggacaaatcataagcgatatggatataaaaagcattcttaccggcttgttaaaaagcttaaactccagaaaatgaagaaaaatgaggtttacgagacattctcctaccctgaaagttacagccccactttaccagtgtcaaggcgtgagaataattccccgagcaaccttccaaggccatccttttgcatggaagaataccagcgagctgagctggaggaggacccgatcctcagccgcactccgagtccagtgcatccctcagatttctctgagcataattgtcagccgtattatgcatctgatggtgcaacgtatggttcttcttcagggctctgccttggcaaccctcgggctgacagcatccacaacacttactcaactgaccatgcttctgcagcaccaccttcagttacaaggtcaccagttgaaaatgacggttacatagaggaaggaagcatcactaagcacccttcaacctggtcggtggaagcagtggtcctatttctaaaacaaacagatcctcttgcattatgccctcttgtcgacctcttcagaagccatgaaattgacgggaaggctctgctcctactcacgagtgacgtgttgctgaagcacttgggggtgaagctgggaacggctgtgaagctatgctactacattgaccgacttaaacaaggaaaatgctttgaaaattgaaaaaatccttgtgcaaatttagattgggccaacttctagaggcaccaatgccttcttagtgtggaatcatttttctgccctttagtcgtttttgttttgtagaaagtatctctcaaaatatattatagctagaattgtagaactatgttatagtccagtctacttctttaaaaaccatttaaactgctagatagtattagaatagtccaatagaaaattcattctttataggtctttaaaaattacttttattatattgtttacaaatatatttcatgcaagaaacagaaaaaaaaaaaaaccctttgattctggttcatctcgatacagagaaccaaaacagctaagagaggtattatcagggttgacaactcctatgattgaatctatgggaattattcctcagaagagaatttaaaggtgtacccatatatatctctttctggagtattttatctgtctgatgttgcagtattctacaagtttccagaaagagaatagccatataaattattttcctttctgctattatttctctatatgttttatttattcagatttagagtaaaaaataagcatataaacttttattatgtgctcttaacagttttaagataaactataggatagatagaatggttattttatgcaagaaatattgtaccgcaagggtggtttggatgaagtctgactactttttttcaaacaaactattatattaaaactgtcatattttggctaagtttggacctataactacactttcattgtttgcatctctctatgaagatacgtctgtccaaacttttaaaaggcataactgtattttatgtgtttattctttatatagatagtattttatattttattctcacccgaagtattcacacaatctttttaaaaaaaatttgaaatggcattttgtattgccacagaggtaggatgagccatatattagtgaaatgttttattttgtaaaatataaatggattatttgccatcattagtacctctcaacttactttttagaggacaagaaacaatctgtagattggtttccatacagggaagttctccgtcctatgcaatgtttctaattaatttgcttaattctgagccattaatcctgctacactttgaatgatacattaattcagactaatctttgggggctttattttgtaagttagaactttcaagggaaacatgttcaacactattattttgttataaatttataactttgttattacattgtgtaacaaatataaggtttacgagctatgagaattggtgctatcaccattagctatttgctgtaatgtcaagaaaatgttcaccagatgcaagaatgtaccttttctttttagaaagccaaatgtactttagacatgaatgcaactatttaaagaatagcttcatcaatgttattccttacatgtcataagattcttacttaaacttggtcttctttcaaattgtttgtatgaagatgctgtacccacttgaacagtcctcaggtgtttacataaatactatgttttacagttttcatattttaaaatattaataaagttaaatcacaatagttcattgaaaaaaaaaaacaaacaaaaaaaaaacaaacacaaacaaaaaaaaacacaacaaaaaaaaacaaaaatataaaagaaacacacaatataacaatattacaccaatgacctcccacaataacaaccactatcacaactatataaatataaaatactttttctcatctattactcataatttcaatacatctaccataacttgaaagtatttatttaaaccaaacgcacacccaaatgagagcaaaataaatgatgtcaaactagtaacgtcatcttaccagataaatatgacatacacaacacacactctagggggccggacatacaagaaaaagtggtaaacaaaaaacacaaaagagcaacagtagaacaaacatactcatacacccaccatcacacccctgcaatctacaacactacatgtctcctccaacacaacaaaacacactattcccaccccaactaccacccacatctcccccaagtcccaacccccccactaccacaacacataattaaaacccacaccccactcaacacaacatccccccccccccccccagcaaaaaatagctcgcacgaggccgcccgcctcagccgcatcgcggagcagaccagcgacaggacgatgagaagagcatcaataggagaccgataataaggcgcgagccatcacagtaacgtgcacgacgagttactagcggcacgagatagggcagccgagtaagcacagcgagccgcagcaagaaagcgtgcgcgctagaccagagaacaatagacgaccgccgcctcagccgcgctcgacaac

SEQ ID NO: 121273 - DNA, 3642 bp, Homo sapiens
agcggggcgtcgcgggagctctctgatccactcaggggtcagggcatcactggtctcgcgtgcgcgtgaccaggcccggtttccggtgccaggacctttccgaagcgtcgagtggcctaacggtcacagctgtcgcccatcggagaggcaggactactgcgagcagttttaccgcgacctccggaggccggcgtgacaggctctgtcactaaaataggagtagaggtttaccactcttaggtgactaagcagtatcacaaataaaccctccagcaagtttaaaaataattaggtccaactcagaggaagtggagtttctcctgttgcacaaaaatgatgtctaacagctccagtgaaatcgatgtggaaccgaatattgtatctgacgcatcctgtaatactgaagagcaactgaagacagttgatgatgtccttattcattgccaggttatatatgatgctctgcaaaacctggataagaagattgatgtgattcgtagaaaggtttcaaaaatccaacgtttccatgcgagatccctgtggacaaatcataagcgatatggatataaaaagcattcttaccggcttgttaaaaagcttaaactccagaaaatgaagaaaaatgaggtttacgagacattctcctaccctgaaagttacagccccactttaccagtgtcaaggcgtgagaataattccccgagcaaccttccaaggccatccttttgcatggaagaataccagcgagctgagctggaggaggacccgatcctcagccgcactccgagtccagtgcatccctcagatttctctgagcataattgtcagccgtattatgcatctgatggtgcaacgtatggttcttcttcagggctctgccttggcaaccctcgggctgacagcatccacaacacttactcaactgaccatgcttctgcagcaccaccttcagttacaaggtcaccagttgaaaatgacggttacatagaggaaggaagcatcactaagcacccttcaacctggtcggtggaagcagtggtcctatttctaaaacaaacagatcctcttgcattatgccctcttgtcgacctcttcagaagccatgaaattgacgggaaggctctgctcctactcacgagtgacgtgttgctgaagcacttgggggtgaagctgggaacggctgtgaagctatgctactacattgaccgacttaaacaaggaaaatgctttgaaaattgaaaaaatccttgtgcaaatttagattgggccaacttctagaggcaccaatgccttcttagtgtggaatcatttttctgccctttagtcgtttttgttttgtagaaagtatctctcaaaatatattatagctagaattgtagaactatgttatagtccagtctacttctttaaaaaccatttaaactgctagatagtattagaatagtccaatagaaaattcattctttataggtctttaaaaattacttttattatattgtttacaaatatatttcatgcaagaaacagaaaaaaaaaaaaaccctttgattctggttcatctcgatacagagaaccaaaacagctaagagaggtattatcagggttgacaactcctatgattgaatctatgggaattattcctcagaagagaatttaaaggtgtacccatatatatctctttctggagtattttatctgtctgatgttgcagtattctacaagtttccagaaagagaatagccatataaattattttcctttctgctattatttctctatatgttttatttattcagatttagagtaaaaaataagcatataaacttttattatgtgctcttaacagttttaagataaactataggatagatagaatggttattttatgcaagaaatattgtaccgcaagggtggtttggatgaagtctgactactttttttcaaacaaactattatattaaaactgtcatattttggctaagtttggacctataactacactttcattgtttgcatctctctatgaagatacgtctgtccaaacttttaaaaggcataactgtattttatgtgtttattctttatatagatagtattttatattttattctcacccgaagtattcacacaatctttttaaaaaaaatttgaaatggcattttgtattgccacagaggtaggatgagccatatattagtgaaatgttttattttgtaaaatataaatggattatttgccatcattagtacctctcaacttactttttagaggacaagaaacaatctgtagattggtttccatacagggaagttctccgtcctatgcaatgtttctaattaatttgcttaattctgagccattaatcctgctacactttgaatgatacattaattcagactaatctttgggggctttattttgtaagttagaactttcaagggaaacatgttcaacactattattttgttataaatttataactttgttattacattgtgtaacaaatataaggtttacgagctatgagaattggtgctatcaccattagctatttgctgtaatgtcaagaaaatgttcaccagatgcaagaatgtaccttttctttttagaaagccaaatgtactttagacatgaatgcaactatttaaagaatagcttcatcaatgttattccttacatgtcataagattcttacttaaacttggtcttctttcaaattgtttgtatgaagatgctgtacccacttgaacagtcctcaggtgtttacataaatactatgttttacagttttcatattttaaaatattaataaagttaaatcacaatagttcattgaaaaaaaaaaacaaacaaaaaaaaaacaaacacaaacaaaaaaaaacacaacaaaaaaaaacaaaaatataaaagaaacacacaatataacaatattacaccaatgacctcccacaataacaaccactatcacaactatataaatataaaatactttttctcatctattactcataatttcaatacatctaccataacttgaaagtatttatttaaaccaaacgcacacccaaatgagagcaaaataaatgatgtcaaactagtaacgtcatcttaccagataaatatgacatacacaacacacactctagggggccggacatacaagaaaaagtggtaaacaaaaaacacaaaagagcaacagtagaacaaacatactcatacacccaccatcacacccctgcaatctacaacactacatgtctcctccaacacaacaaaacacactattcccaccccaactaccacccacatctcccccaagtcccaacccccccactaccacaacacataattaaaacccacaccccactcaacacaacatccccccccccccccccagcaaaaaatagctcgcacgaggccgcccgcctcagccgcatcgcggagcagaccagcgacaggacgatgagaagagcatcaataggagaccgataataaggcgcgagccatcacagtaacgtgcacgacgagttactagcggcacgagatagggcagccgagtaagcacagcgagccgcagcaagaaagcgtgcgcgctagaccagagaacaatagacgaccgccgcctcagccgcgctcgacaac

SEQ ID NO: 121274 - DNA, 1671 bp, Homo sapiens
ggaagcactccacaaatgccagctgctattgtggctgtgggtatgagtcagacagcccgtggattctcagctcagggctgttattggttgttgagtgagcctgcagattcactcccagcttgcagcctcagtttccttatctctaaatcgggttgatgatggccccccactgttagggatgtttgcaggagccagcgacgtgatgtgactaaggtgcacagggcctggcatgtgtcgtggctgttgtggttattagcactactttaattgttcagataaacttgggttcacatcctgtttctgtccctccctagctgtgtgacctcgggcaagtaaccttacctctctgagccttggtttccttgtctgttaagtggaacgcctaatgaagacttgctgttccctgggttgttaagatgcgtgcatgatgcggatttgaggatggctaatccccttttctctcgtccaactcttgtcactaagacctgcctgtcagtcctggtggggagtcacttgcctgcctctggaatgggaggttgcagccccctctcctgttacctggttaccatggctacagccacgtggggtcatgctcccccaccccaagttccagggccccccaccagggggccagcctccccaggttccctagcaacagtcccgggtgttggggcgccagccgggcgggagggagccaggccagctggtggtgcaggccaattttagctcccacccccggccccaggggcttgtcacccactgccccagctgcccctcgcaggggtccctcagccatgctgccttcagcgtggtgccatcccacctccagctggctgccctggcgccacctgacagggcttcttctccaggtccttatcttggtggggatcggaggccttatctccaggatctccacctgcctccctggtctctcctgggaagaagcctgggcctgtggggaagcctggctcagcactcaggaggaatcagcaggccggggttcgcatcccagcactctgctccatctgccctgtgaccttgggggagggactccccctgcctgagcctgggtgtccccgtctgaagactgcagatcataattggacccacattggaggccagggtgagggcacggcaggcagtggcggacgcgtggttagagccctggccgtggtggttggaactgcccagctgtggggaggttgtctttctgcccctgtgaatggactgtgtgaccttcacatggcaccttccctctccaaggctcagtttctctgctggaacatggagtcattccctgggctactgcaggaattaagtgtaggcgagttacctgtttacacaggacttggtccatagcatgagctgctttgtagaaatggttcatgacccagcgtggtagctcacacctataatcccagaactttgggagacccaggcaggaggatggcttgagcctgggagctgaagactagcccggacaacatagcaagactccatctctacaaaaaaatttaaaaatcagctgtgtgtggtggtgcactcctgtggtcccagctactcaggagcctgaggtgggaggatttgcttgaacccaggcagttgaggctccagtgagccttgattacaccactgcacttcagcctgggtaacagagcaaggccctgtctc

SEQ ID NO: 121275 - DNA, 693 bp, Homo sapiens
agaggcatgaatccacaggacaatgagaacagtggaagaggcaaaaggaaagagaaaagtcctcaaactttcacggctgggaagcaggtgaattgactaagcaaaccagagaaagttgaaaaccagctgcagaggagtggagaagccagggacagatgaagagtaacaagaatcaactgtaataatttcctgctatagtggcagtcttagatggttttagaagggatttttcctgaaaattctcaaatatctgttctgctctaatttgtatttgtattctgatttgtaaatacaatggtagtctttctattgcactggatttttttttttgtatgtagcttgattttatctgtttttaagaccagcagcttttagaagttgttctcatttacctttcagtcattttttatgctagcttcaatggaagaaacctattgaaaagtaatttataatttctactcctatgactttatcttctgtctccctccagcaaaggaaaaaatatgtcactcttaaaaattcataaaaaattaaagaatttaaattaaaaatccccaatatctagtggtatatttcttgtgctttaaaaaatattgtgtttctgggcatggcagctcatgcctgtaatcctagcactttgggaggccaatgcaggcaaatcacttgagcccaggagtttgagaccagcctggg

SEQ ID NO: 121276 - DNA, 665 bp, Homo sapiens
agcagtggcagctcccacagcccctccctctcctcccactacagtgattccagatctcccagcaggctgagccccaagcaccgagacgaagggcgaaagacgggcagccagcggtccagcggaagccggtcgccttccccgtcgggcggcagcggatgggggtcgccccagcggaacggcggcagcgggcagcggagcggagcgcacgggggccgccccggctcggcgcacagcccgcccgatgtacgtacgcttcgctttgcggagggttcccgcgccgcgggctgcgccgtgcgtggtcgggcgggtcgccagcggggcagggggcgataagtgtggcatgggggcgggggcgggggcggccgcttcctccctcctcggctccccgctgggcgtcctggctcgggagccgccgggagtgctaggccgttgcgcccacctggccctggtgtcagggtgaggggcgcctgcggtcttgggccacccttgcgcttggcaaactgaaggccagaggggggttgaccgcggggcactgagttgggtacagggctggggaggaatcagggtctcgtgccctccccaggcatattagggtgggaggggcatggacattgataggagtcccaggcaggagcaggattcgagagacaggaccccccactggg

SEQ ID NO: 121277 - DNA, 806 bp, Homo sapiens
tcatcgtttttttttgttgttgttgtttttctttgaaaacctataaagataatgatggtgagattattgcttttgattttgttatttccttttggtaagttgaccgtttcattttatgtcatattgaaaacttacctagaaatgtcaaagcagcttgtctagtttatccttctacagtaatttttttcttggtgaggtttttaattaagagtgattctttagttcactcattaacttaatcctaaaggtatatgttttccttatatttgttttatcactgtgtaaaattttgattaaattagtcaaaatccaaaactaggtaaataccaagtaggaatagaaattgtgtttacatattggtctcctacaaagagcaaatacttcctttattctttcttgtccttttgtgcactgggattcaccctggagcaaacatttacagagtaattatgtgccctgaaacaacagcaacaatggtaatattgacagagccacagctataggtctgataacaggatggccacaattaagagtaaaaacatgaaacattttcattgattaattctgggaaacagcatccctctggatttcttttaatgttttttttgtttgtttgtttgtttttaccagctggagttccctagctatatgctcctattccagccagctttctccacattaaccaaaaataattcagatctgtaaaagtaaggaggggcagcacttaatgtgtacatcagaaatccctgagctccttctgagtataaagtctgtacttatttcttcctgtggcctttccataaact

SEQ ID NO: 121278 - DNA, 168 bp, Homo sapiens
cacgtctcctgtgggggcggccctccgaggcagagtctgatattcaaaaagaggttaaccatgtattattcatgatgaatgaagcgaacataacacggataacctctcctcaaatatccttgcatagttctgaaacgaaaaccatggcctcttccccaccgttgtctt

SEQ ID NO: 121279 - DNA, 423 bp, Homo sapiens
ccttgatgcttctaacttctgcctatcagtcctttctcacattcactttcttctctctctagactccatagctcattcatttcaatcactactagtaacatcccatttctcttgccactcccatatgcctggaactggatcaattcaaatgtctgctttctccaggcctacaacagactactccattgccaaagggggttacacacacacacacacacacacacacacacgcacacactcttactttttgaagcagatgtcattcttttgtttttttcgagagtctcacactgttacccagtcacccagggtggagtgcaggagtggggtcacagctcagtgcaaactcaaagtggggggtacaaccagtcctcctgccgtgagctcctgaagtgctgagattacaagcatgagccaccatac

SEQ ID NO: 121280 - DNA, 144 bp, Homo sapiens
cctggagcacctgaccccaggtcgtcgcctgcctcactccctcatttcacaaccatgactcccctcaaatgtcacctcctaggggaggccttccctgactgccttgtctaaaacagtacaccacccccgtctctctctgcctgt

SEQ ID NO: 121281 - DNA, 401 bp, Homo sapiens
atctgttgcagtctccctccaggtccttctcatatggcatctccccgcaaaatgttttgtggaatactaagtggtgttttattaaaataacgttttaggccaggtgcagtggctcatgcctgtaatcccagcactatgagaggctgaggcaggtggatgacctgaggtcacgagctcgagaccagcctgggcaacatggtgaaactctgtctctactaaaaataaatacatacatacatacatacataaatgagtcgtgcatggtgtcatgtgcctatagttccagctactcaggaggctgaggcatgacaatcacttgaacctgggaggcggaggttgcagtgagctgagattgcaccactgcactccagcctaggtgacagtgcgagactccttctcag

SEQ ID NO: 121282 - DNA, 518 bp, Homo sapiens
aaacttcccagtacacgtacattgctggtgccagctaggattggaagtgcaaatgacattaataccatcatcgtttttagttaagaattcctgatcctttttattgtttgagtgttttcccggtgccttttaagaaacgaggggtggagtctggctacagaaaagtaactgactcccagcttcaggcaaaactaccataaatagccatcttagagcttccactgacttccttgaggccccaaatcatggacttaagagatggtgctacccagctgaggttatttctccagcatcagaacagaagatatccagaccacaacatttattgagaaaaacgtaagccaccatctctgccaccaaggaccatactctctaattttcaaaaatatatatgctcacgaaagcacaatagacaaagtgagttttataagttacaaaagaaatagatgaaagaagagatcactatgctcttgagtgaccgtgaaaggctttatgaagaagacagggctgcagcttag

SEQ ID NO: 121283 - DNA, 670 bp, Homo sapiens
aatttagcacgagaagacagactcattgttttggcaagctcctggcctggaagtctccaacaaaaactcacagcactctatctgaaaaggaatttttaaatgcattcttagtcttgaaattgaaaatatattctagatacaacagtttgctgggaaatttaaacaatgccgtttatcatccaacaactttgctctggacaaagagctttttcatctcttccttagtgtcccttctactccattagcttttcagagctttttttaaaaaattaattaattaatttatttttttgagactccatctcaatagaaaaagaaaagaaaagaaaagaaaaatgatgatgcaagagtggtaagatgcaaggttataactcggttataccacatgcctcatgtgaaatgagcaagtttcttagtacacttgtattctctgcttatgacaattgagacactgccaagagtgttattctccttaatattttgaaatattaaggaaaaagtaatattgaattaaacaggcctggcatatggtgcctcatcatgcctgtaatcccagcatttggggaggctcaggtggcagggtcgcctgagcccaggagtttgaggctgcagtgagctatgatggtgccactgcactccagtctgggtaacagagggagaccctgtctta

SEQ ID NO: 121284 - DNA, 739 bp, Homo sapiens
atcccttgctcgctgctgctgccacgtaagaagtgtgttgcttccccttcgtcttccaccatgaataacagaatggcaattttcgtgtggtgttaatttccgtggaagaagaaaaggctcgactctctgtcctatttttcatgaatactggaagtagggaataaacctggagtctcacgggtgaaaagagacatttccatatcaccagaccacaaacgtgggtgttgattctaaggatacccccaataaacatctttcgtgctaaagcccattccagaatttacttcccagctatctttgatgttcatattgtcagaggtggtggccgctgaaacaggcaaagacatggagcatatcttgggtccaggtaaaggaggtgggtgcacacaagtgaaaagatgttgctgaagtcacgtggcttcaagcagtagagctgactgtcctctagtccagttgtccctacaggataaaagcttctctccattacagagaccttgggagtccagaggaaggtctttttaccatcagcattctctactgtgttcaatgactgtcagccaaagatggccaggttctctactgtgatggtgaattttatgtgtcaatttgactggaccatgggatgcccagctttccttcagaaagaaatgcattcaaagaacctacattcacaacataaagaaataaagcctgcacctacagatctacacacatgcccatgcacatgcaggaagtgttc

SEQ ID NO: 121285 - DNA, 386 bp, Homo sapiens
gggcgctctcaggacttcttattttccttctttataggtagtaagttttaagaaattagttatcctcaagaaactttacaagttgaataacaaatagtttttaaaaatatccataaatgtacatacatagggagtctattgctttaactttgtatatctgacattagcacagacattataattatgcactttggcaagaggaaagttgcttctgaaactgcctctttaaaacgtttatttttaaaaaattgtctcttttttttgtagacaggatctcactctgatgcccaggcaggaatacagtggcacaatcacaactcactgcagtctcaaactcctgggctcaagtgatcctcgtgcctcagcctcctaagtaagactatagg

SEQ ID NO: 121286 - DNA, 338 bp, Homo sapiens
cggagtgcaatggctagccatatgcagaagattaaaactggacccccccccttggccggagtgcatatggctgaatttgtggatggcttggatatagagtatgtggacaaaaaagagaagggtcggctgggcgcggtggctcacgcctgtaatcccagcactttgggaggccgagacgggcggatcacgaggtcaggaaatcgagaccatcctggctaacacagcgaaacccggtctctactaaaaatacaaaaaattagccaggcgtggtggcgggcgcctgtcgtcccagctactcgggaggctgaggcaggagaatggcgtgaacccaggagggg

SEQ ID NO: 121287 - DNA, 446 bp, Homo sapiens
gggggagccggcagctgctcaggaagacggtgggatttgaggagccatcacgcccagtgggacagctgagaggaatgggccacagtggcccgtgacgatggtggctcctacaaggaatggccccgtgagttcttccatcagcaggcctttgacttcatgggcagctgggcctggcccaggcacaagccctgcagaccctcagtgaggccttagggtcctccttgtcctcccagccccccaggggcctccaggcagggcccccgctgagggagcagctagggagggtctggtgcggatgtgaggctgcctggcagggcttgcacggggccgtctccgctgcccttctccctgacgctctctggttctgcagcccagcccctgggtggacgtgttgggggtgacccctcgttttcccagggttgaggccccttggccccgcatcagtg

SEQ ID NO: 121288 - DNA, 339 bp, Homo sapiens
tgaaagaacgatcactctccggcgaatgactctccagagctccctgtgggctgaggctggggctagacttgacctgaaaccatatccctgcatggcccctcccccctcctgcgtccctctccttgtgaatcacatgcaccccaatccccgtctcaggcttctttctagggagcctggccccagaccagcctgtatgggagacattgttaagactctccgttttacagacagggaaagtgaggcacaaaagggtcacacagtctgtaagtggctgtgctgtactgcaccgcttagatggagcccctccccaagcccatgctggtcctcctgccccggctc

SEQ ID NO: 121289 - DNA, 547 bp, Homo sapiens
cttaacgttcaagtgtataagaaacagaaacaattcaactccagtcaataatgtaaacaaatcctggtttagataagccctattaccaggctgaagtggcccagggcacctctgctactgctgattagcgtaaatgctaaacacaaaccaattaacacactctagggctgcttatctcccgtcacttagtgtggaaataaagcccagcgctaaatacacatattgatttagccattaaatccagcatcactcaaaataaaactcattatattatggggcaaaaacaaagtcaccttcgttttcaggatgggctatattatttaaaaatttcacttttacacttttccattgatttcccaaagtggcctgagtatctcctcctactgtggattttggctagctctaggacaaattcagaaagtaagcattttgcattcactttaacatgatctttgcttttagtgctaaaagtgcacacatatatgagaatcctttttctttaagatgctattttagcttagaagaggaaattttatgcttggaagaa

SEQ ID NO: 121290 - DNA, 141 bp, Homo sapiens
gaaaaaaaaaaattcgatgatacaaacagacaaagtaaaaggatgaaaaactaacatgggaacagcaatcacaagaaggctggaatggctaatatcagaaaaaatagatttacaaatgctactggtgagaaagagggacat

SEQ ID NO: 121291 - DNA, 696 bp, Homo sapiens
agggtggggtttctttcccaccctaataatcctgagggtactgcaggagaccagggtgtatgtcagtccttatctcaaccacgtaagacagacactcccagagcggccatttatagacctccccccaggaatgcattcctttcccagggtcttaattattaatattccttcctaggaaaataattcgcgatatcttccctacttgcacatccgtttataggctctctgcaagaagaaaaatatggctctattctgcctgaccccgcaggcagtcagaccttatggttgtcttcccttgttccctgaaaatcactgttattctgttctttttcaaggtgcactgatttcatattgttcaaactcacttgttttacaatcagtttgtacagttagatacaattatcacagtggtcctgaggtgacgtacatcctcagcttatgaagataacaggattaagagattaaaataagacaggcgttaagaaattataaaagtattaatttggggaactgatatatgtccgtattaaaatgaaatcttcacaatttctgttcctctgccgcggctccagccggtccctccgttcggggtccctgacttcccacaacaatttctcttcactaaaataatcacatttttgctctatgtctctgaaattgctcctaaatcccactgagtagagtttgtgttctgga

SEQ ID NO: 121292 - DNA, 495 bp, Homo sapiens
tttattcgaggtgtctggggtgaggggagggtgaaacgacaacatttaggagaactagcaatttaaggagccaagagcaatgcagcctacaagtaatggaaatgataacaattccttgttctgtacggtgctcttaggccctatgcccgctgaccccctgtgtactcaggctgcctgactgtcagaggtgatgctgctaatcctagctcctaacttccaggacacaccacggagaagatctgttttctgagcctgagcgcatcatcccagatgatggcttcaatgggcttacacgcttaatttggtacaaactaacttggcagtaagatttattgccattgtctagtattgtatctgggtttattaaaaatccccatcacatcttttccacaaagggctagcatttctgcaagcatcattaggtagtcaatgatttcagctgacacacccatgggacaatcacagtttggtggaggagactgtgtatatatatat

SEQ ID NO: 121293 - DNA, 406 bp, Homo sapiens
gatagatagatgatagatagatagatggatagatagataaagatatacttccaaaagaaatcaaatatgttaggctaatacactatgagtaataaagttgtactacaagtatgtgtgacaaaaatatcttcatgtaaatcttctgcttattcctactcagctaatgacatagagataaaatgtatctgagcccatttgtgcttactaatgtaaaaagtaataatttatttatttgtgtgtgtatatatacacatcagtgtatgtatacgcatatatgtaaatagaaaaattctggaaaaattgctaaaagatgtatacattataatgttttactatatatacttctgtaccatttcacttttccacaatgagcatgtaactacttaattataaattaaaaaagaaa

SEQ ID NO: 121294 - DNA, 346 bp, Homo sapiens
tcaaacttaagtaaagtgtttccctgagttctgtgagccactttagcaaattaattgagcctaaggaggggggtcatgagagtcccaatgtatagccagttgaacagaagcacaggtcgcaacctgaggcttgcaattaccatctgtagtgttgggtggggggaacaggcttgtgggatctgacactgtctcccagtagatagtgtcagaattgaattgatttttagggcatgcagtcggtgtccattgcagattgctaggtgtgtggggaaaaacctcaacgtatctgttgttagaagtaaattgttgagtgactgtgtgagtataagcaaaggagtaggaaaag

SEQ ID NO: 121295 - DNA, 619 bp, Homo sapiens
accaaaatggcacgagggaaatgagtgttttttatttatgatattgtactagaaattttaaaacacttataattagaagtgaatttcataatctttgattccttcaaaccaaatacctaatagctttcttaacactttgcagcatgtggttttgacttggttaaggggaaagcagcccttaattgtttactgtgtcttcagcccaatttgggaaggagatgagtgcttgataaatactattcaataaggacagaaatacaacacaattctttatattctacgtggtttaaggtaagagtcttgtgaaggcttgccaataatagggaatacacctgtagtatagaagaccaaaaagtggcatcaatctgtgttctaaatatgtttttgcttagaccagttgaatatatcttagcttttctttgtagtactgatgattccaatggaatcattcttcatttgatagatattcatagagcccctctgccataaatgctctactaaaatctagtgctacacaagtaagtgaatctcagtgtctgccctcaaagagttaactgccaattaacaaaatggaatctctcatattaagcgtttaataggtcctaatattttataaata

SEQ ID NO: 121296 - DNA, 167 bp, Homo sapiens
ggactattccatgcctaatattccgcatttccaggagtcgcctaagcgaatctggtcaccgtgattcagcattcacttgtgctgcttgctctgtttcctgatagccaaagtgaaatcacctattttttgtgccaagtgttgacactcatcatagacagcttgtgtta

SEQ ID NO: 121297 - DNA, 252 bp, Homo sapiens
ctaaagcctatgtctacaccctctagcagatgcaggctttagggcacagcacacatgaattcaaatcccagctctgtgttttgctagctgtgtgaccttcagtgagttactcatcctctctgagcctgtgtccttctctgtaaagtgaaaacatgaaactgcctcacacaaagtcattttaagaatgaaatgagaaaatgtatataaagctctcaggacacatataacacaataaagtctcgtctactccct

SEQ ID NO: 121298 - DNA, 246 bp, Homo sapiens
ttaatgaaggaactacaagccaaacccattctttctactccagattgatatatgcagttgtctcctcgacatcttcagatatctcaaaattacgtcaaacctaaaacatatttgaaagtttagtatgcagacttttttcctccaatttgtagcagcatcatctacccagaacctgtgagtcatctttaacacatccttcactacccttaacatttcccttgcaagtaccactcaagtctgtctact

SEQ ID NO: 121299 - DNA, 134 bp, Homo sapiens
ggtgcagcctcacccgaggatctcctggggccagcactgtgccagcctcatcccagcaagacccttgggagttgggtgctgttgttgtccccatttgtcacacaaggaaggaaactgaggccagagagacgaag

SEQ ID NO: 121300 - DNA, 283 bp, Homo sapiens
tgggcaaagggaaccaagctcatgcccagaaaggaggcccagccaaggtctcctgggccaatgctcttcaccttaatcctccaggaaggagctgaaccagccacattcgaacactgtctctgagcgagcccagtgcagatagctggggctatggcgtgactgggtgagggcacaggctggacggggggaggggggtctgctgggtcagctttgactctgactctctcctctgagcatgaggaaagtgtaaagcaagaaaacagggtgggcgaaccccacagcc

SEQ ID NO: 121301 - DNA, 732 bp, Homo sapiens
  misc_feature (590)..(590): n is a, c, g, or t
ctagtcctcaacagggagcctaggagcaggcacaaggaaacatgtcccctctgggtaaactttctgtccaaaattaaacaaaacaaacaaaaaacctgaatacgtctggaatctgtctgagttttttgtggatgcaggcccaccctggccctggcatatcagcaagccagttgtgggccattcttttcctccctgtttattgtcgttttttcctgcgttctttactcactcagtttccttccttttttgtcttttttggttcttttccgtttcttctctttttccttttaccttcttccattccttatatggatagcctaggaaacatcctacacttaccataggcattttttttagcctgattaatggcagtccagaactaaagacaaattttactctgatattatggtctgtaaaatcgcatgctggtgcaaattatttatttgtttgtttgtttgtttgttttttgagacagagtttcactcttgtggcccaggctggaatgcagtaggatgatcttggctcactgcaacctctgcctcctgggttcaagcagttcttctgcctctactaaaaatataaaaaattanccaggcgtggtggtgggcacctgtagtcccagcaactcgggagggctgaggcaggaaaatggcgtgaacttgggagcggagcttgcggtgaaccagaatcgtgccactggactctaccctggcgacaaaagcagactggctt

SEQ ID NO: 121302 - DNA, 199 bp, Homo sapiens
acccgcctcggcctcccaaagtgctgggattacaggcgtgagccaccacgcccgcccagaaagtgctttctttcagagggttacggtttgagaaaagcagcattgaagttgacgctgatcttggtaatacatttgcagagcatgcttatggtcagacgtggatgatggtggggttttgtttttgttttgttttttatct

SEQ ID NO: 121303 - DNA, 461 bp, Homo sapiens
ggacctgaactaagacagtgatggtagggctgatgagaaaggcataagagataatagcaagtaaagctgataggacttagtatttgggtggattcagggtaaaaaagaaaccggaaatcatttccaggtgtttagctagaaggttgagtggatggcagtgccattagctaggagagatcatgtgcctaggaagaagtctaggcaaaagaggaagaagttttagaaaggttgtatgacaggtgcctgaggtatactccagtggagatgctccatggataggggcataggagtctgaagctcagtaaagaggatgggctgaattaaatatttggaagtcatcaggacatagctattagttgagaccacgagactgaatgagatcacccaataggagtctcttaaatggaacagtgtgagtcaaggacagaaccctggggaaccagactccattagaaatctgc

SEQ ID NO: 121304 - DNA, 496 bp, Homo sapiens
gccagactaatagcaggtgccaatcatggattttaagtcagtgaacacacagttgagtgtgccatgtgttctgtacaagaaccaggtacagatgctcctctgcttcggatggtgttgtgtcttgtgtccagataaacccctcatcagttggaaatattgaaagtggaaaatacatttaatacacctaacctactgaatatgctggcttagcccagcctacctcagatgtgctgagaacactcacattagcccacagttgggcagaatcatctcacacaaagtctgttttataatgtgttgaatatctcgtgtgacttacggaatactgtactgaaagtgaaaaagagaatggttgtgtacttcagatactcacacaaccatcgtgtttttcacttctggtgaataaagcagcccttatcgatacagtttctactgaatgtgtatcgtgttcacaccatcatcaagtcaaaaaatcatcaagttgaaccgttttaag

SEQ ID NO: 121305 - DNA, 222 bp, Homo sapiens
cccatttcacctgcactgcagctgggacagagcagcctcgtccttggccacaggagtattcgcatgcaaggtgcttctaggttacccaacagcactatctacgtggtcgaacctggatacctagggttcactgttcaccctggtgacaggtgggtgctggagaccggccgcctgtatgaaatcaccatcgaagtttttgacaagttcagcaacaaggtctat

SEQ ID NO: 121306 - DNA, 415 bp, Homo sapiens
atcccaagagtttcctgtactctaggaatcaggaaagtgtagaatacagatttgaaatatgtctaccaagattgattaaaatattaaatatattgcttaaataaagtaggccttttctagaaatgttcttgttcttgagatagggtattgctcttttgtccaggctagagtacagtggcacaggcatggcttaccacagccttgacctcctggacttaagtgatccttctgcctcagcctcccaagtagctgggactacaggcatgtgccaccatgcctagctaatttttgtatttttattttgtagagatagggggtctcactatgttgcccaggctggtctcaaactcctgtgctaaagcaatccttcctcctcagcctcccagagtactgggattataggtatgggctacca

SEQ ID NO: 121307 - DNA, 453 bp, Homo sapiens
gatgaaggctgcagctcgctgggtcttgctttctcatctgagaatgggagggggtggggcctctaagagcccttctggatcgagtgtctggggattccagaaccagccccactccttcccaaggttcagcgctagcacatccatactccccagactgtctcccccatttcggttgcggcaagactgctgtgagccagagctatgcaggcgtttgaatcgcgggtccctgcctagatggacacttcttccccttaactagttttctccctggcagccctccgtccattctcacctttcctcctcacctctagtcctgcattagaagcagccggttctccttcccagagccctccctggcagattgtgaaccgactaggccatgcctcttcacctgtggagagtggctctgaagcagggtactctctcttaccctgggccctgcactccagtgca

SEQ ID NO: 121308 - DNA, 331 bp, Homo sapiens
ttaaagatttgtagttccctgaagatatcatgcaagtgtccgtcttaaacatataaatcagcctttacttatggtcctgaaccaacctctttactcttcctgtatatctgtccattcttcaacaactcaagtcaagtaccagctcttcaagttctcctcacaggtgaggttggtagcccctcttttatattcccatagcactctctgctttttcttaacaaggcatttcccaccttataataacatcccctctctctggctgtctcttcccaacattagagtgcagtgcctgccctctgtgtgctggtcccttctaaaccctggagatgca

SEQ ID NO: 121309 - DNA, 147 bp, Homo sapiens
aactgcacatatgtgggtgaggggttcttaacattttgggccaattgttacagagattattgctgcagtttgtggatctgaatcctatttttatatagcctggccattgtccactggtctattcagtctcccagcacatagccttca

SEQ ID NO: 121310 - DNA, 439 bp, Homo sapiens
atataacctgtgcgcttatgtgttcatagcatataatcagcttttaagttttgaaaatgatttgactacttctcttagccctcttctcattgccagtagaacacattctactagttatgggttagctaaaaagtatgtgtctctatgaagggtcaaagacaaaaatcaactaatattttcagcaaaaaagaagacatatgatcatacttctggaagtttgtggattaacttctgtgactaaagctgcttgtttaactgttcgggtatgctctgggttataggccctgggttaggagatgaaagcaatttgatttccacaagcatattcatatctcacagatgaagtcacaccaaaatcaaatgatttcacagggcaacagcattgacaaagaaagtactgctttgggaatacaaagaaagtactgctttgggaatacct

SEQ ID NO: 121311 - DNA, 555 bp, Homo sapiens
tgcttttgtactacagtggcagagttcagtcattgtaatggagactgtagggtctgcaaagcctaaagtatttactatctgaccctttacaaaaaaagattactgaccctgggtcagcagtggattttttttttcttttaatgtgggaagagaatctcttgagtgaaggtgaatgggaatttgtaaaggatgagatgtagaatttatcactctaggattctgagttcatgcttacttaacttcagcacataaaattcctaaatcgtagtcacaaaaatcatgctattttcatgaaaaccatgcaaaaaccgtgctgagtttatgaaagttgcagtatactgaaacttctggtgcagtaaacagggcaaaaggaatatttcctaacatccttgccaaggcagtgtctatccacacaacagcatcaacctcttatgcatatctattgtcacctttgattatccagttaaagcttctgaagagcctacatcttagttttggagacaagaagacaaggaatgtcaaaataggggttacagaaacctggctagattcaga

SEQ ID NO: 121312 - DNA, 682 bp, Homo sapiens
ctattaaccagtaactacagaaagaagttagatccaattagtaaaggcagaaagaaacattgcctttgtgagttctgtttccctgtgcatatctgccaccttaaactaatggagctatttattgagttcaagctgtccccaacgaaagctgctttttactttgcttctgtgcaaatcttgttcactttttacaactggctacagaatcaaagccagcagctggcctccatgctactacacagaacaatagcctgagcccaagcttctgaagagcaggcctgccccagtatcttgaatgtatgcctgcataaaaagcagacaccacccaggatggctgtatctgctgcttctgctcaggcagtaaatatgtaaaataggaagccaaaacacatccagggccacatctcattgagtgcccttgggaaactcaattggacatcagtttatctttaaaataggaatcataatggcttcctctgattatgtcctgtaaagtatataagtggtttataaactacagttttaacatactggttgttaggtgatcgtgttcccattttttatgtggttgctttctcaagcacatacataatcatgctaaagaacggtaaaatagcagcagtcctcctgccatgcccaggacttatgctactttgtaatgtgatctcaaaatggactgtaa

SEQ ID NO: 121313 - DNA, 631 bp, Homo sapiens
gatgctaggttgcgctctcctgctgggtctgcgccgtgtgcgtgtgtgtgtgtgtgtgtttagtaagtgcctgttagaaatcttcagcttttccttaaaaaataacctggcctcttctaagggggtgcccttaaactacgtctcttactacaacttaattttcagaggaactgataaaaaacatagttcggagcacgactcagaataattaaaattactgcagccgctgaaagtcactcagttctgccgagtggaaaagcaggcagggaggggtagaataaagacacagaactggagatccttaattcgtgaatgtggggtttctcagattcaaactttactcagaactgcgcgtgaaacctactccttcccttgtcctccctctggtggagaattctaaagagcaaggaaataagaaggcattgacccctcccctgcaaaggacaaaagttaaagaccagggtaacgggcaccacggaaggatccagaattgtctacatgtagagaaaacattctcagagttataccacagctgtggttaacttagactcttaatttacagtgaaatactcttgtgttgtggtcgggaagtggtgagttggaacaatccatattcaaaatctattgcttc

SEQ ID NO: 121314 - DNA, 390 bp, Homo sapiens
cctcccccgggagagagagtaggtttgctattcctgaaatgtaatccctccttcagcgctgcacaaaaggcccatgtctgctcgctgggacctgatagttcgcctttgtacggatgaaaaaaaccaaacactgagcctggtctgagcggggctgtttgttgaggctcctgatgcagacaagggagcagtgtctgcacagggggtctggatcgcacccgacaccatccaggtgcctgcgtgtgctggtcccgccatcaggacttcccctcgtgaggagctgggtaccactgttatcctgcctgctggtctgagggtccgagcgtgattgggagcagagacaagagttccagggcgagcctcagttctgggaccaccattgaccagtagagc

SEQ ID NO: 121315 - DNA, 214 bp, Homo sapiens
cttaggtggtatacatagcactatcagacatggctcctgcttttgaatttcttactttctagtaggggaaaatagaatatcctcaccccacagtgtgttactgtggctcaaccacatgaatcaggaaacaagagtagaggccattcggagcttgcagtgagccgagatcccgccactgcactccagcctgggcgacagagcgagactccgtctc

SEQ ID NO: 121316 - DNA, 678 bp, Homo sapiens
cagagtgcataactaggtattagagtgatctccatttggggatggagttacagtaaataactagactgcgggtactttaatacatgttcttattattttgcatttaagtaattttcatgaccaattgtagggatgttgctacaggtgggttattttgttgccttgctaacctttatcgcatctaggtattagtatgtttcaggtactttgggaagaactttacatataatctttagcaatgaaatgatgtagagtaacttaccttagttcaaatagctgtttaagtggcaatgccacgatctgaattgaacctaggtgatcttagtccacagttctcttgatcatgatgtctcaaatctgggtacctgggtgatggaaaataccagtaatggagcataggcagtattggcaggtcttaatttgtaaaacttactgtccagggtgttttcagtgtttgccaacttgtggtaaattaatatgcttagagaactacccttaggtttgtttctgataagcatgtggaaacaacttagtatatgcctgatgggttatttcaaattgttctcaatgagttttgaaacaagaatttgtagtatttatatataaagttgagttttagggtgtggtcccagagggggttgtgttatggatggatacattaaaggctgagaaacctgg

SEQ ID NO: 121317 - DNA, 1078 bp, Homo sapiens
aatgatattctgtcagataaaaaattatatttatcagagataaatattgaagagtttttggataaaatattatgtctgggaattccttcttctccctttccccaaataaactagggggcagtgcatagaaaacaatattactaagtgattttaaattctgataatttttcaatataaaattggggttctcgcatatgtttgaaattttgcttaatgaaaaatttaaataacttacttagaattcatatataaaatttctaacatttgtaatatgcatggcaggtagcaattatgctccattcttcttctctagctcataagagtttatttttgattgcttagggaaaaccctggacctcaattatactgtaaaatatttttgttccatctaatctttagtattcttatatgcagtgcccctaggtcttactgaagttgccagagttacctgttggttgctgtctgcattatttagctagaatattctttgtctctttaaatgtttgctcagtatttattttacttgataggaaatgaagtgtctgatgaagagtgcttgaagagagtgggcctaagtggcgctcctgctgatgcctgttctactgcccagaaggctgttggatacatttgcaaatgtaatggtggccgtggtgccatccgagaatttgcagagcacatttgcctactaatggaaaaggttaataattcatgccaaaaatagaaattagcgtaatattgagaaaaaaatgatacagccttcttcagccagtttgcttttatttttgattaagtaaattccatgttgtaatgttacagagagtgtgatttggtttgtgatatatatatattgtgctctacttttctctttacgcaagataattatttagagactgattacagtctttctcagatttttagtaaatgcaagtaagaacatcatcaaagttcactttgtattgtaccctgtaaaactgtgtgtttgtgtgctttcaaagatgttgggattttatttatctggggacagtgtgtatggtaagacatgcccttctattaataaaactacatttctcaaacttga

SEQ ID NO: 121318 - DNA, 1793 bp, Homo sapiens
cgggggagggggcggggcgagggacggccgcgcgcgccagctgccaggcggggatcgggcggcgccgagctgaggtggtgagggactagctcccggatgtggagaagctggggagaaggcgtgggaggaagatggactcggtggagaagggggccgccacctccgtctccaacccgcgggggcgaccgtcccggggccggccgccgaagctgcagcgcaactctcgcggcggccagggccgaggtgtggagaagcccccgcacctggcagccctaattctggcccggggaggcagcaaaggcatccccctgaagaacattaagcacctggcgggggtcccgctcattggctgggtcctgcgtgcggccctggattcaggggccttccagagtgtatgggtttcgacagaccatgatgaaattgagaatgtggccaaacaatttggtgcacaagttcatcgaagaagttctgaagtttcaaaagacagctctacctcactagatgccatcatagaatttcttaattatcataatgaggttgacattgtaggaaatattcaagctacttctccatgtttacatcctactgatcttcaaaaagttgcagaaatgattcgagaagaaggatatgattctgttttctctgttgtgagacgccatcagtttcgatggagtgaaattcagaaaggagttcgtgaagtgaccgaacctctgaatttaaatccagctaaacggcctcgtcgacaagactgggatggagaattatatgaaaatggctcattttattttgctaaaagacatttgatagagatgggttacttgcagggtggaaaaatggcatactacgaaatgcgagctgaacatagtgtggatatagatgtggatattgattggcctattgcagagcaaagagtattaagatatggctattttggcaaagagaagcttaaggaaataaaacttttggtttgcaatattgatggatgtctcaccaatggccacatttatgtatcaggagaccaaaaagaaataatatcttatgatgtaaaagatgctattgggataagtttattaaagaaaagtggtattgaggtgaggctaatctcagaaagggcctgttcaaagcagacgctgtcttctttaaaactggattgcaaaatggaagtcagtgtatcagacaagctagcagttgtagatgaatggagaaaagaaatgggcctgtgctggaaagaagtggcatatcttggaaatgaagtgtctgatgaagagtgcttgaagagagtgggcctaagtggcgctcctgctgatgcctgttctactgcccagaaggctgttggatacatttgcaaatgtaatggtggccgtggtgccatccgagaatttgcagagcacatttgcctactaatggaaaaggttaataattcatgccaaaaatagaaattagcgtaatattgagaaaaaaatgatacagccttcttcagccagtttgcttttatttttgattaagtaaattccatgttgtaatgttacagagagtgtgatttggtttgtgatatatatatattgtgctctacttttctctttacgcaagataattatttagagactgattacagtctttctcagatttttagtaaatgcaagtaagaacatcatcaaagttcactttgtattgtaccctgtaaaactgtgtgtttgtgtgctttcaaagatgttgggattttatttatctggggacagtgtgtatggtaagacatgcccttctattaataaaactacatttctcaaacttga

SEQ ID NO: 121319 - DNA, 835 bp, Homo sapiens
cgggatgtctgcgtggtcacgtgataaaggggttgcccatcccgacaaatatatgttggtctcttgccgaggcctagagaaaaactcggtggtcacacattgaggaccccccggcgcccctgtaagttcccgtgccccccaaggatataattcctatgaaggtaaaggagcctatgggaataagtttattaaagaaaagtgtatttgagtgaggctaatctcagaaagggcctgttcaaagcagacgctgtcttctttaaaactggattgcaaaatggaagtcagtgtatcagacaagctagcagttgtagatgaatggagaaaagaaatgggcctgtgctggaaagaagtggcatatcttggaaatgaagtgtctgatgaagagtgcttgaagagagtgggcctaagtggcgctcctgctgatgcctgttctactgcccagaaggctgttggatacatttgcaaatgtaatggtggccgtggtgccatccgagaatttgcagagcacatttgcctactaatggaaaaggttaataattcatgccaaaaatagaaattagcgtaatgttacagagagtgtgatttggtttgtgatatatatatattgtgctctacttttctctttacgcaagataattatttagagactgattacagtctttctcagatttttagtaaatgcaagtaagaacatcatcaaagttcactttgtattgtaccctgtaaaactgtgtgtttgtgtgctttcaaagatgttgggattttatttatctggggacagtgtgtatggtaagacatgcccttctattaataaaactacatttctcaaacttga

SEQ ID NO: 121320 - DNA, 330 bp, Homo sapiens
  misc_feature (312)..(312): n is a, c, g, or t
  misc_feature (315)..(315): n is a, c, g, or t
  misc_feature (319)..(319): n is a, c, g, or t
cctagttttagaagtttcaatagcaaaagacatttgatagagatgggttacttgcagggtggaaaaatggcatactacgaaatgcgagctgaacatagtgtggatatagatgtggatattgattggcctattgcagagcaaagagtattaagatatggctattttggcaaagagaagcttaaggaaataaaacttttggtttgcaatattgatggatgtctcaccaatggccacatttatgtatcaggagaccaaaaagaaataatatcttatgatgtaaaagatgctattgaacttctaactaggggtacnacncgantcgatctgtat

SEQ ID NO: 121321 - DNA, 726 bp, Homo sapiens
  misc_feature (28)..(28): n is a, c, g, or t
taaagaggaaaaagaagggaaataaagnttaccccatttcattgtgccaaaggcgtgtgggttgacagaagagaaaagctagcagttgtagatgaatggagaaaagaaatgggcctgtgctggaaagaagtggcatatcttggttggtatctttttattcacccatagtaaaatggaccaggaattaattatttacttatttttaaagaaatgacaaagcacatcctccaaatgggtatgattgtagggaaataggaactcttttaacaaacactgctgatcaaactgttaaactgggacagtctttctggaggttagtttgataataggtatcaaatgtagaatgattattagcacaagctgtgaagtcagactgtaccactgattagccagttgtgataagatgaatgttgtttcctcatctgtaaactggagatatcgagagtacctattaccgtagggctctggaagggattaataaaataatatgagtaaagcacttagcagaatttctagtacatatgaattacactctgaatagtttttgctgctaattgaatgtacatactttttcctccaaattccaattccaggaaagaaatgagacaaatgggccaatagtgaagttaaaagaacccacttaaatgtcctgtgaaaaatagaatatccctaaaaaggattactatgcaaccattacaaacagtgctgtgacctgtatttatttgc

SEQ ID NO: 121322 - DNA, 1621 bp, Homo sapiens
cgggggagggggcggggcgagggacggccgcgcgcgccagctgccaggcggggatcgggcggcgccgagctgaggtggtgagggactagctcccggatgtggagaagctggggagaaggcgtgggaggaagatggactcggtggagaagggggccgccacctccgtctccaacccgcgggggcgaccgtcccggggccggccgccgaagctgcagcgcaactctcgcggcggccagggccgaggtgtggagaagcccccgcacctggcagccctaattctggcccggggaggcagcaaaggcatccccctgaagaacattaagcacctggcgggggtcccgctcattggctgggtcctgcgtgcggccctggattcaggggccttccagagtgtatgggtttcgacagaccatgatgaaattgagaatgtggccaaacaatttggtgcacaagttcatcgaagaagttctgaagtttcaaaagacagctctacctcactagatgccatcatagaatttcttaattatcataatgaggttgacattgtaggaaatattcaagctacttctccatgtttacatcctactgatcttcaaaaagttgcagaaatgattcgagaagaaggatatgattctgttttctctgttgtgagacgccatcagtttcgatggagtgaaattcagaaaggagttcgtgaagtgaccgaacctctgaatttaaatccagctaaacggcctcgtcgacaagactgggatggagaattatatgaaaatggctcattttattttgctaaaagacatttgatagagatgggttacttgcagggtggaaaaatggcatactacgaaatgcgagctgaacatagtgtggatatagatgtggatattgattggcctattgcagagcaaagagtattaaggtgaggctaatctcagaaagggcctgttcaaagcagacgctgtcttctttaaaactggattgcaaaatggaagtcagtgtatcagacaagctagcagttgtagatgaatggagaaaagaaatgggcctgtgctggaaagaagtggcatatcttggaaatgaagtgtctgatgaagagtgcttgaagagagtgggcctaagtggcgctcctgctgatgcctgttctactgcccagaaggctgttggatacatttgcaaatgtaatggtggccgtggtgccatccgagaatttgcagagcacatttgcctactaatggaaaaggttaataattcatgccaaaaatagaaattagcgtaatattgagaaaaaaatgatacagccttcttcagccagtttgcttttatttttgattaagtaaattccatgttgtaatgttacagagagtgtgatttggtttgtgatatatatatattgtgctctacttttctctttacgcaagataattatttagagactgattacagtctttctcagatttttagtaaatgcaagtaagaacatcatcaaagttcactttgtattgtaccctgtaaaactgtgtgtttgtgtgctttcaaagatgttgggattttatttatctggggacagtgtgtatggtaagacatgcccttctattaataaaactacatttctcaaacttga

SEQ ID NO: 121323 - DNA, 1202 bp, Homo sapiens
tctccacgtatgcggcgtgctagctggatgtcttttggcataattgttacacgtttggcatggatagcacacaggttggtgtcttcaaaaaggccaaccagataggcctcacttgcctcctgcaaagcaccgatagctgcgctctggaagcgcagatctgtttttgctattgaaacttaaatggctcattttattttgctaaaagacatttgatagagatgggttacttgcagggtggaaaaatggcatactacgaaatgcgagctgaacatagtgtggatatagatgtggatattgattggcctattgcagagcaaagagtattaagatatggctattttggcaaagagaagcttaaggaaataaaacttttggtttgcaatattgatggatgtctcaccaatggccacatttatgtatcaggagaccaaaaagaaataatatcttatgatgtaaaagatgctattgggataagtttattaaagaaaagtggtattgaggtgaggctaatctcagaaagggcctgttcaaagcagacgctgtcttctttaaaactggattgcaaaatggaagtcagtgtatcagacaagctagcagttgtagatgaatggagaaaagaaatgggcctgtgctggaaagaagtggcatatcttggaaatgaagtgtctgatgaagagtgcttgaagagagtgggcctaagtggcgctcctgctgatgcctgttctactgcccagaaggctgttggatacatttgcaaatgtaatggtggccgtggtgccatccgagaatttgcagagcacatttgcctactaatggaaaaggttaataattcatgccaaaaatagaaattagcgtaatattgagaaaaaaatgatacagccttcttcagccagtttgcttttatttttgattaagtaaattccatgttgtaatgttacagagagtgtgatttggtttgtgatatatatatattgtgctctacttttctctttacgcaagataattatttagagactgattacagtctttctcagatttttagtaaatgcaagtaagaacatcatcaaagttcactttgtattgtaccctgtaaaactgtgtgtttgtgtgctttcaaagatgttgggattttatttatctggggacagtgtgtatggtaagacatgcccttctattaataaaactacatttctcaaacttga

SEQ ID NO: 121324 - DNA, 1026 bp, Homo sapiens
cctagttttagaagtttcaatagcaaaagacatttgatagagatgggttacttgcagggtggaaaaatggcatactacgaaatgcgagctgaacatagtgtggatatagatgtggatattgattggcctattgcagagcaaagagtattaagatatggctattttggcaaagagaagcttaaggaaataaaacttttggtttgcaatattgatggatgtctcaccaatggccacatttatgtatcaggagaccaaaaagaaataatatcttatgatgtaaaagatgctattgggataagtttattaaagaaaagtggtattgaggtgaggctaatctcagaaagggcctgttcaaagcagacgctgtcttctttaaaactggattgcaaaatggaagtcagtgtatcagacaagctagcagttgtagatgaatggagaaaagaaatgggcctgtgctggaaagaagtggcatatcttggaaatgaagtgtctgatgaagagtgcttgaagagagtgggcctaagtggcgctcctgctgatgcctgttctactgcccagaaggctgttggatacatttgcaaatgtaatggtggccgtggtgccatccgagaatttgcagagcacatttgcctactaatggaaaaggttaataattcatgccaaaaatagaaattagcgtaatattgagaaaaaaatgatacagccttcttcagccagtttgcttttatttttgattaagtaaattccatgttgtaatgttacagagagtgtgatttggtttgtgatatatatatattgtgctctacttttctctttacgcaagataattatttagagactgattacagtctttctcagatttttagtaaatgcaagtaagaacatcatcaaagttcactttgtattgtaccctgtaaaactgtgtgtttgtgtgctttcaaagatgttgggattttatttatctggggacagtgtgtatggtaagacatgcccttctattaataaaactacatttctcaaacttga

SEQ ID NO: 121325 - DNA, 1718 bp, Homo sapiens
cgggggagggggcggggcgagggacggccgcgcgcgccagctgccaggcggggatcgggcggcgccgagctgaggtggtgagggactagctcccggatgtggagaagctggggagaaggcgtgggaggaagatggactcggtggagaagggggccgccacctccgtctccaacccgcgggggcgaccgtcccggggccggccgccgaagctgcagcgcaactctcgcggcggccagggccgaggtgtggagaagcccccgcacctggcagccctaattctggcccggggaggcagcaaaggcatccccctgaagaacattaagcacctggcgggggtcccgctcattggctgggtcctgcgtgcggccctggattcaggggccttccagagtgtatgggtttcgacagaccatgatgaaattgagaatgtggccaaacaatttggtgcacaagttcatcgaagaagttctgaagtttcaaaagacagctctacctcactagatgccatcatagaatttcttaattatcataatgaggttgacattgtaggaaatattcaagctacttctccatgtttacatcctactgatcttcaaaaagttgcagaaatgattcgagaagaaggatatgattctgttttctctgttgtgagacgccatcagtttcgatggagtgaaattcagaaaggagttcgtgaagtgaccgaacctctgaatttaaatccagctaaacggcctcgtcgacaagactgggatggagaattatatgaaaatggctcattttattttgctaaaagacatttgatagagatgggttacttgcagggtggaaaaatggcatactacgaaatgcgagctgaacatagtgtggatatagatgtggatattgattggcctattgcagagcaaagagtattaagatatggctattttggcaaagagaagcttaaggaaataaaacttttggtttgcaatattgatggatgtctcaccaatggccacatttatgtatcaggagaccaaaaagaaataatatcttatgatgtaaaagatgctattgggataagtttattaaagaaaagtggtattgaggtgaggctaatctcagaaagggcctgttcaaagcagacgctgtcttctttaaaactggattgcaaaatggaagtcagtgtatcagacaagctagcagttgtagatgaatggagaaaagaaatgggcctgtgctggaaagaagtggcatatcttggaaatgaagtgtctgatgaagagtgcttgaagagagtgggcctaagtggcgctcctgctgatgcctgttctactgcccagaaggctgttggatacatttgcaaatgtaatggtggccgtggtgccatccgagaatttgcagagcacatttgcctactaatggaaaaggttaataattcatgccaaaaatagaaattagcgtaatgttacagagagtgtgatttggtttgtgatatatatatattgtgctctacttttctctttacgcaagataattatttagagactgattacagtctttctcagatttttagtaaatgcaagtaagaacatcatcaaagttcactttgtattgtaccctgtaaaactgtgtgtttgtgtgctttcaaagatgttgggattttatttatctggggacagtgtgtatggtaagacatgcccttctattaataaaactacatttctcaaacttga

SEQ ID NO: 121326 - DNA, 1870 bp, Homo sapiens
cgggggagggggcggggcgagggacggccgcgcgcgccagctgccaggcggggatcgggcggcgccgagctgaggtggtgagggactagctcccggatgtggagaagctggggagaaggcgtgggaggaagatggactcggtggagaagggggccgccacctccgtctccaacccgcgggggcgaccgtcccggggccggccgccgaagctgcagcgcaactctcgcggcggccagggccgaggtgtggagaagcccccgcacctggcagccctaattctggcccggggaggcagcaaaggcatccccctgaagaacattaagcacctggcgggggtcccgctcattggctgggtcctgcgtgcggccctggattcaggggccttccagagtgtatgggtttcgacagaccatgatgaaattgagaatgtggccaaacaatttggtgcacaagttcatcgaagaagttctgaagtttcaaaagacagctctacctcactagatgccatcatagaatttcttaattatcataatgaggttgacattgtaggaaatattcaagctacttctccatgtttacatcctactgatcttcaaaaagttgcagaaatgattcgagaagaaggatatgattctgttttctctgttgtgagacgccatcagtttcgatggagtgaaattcagaaaggagttcgtgaagtgaccgaacctctgaatttaaatccagctaaacggcctcgtcgacaagactgggatggagaattatatgaaaatggctcattttattttgctaaaagacatttgatagagatgggttacttgcagggtggaaaaatggcatactacgaaatgcgagctgaacatagtgtggatatagatgtggatattgattggcctattgcagagcaaagagtattaagatatggctattttggcaaagagaagcttaaggaaataaaacttttggtttgcaatattgatggatgtctcaccaatggccacatttatgtatcaggagaccaaaaagaaataatatcttatgatgtaaaagatgctattgggataagtttattaaagaaaagtggtattgaggtgaggctaatctcagaaagggcctgttcaaagcagacgctgtcttctttaaaactggattgcaaaatggaagtcagtgtatcagacaagctagcagttgtagatgaatggagaaaagaaatgggcctgtgctggaaagaagtggcatatcttggaaatgaagtgtctgatgaagagtgcttgaagagagtgggcctaagtggcgctcctgctgatgcctgttctactgcccagaaggctgttggatacatttgcaaatgtaatggtggccgtggtgccatccgagaatttgcagagcacatttgcctactaatggaaaaggttaataattcatgccaaaaatagaaattagcgtaatattgagaaaaaaatgatacagccttcttcagccagtttgcttttatttttgattaagtaaattccatgttgtaatgttacagagagtgtgatttggtttgtgatatatatatattgtgctctacttttctctttacgcaagataattatttagagactgattacagtctttctcagatttttagtaaatgcaagtaagaacatcatcaaagttcactttgtattgtaccctgtaaaactgtgtgtttgtgtgctttcaaagatgttgggattttatttatctggggacagtgtgtatggtaagacatgcccttctattaataaaactacatttctcaaacttgaaaaaaaaaaaacaacttgtgggccgccaaaattataatctggcgcgccagaagaagtatcgacaacgcgaagggtca

SEQ ID NO: 121327 - DNA, 1802 bp, Homo sapiens
cgggggagggggcggggcgagggacggccgcgcgcgccagctgccaggcggggatcgggcggcgccgagctgaggtggtgagggactagctcccggatgtggagaagctggggagaaggcgtgggaggaagatggactcggtggagaagggggccgccacctccgtctccaacccgcgggggcgaccgtcccggggccggccgccgaagctgcagcgcaactctcgcggcggccagggccgaggtgtggagaagcccccgcacctggcagccctaattctggcccggggaggcagcaaaggcatccccctgaagaacattaagcacctggcgggggtcccgctcattggctgggtcctgcgtgcggccctggattcaggggccttccagagtgtatgggtttcgacagaccatgatgaaattgagaatgtggccaaacaatttggtgcacaagttcatcgaagaagttctgaagtttcaaaagacagctctacctcactagatgccatcatagaatttcttaattatcataatgaggttgacattgtaggaaatattcaagctacttctccatgtttacatcctactgatcttcaaaaagttgcagaaatgattcgagaagaaggatatgattctgttttctctgttgtgagacgccatcagtttcgatggagtgaaattcagaaaggagttcgtgaagtgaccgaacctctgaatttaaatccagctaaacggcctcgtcgacaagactgggatggagaattatatgaaaatggctcattttattttgctaaaagacatttgatagagatgggttacttgcagggtggaaaaatggcatactacgaaatgcgagctgaacatagtgtggatatagatgtggatattgattggcctattgcagagcaaagagtattaagatatggctattttggcaaagagaagcttaaggaaataaaacttttggtttgcaatattgatggatgtctcaccaatggccacatttatgtatcaggagaccaaaaagaaataatatcttatgatgtaaaagatgctattgggataagtttattaaagaaaagtggtattgaggtgaggctaatctcagaaagggcctgttcaaagcagacgctgtcttctttaaaactggattgcaaaatggaagtcagtgtatcagacaagctagcagttgtagatgaatggagaaaagaaatgggcctgtgctggaaagaagtggcatatcttggaaatgaagtgtctgatgaagagtgcttgaagagagtgggcctaagtggcgctcctgctgatgcctgttctactgcccagaaggctgttggatacatttgcaaatgtaatggtggccgtggtgccatccgagaatttgcagagcacatttgcctactaatggaaaaggttaataattcatgccaaaaatagaaattagcgtaatattgagaaaaaaatgatacagccttcttcagccagtttgcttttatttttgattaagtaaattccatgttgtaatgttacagagagtgtgatttggtttgtgatatatatatattgtgctctacttttctctttacgcaagataattatttagagactgattacagtctttctcagatttttagtaaatgcaagtaagaacatcatcaaagttcactttgtattgtaccctgtaaaactgtgtgtttgtgtgctttcaaagatgttgggattttatttatctggggacagtgtgtatggtaagacatggtgtgtgtggttgggggaagggggggggggtcagaacgttaaaaa

SEQ ID NO: 121328 - DNA, 1475 bp, Homo sapiens
tgaaggtggaagaaataggtcattagtacaagaaaaagtatataatttgtttatggtcagcggttgtcgacactgtatgggtttcgacagaccatgatgaaattgagaatgtggccaaacaatttggtgcacaagttcatcgaagaagttctgaagtttcaaaagacagctctacctcactagatgccatcatagaatttcttaattatcataatgaggttgacattgtaggaaatattcaagctacttctccatgtttacatcctactgatcttcaaaaagttgcagaaatgattcgagaagaaggatatgattctgttttctctgttgtgagacgccatcagtttcgatggagtgaaattcagaaaggagttcgtgaagtgaccgaacctctgaatttaaatccagctaaacggcctcgtcgacaagactgggatggagaattatatgaaaatggctcattttattttgctaaaagacatttgatagagatgggttacttgcagggtggaaaaatggcatactacgaaatgcgagctgaacatagtgtggatatagatgtggatattgattggcctattgcagagcaaagagtattaagatatggctattttggcaaagagaagcttaaggaaataaaacttttggtttgcaatattgatggatgtctcaccaatggccacatttatgtatcaggagaccaaaaagaaataatatcttatgatgtaaaagatgctattgggataagtttattaaagaaaagtggtattgaggtgaggctaatctcagaaagggcctgttcaaagcagacgctgtcttctttaaaactggattgcaaaatggaagtcagtgtatcagacaagctagcagttgtagatgaatggagaaaagaaatgggcctgtgctggaaagaagtggcatatcttggaaatgaagtgtctgatgaagagtgcttgaagagagtgggcctaagtggcgctcctgctgatgcctgttctactgcccagaaggctgttggatacatttgcaaatgtaatggtggccgtggtgccatccgagaatttgcagagcacatttgcctactaatggaaaaggttaataattcatgccaaaaatagaaattagcgtaatattgagaaaaaaatgatacagccttcttcagccagtttgcttttatttttgattaagtaaattccatgttgtaatgttacagagagtgtgatttggtttgtgatatatatatattgtgctctacttttctctttacgcaagataattatttagagactgattacagtctttctcagatttttagtaaatgcaagtaagaacatcatcaaagttcactttgtattgtaccctgtaaaactgtgtgtttgtgtgctttcaaagatgttgggattttatttatctggggacagtgtgtatggtaagacatgcccttctattaataaaactacatttctcaaacttga

SEQ ID NO: 121329 - DNA, 1061 bp, Homo sapiens
atagtatcagtatcagtttctcccaaaaatcctgctggattgtcggttgggattgctattgaaacttctaaaactagagttttagaagtttcggtggaaaaatggcatactacgaaatgcgagctgaacatagtgtggatatagatgtggatattgattggcctattgcagagcaaagagtattaagatatggctattttggcaaagagaagcttaaggaaataaaacttttggtttgcaatattgatggatgtctcaccaatggccacatttatgtatcaggagaccaaaaagaaataatatcttatgatgtaaaagatgctattgggataagtttattaaagaaaagtggtattgaggtgaggctaatctcagaaagggcctgttcaaagcagacgctgtcttctttaaaactggattgcaaaatggaagtcagtgtatcagacaagctagcagttgtagatgaatggagaaaagaaatgggcctgtgctggaaagaagtggcatatcttggaaatgaagtgtctgatgaagagtgcttgaagagagtgggcctaagtggcgctcctgctgatgcctgttctactgcccagaaggctgttggatacatttgcaaatgtaatggtggccgtggtgccatccgagaatttgcagagcacatttgcctactaatggaaaaggttaataattcatgccaaaaatagaaattagcgtaatattgagaaaaaaatgatacagccttcttcagccagtttgcttttatttttgattaagtaaattccatgttgtaatgttacagagagtgtgatttggtttgtgatatatatatattgtgctctacttttctctttacgcaagataattatttagagactgattacagtctttctcagatttttagtaaatgcaagtaagaacatcatcaaagttcactttgtattgtaccctgtaaaactgtgtgtttgtgtgctttcaaagatgttgggattttatttatctggggacagtgtgtatggtaagacatgcccttctattaataaaactacatttctcaaacttga

SEQ ID NO: 121330 - DNA, 462 bp, Homo sapiens
aagaacattaagcacctggcgggggtcccgctcattggctgggtcctgcgtgcggccctggattcaggggccttccagaggtgcgcatgtgcgagagtgggcggcgcggcctgggcgggggtcgggagagggagtcgggctgctggaggggctggggcctccggggccaccgctcttggaagggggccatctctcatgccagggatgtgcaagatccggggtgcctggggccgggctgagagcccaggaggaagggctccagctccttccttgttccgtagctgccaatggtcataacctgggacagttcctgtctccgcccttgagaatcatccgtaaaaggggagattacacctccccaaccgtcccctcctcccgggttgaccttacggggaaaagtaaaggaggccaccccggtgcaacatctgtgataatatgtgaacttctttggatgggggccat

SEQ ID NO: 121331 - DNA, 558 bp, Homo sapiens
cttacatctgtcaagtggttccatacttcttgtaaaagtaaagtttgggtattgtttgctgtatcaatatgatggctttccatgcattgtctcattatccctaggatacgtgctaaaggaaaactgtcctgtaattcctgttaatatattgttaatgtcagacgtgatgtgataccgttagactgtccaaatgtacaacaatttaatggtgtttgtagaactgatatgtcttaaatgttgcatgaaatatgttataaaaatagatttgttttctattttcaacacctcagaattgagggttcatgggccaataagtgcaatatttaatgactcactcagtgtatataaactagtatgaaagagtgaattataatgaatgtgtgagatgctttgatagctgtgtgacttattcaaatgattttcttgtagctgtatttgtctagtggtgcaatttatacagtaaatatcttattggtgtcatgtaaaacccctctgtgcctacttcaaaatacttttttcttataaaaccaaacatttagtatctgaaatatgtgtcaa

SEQ ID NO: 121332 - DNA, 317 bp, Homo sapiens
cacttccgccaccccttgtgtctatggatattccacttccgccaccccctgcgtctatggggtatcccagttccgccatctcatgtgtctgtaggatattccagctctgtcatcccctgtgtctgtggggtatcccactcccgccatcccctgcgtctgtgggatattccagttctgtcatcccctatgtccttgagaaccaggattctccgtggggctgaagggaggtgcagatgtcacaaagaaaaggatgaatgaaaactttagtcctgaatttctatgggaagtatcagtgtgaactcaggaattttatctta

SEQ ID NO: 121333 - DNA, 372 bp, Homo sapiens
ttttgagacagagtcttgctctgtcgcccaggctggagcacagttgcatgatctcagctcactgcaacctccgcctcctgggttcaagaaattctcctgcctcagtctcccgagtagctgggactacaggcacatgccaccaggcccagctaattttttgtatttttagtagagatggagtttcaccatgttagccaggatggtcttgatctcctgacctcatgatccacccgcctcggcctcccaaagtgctgggattacaggtgtgagccactgtgcctggccttaaaacaacatttttaacattgtgtcatttaaaagatgcttgtgtgtacagaataatgcaagtagcccaataattgggccaattgc

SEQ ID NO: 121334 - DNA, 167 bp, Homo sapiens
accttgagtcaaacagttgagaatgcaacatttatggcattttaaaagctcgaacttcatctttaaaatagataatactgaatttatttttcataataagaaattttctggaataagaaatgaacctctgctgctatcctatgtccacttttgtggacatagaaaac

SEQ ID NO: 121335 - DNA, 657 bp, Homo sapiens
gtacattctgaagtaagaagttggtgtgctgcctgtgtttttgactttataactcccatttcatgtgccaccttgaaaactggcgaagagacctctgcagcatctgttgccaggcatgggggccctttgaaggaggaggtgcaaaataattagtgtgatgaagcgttcagaaagatcgtctttcctcatcattatgggagctgggaaaggattatataccttttgtttttatttcttatgatgtatagctagataaaagtgtttcctctttatgcagaaagttgacctgatgtaagtgttctgtccactgacttgtggattttcttctattaataatgatcaaaaagcacttttcttagaaatgtaagtagaactttaattggaagggttattgcaaggtttctatattttaatactagaataattattattggcacagtcaaatattaaaactgctgtctagtgatccatgacactctaggagagaggagcgttaatcttgaattccaaattaatgtagcatggttggcatgaatccagaaatttacatgaggatggtagagaatcccatcagataacgctctggttcaaatttaaactaaaaaaaagaaccaactcaatattttcgtttagtctaaacagttaagtgttgggaaa

SEQ ID NO: 121336 - DNA, 301 bp, Homo sapiens
gtgacactgatatgaaagttcactagctggaagacattgaggcagttttcaaaggcttttaactctgactctcttgggctatatttttacacattcagatcatttggttcataagtaagattaatgccatctgcagttactatatttacagtttacatgtaccatcaaaaccaattcatagtcataaaagttaaaagcatgttaaaggtctttaaaatgtagaaggcaaaaattgtgttgtaattgagcatgaatgtcaatatagtaaaaaaaagatcttataggcagttaaagtattatt

SEQ ID NO: 121337 - DNA, 488 bp, Homo sapiens
ttttgcttatttgtatacttattgcatgtgacatagtttcaatgcaatagttctctctctctttctttctctttttaaagcaatctatgggggtctataaccatagtggcagaaagaaagttaatggagactaaacaatagtgttcatgtttacaaaattaaatgctgaaacatgatggaattctgtattaatggggtttcaacttgctataaaatgaaaataatgtgatggagttctgtattcgtaagattccaatccgctataaaaattaatgttaataagcaagaagattggttcatattcgtggttttcttcctgcaaagtcaaatagtatacatgcatttgttaatgactccctgaataaggtctaaatcacttaagtacagttttatatggagtggaagtataagaatcaaagtttgtggttattttgtaagaatttgcttccatttttacaatgcaagtcagagaaatcttgatgtgttcc

SEQ ID NO: 121338 - DNA, 668 bp, Homo sapiens
aggtgggaatgacagtttgctgcagtcccgtcaatgggggaatctgcccgagctctgcctgcattttgagcagcaaagcagctccagccaccaagaccgttgcctgcgctgtcttaggccagcccatgctgtctgccagccgcttgttgcgctgccttggggactgggaacacacccagccccggtccccatctgttgcagacatgcagtggcagcagctcggagcacagccgaaccctagaaattgcctgtgctgaaggggctgggaaaccccttctctgatggacctttcgagtgaggcagcaggatttgtcagagctgggagtgccgcccgtccccgtcactcgcatcctgccatccagcagcttacaagcctgcactgcttattagcatctggaagagaagacctccaggaccccttggggctgagacctgagctccttcgccatgccgctcctggacggagacctggagggttccggaaagcattcctctcgaaaggtggacagccccttcggcccgggcagcccctccaaagggttcttctccagaggcccccagccccggccctccagccccatgtctgcacctgtgaggcccaagaccagccccggctctcccaaaaccgtgttcccgttctcctaccaggagtcccgccagctccctcg

SEQ ID NO: 121339 - DNA, 687 bp, Homo sapiens
ccactcatctatagtgttgatatttctgagtagttgaacttcagaccagtgctggatggttctctctgtatgtgagaacacgtcctgagtttttataaagtgtgtatgcgtgtcaacaatctgaattagtttatataagaggttgggcaatattgtaagtagatatttgtctttattgcccagatgaagctaataaacctctttatggtatagtgtcatgccttgagttttatagcaccttccttttaacaaactcggtgtttcattctttaagcttattatatctcttagtttgcgttgtttttattaatttttttttgagacaggatcttacttgcactctagcctgtgtgacaaagtgagactccatctcaaaaaaaaaaaaaaaaaaaaaattaaaacaaacaggaaacaggtggaattttttggatttacccattttaaaaattttccttttattatcttaaaccagttgtttaaaaactttttgaatgggaaaatttaatattccctttaatgcgggaacaaaggtctttggaaaaattgtgggccatacttaattttctcacgcgagggaatgccaaatttgcttggaaaaatcctttattgggttttctgatttttccaaatttcagccgttgaacaaagttgggttaatttttctgttttccaaattatccctcattt

SEQ ID NO: 121340 - DNA, 253 bp, Homo sapiens
tagaaacaaagtaaagatgaaaaggatgtctcagtttgtttcaggttagccttgcttctacactcaaaatgcttgccaggtgagggtcttcaaaatgtgaataatccagtgttgtatttaattctgtgtcatctgtctttgtgaaagagagggagccgaatactcccaaagcccaggttcttagtgtattccaccaggttcctgatcttataagattgttcaacttagtacaaaaccagaagaattaaaatcc

SEQ ID NO: 121341 - DNA, 524 bp, Homo sapiens
tcgtgatccgcccgcctcggcctcccaaagtgctgggattacaggcgtgagccaccgcgcccggccttggtttttatgactgccttaatatttagaatttattagtgttttcttcttattttcttggttaaattttttattactgtttttcaaaggtccagttttgagatttatcagtaattttttttctgtttttctttctttctttttaaaatttctttcctgttttcctcttcattcttttatgactcttattggctgaatcatggttcatttatctttccttttatattaataaaactttttaaagatgtgaatttatctctgaacacacttttgatagactgttattttctaatgatattttcacttgctgtttgatagaatgacaattgagtaaagtactgttaagtgttaaacaaactttgtcgctattgagatttattattgacctttttttcactacattgtgtccagataatagggttagattatcagcaacactggtgtttggtgacgtattg

SEQ ID NO: 121342 - DNA, 456 bp, Homo sapiens
agagtaagaccctgtctcaaaacaaaacaaaacattaagaggaaaagggaaaatttgcaggcaggcccatagtgaactaaggatctcaagacctggattctagtctcctgactttgacacaaatgggttgagcagtctattaaacttgcctttaaactgaggggggtaggagagaagataagaacctcccaagaacagagtctctaccaaatctgaagtctaaaagagcaagtcatggctgtccaaaattaccttgctgaaaaatgagaattccttctctttgaggaaagatctctagattctttacagttgaacctgttccttcatcctcacactgtacccaccatggagaaataattcacagacccactcgctgcctccccaaaagacctttctcctgggaaagaactttataaatcactttaagttagcaaccgtaattcccagacgcttaca

SEQ ID NO: 121343 - DNA, 495 bp, Homo sapiens
aagtaatagtaattttaaaagtatcctgccgtggtcacgtgtaagtatacttctgtgagcagatttacagttcgggatggaagtggtttgggcagatttctgacattcctgcatcctcatctctcacttcatcctaacaccagtaagggcagttggaatgcagcagctcagaatcaaagctctggcaccaaagtgcttgggttttaaatatggctctgtcaccttctagctgcatgacattgggcaattacttaaccttcctgtgctccattgtctaaatgtatataacaacgccttgataggggtacataaagattaaatgagttaacacatgtaaagcactcagaatagtgcctgatgtatattaaagtgctccatcaatgttggctattataatattatcattatatttatttatttagagacagggtctcactctgtcacccaggctggagtacagtgggatgatctcagcttactgtagccttgacctcc

SEQ ID NO: 121344 - DNA, 950 bp, Homo sapiens
cagagatgctgagtgaatgtttttacttctactatcaccacctacccacccctgttcccctgcaaatgtctagcactgacagcttccttcctccctgccttccagaaacaagttgagtgcagacagcgtgggtgaggtcttgtgctatgcaccaggacagagaggagacccacagctgctgtcattgggggtatgtgaggacctaacattcaccaagacacatatgactcctgccatcaactggaaaacgtaagggattcaaattcagaagagctgcattcctgcaggtgtgacccccaactctcaaccccccaaagcctcagcttcctcatctgcagagaaaacaatgatccctagagcacacacatcttcaagggctttctgaagtcttagtcccatcactcgcttttgtgatggtcattactaggttaacaaagatttgtggtacccagttccagagttacgctgggaacataatgggggaacccttattcagggtctccccagcttgcctgaccctaagaatcactgaagacactggtgaaaatgcagattcccaggccacctgaatctgactctcccggatccgcacagggccccaggtgattagggaaactggccagtttgctagagagagcacagttgctcaactcaaaaacaagcaactaagatttccagggttaggtgatctaactgaaagcattactttctgggggtcggaaagtagagctagggcttgggtttgttactttgccagaggtatgaccctgagccaggtcttcaacttctctcggtctccatttcctcaaaatgggaataattacaatgaatcctaatgcccaggcaggagtgaaggtggaatgtcaggtgtcttctcccggctgccttactcctgttctggggactaacatggcttcaagcaaggggagctggcacgtggtggcctccca

SEQ ID NO: 121345 - DNA, 105 bp, Homo sapiens
ataaataaagatagttaaggggaatgtaaaagtgataaatattaacttgtaatctctagaggcctcatgtaatacatgatctggggtaatgctgttttaaactca

SEQ ID NO: 121346 - DNA, 703 bp, Homo sapiens
ggattacaggtgtgagccactgagcccagcctgtgtctagttctgacacatagtctttcttgttttttctggggtttcagtaccaagactgatgtgtttgctaagcacttctggcttggtgaagttcaactccaaactgtgtgggtagtacctaaaaatctatcaggcttctaagccttctggtattgctttccactaagctctttgaaatttctcccacatatgctattcagggggtcatccaaggagcttatcatagtgtatacgcaaatttggaattcttgccaccctgtggctgtctcctttctaagatttttcttccttgatttccagcttttggtctacttagaccatgcctcccaagctgagaagtgccctcagaggaaaagccatgtaaaattttctttcaatttctactttatttttgtcactctcaaatacattcacatacttcattctgtacttttctgagggtttataattgttataaatataagagttaacaaagtacacttggtgttttgtttttttttcagtgttactcaaaacagaactccttgtagtccatgctttattttaaggttgtgaaatcatttgcacactcaatgagaatatggctttattcttaccatacaggtcaaggcagattaaaaaacttaaaattgcaatttatattatagtagtcactgtcctgatgtattac

SEQ ID NO: 121347 - DNA, 409 bp, Homo sapiens
gctcctcctacaagttctgggtcctatttgtccctaataataatgccaccattttatttagcatataccagtgctgctgctaaatcctttaaatctgtgacctcacagcacctctacgaggtgtgctattctcatcctcatcttataggcaagttaactgaggtataaggaggttggttatgtaacttgaccaaagtcacacaataagggactgggagatctgggatttgagccctggcagttggactccatccaaagtcctcactatcctagcacctctctatcccctccctttcctctctcctaccttcttctgtgctgctttcaaacagacagttatctctacccttaaaaacacagctgtgctgactactctgcttagatgccctctcaccccatcagattattg

SEQ ID NO: 121348 - DNA, 259 bp, Homo sapiens
aaatgtcagctctctgatgcgctagctgtgcaatcctgtgtaagtctcctaattttcaggtcccatttcctcttttgtgaaacgtggccaagggagaatggactttgcagtgtttgtgtttcagtctaagataatactgtctacttgggattgcagtccagccaccacttaccagctatatgcccttgggccatacttcctctgcgcctcagcttgagcctatcaatgacatctaagagctgtttatccagtcaggagt

SEQ ID NO: 121349 - DNA, 327 bp, Homo sapiens
tctttctaaatatgtgtagaaagggaagcctagcaagtctattaataagatttagagtgtgtataaagcaagtatgtgtatgtgtacatgtgtatatacatgacacctggtatgtaaaaatgggtgtggattttgcaatttttacaaaactaccgtaaataacacagacatccattttagagtgatcaaatctccccctaaatgaaagtttctctctgatgtcatgctccgcttgaccatgaaatgaaaatggcttcaaactgttcttaattgtgaaattaaaaaataaagagacagaacgcatcacctcttgcaccataagatcca

SEQ ID NO: 121350 - DNA, 797 bp, Homo sapiens
  misc_feature (73)..(73): n is a, c, g, or t
  misc_feature (168)..(168): n is a, c, g, or t
catagatttttgaaagtcaagtgagaaaaattcagtcaatacttccaacatttaagaaagtgtaagtcctttntgatttattgtttatttctaaaagtaataaatatcaatagaaggaaattaatccattactgttctgaggctgcatggtgctatttttctgacatntggcttaatctggatacctctttctgcttccaggtaccattcattgtattttccatgcaactgggcatccttgccatgttcttgatcttagaagaaagtctttaagtgtttcaccattgagtatgatatttgctgtggggttttcatatgtggcttttattatggtgaggtattttccttgtatttctagctcgttgagtgttttcattctgaaaggatgttgaattctgtcagatgctttttctgcatcaattgagatgatcatgtgttttttcgcccttcattctgttcatgtggtgtattgcatttaccagtttttatgtgttcaaccatccttgcattccaggaataaatcccacctggtcatggtgtataatccttttaatatgctgctgaattcaatttcctagttttttattgaggattgttacatcactgttcataagggatatgatattggtctgtagctttgggttttatagtgtctttggctttagtgtcagggagtgctggcctcatagaatgagatggtagtggaggaggtattggttaagagatttaggctgggtgcagtggcttgtgcctgtaatcctagtactttgggaggctgaggtgggaggatcgcctga

SEQ ID NO: 121351 - DNA, 820 bp, Homo sapiens
ggaggtggaggttgtagcgagccgagatcacgccactgcactccagcctgggcaccattgagcctcatttatgaattctatcaggatttctttttttggtggaattcttagcatgttcacatatgagatcatatctgcaaacacagataattttatctctttctttccatcttggatgccttttatttctttttcttgcctgattgccctggctaaaacttccagtactatgttgaatagaagcagtgaaagtgggcatccttgccatgttcttgatcttagaagaaagtctttaagtgtttcaccattgagtatgatatttgctgtggggttttcatatgtggcttttattatggtgaggtattttccttgtatttctagctcgttgagtgttttcattctgaaaggatgttgaattctgtcagatgctttttctgcatcaattgagatgatcatgtgttttttcgcccttcattctgttcatgtggtgtattgcatttaccagtttttatgtgttcaaccatccttgcattccaggaataaatcccacctggtcatggtgtataatccttttaatatgctgctgaattcaatttcctagttttttattgaggattgttacatcactgttcataagggatatgatattggtctgtagctttgggttttatagtgtctttggctttagtgtcagggagtgctggcctcatagaatgagatggtagtggaggaggtattggttaagagatttaggctgggtgcagtggcttgtgcctgtaatcctagtactttgggaggctgaggtgggaggatcgcctga

SEQ ID NO: 121352 - DNA, 272 bp, Homo sapiens
gcagcaaggagtcagaatgagatggacagaactggggcttggaaggagaaagtgttggtgtcctgcacatctgaggtgctgagggagacagtgtcacccagtgtggaatggccatcctcaaactgggcatggctctcacagccgaagtgagtgttgtctgctgaatgccttcctgtttcttttccctaagaagggtgacatgagaagccccagcaaagatgtatcaaggtgtcacccagcctccatggccctgtgccacgggcactgcagtg

SEQ ID NO: 121353 - DNA, 345 bp, Homo sapiens
tcccgcaatatacccaaggacgaggaaaatcagtgactgttcagaggaggaaccaccttatcagggaccaaaattaacattgccaatcagggcaagctgacagacgtctctgtgtttgatatctcaaggacaccgtttacagagcactccagccagaaatatataactcgaattccatcctgacaaaataccagaccaaaccaaattgagggcattctttaatataaccagctggtatttgttcagaaatatcactgctgttaaagacaaagacaggctgaagaactgcagcaggttaaagaagaataaagagatatgattactaaacagagcatgtgatctggt

SEQ ID NO: 121354 - DNA, 725 bp, Homo sapiens
tgtcgattttaagtttatttttgtataaggtacgaggaggaaggggtccagcctcatttttctgcatgtggatacccagttgtcttagcaccatttgttgaatagtctgttctttccgcattgagtggtcttcatgtgcagactgttattgctgtgcatgtgtatatctgtttatctggaattcacttttaagaactgtatatgggccaggtgcagtgactcacatctgcaatcccagcgctttgggaggctgaggtgggaagatcacttggggtcaggagtttgagatgagcctgtacaacatagcaagaccttgtctcttcaaaaaaattttaaaaactagctgagtgtggtagtacctgcctgtagtcctacctactcaggaggctgaggcagagggattgcatgggcctggaagtttagggcaacagtgagctatgatcacaccgccattccagcctgggcaacagagcaagaccttgtctcattaacccagttgtgcctagtgttccattattggaacactaagcttgtgggagttatttatatcctgctccaggtcattgccaaggtctgatttttcacaaaaaaagtttgcaaccttcggcataaatgggttaaaaaaaggaaaagctgtatatgaaggtctttggccacagtttggtttttgatggtagatagggttttgtcacttgaatgcaaaattagctttataactataactt

SEQ ID NO: 121355 - DNA, 822 bp, Homo sapiens
taaatgtttcagtcgtaaagtcttgacccatgaacacgtttatacctctgactttagtaacacgtgaaataatgtggcattatattccagttttcattgtaactcatattctgctactagtttaacaatgaaatgctttcatttatcgatatagaggaaatactgtactttataatagtttttctaagaatgtgacagaaaagtgtgccagtttgaagtgtttcattatttttccattagatatgggtttttttcctgcccctaagaagaaaaaaactggctcttatatatttatctataaaaggaagtgtggggaggaataagttatcagatctcagatcctactagatgtacattctagagatcaacctttgaagccttgtactcaagaatttattccctttatcagttgctgtgtggcttattttgaaatttttatcatattctgtgcttagcatcataataaaacatactgaaaggctttttttatgtttccaaaaaaaaaaaaaaaacacaaaaaaaaaactttttggggcgcctgggccctggaaaaagttttttaacccctccgttggggggcggggccccattggtgttcgttgacccgggggccaaacgcgggcccccaaagaggaagaccccgggggtcccagacaccaagggcgtcgggtttttcccccccaaataaaaaaacgcccgggcggaccacggacgcgcgtttcgggaacaattccccgaaggggagtccccggagggccagaaggcgggtcccaacacagggggtgccagggaggcgaaataaaatacacgcggcggggggcg

SEQ ID NO: 121356 - DNA, 179 bp, Homo sapiens
ggtactgggggagtgttaaagatcttacgaggaatactaatgctctttttcccgttgacttacatatttaataaaatgaccctcctccaggggttttatgattttaagtctacagtaatttatttggatcagttacttctgaattcttaaatatactctgatttgttgttcttgggttt

SEQ ID NO: 121357 - DNA, 417 bp, Homo sapiens
gccaccgtgcccctccaggtgtagttatataatcaggaaattaattgatactttgacacacttataatctaatcctcagaaccgattcatattggccagtttttataggaaaagatcctatccagaatcacaagttgcattcggttgtcatctctctttattctcctttgatctggaacagtttcttagctttctccttgattttcatgacctaaatatgtttgaagattacaagtcaaatattttgtataatgtttcccagtttgagtttatttgatatttctttgtgatcaggttgaggttatgcatctttagaaggaatatcacagaagtgattctgtgttctccatgtttcgtcttgtcagatggcacacaagtttggtttatctcactacctgtaatgttccccttgatatt

SEQ ID NO: 121358 - DNA, 236 bp, Homo sapiens
atcatgctcggcgctcctactactctttactctgccctcactgttagagttcccaagagttagtcagtggccgtgtgtctctgctctaccaatactcctttctttgtgatcaggttgaggttatgcatctttagaaggaatatcacagaagtgattctgtgttctccatgtttcgtcttgtcagatggcacacaagtttggtttatctcactacctgtaatgttccccttgatatt

SEQ ID NO: 121359 - DNA, 252 bp, Homo sapiens
tgacataaatgttgagaaatgcattcttgttttccttcccaaggcaccaatagtacaaagacaagcataaagccccttaggatacaaaaaaaaaaaaaaaaaccccggcttttggcccggtatagcctaagggggcgcccctctgtattcttaaacggggggggggttttcccccctaatggaacaaacggcctttggactcttgggaggccccccctgcctaatcgatgggaaggcttccctagggacaga

SEQ ID NO: 121360 - DNA, 882 bp, Homo sapiens
gaaagaggggaagcaagcacacaccctgtggccagtcacggctgcccgctttccacacctgacctcttcagttcatcagtggggttcaccagcatcacccccatttttcatggggagaaactcagaagtggagagaacgtctgaggctacatagccagtacaaaatcgcttcttgacctgcacaactttctgatttgatgagttcaacagaaaccaactcaagggagaagaataaagacattgttgaacttagactttgacaagatgcatattggatatctaaatagagatatcaagaaatgaagatatgcatttccagttccagagagaaattcacactggaaatataaatttaggaattttaaagttagtggtcacatttaaagctgcagaatacaaagagatcacctgtgtgagagaactgagtcctgaaacatacccgtgtttaaagatctgggaggtgcagaggaattatcaaaggaggctgagaaggagcagccagtgaggtgtgtagaaaaacaagataagcaaaaagaaaagcaagagatatggaactgaacttccctttggcaaaaaatttagaaaatgataatgagactccgctttctgtctctctgaagataacgttaagctgcagctccgtatctgtgaaaacccatttcacagcatctgcatccctggattgctaaatacccttgtctagttacccaaatattaatggatcccatggaataaggtggcatgatttaggcacaagcaattaccaaaggattttgaaaagcagtaactccaaattatcttgtaaagttgagaataatctgagaagagctattgtaagactgggaatcaagtaacaaaataaagatatgaaccgtcaattgg

SEQ ID NO: 121361 - DNA, 551 bp, Homo sapiens
caccagaaaatcctcaatgcctgagaaatgagggacattccaaagccacggattgatctgaaatacaggtctttggaaatcctcctccagattccccagagcatgacagtgacttcacgtggatacagattttgcagttatcaactaacccatcaattagcatttatggagcactaattggtgtcaacccaggtaccataagtatcgcttcttgacctgcacaactttctgatttgatgagttcaacagaaaccaactcaagggagaagaataaagacattgttgaacttagactttgacaagataagaataacaatcttggaatatgctgaagatggcagactacaaagtagaaggagacaaagtttgtgaaagaccaggtggaggaaagtcatccactaatcaggagcccttttatggaatctacgtaaacaagaaataaacaaaggtttagtccattatacctttcaagtcaacagcaaagcagacagcctactctaattaatgtatccattctaagggaaaattatattaaatgttatattttgaaa

SEQ ID NO: 121362 - DNA, 3187 bp, Homo sapiens
  misc_feature (1350)..(1350): n is a, c, g, or t
  misc_feature (1542)..(1542): n is a, c, g, or t
gaaagaggggaagcaagcacacaccctgtggccagtcacggctgcccgctttccacacctgacctcttcagttcatcagtggggttcaccagcatcacccccatttttcatggggagaaactcagaagtggagagaacgtctgaggctacatagccagtacaaagtaggttttctgcttgaaaaacctgtttctatttctttttaaaaaatcatactgcataacagaatagtaaaaacaaaatgcgtgttaagacttacagggaaacagttgccgtttcattttaagtgagacttgctactctttttcatcgtctcttgaaagactgacagaaggaaaatatgacttatcagaaatctgttgtctgcatgcatggacctagtgttttcatcagctcccttcagcatcttgggacctctctaatcctgcctaatttgggactttttctgcaggattgtaatgtaaaatagttctttagctcttggagatttttaataatacgagttattaaaaaccaccaccaccagaaacttgattaacttgattaccctgttgagtagagaggtcttaaccaccgaaaacactgatatctttatgttggcatgctcatgcaaacacatgtgtgtgtgtgtgtgtgtgtgtgtgtgtgtgtgtgtaccacagtgttttataaagcacagcctaattgattatataggacaaaaattgtataggaccctgggtcagtataaatgctaatggctgacaaagttcacaaagagatgtattttgcttactcctctgttcaatcctctggttgcctgccagtgtttatgtgtgtatttggacagacattcatttattgtcattcagtcaataggtagagtatatgtgtctattttttggcaggcatatagatgcttgaggctaatgggaaaaaaccagcatgaactctgactttagtagtgctaagtaatagataattttaaaaaatgacaccgttaaatagaaaatggcatgcatactaacagttgcaatggagaggctgtgatgctacgagatataaacgtagagatgccatcatgtgaaactggaagtgggggtgggtcagggaaatttgttcttggaaagaaataatgaacctcaaggaagagtaggcattgtcctggtgtggtggggtgtaagcggtgatcccacaaagcactgaagctcttagatgggtgggagctgaataggtgcagatagcaggggtgaaggagtgaaaggataaaagattcaaggttgagatgaggatggagcaagaagaagccacattagggccattaaggctgctagaatttagaaagaaaacacacagcctcccagagtgctnggattacaggcatgagccactgctcccagccttccagaggaattttaagcccatgtccaaacattctgtttgtataaatatattctaatttttaaataaatagtttctacttttctgaactttatattttttcttgctataatggattttcataatcagaaaagattaaattagtaatcatgaattgccttnaatatttggcagtaagtcaatgaaataataaggcacttatataccatctttgacatcattaaaagtatcaaatcccattaatctaaaacttctttaagcattttgaaagcagaaaatgtttacatggttctttcagttcctcaggctttttgtctaatgatgcgtgacttaggataagatttgaattaagtgcccagcttgaaacataataatttttctgtataagccacagatcctctacctcctttgtgttaaagcctttatatgaaacaattaagtagaagcattcaatagtgtgtcattaactgttcatactaataaatggatacagcacattttcatggcctgtaatgtagaacatactatataaagttctcagtttggggatgactaggtttctggaaggaatagaatgctaaatcaatggatggcattgggctgagaaacactgctgctactaatcagccttgaatgtgtaatgtgaacatgcaaaagagaacatgcatacactcaaatttgtacaatgctataactggaagttgaaggacttgaatttttatattgtgctattgttatgttttctgtaattgtttatatctaaggaatttttgaggtaatataaaagaaaaagagaataatgaacaatgatgtcactggagggtttttacattaaattagatcatttttcttcttattcacaataataatcttaatctttaagaattaattataatttaatattataattcataatctttaagaattaataattataatttaatattataattaataatctttaagaattaataatataatttaatattataattaataatctttaagaattaataattacaattaataattaataataatcttaatctttaagaattaataataatccttaatcgcaataataatcgcaaggaggagaagtaagtccctcctccttctgtatgaacttttctcccacatgctgctgtatggtttagtgagagtgaagttctaaagaacatcaatatgattggtgggataatccaaagacattttttcagaatcaaatggcatgtcgaaggtttgtttcttgcatatgtatttactggtccacagcacaaaataaagtgaccacatatacataggaaagttgaatttgtacacatacagcatctgaaatgtatctgatgttcagcatcaagatttcactgaacattgtagaaatgtgtatcttttgcatgtatattttacattgattttctatttatgtacatctagaaagttttaaccctaataaatagttttgtaattttgaataatagtgtcagtttatatgtgagggagtagagacagagaggttagcactggataataattagtaaggccaaaggagaaaatttcatagaaaatattgttgttgtcataatgagtacagcatgaaaggcttcctctacaagacactagtcaaagagttgagagctgcggtttctaatctttgtccattactcccttactccctatgagactgtggacctgtcacttggcctctctggtcttcagttttctcaccagtaaaacaaggaacttgaaccaaatgacctctagtgttccccttgggtttaaatgtctataaatgttcaatgactag

SEQ ID NO: 121363 - DNA, 4212 bp, Homo sapiens
  misc_feature (1350)..(1350): n is a, c, g, or t
  misc_feature (1542)..(1542): n is a, c, g, or t
gaaagaggggaagcaagcacacaccctgtggccagtcacggctgcccgctttccacacctgacctcttcagttcatcagtggggttcaccagcatcacccccatttttcatggggagaaactcagaagtggagagaacgtctgaggctacatagccagtacaaagtaggttttctgcttgaaaaacctgtttctatttctttttaaaaaatcatactgcataacagaatagtaaaaacaaaatgcgtgttaagacttacagggaaacagttgccgtttcattttaagtgagacttgctactctttttcatcgtctcttgaaagactgacagaaggaaaatatgacttatcagaaatctgttgtctgcatgcatggacctagtgttttcatcagctcccttcagcatcttgggacctctctaatcctgcctaatttgggactttttctgcaggattgtaatgtaaaatagttctttagctcttggagatttttaataatacgagttattaaaaaccaccaccaccagaaacttgattaacttgattaccctgttgagtagagaggtcttaaccaccgaaaacactgatatctttatgttggcatgctcatgcaaacacatgtgtgtgtgtgtgtgtgtgtgtgtgtgtgtgtgtgtaccacagtgttttataaagcacagcctaattgattatataggacaaaaattgtataggaccctgggtcagtataaatgctaatggctgacaaagttcacaaagagatgtattttgcttactcctctgttcaatcctctggttgcctgccagtgtttatgtgtgtatttggacagacattcatttattgtcattcagtcaataggtagagtatatgtgtctattttttggcaggcatatagatgcttgaggctaatgggaaaaaaccagcatgaactctgactttagtagtgctaagtaatagataattttaaaaaatgacaccgttaaatagaaaatggcatgcatactaacagttgcaatggagaggctgtgatgctacgagatataaacgtagagatgccatcatgtgaaactggaagtgggggtgggtcagggaaatttgttcttggaaagaaataatgaacctcaaggaagagtaggcattgtcctggtgtggtggggtgtaagcggtgatcccacaaagcactgaagctcttagatgggtgggagctgaataggtgcagatagcaggggtgaaggagtgaaaggataaaagattcaaggttgagatgaggatggagcaagaagaagccacattagggccattaaggctgctagaatttagaaagaaaacacacagcctcccagagtgctnggattacaggcatgagccactgctcccagccttccagaggaattttaagcccatgtccaaacattctgtttgtataaatatattctaatttttaaataaatagtttctacttttctgaactttatattttttcttgctataatggattttcataatcagaaaagattaaattagtaatcatgaattgccttnaatatttggcagtaagtcaatgaaataataaggcacttatataccatctttgacatcattaaaagtatcaaatcccattaatctaaaacttctttaagcattttgaaagcagaaaatgtttacatggttctttcagttcctcaggctttttgtctaatgatgcgtgacttaggataagatttgaattaagtgcccagcttgaaacataataatttttctgtataagccacagatcctctacctcctttgtgttaaagcctttatatgaaacaattaagtagaagcattcaatagtgtgtcattaactgttcatactaataaatggatacagcacattttcatggcctgtaatgtagaacatactatataaagttctcagtttggggatgactaggtttctggaaggaatagaatgctaaatcaatggatggcattgggctgagaaacactgctgctactaatcagccttgaatgtgtaatgtgaacatgcaaaagagaacatgcatacactcaaatttgtacaatgctataactggaagttgaaggacttgaatttttatattgtgctattgttatgttttctgtaattgtttatatctaaggaatttttgaggtaatataaaagaaaaagagaataatgaacaatgatgtcactggagggtttttacattaaattagatcatttttcttcttattcacaataataatcttaatctttaagaattaattataatttaatattataattcataatctttaagaattaataattataatttaatattataattaataatctttaagaattaataattacaattaataattaataataatcttaatctttaagaattaataataatccttaatcgcaataataatcgcaaggaggagaagtaagtccctcctccttctgtatgaacttttctcccacatgctgctgtatggtttagtgagagtgaagttctaaagaacatcaatatgattggtgggataatccaaagacattttttcagaatcaaatggcatgtcgaaggtttgtttcttgcatatgtatttactggtccacagcacaaaataaagtgaccacatatacataggaaagttgaatttgtacacatacagcatctgaaatgtatctgatgttcagcatcaagatttcactgaacattgtagaaatgtgtatcttttgcatgtatattttacattgattttctatttatgtacatctagaaagttttaaccctaataaatagttttgtaattttgaataatagtgtcagtttatatgtgagggagtagagacagagaggttagcactggataataattagtaaggccaaaggagaaaatttcatagaaaatattgttgttgtcataatgagtacagcatgaaaggcttcctctacaagacactagtcaaagagttgagagctgcggtttctaatctttgtccattactcccttactccctatgagactgtggacctgtcacttggcctctctggtcttcagttttctcaccagtaaaacaaggaacttgaaccaaatgacctctagtgttccccttgggtttaaatgtctataaatgttcaatgactagaatgtattgcgtttttctttattctttttgctttgagaaaagagaatgtgatttaagagtaataatttgaataccaattatccacattaaaattgtgtcctctatgtgtaaggcatagcacatttagcacacatacataagcacactaagcaccttacaaatatcctcatttattctttacataatcttttgaaattgattatgtaatacacactgtttttgaacaattggtgacttccagctgtttaaaacaaactacagtatggtgcttgagtactgacttaggaggtcagcattggtttcactaggagcttctcaaagcacgctgccaaacatgctccagtctcattgtcaaggccttagaccaggcaatcattacggcagtggttcttcaacttcagcagcagcaaaacgatctggcgggggcttggtgaaacagactgctgggctcgaccaccagaatttctcattcagagggtctggcctgatcacttgcatttctaatcacttcccaggtgatgcagatgtttctggtccagggaccccagtttgagaaccactgtattaaaatttccttcatctctatagaaatggaaagattttttataagtcctctaatttgctttaagataaatgagatttcacttaattctgttggagaaattgttttaaaaattgtgctaaagaaccgaaaatcactttatgttaaggctctatttatagcaagtgaacttttcatgagttaataaaggcctacaaaaataattttgactgtgaaactaattaaaatctctgtgtttcatttaaagcataaacatatttgaataaaaataggttaacaataatttgggacatgtattcagtataattttaagataattttacaaaatatatgtaacattgcatttgtttctgtaaaatatcttcggaaaaagccttgttttccctagtgtgttatttgttgaatttcttgttaaatgtattttttcccattgaaaaaaatgtttttaatcaatgtgatcaatacagctatctatatgccctgctttcactgtagaattagaaag

SEQ ID NO: 121364 - DNA, 1757 bp, Homo sapiens
gaaagaggggaagcaagcacacaccctgtggccagtcacggctgcccgctttccacacctgacctcttcagttcatcagtggggttcaccagcatcacccccatttttcatggggagaaactcagaagtggagagaacgtctgaggctacatagccagtacaaagtaggttttctgcttgaaaaacctgtttctatttctttttaaaaaatcatactgcataacagaatagtaaaaacaaaatgcgtgttaagacttacagggaaacagttgccgtttcattttaagtgagacttgctactctttttcatcgtctcttgaaagactgacagaaggaaaatatgacttatcagaaatctgttgtctgcatgcatggacctagtgttttcatcagctcccttcagcatcttgggacctctctaatcctgcctaatttgggactttttctgcaggattgtaatgtaaaatagttctttagctcttggagatttttaataatacgagttattaaaaaccaccaccaccagaaacttgattaacttgattaccctgttgagtagagaggtcttaaccaccgaaaacactgatatctttatgttggcatgctcatgcaaacacatgtgtgtgtgtgtgtgtgtgtgtgtgtgtgtgtgtgtaccacagtgttttataaagcacagcctaattgattatataggacaaaaattgtataggaccctgggtcagtataaatgctaatggctgacaaagttcacaaagagatgtattttgcttactcctctgttcaatcctctggttgcctgccagtgtttatgtgtgtatttggacagacattcatttattgtcattcagtcaataggtagagtatatgtgtctattttttggcaggcatatagatgcttgaggctaatgggaaaaaaccagcatgaactctgactttagtagtgctaagtaatagataattttaaaaaatgacaccgttaaatagaaaatggcatgcatactaacagttgcaatggagaggctgtgatgctacgagatataaacgtagagatgccatcatgtgaaactggaagtgggggtgggtcagggaaatttgttcttggaaagaaataatgaacctcaaggaagagtaggcattgtcctggtgtggtggggtgtaagcggtgatcccacaaagcactgaagctcttagatgggtgggagctgaataggtgcagatagcaggggtgaaggagtgaaaggataaaagattcaaggttgagatgaggatggagcaagaagaagccacattagggccattaaggctgctagaatttagaaagaaaacacacagcctcaaagaaatgtgggtaagccaaagaaggattttgttttgggaacctgaataaaagatgtccatttggctaaaaagtaaaagcagaatctttttagggcttttaatatacccaccctgggatatttggtatgctggcaatggtaattcaaattggcgtttaagaataatcttggccgggcgcgatggctcatgcctgaaatcccagcactttgggaggccgaggcgggcagatcactaggtcaggagatcgagaccatcctggctaacgcggtgaaaccccgtctctactaaaaatacaaaaaattagccgggcgtggtggcaggcgcctgtagtcccagctactcaggaggctgaggcaggagaatggcgtgaacccgggaggcggagcttgcagtgagccgagttcatgccactgcac

SEQ ID NO: 121365 - DNA, 1616 bp, Homo sapiens
  misc_feature (302)..(302): n is a, c, g, or t
gtctcgtgttggctcctgtgctcgctgcttctgtcgcgtcactctgcgctcgctcgtgttttcctgtgcgcgtctcgtccttcgcgtttctgcgctctcgccgcgcggttttcggtcggtcctcgtgagccatgtgccccgcccctggttggtcgaagctcggtccgccggctttttttgtggaacccagcccatttctagcgcggtggtctggaacgtctggcccgtttccttacgctgggcgccggcccaacggttgttgttaactttttggggcgcgggcgcccgcacacattcttttnttgttttttgttttttttttgtagcccagaggtcctttattgtttttttgtaacacctattatgccatgaattcatagggaataggttccagcagctcaggctccttcccattggttctcacaaagtgtgcttctctgggtggagcaggctggcgctttagttgaacccaggtacctttctctttggcttctttctttttctgatcattttccttcacacgtttcaggaagctatctcggctcttagagtgcttaatgtgctcaatacgcacattaattctcttggcaagaatcttgcccttaacttgtttgtttacaacaatgccaacagcatgctgggtaacattgtagactcttccagttttgccatggtaacacttgtggggcattcctttttgaacagtacccattcccttgatgtctacaatatcacctttcttatagattcgcatatatgtggccaaaggaacaactccatgttttctaaaaggcctagagaacatatatcgggtgcctctcctctttccctttgtgttcgtcattttggcgaattactggaagatggcggttccggccgaaagggcatgcatattggatatctaaatagagatatcaagaaatgaagatatgcatttccagttccagagagaaattcacactggaaatataaatttaggaattttaaagttagtggtcacatttaaagctgcagaatacaaagagatcacctgtgtgagagaactgagtcctgaaacatacccgtgtttaaagatctgggaggtgcagaggaattatcaaaggaggctgagaaggagcagccagtgaggtgtgtagaaaaacaagataagcaaaaagaaaagcaagagatatggaactgaacttccctttggcaaaaaatttagaaaatgataatgagtctctagacccccttcgtggatggtatcagatgatttcagtccaaccttccattgcattctctgactgagccaacacagctggattctcagccaactatgaagtttaaattgactccgctttctgtctctctgaagataacgttaagctgcagctccgtatctgtgaaaacccatttcacagcatctgcatccctggattgctaaatacccttgtctagttacccaaatattaatggatcccatggaataaggtggcatgatttaggcacaagcaattaccaaaggattttgaaaagcagtaactccaaattatcttgtaaagttgagaataatctgagaagagctattgtaagactgggaatcaagtaacaaaataaagatatgaaccgtcaattgg

SEQ ID NO: 121366 - DNA, 1504 bp, Homo sapiens
  misc_feature (302)..(302): n is a, c, g, or t
gtctcgtgttggctcctgtgctcgctgcttctgtcgcgtcactctgcgctcgctcgtgttttcctgtgcgcgtctcgtccttcgcgtttctgcgctctcgccgcgcggttttcggtcggtcctcgtgagccatgtgccccgcccctggttggtcgaagctcggtccgccggctttttttgtggaacccagcccatttctagcgcggtggtctggaacgtctggcccgtttccttacgctgggcgccggcccaacggttgttgttaactttttggggcgcgggcgcccgcacacattcttttnttgttttttgttttttttttgtagcccagaggtcctttattgtttttttgtaacacctattatgccatgaattcatagggaataggttccagcagctcaggctccttcccattggttctcacaaagtgtgcttctctgggtggagcaggctggcgctttagttgaacccaggtacctttctctttggcttctttctttttctgatcattttccttcacacgtttcaggaagctatctcggctcttagagtgcttaatgtgctcaatacgcacattaattctcttggcaagaatcttgcccttaacttgtttgtttacaacaatgccaacagcatgctgggtaacattgtagactcttccagttttgccatggtaacacttgtggggcattcctttttgaacagtacccattcccttgatgtctacaatatcacctttcttatagattcgcatatatgtggccaaaggaacaactccatgttttctaaaaggcctagagaacatatatcgggtgcctctcctctttccctttgtgttcgtcattttggcgaattactggaagatggcggttccggccgaaagggcatgcatattggatatctaaatagagatatcaagaaatgaagatatgcatttccagttccagagagaaattcacactggaaatataaatttaggaattttaaagttagtggtcacatttaaagctgcagaatacaaagagatcacctgtgtgagagaactgagtcctgaaacatacccgtgtttaaagatctgggaggtgcagaggaattatcaaaggaggctgagaaggagcagccagtgaggtgtgtagaaaaacaagataagcaaaaagaaaagcaagagatatggaactgaacttccctttggcaaaaaatttagaaaatgataatgagactccgctttctgtctctctgaagataacgttaagctgcagctccgtatctgtgaaaacccatttcacagcatctgcatccctggattgctaaatacccttgtctagttacccaaatattaatggatcccatggaataaggtggcatgatttaggcacaagcaattaccaaaggattttgaaaagcagtaactccaaattatcttgtaaagttgagaataatctgagaagagctattgtaagactgggaatcaagtaacaaaataaagatatgaaccgtcaattgg

SEQ ID NO: 121367 - DNA, 975 bp, Homo sapiens
  misc_feature (302)..(302): n is a, c, g, or t
gtctcgtgttggctcctgtgctcgctgcttctgtcgcgtcactctgcgctcgctcgtgttttcctgtgcgcgtctcgtccttcgcgtttctgcgctctcgccgcgcggttttcggtcggtcctcgtgagccatgtgccccgcccctggttggtcgaagctcggtccgccggctttttttgtggaacccagcccatttctagcgcggtggtctggaacgtctggcccgtttccttacgctgggcgccggcccaacggttgttgttaactttttggggcgcgggcgcccgcacacattcttttnttgttttttgttttttttttgtagcccagaggtcctttattgtttttttgtaacacctattatgccatgaattcatagggaataggttccagcagctcaggctccttcccattggttctcacaaagtgtgcttctctgggtggagcaggctggcgctttagttgaacccaggtacctttctctttggcttctttctttttctgatcattttccttcacacgtttcaggaagctatctcggctcttagagtgcttaatgtgctcaatacgcacattaattctcttggcaagaatcttgcccttaacttgtttgtttacaacaatgccaacagcatgctgggtaacattgtagactcttccagttttgccatggtaacacttgtggggcattcctttttgaacagtacccattcccttgatgtctacaatatcacctttcttatagattcgcatatatgtggccaaaggaacaactccatgttttctaaaaggcctagagaacatatatcgggtgcctctcctctttccctttgtgttcgtcattttggcgaattactggaagatggcggttccggccgaaagggcaaagaggcgggcccggcgcgcgccttacaagggcctgtgggctgcccacggcgcttgcctgagggaaacgccaaccgtaagcgacttcc

SEQ ID NO: 121368 - DNA, 554 bp, Homo sapiens
cagtttctctgactacaaaacattgtacttcattccatcaaaaaataaatacagcagtgaaaacaatttgtaactttacataaacctaacagctagtttatgggaaggacaaagtgtttcttttaatttatggaaactagtattaagcttgtttatctgcacaataaatttaaaacatagagatagctttaacttgcaagagggagaggaagagagaaagctaaatgtttaacttttccatctttgcaaagggtctttggaaatcctcctccagattccccagagcatgacagtgacttcacgtggatacagattttgcagttatcaactaacccatcaattagcatttatggagcactaattggtgtcaacccaggtaccataagtgtaagcatgatccaaataaattaaatgagaattgattgttttaattacggcaatccagtcaatggcaggctcttctttctctgcttttattttccttctcttcctctttccccttacctttctctttctcattctttttcctctttctcttcttttttctcattggc

SEQ ID NO: 121369 - DNA, 319 bp, Homo sapiens
gcaaagggtctttggaaatcctcctccagattccccagagcatgacagtgacttcacgtggatacagattttgcagttatcaactaacccatcaattagcatttatggagcactaattggtgtcaacccaggtaccataagtgtaagcatgatccaaataaattaaatgagaattgattgttttaattacggcaatccagtcaatggcaggctcttctttctctgcttttattttccttctcttcctctttccccttacctttctctttctcattctttttcctctttctcttcttttttctcattggcaaaaaaaaaa

SEQ ID NO: 121370 - DNA, 481 bp, Homo sapiens
tctcacggagcttttccccctttgcttggcacttctctctcctgtcgccatatgaaggatgtgtttgctttcccttccgtcatgattgtaagtttcctgaggcctccccagccatgctgaactgtgagtcaattaaacctctttcctttataaattacccagtcttgggcagttttttacagcagcgtgagaacagactaatacactcatacgttccagtgaaatattaaatagaaggtccctgagggtacaaataagtctcactcactgcaaaaagcagagcatgttatgaatacttggtattaagagattcataagatgcaaacgtatgccttgcttaggacctagcaaatgtcagatcttattcttattcttcttattttttggagacagagtcttactctgtcgcccaggctggagtgcagtggcacaatcacaacttgctgcaatgtccacctcctgggttcaagtgattctcctg

SEQ ID NO: 121371 - DNA, 325 bp, Homo sapiens
tcttgaaagagttgagcctccaccacttcagagagagggcagcaagagcgctctggagcctgccctccacagagcttggtgctttgagacctggacagtgcccaccagacagaatccacatagtgtttcctctcctccttccagaaccggatcttcctgagtccctcagtggctttgactggtgaaggctggccaggcctgctggagagatccgggatgcagagctgtttagtctgggaggcaggtcagtctcagaggatgggtgggtcagggctgaacacaaggaaaaaagacgccacacatggaaggaaatcaccactatgcc

SEQ ID NO: 121372 - DNA, 460 bp, Homo sapiens
gggttatgccattctagagaaattataaatgttcttgggggttgacccataggtgagctgggcatccctgtgctcttgggagctggagcaggcaggaggcccatcctcctgggcacagccgccatggctgcagacccaggcatctctgcactctggagggctcaggaaggttcccccacccccacaggcttggaagtgctcgctcccactgtctggcttctcctcactcttggcatccactccaatcacagagaaaaggggagtctgggcccacgcacctatcaacccatcacctaggtattaagcccagcatgcattagccatctcctctttgacttttaacatgaaattctcatgatcattttatgttatcaatgaccagtcataggttttaaaatgctggctgttacttgtgtataataacaatgacatttttattaataaaacaaaacacgggata

SEQ ID NO: 121373 - DNA, 369 bp, Homo sapiens
caatccacccggcttcagtcttcccccaagcgcatggttgtgggactaagcacctcaaaggagggcacagaccccgccagcctgctgggaaaaaggcgtccttcctgctaagaaagtaggatctcaaaaggcctgtcctacccccagtctctccagggaagctgcttagaggcagactggcagcaggcagggccactcccagatgctgggcccagagccaccccaacaatccagcacaggaccccgctcagcaccagggagcccacggcagcccaccagcaaatcaagacaggcttcgcctctctgcctcgtcgtacatcttctctccccacgcaaatgcagttgtccaggccccgctaagaaccgttt

SEQ ID NO: 121374 - DNA, 366 bp, Homo sapiens
gtatattagctactgtgcctgacactgctgatttttactggatattgacccaggttctttagaatccttgagatgccaaatctgggaagagaaagaaggaagggagggagacagggaggagagaaggaaagatttttctccctgattttgtttcatgattgacagtgctgtttatgccttggcgtgttacgtagtaaaacattctttgaaggttttacatacagctctttctcactgagactcaacattgtctatatgcatagaaaaaatatcaaaaggtaaatttgggattcaaagttatttttattttcttctcaatacttaaaattttcattaaaaattttgagtaggtattaaattttactt

SEQ ID NO: 121375 - DNA, 495 bp, Homo sapiens
ggtgtgtggggcagcagcggctaacagcgtttctaccgacaaagcacacaggaattcacgtttgaaaatattttcgagaaatatttcatttgtaatgcactccaaaaacacagagaaacgacaaacccatgattgtcttaccatatgtgtgttggtagtcattatctgagggtgggaagggacgccagtggcaaaaagaaaaaagcaagatacaaataaaacaaacccccaggggttaggcaaacaaccagagagtgaatgtccgctagaaaactacaaatctactcatcacagaggaagacgactaagtatggtactcggggaaatctaacacgggctcaacgtggaattcattcccacatcaaaaatgcaatgtcttaacatggtaataatgtaccactaggtaacaaactgatggcgaactgtaagttacagagataaagtctgaaaacctcagcaggctggccgtgcattgggggctcacgcctgtaatcc

SEQ ID NO: 121376 - DNA, 271 bp, Homo sapiens
tggcttaagatctttgctctaaccactttgcagctgtgtgcccttgggtaagccccttaacctctctgaaactcctcctcataatcacagtatggcccagggatgtatggattaaataagatcaagccccagaagcacttaacatagggcctagtcttggtgagggaggcagttgttattaatatgcccaaaagatcacatctccacaccaccaccagcctggctatttatgaaaaccccatcccctatacaaatttgaaacaaatcagag

SEQ ID NO: 121377 - DNA, 1307 bp, Homo sapiens
agacatcagaatatttgatgttggacattgtaacttttgaccactggtttagatgatctgcccagatacttgtgatcggctcccttggcccttctcttctgcgttcctagcaggttctattaacaactgagaagtagaaggtggctgtaagacaaaaccaaccctgacaagcagacccaaatgacagcacatcagcaatgacctgccaaatacagtttgtctccccattttgtcaaatcctgttccacatcattctcctctagggcacagaagtggggccccagcaaattgaaactagaaccacttgtatttccttccatgatgccgataggaaccgagaggtctggatcaataatattacctgctctcatgctttttgtctgattttcagtctaaatgataatacaaacagtgtctcatagagattgcacaatttccaccttatttgtcatatctggctccattcctggaatgaggtagagattctgactccacaagctaattggctaccacttaaggaagcctgcactgcctctagaaaaaaagaagtgccccacacagatttgaaaggccgttatgcaaatccaaatagaaattcatttggggctgtcgtcacatggaataatttttattctatagctccagtgattcctttcctggtgtgcatttttatcattgccatcagatgattttctcagagctgaaatcacaatatatcgtgttagatctcagagtaaagatgtcactgctgttaaatgtttattggacttgctcaatcttttccaaatttaccaacttgattgtcaccggggaagaaagactgtgagcttgttgttgcagatagatgttataattaaatttgagtaacacaacagtgccttcctccttgactctcagcccctattcatgcagctagcgtgttctgatttatatataatcatctatatatttttttggttatatatgttctgttcttactaaagcacataattgcataggcctgttttttcaaagggaggatagctgaattacaaaaggaaggtcagtttatacccaaaactgatcttgttataactaaatgaaaagcaattatacatgtaaagaaagttgccaaaatataaaatgaactagaactcgaagatttaagaaattagctcatatcgatgcatatggtatgtttggactattaatagcaaagagacgaatagcccagacattaacgcgactcatgtccttggcattgttacttactagctgtgttacctggagtgagtttcccaacctctgtctcactttccttatgtgtt

SEQ ID NO: 121378 - DNA, 410 bp, Homo sapiens
tttcctgaatgcagttttaggataaggacaatccttggaaatccaccttccagaaggttccactgttgcggctttgggatcaggaaaggggatttgcaggaagggacaattgagagggcttctccctgctatggagacacacagctgtctgtacttcacgggaccccctccttcagatccagaagacactgaaaagaaacgcagggctttgaacctgggctggggctcccggggctgggcggctgctgcctctcgctgagggaatccacactctcgaggcagcacctcgcagagcaggtcacctcgactgccccatgatgtccacgaggcttgttcctgtcttactacgatcgagaagacagcatgtgattttatgaacaccccgtaaagaaaacctgaaaaccgtgttc

SEQ ID NO: 121379 - DNA, 433 bp, Homo sapiens
tcagtctaattacacagtacctgaggttctacatccatgacaagtgaggccattgtcatgcaatacccttcactgagaagacagtatctggaatgttagcatcagttcccctagtgctgacagtaaggttaactaatagaaaacacattgacacagtaaagtacagaagaagaggaagaaagtaatgaaaaatcaaaatgttttatattcagttttctctgtctatgcatctattggaaaggaaaatattttaagaagtcattacagctgattttaaatgtaccttttctgtgcaggctcagacataggggagaactagctctgctgtttgaaagtaactttggccagacttcaattcaaaataagaattcaagctatgtgaaaattgaatgaccttctgtttcatggagacccgtggcacagaaagagttct

SEQ ID NO: 121380 - DNA, 351 bp, Homo sapiens
aaaaaggaataagttcaagagatctattgtacaccatggtcaatatagttaacaatatattttatactttaaaattgctaaggtagtagattttaagtgttctcaccacacaaaaaaataagtatgtgaaaagcatatggtaattagcttgatttaaccacgccacagtgcatacatatgtcaaaacatcatgttgtatactataaatatatacactttttgtcaattttaaacaggttataaaaaaacatgttattgttgataattatgaaaaattttaatgatgtggaaatgtgtacagtataatgataaatgaaagagtagtaaaaatccttataaaatataattaca

SEQ ID NO: 121381 - DNA, 562 bp, Homo sapiens
tagaagtattagggttgcagcttaaaggaagagcttgatacttcaaagtctcactgagaagatgttagaattggcatccagtatgaaaactgaagagcctaaacaagattctttgccaaatgaatgggcagcttcctggcacatagaggtgagccatgacagcacctgcagagaggttccagattttgctggaaagtagttcccagccctctcagccagagaatgaagagaccctcagaaccccaaggtgatgcagaaagaataagatccatcctgggcaacatgttgaaaccctgtctctaaaaaacatacaaaaatcagccaggtgtgatgacacattacctgtggtcccagctactccagaggctgaggtgagaggatcatgtgagcctgggaggtcaagctttctgtgagccatgactgtgccactgcactccagcctggacaacagagcaagaccctgtctcaaaaaaaaaaagcaagaataagactattttaaacgcaaaagactttctcttgtttttaattatcaaaatggaaagattattttatgactgtaaac

SEQ ID NO: 121382 - DNA, 406 bp, Homo sapiens
ggcaaatgaccagggaatggcctgggatggcctgggaagctgggggacctacggagaaacacaacccttctctcttcctggcctgcctggggccatggtgcatcatcactgggaggtaaggtcctcagaccgcttctgaattagcctctgcccatggtttcaataaataaacacatatttattgagcaccttctatgtttgactcactgtgcctggccctgaggctacaacagtgaacgagacaaagatgcctgccttggtgaaactgaccttcaagagggaaagatggatgataaatggagacagaaatgcttatatgaggccaggcatggcggctcacgcctgtaatcccagcactttgggaggccaaggcaggtgtatcacctgaggtcagaagttcgagacc

SEQ ID NO: 121383 - DNA, 379 bp, Homo sapiens
ctgtggtcgctctgaggatcccccggaagactggcctcttgagggatatgaagcccgccaggtcctttgcgttttaagctgtggctcgtggtgttctggcgagaggagatcaccaagggtcaaaacaaatctcaacccttgacctctggaactttcacttcaaagatacccaagtttgattgacttagactatggaacagtttatactgtagtgcattgttgaaatcattacaggaatcagacagcaattagtgtaatttaacaagctagttgtggtcagagaaaccaagaatcagcgagagccctgcccaaaccactctcatcccaaggtgacagtgagcaatctcaagtctgagctccctgaggagcaactccagag

SEQ ID NO: 121384 - DNA, 534 bp, Homo sapiens
ggtataagaaccatttcaagtcgaaggagagtggttaaaggccaggtatgcggaccacttctataagatctcatagttgctctcttgttgccgagcgaggcgaatgacattgataaatcgccccattataactggtgataaaagcagcaggtacttaaaggactgaccaatagacatctgaaaagacaaatgactgcttgaagatgactgatacaagttggaaattagcgatacccattgtgaggagaacaggacaaagcacgctggacagagataataccccaatctcctgaatgctcattgatgtgggtcacctgacagccttctcggaaaaaagtcttaattactaaaaacatatgtgaaaacaccctgaggaccatgatagctcatgcaaatgtaaggtattattatgattcaaccaactgaagtgttgaaaattaaagcaattttatatactttcatttggggcacaagttttggggcattcggttaggactttttttttttactaaatggtctggatacttactatag

SEQ ID NO: 121385 - DNA, 241 bp, Homo sapiens
tcccattatccttggcagttctcttagaccttcgccatttcatcaggcctctcccctctgcctgcctcgcgccaagcagatgaccttgccttttactcagagcaaatagaggccttcaatcttcatcccctatctccatgcagggaaccaccacctacttcacacactccccagagccgccacccaggaactgacgaaatcctctcccctcacctcctccatccagctagagccaagccct

SEQ ID NO: 121386 - DNA, 543 bp, Homo sapiens
gcaggatgacagggagccagccacaggaatatctcaggggagagtgatccaggcagaagtcagagccctgcaacagaattgatcctggaatgcccaaggctgtatgggacagggaccaggccacagagggctccttgaccatggccacggggagcagtcttgatttgaatcctgaagcaagaggatgcagccatggggtggtgagcaagggagtcgatctctgcttctggtcacaccagagtaacagggatcagcccagccctcctgccatagcaactattaaagcagacaaaataacggaaaccactattttcaggtagtagacaatgtgcagggctagactgcaatcctgagagatgggaacccctgagagggtttgcccatcctgctgcttggtcactacttcctgaccaccatgcagagagctgagtctgagcatagcatgcagtctccctgggcagaggaggcagtgccagagtgaggacagtgggactgtcgggctagtcgggggctgtcgggctagtcggggactgtcgggctagt

SEQ ID NO: 121387 - DNA, 464 bp, Homo sapiens
tttaaacagagttttgctctgtcacccaagctggagtgcagtggtgcaattgtggctcactgcaacctctgcctcctgggttcaagcgattctcctgcctcagcctcccaagtagctgggattataggtgtgcaccaccatgcctggctaatttttttatttttagtagagatggggtttcgctatgttggccaggctggtgtcaaactcctgacctcaggtgatccaccctcctcggcttccctaagtgctgggattacaggcgtgagccactgcgcctggcccagatagtaaatattttaagctttgcagaccaagaggcaaaatcaagggtattatgagacttacctcaataataagaaacaaaattttcacagatttttttattgacaaaattcataacataattattgagtccagcataataatacacatctactaatgaggggaatagaattcttttt

SEQ ID NO: 121388 - DNA, 456 bp, Homo sapiens
ctttgtacatccacattcatatcactattattcataactggtaaaacatgaaagccaaccaagtatgcatcagcaaatgaatagataagcacaatatggtaccatagataaagtgaaacattagccttaaaaagaaagggaattctgacatatcctacaaaatggatggaacttgaggacaatatgctaagtgaaataagccaggcacaaacaactactgtatgataacagttatatgatgtagttaaagaatagccaaagccacagacagacaggagaatggctgttgccgggtgcaaagggaggggtcaaagggaagttattgtttaatgggtatagactttcagttttacaagatgaaagaaaagagttataaagatggatcgtgtgatcactgcatattatcaatgtatacttaaaatgtacacttaaaaatggggttaagattttaaactt

SEQ ID NO: 121389 - DNA, 759 bp, Homo sapiens
ataagaaccagagtcctcagcctcaccctgaagtgtccgctagacccttcgtgacccaaccctgctgaccagccacgtctctcatgtctcttaccctgtgcctggccagcgtgatgtgcagtcatctctagaatagacaggatgtttcacacatgctgctccctacccctggaaactcccttctctcccctgtaactgctcatccattgaggatcaacacagatagcacttcctccaggaagccccctcccattcctttgtgctttcttagcatctatcacaatacccactgcccagtgttgtgactatctagtgtgtatctgctcctctcggactgtgagcagcttaatggcaggggtcatgtaaatttgtttttgtaccctcatctgacacaaaggtggtgctcaacagatgtgtagagagagaaaggaagggaaggaagctgaaggaaggggaggaagaaaggaatgaaggcagaaaagaaggagagaggcagaccttagttccaccagtggcataatttccaccaagccaaagctgtctggggatggcccggagcccccaagggtggcaggtttcccatcgggagaggtgtttgagcaggggcagtgtgcccactggctgaagaagtggtaggagagttgacatcttgccaagggcctggtgtagatgacattgagggtccctcctggctctgcaatgatcaagttctatgaacattgttatttttccagaaattcatctgagcagccaaaaaaa

SEQ ID NO: 121390 - DNA, 697 bp, Homo sapiens
gtgacctacagtatttagtacagtcacatgtggtccagatttgtagcctaggagcaatgggctatgccatatagcctaggtttgtaatagcctagactattcaggtttgagttcactctatcacctaatggcacatttctcagagtgcatccccatggctaactgacgcatgactatggttgcgctcttatatttagttcagaattcagaacctctgcttccctcctgagagccatctctgactgtgccaactcaaaacaactgccccctatttacccacatccctggacctcccctcaggggagtgtctgagtgggcatagggtctgtgcccccagctccctgccctcacccttgcctttctccccaccctcctagaagtgagtgagtgtggaactgcagggccctgaacggcccagggcagggcattgctttgcctgacttgctgggggccttgggacagccccttgcagagcagggagacttggctgggagatctccaactttccttcccgccctcgcttttggggagtcccatgacttgctgtgtgaccttcagggcgggaggaagggttgagaatctgggtgaggctctcaaggctcaggaaggaaagtacgatcgctgcttaaaaaaaaaaaatagattagttgctgcttgaaaaaacaaaaaagcgtaaaccaacaaaaaagcataaacc

SEQ ID NO: 121391 - DNA, 458 bp, Homo sapiens
aagaccctggacctgggtcaccctatcgaagtcactgtatttaaaatatatttgagctgaaagtcccaggagtacacacagagtgccagctgcccctccgctggttcagcaggacctgccattgccacccacatccccagccgtggccctcaccctgtccttgaccctggtttattggtcagagacccaggtctgagtcagcctgaacatcttcctggttgtgtgagtgggatgctgccatgaggctgggcactgggggtttcctgacagtgacagaaatagccaaacggaaatgtatttggtgtttcacactttgcaaatagcattccctcagattgggcagagacccatcttctccctgccaaccccaacccccagctccatggacacaggtaggaggcctctgtatcctgctgagaacacaccccaccaggcctgtttcttctccccaccgttcc

SEQ ID NO: 121392 - DNA, 412 bp, Homo sapiens
acttcataatagcttttaatctcatctctactaataaattgaaacctagtgttagacacatagtagccctcaataaagacttgatggatttaaattcacctgggcctttattcttctgtgatgagtcatcaggacttactgagcctaggaaaagttgtcagaacagttacctggctgactggtggctcctttgtgtgtactgacctatataatgcctggggtgttcataatatttttggatacctccaccaagaaaggatcatttatcagtcttctgattgcttgataagaggatcctgataccatggaattttcttgtatctggatcaatgtttattactagtaggtccatgttaggaacacagcccgagtatggctttggttcaatagagtagattaaaagccattctgg

SEQ ID NO: 121393 - DNA, 259 bp, Homo sapiens
acgaggatggctacaggatgaagtttgcctgctactacccccgtgtggagtacggcttccaggttaaggttctccgagaagacagcagagctgctttccgcctctttgagaccaagatcacccaagtcctgcacttcaccaaggatgtcaaggccgctgctaatcagatgcgcaacttcctggttcgagcctcctgccgccttcgcttggaacctgggaaagaatatttgatcatgggtctggatggggccacctatga

SEQ ID NO: 121394 - DNA, 276 bp, Homo sapiens
tgctgagattataggtgtgagccactttgcccagcctggaactttcattcttaattatcactaagaatttgcacacatctacttcttgaaatttttaaagtaatcttgggatcaagaagtgcggttactatatttagatacaatctcaacattcaacttatcagccacacctctagactgcaatccaaatgtgcatagaacaacacatgcatgggttggaagtttaaactgtttttttttttttttttttttttttttttttgagaaggagtctca

SEQ ID NO: 121395 - DNA, 416 bp, Homo sapiens
ctaaagaggatttcaccatgttggtcaggctggtcttgaactcatgacctcaggtgatccacctgccttgacttcccaaagtgctgggattacaggcgtgagccaccgcgcctggccaagtttttttttttttaatatcaataatttagaactgtgcttgtcctctcccttgcctcacctatcactcagaagggacttagtatttatggagagatattattgatgggcgtggattgcacaagggaaggatgtggaatcagataaaagattgagtatgttagtccatacttgaacaaagaagcaattctttccccatctgtcttcttaaagctttttccatttgccttattgctagcctgttctattccttccttctcttctcctcccctctcccctctcccctctctccattcagt

SEQ ID NO: 121396 - DNA, 529 bp, Homo sapiens
tgagggaaccaggattaaacctaagcaatctaactccaggtcccagattttttaaccattacagtactgtttaatttgatttgatatgttaaaaggattaataaaattaatacaggtccattcccttattcataaatgttcattgtcttcatttatttctttatactgttctgctgaaattgcactctcatctccccaataactttgtaatatccaatgccatttttttcagtcatcccattttaaaatatatttttactagaatagtgaaatatatattcagataaaattggctttgttttaataatgatcagtaaaagtaaattcattttaatcatttccacacattcatgaaaagtaaaggggaaaaatgggcatagaggtaaccactagaattaggctttcttggatgggtagaccaggtgtggaggtgtgcagataagattttacaaacactcatacactcccatctccaaaatcataatttatcttacattctgctactaataaacattccactggttttaaa

SEQ ID NO: 121397 - DNA, 368 bp, Homo sapiens
tccggggcggaccgtgggactccgcgcgtactcggcgctgagcgcgaccacgcctgcctgtcttccagtccagccaaacactctaagcaggaccgctccaaccgcagccccgggatgggtccacttcctaacgcagatccccaggccccctccaaccagtcggctagccctcgcctctgcccagctggacgagtctcctcaacacgccacctcgccctgcccacagagggccttggctctcaccttctcgcctgcctataaggcccgcccacattcctcctctctcccagccaaaccccatctgtccttcaacaccaagtagaagtcccctcctacacacactcctctctgaccagtgaaagagctcc

SEQ ID NO: 121398 - DNA, 331 bp, Homo sapiens
  misc_feature (159)..(159): n is a, c, g, or t
  misc_feature (223)..(223): n is a, c, g, or t
atcaccaccactgagatcccatcacacagtactcccagcttcacttcttcaatcaccaccaccgagaccacatcccacagtactcccagcttcacttcttcaatcaggaccactgagaccacctctcatagtactcccagcttcacttcttcaatcatngccaccgaaaccacctcacacagtactcccagcttcacttctttgataaccacctctgagaccncctcacacagtactcccaaagggacctgccttgtttttgaggagcttgtcacttaactatgttgaggtaccaaagaggaagctgagacaaagtcaattcaaagtacag

SEQ ID NO: 121399 - DNA, 405 bp, Homo sapiens
ggaaagcagaggctgctgggctggcgaattcagaaaaattaagatcacagagggtgaagagccaaagctggcagccaagaaagttacataagccccttcttcaatttcatgcacaaaacaggctcctgggggctttggggcctgggagccatgaaaggacacctttgcagatcaagtcccttgccttctggaaagctctggcctcaggacacgcaagcaagatggacccttgtcttcagagttgagaatggagactcctggggtaggatcagagttacgatgaccttcgctagcctgccaagtgctctgaaaacttgggagtggcaagcaggacagggaacctcagcccccttagagaccatcaagtctgggtgaggtctgtaaaatgaagacttcacttagctc

SEQ ID NO: 121400 - DNA, 676 bp, Homo sapiens
gccatagctttttgaatggttagtttcagttggaaaacatagtgaacaatacatctggaaatattctgtcatgttttgagctgagaaactctagagaaccagctgctgatttaaaagccttttattatgatacagacagtctattgtctataaaagcattggctattacacagtggtagatatgtgttgctttttctagctattaacttgaaagaaaaaacttgtattcataatttatgcatgacttatattccctgagaatagtttattgtgttattttctttagctgatttactgagcatttagagattttttgagacagggtcttgccctgttgtccaggctggagtgcagtggtgtaaaacactgctcaccacagccttgacctcctgggcttaagtgatccttccacctcagcctcccaagcagctgggaccataggtgtgagccacacacccgactaattttgtgtagagacaaggtctcactatgttgcccaggctggtcccaaactcctggtttcaagtaattctctcaccttggtctcccaacagtgctgggaatgataagtgtgcaccactgtgccagccaggatttttcttactccatttttttttcctttaaactcaatcaaaagttaaatggttaaatagtaggactgacatattttccattc

SEQ ID NO: 121401 - DNA, 468 bp, Homo sapiens
cccgagtcgtcctggggattttcttcactgagcatttgtgaagattctggggtcaaggttgggttaaacttttgtggtgggtccatccgcggtctagtcaacagtactaagctcttcctgcatctttgggacccagcgggaagtgatgccagctctcaaattgctacaaggtatcctggaaagaaatctatgacccagaaagagcctgaaaacccaaactccagcaaatattggtgaaagagccaacccgcaaagccttttaaaaccttgaattccttacctataaactgggataaaacctatggtgtaagtctgttctgagaattacatgaaatggatttatagagttctcagtacagttcctgaaatacagcagctgacgccagtagatgttgatttccttctcctttctacttttgaacttagctgtagttattagcatttttttaatgttgaggtaaacagttt

SEQ ID NO: 121402 - DNA, 246 bp, Homo sapiens
tactgggattataagcatgagccactgtgcctggccacattcttgatttttagtttgttcagtttttttacttgccctaagcatgacagtgatgacttctaagctctttacatgctgaaggtgaaaccaaaagtctctggcatttttttagattgaaaagtcttaaaatttctccttcttataaactaatttatctcattctttatagtccaatgatgtgcctttacctgtttgcaaacattctgt

SEQ ID NO: 121403 - DNA, 291 bp, Homo sapiens
gatatttaattcagaaaaaaatgtattctgtagtgttaggggttttgaagagtgaaaatatagtcagcaaattaaccttctgttactggaaaatggtaggacacgttatcaggacgagacttccaagaaaaacaatggaaaataaatagtgcaaaaaaataatatgaagagactaactaaaaatgctctttctaaacacccctcctgccttctcccagctcagcactttcttcccatacctgctgtcacctcttgtcccatatccctctttcacacactgtctctccatcc

SEQ ID NO: 121404 - DNA, 479 bp, Homo sapiens
tcatctggtgatgggcatttggattaattctctctttgggttattaggagtgatgctactgtaattattcatgtacaaaattttgtgtggacctgtgctttcatttttgaatatgaaaatactgcgcatctccaaggaagacatacaagtggtcaataagcacatgaaaagatgctcaatgaaattcatcatcagggaaacagaaatcaaaaccacaattagataccacttcatacccataagcatggctagaatcgaagatagagaaaattggcctggtgcggtggctcatgcctgtaatcccagcactttggaggctgaggcaggagagtaacttgaatctggaggcagaggttgcagtgagctgagattgtgccactgcactccagcctgggcgacagagcaagactctgtctcaaaaaaaaaaaggaaatggggctctatgtagcaggagacaaagggaaccaggggatcctcta

SEQ ID NO: 121405 - DNA, 3025 bp, Homo sapiens
tcgaggcctggggtgtgaatcggccgaggtctcaccactcaagatggactcgattggttgatatcaacctagtacggtgccatgctttgaagctggactcttttggccagtttattgaattattacccagcctagagtttatttcactggatcagatgtttcgtgaaccacccaagggttgtgctcgagttggtctgagtgcaggcacaggaattggtgtttcatcagctcttgttagcaaccagaactccaacaatgacgataataatgcccagaataacaatgccaacatccacgacaacaatcaccatcatccagatgactcagacgaggagaatgactttcggcaagatctgcagccaggagagcagcagtttgcagctgacgcattaaatgagatggaagacatcgtccaagaagatggagaggtggtggccgagagtggaaataatactccagctcacagccaggcaattattcctgtggatgttgatgaggaacaagcaggacccagtggtcttcagcgtgtagtaaaaccaaccccaattactgttcatgattcagagagtgatgatgaagaagatagtctagaactccaagaagtctggattcctaagaacggtactcggcgttactctgaacgtgaagaaaaaactggagagtcagtgcagtccagagaattgtcagtaagtggaaaaggcaagactccacttcgaaagaggtacaactcccatcagatgggccagtcgaagcagtttcccctcgaggaaagcagctgtgagaaaggctgtcaggtcaccagtgagcagatcaaagccgatatgaaagcagctagggatattcctgaaaagaaaaaaaacaaggatgtttatcccagctgcagcagcaccaccgccagcacagtgggaaactccagctcacacaacactgcttctcaaagccccgactttgtaaggacggtgaacagcggcggctcttccgagcctagccctacagaagtggatgtgtccaggcagtgtgcctgctcccccggtgggtcagaggactctgaggccatggaggagggagatgcagagagttctgtctgccccagatgctgctgtcacaggccccaggaatcccaaaggagaactagcaggtgttctgatgaggaacgtccttcaaccagccgagcctgtgttgtgaatggcccggatggtacgagatccgccttttcctttaggactctgccacaaggggggtcttcaggcccagcacatgatgagaggactaatgggagtggctctggggctacaggtgaggacaggagggggagctcccagcctgagagttgtgacgtgcagtctaatgaagactaccctcggaggcccctaaccagggccaggagcagactgtcccatgtactgctggtatctgagtcagaagtagccaaaacaaagccacgtcacgccatgaaacggaagcggacagcagataaatccactagtacaagtgatcctgtgatcgaggatgaccatgtgcaggttcttgtattaaaatccaagaatcttgttggagtcactatgaccaattgtggaatcacagatctagtgctaaaagactgtccaaagatgatgttcatccatgctaccaggtgcagggtactaaaacatttaaaggtagaaaatgcaccaattgtaaaccgatttgactatgcacagtgcaagaaactgaacatggatcaggtactagaccagatactaagaatgccacccgagagaaaccgcatcatatacctacgcccaatgcagcaggtggacactctaactttggagcagaagctatttagtggtccctacccctatcacatctgtattatccatgaattcagtaaccctcccaatgtccggaataaggtgcgcattcgcagctggatggacactatagcaaacatcaatcaagagctcattaaatatgaattcttccctgaagccactcgaagtgaagaagacttaaagaaataccccaagtacccctgggggagagaaatctatactttagaaggtgttgtggatggagctccatattccatgatttctgacttcccttggctgaggtcattacgagctgcagagcccaacagcttcgctcgatacgactttgaagacgatgaagaaagcactatctatgctcctagaaggaaaggacagctgtctgcagacatctgtatggaaacaataggagaggaaatttcagagatgcgtcagatgaagaagggtgtatttcagcgagtagtggcaatttttatccactattgtgatgtcaatggagagccagttgaagatgactacatttaattggtccctcctcctttccagctattttgtcagaaagcaagtagggccatccagctgccagagtgctccacagggacttgaggcatgcagttgggaggtcctggctcggtttgctatatagggaatatataaggaacatcgaaattgtatacaaagatttgtacataaaaaatatacaaagacgcttcctaaagtaccaactttatatcatatgtttatacaatttaatttaaaaattcattttaaggaagacagataatttgaaagacttttgtttttcttgacttaattcatgaagtatcattttttgactgagtctccatttacttcattcttaatgattattgtcatccctttaaatctgtgcctttttcttcttgagcgaagctgtttgagtaaacctgttgaagagtgtttgtgtcttttgtgcttttttgttgttattaaaacaccaactaaaccttatagtcaagacaaggctctatgtttctgtacaaagctgtagttctttcttagtattatagttgccatgtttcttaaaatcaagtaaaaagacttatgagcttaaaaaaaagtgagtttgagagggaaatggaaaagtttccagagtatttctagtaatttatttccacattgaattgtgtatatgctttatcttgaatataaaataaaagtttattaaaaacttt

SEQ ID NO: 121406 - DNA, 745 bp, Homo sapiens
agcggaagtgcctcagcggtaggggccggggagcgggtctgtagcgtccctccctctcaaccacaataacaggcggagggtcggcgtaggtactttgaactcaagtaaacaaaagggaagattttctcgttgatactggagactgcacaacaatggggccacgaaagaaaagtgtgaaaacatgtatcatgaataatgaaattccagaagaaatgacagcagatgaaacaaaggactatatgaatcaactttcacatgaagtactttgccatatttttaggtacctccctctgcaggatatcatgtgtatggaatgtctttcccggaagctaaaggaagcagtgaccctatatctgcgagttgtgagagttgtagatctctgtgcagggcggtggtgggaatacatgccaagtggtaagtggatttagtctgtgaagtacagtagtgtcctactggaaagtagtaacaatggtttcataaaaagttacttgttgtcttgagaaaggcaatctaagtcaccttgtaggctggcaagattttgtctaaattatttatgttgggttttaggttgtaaaatgcgttttacctgaggctttattgttttaatagtctgctcttttcatttcctgtccttaagtaactatatcagcctgttccacacatctgtgattggagaacatgagcctttggttaattgagtatatgtgtatcacattagacactgtgtgtcctttactgtctgatg

SEQ ID NO: 121407 - DNA, 4183 bp, Homo sapiens
agcggaagtgcctcagcggtaggggccggggagcgggtctgtagcgtccctccctctcaaccacaataacaggcggagggtcggcgtaggtactttgaactcaagtaaacaaaagggaagattttctcgttgatactggagactgcacaacaatggggccacgaaagaaaagtgtgaaaacatgtatcatgaataatgaaattccagaagaaatgacagcagatgaaacaaaggactatatgaatcaactttcacatgaagtactttgccatatttttaggtacctccctctgcaggatatcatgtgtatggaatgtctttcccggaagctaaaggaagcagtgaccctatatctgcgagttgtgagagttgtagatctctgtgcagggcggtggtgggaatacatgccaagtggctttacagatgccagttttctaacactattaaagaagatgccagatgttgaacagctatatggccttcaccctcgataccttgagaggcgaagagtaaggggccatgaggcttttagcattccaggagtcctagaagctttgcaggcatgcccaaacttagtgggtgtggaaacttctcatttggagttggtagaatccatttggacatatatgccccatgttcatattttggggaaatttcgtaatcgtaatggagcttttccaattcctcctgaaaataaactgaaaattcctataggagccaaaattcaaactttacatttagttggggtgaatgttcctgaaattccttgtatcccaatgctaaggcacctttatatgaagtgggtaagactcactaaaccacagccatttaaagacttcctttgtatcagcttaagaactttcgtcatgaggaactgtgcaggacccacaaattccttgaaatatgtccctttagtaacaggcttagcctctgcccgaaacttggaacacttagaaatggttcgagttcctttccttggaggtcttatccaacatgttgttgaagacagttggagatcaggtggttttagaaatttgcacactattgttctgggagcttgcaaaaatgctcttgaagtagatcttggttacctcatcattactgctgcccgtaggttacatgaagttcggatccagccttccctaaccaaagatggtgtcttttctgccctaaagatggcagagttggagtttccccagtttgaaacccttcatctaggatatgtagatgagtttttgctacagagcagaatggctaatgcggatctggtgaagtatggtttggctgatgtggtagaaaatcctggtatcatcactgatatagggatgaaagcagtcaatgaagttttttcctgtatcaaatatctggcaatttacaattgccctcatctacacaacccatacaattggatctcagaccactcaagatggactcgattggttgatatcaacctagtacggtgccatgctttgaagctggactcttttggccagtttattgaattattacccagcctagagtttatttcactggatcagatgtttcgtgaaccacccaagggttgtgctcgagttggtctgagtgcaggcacaggaattggtgtttcatcagctcttgttagcaaccagaactccaacaatgacgataataatgcccagaataacaatgccaacatccacgacaacaatcaccatcatccagatgactcagacgaggagaatgactttcggcaagatctgcagccaggagagcagcagtttgcagctgacgcattaaatgagatggaagacatcgtccaagaagatggagaggtggtggccgagagtggaaataatactccagctcacagccaggcaattattcctgtggatgttgatgaggaacaagcaggacccagtggtcttcagcgtgtagtaaaaccaaccccaattactgttcatgattcagagagtgatgatgaagaagatagtctagaactccaagaagtctggattcctaagaacggtactcggcgttactctgaacgtgaagaaaaaactggagagtcagtgcagtccagagaattgtcagtaagtggaaaaggcaagactccacttcgaaagaggtacaactcccatcagatgggccagtcgaagcagtttcccctcgaggaaagcagctgtgagaaaggctgtcaggtcaccagtgagcagatcaaagccgatatgaaagcagctagggatattcctgaaaagaaaaaaaacaaggatgtttatcccagctgcagcagcaccaccgccagcacagtgggaaactccagctcacacaacactgcttctcaaagccccgactttgtaaggacggtgaacagcggcggctcttccgagcctagccctacagaagtggatgtgtccaggcagtgtgcctgctcccccggtgggtcagaggactctgaggccatggaggagggagatgcagagagttctgtctgccccagatgctgctgtcacaggccccaggaatcccaaaggagaactagcaggtgttctgatgaggaacgtccttcaaccagccgagcctgtgttgtgaatggcccggatgaagtagccaaaacaaagccacgtcacgccatgaaacggaagcggacagcagataaatccactagtacaagtgatcctgtgatcgaggatgaccatgtgcaggttcttgtattaaaatccaagaatcttgttggagtcactatgaccaattgtggaatcacagatctagtgctaaaagactgtccaaagatgatgttcatccatgctaccaggtgcagggtactaaaacatttaaaggtagaaaatgcaccaattgtaaaccgatttgactatgcacagtgcaagaaactgaacatggatcaggtactagaccagatactaagaatgccacccgagagaaaccgcatcatatacctacgcccaatgcagcaggtggacactctaactttggagcagaagctatttagtggtccctacccctatcacatctgtattatccatgaattcagtaaccctcccaatgtccggaataaggtgcgcattcgcagctggatggacactatagcaaacatcaatcaagagctcattaaatatgaattcttccctgaagccactcgaagtgaagaagacttaaagaaataccccaagtacccctgggggagagaaatctatactttagaaggtgttgtggatggagctccatattccatgatttctgacttcccttggctgaggtcattacgagctgcagagcccaacagcttcgctcgatacgactttgaagacgatgaagaaagcactatctatgctcctagaaggaaaggacagctgtctgcagacatctgtatggaaacaataggagaggaaatttcagagatgcgtcagatgaagaagggtgtatttcagcgagtagtggcaatttttatccactattgtgatgtcaatggagagccagttgaagatgactacatttaattggtccctcctcctttccagctattttgtcagaaagcaagtagggccatccagctgccagagtgctccacagggacttgaggcatgcagttgggaggtcctggctcggtttgctatatagggaatatataaggaacatcgaaattgtatacaaagatttgtacataaaaaatatacaaagacgcttcctaaagtaccaactttatatcatatgtttatacaatttaatttaaaaattcattttaaggaagacagataatttgaaagacttttgtttttcttgacttaattcatgaagtatcattttttgactgagtctccatttacttcattcttaatgattattgtcatccctttaaatctgtgcctttttcttcttgagcgaagctgtttgagtaaacctgttgaagagtgtttgtgtcttttgtgcttttttgttgttattaaaacaccaactaaaccttatagtcaagacaaggctctatgtttctgtacaaagctgtagttctttcttagtattatagttgccatgtttcttaaaatcaagtaaaaagacttatgagcttaaaaaaaagtgagtttgagagggaaatggaaaagtttccagagtatttctagtaatttatttccacattgaattgtgtatatgctttatcttgaatataaaataaaagtttattaaaaacttt

SEQ ID NO: 121408 - DNA, 4662 bp, Homo sapiens
ctggccaagggcaactggtcacttaggaaggttcctgtgcaatgagaagctctgtccagaaaactttgttttatacacctaaaccagcagtgtaaatcactacaaagtgaaaaacaggagaccttgatttttgttccaaagttgctattaacttgatggtttactttggccaaatcccttcctctctctgaacttgagatttttttatctgctaaaggaagacgttggattaggtcactggtttttaatcccctttcccattcccccagcacaagtgaaggataaaataatagttctataaagccatgattttcccagggaaggaggaggtccagtctggagggtactttgaactcaagtaaacaaaagggaagattttctcgttgatactggagactgcacaacaatggggccacgaaagaaaagtgtgaaaacatgtatcatgaataatgaaattccagaagaaatgacagcagatgaaacaaaggactatatgaatcaactttcacatgaagtactttgccatatttttaggtacctccctctgcaggatatcatgtgtatggaatgtctttcccggaagctaaaggaagcagtgaccctatatctgcgagttgtgagagttgtagatctctgtgcagggcggtggtgggaatacatgccaagtggctttacagatgccagttttctaacactattaaagaagatgccagatgttgaacagctatatggccttcaccctcgataccttgagaggcgaagagtaaggggccatgaggcttttagcattccaggagtcctagaagctttgcaggcatgcccaaacttagtgggtgtggaaacttctcatttggagttggtagaatccatttggacatatatgccccatgttcatattttggggaaatttcgtaatcgtaatggagcttttccaattcctcctgaaaataaactgaaaattcctataggagccaaaattcaaactttacatttagttggggtgaatgttcctgaaattccttgtatcccaatgctaaggcacctttatatgaagtgggtaagactcactaaaccacagccatttaaagacttcctttgtatcagcttaagaactttcgtcatgaggaactgtgcaggacccacaaattccttgaaatatgtccctttagtaacaggcttagcctctgcccgaaacttggaacacttagaaatggttcgagttcctttccttggaggtcttatccaacatgttgttgaagacagttggagatcaggtggttttagaaatttgcacactattgttctgggagcttgcaaaaatgctcttgaagtagatcttggttacctcatcattactgctgcccgtaggttacatgaagttcggatccagccttccctaaccaaagatggtgtcttttctgccctaaagatggcagagttggagtttccccagtttgaaacccttcatctaggatatgtagatgagtttttgctacagagcagaatggctaatgcggatctggtgaagtatggtttggctgatgtggtagaaaatcctggtatcatcactgatatagggatgaaagcagtcaatgaagttttttcctgtatcaaatatctggcaatttacaattgccctcatctacacaacccatacaattggatctcagaccactcaagatggactcgattggttgatatcaacctagtacggtgccatgctttgaagctggactcttttggccagtttattgaattattacccagcctagagtttatttcactggatcagatgtttcgtgaaccacccaagggttgtgctcgagttggtctgagtgcaggcacaggaattggtgtttcatcagctcttgttagcaaccagaactccaacaatgacgataataatgcccagaataacaatgccaacatccacgacaacaatcaccatcatccagatgactcagacgaggagaatgactttcggcaagatctgcagccaggagagcagcagtttgcagctgacgcattaaatgagatggaagacatcgtccaagaagatggagaggtggtggccgagagtggaaataatactccagctcacagccaggcaattattcctgtggatgttgatgaggaacaagcaggacccagtggtcttcagcgtgtagtaaaaccaaccccaattactgttcatgattcagagagtgatgatgaagaagatagtctagaactccaagaagtctggattcctaagaacggtactcggcgttactctgaacgtgaagaaaaaactggagagtcagtgcagtccagagaattgtcagtaagtggaaaaggcaagactccacttcgaaagaggtacaactcccatcagatgggccagtcgaagcagtttcccctcgaggaaagcagctgtgagaaaggctgtcaggtcaccagtgagcagatcaaagccgatatgaaagcagctagggatattcctgaaaagaaaaaaaacaaggatgtttatcccagctgcagcagcaccaccgccagcacagtgggaaactccagctcacacaacactgcttctcaaagccccgactttgtaaggacggtgaacagcggcggctcttccgagcctagccctacagaagtggatgtgtccaggcagtgtgcctgctcccccggtgggtcagaggactctgaggccatggaggagggagatgcagagagttctgtctgccccagatgctgctgtcacaggccccaggaatcccaaaggagaactagcaggtgttctgatgaggaacgtccttcaaccagccgagcctgtgttgtgaatggcccggatggtacgagatccgccttttcctttaggactctgccacaaggggggtcttcaggcccagcacatgatgagaggactaatgggagtggctctggggctacaggtgaggacaggagggggagctcccagcctgagagttgtgacgtgcagtctaatgaagactaccctcggaggcccctaaccagggccaggagcagactgtcccatgtactgctggtatctgagtcagaagtagccaaaacaaagccacgtcacgccatgaaacggaagcggacagcagataaatccactagtacaagtgatcctgtgatcgaggatgaccatgtgcaggttcttgtattaaaatccaagaatcttgttggagtcactatgaccaattgtggaatcacagatctagtgctaaaagactgtccaaagatgatgttcatccatgctaccaggtgcagggtactaaaacatttaaaggtagaaaatgcaccaattgtaaaccgatttgactatgcacagtgcaagaaactgaacatggatcaggtactagaccagatactaagaatgccacccgagagaaaccgcatcatatacctacgcccaatgcagcaggtggacactctaactttggagcagaagctatttagtggtccctacccctatcacatctgtattatccatgaattcagtaaccctcccaatgtccggaataaggtgcgcattcgcagctggatggacactatagcaaacatcaatcaagagctcattaaatatgaattcttccctgaagccactcgaagtgaagaagacttaaagaaataccccaagtacccctgggggagagaaatctatactttagaaggtgttgtggatggagctccatattccatgatttctgacttcccttggctgaggtcattacgagctgcagagcccaacagcttcgctcgatacgactttgaagacgatgaagaaagcactatctatgctcctagaaggaaaggacagctgtctgcagacatctgtatggaaacaataggagaggaaatttcagagatgcgtcagatgaagaagggtgtatttcagcgagtagtggcaatttttatccactattgtgatgtcaatggagagccagttgaagatgactacatttaattggtccctcctcctttccagctattttgtcagaaagcaagtagggccatccagctgccagagtgctccacagggacttgaggcatgcagttgggaggtcctggctcggtttgctatatagggaatatataaggaacatcgaaattgtatacaaagatttgtacataaaaaatatacaaagacgcttcctaaagtaccaactttatatcatatgtttatacaatttaatttaaaaattcattttaaggaagacagataatttgaaagacttttgtttttcttgacttaattcatgaagtatcattttttgactgagtctccatttacttcattcttaatgattattgtcatccctttaaatctgtgcctttttcttcttgagcgaagctgtttgagtaaacctgttgaagagtgtttgtgtcttttgtgcttttttgttgttattaaaacaccaactaaaccttatagtcaagacaaggctctatgtttctgtacaaagctgtagttctttcttagtattatagttgccatgtttcttaaaatcaagtaaaaagacttatgagcttaaaaaaaagtgagtttgagagggaaatggaaaagtttccagagtatttctagtaatttatttccacattgaattgtgtatatgctttatcttgaatataaaataaaagtttattaaaaacttt

SEQ ID NO: 121409 - DNA, 3020 bp, Homo sapiens
caaaatgaaaactctcctcttctcaaagaccactcaagatggactcgattggttgatatcaacctagtacggtgccatgctttgaagctggactcttttggccagtttattgaattattacccagcctagagtttatttcactggatcagatgtttcgtgaaccacccaagggttgtgctcgagttggtctgagtgcaggcacaggaattggtgtttcatcagctcttgttagcaaccagaactccaacaatgacgataataatgcccagaataacaatgccaacatccacgacaacaatcaccatcatccagatgactcagacgaggagaatgactttcggcaagatctgcagccaggagagcagcagtttgcagctgacgcattaaatgagatggaagacatcgtccaagaagatggagaggtggtggccgagagtggaaataatactccagctcacagccaggcaattattcctgtggatgttgatgaggaacaagcaggacccagtggtcttcagcgtgtagtaaaaccaaccccaattactgttcatgattcagagagtgatgatgaagaagatagtctagaactccaagaagtctggattcctaagaacggtactcggcgttactctgaacgtgaagaaaaaactggagagtcagtgcagtccagagaattgtcagtaagtggaaaaggcaagactccacttcgaaagaggtacaactcccatcagatgggccagtcgaagcagtttcccctcgaggaaagcagctgtgagaaaggctgtcaggtcaccagtgagcagatcaaagccgatatgaaagcagctagggatattcctgaaaagaaaaaaaacaaggatgtttatcccagctgcagcagcaccaccgccagcacagtgggaaactccagctcacacaacactgcttctcaaagccccgactttgtaaggacggtgaacagcggcggctcttccgagcctagccctacagaagtggatgtgtccaggcagtgtgcctgctcccccggtgggtcagaggactctgaggccatggaggagggagatgcagagagttctgtctgccccagatgctgctgtcacaggccccaggaatcccaaaggagaactagcaggtgttctgatgaggaacgtccttcaaccagccgagcctgtgttgtgaatggcccggatggtacgagatccgccttttcctttaggactctgccacaaggggggtcttcaggcccagcacatgatgagaggactaatgggagtggctctggggctacaggtgaggacaggagggggagctcccagcctgagagttgtgacgtgcagtctaatgaagactaccctcggaggcccctaaccagggccaggagcagactgtcccatgtactgctggtatctgagtcagaagtagccaaaacaaagccacgtcacgccatgaaacggaagcggacagcagataaatccactagtacaagtgatcctgtgatcgaggatgaccatgtgcaggttcttgtattaaaatccaagaatcttgttggagtcactatgaccaattgtggaatcacagatctagtgctaaaagactgtccaaagatgatgttcatccatgctaccaggtgcagggtactaaaacatttaaaggtagaaaatgcaccaattgtaaaccgatttgactatgcacagtgcaagaaactgaacatggatcaggtactagaccagatactaagaatgccacccgagagaaaccgcatcatatacctacgcccaatgcagcaggtggacactctaactttggagcagaagctatttagtggtccctacccctatcacatctgtattatccatgaattcagtaaccctcccaatgtccggaataaggtgcgcattcgcagctggatggacactatagcaaacatcaatcaagagctcattaaatatgaattcttccctgaagccactcgaagtgaagaagacttaaagaaataccccaagtacccctgggggagagaaatctatactttagaaggtgttgtggatggagctccatattccatgatttctgacttcccttggctgaggtcattacgagctgcagagcccaacagcttcgctcgatacgactttgaagacgatgaagaaagcactatctatgctcctagaaggaaaggacagctgtctgcagacatctgtatggaaacaataggagaggaaatttcagagatgcgtcagatgaagaagggtgtatttcagcgagtagtggcaatttttatccactattgtgatgtcaatggagagccagttgaagatgactacatttaattggtccctcctcctttccagctattttgtcagaaagcaagtagggccatccagctgccagagtgctccacagggacttgaggcatgcagttgggaggtcctggctcggtttgctatatagggaatatataaggaacatcgaaattgtatacaaagatttgtacataaaaaatatacaaagacgcttcctaaagtaccaactttatatcatatgtttatacaatttaatttaaaaattcattttaaggaagacagataatttgaaagacttttgtttttcttgacttaattcatgaagtatcattttttgactgagtctccatttacttcattcttaatgattattgtcatccctttaaatctgtgcctttttcttcttgagcgaagctgtttgagtaaacctgttgaagagtgtttgtgtcttttgtgcttttttgttgttattaaaacaccaactaaaccttatagtcaagacaaggctctatgtttctgtacaaagctgtagttctttcttagtattatagttgccatgtttcttaaaatcaagtaaaaagacttatgagcttaaaaaaaagtgagtttgagagggaaatggaaaagtttccagagtatttctagtaatttatttccacattgaattgtgtatatgctttatcttgaatataaaataaaagtttattaaaaacttt

SEQ ID NO: 121410 - DNA, 4152 bp, Homo sapiens
agcggaagtgcctcagcggtaggggccggggagcgggtctgtagcgtccctccctctcaaccacaataacaggcggagggtcggcgtaggtactttgaactcaagtaaacaaaagggaagattttctcgttgatactggagactgcacaacaatggggccacgaaagaaaagtgtgaaaacatgtatcatgaataatgaaattccagaagaaatgacagcagatgaaacaaaggactatatgaatcaactttcacatgaagtactttgccatatttttaggtacctccctctgcaggatatcatgtgtatggaatgtctttcccggaagctaaaggaagcagtgaccctatatctgcgagttgtgagagttgtagatctctgtgcagggcggtggtgggaatacatgccaagtggctttacagatgccagttttctaacactattaaagaagatgccagatgttgaacagctatatggccttcaccctcgataccttgagaggcgaagagtaaggggccatgaggcttttagcattccaggagtcctagaagctttgcaggcatgcccaaacttagtgggtgtggaaacttctcatttggagttggtagaatccatttggacatatatgccccatgttcatattttggggaaatttcgtaatcgtaatggagcttttccaattcctcctgaaaataaactgaaaattcctataggagccaaaattcaaactttacatttagttggggtgaatgttcctgaaattccttgtatcccaatgctaaggcacctttatatgaagtgggtaagactcactaaaccacagccatttaaagacttcctttgtatcagcttaagaactttcgtcatgaggaactgtgcaggacccacaaattccttgaaatatgtccctttagtaacaggcttagcctctgcccgaaacttggaacacttagaaatggttcgagttcctttccttggaggtcttatccaacatgttgttgaagacagttggagatcaggtggttttagaaatttgcacactattgttctgggagcttgcaaaaatgctcttgaagtagatcttggttacctcatcattactgctgcccgtaggttacatgaagttcggatccagccttccctaaccaaagatggtgtcttttctgccctaaagatggcagagttggagtttccccagtttgaaacccttcatctaggatatgtagatgagtttttgctacagagcagaatggctaatgcggatctggtgaagtatggtttggctgatgtggtagaaaatcctggtatcatcactgatatagggatgaaagcagtcaatgaagttttttcctgtatcaaatatctggcaatttacaattgccctcatctacacaacccatacaattggatctcagaccactcaagatggactcgattggttgatatcaacctagtacggtgccatgctttgaagctggactcttttggccagtttattgaattattacccagcctagagtttatttcactggatcagatgtttcgtgaaccacccaagggttgtgctcgagttggtctgagtgcaggcacaggaattggtgtttcatcagctcttgttagcaaccagaactccaacaatgacgataataatgcccagaataacaatgccaacatccacgacaacaatcaccatcatccagatgactcagacgaggagaatgactttcggcaagatctgcagccaggagagcagcagtttgcagctgacgcattaaatgagatggaagacatcgtccaagaagatggagaggtggtggccgagagtggaaataatactccagctcacagccaggcaattattcctgtggatgttgatgaggaacaagcaggacccagtggtcttcagcgtgtagtaaaaccaaccccaattactgttcatgattcagagagtgatgatgaagaagatagtctagaactccaagaagtctggattcctaagaacggtactcggcgttactctgaacgtgaagaaaaaactggagagtcagtgcagtccagagaattgtcagtaagtggaaaaggcaagactccacttcgaaagaggtacaactcccatcagatgggccagtcgaagcagtttcccctcgaggaaagcagctgtgagaaaggctgtcaggtcaccagtgagcagatcaaagccgatatgaaagcagctagggatattcctgaaaagaaaaaaaacaaggatgtttatcccagctgcagcagcaccaccgccagcacagtgggaaactccagctcacacaacactgcttctcaaagccccgactttgtaaggacggtgaacagcggcggctcttccgagcctagccctacagaagtggatgtgtccaggcagtgtgcctgctcccccggtgggtcagaggactctgaggccatggaggagggagatgcagagagttctgtctgccccagatgctgctgtcacaggccccaggaatcccaaaggagaactagcaggtgttctgatgaggaacgtccttcaaccagccgagcctgtgttgtgaatggcccggatggtacgagatccgccttttcctttaggactctgccacaaggggggtcttcaggcccagcacatgatgagaggactaatgggagtggctctggggctacaggtgaggacaggagggggagctcccagcctgagagttgtgacgtgcagtctaatgaagactaccctcggaggcccctaaccagggccaggagcagactgtcccatgtactgctggtatctgagtcagaagtagccaaaacaaagccacgtcacgccatgaaacggaagcggacagcagataaatccactagtacaagtgatcctgtgatcgaggatgaccatgtgcaggttcttgtattaaaatccaagaatcttgttggagtcactatgaccaattgtggaatcacagatctagtgctaaaagactgtccaaagatgatgttcatccatgctaccaggtgcagggtactaaaacatttaaaggtagaaaatgcaccaattgtaaaccgatttgactatgcacagtgcaagaaactgaacatggatcaggtactagaccagatactaagaatgccacccgagagaaaccgcatcatatacctacgcccaatgcagcaggtggacactctaactttggagcagaagctatttagtggtccctacccctatcacatctgtattatccatgaattcagtaaccctcccaatgtccggaataaggtgcgcattcgcagctggatggacactatagcaaacatcaatcaagagctcattaaatatgaattcttccctgaagccactcgaagtgaagaagacttaaagaaataccccaagtacccctgggggagagaaatctatactttagaaggtgttgtggatggagctccatattccatgatttctgacttcccttggctgaggtcattacgagctgcagagcccaacagcttcgctcgatacgactttgaagacgatgaagaaagcactatctatgctcctagaaggaaaggacagctgtctgcagacatctgtatggaaacaataggagaggaaatttcagagatgcgtcagatgaagaagggtgtatttcagcgagtagtggcaatttttatccactattgtgatgtcaatggagagccagttgaagatgactacatttaattggtccctcctcctttccagctattttgtcagaaagcaagtagggccatccagctgccagagtgctccacagggacttgaggcatgcagttgggaggtcctggctcggtttgctatatagggaatatataaggaacatcgaaattgtatacaaagatttgtacataaaaaatatacaaagacgcttcctaaagtaccaactttatatcatatgtttatacaatttaatttaaaaattcattttaaggaagacagataatttgaaagacttttgtttttcttgacttaattcatgaagtatcattttttgactgagtctccatttacttcattcttaatgattattgtcatccctttaaatctgtgcctttttcttcttgagcgaagctgtttgagtaaacctgttgaaaaatgaaaaaataacccttatatt

SEQ ID NO: 121411 - DNA, 3561 bp, Homo sapiens
agcggaagtgcctcagcggtaggggccggggagcgggtctgtagcgtccctccctctcaaccacaataacaggcggagggtcggcgtaggtactttgaactcaagtaaacaaaagggaagattttctcgttgatactggagactgcacaacaatggggccacgaaagaaaagtgtgaaaacatgtatcatgaataatgaaattccagaagaaatgacagcagatgaaacaaaggactatatgaatcaactttcacatgaagtactttgccatatttttaggtacctccctctgcaggatatcatgtgtatggaatgtctttcccggaagctaaaggaagcagtgaccctatatctgcgagttgtgagagttgtagatctctgtgcagggcggtggtgggaatacatgccaagtggctttacagatgccagttttctaacactattaaagaagatgccagatgttgaacagctatatggccttcaccctcgataccttgagaggcgaagagtaaggggccatgaggcttttagcattccaggagtcctagaagctttgcaggcatgcccaaacttagtgggtgtggaaacttctcatttggagttggtagaatccatttggacatatatgccccatgttcatattttggggaaatttcgtaatcgtaatggagcttttccaattcctcctgaaaataaactgaaaattcctataggagccaaaattcaaactttacatttagttggggtgaatgttcctgaaattccttgtatcccaatgctaaggcacctttatatgaagtgggtaagactcactaaaccacagccatttaaagacttcctttgtatcagcttaagaactttcgtcatgaggaactgtgcaggacccacaaattccttgaaatatgtccctttagtaacaggcttagcctctgcccgaaacttggaacacttagaaatggttcgagttcctttccttggaggtcttatccaacatgttgttgaagacagttggagatcaggtggttttagaaatttgcacactattgttctgggagcttgcaaaaatgctcttgaagtagatcttggttacctcatcattactgctgcccgtaggttacatgaagttcggatccagccttccctaaccaaagatggtgtcttttctgccctaaagatggcagagttggagtttccccagtttgaaacccttcatctaggatatgtagatgagtttttgctacagagcagaatggctaatgcggatctggtgaagtatggtttggctgatgtggtagaaaatcctggtatcatcactgatatagggatgaaagcagtcaatgaagttttttcctgtatcaaatatctggcaatttacaattgccctcatctacacaacccatacaattggatctcagaccactcaagatggactcgattggttgatatcaacctagtacggtgccatgctttgaagctggactcttttggccagtttattgaattattacccagcctagagtttatttcactggatcagatgtttcgtgaaccacccaagggttgtgctcgagttggtctgagtgcaggcacaggaattggtgtttcatcagctcttgttagcaaccagaactccaacaatgacgataataatgcccagaataacaatgccaacatccacgacaacaatcaccatcatccagatgactcagacgaggagaatgactttcggcaagatctgcagccaggagagcagcagtttgcagctgacgcattaaatgagatggaagacatcgtccaagaagatggagaggtggtggccgagagtggaaataatactccagctcacagccaggcaattattcctgtggatgttgatgaggaacaagcaggacccagtggtcttcagcgtgtagtaaaaccaaccccaattactgttcatgattcagagagtgatgatgaagaagatagtctagaactccaagaagtctggattcctaagaacggtactcggcgttactctgaacgtgaagaaaaaactggagagtcagtgcagtccagagaattgtcagtaagtggaaaaggcaagactccacttcgaaagaggtacaactcccatcagatgggccagtcgaagcagtttcccctcgaggaaagcagctgtgagaaaggctgtcaggtcaccagtgagcagatcaaagccgatatgaaagcagctagggatattcctgaaaagaaaaaaaacaaggatgtttatcccagctgcagcagcaccaccgccagcacagtgggaaactccagctcacacaacactgcttctcaaagccccgactttgtaaggacggtgaacagcggcggctcttccgagcctagccctacagaagtggatgtgtccaggcagtgtgcctgctcccccggtgggtcagaggactctgaggccatggaggagggagatgcagagagttctgtctgccccagatgctgctgtcacaggccccaggaatcccaaaggagaactagcaggtgttctgatgaggaacgtccttcaaccagccgagcctgtgttgtgaatggcccggatggtacgagatccgccttttcctttaggactctgccacaaggggggtcttcaggcccagcacatgatgagaggactaatgggagtggctctggggctacaggtgaggacaggagggggagctcccagcctgagagttgtgacgtgcagtctaatgaagactaccctcggaggcccctaaccagggccaggagcagactgtcccatgtactgctggtatctgagtcagaagtagccaaaacaaagccacgtcacgccatgaaacggaagcggacagcagataaatccactagtacaagtgatcctgtgatcgaggatgaccatgtgcaggttcttgtattaaaatccaagaatcttgttggagtcactatgaccaattgtggaatcacagatctagtgctaaaagactgtccaaagatgatgttcatccatgctaccaggtgcagggtactaaaacatttaaaggtagaaaatgcaccaattgtaaaccgatttgactatgcacagtgcaagaaactgaacatggatcaggtactagaccagatactaagaatgccacccgagagaaaccgcatcatatacctacgcccaatgcagcaggtggacactctaactttggagcagaagctatttagtggtccctacccctatcacatctgtattatccatgaattcagtaaccctcccaatgtccggaataaggtgcgcattcgcagctggatggacactatagcaaacatcaatcaagagctcattaaatatgaattcttccctgaagccactcgaagtgaagaagacttaaagaaataccccaagtacccctgggggagagaaatctatactttagaaggtgttgtggatggagctccatattccatgatttctgacttcccttggctgaggtcattacgagctgcagagcccaacagcttcgctcgatacgactttgaagacgatgaagaaagtaattatgacctgacttgac

SEQ ID NO: 121412 - DNA, 304 bp, Homo sapiens
tctgtttgtatttaaagggagtagaattttaacctaggcaaatacattggataacaatatttaggagaaaaatattacagtggcaaaatttatttagaaagcaaatttaatgtttttcattgtttataaaatgtgttgtcatgtttctgaaaaattctgcttataatctaagttatagagtaaattaagttatggctagcagtgatgatttattttgtataatatttgatttaaatcattttaaaggggtaagaagagggacgagaagtagaaaaaataaatggatctgctaaatattcaacag

SEQ ID NO: 121413 - DNA, 448 bp, Homo sapiens
aatccttgaaggttaagctgttaatatgaaaaatagactcttgaacttataagcaaaatatagtatatttttgtgatttttttcttgtttgttcttttttatatttgtgttttaggggtgaatgttcctgaaattccttgtatcccaatgctaaggcacctttatatgaagtgggtaagactcactaaaccacagccatttaaagacttcctttgtatcagcttaagaactttcgtcatgaggaactgtgcaggtaatggtacacaattatggtggaattaaacataagttattctaaaaatatcctgaagcaaactctagctacatttgtaaatacaattatattatgctattactatttatgtcttataacatattcatcttgtgaagataaatgtactttttgttttaaagacattagaaagatgatttgtgtttgacctcagca

SEQ ID NO: 121414 - DNA, 366 bp, Homo sapiens
cacttatattaggaggaatctttgattctgatggtttttgttttactctgatatgttctctgtctttattcacaggttacatgaagttcggatccagccttccctaaccaaagatggtgtcttttctgccctaaagatggcagagttggagtttccccagtttgaaacccttcatctaggatatgtagatgagtttttgctacagagtaagatttatcccattttaattcctagaattactgtaagaaatttacttgacaaactgaaatctgaattgggttgtgccatgtctttttgaacataagacaacttaaaatcttaggtgctctcacgtcttgaaaaataaacttttaaattagaaatgtc

SEQ ID NO: 121415 - DNA, 4408 bp, Homo sapiens
agcggaagtgcctcagcggtaggggccggggagcgggtctgtagcgtccctccctctcaaccacaataacaggcggagggtcggcgtaggtactttgaactcaagtaaacaaaagggaagattttctcgttgatactggagactgcacaacaatggggccacgaaagaaaagtgtgaaaacatgtatcatgaataatgaaattccagaagaaatgacagcagatgaaacaaaggactatatgaatcaactttcacatgaagtactttgccatatttttaggtacctccctctgcaggatatcatgtgtatggaatgtctttcccggaagctaaaggaagcagtgaccctatatctgcgagttgtgagagttgtagatctctgtgcagggcggtggtgggaatacatgccaagtggctttacagatgccagttttctaacactattaaagaagatgccagatgttgaacagctatatggccttcaccctcgataccttgagaggcgaagagtaaggggccatgaggcttttagcattccaggagtcctagaagctttgcaggcatgcccaaacttagtgggtgtggaaacttctcatttggagttggtagaatccatttggacatatatgccccatgttcatattttggggaaatttcgtaatcgtaatggagcttttccaattcctcctgaaaataaactgaaaattcctataggagccaaaattcaaactttacatttagttggggtgaatgttcctgaaattccttgtatcccaatgctaaggcacctttatatgaagtgggtaagactcactaaaccacagccatttaaagacttcctttgtatcagcttaagaactttcgtcatgaggaactgtgcaggacccacaaattccttgaaatatgtccctttagtaacaggcttagcctctgcccgaaacttggaacacttagaaatggttcgagttcctttccttggaggtcttatccaacatgttgttgaagacagttggagatcaggtggttttagaaatttgcacactattgttctgggagcttgcaaaaatgctcttgaagtagatcttggttacctcatcattactgctgcccgtaggttacatgaagttcggatccagccttccctaaccaaagatggtgtcttttctgccctaaagatggcagagttggagtttccccagtttgaaacccttcatctaggatatgtagatgagtttttgctacagagcagaatggctaatgcggatctggtgaagtatggtttggctgatgtggtagaaaatcctggtatcatcactgatatagggatgaaagcagtcaatgaagttttttcctgtatcaaatatctggcaatttacaattgccctcatctacacaacccatacaattggatctcagaccactcaagatggactcgattggttgatatcaacctagtacggtgccatgctttgaagctggactcttttggccagtttattgaattattacccagcctagagtttatttcactggatcagatgtttcgtgaaccacccaagggttgtgctcgagttggtctgagtgcaggcacaggaattggtgtttcatcagctcttgttagcaaccagaactccaacaatgacgataataatgcccagaataacaatgccaacatccacgacaacaatcaccatcatccagatgactcagacgaggagaatgactttcggcaagatctgcagccaggagagcagcagtttgcagctgacgcattaaatgagatggaagacatcgtccaagaagatggagaggtggtggccgagagtggaaataatactccagctcacagccaggcaattattcctgtggatgttgatgaggaacaagcaggacccagtggtcttcagcgtgtagtaaaaccaaccccaattactgttcatgattcagagagtgatgatgaagaagatagtctagaactccaagaagtctggattcctaagaacggtactcggcgttactctgaacgtgaagaaaaaactggagagtcagtgcagtccagagaattgtcagtaagtggaaaaggcaagactccacttcgaaagaggtacaactcccatcagatgggccagtcgaagcagtttcccctcgaggaaagcagctgtgagaaaggctgtcaggtcaccagtgagcagatcaaagccgatatgaaagcagctagggatattcctgaaaagaaaaaaaacaaggatgtttatcccagctgcagcagcaccaccgccagcacagtgggaaactccagctcacacaacactgcttctcaaagccccgactttgtaaggacggtgaacagcggcggctcttccgagcctagccctacagaagtggatgtgtccaggcagtgtgcctgctcccccggtgggtcagaggactctgaggccatggaggagggagatgcagagagttctgtctgccccagatgctgctgtcacaggccccaggaatcccaaaggagaactagcaggtgttctgatgaggaacgtccttcaaccagccgagcctgtgttgtgaatggcccggatggtacgagatccgccttttcctttaggactctgccacaaggggggtcttcaggcccagcacatgatgagaggactaatgggagtggctctggggctacaggtgaggacaggagggggagctcccagcctgagagttgtgacgtgcagtctaatgaagactaccctcggaggcccctaaccagggccaggagcagactgtcccatgtactgctggtatctgagtcagaagtagccaaaacaaagccacgtcacgccatgaaacggaagcggacagcagataaatccactagtacaagtgatcctgtgatcgaggatgaccatgtgcaggttcttgtattaaaatccaagaatcttgttggagtcactatgaccaattgtggaatcacagatctagtgctaaaagactgtccaaagatgatgttcatccatgctaccaggtgcagggtactaaaacatttaaaggtagaaaatgcaccaattgtaaaccgatttgactatgcacagtgcaagaaactgaacatggatcaggtactagaccagatactaagaatgccacccgagagaaaccgcatcatatacctacgcccaatgcagcaggtggacactctaactttggagcagaagctatttagtggtccctacccctatcacatctgtattatccatgaattcagtaaccctcccaatgtccggaataaggtgcgcattcgcagctggatggacactatagcaaacatcaatcaagagctcattaaatatgaattcttccctgaagccactcgaagtgaagaagacttaaagaaataccccaagtacccctgggggagagaaatctatactttagaaggtgttgtggatggagctccatattccatgatttctgacttcccttggctgaggtcattacgagctgcagagcccaacagcttcgctcgatacgactttgaagacgatgaagaaagcactatctatgctcctagaaggaaaggacagctgtctgcagacatctgtatggaaacaataggagaggaaatttcagagatgcgtcagatgaagaagggtgtatttcagcgagtagtggcaatttttatccactattgtgatgtcaatggagagccagttgaagatgactacatttaattggtccctcctcctttccagctattttgtcagaaagcaagtagggccatccagctgccagagtgctccacagggacttgaggcatgcagttgggaggtcctggctcggtttgctatatagggaatatataaggaacatcgaaattgtatacaaagatttgtacataaaaaatatacaaagacgcttcctaaagtaccaactttatatcatatgtttatacaatttaatttaaaaattcattttaaggaagacagataatttgaaagacttttgtttttcttgacttaattcatgaagtatcattttttgactgagtctccatttacttcattcttaatgattattgtcatccctttaaatctgtgcctttttcttcttgagcgaagctgtttgagtaaacctgttgaagagtgtttgtgtcttttgtgcttttttgttgttattaaaacaccaactaaaccttatagtcaagacaaggctctatgtttctgtacaaagctgtagttctttcttagtattatagttgccatgtttcttaaaatcaagtaaaaagacttatgagcttaaaaaaaagtgagtttgagagggaaatggaaaagtttccagagtatttctagtaatttatttccacattgaattgtgtatatgctttatcttgaatataaaataaaagtttattaaaaacttt

SEQ ID NO: 121416 - DNA, 4466 bp, Homo sapiens
agcggaagtgcctcagcggtaggggccggggagcgggtctgtagcgtccctccctctcaaccacaataacaggcggagggtcggcgtaggtactttgaactcaagtaaacaaaagggaagattttctcgttgatactggagactgcacaacaatggggccacgaaagaaaagtgtgaaaacatgtatcatgaataatgaaattccagaagaaatgacagcagatgaaacaaaggactatatgaatcaactttcacatgaagtactttgccatatttttaggggtaagaagagggacgagaagtagaaaaaataaatggatctgctaaatattcaacaggtacctccctctgcaggatatcatgtgtatggaatgtctttcccggaagctaaaggaagcagtgaccctatatctgcgagttgtgagagttgtagatctctgtgcagggcggtggtgggaatacatgccaagtggctttacagatgccagttttctaacactattaaagaagatgccagatgttgaacagctatatggccttcaccctcgataccttgagaggcgaagagtaaggggccatgaggcttttagcattccaggagtcctagaagctttgcaggcatgcccaaacttagtgggtgtggaaacttctcatttggagttggtagaatccatttggacatatatgccccatgttcatattttggggaaatttcgtaatcgtaatggagcttttccaattcctcctgaaaataaactgaaaattcctataggagccaaaattcaaactttacatttagttggggtgaatgttcctgaaattccttgtatcccaatgctaaggcacctttatatgaagtgggtaagactcactaaaccacagccatttaaagacttcctttgtatcagcttaagaactttcgtcatgaggaactgtgcaggacccacaaattccttgaaatatgtccctttagtaacaggcttagcctctgcccgaaacttggaacacttagaaatggttcgagttcctttccttggaggtcttatccaacatgttgttgaagacagttggagatcaggtggttttagaaatttgcacactattgttctgggagcttgcaaaaatgctcttgaagtagatcttggttacctcatcattactgctgcccgtaggttacatgaagttcggatccagccttccctaaccaaagatggtgtcttttctgccctaaagatggcagagttggagtttccccagtttgaaacccttcatctaggatatgtagatgagtttttgctacagagcagaatggctaatgcggatctggtgaagtatggtttggctgatgtggtagaaaatcctggtatcatcactgatatagggatgaaagcagtcaatgaagttttttcctgtatcaaatatctggcaatttacaattgccctcatctacacaacccatacaattggatctcagaccactcaagatggactcgattggttgatatcaacctagtacggtgccatgctttgaagctggactcttttggccagtttattgaattattacccagcctagagtttatttcactggatcagatgtttcgtgaaccacccaagggttgtgctcgagttggtctgagtgcaggcacaggaattggtgtttcatcagctcttgttagcaaccagaactccaacaatgacgataataatgcccagaataacaatgccaacatccacgacaacaatcaccatcatccagatgactcagacgaggagaatgactttcggcaagatctgcagccaggagagcagcagtttgcagctgacgcattaaatgagatggaagacatcgtccaagaagatggagaggtggtggccgagagtggaaataatactccagctcacagccaggcaattattcctgtggatgttgatgaggaacaagcaggacccagtggtcttcagcgtgtagtaaaaccaaccccaattactgttcatgattcagagagtgatgatgaagaagatagtctagaactccaagaagtctggattcctaagaacggtactcggcgttactctgaacgtgaagaaaaaactggagagtcagtgcagtccagagaattgtcagtaagtggaaaaggcaagactccacttcgaaagaggtacaactcccatcagatgggccagtcgaagcagtttcccctcgaggaaagcagctgtgagaaaggctgtcaggtcaccagtgagcagatcaaagccgatatgaaagcagctagggatattcctgaaaagaaaaaaaacaaggatgtttatcccagctgcagcagcaccaccgccagcacagtgggaaactccagctcacacaacactgcttctcaaagccccgactttgtaaggacggtgaacagcggcggctcttccgagcctagccctacagaagtggatgtgtccaggcagtgtgcctgctcccccggtgggtcagaggactctgaggccatggaggagggagatgcagagagttctgtctgccccagatgctgctgtcacaggccccaggaatcccaaaggagaactagcaggtgttctgatgaggaacgtccttcaaccagccgagcctgtgttgtgaatggcccggatggtacgagatccgccttttcctttaggactctgccacaaggggggtcttcaggcccagcacatgatgagaggactaatgggagtggctctggggctacaggtgaggacaggagggggagctcccagcctgagagttgtgacgtgcagtctaatgaagactaccctcggaggcccctaaccagggccaggagcagactgtcccatgtactgctggtatctgagtcagaagtagccaaaacaaagccacgtcacgccatgaaacggaagcggacagcagataaatccactagtacaagtgatcctgtgatcgaggatgaccatgtgcaggttcttgtattaaaatccaagaatcttgttggagtcactatgaccaattgtggaatcacagatctagtgctaaaagactgtccaaagatgatgttcatccatgctaccaggtgcagggtactaaaacatttaaaggtagaaaatgcaccaattgtaaaccgatttgactatgcacagtgcaagaaactgaacatggatcaggtactagaccagatactaagaatgccacccgagagaaaccgcatcatatacctacgcccaatgcagcaggtggacactctaactttggagcagaagctatttagtggtccctacccctatcacatctgtattatccatgaattcagtaaccctcccaatgtccggaataaggtgcgcattcgcagctggatggacactatagcaaacatcaatcaagagctcattaaatatgaattcttccctgaagccactcgaagtgaagaagacttaaagaaataccccaagtacccctgggggagagaaatctatactttagaaggtgttgtggatggagctccatattccatgatttctgacttcccttggctgaggtcattacgagctgcagagcccaacagcttcgctcgatacgactttgaagacgatgaagaaagcactatctatgctcctagaaggaaaggacagctgtctgcagacatctgtatggaaacaataggagaggaaatttcagagatgcgtcagatgaagaagggtgtatttcagcgagtagtggcaatttttatccactattgtgatgtcaatggagagccagttgaagatgactacatttaattggtccctcctcctttccagctattttgtcagaaagcaagtagggccatccagctgccagagtgctccacagggacttgaggcatgcagttgggaggtcctggctcggtttgctatatagggaatatataaggaacatcgaaattgtatacaaagatttgtacataaaaaatatacaaagacgcttcctaaagtaccaactttatatcatatgtttatacaatttaatttaaaaattcattttaaggaagacagataatttgaaagacttttgtttttcttgacttaattcatgaagtatcattttttgactgagtctccatttacttcattcttaatgattattgtcatccctttaaatctgtgcctttttcttcttgagcgaagctgtttgagtaaacctgttgaagagtgtttgtgtcttttgtgcttttttgttgttattaaaacaccaactaaaccttatagtcaagacaaggctctatgtttctgtacaaagctgtagttctttcttagtattatagttgccatgtttcttaaaatcaagtaaaaagacttatgagcttaaaaaaaagtgagtttgagagggaaatggaaaagtttccagagtatttctagtaatttatttccacattgaattgtgtatatgctttatcttgaatataaaataaaagtttattaaaaacttt

SEQ ID NO: 121417 - DNA, 3944 bp, Homo sapiens
cctgcatattggttgattgcagactgtgagagacgtattcccatgagctcttgtatccccagcactatgctagacactaaagatgtaactatgaactaacagaatcttggagcgtgagggggcaggcagatgggagaaatgataagaggcaagggatgaggtgtgattcttagtgacatgatctagaataaaggatcctcctttacttattcccaaacccctagtttgtgaccagagagtaggcactaaagcccagtggcatgtgtttgagttagaagtgcacttttagggtatagatagatgttactaaccagtgccatgggttctaacaatgaatcttaaattctcagagtttacctttctctacacatgtccacactgggctccaagaacatcattttattgtaagggagttgagtttttaagattttgttttccttttaaatgataaagctaaaactttaccatggtatgaaccagtatgatagatccttcacttatgctttaagaatttttgccttttctcttctctaaacaattggaaataatttttcctactagctgtcccttgacttttaatataatttattattttgtacaagaagtgctaccatatgtacggaatacctaacctaaaattatacctgaacccaatgataagcagatgatacagaatgatggtagagactttttatactgactggtaagatacaaagttggtaacactccctaacacttaagaatttgactttttttttttttaattgattgctctttttaggcagaatggctaatgcggatctggtgaagtatggtttggctgatgtggtagaaaatcctggtatcatcactgatatagggatgaaagcagtcaatgaagttttttcctgtatcaaatatctggcaatttacaattgccctcatctacacaacccatacaattggatctcagaccactcaagatggactcgattggttgatatcaacctagtacggtgccatgctttgaagctggactcttttggccagtttattgaattattacccagcctagagtttatttcactggatcagatgtttcgtgaaccacccaagggttgtgctcgagttggtctgagtgcaggcacaggaattggtgtttcatcagctcttgttagcaaccagaactccaacaatgacgataataatgcccagaataacaatgccaacatccacgacaacaatcaccatcatccagatgactcagacgaggagaatgactttcggcaagatctgcagccaggagagcagcagtttgcagctgacgcattaaatgagatggaagacatcgtccaagaagatggagaggtggtggccgagagtggaaataatactccagctcacagccaggcaattattcctgtggatgttgatgaggaacaagcaggacccagtggtcttcagcgtgtagtaaaaccaaccccaattactgttcatgattcagagagtgatgatgaagaagatagtctagaactccaagaagtctggattcctaagaacggtactcggcgttactctgaacgtgaagaaaaaactggagagtcagtgcagtccagagaattgtcagtaagtggaaaaggcaagactccacttcgaaagaggtacaactcccatcagatgggccagtcgaagcagtttcccctcgaggaaagcagctgtgagaaaggctgtcaggtcaccagtgagcagatcaaagccgatatgaaagcagctagggatattcctgaaaagaaaaaaaacaaggatgtttatcccagctgcagcagcaccaccgccagcacagtgggaaactccagctcacacaacactgcttctcaaagccccgactttgtaaggacggtgaacagcggcggctcttccgagcctagccctacagaagtggatgtgtccaggcagtgtgcctgctcccccggtgggtcagaggactctgaggccatggaggagggagatgcagagagttctgtctgccccagatgctgctgtcacaggccccaggaatcccaaaggagaactagcaggtgttctgatgaggaacgtccttcaaccagccgagcctgtgttgtgaatggcccggatggtacgagatccgccttttcctttaggactctgccacaaggggggtcttcaggcccagcacatgatgagaggactaatgggagtggctctggggctacaggtgaggacaggagggggagctcccagcctgagagttgtgacgtgcagtctaatgaagactaccctcggaggcccctaaccagggccaggagcagactgtcccatgtactgctggtatctgagtcagaagtagccaaaacaaagccacgtcacgccatgaaacggaagcggacagcagataaatccactagtacaagtgatcctgtgatcgaggatgaccatgtgcaggttcttgtattaaaatccaagaatcttgttggagtcactatgaccaattgtggaatcacagatctagtgctaaaagactgtccaaagatgatgttcatccatgctaccaggtgcagggtactaaaacatttaaaggtagaaaatgcaccaattgtaaaccgatttgactatgcacagtgcaagaaactgaacatggatcaggtactagaccagatactaagaatgccacccgagagaaaccgcatcatatacctacgcccaatgcagcaggtggacactctaactttggagcagaagctatttagtggtccctacccctatcacatctgtattatccatgaattcagtaaccctcccaatgtccggaataaggtgcgcattcgcagctggatggacactatagcaaacatcaatcaagagctcattaaatatgaattcttccctgaagccactcgaagtgaagaagacttaaagaaataccccaagtacccctgggggagagaaatctatactttagaaggtgttgtggatggagctccatattccatgatttctgacttcccttggctgaggtcattacgagctgcagagcccaacagcttcgctcgatacgactttgaagacgatgaagaaagcactatctatgctcctagaaggaaaggacagctgtctgcagacatctgtatggaaacaataggagaggaaatttcagagatgcgtcagatgaagaagggtgtatttcagcgagtagtggcaatttttatccactattgtgatgtcaatggagagccagttgaagatgactacatttaattggtccctcctcctttccagctattttgtcagaaagcaagtagggccatccagctgccagagtgctccacagggacttgaggcatgcagttgggaggtcctggctcggtttgctatatagggaatatataaggaacatcgaaattgtatacaaagatttgtacataaaaaatatacaaagacgcttcctaaagtaccaactttatatcatatgtttatacaatttaatttaaaaattcattttaaggaagacagataatttgaaagacttttgtttttcttgacttaattcatgaagtatcattttttgactgagtctccatttacttcattcttaatgattattgtcatccctttaaatctgtgcctttttcttcttgagcgaagctgtttgagtaaacctgttgaagagtgtttgtgtcttttgtgcttttttgttgttattaaaacaccaactaaaccttatagtcaagacaaggctctatgtttctgtacaaagctgtagttctttcttagtattatagttgccatgtttcttaaaatcaagtaaaaagacttatgagcttaaaaaaaagtgagtttgagagggaaatggaaaagtttccagagtatttctagtaatttatttccacattgaattgtgtatatgctttatcttgaatataaaataaaagtttattaaaaacttt

SEQ ID NO: 121418 - DNA, 3679 bp, Homo sapiens
agcggaagtgcctcagcggtaggggccggggagcgggtctgtagcgtccctccctctcaaccacaataacaggcggagggtcggcgtaggtactttgaactcaagtaaacaaaagggaagattttctcgttgatactggagactgcacaacaatggggccacgaaagaaaagtgtgaaaacatgtatcatgaataatgaaattccagaagaaatgacagcagatgaaacaaaggactatatgaatcaactttcacatgaagtactttgccatatttttaggtacctccctctgcaggatatcatgtgtatggaatgtctttcccggaagctaaaggaagcagtgaccctatatctgcgagttgtgagagttgtagatctctgtgcagggcggtggtgggaatacatgccaagtggctttacagatgccagttttctaacactattaaagaagatgccagatgttgaacagctatatggccttcaccctcgataccttgagaggcgaagagtaaggggccatgaggcttttagcattccaggagtcctagaagctttgcaggcatgcccaaacttagtgggtgtggaaacttctcatttggagttggtagaatccatttggacatatatgccccatgttcatattttggggaaatttcgtaatcgtaatggagcttttccaattcctcctgaaaataaactgaaaattcctataggagccaaaattcaaactttacatttagttggggtgaatgttcctgaaattccttgtatcccaatgctaaggcacctttatatgaagtgggtaagactcactaaaccacagccatttaaagacttcctttgtatcagcttaagaactttcgtcatgaggaactgtgcaggacccacaaattccttgaaatatgtccctttagtaacaggcttagcctctgcccgaaacttggaacacttagaaatggttcgagttcctttccttggaggtcttatccaacatgttgttgaagacagttggagatcaggtggttttagaaatttgcacactattgttctgggagcttgcaaaaatgctcttgaagtagatcttggttacctcatcattactgctgcccgtaggttacatgaagttcggatccagccttccctaaccaaagatggtgtcttttctgccctaaagatggcagagttggagtttccccagtttgaaacccttcatctaggatatgtagatgagtttttgctacagagcagaatggctaatgcggatctggtgaagtatggtttggctgatgtggtagaaaatcctggtatcatcactgatatagggatgaaagcagtcaatgaagttttttcctgtatcaaatatctggcaatttacaattgccctcatctacacaacccatacaattggatctcagaccactcaagatggactcgattggttgatatcaacctagtacggtgccatgctttgaagctggactcttttggccagtttattgaattattacccagcctagagtttatttcactggatcagatgtttcgtgaaccacccaagggttgtgctcgagttggtctgagtgcaggcacaggaattggtgtttcatcagctcttgttagcaaccagaactccaacaatgacgataataatgcccagaataacaatgccaacatccacgacaacaatcaccatcatccagatgactcagacgaggagaatgactttcggcaagatctgcagccaggagagcagcagtttgcagctgacgcattaaatgagatggaagacatcgtccaagaagatggagaggtggtggccgagagtggaaataatactccagctcacagccaggcaattattcctgtggatgttgatgaggaacaagcaggacccagtggtcttcagcgtgtagtaaaaccaaccccaattactgttcatgattcagagagtgatgatgaagaagatagtctagaactccaagaagtctggattcctaagaacggtactcggcgttactctgaacgtgaagaaaaaactggagagtcagtgcagtccagagaattgtcagtaagtgaagtagccaaaacaaagccacgtcacgccatgaaacggaagcggacagcagataaatccactagtacaagtgatcctgtgatcgaggatgaccatgtgcaggttcttgtattaaaatccaagaatcttgttggagtcactatgaccaattgtggaatcacagatctagtgctaaaagactgtccaaagatgatgttcatccatgctaccaggtgcagggtactaaaacatttaaaggtagaaaatgcaccaattgtaaaccgatttgactatgcacagtgcaagaaactgaacatggatcaggtactagaccagatactaagaatgccacccgagagaaaccgcatcatatacctacgcccaatgcagcaggtggacactctaactttggagcagaagctatttagtggtccctacccctatcacatctgtattatccatgaattcagtaaccctcccaatgtccggaataaggtgcgcattcgcagctggatggacactatagcaaacatcaatcaagagctcattaaatatgaattcttccctgaagccactcgaagtgaagaagacttaaagaaataccccaagtacccctgggggagagaaatctatactttagaaggtgttgtggatggagctccatattccatgatttctgacttcccttggctgaggtcattacgagctgcagagcccaacagcttcgctcgatacgactttgaagacgatgaagaaagcactatctatgctcctagaaggaaaggacagctgtctgcagacatctgtatggaaacaataggagaggaaatttcagagatgcgtcagatgaagaagggtgtatttcagcgagtagtggcaatttttatccactattgtgatgtcaatggagagccagttgaagatgactacatttaattggtccctcctcctttccagctattttgtcagaaagcaagtagggccatccagctgccagagtgctccacagggacttgaggcatgcagttgggaggtcctggctcggtttgctatatagggaatatataaggaacatcgaaattgtatacaaagatttgtacataaaaaatatacaaagacgcttcctaaagtaccaactttatatcatatgtttatacaatttaatttaaaaattcattttaaggaagacagataatttgaaagacttttgtttttcttgacttaattcatgaagtatcattttttgactgagtctccatttacttcattcttaatgattattgtcatccctttaaatctgtgcctttttcttcttgagcgaagctgtttgagtaaacctgttgaagagtgtttgtgtcttttgtgcttttttgttgttattaaaacaccaactaaaccttatagtcaagacaaggctctatgtttctgtacaaagctgtagttctttcttagtattatagttgccatgtttcttaaaatcaagtaaaaagacttatgagcttaaaaaaaagtgagtttgagagggaaatggaaaagtttccagagtatttctagtaatttatttccacattgaattgtgtatatgctttatcttgaatataaaataaaagtttattaaaaacttt

SEQ ID NO: 121419 - DNA, 446 bp, Homo sapiens
agtggtagcattgaagctgggcgtggtgaatgggctgcatttcaacagtcagttgttgaggaaggagcatttctagctcccccatgacctttcttctgggggcttctcctccctcaccccctgatatggtttggatctgtgtccccacccaaatctcatgtcaattggtaatctccaatgttggaggcggggcctggtgggaggtgattggattatgaggtgattctctggtttaacaccatcccccttggtgctgtcatggagagaatgagttatcaagagatctggttgttgaaaagtgtgtggcacctccctactttctctctcttcctcctgcagctcgcccaactcaggggcgagctgcctctgtagccgcttgttctgttccttctcccggttctcggctgcaatgcgctgatcccgctcctcagtcagcttctccatgt

SEQ ID NO: 121420 - DNA, 101 bp, Homo sapiens
ggagtatgagtgaagaactcagatatgcagactttcagggctggaaagaatcttaagagatgatccaggaaagctctatctcacagatgagaaaaccaagt

SEQ ID NO: 121421 - DNA, 447 bp, Homo sapiens
tatcattctttgcaagaaatgctagaaggagtctttcaggttgaaacgctgaacactataaacttctttaaaagaacactaagcatcttacaacttgaagttgtaagaagaaatagagatctccagtaaaggtaaatacatggacagttataaaatctagtatattctaatgatggtttgtaactctttttattttctacatgattaaaaagacagatccattaacaactgctaatattgggtgcacaacgtataaagatgtaatttgtgatgtcagtaacagtaagggagacagcagtacaggagcagagttctgtatgttattcaaattaggttgatataaattcgatttaggttgttgtaatgttaggatgtcaagtgtaatccccgtgtcactataaaaaatgaactaaacacgaaaggcagtaatggaggaaatgaggaacc

SEQ ID NO: 121422 - DNA, 150 bp, Homo sapiens
ggagatcctgtgtcctacaaaagaccccttgagggagaccagccccctagagctccgtgggtctaccagggatggttttggcagcctgtccctcaccctttcagggccctcaggatggaaggaaggtctcccccaaggggatgccttcca

SEQ ID NO: 121423 - DNA, 423 bp, Homo sapiens
ttcatccccactctcatctaaatggccatcagtcctattgattatatctctgaaatgtttccacagtagtcataactgatgttatttatgctaagcacttcacatacacgtacacacacacacaccacacacacaaacacacacatgcaacctaattaatctacagacaacagtccattttaaaggtaaagaaacagaggcatgtagaacttaagtagctttcccaaggtgacacggcagtaagcagcagagtcagagtctgaacccagttgtgtgactccaaggcttgtgaggccagcccctttgctgctatgctgcacattgaaatccatggtctaatttccacttttttgctgctgtagtttaaaattcaggttctttgtgtgatcattttcactcttaagaagtaccatacacatgagg

SEQ ID NO: 121424 - DNA, 567 bp, Homo sapiens
gtgtgtatttctgtctttcaatttccaagtacaaggtctcatttaaaaaattactgtcaaagaagtattgaagatggattgttacgaatataaggggaaagtgataaaaacagtgttcagaagagagatgataaggacatgagtcaaggcagtagctggggagaatagggaggggaaagagcatagaagagccattatttaattagaagcggtaggtcttggtgactagttatgaggaggtgtgaggtgaagtgaggtgtcaaggttaatgtacatatttctagtttaggtaactcagtggctggtgttatcttcaattgagatggtgaatactaggagtgaaatgtgggtttgggtagaaagttaaattctttttttttttttttaattcaagagacatgccccttgccatattatctgggctgggtttgaactcctgggttcaagagatcctcccatttcagcctcctgagtggctgggactataggtacatgccaccatgcccagccgagtagtttttgacatgcacggtttgcgatgtctttgagtcaggtttataggacttg

SEQ ID NO: 121425 - DNA, 212 bp, Homo sapiens
ttcatttgaaacctattatcagccttatgaccataccaagttgtgccagtcatttaaaatttttagtttttcattattcaacatacattgatatacagcctaacatgcatgtctatgagaaagtggtaggagaaagctctcagctgatttttgtgcaactgaatgaccattaatgcttggcaatcttcccaactgaatctgactcaagtaga

SEQ ID NO: 121426 - DNA, 137 bp, Homo sapiens
atgccactgttaagtgaattaattacataagcataacagtctactgctattttctactcttattgtctaagaagtttgaagtttaaataaaacagggataaatcagaaaattaatgctgttgtccatcagtaaaata

SEQ ID NO: 121427 - DNA, 445 bp, Homo sapiens
cttctagctccaggtggtaaattctgctcagaaccctggccagatcatgctgccccctcttctgctctcagtcctgctttgcagcaggaactatgggaggatgccagtgtgtccagttcgtgtctgttcacctcacacatgacagaaattgctccattacacttctctgcccctgagaccaggtggggtgatgcagtcctacttaagacaacttggaggcacaagagcacaaaccaatcctgaatgtgctttgccctaattttaccaataaagaaactgagattttgaatgttcataaaacttgtctaaggtcacatagcatgtcaatgcgaatctaataaggagaacctgtactccagttctgggctctctttgttgtgctgttgtaatatctgtgacctaggatcgatggggcccagttctctaccacattgaaatatcctcg

SEQ ID NO: 121428 - DNA, 333 bp, Homo sapiens
agtttatagccaatcacttcctctaataattcagactcatgtaaccaactgtttggggggcatctccacctggacatacacaggcacctcaatccaaatgcatcgcaaactgaatccactatcttcaactcaccaattcccattttaaggaatggcagtatcatccacccagtaccacaaatcctctccctttctccaaaccttccatcagttaccaagccctgccatgttttatctcctcataagtctcaaattcagcccctgcttgaaacccttctaccacagccttagttcaacagctcattagctctcacttcaactattgaaaaagct

SEQ ID NO: 121429 - DNA, 324 bp, Homo sapiens
atattatctctttgcttgtaggaagccctgagatttgcaaccctctacactatcgacattggacattatggcatgcattcttaacatttgaactgtgccccgacttcatcttgcttttttactgttgttttccctcaattctgatttcgttaactaatctttgttctcttgtatcatatatatttctataaatggtttcaaattattttgagaatgaaaatggctattaatgcataaatacacacagtggattttaacccaaaccctttacgacactagtcctgtaaaaagacaatgtggcctcagacagacctgggctggaat

SEQ ID NO: 121430 - DNA, 758 bp, Homo sapiens
ccaccaactggggtagatttattagttactttaccattatcacacatattttatactgagataaatacagtattctgtattagtgctagtttgtcacaaatctccattaatgcgctttcaacttcgtgccagtaaatggttaaaaggatctatgaaaactgtggattatatctcgaaggtaacttagtaaggatctttgctaatgatatgtaattacatgactaaattatttccttagtatattaagctttctacaaatactagcacattctttgttccaggtcagtgtttttcttataaatatcacaatgttaattttgaaaagtaatactttcaataggcatatttcaggtattgtgtgtactttttaatcatcagaaattcccaggcgcatatgttaaaatatttgtcttcctttgaaaaaggaattgtatgctcaaatgctcttgagtttatcataaacaaaataaataacaataatttttaataaattccctagctaatgaatggaaagggggacataatttttaaaattccatcaatatttgagaccactatgaatgcagtcaacaagaatttctaaattgttattggacgttgtccatacattaacttcttccgagataaaagctattgtcatagtaataaaattacctaactaaattaaatagactaggtgatgtgttgtcaaatgagaaaatagtcaattacttaagagcaacttattttaaaaaattatttttgtaggtaaaataatc

SEQ ID NO: 121431 - DNA, 442 bp, Homo sapiens
ttgaaatatatactaccaataaaataactcattctctttcattagttaacattacagtgtacagaaaagcattatgatgtagaaaattcaaattcggcctcccaaagtgctgggattacaggcgttagctgccgcgccggccaaaattattccataaatttatccataaaaattccacataaattttctggagtttgattatgtattaggcttgttgggaaatttattacccttgtgaagaattttgtagctaagtagcttgagggttttttttttttttttttcactcaggaaagacatggtatgtatgcatcactgctattctatttgaagcttttggaatttttatttatggggtgtggatagaggctggaggcagagactgaggtcagagaagaggtagtagaaaagaaggtggcccactaccatatttccagtgtat

SEQ ID NO: 121432 - DNA, 405 bp, Homo sapiens
attgttataggagacaaaggaggacattacatactgagaaaatggaaaattactcaagacttcgcaatggaaatgtatacacaccaaaatatagagccccagaatataagaaaatatactgacagaattggagtgagaaagacagttctacaataatacttagggacttcaataacttactttcagtaatgggtagagtcaaagaagaaatgaaaacagaaacttaaaaatatcttcagacaaatgacagtgggaacacaacataccaaaagcaaaacatgcagcaaaagcagttctaagagggaagtttacagcaataaatgccttgcctacattaaaaaagaagagatatttcaaatagcccaaaattgtacctcaaggaattagaaaaagaagaacaaacta

SEQ ID NO: 121433 - DNA, 258 bp, Homo sapiens
cagagatgaggagggaccatctattttgggctactagggttggcataacagcatctttaaggcaacaggacacaggcattgtgggagggaagcagctaacatttagcttttactctgtggacttagcgtgtattttctcctttaatcctttccacaaccctgggaagttgctactatcactgttcccatttttactgatgaaaaatatgaagctggaagaggtgaagaaagtggatcaaagctgtatctttacattgc

SEQ ID NO: 121434 - DNA, 472 bp, Homo sapiens
aaactgcttcggaaattcatttgtgtgtatgtaaataacacaacatagaaacaggaagggaaaaaagtctgcagtaatgcacgtattttttttctttcctgtttattttcggttttgctttaagtccttttatttttaattccctttttgtttttctttttgggttttggttccttttgggtttatgggtgccctgatactccagcagagatcagaaggctacagatccattctatccatccgttatgtggctttgccatcccagcttggagtgtctttacaaagataataacagttgtgttctttgctctcgttttggatgcatagactgaaaaattaaaacaaataacttgtaaaatggcttgttaaaaaatacaattacctctaattagtagtacgcgtaaatgttttacagaatgaaaggcgtgctttttattttcttacttcgttacattggtggcgaaagaagtct

SEQ ID NO: 121435 - DNA, 307 bp, Homo sapiens
ctgccccgggaactggaatgaatgactctcaggtaccaaattaagccccagcacgaggactctgggctggttatgttttccttcctcgcttatgtgtgtggcctcaaaggcactgctaaccataaagcatgcaagttcaaggggaaggggattcctcaacaccaaccctgaaagctgcgggcaccagagatgagtttgttctcacctggagcagcagtgacttaacaagagacaaggataggctcagtcgtccccactccaccctagcacgaccagccagcctcagcataccttctatgcacttaag

SEQ ID NO: 121436 - DNA, 411 bp, Homo sapiens
atccctcttcatcccacgatcacagccatgctgcctgatacaaggaggcttaaagcagttgttgctcctgaaccaggaatgagaagtgtttcaagggcaagaagcacaaggttgagcccaagagagagaataaagaagagctgttgtcagatagaaaaaagtgaagaggtacaagtcctctacctgaagaaagttacagtgacaacggaaaatgccaggtttgaggctgttgctgtcatctgagaggtatgtattaattacttcatagagtaacttgtccaaggcatagctgaaaatatagttgaaccagaatttgaactcggccatctggctccaaagcttatactatatgagaatttagttttatttggaagtagggttgtgctgtttctacacatcaaagttaataag

SEQ ID NO: 121437 - DNA, 932 bp, Homo sapiens
taatccaatttattttggtagcattcagctcaattaagggatacaatgttacttaaaatagtctaattagatgaaactccactatggtactcatctttcaatgtctgaaatataaccatgcattaggctgcaagaggtgaatactgttaactccagcctccatgtgtctgtccagtctatgagctacactgctatttccaacactgacctatatacagcaacatgccatccgttctggctgtttgtgtaagagatgcctcacacacttgccttaaccaacatcattcgcattgttcccacaatgggctatgtgaaaatggaggctactttgcatagtgatatgttcataacgtgtattagtcttacagtagagcaatactagattaaaccgtttccaaaaatgcctcctccagagtttattaactgaaaaatgtaagtagcattttggcaatctatagagcagcagtgccggaaagtgtcagcagagtaaaacaatcacattttagtttagaaagcttcaggaagagaatattcattttctccattagagtctcttctgacattgaaaaaaatgtcaccgggaaactgtagctacagttgtaggattctaaagcacagatagatactggttccgctgggatttagcacaccaactttaaataagcaaagtgttgacaggtttaaaataaagataattagtaatttatgatcttatcaccctattaaaaacaaatcacctgacaaactgactgctatttgtagtaagctacatattcattacgctccgaaggaagcaagatttacttgcagtattgttcttttggggatgtctgatccaacttgttttaataaatgtaggcacagatttcttacttcaccttttccaaacttctgtccttcttccatttccctgcaaatccactcatgtcatt

SEQ ID NO: 121438 - DNA, 823 bp, Homo sapiens
atcatatagagcttcttaaccttttttatgacattaaccccttctcaagataagagaagttttaatatttaaataaataaaatgtgtaggattacaaagaaaacaaattatattgaaatatagctcaggtaaagaaccccagaacccttcattatacagatgaagaaactgaaacccagaaaagctgcgatttgtccctttgagcactctaatctgatagtcttctctgtctacatggaccataatgtcatctttaactggtttttttttaggcccttgtcctgattggataaacaagataatatttcttatgatttagaatgcaatgtgtaaatttcagactttgctacttatttgcaaacttcatttagataaaaattaaactgggtgattgttttacctctgtttagctctgtctctctttttccttcttacaagtgccttgaatacaaagtcttgttagaccaaaaataaaatctctgtggcgcacacctgtagtcccatctactctggaggctgaggtgggaggatcacttaagcccaagagttggaggctgcagtgagctatgatcgttccactgcactccagtctgggcaacagagtgagacttcaactcaacaaaacaaaatgaaaacaacaaaaacaaagcaaaagttaactccctaatcttcagtctctctagtggtgccacaatgattttattataattcaaatttgtgcagtccactttagggttaaaatccttcatcattttccctaaagctggggaaaaaaagacctgattctagagcactccaggcccttcatgtgggaccctggctg

SEQ ID NO: 121439 - DNA, 242 bp, Homo sapiens
cgctcatatgcctcaggtgctcccaggccatctggaaagtggcttgaattccaacccagatgagttcatcctggttctagagtttcttccccagacttcaccaaacctctgtgataccccagaagtaattggcctcccaaattgggccattctgggatggtactgaaccttctacaatggtgggagaactgattcaacatgtcccaggcccggagtgctagagtggctacacggtggaagag

SEQ ID NO: 121440 - DNA, 465 bp, Homo sapiens
tttttaaatgagagaaaaatatacccttaggtgtttgactattatcaggtccctattaacagctaaataaaattcccaagtaaaataatagtgtaggatggatatccccctaaccctcaactccatattccatacatccagtaaatatttgagttcaccatgtgccagatatttctttccctagatttctccatttctgcttaagagaccatcattctccattctcaccatctgcttaagaacccatgtgaggtttagtgagcaagagtgtaatgtgagaacagttgacgtgcttgtacattttggtccagctatcttcggctgcatgagttcaggtataaagtaagtgaagagatgtctgagctcctgatctactgagagctactgagaccagaaatcttagccttccccttaaatgccttctcaccctaatctgcacatccagttagttgtcaaagcctgtca

SEQ ID NO: 121441 - DNA, 705 bp, Homo sapiens
cacacgggacacgcatgaattagcataacggcactcacgaatgatttggcatgggattgtcgaatcccctgtgctaaattgttatcctcaagtcagcatggtcttcacagaccccctacaggggaaggagagagaaaacactctgactgcctgacttctttttttttcccccaagatggagtctcgctctgtaacccaggctggagtgcagtggcatgatctcggctcactgtaacctccacctcccaggttcaagtgatcctcttgccttggcctcccaaagtaggattttcttaaatcatgttaaatcatgtgccagtgggttatactgtctatgaacttcatttcaggagaacagagagaactttcccagaactgacattcaagccagcacacgccctggtatggccacgccagtggttaagacagcaaaacactaaattatggattatttactcattcataaacggtcactgccatgaaccccctgactattagtatcctcctagctctccctggggatcccctgggctgccctctggcccagaagtccaggggttaaactgggtatagtgggagataagagggacccatatcccggatgttggatggactgatgactttgccaagcagtaaatattttgtctatcagccctacatgttacaaaatatttgctatgaacaatagtggcatgtaaagacctg

SEQ ID NO: 121442 - DNA, 461 bp, Homo sapiens
cctgttacttcatcgccggcttcctttgctctgaccattgggctcctgtgccaggctcaacgtatcagcagagccaggctatgcacatgctgactgacctcactggtgacttctgcagtgtcagcaatgggtaatgacgccaagagagcagattctcagccatgataggggccacactgtagccccaccctaggagagtggcaccctgcacctctatatcacccctgggttcctttccatcattcagtccctgctctgatgcaaaggtaggaggctgtgaactccgaatccaagcctgctgtctgctaggcctgcgtgctgtcctccttggcaggttttggaaatggggaatgacttgagccagagcctcctccctgaattatgggcaatgtagcaggtcagggctctctgcctgccccagtacccagtctgtgcctctccaaacccttagccatgttgtg

SEQ ID NO: 121443 - DNA, 364 bp, Homo sapiens
gtttgatcttgacaatgcacctgaatgcctgagactgcctcacttgctgctgtgcctcagaacagggggctgttcctgttggatgggaaaaatagaaacacaaatgtcccaggtgcccactccagatgtgtggcacataagaaaaactcgaaggctaggatgtgcctggaggagaggcaggagggcagtggtgtgttgcccagacactctctgggcatgaacaaagtgaagtagacacccaaaggaagccccctaacccatctcaccctttgccctcctccttaagaatgtaatttcttcaaaggagacaaaacaaagtgtttagatctcaaagatgagagaatccatctgagggggcctgcac

SEQ ID NO: 121444 - DNA, 581 bp, Homo sapiens
agccatctcattcttcagtgatactaggactgtggtaaggtatatggatccatatacatttttctgtgatttagtcatagtctgcctaggcctggtcttttcattcttgattctgtgtcactggccacatgtttcatgtgatgtttcactatacagtgccagcttctgtatgcatcccttttgtgcctatattatggagaactataagaatacatacctaaggattagtttactagtaatggaacaagaaattgccaaggtggcttttggcgtgagattgcttgactttttccccttgattgtgacgtatttaaaatgttgttagctatacagatattgaagcaggccctcatttctttggtaagaatattggcaattgctctgtgatatctgaacattttactaactgtcatttttatagtacttttcttaaaaattaaaaaaatcctttatagcaaccatgatgggtagtggtaatggcactttttaagtcgttttagcttataaagtgctttcacacgtgttatcttatttgatccttgtataaaaagccccatgatatccaaagtgattaagatctt

SEQ ID NO: 121445 - DNA, 356 bp, Homo sapiens
caaatgagtattcttaacattttactaaattaaaaaaacttatgtgctgagttttttattttacaagtatctccaagtatgctggatgattgcaaagaaaatcaaggccagtcattggttaaatgagtttaatagtagccacataatttcaaaagcaaaattataaagacccttcccagactgttgatagcaaaaataatctacgttgtggaaagtgggtccatgttaatatgttagatataagtagtgaggcctaaaaaggtattaaaacatctttgcttaaggtactacctatttgcaagattgttattttaaaaatagcttatgttttaaattgttattgctttttatcactc

SEQ ID NO: 121446 - DNA, 392 bp, Homo sapiens
gtacagtctgctggattgtgagccatataatctttatttctttataaattatccactcaggtattcctctatatgcaaaatgattaatacggtctgcaatgtcgtctaggctttgttttcttgttgattttttaatctgaattttctatttattattaaaaatggggtattgatgtctacaattatattctatgtatttcttgctttacttttgtcaatatttgctttatatattttggagaccttatgttatatatacatatacatacagataggtagatggatataatcattatagatttgtggtaaatcaacctattttatgagtatgtaatatcagtgtttgtctcatgttagcacttgacttaaaacatatctaatacacaattgta

SEQ ID NO: 121447 - DNA, 321 bp, Homo sapiens
aaaacatgtatggttgaagaaggttgtaccatattgaaaatggggtaaggtatgaaaacatttatatagaaagaatgctaagacctggccttcttctcttcagctccgagatattccacagccaagcatacatcctctaaatcatagactctaacaagagcaagagaaagacaaaagacactaacgtgagcatttctcacaaaattcttcagccagataagcctacattaaagtccttggaaggcaaaccacagacatttgtttacaaataccaagtagtatttcagggaccactatcaaatacgagagaacatcccagaa

SEQ ID NO: 121448 - DNA, 368 bp, Homo sapiens
gtaacataattaattttcaattcatgtggactactagctttaaaatgatgagattcttgaagagtttttaatttgggatgtttcacattattttaaattttgtacagagactttatgactgcatttaatagtgtgttatttcaaatttaaagttccacattttgcatggaattttgccacatcacatttcataggcaaaattatcctctagtagttgaatactcagggaagcatataccctcattctctcttttgggcctattggcacccagggaaattaatgagttaatctattttcttaaataccagggagagattgaacattatttaatctgtgggctcaaaatggccttaaagttcctgcattt

SEQ ID NO: 121449 - DNA, 370 bp, Homo sapiens
tgaccactcggtggagttccactatgtaaatcaaacacaggccatgtatgtatgttgtatgctgcccactaacaaatgtaaggccatcttacctcaagtactcaaatatctaatactgtcagcttgctgctgcaacttgtttttcaaaagacttcatcttccaacaatgaatgtcattagcattagatgtatcacacatcacatttgctaaatttggtacctgaaatgtgacttctagtattacagtatttgtagggaaaaaaaagtatctcggccgggcgcagtggctcacgcctgtaatcccagcactttgggaggccaaggcggatggatcacaaggtcaggagatcgagaccatcctggctaacat

SEQ ID NO: 121450 - DNA, 410 bp, Homo sapiens
tgtgcgtgcgtagtggtgggggggaatctctggcaaaacttcccctaggtcagtcactgaccctggcacatcatgtggcctctctgggcttaagtttcttttggatgtgttggagtctggggtacagcaggagtctccttcagccttataatctggccttagctaaggctctgtctttgccagtaacttactgctctattctacttaactcatgacttctatctcatagtccaagatggctgcctgagatccagctatcacaactgtttttcacccagctagaaggaggagggggtaaagagaacacctctctttttgagaacacaacctgggaattgtgctcaacactctttttccaagtcactggccaatacctagtctaagggctacatctagcttcaagggagact

SEQ ID NO: 121451 - DNA, 520 bp, Homo sapiens
cacagactcattttttgctttattttctcccaatattcatttgaagttcagctgcatgagtgttgtctgaaatgaaatgtcagaggctacacttggatgctattaaatgtttgtgttgtttcacaattcatattcaaaacttagaagatattcctgtagagttgcataaaaattgacacatttgcagaccatattttgacaaagccgtaccttatgtactccatgattgccagaattgcagttaaacttggtttggtttatatattggaaaaaattttaaaaatcatagttccttattatagaatcatatagatctgtttgattttccttattttcttctgctttaatctttctctattttacaaataacttcaaatatttttcaaattgtttagaattctctgaagtgaataaaaggtgtattgtgcaaattatgtgttcttaaaagatgtttagatatttcttaagagattaacactaatttctacttatatatttaaataaattttatttaaatatc

SEQ ID NO: 121452 - DNA, 384 bp, Homo sapiens
acgctacacagccataaaaaacaaatccatgcccttaccagaaacacggacagagccgtagtccattatgaacaaaaggcaagaacagaaaaccaaaattttcaaaacagctacaaaggtcaattgtgaatattctctccacagagaaatcataactctggagctcacagagatgctagacactgcaacttcattatgatgccacttttacatagatcaaattgtcccttacagcagctggttatacacacatactctacggcaatgaaattgctatcccattctggtaacattcattctcagtggagtgagatgatatctgagtgtggttttgacttctcgtgaggatcagtaatgttgattcagaatcttttacctgtgcat

SEQ ID NO: 121453 - DNA, 467 bp, Homo sapiens
atgaaatcccactggagtgcaatccagttgcaggaaggagcacataacgttatgctgagtgacacgtttcatttgtgtagtactctatgtggggggacattcatacatacattgatatgctatttcattgcatatcaactccatgaaacgggaattattctctgctattttaatgatgatgaaattaaggatgaatgtgattaaattagttgtgcaaaattaaagaagggactagatcttgaaatcaggtttcatggccccaggatcagtgctgtttcctccacagttatctcaaaatatccaactatagtgaactaaagaaggataatatttagaaatcaaagaaaaattaagtactctaaatatttgttaaagttgtctgagatttcagcatgagtagagattactttgtagaaacaagggtcataaaagcagaatctgtctataagaaattgaagcagcttatt

SEQ ID NO: 121454 - DNA, 932 bp, Homo sapiens
tgggagacctgcagagagtgtgggtgctagagccttctgcagggctcaggacacattccccgacacacccaggccaataatttgcactgggatacagagaggaggctcggggcctctgtcaacagattgccatccacttagatgagtaaatggtgctggccccgtggtgtggtgacatctgtctgtctgtctggtctagcatccagcacagtcctgggcacatgaattggtgctgatgctgctgaaggagtgaatgcaggccagaaggaaggagtgctggggaagaagtgagccatggagcaggcaggaaccacggacagaggcctcccagttcactcggggacatatccgcagatgtgagaactcagagagatgttcaagtttcctaagagggcttcaatcatggctcacagactactaatttccagtttcttctctaccagtctggatgcccatggtgaactttagagatatccatcagctccatcaattccctcaactacatctacctagcttttgagcccagaagaacccaatcatgtgtgttctcctcagctcccaggctgctgagcaatgctggagaaaaatcacaaaactatacagtttggtatctctccagaattatggtttccagcttgagttggaaattcagaattacttcaaaatgtttaaatttgtttctggtcagtttcctccttcatttcccagtttcatttatcactctatttaacttgttacccatcgctgtctgctattaaccttgcctccttttacacgagaaaacagaggccatcaaatggcatttcccatcactccatcactccacctctgtcaatgaatccaccagtaacatctcagagatccttctgtctagcactgatgatcttattgtatcagttactccttcttccttttgtattttcaatgctcct

SEQ ID NO: 121455 - DNA, 886 bp, Homo sapiens
tgggagacctgcagagagtgtgggtgctagagccttctgcagggctcaggacacattccccgacacacccaggccaataatttgcactgggatacagagaggaggctcggggcctctgtcaacagattgccatccacttagatgagtaaatggcatccagcacagtcctgggcacatgaattggtgctgatgctgctgaaggagtgaatgcaggccagaaggaaggagtgctggggaagaagtgagccatggagcaggcaggaaccacggacagaggcctcccagttcactcggggacatatccgcagatgtgagaactcagagagatgttcaagtttcctaagagggcttcaatcatggctcacagactactaatttccagtttcttctctaccagtctggatgcccatggtgaactttagagatatccatcagctccatcaattccctcaactacatctacctagcttttgagcccagaagaacccaatcatgtgtgttctcctcagctcccaggctgctgagcaatgctggagaaaaatcacaaaactatacagtttggtatctctccagaattatggtttccagcttgagttggaaattcagaattacttcaaaatgtttaaatttgtttctggtcagtttcctccttcatttcccagtttcatttatcactctatttaacttgttacccatcgctgtctgctattaaccttgcctccttttacacgagaaaacagaggccatcaaatggcatttcccatcactccatcactccacctctgtcaatgaatccaccagtaacatctcagagatccttctgtctagcactgatgatcttattgtatcagttactccttcttccttttgtattttcaatgctcct

SEQ ID NO: 121456 - DNA, 318 bp, Homo sapiens
acgtgctaaaagccactaagaagccaagcagagtgagaaatgaagacctccactgggtcttgcaagaggggaggcctttgaggacctcacctgagagctgatgaatgaagtgatggctggaagcagctctggagagggaggaatactgtggggaggggaggaactgaagaagtagagaagcatggctgtgcacaggggaggtgggatggcagccagggaggagcagaggtggaatgtggatcttgttttccccaacagagatagaggggggctaaaagtccatggaagggactctgctgagagggaagggtggatcca

SEQ ID NO: 121457 - DNA, 408 bp, Homo sapiens
gtgaacagatggacaagattactagggcatgagcccactgcccaggggaacttagatgactccatgggaagttcagtatccccagggggaggaaaaagaagagagaagatgctcccagcagctccttttccacaagggatcagactcagggacctctcttttggaggcaaataagcatagatgctgttcctttgggcagctcctctatacacagctgaggtcaagtaattgtaaatattttgagattaattcacaaacaacgtcacagccaaatagcacttatcctacttattgaaaaaaaaaattgaggaacagggagacagtcaccgactagggtcacacaagtcaaaggtgtcagattagagtcacacgaggtctctctgcagccacagctgcctcttctccacc

SEQ ID NO: 121458 - DNA, 248 bp, Homo sapiens
aatgcacattaaaaaccgcagaggttaccagctgggccttgggcacagcagcatgcggtgaggagaaacaagagaggtgaaggaaagaaagattagcctgaagggtattagcatctggtcacacggaagggaaaaggtcgtacttgggtcaactatttatagacagaagaaacaaggtccagtctccagagccagggacctggtgatcagaggtcaggggtcactagaaagatctctgggaaaagtat

SEQ ID NO: 121459 - DNA, 241 bp, Homo sapiens
ccctgtcctaatgatgcctctggcagcacatgacagggatgtcacctgtagcccttttgagacacattcctcttggggtcctgggacccaacacttggtttcctccctgctctgactgttcgttactgtcacatctttggagtcctacagctccctgggcctcttctctccatcccagccctggccttccacgcctggcatgtctgggattggatccgtctcccccatggtgcaggcccac

SEQ ID NO: 121460 - DNA, 456 bp, Homo sapiens
aatatctcttaaataaaatttctcttgtctttgagctctgttttttaactttcctgtatttgataaagatcttctctaggttaccccaagtttggaaatgctggagctacctgtgactcatatatctgttttactgacgaaaccctggattttgtcctaaaaactgacttgttaatctttactcatcttttgatgatgttattgttatttgacttaattcattgttcgcttttcctctgggttttattaatacattcaggttcagttcaagacatttttttcatgcaattttgcctgatttatgcccttgctcttcctcttctctaaccttcaacaatggttgatttctaccaaaagacaccattaaattgttgcctgccttatgatgtttgatgttgtgtgcacacaatataatcttcctgctgaaataaaagctcctagagttcaaaaaaaaac

SEQ ID NO: 121461 - DNA, 631 bp, Homo sapiens
aaaaaaaaaaattagccgggcctggtggcgggcgcctgtaatcccagctactgtggaggctgaagcacaagaatcacttgaacccgggagatggaggttgcagtgagctgagactgtgccactgcactccagcctgggtgacaagagtgagactttgtctcaaaaaaaaaaaaatccttttgtttatgttcacatagacaatggcagaaggaggggacattcctgtcataggaacatgcttatataaacatagtcacctgtccttgactatcaccagggctgtcagttgattctgggctcctggggcccaaggagtgttaagttttgaggcatgtgccataggtgatgtgtcctgctaacacacagatgctgctccaaaaagtcagttgatatgacacagtcacagacagaacagtcagcagcccaagaaaggtcctcacggctgctgtgctgggtagcacttgccatccagtttctagagtgatgaaatgctctgtctgtaccgttcaatacagtaggcactggcactagccacatgtgccagctaagcacttgaaatgtggccagtgcaataaggaattgaacttttaattgcatttaataaactgtatgtaaatagtcaaaaaagtca

SEQ ID NO: 121462 - DNA, 632 bp, Homo sapiens
aaatataaggaagatgagggtcagctaatacataagcacaagtcttcaactatgtaatttttttggcttcagacaaagggcttggattaccaaggttgaaacataaaatgagtttttctcagtatacaaatttcatagaccagtactagaaataagcatagattctagagtgccaccaagaccctttatttatctatataccactcatcccccacgtgttaggttaagatcccctcgaccgtgctagtcactctttctcagcctagttttgcatttattttctgcaatctgtcttcagcctcacctcctacctccttccttcactttgggctccatgatccagccatgccctacgaattacagttctctaaatactctaaattttgttttatcagataaggatccaacatctgtgcctgttcaaacttgaggacagagtttttatggtctccagctctgaagtacagatctgccaagcttcccaataggtccacgttatctcgcaataaggattttttctctagtgaacagatggtactgatggctcttgagttgtcaccagtgtgcacaaaagcatacgcttttgatccacacagagagccagtcaagttaggcctgtttggatcacattc

SEQ ID NO: 121463 - DNA, 824 bp, Homo sapiens
gggggaggtaaggagcagcgagagtaggagggcagggggcctgtttcctgggtcctgctcctggacatgaggcgagacgaagagagggatgctgttgccctgagacatccaggaagaggacccagggccacgtcaaagaagtcctgaggcccaagggcagccccaagctgtggggagcagctgaccttcaagaatctggcagaaagacaaagagaggctgggcacagtggctcatgcctccaatcccaacactctgggaggatgaggtaggccgctcacttgaggtcaggagttcaagactagcctgggcaacacagcaaaacctacagaaagtacaaaaattagctgagcatggtgttgtgcacctgtagtcccagctacttgggagggtaaggtgggagaattgcttgagtctgggaggtcaaggcttctgtgagcagagatctgccactgtactccagcctgccagcctgggtaacagagtgagatactgtctcaaaaaagaaaaaaagaaaaagaaaaaaaaacaacttttcgggccgccttgggccctaaaaacgcgactaaaaacagagggaggaggggagcggggccgcccaggagatgtgccaacatgggaacgacaagcgagcccacgaaggaaacaaaccacgaggcgacagagaaacaggacagcaggatactccagacagaataagaaaaacacgcccagggggtgagaccggagcggtttgcgcgaaaaacccgaaggggcaagcacagagggcacacaaggggaatatcaccagcacgcggcccaaggggcacggggattacaagagggc

SEQ ID NO: 121464 - DNA, 169 bp, Homo sapiens
agaaggaaaattcagatggaagtaaggttgaaattcttgatttttagagtgattaaatactgaaataaaatgccaagggagactgcatacttttacacctaaaataataacagattgctgagtcagcagtctcaggtaaccagcacagtgagtatagaaacaaggacca

SEQ ID NO: 121465 - DNA, 524 bp, Homo sapiens
atggaatgtctcaggtggtggcaagatgagatggtgaatccctgtaccattacccccccagacccaggacttatacgtaacagggaaagagtatttgtgattcagaagagatgtgtaggacaattgaagtacagtcaatttaaggttgttttgacctcagggcaggatttacagtaaacagtagataaactggaagtcttagaagccttcccagggctagggttaatcataagtcaacatgacagatgagcatccaagatggagttgctttggcctccacaagcatgttgtttccctaaactcggaaccttcttcagaacttgaagtggcagttttcctgaggtcattaacagtagtgccatggcctccaccacaggctctgtctattccagcactccctgaaatgtaaagctgatgtgtgggttaggaaaaatagtgttttccttgtgttctgctttttctgccctaggaaatttcagggctaaaggaatttgagagttaagcagtgggaatatgtttatctg

SEQ ID NO: 121466 - DNA, 213 bp, Homo sapiens
gaaactcagaagagaataaccgacatatatgtattcgctggatacgaaactggcggcaggcatgttgacgcacacatgtgatccagcacaaaataaatgcaaaatttgcaatcatgaaacatgattgatttagaagaggcatgtaggctggggaggagacacagttcagcctgaaacaaacgtcaaagaaatctaaaactgcattctatggtg

SEQ ID NO: 121467 - DNA, 431 bp, Homo sapiens
aatttggaagcttgccaaatgtgacctaaggttatcaattaaatacattgaaggaatagttaatattcttccaaaaaggaaacttcaggaacagagggttttacttggaattctgtcggtatttaaggaataaataggggccaggtatgatggctcatgcctataatcctgactctttgggaggctgaggtgggaggatcacttgaggccaagagttcaaaaccagcctgggcaacagagcaagacgtcgtttctatgaaaaatttttaagttaactggacgtggtgatatgcacccgcaatcctagctacttaggatcccttgagcccaggaggatctcttgagcccaggagttcaaggctgcagtgagctatgattgcaccactgcactccagcagtgttctgggtaacagagcaagaccctgtcttgg

SEQ ID NO: 121468 - DNA, 618 bp, Homo sapiens
aatccattccagctacattccagttcgcagctatattcaattccattccagcgtatttacattcaagatgtatctcttctaagtataatataattgggcagaattcatttttaatatggtttggtaacttttctttttaaattggatatttagtctattaatattgaatgtacttacagataaatttgggcttatatttaccaacttgtttgttttcctgttttacttaaccgtttcttcaacttgttttatgttactttttctcttcttcttgtctttaatgaattacatatattgttgttccgttttcccctctattagcttgttaattatatattattttactattcttttagttgttaccctccttgacagcatgcattcttgatttttttagagtagaaactaattcttttattactccccagacaatgttatgtccttagcatactttaactccatttaacccaccaccacctttttaattattattttcattgtacatacattttaaaccttatgagccctttttttgtttatatagcaaacattcatttatatttgttccatttccctcttcaatcactcttcatttattcctatgcttctgtgtttctg

SEQ ID NO: 121469 - DNA, 220 bp, Homo sapiens
gttggaatcgggttaggggagcccagtgagtccatagaggtgaggctcaggcacttggtttaatgggacgtggccggtgacagcgaggcggcaaggatgaggtggcagtggcctcagtgtctttgctgacctagtacccttggctcaagtgccatggctggacctctcaggatgatgtccaacccaaggattgcctgggtaagaacacctctctcataca

SEQ ID NO: 121470 - DNA, 960 bp, Homo sapiens
tgtctcatgactgagaaaattaaggagcatgggtgaaaatgaaaatggtgaggttggagtgaaagtgtaatgaacaaaaaatgaaagctctctgcaggggagcggggagccaagtggttttccgtttttacagttgaatcccaaaagtttgtataagaaactcctctcagttctgtagctgtttgcgtaacttttcttcatctgaaaagctgtctgctcaactccctcccccttgtctgtgtagctgtgggtatgactctaggcaagcacaaagcaccgcttctcttgtttgtaaaactgtgggtttgttttagggaagccccctcctccctgtgcaagttcccaccgagcccactgcatacatgtctgaaaagaaggggaaacttttccctgggagctggttaatcacacgaagaacaaaaggcttctgtgccggaccttgcgtgcttgtctgtgcaggtgcatcctgagttttccccaggctgctctatttttgcctgtagctgcgatttttcaggcaggctgcctctccgaggaccagccttaactgtttacctaactgatttttccttttcttctccctcattactttcaaacttcttatacagaaccagaagtctcaattttctttttaaagaggctaaaaattaagaacagggtgttttatatttactcacacttttcccattttggtgctctttattcctttgcataggtaaaaatgtcaggctgggcttggtggctcgcgtgtgtaatcccagcactttgggaggccgaggcgggctgatcacgaggtcaggagatcaagaccatcctggccaacatggtgaaacgctgtctctactaaaaatacaaaaaattagctgggcgtggtggcaggcgcctgtagtcctagcttctagggtggctgaggcaggagaatcgcttgaacctcagaggaagaggttgcagtgagctgag

SEQ ID NO: 121471 - DNA, 343 bp, Homo sapiens
tgtttacactctgcctccatcgcaggattatttgtttccttccttgcatcgctttgggtatttgatgctctattcgaatcattccttttccctccctcctcactctctccatttcagatgctcaacatggaattcctgtcagaagtctttttagagtgcttctccaaagctctgaggacttcctgaattataagagttcaccaggcccaagttgtagtgaagatgccagtctgtctgctatagcaggatttattttaaagcatctctgaagctttttgttttattctactcagagtcaagagaacccctcttggggacagtgaaatatacttaggcacgtttc

SEQ ID NO: 121472 - DNA, 511 bp, Homo sapiens
cagagaatcaaatgatgtggtctctagaaacttggtgtcaaagctgagcagttaaatttgtcagcagctaatatagccgaagactccccagcttccaacacagacagcaatgactctcctctaagcatcatccccagagcagactgagttctagtttatctttacactaaaggagaacaattggtggtcatttctcaggatctcctaataactgaataaagatgtaggttaatgcaacattttgtaaacagaattgtgttttcaatgaaaccttgtaaagggataacatacatcctttcttttttaaaaaaatttttattgataattaagttgtacatattttgggggtacatgtgatacaatgtgtaatgatcaaattaggataattgggatatccacctcaaatatttatcttttctttgtgttgggaacattataattcttctagctattttgaaatatacaataaattgttaactataatttccctactgtattatcaaatactaga

SEQ ID NO: 121473 - DNA, 470 bp, Homo sapiens
gaagcttcgttctgcgtctctctctgtgggtgacccacatatcacttgtacccatgccacttctggtaccagcaccgaacacgaaggattcctaggaaatctgagcgcttatttcccaccccgcctccccaactatcatggaaaggaacatgggactactgaatctgtttgctgtgttgtaacgacagtgaaggccgcgactttcttgtacttagggtgctgaagtaatgatctgagggatttgctcgtcatttgctgtggcagagatgatgttgacaccctgggatgctgtgggagggacaaaagactcacgtatatgttctgtcaaatcggagaagtaaataatccattgggatgccaggatactttattctacagcgaagttaattttgtatccgtcgaggctacagtagaggtaaaaatgacattgagttgtactttgctttgaattaaagttgatgggtagcagc

SEQ ID NO: 121474 - DNA, 416 bp, Homo sapiens
gaagcttcgttctgcgtctctctctgtgggtgacccacatatcacttgtacccatgccacttctggtaccagcaccgaacacgaaggattcctaggaaatctgagcgcttatttcccaccccgcctccccaactatcatggaaaggaacatgggactactgaatctgtttgctgtgttgtaacgacagtgaaggccgcgactttcttgtacttagggtgctgaagtaatgatctgagggatttgctcgtcatttgctgtggcagagatgatgttgacaccctgggatgctgtgggagggactgccaggatactttattctacagcgaagttaattttgtatccgtcgaggctacagtagaggtaaaaatgacattgagttgtactttgctttgaattaaagttgatgggtagcagc

SEQ ID NO: 121475 - DNA, 303 bp, Homo sapiens
ttatacagtaaggaactaacattttacttttggttttggttttgtgtgtgtgtttggtttgtttctttttgttgtggtcgtggtaagtggtggggggtagcatatttatacacgtacttaagtgtataaggacataggtagaggagacacccaattattcatgttgatcgcctcagagaagtgggatggaaaggtgggaagagcagggaaaataacttttcttcggaaaaagttaaaatgcctatagagatgtaaatatatactttctctttacaaatctttatataatttagccccccgcct

SEQ ID NO: 121476 - DNA, 369 bp, Homo sapiens
tggtggggtttttttttgttgttgttgttcttcaggtttttttaagattttacatcacagtgaacatggccagaaataatttaaaatgaagaaattaaacaaaataatacctgttagaaggaagacactaaatgaaagaccatgttgtagtcatgtttctacaaatagaagttatacaaaaaagtagtcaatacattagaattgaggaaaaaaatggtcttctgagctagctggtttacaaaaatgattgtgacattacagttttatctaatcacactgtagaatttagacctcatcaagctctgcacagtcgattcccaatgtgcctacaaatgactatactgtcatttattgcccattttgctataa

SEQ ID NO: 121477 - DNA, 433 bp, Homo sapiens
tgataagggaccaaccctgctctcctggcgctcacaccaggggcaagtcaacaaatacacaagaaagaaaatgaatgaatgagtgaagaagaaaaccaggaagagtgaacaaggtgccctccaaacacctcagagatgcaaatcctacagagaaacatcttcagggggtgactggggagggatagttcctactaaggtccctggaaaggcctcccagaggaagtggcgttgaggtgaaggtgagatgaagccagtaacaggatggtctgcggggagagcaggcctgagagagcagcaggcaatgctgaggccactacagggctggcttcagggaatgagaatagaggcaaggtggcagggcctcagcagagtgagaccagggagagtgggaggtgatggggccttgtccgccacagatttaactccgtacttc

SEQ ID NO: 121478 - DNA, 915 bp, Homo sapiens
agagggggcggagcggccggggtgcgcggtaaagatggggcggcgcggccggggctcgccagcaccagccctggaaccccatgggggacctcgacaacagcgcctttgcggcgtgggcccctttctgcagctcctccacccgcgcgctgtcggctccgggacactggggctttgaagggcgccagttcccagccgcacctgcacgcctaggagggcgcaggccgcgtgtccctgtgggaggaaggccccggcaacctgcaaagacctcacgtcacagaaacttgcggcgtttgcccccgatgcgcgcgtcaggtgctccgtcccttccaggtggcagaggagagggaagggtcgcgcctggtgggggcctgagagccaccgggctgcggtgcgcgagtgtggacaccgccccgccttctgcgtctacagccctgggttctgggacctttggaaaccgctttggacgaagctgagcatctctttccccacgctgacctcccccatagactccggatgggagtaaatgaggctcctgggaaatccagaaacttcactctagagaagcttgtttgccaaaccttgctttgggcggtggagacagaatatcatgtcccagatcagcgtgtggtgactgtggaggcatttacacacagcacactccagctctgccactgggccggctgaggtggctgcggtacacggcgcccatcctgagccccaggttcctcacatgtcaacagcatgaaaagtgcctctaagacatccacaggtgtgcagtgttaaagcaggcagcgcctcagcttggttagctcccttaaggactgcggctcccttaggacaaggctctgtccctcagagcactgagtgcgatctcatgctggcatcttagagacattgtattcaccaggtaagatg

SEQ ID NO: 121479 - DNA, 858 bp, Homo sapiens
aaaccaagaatgaggtaggcctctgtcttctaagcaacatcagaactctaagaacatgagggactcttagaaaactctctggagctaaccacagctgggtcactgctcatgtactgaagaccagccagagggttcccctgaaaaggagggaaactgagcaaacattctccagttctcttagtgtgcacatgtttcaggaggtgtgaaccccacatgtagcttgtgtaggcaagaagacaaatagtgctactgtctggtcaaggatttgtttgaagagccatgattatgcccatatggtaagccaccagtgctccccatccctgtaagacacttctttctcattattttctcctctgatggtgtgccaggatgctggccaagagaagccaagtggaaagaaggctgttcagtgacaaggaacctaagacttagtgccaaggactgaaaccaagtaaacttgtaattttccatgatggaaacatctacactttctcattagtggcctctacagcagttgccccaaagaagcgtctcattgtttttttactacatttatgtgaagcatacaggcaaactcagaaagactgtgataaggctcgccagagatgcctgcacaggtgctgggggaaaagcaggaccatcctgaagggagatggtgtctgtggacaaagaactctgcagtggttcttatttgcatgatttctgctggtggaggctgtaaatgtgagctcaaactcccacataagtgagttttcattgtaatccagaatgtttttaaatcaccctacttctattgaacttgcactatcatctgttaacctctactgtatttattaaataaacctgaataggtaaatc

SEQ ID NO: 121480 - DNA, 1056 bp, Homo sapiens
aaaccaagaatgaggtaggcctctgtcttctaagcaacatcagaactctaagaacatgagggactcttagaaaactctctggagctaaccacagctgggtcactgctcatgtactgaagaccagccagagggttcccctgaaaaggagggaaactgagcaaacattctccagttctcttagtgtgcacatgtttcaggaggtgtgaaccccacatgtagcttgtgtaggcaagaagacaaatagtgctactgtctggtcaaggatttgtttgaagagccatgattatgcccatatggtaagccaccagtgctccccatccctgtaagacacttctttctcattattttctcctctgatggtgtgccaggatgctggccaagagaagccaagtggaaagaaggctgttcagtgacaaggaacctaagacttagtgccaaggactgaaaccaagtaaacttgtaattttccatgatggaaacatctacactttctcattagtggcctctacagcagttgccccaaagaagcgtctcattgtttttttactacatttatgtgaagcatacaggcaaactcagaaagactgtgataaggctcgccagagatgcctgcacaggtgctgggggaaaagcaggaccatcctgaagggagatggtgtctgtggacaaagaactctgcagtggttcttatttgcatgatttctgctggtggaggctgtaaatgtgagctcaaactcccacataagtgagttttcattgtaatccagaatgtttttaaatcaccctacttctattgaacttgcactatcatctgttaacctctactgtatttattaaataaacctgaataggtaaatcacagtacagcaaaaggttctgtgttccccagaattctaatcaaactccaaattcctgaaaaggctctagtcctttcctatatgtcaaatttaaatgataagttttcattttggaacataaagagggattttgaagaccacagcatagccctgggtttttgcatagagataataaacagacaatctcttttcagactga

SEQ ID NO: 121481 - DNA, 300 bp, Homo sapiens
taaaacccacccccatgattaaggtacctcccactgggtccctccatgacatgtaaggattaaggaagctacaattccagatgtgatttgagtggggacacagccaaaccatatcacacactctgagttttgtttttccccctcattatacttgatagggaataacgttcacaatatatgtgaaaactattttttttttttttgagacagagttttgctcttcttgcccaagctggagtgcagtggcacaatctcagctcactgcaacttctgcctcctgggttcaagtgattctcctgg

SEQ ID NO: 121482 - DNA, 102 bp, Homo sapiens
gctaactgaaataagccagtgacaaaaagacaaacagtatataagtccaattacatgaggtgtctaaatagtcatattcatacaaatagaaagtaaaacggt

SEQ ID NO: 121483 - DNA, 243 bp, Homo sapiens
tcctctgctgccacagcggactgcctgcagactgagaagtcctcctcagttgctgtgctggcctcagcggcccccctcctcctgctgcccctcctggctgagtcctcctgcctcctatgcaggccaagctcagttgccagctttctcatgtcccagggtttcacccctaccccttaagccttttttctaaatggccacatggtctgtccctgtgagccagtggaaccaaatctaaccagtggc

SEQ ID NO: 121484 - DNA, 557 bp, Homo sapiens
gagacaaagcatgagtaactgaatccaccaccaggaccttttgcttgtaactatctggtcttcctctctccattcttgttctcctccagtttattccctgcatagcagccagttggatcacatcaactttgctaattaaagtccttcagtgtcaaggcacctgcatgatcaggttcctgtctgcctcttgcttctcacattgaaactattctcaggcacactggtttcctccataggacgaagcttttgtctttctttcttttttttttttgagatggagtctctgtcacccaggctggagtgcagtggtggagtcttggctcactgcaacctccgcctcccaggttcaagcaattcttgcgccttagcctcccgagtagctgggattacaggcatgtgccaccacgcctggctaattttttgtatttttagtaggcacagggtttcactatgttggccaggctggtctcgaactcctgatctcaagtgatccacccgcttcggccttccaaagtgctgggattacaggcgtgagccaccgtgcccggctgaatcaa

SEQ ID NO: 121485 - DNA, 404 bp, Homo sapiens
gaggccaaattagttttcacttttacgctgaattgctaacatcaaatgtgcccttcctgccccacccaaaagggcagaggaagtgacaaccccaggggccctccttctcccctgtgtccagggaagagcatccccacttccagtcactccagcagggaagtataaggaaagggcagaagaagtgaggggtggacatcagaccacagggactagctctcagggcgtgtggggactaggtgagtgggagaagcggatcacgctgactccactagatccagtaggagtagccaaagctggagttattatctacatgaatatggggaacgagttacccatttgttgtcccctacttgaggagggaatcaaccctgaagtctgggcattggaaggaacaaactcaagct

SEQ ID NO: 121486 - DNA, 158 bp, Homo sapiens
cagacagtgaatgaggacccactgatttaaaggcaacactgcagccccttcttgcctcattgaagtcccaagttttattacagtaaaagcacttaatgttgacatttctgaaagaatgaagaggccgggcgcggtggctcacgcctgtaatcccagca

SEQ ID NO: 121487 - DNA, 335 bp, Homo sapiens
acatatagctatgtttcatagtatcaaggaagtctttgactttaggcaagaatttagacactataaaaaaatttcaatattctgaaaacaaaagtctactctggattgatgaattattgcactaatcacataataaagattaaaactaaaattcacagagcacctattgccagggactatataagttacttatatgtactttctatgatttatatttccagcaaccatgagatattttatatccatgcttattaagagaagcaacatgtccagagctcacatggtgaaaatacttgtatttgatacagctggaatttaattccagatgtaattcc

SEQ ID NO: 121488 - DNA, 303 bp, Homo sapiens
agccatgggccattgtacgtggcagatgatgatacgagaggaatcagaggcacagcccaattttctgggggatacaccagaggctgactgttctatctcctgagcacagaggccagtggagagcaggtgtgtggaggaggggctggcaagagtcatgagtgtgcttttggatatgacataaaatgaaaccttgaatgcggagtgcttcacccaatgcctggtgagcaaagagggctgttattgctctgttttgttttgctttttgagacagagtctcgctctgtcacccaggctggagtgcag

SEQ ID NO: 121489 - DNA, 334 bp, Homo sapiens
ttacactgttggagttgacaggtggagggggttgtacctttggtaaagtgaatgtaaggctttagataggtacaacctattgaggaggtccagccttgacacttggtggtatagattacatctccctaagtatcacagaactaccagttataggatcggcctcagtccatgcaaaagtcagttctgtaggcagttttatttatcctggaagggcaaaggtacttttctgaagaggccagctgtctttggctttggagatccccacagggcataacaagacaagcattaaaagtaatggtttgaggggagctagatctggttatattaataataa

SEQ ID NO: 121490 - DNA, 380 bp, Homo sapiens
gccggaagggaaaaactgggcctggaaaggccgttgtgaggaatgagccccatgggcctgaagaggccactggcaggcgggagctgggcctgccaaagcggccgagaggcaggagctttggacttgggaggccgcagtgaggcgagagctagctgggcgtggagagtccgctgtgaggctgaggctgggcctgtgcaggccttcgggaggcaggaggccgggaaggccgccgggaggcatgagctgggctgggccgaaagaggccgctgggaggcaggaggagctgggcctggagaggctgactcgaggaacttttgcacctggagcggccgccgagaggccggagctgggcctggggaggccgacttgaggacgacttg

SEQ ID NO: 121491 - DNA, 246 bp, Homo sapiens
acagattgtagtacatcgttatgacttttaagtgctaagcaaattattgtccagagtggcaggcagacagtaaaaatcataattattgtaagctctgggccatacttgtaagtatagtaataaatctgcacttataagtcataacgatgtactacaatctgtagcttgtaagatttgatacataaaagattctgttccctcctctctctgtctcaacacacacacacacacacacacacacacaca

SEQ ID NO: 121492 - DNA, 347 bp, Homo sapiens
cttaccgtggggattctgaagggcagtgtcttatgagagaagagagatcaagttacttggtgagtgagatgttctaggtgctcagtccaagggctggccggatggctagcactgaacttgtgtggatgtttgttcaaactaatcagcctacgattggtttgttcctaagaatgataaaactttgttctagttttttaaattgtaataataattctgtaagcatttaagaagaatgctttctttaatgttgacttttttttttttttgagacagagtcttgctctgtctcccgggctggagtgcagtggcatgatctcggctcactgcaacctctgcctccgggttga

SEQ ID NO: 121493 - DNA, 273 bp, Homo sapiens
tcccttgttatataataactacccagataagatgctcaattttgtttcttggcccacaaagcctaaagtattttattctctagactgttaaagaaaaaattgcagacccctggcttaactgatgctgctgatgtggggatgactttgagaaccacgtaagccatttgctaagctaagtgtagtaaaccctccttccactgatttaatacaattccacgggcccaactgtcctggactatcacacaatgccgagagagaggcaccacccctcaa

SEQ ID NO: 121494 - DNA, 92 bp, Homo sapiens
ccacctccctcctggattcttgcacctctcaaaacttcaaaaactgacagcttcaaaaaattgtttagaaaaattgttcgaagaagaaaatg

SEQ ID NO: 121495 - DNA, 694 bp, Homo sapiens
tgtggtggcaggtgcctgtaatcccagcaacttgggaggctgaggcaggagaatcgcttgaaccctgaaggcagaggctgcagtgagccgagatgtgccactgcactccagcctgggcgacagagtgagactctgtctcaaagtaagtaaataaataaataaataaataaataaataaatgggtggaatacagacatttttagatgtgtaactcactaaaaatttcccttccaagcttccctatcttaggaagttactttaggaaatagtctaacaaaatgaggagtaaaccaagaaagcagaagaaacagtagagtggacaccagtgaggaagaaagtaccagctgaccatggtgcagtgtgtccagtgagtcagatgagaggtcagaaggctccaagagaaatttaaggggataacaatagactacctgacatatttgagcccttgcagcaagatatacataattcagggataattggggatttgtgttagtaataagcccatagaagactaatcaaagagaaaaaatacaattatcgactacagagaaagcagaatgtgcttgaaaagaaaataaatcatgatacacttgatggctgagttgtgaatagcatttacatagtcaaaatgatgtaatcaccctttttaaacttaaaacaccttttaattgaagtataataaacatactgaacc

SEQ ID NO: 121496 - DNA, 302 bp, Homo sapiens
aaaataacttatctgctgtctaaccacggagctcaggcatctaagaaaagcctaaataattcacgaaaactgtgcccaaatagacaaaaggagctcactgcttcttgcagaatatttaaacctgactcaactttggggttttaatccaaatatcttaagttcacatttcattgctggaacattccatgttgtatcaggagctgacttaggtgggtgaagttcttaaccctgaacagagaataaaatgttaaaaatagtaatgagagtgccgatacctccatagacaaccctaaaatgtgtaa

SEQ ID NO: 121497 - DNA, 602 bp, Homo sapiens
aggggagagaatcacttgaacctgtaaggtcaaggctgcagtgagtcataatcacgccactgcactccagcctggataacagagttagacctgtctcaaaaaaaaagaggaagagatctctggttagagtttgtctctgatggatactaaccatgcaagtagtttacacaaaccacattctttctgtagaatgagaaaatcttggatataatttagcataatgagctaaataactctagactgagcttcgctgcccagacaggactctacttgtgatctgggaagatctacccttgcactgaattctctcctcttctctcctgactctgtgagaaaagtttgcatgaatttactgagattagttatagaaggaactgtgtgtcattgaaagtcttgtacagaagttcacattaaaatatatcatagtcatctttgggaatgattctgcaaaattcataaaacaaagatctctgaaaccctaaggcacactgtgctggaggctaagggaataatagtgagctgagtggtttctgcctacacagagcttctaatatattgaggaaagagatctcaatcaaattccaattgcaaatttattaagt

SEQ ID NO: 121498 - DNA, 321 bp, Homo sapiens
actggtgtgtgcgtgggcgtgtgttgtttgcatgcgggtaggatgcctgcctcttcggattgctgtgcaggggcccgaacacagcaggcatttgtgagcattatgctgagtgtgttgtgctgggtgtgttgtgtagtgttgcatcgttccactggaggggcacaaagcgctggagtgggcatcaattccaactccaggcattcccccattagcatcttgggggaatcaaaccaagaatccaccaatccttaaggggcaagttcctatcgatctgctctacggagcattaagacctcaatgaccccagaccttgctgccatc

SEQ ID NO: 121499 - DNA, 389 bp, Homo sapiens
ggcatagccttggcctttaattatggttgtaagcccaaataatggcagagaaacacagggctgtttttacaacagaaaactcaatataagttttatataagaatcctataaaatttgaaccagagctcctatttagttgttataatgtctcctaaagatcttaaatgcttctaaaagctaattattattccagagcaactttttccttttcccccttataaagtttttttttaaatccaaaatcttagatttctgtgccacagtcttgcgccggaggggtggggtggggggtgtgggaggagggacggctcagccgtcccctcccaagcaaggccagccacagcacagcgccacagtgtcacagacaccaaaataggagattagtgcgg

SEQ ID NO: 121500 - DNA, 152 bp, Homo sapiens
atggcaaaggcagtagatgggtatcttttaggtaggtgttgaaagtcatcttaaggaatttgagcttcctcctaagggcagatgaaggttttcaggcagggagattggcatcatcagattatcattctggagggaccactctgtggtatgga

SEQ ID NO: 121501 - DNA, 726 bp, Homo sapiens
cacagactgaatttcagctccctgtcttggccagggcacatcctgtctaatcactcatgttcacccagctttgcaccctcttcagcctccccacgtttaagcgaggcagctggcggtgcaggaagaatattcatccatctcctaggagctcaggagtcagaccctgggcccagactcctgcagcaagtcggggcttctgtcacaagcgcctcaccttactggctttggcgccatctagtggacgcatctgggtctgcggggaccgcagcccttcctgtgacccagaagcaaaaccagcaatttacctggccgtacattatttttgagtcccgaatcccaagagtccactcccaacccagctcagcatgtattgtccactgcctgcttagtgccggaccaacacaccttcacctcacatcaacagggactcaaacagagcctcttcccctcaaatcccagccccatactcaactgtgtgcacaaaagcaggcattcgtcctaacaaagcagaatgaaacaacccaaacttccctcaagatggggagcatgcattctacggaatattatgaaatggataaaagggtttgctggattggaaacgtctccaaaagcacattaaagaacaatacataccgcatgatgccgtttattggaagaaacaaacccaagcctgatccactgttcgcatatccgtgtgaaatgcagagggagggctggacacacacc

SEQ ID NO: 121502 - DNA, 494 bp, Homo sapiens
actaggtaaatacatgaatttaataatgattttggtgctccaagattcttagaagaagcagtgagaaatatttcatttatttgaactgctcatttgtaatagtattatttggaagtggtatagagctccaatggttaaacaatgtactttggagtccaacagacatggtttcataacctgtttgtccatttgctggataactttggttaaatcacagaacccctctaagaagttaatatttacccaaatagagatgatgtaagaattaaatgatagtgtacgtaaaacacataatagagattgtcacataataaacagtagccatcaccatcactataatcaccattatcaccaagaaggtcttgttacaccaagtgtaacaagttcatgttacatcaagtgtgagagtgtgtataactttactaacaaggcagaaattacaatatcctcgtcttgttgttgtttttttttcccaagacagtcctggctctgtc

SEQ ID NO: 121503 - DNA, 329 bp, Homo sapiens
cagagccaacccttatccccaggacctttcacattgctcttgtgaactttctactgtcagcacctgcatctcaaatgctgatttgcccatggacagcagttcattctagggaattaatatgcttgcttttccagcagccctcatctaataactctctagaggtgacatataaataccccagctccctcaccctcagatgagataattctgaagctgtgttttgcactagttctgaaagcttccccagggaattcagctccaagcacccactctggcagctgatttattagatgcttttccttctttgtctctcttccccacttccctac

SEQ ID NO: 121504 - DNA, 745 bp, Homo sapiens
tctacatatgttcatgcttacaattttgaacacttgtttaaattttgatttctcatcaacacttttactttatagtaagttctggtaattttgttctctccttaacattccctgcaaatcctctcctgctagaaacaacagattaaaaccagactggcagttgggaaatggtttctattgcaaccatgtgtgtcagaagaaaggattaggtttccttgtccaagaacatcaaggggaacctccacctctgcagacacacctctattccttagtaatggagagtttatacctagttagatttaaatgggataagggaagagtttaaatccattcttagctcaagcagtataatcagccctcaagtctcaaagtatccaattttctttctctaatttaattctaagtgtcaggttggtattagatgctgatcaaggtaatggagagttgccctacacatttattcacttaaagaagaattttgcagactgcaaagactagatggcaattgtattcaaaacttacttaaagcacaattcattcacccctgacctttcatttatattgagtatgttttttcaaatatagaagagattccataataaaagcaaacaaacctctctcttcataattatggactatagttctctgtacatgttctctgaccatgccatcttatgctggacctattataaggacccaaattaaagtgaggcagatcctgcttttgagtgagataacctccaag

SEQ ID NO: 121505 - DNA, 339 bp, Homo sapiens
atctatactattgcagccccaggatgctgatgaactggaagaattactcagcagctatgctttcatatgtgattatgttgctgaaggtcaataaaacattgagattcccaatgatatttcccatttttttctacatctcccttatagctaaggtgagctgtaaagcacttcaatcttatttaaagcttcataaaaattcttcagtagacatttaatgacattgtcttagtttgggttttgtcaaaagcaaagcctgagacaaagtcttgggtacagatgatctgctggggaggtggttccagaaagaggggtgagggagccaggagagtgagagaagag

SEQ ID NO: 121506 - DNA, 896 bp, Homo sapiens
taatcataatagtttgctaacatgtatttgtaacatgttaactttcctaaacacattcatgtgttttatttatttcctcaaagacacctatgacattggtagtaaaactatccctgttttacaatcatgaaatggatgcacagattgagtaacttgtccagagtctaacagccaagatttgaacttaggtgatcttcagatgtgggtgattcatgtaccaatatgtcagtcttgaataagaacttatattgtatatgcatgtttacaacaattttgtcccaaggtgtatttgaagatatatgttatttgggagaaaatgaaatagtgccttaagattctgggctttgttcttgagcttttaaataacagtctagtaattctgttttcagtaatggttaatgtgcttgtttcagaccattctccatttagaacaaatagaaaatctggaagtggggagggatatcaatttgaaagtattgagatctacaagatagcaagaatttgtggggccaatattccagggagaaggtaacccagaaaaggagcaacttttcccattcaggcatttgctgaattaaaagtctcatctgggaagctgaaaagctgagtggagtttttggaaaactcaaagagctgtgaaattcatattttgctaaggaggaggagctctggaaaatagctcaagcttttattgggacctcaaagggtttcactgtaggaataagagtgaatctgagaagtgatttctcacagtgactgaagccaagcttctgatcatgcaagcactagaaagaagtaatctgttcccagcctgtgcctctgctagctgcaaaagtgaatccactctggatgaaagtaacattaactgtagcctcagattttctctacaagttttt

SEQ ID NO: 121507 - DNA, 573 bp, Homo sapiens
gttaattagttatcctaatgagcttaattaacttaatagtcccactgcaggcggtgctaccaggcagccagggtggagagcctgtgctgtgaagtccttactcacaggttctggggccactgtatgtgccctgggggtagccctaggtgttggtcttgaactgcttgcatcaggctcatgtgcgagggaatagcagccatctgggcgatggctacccatgtttgcagatggcagtctcttaacacagtgtaaccttgaggatggccaggagggaagtgaatagaagccttgtctgagagtgctttaatctgttactaacattaataatctgttaataattaataatctggactaacactcagggagtgtcagtgaatgttatgagttccaagaacaagcccatgcctgcatggaaggaatcccctgtttcaggaaagcagtgcccttggctggactgcagactccacgtgcagtacagaccagagacatgggtgtggtgatcctgccttttaagatggggctcattaactagtgtatgcacgtgtaggcttatgccattggttggcataaatg

SEQ ID NO: 121508 - DNA, 656 bp, Homo sapiens
taagacatcaattaaaaatgtttaatatataaatttattgcagttataattcctgtgagaaccaatagtgaaaaataaatggatgacattatcaaaacattttcattgggaataaggatgaactcagcaaacttggaaaactgaacacactgcaacaatgatcaaaatcttatggccttgggttattacagtcggaaaaaagagtttatcttacaacacacaggagaaatggtatgtatctacaaccttgtttatttcagcattgtttataataagatatatttcaaatacaaatattctttagtaaaggactgataaatcatgatataggcataaaatgaaatcttatgaaagcttttaaaaagactgagaaagctctttgtacttttatgagattatcttcaatctatgtcatgtgcattttttaacacaaaacaattacctaatagtatgctacaatttctactaaaagggaggaaatgatacaaacttgtatagatacatatatagatatgtttgtataagcataaactaagcataagccaccaggcatggtggcttgcacctttaatcccagctatttgggaagtctaagggggaggataatttgaacccaagagtttgagacctgccagggcaacttagaccctgtctct

SEQ ID NO: 121509 - DNA, 378 bp, Homo sapiens
tgtgttccttctgctctgatgcagggttttctggctgccccctcagacccatcttccctgcttcatgttgtccctttcttcatgcttcctctgtagtaaggcttcctagagttgcatccttaaccctcatctctgggtggccttcctcctgtgggtttggcgactacctcctcagtgcgtcctggccttccgtatctggaccagtcatggctccagagttgtggcctcggcaccttcagagcctgcctggaggtcccctctgttctcctcgccaggctcctgcctgcatgctggaatttgggtgtccttccttgtctttagttccctcttttctctgctatccacctccgttgggtcaacaagtgcggtcagttctgt

SEQ ID NO: 121510 - DNA, 297 bp, Homo sapiens
acaaataaagtcacatagtatgtactatagaggaaggctgatacaatcctttcttgttatacataaatatctaaaaatgtggttccaatttctttttttttttctaaaccatgctcattttctttcaaattacttccaaaaacgaaggtctctctgatgttaatcgtgtgtatacttcagcttacactttaaagagtcttcctctcccgggaagtgacttttgtatataaatcatggaaagctacttagacaaagtgctggagatgattaaaaagagccagattcaaatttatacct

SEQ ID NO: 121511 - DNA, 598 bp, Homo sapiens
tcccacttttaacagtagacaaatgatttagaaacatgagacttaaactacaccatggacatttacagaacatgaacagccgcagaatacacattcttttcaactgtgcatggaatattctccagtaaagatcgtatgttagagatggtatcaagtattttaccagatcacaactatataaagctagaaatcaacaacaagaaaaacgttagaaaccaacaaatacatggaagttaatatgcaccttaataaccaatgggtcagtgaagaaattaaaagggtaattagaaagttccctgggacaaaggagcgtggaaacacatacaaaaacctgtgggacacagtgaaacctgttctagaagttcatggcaataaatgcctgcatcagaaatgaggaaagatttctaataaacagattaactgtgcaactcagagaaacctgaaaagcaagaacaaattaaacccaaaattggtaggatggaaataataaagcttagagcagaagtaaacaaatagagactaaaagagcaattcaaaagatcagtgaaatttttttgagaagataaacagaatcaacaaacctttagctagactaaga

SEQ ID NO: 121512 - DNA, 102 bp, Homo sapiens
taagtatagcatcttcccccttttctaaaaatctaggctaaataaaataatgtaatgtgctagtatagccacaatggaaaattaagacagccttaatagttg

SEQ ID NO: 121513 - DNA, 359 bp, Homo sapiens
gaaaaatggaagcatcaaagttttaaacttatgctatcattaaaataacaacaacattcattgtctgaaacaaaaattaactgtgaagtgagaatttgagaagtctcagccagaacacagtgctgaccttcatctgcgttttgtagccaccacgtccaatccatcacctgctggttgtagcggcagagagaaggatgcaacccctgtcctgctgttgttttatggctgatgattcatgaagacagaaaaaatgccctcattttggcagctttcatttgatcattctttcccaccttccccagcctctgggagatgtgtttattgccagcttcactgcagaggagacaaataagtaaccc

SEQ ID NO: 121514 - DNA, 514 bp, Homo sapiens
cttctctgaccaccttacattcctttctcacagcactctccggtccttgctcttctccttagtggtcttcacttactacactatgtacttaattatctctcccacaagaaaataagctccatcaagcctcttttgttcactgctatattcacagcgcctgcaacaatgcactgcacatatcagatgcccagtaaatatgttagaacaacaatggttagaaaacctaaaacctgtggcaagtaataactagaaaactatagagactaggtaagtttatgtacattaaatttgtatctactgggattatacagtaacaacccaaacatgagtcaatcagttaatgctctccctctttcagaaatacaattcctatttcctatttattgggaatgaagtaaaatgtctggattttagcaacaatagatagctcccttccttactactatgtaatgagcaatgtgcctttgctaacttatgcaactcttaaggttttgattcaaagctaaaatcctat

SEQ ID NO: 121515 - DNA, 396 bp, Homo sapiens
tagagaaatttttggtgaaagaagagccaatcagcacgcaagttttgttgtctcaagaaattgccacagccatcccctccttcagcaatcaccactctgatcgaacaacatggaaccaagaccctccaccatcaaaaatactgtgtttcattgaaggcttgggtgattgttagcattttttagcaatacaatatttttaaattaagttaggtacattggttttttagacataatgatattgcactcaatagattacagtataagcataacttttatatgcctggggatattaaaaaattgtgtgacccggtttattatgctacttgctttattgcaatggaatggaatggaacctgcaatatatccaaggagtgcctgtagttggaatcataaaga

SEQ ID NO: 121516 - DNA, 234 bp, Homo sapiens
catcgcctaggtacgtgcacatacatggtctcatttggttcccttgaccaccatgtgaagaagttgggtgtcatgtttataaagatgaaaaaacagggtcagaaaggttaaggattctcaaagccctatgaccagtaatgagagagtttggttcaaacactaagtgtatggctcctggtctggaacttctttatttatttatttttattttttgagacagagtctcggtctgtc

SEQ ID NO: 121517 - DNA, 651 bp, Homo sapiens
ggatggctaaggattctaggttggaaataatttgccttcataattctgaaggccttgctgcattgttttctagcttgtcatccttttgagaagtctgaagacattctgattcttgattgtaaaaatgttttgctcaatgttttgttttctggcttttgtgtttcctatattcctgaaattttcataaggttgtagcttggtgttacgtctatttataacaatttttcttggatatttgtgtaccttctgaatctgtaaaattcattagttctgggacattttctttaattattttattgacagatgtattagtctttgaggactgtcataacaataccacagtctgctctctgtttgtctgttattggtgtataagaatgcttgtgatttttgcccattgattttgtatcctgagactttgctgaagttgcttatcagcttaaggagattttgggctgagacaatggggttttctagatatacaatcatgtcgtctgcaaacagggacaatttgacttcctcttttcctaattgaataccctttatttccttctcctgcctaattgccctggccagaacttccaacactatgttgaataggagtggtgagagagggcatccctgtcttgtgccagttttcaaagggaaatg

SEQ ID NO: 121518 - DNA, 184 bp, Homo sapiens
aaatttttcagcagtacaacctgctgagctcaagctccatgtaactttgtatttccctgttcataattaactaattatgctctaatcaatagtgtagatcctgattttacaatgtaaatcagataaatgagataattgctgggtgtcaatctcattttatttacaaagcccagcatgtgcatcc

SEQ ID NO: 121519 - DNA, 200 bp, Homo sapiens
atagacgatccccgtacatgtagtgaggacaggttcatgaggctcttcatcaatttcacattaggttatgacactgtagatgacagcatgtgacataaacattctgccacagatttcatcacattaataatagtatccccagtgtgttcaagtagtcaataaagcagcccaaaagggctttttgaatttacacgtgaaca

SEQ ID NO: 121520 - DNA, 690 bp, Homo sapiens
tgtggtggcctgtagtcctagtactttgggaggccaaggcgggcaaactgcttgagctcaggagtttaaaatcagcctgggcaacacagggagacctcgtctctacaaaaagacaaaaattagtagtggcccatgccagcagccccgactacttgggaagctgaggtgagagaatcacttgagcctgggggattgaggctgcagtgggccatgatcagaccactgcactccaacctggctgacagggcaaaatcctgtctcaaaaagatatatacaaataaaactttaaaaataaatttacaaatgtccaaaacaaccatactacacagaactaggtttctacactgtcgaggaatctaatattacagatttctttctggattggtgaaggagggttggtatttccccactgaagtagacagtgtggtgtgtattgggtattattcaagccaaataaaaggaaatgcagtgggatttttaacgtttttaaaaatgttaataatgtctcactattttgcccgggcttgtctcaaactcctgggctcaagcaatcctccccacctcagcctcccaaagtgctgggatgacaggtgtgagccactgcacctggcctaaaatttttacatttaccccacaaatagttaattctaatcagcaccttaagaatattgactaaatactacatccaaa

SEQ ID NO: 121521 - DNA, 468 bp, Homo sapiens
acttaaaaaagtctcaagaggctacaaagatcttttaaatacgttaaaagctctaaacgattagaactgcctaagataatgtttctcttcctgaaacctgctttgctttaaactcaaaacattccttcagtccttgagcattaccttattgattctgaaaagggaggaagtcttcatgagtaggagtgtgcttctttatcattattatatactatgtccactacctcgaaatggagtggttcattttatttgtatggtttggtagctagcgaccctggttctatactggaatcgcctagagatactttgaaaaacacatatgcttgagccttgcccttagaaattctgatttagtgaatacaaagtataactcagccaactgagaacatacgacgtgcggtcggggttgagaactatttatgaggatagcgaaactagtgttttaggccctgtaaaatttactttaaa

SEQ ID NO: 121522 - DNA, 457 bp, Homo sapiens
cacttagaatattgctgaaaaaattagtcgcaagccaacttgtgcattaggaacaagcacaatcaaaaatagagacttctcacagaacggaagcctcgctgggctttgtagaactgaattaataatgactttacctttatagttggtttttctggactcatgtccacattagtatccttcaaaagtctgaactcctaattttaaaatgagtgattaaattccagtatcctgttcatactcagaaaaagaatttatattctttcaaataatctgcaccatttctaaaacggggctgagcagagaattctctatagggatgacagtccgcacgccacacttaccttcaataactgttcataaatgtgagcaagtggtaaatatgaaatgtgtgtgtcactggcactcaagggaagtgctttctgtaaaacacaacaacttagcagaacatacacaaaca

SEQ ID NO: 121523 - DNA, 216 bp, Homo sapiens
ctggcagtgcagtgggttgtttacaccaccatcaccacaaacacgcaagtaatgaattgttctaggatgttatgatggctacaacagcactaggtgataagaatttatcagctccactataatcttgtgagaccaccattgtatatgtgcaatccattgaccaaagcctcattatgcagtgcagagtaccatatcctagcatgaatgcatagttag

SEQ ID NO: 121524 - DNA, 173 bp, Homo sapiens
cctcagcctcctgagtagctgggactacagaaatgcataggaatatgctggtgcctgaatgtaccatccggggacctggagattgactcacctgcctccagagctggtgctcacacttactactgagaggcctgaggaaacgcctgcctacccaccaccagaacctgtatagg

SEQ ID NO: 121525 - DNA, 456 bp, Homo sapiens
agatagaatgtgatcacagcagcacccatctttccctacatccaagaaactgctcaacagacacactgcttaagagctggccccacaaccttacttttgtgactaccaaattgtatcagcagatgttctcagctaattttacatcagcaggtcacctctgtgtgacaatagacaccggcaaaaggtatggtaggtaatttgttactaatcacattttaaaatcccaacctggagccaatttggtgtttaatataaaagtgcacctaatgccacaactccctttattgttgcatgtggagaaagagaagggggtagggggtgaattggagaaggagatccaaaggcagaatctgatcagaaaatccagagctcagatccctgagtgcttcctggctcccatcctaggacagggaagaggtgtgggcatcactagccaaagcccctactgggtagata

SEQ ID NO: 121526 - DNA, 231 bp, Homo sapiens
aacttgactgtggttggcggcaactgtgcggacttgatgccaggccagccagcactgagttgagactgtgtaagtgtgctgagctcgtatttttcctagtcttctggttttgaaggttgggcaccatctacctgtgtaatagatgattaaaaacaggtgaaaaataattcgaacccaacttcatgttagtatttcccatcctgttccagtactgcctgaataaagttgcct

SEQ ID NO: 121527 - DNA, 483 bp, Homo sapiens
ttttcatcagaggcacaggtgcagtgctgggctcatagggggaaagtctacatggaacatcagtattcctgcagatgaaaagagatgcctttctgatttgaacagctggaacagcagggcacatcactagggaatgagagaagcttcatgagacctctgccattccagccccacaggagacagtgaacctgctcacaaatccagcacatcactactatcatcagcatctgagaaagccatcacacaaagattctctacaactaaggaactcatacagagtcttcacactgaaaatgctgagtcaaagctagctaagaaaccataaagtcacatccccaacgagtaaaaaaaaactaaaaaaaaaaaaaactcagttgaattagaaataaataagttccttctcactggggtagacaaaatagtctaccccaataagaagaaaccagaaaaataattctggcaatatgaaaaaaacgggattat

SEQ ID NO: 121528 - DNA, 654 bp, Homo sapiens
tgaaccactacacccggcctattagaattttcaacagcatgtaagatcaagttttctagaaagagttataaacttagtatttcttatctgtcagatatttgaagtaatctatgtagtagtcagccaaattatttctctgccaacaaaaggttaccccattttccctaagcaataatgtctaccgtctgttactatcattatggtacagctaatttgggatgctatcaatcagccaggttattagcaaccaggtcagtttggttttcttatattttctactttgtctatctagattataatggctttaaatcaggatttttatttcttggtcagtgaatcaaatattgggttattggctttatgctactttaggaccaaaaatatctataccactgatactataaaataatattcttggccaggcacggtggctcatgcctgtaatcccagcactttgggaggccaaggcgggcggatcacgaggtccaggtatcgagacaatcctggccaacatggtgaaaccccgtctctactaaaaatacaaaaattagccaggcatggtggcatgcacctgtctcagcctccccagcagctgggactgcaggcacacgcctgcatgcctggctaattttttgcatttttagtggagattga

SEQ ID NO: 121529 - DNA, 399 bp, Homo sapiens
accgcagctctctctgagtgttagcctctctcctgaatgacgtggttgcacggacagagggtctcctcacttctcagacggggcggccgggcagagacgctcctcacctcccagacggggtctcggacgggcagaggcgctcctcacatcccagatggggcggcggggcagaggcgctccccacatctcagacgatgggcggccgggcagagacgctcctcacttcctagatgtgatggcggctgggaagaggcgctcctcacttcctagatgggatggcggccggccggagacgctcctcactttccaagactgggcagccaggcagagggggatcctcacatcccagacgatggggcggccaggcagagacaactcctcacttcccagacggggtgg

SEQ ID NO: 121530 - DNA, 279 bp, Homo sapiens
caggaaagactacagaagtagcgaaaggcaaaatgatgctgtttaagtaacaatgtttaaaatcagaaaaaatgtaaaaaatctagcacaactaggcctggtgtggtggctcacacttgtaatcctagcgctttgggaaggcgagtcgggcagatcacctgaggtcaaaagttagagacctgcctggccaacatggtgaaactaaaaataccaaatactaaatactaaaatactaaatattaaatactaaaaataccaaaaaaaaaatcaagcccaact

SEQ ID NO: 121531 - DNA, 168 bp, Homo sapiens
ttaggagctcctggatctgatctctgggttctgatggtccgagtggaagaaactgagcccctggagggtttgccagcacaatccatccattctttcactctcccattcaacgaacacacattcatgtagccagctctgtgccacacgctgtgtagacctgctgcgaat

SEQ ID NO: 121532 - DNA, 409 bp, Homo sapiens
aaaagatcttttagctcggggtggtagtacatgactgtagtcctagctactcagggggctgcaatgggaggatcacctgagccctggaagtggaggttgcagtgaaccataattgcgcaaccacactccagcctgggctacagagcgaaaccttcctcatcttaaaaaaataaaaacggccaggcgtggtggctcatgcttgtaatcccagcactttgggaggccgaggtgggcgggtcatttgaggtcatgagttcaagaccactctggccaacgtggcgaaaccccatctctactaaaaatacaaaaattagctggacgtagtggcatgtgtgctcgtgtgtgtgctgtgtgtgcgtgtgtgctgtgcgtttgtgtgtgctgtgcgtttgtgtgtgtgctgtgtgtg

SEQ ID NO: 121533 - DNA, 460 bp, Homo sapiens
acacggaggggaacatcacacaccagggcctgtcggggagtgcggggttaggggagggacagcattaggagaaatacctaatgtagatgatgggctgatgggtgcagcaaaccaccatggcacgtgtaacaaacctgcacgttctgcacatgtaccccagaacttaaagtataataaaaaataataataaccaaatcctgcccccaatccaaggccacaaataatttaattaaagcctataaaataggacacacagaaaagtcactctgtttccttgactccacaacttgtatgtgtggcttataatgcatttactttattatcactctcgataaactctgggggagaaagccggggataacacacctaatcctttcatgaaatgtctaacatggcctcgagtgtgtgggatcttttctcaagcccccatgtctgagtgccatttgctgatggcccttcc

SEQ ID NO: 121534 - DNA, 450 bp, Homo sapiens
ggcattccaaaaacattttcctattgtcaggtgtcatcacctgaagccctcttcaagcatagaacattctaacatcaattaggaaagacttcatgtatttcctggaaatgacaacagggaagttagaaatttttgaatgttcctttaacttattcttctaaatattctaataagtcaactttaaaggacaggttttaaagaaagggcttttctttctttccaggaaaggagagtactggctatctggaccttgtgaaaagatttttagtacactacttagcttcttgatttcatgaagaattcattttggtttctaatatactgatatggtttggatctgtgtccccacacaaatctcatgttcaactgtaatccccaacgttggaggtggggcctggtgggaggcgactggattatgggggtgtatccttcatgaatggtttagcacga

SEQ ID NO: 121535 - DNA, 289 bp, Homo sapiens
ctcctgcctcagcctcccaagtagttggaatcgcaggcatgcaccaccactcccagctaattttgtaattttagtagaaacagggtttcattatgttggtcaggctggtctcgaactcctgacctcaggtgatccacctgcctcagcctcccaaagtgcttggattacaggtgtgagccaccacgcccggcctgtgtgtgtgtattatttgattgtgctattgcactccagcctgggtgataccccatagagagatactctgccaggctggagtgcagtagctcagttt

SEQ ID NO: 121536 - DNA, 558 bp, Homo sapiens
aaatctgagttctgccatcctagcctcctttctctgggaatttttaatgaattgtgtcctaatgggtccctgtatagcactgtagcagctttctcaggaccgataggtaggactttggagaccaccctggtccattctcacattcctgaggtgcaggaaggtcttgcccagtttgtgcatgaacttgacaggcaaataaaccatctaatctggtgaaaagcaaaaagcaatatggagagacctttgggggacagcatgttgacttccaactataaaaagattaagtacagttagaatacttttcccatccaaagtaaccttcaaatttattacttactggccagctttacaaatgtattcacacagattaacacgttgtgaacatgctctgttaatattgggatctgaaaaaaaaaaaaggagcaagctccaaacaatgttgagggggggaaagcaaagtgaagcagggtaacattgtctctgctcagcaaaaagtggtaggggacattatctaagataaataaagtaacatggaatacaactttgagaccatacact

SEQ ID NO: 121537 - DNA, 323 bp, Homo sapiens
ttcttgaaacttatgtgcttagtcatatctgcttctgtcttcattcctgattgtctcttagtcattgtttaggtcttggcttaaatgtaaattcctcacataggcattccttaactgtcttcattagattaggctctctgctgtatttttccttaggaccctacacttaactcatcacattttaaatcatttattcattcatctattcagtagatatttaccaagtgcacgcaatttgtctgacactgtttgaagtgctgttgatatagtagtgaacaaaagagactgaacatatttttatgccctcaaggagcttacactat

SEQ ID NO: 121538 - DNA, 325 bp, Homo sapiens
ggttcttgctttttgtgttctaagaaaatttgcttaaacaggaccaagtgcggtggctcacgcctgtaatcccagcactttgggaggccgaggcgggcgaatcacaggaggtcggcagtttgagaccagcctgaccaacatggtgaaaccccatctctactaaaaatacaaaattagccgggcatggtggtgcttgcctgtaatcccagctgctcgggaggctgaggcaggagaattgcttgaacctgggaggcagaggttggggtgagccgagattgtgccgttgcactccagcctgggcaacaagagtgaaactctgtctcag

SEQ ID NO: 121539 - DNA, 339 bp, Homo sapiens
acaagtttttattactgcagttgtaaaacaaagactgatggctattttttatgtatcatcacagttaactattttcagaatcttgagaggtttaatctcctttctaagtcttttattccatttagtgacaactgttttttgacaatgtaatatatactctagtataatttaaaaatatctacaagttgtcaagttgaatggctgagagatttgtttaaagaaatgtgggcaacattcttgtggttggaaaaagtaagggaaaaatgaaagtattgcttaaaagctgttttcaaagcttgcattatgaaagggattatatgtgagatttagagtcttttt

SEQ ID NO: 121540 - DNA, 317 bp, Homo sapiens
atttccaccatttcacccaccaaaaaaagtccccataaacagtcctcattcccccaccaccccccacaccacccagctcttggcaaccactaacctactttgtttctgcggatttgcttattctggacagttcatataaatggaatcatacaatatgtggtcttttgtgactggtttacttcaattaccacaatgttttcaaagttaatctatgcttagcatatcaggacttcattcttttttatggccaaataatatccactgtatgaatatgctacattttgtgtatccattcatcagctgagagacatttgggt

SEQ ID NO: 121541 - DNA, 716 bp, Homo sapiens
cctgtaaaaagtgtggtcattcctgctaggagttctacccttgaatcaggcattaactgctcttttttaacctcaattctgttagtactataatggtgaaatattgagtaataatcatctgtcataagtgtgtgtgtgtgtgcgcatactaattacttgaagctttttttttttcttaaagctatatgttgctcaccactatttgatctcaggcttaacagttgaggtttagggttacaaaaatgggatctatctatacctgattaagcagaatcaatattaattgaaggatttaaggtggcttaaagaatcgatgaggagtttggagaatccaagctggacctgaaccacagaagacaaaaacttgagatagaatactgtatgttagaatctcttttgttgacaccgctgttgctgggctctcttcagcttacctttggagtctattgcccatacttgctccacagcactgggctctcatctctgtggaattcactggaagacaggtcgtgcacctttgcgtctcattcttaacactaaaaatcttcggagtatctgtttgggtgggctgaaatcgcccctttaaagggttggggagagagtgttagttcccctttggcatcagcagtggaaagtgcctgccatccatcttggattctctctgaatatgaagagtgcttagatgctgggaagacaaaatgaaatgaggctattgc

SEQ ID NO: 121542 - DNA, 718 bp, Homo sapiens
aatggcggagggaggtaccctgctgaggggaaggggggatccctgacacctgggcttccccgggagtcggctgtggagtcgagttgagctccctttccgggtctggggaactcaacctcaccttatgcctggggtctccggggaactagtgggctttctgcaacggggggaaggaggggacgactcccgcccctagtttacccctcaaaagttaatgcctttgtcggaggaagcaatttcagtccactctccttttcagtccctgttggccgcttaaactaaaaggctacagacgggcttaaatgcgtctccgctgtgtttcttatgcctcgggccggcagggtaacgggttctagtcacagcttgtagagttcaggatgggtgacattcaggtcctattgtttttgagtcaaggtttcggctatagcttcttgaattatgaagctgtcataataaagaattcctgattatctaaagctgttattcttccctacttccaaggcagaatttgaatatattttggtggatgaaacgaaaacaaggagagtcttgtgactatgagatactagctggttgatgtatcatgaaaaacttagtggtccctatgtgggaaggtaaatggaaaactgcaaaaagagcaagaatgaattacaaagtgaaattagaagaaatatctggcttacttgtggatgctttgtacaccaatacaatatattat

SEQ ID NO: 121543 - DNA, 137 bp, Homo sapiens
ttggcatgagccactgcgcttagcaatgtattctttaatgattttgaaaacaataatgacaatgctttggacatgtaatgtcaagcgcacttttcattatctagtttgaatttttatttctgaagatatttttgctg

SEQ ID NO: 121544 - DNA, 270 bp, Homo sapiens
ggaaatgacctttttcccctcctctgggagccacatctcatcctgcctcactgggctgctttcactatcagagggtcattcatactccgaacagctaggaggtggctctggagaaaaactgcctgagttcactccccagcccagccgcctcagggtatgtgagttgtcttctctgtacctgttttacagctggggaaagtagtaattgtacccacgtcagtagttaatgcctgcaaagagtttagaacagcttggtgggtgcagtggctc

SEQ ID NO: 121545 - DNA, 282 bp, Homo sapiens
cctgtcacccagatactgagcatagtgctggtatatttcccagtcaaagatggtcctgtttaaatattgttgatttgggaagagtaaggttaaatttcaaaaagagaagttcttgcctatttggaaatacatactgaaaacatttaagatgaaatgaaatggtctcagagatttgttcacaaataatctggaaagaatagtggggtagggttatagaggaaaaaagattggccttgttttgataatttttaaagctgagttatgggtacatgggagtttatt

SEQ ID NO: 121546 - DNA, 515 bp, Homo sapiens
acaatgaaacaattcccacctgaaaaagttatctataggacttaaagcattcaatgttcctatgttgcgagaggatgagttcagcaaagccagaggattctgcagtgttctgtaatgaatcctgtagtgttctagcctgaagcaccattggcacagaagctaggcacaacagaatcatttcaaaatgactctttgagtgttacgtgatttttaacaagcagttgcacacagatccttttgttagccactaacacaatatgatagccatctctaaaccattttatacagcactaatactgaagagcatgagaaaggaatggggagttcacagctcctacagtcctcatgggcacaaggaacagaccaggagaaaatagctctgttctatgcaaggagaaatgatcccaacccgtcccactctaccgtctcacatcaatccaggccatcccctcccttttgagagtttgcaacaaattgacctttgtcaccttggtggaccagaatagatgcagagc

SEQ ID NO: 121547 - DNA, 613 bp, Homo sapiens
aggacagtctcgattcgggcctgagccgtggaagccgttggccttcgcacaggaaagaggagcccgagatcagtctctctgcgcctccctgcttccccccttgaatggagctgcgttcaggagctgcctacagtgcccagcgcatggcaggtttagtgttgcctgacttcagatatggcctattgttggggctggatgtttgggcctcgtggcttgaccaccaatggctgaagcaaacgctagctctgctgagctctgggccagcccagcttgtccttgccgcctgcagtgggccccaaaggtggggggccgccttcgggagcctgtgtgagctcgggttatgcccttccccacatggggcttccctccccagcaccgccctcactctaactcagctggtccttgctgccaggtcttccacaggagcatatgccctcaggctgtgcacaggccccccagcaccccgtcctgcctccctggcctgtgtgagtgattgcgctgaaggccactgggagaagccagggcaggacgcaggctgcacagatgacggggatcacactggccttccttgaaggacacgatgcccgatgctggtggggggagggcagagcca

SEQ ID NO: 121548 - DNA, 238 bp, Homo sapiens
atatgtaacatacccattaatattttatactaaatacatattgaaataatgttgagttaaataattattcaaattaatttcacctgttccttgcctgctttactggaactattagaacatttaaaattacatatgtggcctacattatttttccattgatcagagctgagctagattgtaaatacttagttacattaccatgggcacacctgcacccacagtcacatgacgatgagct

SEQ ID NO: 121549 - DNA, 396 bp, Homo sapiens
gacaggtttttttttttgtttagtgtattgacattgatgccaataagataaaactagacctcagtggctcctcctcaactccacccaatctatttgtctccaaagtgctgttggagtaagtaatctttgttaagagcaaacctatttgtatatctgatgataatctgagggataataatatgatatttaaggagtttctgtccttggccctgactatttcctggtcctccttcacgcccagtgatgtgctggtaaatgttaaactctggggggaggggcagcagaagcccctaatttgtagcatttgccaatttctatggtgtaaatatcccactgagccagtttcaaggtaccactgaaacagcgttagtcactgaacaacaatgaggaagagat

SEQ ID NO: 121550 - DNA, 326 bp, Homo sapiens
cttttcgcaggggatcactggattgactctaggagaaagagaagctatgcatgccgcaaacacctgcacaccaccattcatcctgcccaggctgctgctgagtggagctcaggcttgcaagtttgtggatcagtgtgccccacaaagcgtgcttatctctgcctcaccccctagggggagtggggataggggtagtggaaagtaggtagccagcccctactttctgctgttcccactccaaaatgtacatatttgtcaaaaccttccagattccttctgagtggaggatgtggcagtatcaccttctgtctaccctgagtgcctca

SEQ ID NO: 121551 - DNA, 786 bp, Homo sapiens
cacagtggctcacgcctgtaatcccagcactttgggaggccaaggtcggaggatcacgtgagcctaggagttcaagaccagtctgggcaacatggcaaaaccccatctctacaaaaaataaaaaaaattagccgggcatggtagcatgcgcctgtagttccagctacttgggaaactgaggcaggagaatcacttgagcccaggaggttgagggtgcagtgagccatgattgtgccactgaactctgacagaatgacaccatgtctcaaaaacaaagaaacaaaaaaacactcaacaaactaggaatagaggaaactatctcaacataatagaagttatatattaacaacccacagcagacgtcacattcaatggtaaaataccaaatgctcttcctctaagatccaggaacattacaaggatgcctaactttgccacttatattcaacatagtactggaagtcctaaacggagcaattaggcaagaaaaagaaataaaaggcatccaaattggaaaggaagaggtaaaattatctctgtagctgatgatgtgatcttattttaaatgctgtgatcctaaggataccaccaaaaagtctgttaaaaccaataagcaaattcagcaaagtagcaaggtacaaagtcaatatgcaaaagtcagttgcatttttaaacatgaacaatgaacgatctgaaaaggaaattaagaaaacaatttcatttacaatagcaccaaaaagaataaaatactggggccgggtgaggtggctcatgcctgtaatccca

SEQ ID NO: 121552 - DNA, 312 bp, Homo sapiens
tgcaaatgaggaaattaatggaggtccagagccttgtgcaagatcacttaactaaaagcatcagaactaggaactgaaccaaatgttctgactgtaatggaaataattttctctaaaaatctttgcttttgaggaaccgctccataaaataattgtaccctgcggagtagtttggatggggctaacctgtttctccaggttggacatataacccaggcttggctaaagtaaagtatgtccctacccccaaccaagtttgaatgattaattccaggatggacagtttactccaagtgtttgtggggacttttc

SEQ ID NO: 121553 - DNA, 220 bp, Homo sapiens
cttcagtcaggcttcgatgcagagtctgaacccggtctggacgaggagctgtagtcttctccagggctgtagaatgtccagtctctgtagtgggttctggaatgatggcaagtcccaggtctggaggctgagttgaggtctcctccgtggttggagatggtttaacctctgtagtaggttttgtagttatggtaagctccaggtccagaggttgaacggt

SEQ ID NO: 121554 - DNA, 348 bp, Homo sapiens
aattctgagccttgcagtgtgcctttgctattaaagtgaggatattgactaggaatgaatgggatcctgaaaattggaatggtgacatatgggaagatcctgttgaagctggtaatattgaatctctaaattctgatgagtcttcattgccagtagaagcagagttaactgatttacccaaactgattatacctaattgacattaactgctttccctgaggaaactgatgtcttcctctgagataattgccttgcaggacactgctgattgtcctcaggacccaccctgaccacccctctttggttctaaacctataactagattcaagtcccagcaggccccaaagg

SEQ ID NO: 121555 - DNA, 293 bp, Homo sapiens
tgatctgatgaaaatgtcaaatcagtataaaatatcaaataatgattaccctcaatttaaatattgtgatcataagcttctgaaatttactaagatataatgtatttatttatggagtaactaggatttgcatggcccaaatacaggatactgttagagagaacagcacttagttcccctagaggatcttgacttgtatggtatttttacatatgattctttagtatatggcacattaggtagataaaatatgttctttgccctaagctaactccggtatagtaggggaggca

SEQ ID NO: 121556 - DNA, 503 bp, Homo sapiens
gataaaggtctagtaggtgaataggtgtgtttactataggtgaattggtgtatattttattttgtccctgttcctaaaacattgtatctcatttctgaggagaaattccaacgagttttttaaaaaataaagtggtgtactttggctcgacaaatatttttaaaactaagcaattttataatgggttgtatagttatctttcaattaaataattgtaatcttactttgcaatagagtgaccagtaggtaaagcattatagttttaaaattagcatagcaaatatatagtattaagttttctttactttagctctttgcagaatctgtaaaagttgtttccgttggttgaatggaattgtggaaactttagaagtatatttcattttgataaatatgtgttagaaagagattctacaagcgtttgggggttgagttaaagaattatacaattttgaaaatcagtttgtccctgcttaatttgtaaaaagtggtgctgtatgtga

SEQ ID NO: 121557 - DNA, 685 bp, Homo sapiens
aactgaaaaaaattctgcacacattgggcttcctttccagtttataacatcataatacagttccatgttacatattatatgtttctcattcagctgttgctgtggaataactagagaaactgggcatgtggttaaacttcttttccaagcatctcctcttgttgattgcaaaaacatttctttttagcttaatcctttattcatgtattactgctaaacattttagagctgagtaaaccaagactcttttttaatcctttattttaaaatggcagcattagaatatttgaaattttcttaaatgaatataaaagtcgctcttcttttataaagacaattttaaagaatacttgacctgaggagtgcttactgttactacactaataagtctggattttacttgaaaatacagtgaattggtttagaaggctggaaacaaactgaagaacacatctaattcgtctgttctaagaaggactcactcattttaggaaaagatggtccattatgattttattttttctaagactctaattagagcctattctacttcttaataatactattccagtttcaaattgcccatgtttaaccatgtgctcttaataaaatttatgctttttattcttcctacttaggaaataatacagtctgttaacataaaacatgtttccataaacgaaat

SEQ ID NO: 121558 - DNA, 218 bp, Homo sapiens
tgacgatcactaatggacatcactaatggacatcagctgccaacagatacacggcttgcatcagtctttctgtgacaggcacatagctttccccctctacatctactgacaatcacattctgccctagtactcctttcttcatgtttgtgaaaagatactgtctccttaaacactccatctcatttggacttggaaaaagaagccaggaaagggtaat

SEQ ID NO: 121559 - DNA, 347 bp, Homo sapiens
gtcggtttgactctaaggatcccgggccagggatggatttggaatatgtatttccaaatataatcaatctgacatggtgatgaattggatgagaggtaaaaacaagaaggtgtcaagtatgactccagatttctggcttaagcgagtaggatagtgggctcttttgctgagactaaatgaggtaaaaatggactagaagaaaagcctagttggaagcaacagtcacgagttcagccttgaacatgtgtgagagacatttaagtggagatgtcaaactatatatgactaagaagctcagaagaaaggtttaggcaggagggataaatttctgagttactggcccataa

SEQ ID NO: 121560 - DNA, 547 bp, Homo sapiens
ggaatgcaatggtgcaatcttggctcactgcaacccccgcctccccagttcaagtgattctcctgcctcagcctcccaagtagttgagattacaggcacccgccacctcacctggctaatttttttttttgtatttttagtagagacggggtttcaccatgttggtcaggctggtcttgaactcctgatctcaggtaatccaccctcctcagcctcctaaagtgctgggattacaggtgtgagccactgcacctggcctaaaacaaaatatacttaatttagaaaaataaacaagagaaaataataagtagacatcttcttttccttttatattgctaatgtgtgcattctacataaactgcaatttttttttttttagtcagtaattctcatctcaaacttttagtgttccagtgtttgtttaaaatgcagatcccagggccctacaccatacttattaaaattggttctggtggtttctggaataagccctggaataactccctaggtgatcctgatgtaggtggggttcaaatctcttgcctta

SEQ ID NO: 121561 - DNA, 396 bp, Homo sapiens
cagctcttgtatccacagttaatccaggaaaaagagaaaaaagcaaatagatgaaggagcagtatggctgattttgtccttttaaaggtttttccagaatctcaaatcagcaatttgtgcttacaactcaaaagccaaaactgagtcatatgatttcccgctttcttgtaagagagtatgaaatgatgagtgtttcgacttctttgcctctgcaagcagagaaaattaataatagtccatccccttggctatccagcatccatgacatcaataaaggtgacatgcatacatacattttaggtggcatgcattaattctttcccaaaaagaacccacctcaaagctgtgattgcatctggtgactcggttatctccaacaggcccatggctcctcct

SEQ ID NO: 121562 - DNA, 286 bp, Homo sapiens
cttgcattgctgggaaacattgatgtgtggggactcactcctctccgtgtgctcttttgtcagatgacttccatagatctatgcactgagattcgtagaaagctgttggtggtggctctgctgggcgtgaggccgtcggtcacagcgaaggagcttgcctggccctgggaggcccaaggatagcagggccagcagagggcatgggccgttcttctggggtttgcatttggggccccagacttgggtttgccaatctagaaactgttgcactaagagtgacaccacg

SEQ ID NO: 121563 - DNA, 131 bp, Homo sapiens
taaattcaacaggtgtcatttctccttaaaaccaaatgatttcagtatgccaaaacacttgtcattggaggatgcagtagggggactctaaaagtctatcctttcttgttaatatgaagacagataaacga

SEQ ID NO: 121564 - DNA, 281 bp, Homo sapiens
tatccatatccccatgtgaaaagctgaggggcagagctgacagtcacaaactcaccccagtcaaaagtatggacaacacaatgattaaattccaccagaggcaaataaaaatcccaacttaccagaaagctatccctacaccaaattgaatccttttactttcactcccacaaagaaggtaatctgaaataaaagtcgggtaactgggtatggtatttaaaatgagtcgaagaaactacactgaagctactatagaggcgctgaaaaaggtaacccaaaag

SEQ ID NO: 121565 - DNA, 398 bp, Homo sapiens
ccaaatctctaatgggcagatttctctaaacacatgtagtcttgggagacacgtgtttccttttgaccatttacgtgtggtgcccaccatgcattctcaacggggatgagcaaaattggtactaggaaggggacgaaaaccttcgctattacaaaggtttttaccctccaaagtttagcttagcacaacccaataaaatcttattccttagtgttcaagttctcttgttagaaagaaactaaatttaaattcatttagtttttctctttaggcaggcggtaacaaaaaatgctggtaaaacactagtgtgcaccaccaacaatgcatgtcttcctcacattctcagggacacgtgcaagacacaagagcatgaggagtgtcttaaatatatccaaaag

SEQ ID NO: 121566 - DNA, 335 bp, Homo sapiens
actttggtcacaatcatttaactagtgtctaatatgtttcaaactttccctcatcttcctgttttcttctgagctctccaaactcttccaacctctctctgctcattacccagatccaaagtcacttccacatctgcaggtatctttatagcaatagtaataccccactcccagtaccaattttctatgttagtccattcgtgttgtcattaagaaatatctgagtctgggtaatttataaagaaaagaggtttaattggctcagcattctgcaggctatacaaacacggtgctagcatctgcttctagtgagggcctcaggaagcttccaatca

SEQ ID NO: 121567 - DNA, 191 bp, Homo sapiens
catcctggggttctaccgataaaatgtgacaatagcttcttgtagacacctaccacgtgtcaggtgtttttgacagatttcatcctctcaacaagtctatttatcacaccatcacactggccaggaaattggattaccagaagggtcaaggaagctaacaaagtcacactgcctagtgtcagtcacaagcg

SEQ ID NO: 121568 - DNA, 260 bp, Homo sapiens
atcacttgctgatggattggagggtgggatgaggaagagagaagaatcaaaggatgacctcttggttttggggttgagcagctggtaatgcaacaattgggaaggttgggggaggagcaggtttatagtagaaaatcagtagttccattttggcactcatatctgcaggcttaggaatcaaactatctggtccaattccagtctctgccactttgtatctgggcggccttctctgggcctcagttcttgtctgcaaaaca

SEQ ID NO: 121569 - DNA, 358 bp, Homo sapiens
agagagtccagcggcagcaggctggacaggagagctgccttatgtacagaaagagtccagtggcagtgggctggacaagatacctgccttcgtacagcccagtggcggtgggctgggcaggaaaactgcaattatctgcaaacatcacgcagtttatatagcattttcacttaacactctcccactaatgaccttgatacggtttaaatctgtgtccccctccaaatctcatgttgaagtgtaatccccagtgctggaagtggggcctgctgggaggtgcttggatcatgggggtggtttctcatgaatggtttagcaccatccgcatcgtgttgttcttatgatagtgttctcacaa

SEQ ID NO: 121570 - DNA, 351 bp, Homo sapiens
gctgggattatagatgtgagccaccacactgggccaaaagacagctttttttaaaaaaatagagaagctacaggctgggaaaaatatttgccagtcttttttttttcccgcttgttgatccatcactaagagttataagtaatatacaaagtcttacaactcaagaacatacccaattaaaaatgggtaaccagcagctttgtacatgttaaaaaaataaaaacaaaaagattgacttagattatgtcaccaaagactgacataagaatggccaataaacacatgaagaggtttgacatcactagttaacagaaaaacatgagttagaatagtttacaggaacataccaaa

SEQ ID NO: 121571 - DNA, 183 bp, Homo sapiens
ccgagattgcaccactgcactccagcctgggcgacagagcaagtctccgtctcaaaaaaaaaacaaaaagagaatgggtcttgctacattgcccaggctaaaaatctatgttatctgactgctgttataggctgaattgtgtcctctctcctcccactcacacccccaccccttgtcacccaa

SEQ ID NO: 121572 - DNA, 428 bp, Homo sapiens
ttccttgctgtgtgaccacttataagtcacttaacttccctgagtctcagtttccttaggtataaaataggactagtaatgctttgctcaaatatcatcatctccgtgaggcctcctccctggtgtcactccctacccccttcctgctttattttcctccctagttcttaccaccatcttttatcccatgcattaggcttaccttttctgatgattttctgttcctatctccacccacagggatgttaattctcatggaaccgggatctgtccgttttgctcactactgtatccctggcacttagacccagcaacaatacaaagtgcatgctcagaaattttggggaaaaatttatgagatactattgaattgtatccaccccagaggagtgtcaatgtatgcaaagtaggcagtgtggtgcttggta

SEQ ID NO: 121573 - DNA, 393 bp, Homo sapiens
agctatagttaaaatacactaatttacatctcactcctttgaaaagaggcgtataaagcatgatccctgtctcaaagggcttagagtctaactggagaagactaataatactcatgaaactactcatctcaattgaaggcattataataaagtgctaaaatgtgtggcccctacttgtgataaggttcaaactagcaaatgcaggaagactagtagaatttaaatcactatttatgctttgggaggctgaggtggtaggatcacctgagaccaggagctcaagaccagcctggacaacatagcaataccttatctctacaaaaatgtttttaaaaattagtggagtatgttggcacatgcctgcagtctcagctactcaagaggctgaggcgg

SEQ ID NO: 121574 - DNA, 243 bp, Homo sapiens
gcaactaaatgatgtatgttctactctagtgtacaactataaagacctggacagaattgcctacataaaattgttctacaaaaaagattattgctcttgtacatcctatttttatataccttcaaatcttttatgtcatttgactataaatggtcaagttggtttggtttgtcatcatgaagctataactatcagttgttgatatcctccaaaaaataaattgaggaaatatataggtaactt

SEQ ID NO: 121575 - DNA, 815 bp, Homo sapiens
accgtgtgagctccgcctcccgtcagagcattaccgtgtgagctccgcctcccgccagagcattaccgtgtgagctccgcctcccgacagagcattaccgtgtgagctccgcctcccgtcacagcattaccgtgtgagctccgcctcccgacagagcattaccgtgtgagctccgcctcccgtcagagcattaccgtgtgagctccgcctcctgtccaagcattactgtgtgagctccgccccctgtcatatcattactgggcgagctccgcctcctgccagatcagtggtggcattagattctcataggagtggaaccctgttgtgaactgcacatgcgaaggatctaggttatgcgccgcttatgaaaatctaatgctgatgatctgagatggaaccgtttcatctccaaaccatccccaccatccccacacttgtccgtggaaaaagtgtcttccatgaaaccagtccctggtgccaacaaggttagggaccaccagtttaaataaccaaatactaaaagaactggcatagaagtaaatgggctgctgctttatttttaggctgttctttttagagaacaatgacaattatttccaagtttgtcattagaaagtaatattaggttggtgcaaaagtaattgcagtttttgccattactttcaatggtaaaagccacgattacttttgcaccaacttaatatgataaatttgttccttaaagtgtatttttggtaagaaaaaccttttgtttttccttatattaattttttgttttttttcttggtagagacagagtcttgccatgctgccca

SEQ ID NO: 121576 - DNA, 279 bp, Homo sapiens
aggatctccatcagcagtggtacaatcatagctcactgcagccttgagctcctgggctcaagtgattctcctgcctcggcctccctgagtagctgggaagacaggtgcaccaccatgcctagctttttttttttaactttttattttttgtagagatgggatcttattatgttgcccaggctgacttaattgtttctttggttgaattgttccttcctgaaggtaggaggatacctctctgcctaaaggtaaggtccagcagaggaaaaaaggcaaact

SEQ ID NO: 121577 - DNA, 710 bp, Homo sapiens
cggcccccaaacacaggtggcttttgggcccaggtgggtcagcctgctgcccctggcccataccctctcaggccattgggacccctgcccttcagatgttctagggtctaggagtggaccagtcaccctgggaagaggccagggccttggcaggaggggtggcccaggcaggacccagtcctgagtcctggagcaaggccagggaggcgcccaccccaccccggccagctgccctctctgctgtttgttctatttgttcttcttttcacccatagccttgtgttcctgtcatccctcctttcagcaaaagtccttttcccattccctctgtccccaccaactgctgttccccaagaaaataagctatcattgtatttgcaatctatggattagaggttgaagtatttattattattggttaattattattaattatataaaatatatatattagaacttggctagccaattttattgaacaatttctgttcaataaaatgttgtttaaagtacagtttagaaaactatggtaggtttatttcttgaactttcagaaattcaagcttaaagcatcacacgtttttctaatattgtgtggcattttctgtcattttacttttttaacctttatatggaataacaaccatcagccttgtctttcagatgtgccatttgggggtgctaaagctggtgttaagatcaatcccaag

SEQ ID NO: 121578 - DNA, 428 bp, Homo sapiens
ctacttgccttacattagatatttatatttcatgttccttttcatgattgaggataatttggggtaagccttaggattatttgctgtaaattggaatgatccagaataaggcatgccttctgtgtgagaattcaacagtaagacaacaaattttttttttgtgctgctctttctagtgctatttccttagtttatttaaatcgaagctaggtggcttttgaaatggttttggggtacaggcttctcacagtaacattttaaaagtctgcccagtgtatcctatcttttcaacctgtttctcaatgctttgcatacctttggctatgtctgtatttaggtatttaatgtcccagtttcctggaactccctcttctcctttttcgggcaaatggctgtatgcctaccaagaggctatggttcatcttttc

SEQ ID NO: 121579 - DNA, 675 bp, Homo sapiens
tgcagtggctcacgcctgtaatcccagcactttgggaggccaaagcaggtagatcacctgaggtcagaagttcaagaccagcctaggcaacacagtgaaaccctgtctctactaaaaatacaaaaagacccagaaaaattaaccaggtgtggtggtgcacgcctgtggtaccagctactccagaggctgaggcaggagaattgctgagcctggaggcagaagttgcagtgagccaagatcacatcactgcaatccagcctaggcaacagagccagaccctgtcaaataaataaataaataaataaacaaacaaagtactagaactcaggattctcatttctgagatcaaaggggttgaccagatgatctctggggtcccttccaggttgaacactctctgattgcataaagtttaaattggttctgaagctcgtaacagtacaattttaagtttctattttaggaaaaaagagtgacaccagctgggcacggtggctcacgcctgtaatcccagcactttgggaggctgaggtgtgtggatcatgaggtcaggcgttcgagaccagcctggccaacatagtgaaaccccgtctgtactaaaaatacaaaaaaattatctgggcctggtggtgggtgcctataatcccagctactcaggaggctgaggcaggagaa

SEQ ID NO: 121580 - DNA, 927 bp, Homo sapiens
atttgactgaacctgggatataactgtgcgactcttgtcaccggagatatggggagatgttgttgtcaatggatcctctttatgaagacacaccagagagatgcctattgggcatcagcaccaaaaaaaggccatgatcctcctgagcaaccagttcatgtttgtcttacggattccaggaatcatttaattaacactattttccaggtttgtagtagctgctgcaaagctcaagatcaaagccatggtgcatctttatcacctacaaagaattttgtggtgtgtgtgttacatattgacttggttctgcattattttttgtctttttctcttcaccctctgatatggtttaggtctgtgtccctacccaaatctcatgtcaaattataattctcaatgttggaggaggggcctggtgggaggtgattggatcatgggggcagacatcccccttgctgttctctcaataatgagtttttatgagatctggtcgtttgaaagtgtgtagcacctcctcctttgctctctttttcctgctggccatgtgaagatgtgcctgcttccccttcgccttccgccatgattgtaagttttctgaggcctctccagaagcagaagcctgtatagcccacagaactatgagtcaattaaacctcttttctttataaattacccagtctcaagtatgtctttatatcagtgtgagaatgtatgaatacaccctcctttccttaactttttctataataaagctttttaattgagataattcacatatcataatattcgcccttttaaagtgtacaatccagtggtttttagtgtatttacaagattgtgtgaccatcactactaattccagaccatttccatcaccccaaaaataaactccacacccattagcagtcacttctcactctctcttcc

SEQ ID NO: 121581 - DNA, 995 bp, Homo sapiens
  misc_feature (461)..(461): n is a, c, g, or t
  misc_feature (485)..(485): n is a, c, g, or t
  misc_feature (524)..(524): n is a, c, g, or t
gatcacagctcactgcagccttgacctcctgggctcaagtgatcctcccaagtagctgggatgacagggacacgccaccacacccagctaatttttgtttttttttgtaaagacggggcttcaccatgttgttggccaggcaggtcctgaactcctgggcacaagtgatctgcccactttgtcctcccaaagtactgggattacaggcattagctaccacgccaggcctatgttttctatctgtgaaaattagatgaaaacatacatgtaagcaaatacatgggagacttcccttctggtaaaaagaaagagagcaatcacctaggtagtttaagaggacagctgataaaatggtggtgtgtttgttttaaggttgaagagacttttttttcttttcttttcttttcgtttctttcttttttttttgagacggagtctcatgtctcgcccaggcagagatngcagtgagctgagaccacgccatngcactccagcctgggtgacagagtgagactccatctcanaacaaaacaaagcaaaaccacaaatatttgggcaaactgacattgaaattattttttaaggagcaggagaaatggtgtattcaatatccttgtgtactgaattggatcatggaaggagttaaggggtcatgctggaaggctctaatggtctaggacttattgctattaaaaataatagttccagggccggagcgggggatcatgcctgaatcccaaagtggtgggcttataggggttgaggccaacgcgacctgggcctacaaatgcgcacttttcgaaatggaagcacacaggcctacggcttcgaacaccaatcactgaaggccggggaggagcccgcgcaatgcacggccaattgaagcgtgacaccattgtacaggacaaacgagcaagtggccagacatgtaaacagagcacgcgaagacgtacaaccaaatatgcactagaacagcacacctcagaacatgacga

SEQ ID NO: 121582 - DNA, 339 bp, Homo sapiens
cagaggaataaactgggcatgactaatgtgcacgcaaattgtcctgcacccgtggacacttcacccagagtccggtggcatctagcacgctacactggacgagaccctggcaggtggccattgaggagcctgcgtggctctgtgcttggaggcacagtgattgttcctcatgactgcttggcacttggccaggggaccatatgcctggagttgtgtaatgcagtgggatacctggccagtttccccaaccctcagggggcttcctggtctttttaaccaaccacatatgcataggctatattcgaaggaccaagctgatgaaaacaatatcagcttgtg

SEQ ID NO: 121583 - DNA, 546 bp, Homo sapiens
ttatatagtgcagtaacacggaagaaagaaaatgggctcagtgaacttatggacttgagcaaagaaaactccaaatgttgaaagcatgaactggttgctgttagatgcatattctaagcttgctgtaagacatgaagaattagctcagaaaataactggccagtttgcaagcagaattcagaggcaacaaaatttaattaaacgtagcatatttcagaaacactgggttagttgaaaacaacaacaaaaaatgttttctcgcctctatcctctccagctagcaaaagaatcccaaattaagtaacagcctgtgagcaaagatcaaatccagagcactgccaggaagccatggactcatagtaaagatcaaatcaagggtatagcttaaagcagtgcctcacagaccctcacaactagaaaagggggcatttaggaggcttgagggcgttgattcacggtagcctgacataccctaaataccagcaattaggccttgggagagaagcctgtctcaaaaataattgtgagcgtggtttgttgacacat

SEQ ID NO: 121584 - DNA, 252 bp, Homo sapiens
ttgtttcttataaagttatacatgcactttactatatgaccccaggaattctgctcctagatatttactgaaaagaaatgaaagcatatgtctgcacaaagagctgtattaaaatgtttaaggcaactttatgtttgctgaaaactggaagcaactcaagtgcccgtcagctgatcaatggataaattgtggtacaaccacatagtgggatattactgaataataaaaagtaatgaattactgctatgtgca

SEQ ID NO: 121585 - DNA, 384 bp, Homo sapiens
gggttcatttttgccggatgtgttacacatgtgcaagcgtagtggttttatgtatagaaaacctgcccagcggtgtgggcatgggtgctactcctggcgaggactgcagaaaggcccctggccaatcagtgctctcgtgaaagagggatgctcttgttaaccatcccgggcagggggcatgtgaataaataatcaaagactggggtgcctcttgcagactgagggagggacattccagagaatttgctgcattcttccttgaacaggacgggaaggcgaagataggctggagcttccagatttccatcctgtgcccttgagggaccctctgcaggagcctggctctgcctttgagccctggagcccctagatgcaggatgatgg

SEQ ID NO: 121586 - DNA, 719 bp, Homo sapiens
gacggaggctcactctgtcgcccaggctggagtgcagtggcaccatcttggctcgcagcagcctccaccttcctggtttaaatgattctcctgcctcagcctccagagtagctgggattacaggtgcccaccatcacgccggctaatttttgtacatttagtggagatggggttttaccatgttggccaggctggtcttgtactcctgacctcaggtgatctgcctacctcagcctcccaaagtgttgggattacaggcattagccacctcgcacaacaataatatgcatttttaagatcctgtaaatattttatttgttctagccaacacctttattgaaaagaaacactttttctactttagtgacaatttgtcatgttagacatgcaaatctgatagatgacaggagaaataaaggttgtccatttcccttgtaaccccgccccagagattttctttttctcttcaaaattactttagggacccgcaatagaaatgacgtaagaggccaggtgtggtggctcatgcctgtaatcccagcctgggtaacgtggtgaaaccccgtctgtccaaaaaaaaaaaaaattttgttgggtgtggtggtacacacctgtggtcccagctgtttgggagttctcaaacagctgagaggattgcttgatcccaggaggcagaggttacagtgagctgagatgatgccactgcactccagcctggg

SEQ ID NO: 121587 - DNA, 254 bp, Homo sapiens
ctacttgggaagctgaggcggtagtagaattgcttgaactcgggaggtggaggttgcagtgagctgagactacgccattgcactccagcctgggcaacaagagtaaaactccatctcatgtatacgtatagtgtgtgtatgtgtgtattttttgtctaggcttttgagataaagtgctatacataaccaggaaatacatgatgaaagtgccctgtcaagttagctagcccatgacctgggaccttttctttttt

SEQ ID NO: 121588 - DNA, 402 bp, Homo sapiens
tgtagctgtgacatgaatattggttgatattttcatttttattaagaagtaaggcaaaaacaaaataagacatatgtcagaacttcacttatccttctttgctgaattggataatggttttaaaataccaaaaaatatttcttcaatttttttctgctactcataatgtagcatctgtagagcgacacacttttgaatttgagttaatatttcttttttattttattttattttttgagatggagtctcattctgtcgcccaggctggagtgcagtggcgcgatctctgctcaccgcaacctccgcctcctgggttcaagcgattctcatggcttagcctcctgagtagctgggaatacaggcacccaccaccacgcctggctaattgtttttgaattttta

SEQ ID NO: 121589 - DNA, 623 bp, Homo sapiens
tattaaggaagaagatttctaggcgtcgtgggctctgttaaacgatcaaactgtagactcttaaacagcattcacattgtgacatccttcccatcagacaaggttgtgcacccagttcgagcttcatctgtccccctcctcctgtcccacagcaccctgccactggcctctcctattcttgtagctttcctttcatcagtgttcatcagcctagatagagcggtgaaggaggtccattccccactgtgagggagattcacctggggaggagggccactggcagcagacaagaaacagatcttagttctcacatccaaataaatgttggctttcaccctcctgtcccatcatcaccagtctgggtcccagaccaagcacctcttccctgccactctggcaagagttggtttcctgactctgttttttgccactctagtccactatgcacattcttcccagattgttcttcataaatcctccactcacaagcttgcagcctttcctatcacagtcatatccaatctcaattcccctgcccagtataatgggactcgactctagacacctgacctaatttctctccactccatgcacgcttccttgagccagcctctgttcctctc

SEQ ID NO: 121590 - DNA, 399 bp, Homo sapiens
tcgtgtgatataatgtttttggggagggacgtactagttctagaatagtgctgatcacatatggatgcttgttaggcaaaccaaagtgaattaaatgtaaataaaattaaaaatttatagtttctccattgcactatgtactgttcagtgctcagttgtcacatgtagccagtggctgtcacataggatcgtgcagatgtagagcatctccattatcacagaaagttcttttggatgatgataggctgcctctggaaaagtccttaaatactaccgtccattaccttcattagcagaaccactgacaaactcaaatacttccctgggactctgactcacatcttttgaactctggggtccacactgtccacagtctgggactcctaactgaaggagggg

SEQ ID NO: 121591 - DNA, 328 bp, Homo sapiens
cattcctcattgtggggagggtggccttccctgcctcatgtctgtctaactacctactgtaacagaaggatgaggcctcggggagaaactgccaaaagcggtaagagttatgggcagccttatgtatgcccttcctgcaaaatgtggtaggccccaggagtcagagccacagaacacaccaagctcttagaaccaaggattccaaccaccaaccgcctcctaggttaactgactctaacctaacctgcgacatacacctctgacaaactgcacagacttcatgcaacaagaacattcattttggggctcacaggcccaaagagagctt

SEQ ID NO: 121592 - DNA, 408 bp, Homo sapiens
taaatcctgagtcactggtgtctattgggttctcagtcactgtttctgaatgaatcaaatgggaatgaatgaatatgaataagacttagaactgctcacagtttgggcagcacaaggaacatgtgtgtaatgctttctgggttacaaagcattctgtacacatatctcttaattttcctaataatcctacaggggaaactattatttttaaccttcttttcattgaagaagcaataactcaaagtgattaaggtcatactgtgaaactgttggtctgagactcagtcctgacccctcaacttcatgttccctgctttttccatctcctgtaagttactgccttcatattcagatgtatacaattctccataaactatcctcatcaaaatctcatatctggaaaccagt

SEQ ID NO: 121593 - DNA, 664 bp, Homo sapiens
cgatctcggctcactgcaacctccgcctcccgggttcaagtcattctcctgcctcagcctcctgagtagctgggattacaggcacgtgccaccacacccagcttatttttgtatttttagtagagacgggggtttcaccatgttggtcaggctggtcttgaactcctgacctcaggtgatctgcccgcctcagcctcccaaagtgctgggattacaggcgtgagccaccatgcccggccgctctttttgtttttaagaagaactatggatacatgaaggcgagtactgcctttcagtgggtgcaaggaatccctgggtgttgatgttgaagaaaccatttgagaaagtgaggcttgtggggtcggggttcctcagtggagggggttgggctgtgggctggcttcctctccactccctatttttctggggtagatgagtctccccagcacccaggcctcctggctcttccccggacctttcaggtgagaaactttccattgttgccttatctcagcaatccgcctcccctccttgcagcgaccgcaggtgcacacagatctgagggcctgatctgttccactctctttatgccaaacagaggagggacgcgaaccccagcatgaaacggcacccacaaccacaaggcccggtgtgcgccctctga

SEQ ID NO: 121594 - DNA, 468 bp, Homo sapiens
atggagtgctatagacacaaatgtattatcctacagttctagaagtcagaagtctggaatcagattcaccgggctaaatccaggtgtcggcagggcagtgtgccttctggagactccaggggagaatctacaggccacctctattccttggctcaattcatggcccttcctccaccttcaaaaccagcagtcgctggtcaggtctttctcaagctgcatcactctgaactccttttcacaggcacagtccactctccctctaatcaggcccacctgatatccctggataacctctccatctcaacagccttaacttaatcacatctgaaaaggcccttttatcaggtaggtaacatattcacaagttgcagggattcggatacgacatctttaggggaccatgattcagccttaatcatgcagtgattaagactgcatgctccagggccagactgcctgggtttaaac

SEQ ID NO: 121595 - DNA, 547 bp, Homo sapiens
acataatgtagtctgggcttaatctaagttagctctttacaaggctagtagaacctaactcacttgctccttggactttctcacactcttggaaactcacaaccatggatacatcctcttatctgcttgggccatgctcataatcctaaggctgaatgtagctggaaaaacgtgcacctatgctgacaggtcttgttatatattcatggccattgacctgcctcaggtaagccccagaggctgcccaaaaatcatatgtccctaatccattctctcttccagtcttctgtcaactatttcagacttcatttacttttcccacctccaatatttcttcccctattctcactcaggtgaggaccttgctgcttatttcactgcaagaaatgaagtaatctctgcatctctgtgtatgcaccctgctatctcttttattactgtttgtaaataggtcatgcacctaacaaaggccaccacctctgctcacaagtattgctctagcaactctcttcaccttgccttgtcattataaataatttcctccata

SEQ ID NO: 121596 - DNA, 440 bp, Homo sapiens
gcagacggagcttagctctgtcatccactgaactccaccctggggcacaaagcgaaactccgtctcaaaaaaaaaaaaaagaaaaaagaatgtaaactacctcatttaaaaaatttaaaaaatactgattacatgttgaaatgatcatatttttaatatatttgataaaatatatattttttgactttttcagtgtggctataatatttaaaatcacatattagcaaagtaataaaagaatggaaaataaggggctaatagaagataagtagaatattaatacttgattcatccaaaataaggcaggaaaggagagaaaaggaacaaagaactaaaggtatagtaatagatgtaaatccatatatgtaaaaatcacattataggtaaataggctgaatattccagttaaaagacaaagattttcatgttaaaaacaatag

SEQ ID NO: 121597 - DNA, 1472 bp, Homo sapiens
  misc_feature (3)..(5): n is a, c, g, or t
  misc_feature (9)..(9): n is a, c, g, or t
  misc_feature (47)..(47): n is a, c, g, or t
  misc_feature (114)..(114): n is a, c, g, or t
  misc_feature (122)..(122): n is a, c, g, or t
  misc_feature (185)..(185): n is a, c, g, or t
  misc_feature (195)..(195): n is a, c, g, or t
  misc_feature (207)..(207): n is a, c, g, or t
  misc_feature (255)..(255): n is a, c, g, or t
  misc_feature (286)..(286): n is a, c, g, or t
  misc_feature (293)..(293): n is a, c, g, or t
  misc_feature (736)..(736): n is a, c, g, or t
  misc_feature (779)..(779): n is a, c, g, or t
  misc_feature (789)..(789): n is a, c, g, or t
  misc_feature (815)..(815): n is a, c, g, or t
  misc_feature (940)..(940): n is a, c, g, or t
  misc_feature (952)..(952): n is a, c, g, or t
  misc_feature (971)..(971): n is a, c, g, or t
ggnnngagnattgtaggatgccgccgggcacaggggctcatgcctgnaatcccagcactttaggaggccgaggcgggtggatcatgaggtcaggagatcgagaccatcctggcnaacacggngaaaccccgtctctactaaagataccaaaaacaaattagccaggcgtggtggtgggcgcctgnagtcccagcnactcgggaggcngaggcaagagaatggtgtgaacccaggaggcggagcttgcagtgagcngagattgcgccacggcactccagcctgggcnacagagngagactccgtctcaaaaaaaaaaaaaaagaaaaaaaaattgtagtatgcccagtttgtatctacaagatgaggaatcacttgctgtggaaaacccacacacagtgccagaactcctatgaggagtaaaaacagattttcctttatatccaaacagaaaccatgagagctggagtggctacgtcaacatcaaaagaaagacgccactttgggaggccaaggcaggaggatcgttttagcccaagagctgaagatcagcctgagcaatgtagcaagactccgccttgcctacttttctacgaaaagtttaaaacttagccgcacacaggctgggtgcagtggctcacccctgtaatcccagcactttgggaggccgaggcaggcagatcacaaggtcgggagttcaagaccagcctggccaacatggtgaaaccccgtctctgcnaaaaaagtacaaaaattagccaggcatggtggcgtgcacctgnaatcccagcnactcgggaggctgaagcaagagactngcttgaacccaggaggtggaggtcgcagtgagccaagattgcatcactgcactcgagcctgggcgacagggcaagactccgtctcaaacaaacaaaaaaggccaggtgcggtggctcacgcctgnaatcccagcacnatgggaggccaaggcaggngatcacatgaggttgggagttcaagaccagcctagacccgccaacatgggccgcgttcgcaccaaaaccgtgaagaaggcggcccgggtcatcatagaaaagtactacacgcgcctgggcaacgacttccacacgaacaagcgcgtgtgcgaggagatcgccattatccccagcaaaaagctccgcaacaagatagcaggttatgtcacgcatctgatgaagcgaattcagagaggcccagtaagaggtatctccatcaagctgcaggaggaggagagagaaaggagagacaattatgttcctgaggtctcagccttggatcaggagattattgaagtagatcctgacactaaggaaatgctgaagcttttggacttcggcagtctgtccaaccttcaggtcactcagcctacagttgggatgaatttcaaaacgcctcggggacctgtttgaattttttctgtagtgctgtattattttcaataaatctgggacaacagc

SEQ ID NO: 121598 - DNA, 897 bp, Homo sapiens
  misc_feature (3)..(5): n is a, c, g, or t
  misc_feature (9)..(9): n is a, c, g, or t
  misc_feature (47)..(47): n is a, c, g, or t
  misc_feature (114)..(114): n is a, c, g, or t
  misc_feature (122)..(122): n is a, c, g, or t
  misc_feature (185)..(185): n is a, c, g, or t
  misc_feature (195)..(195): n is a, c, g, or t
  misc_feature (207)..(207): n is a, c, g, or t
  misc_feature (255)..(255): n is a, c, g, or t
  misc_feature (286)..(286): n is a, c, g, or t
  misc_feature (293)..(293): n is a, c, g, or t
ggnnngagnattgtaggatgccgccgggcacaggggctcatgcctgnaatcccagcactttaggaggccgaggcgggtggatcatgaggtcaggagatcgagaccatcctggcnaacacggngaaaccccgtctctactaaagataccaaaaacaaattagccaggcgtggtggtgggcgcctgnagtcccagcnactcgggaggcngaggcaagagaatggtgtgaacccaggaggcggagcttgcagtgagcngagattgcgccacggcactccagcctgggcnacagagngagactccgtctcaaaaaaaaaaaaaaagaaaaaaaaattgtagtatgcccagtttgtatctacaagatgaggaatcacttgctgtggaaaacccacacacagtgccagaactcctatgaggagtaaaaacagattttcctttatatccaaacagaaaccatgagagctggagtggctacgtcaacatcaaaagaaagacgccactttgggaggccaaggcaggaggatcgttttagcccaagagctgaagatcagcctgagcaatgtagcaagactccgccttgcctacttttctacgaaaagtttaaaacttagccgcacacaggctgggtgcagtggctcacccctgtaatcccagcactttgggaggccgaggcaggaggatcacctgaacccacaagttcaagaccagcctgagcaacacagcagaccccatctctactaaacagaaaaaaatcagccgagcatagtggtgcatgtctatagtcccagctacttgggaggctaaggtgggaggactgtttgagcccagaagctggaggctgcagtgagctatgatcgagccactgaactccagtgtgggtgacagagtgagaccctgtc

SEQ ID NO: 121599 - DNA, 249 bp, Homo sapiens
cacctgctacaaaccagtgtctctgcgtattgacttgctgtgtgcattaagtgacgaacctattgtgtggttacagtaggagtaaaaaaaagagaagactggttgaaaggctaatttaaaacttgttatacctctaatcctccctctgtactcccaaaacagcatgctgattccctagagaaggtcaaacgctggtcttaggattgagtggccaagcacatttgaggacaagggtaccctatcagtgag

SEQ ID NO: 121600 - DNA, 317 bp, Homo sapiens
tgtcattttgctaattattaagaaaagactcacccaattaattgctgagtcctttcttaaaagtgaattaagatgggtgtggggaagaagtatttcaaaacaaactgttttcaggcacataaggaattctgtaagttacataattgtaagccatcaatattccaattgtcaattattcctacctgctcattaaaataaattttctaaggactgctcttagctgacttttagcattttatcaaaatttgtaaaattttaaaaagtctataattctgaatttttactttttcagaaaaccttttctcatttgtttgaat

SEQ ID NO: 121601 - DNA, 453 bp, Homo sapiens
cactactaaaccccctacaattctctttacataattttccaaaactgtttcccaaaaagttgccagcagtaaccaaattccagaagtgaaagcatgaccctggcccatggtgacaaacccgctttctaccaagttgatcaccacctaactgttgattctagcccttctaatctttagcctgtggtagcaagccaggtacaatttggcattaagatctaagaatggccaaagtctctcattgcacgcagtgctaccctgatgcagtggaaactacactaaacaagctccgtgggatccttgggccttctcccgtctccatgactcattggctgggagactttggaaaattttttctgcttctgtgaacttcagtctcagtggaacataaaaactggtaagaaaaagtttcattgaagcaggtttttgaagccaaaggaaaagatataagttcca

SEQ ID NO: 121602 - DNA, 443 bp, Homo sapiens
ttttctaatacaaaatattgctgcttaacactaaagagtaggtaaaaatactagtttaatttttttatcatttccaaaagattttagtattctttaaaatagtctcacttatcttaattgttcattaaagatctataatccattatgtatatgtatattgaaaggaaaagacctagttttgggcctttattttggaaaatctatgactctttgactctgttttctcatctataaaatggacttttgagaacattcaactaacttgcaattatggtgagaattaatatgtgaaagaaagtgctcagcttctgtcaaatgcttcttgtggggtgtgtgtgtgtgtgtgtgtgtgtacatgcctgggcatttgcatgtatttgtgtgcctgtgtttgtgataataatttctatttatgtcatgatctagtggtgcaaagacaaagg

SEQ ID NO: 121603 - DNA, 192 bp, Homo sapiens
tcagctgttttcagctaaagttatgggagatccctttctcgtgggggagataggcctgctggcattcaagtctgcagcagacgaaggacagaaacaagaccaagactctcacgtgctgctcttggagatgttttccaaacttctggaactcttgaccctccgccaccggctgatagaaatgagcctggagag

SEQ ID NO: 121604 - DNA, 417 bp, Homo sapiens
ctcttgtgccgtggcctggcatgggagaaggtgacaccctaggaggtggggaaggctgagcttaggcagatggagactccaaggaggtgccctccctggaaaaaaccccaaggaggaagcctgctttgagaggctctctcaagttctcactcagctccttctcctacctccctgcgcccggcctctgcgctccttgctccctcctcctcggcccagctatctcctccttcaagtggtagcatgaaagccaccacttccaggaagccttccctgatccccagggcaaccaaggagttccactgccaagagggtcggattgggcgggcgggaaggatggggcccagcaatgcttccttgaaaggatgagtggtgccccctcagatgtccctcccgcggcccctccccggcctgggggct

SEQ ID NO: 121605 - DNA, 744 bp, Homo sapiens
ccctacgcgaactcctggcagctaaggacactgcaggccctcttgctcccggctgtgacggctggcgtgccctactgggcacctctccgaataaactctgagggcggccagttattgaacgccgccatctaatctctgtcaaccattcataatctgagaacggagctattactgtgggagacctgatgtcccaattctttaacttggaggaaagattttcaggtttcctccaagaaacagtctctaagaacacagcactcagagaagctcgaggctgataccgtagattactagcggttcacgaggcttacagtaagacgaaactacagtcttagcgataaccaagtggcagacgtggcagaagacagaatttgaaaccatgggccacattgagcctgcaggcactgtctggcctgtactgacgacatgacatttcaagcacagagaggcacaggagcactgtgtgagcctggagcttaaatcgcgaatccagagagccctctctgagcatgcgttgtgcccagagttggtgacatgtggatcaactcaggcttctatggcagggccaccagacagggtccacagaagtggtttctgccaatctttgaagagtcctgatcttatataatcaaagaagcttcaagtctggaagagagaggcaaaaggtgagagtcaggagaatctgaagatgctacactgctggctttgaagatgaggatgggtcatgagcctaataaaaaaggt

SEQ ID NO: 121606 - DNA, 398 bp, Homo sapiens
ctagttctaattgacagagcaaatatgggaagaaaaatgtaatgaagctcaaggtggacatttttctctactttttctgtagctatggtagactgccaaatgactaccctgtccccaatgttcccctctatcatgtgactttgctgcctctttcatcaaaagggagggtttatttcgccacccattgagtctaaaattgctgtgtgacttgctttggctagtggaacattatcatgaataacataaagcaaagatttgaaaagtgtaagcatttggggcttgccctctctgctgctggaaacccttccactaccatgaaaagcccaggccaggccttgagagaccatgaggaaagaggccctcatctccccagccatgccagctgtctcagctgtgtg

SEQ ID NO: 121607 - DNA, 406 bp, Homo sapiens
ttttatttctaggaattataaacgaaagtaatcagggcgattagtcatcaggttactaacttactgccaaatggcttagtgaaaactagttgtatttgtacaataattaaaactggctgtttcagaaaaaattaaaaatgatttttttcttgattatatttcttgcatacgttaatggtagaactttggaaattattttctgaaaatactgatttgtagaaattctcagttaacgttttaaaaattatgtgtacatgctagttttaatttaggatagagtttttttcatctatggagataacagccaagtggatttttaaaaataacgttagtgatgttttttttcctgataccaaaaacaggtgtcaggcagggctcactttgggaggttgaggcgggtggatca

SEQ ID NO: 121608 - DNA, 258 bp, Homo sapiens
gttgagcaggtgagtaaggagctctgaatttaaaaaccctgtgtggcttaaggtgaaagttcaacagcagcactttcattgttttaaggttttaattctttgatcaactccttgctttccctgaataaactttaagttcccaacaatcaggcattgatggtgatccttgaattgaaaggtttacccctgtctcatcagtcacttttccttgtctcttgctgattaacttcaatgacacaggaacagcacttcacaggt

SEQ ID NO: 121609 - DNA, 179 bp, Homo sapiens
gcctagtctagcttccccaaaacatctcctccatcacattggcttcccatctcttgaggcttccttcaagagaaatattatttcctttcactgatattctagctttcctgttcacgatgctgcgggtccattctcaaatgccaccacctctgactctaccatgccaaagtgagctcacc

SEQ ID NO: 121610 - DNA, 179 bp, Homo sapiens
tgccgggattacaggtgcgagccaccatgcccagccagcacttatatatggaaatgtattcgtatttttcctttgtcatttatattggatcattatattttctttgaaattgtgtgaattatctatgaatttcacctcagcattataaaagaggtattataaaatattagttatgcaaa

SEQ ID NO: 121611 - DNA, 216 bp, Homo sapiens
ggtcactgtgcttcagacaagcggcaggcattgaagaaaagaccagtaagtactcttctaattcagaggggatggccagtcagtcaggatagggcagtacagaacagggagggccaaactgtcttggcttaaaaggcaaagtaaggccttagagtagttcttgagtcactgcctatcatggacgtctcctgaaggatgtgatatctgagagtttgg

SEQ ID NO: 121612 - DNA, 480 bp, Homo sapiens
catacacagttctcagttctcagtagggttcaagctcccatgagaatctgatgtggctgctgatctgacaggaggcagagctcaggtggtcatgcgagcaatagggagcagctgtaaatacagaagaagcttcgctcgcttgcctgccgccccctcctgctgtgtggcccagttcctaacaggccacaaaccacaacctatcaagaaaaactggcttcctaagaaacataaaattgtttctcttccctttcgctagtgcaattggtctaaatcgttttagaagtattgatagaagaaacaaacaggacaatcattagtttccaaaactttaaggagcgacatgtttgttggataattggatacctgaataaaaataaaaaatagcaaaagtttcttgttattatcactattacacagcagttcctatcattcatggagtacctagcaggtgccagattcagtactaacctctttacatat

SEQ ID NO: 121613 - DNA, 534 bp, Homo sapiens
  misc_feature (391)..(391): n is a, c, g, or t
acagacaggcaggcaggcaaggaaacagagtaagacagaagataggaacagagagagagagagagagagacagagagacgcagaaaaagaaagagagaggcagacagacagagaaagacagagacagacagagagaaacaggcagaaagagagagagagagagaaaaacagacaggaaaggagagagagagagagacagagagagaaagagaataagacagaagacagacacagtgagagaggcagagagagagagagagagagagagacagagacagagacagagagaaagagacagacagacagagaaagagacagacagagaaagacagagagagaaagagagaaacaggcagagagagagctagcgagagagaaacagaaaggtaangagagagagagagacggacagacagatggacaggcagagaaggagagtaagacagaagacagacacagtgagagagacaaggagagagagagagagagagagacagagacagaaactgaggcagaccacaggacggggtcgac

SEQ ID NO: 121614 - DNA, 792 bp, Homo sapiens
gaactcctgggctcaagcaatctacgcatcttggcctcctatagggttgggattacaggcatgagcccccgagccagtgtttggaaaattttacatatattaattaatttaatcttccataactattctaggagataccttttccaaatgaagaacttatctttatttcccctttattgctgaaggataattttgctggatgtagaattctaggtcggcttttttcctttcacattaaaagtgtcattttcttctggcttgcattggttcttgacacaatgtctaggtaatttttatattttatatttgttcttctgtatgcaatatgtcttctttttccttgtctgttcttaagattgtctctagtcatggattagtcaaaatggtttctgtggccttggagaggttaaataatttagtggagtcaggattaaaattcagctaatatttctctagaggccctgctcttaaccagttgaacatgctgcctcttttacggtagataaaatcagtttttttgataaggacactgaagcagaaagaggtgaatttaggtctcctgattctcaaggtcaacattcttatttccattaatcactcaggacagaatcatacctaactttttctacaaacttttctgaatatgttttttaaaagttcagggcaattacttccaacccagtatccctttgatctctagatagtagggctcaaaaaggaagtgtcaatatttaaaaattagaaatcacacattgactcgatacgagtacagtgggctacagaagtatttga

SEQ ID NO: 121615 - DNA, 517 bp, Homo sapiens
agagatcctactgtcgagtcaggctctgattctgacatagcatatatgagtccagtccctcggtcattatagtagacagtcaagaatcaggaaacgtaagtttaccagtgtattacttttttttttttaagacagggtctcactgtgttgcccaggctggtctccaacttctgggctcaagcgatcctcttgtctcaaccttccaagtagctgggactacagacattccgccaccatgcctagctaacaaagggtattttaagggtgaagagataaataggtggggtgaggtctgaaaggattcccagcacaggagcttctgtccctgtgggtgggttggggaactcattcttgttcaccttcctgtcagcctccacattcagttctctagaaactccccaaaccctgtcctcttgggcattttatggagatgtcattggataggcatgattgaaatgtggacaaccgtgttgaaatgtgattggacaaaaaaggtgtgatctaaacctagcaagac

SEQ ID NO: 121616 - DNA, 267 bp, Homo sapiens
ccagtactaacaaacttaaggaccaaactcgtcaatatgtaagatactagaaaaattaatcagaatatattttgaatatcttgtggaagcttctcaaaggatattacattgagcatcataggctggcatgttatttcatgttttaagtaaggcatttgtaagttgtccatttaaatatatttattttagaaagcaaatatatttgtcctgtgaagagcatccttattttgagggatagcttcttgctgttaataaaacttcgtagat

SEQ ID NO: 121617 - DNA, 362 bp, Homo sapiens
ccctggtaatctctctgaatttgcctattctaggtacccccacacaagtggaatcatatactagtccttttgtgtctggcttatttcactgagcataatgttgtcaaagttcaatcatgttttggcatatattaatattttgctccttttcatgattgaacagtatttcattgcatggtcataccacattttgtttattcttctaccttttgggtattgtgcatagtgctgctgcgaatgtgggtgtgaaagtatctgtttgaattcttgctttggaaatgctttttaaatcacagcggtctgaccttatctaacatttggaatatccattatagcctgagtaggccgctaggctgtgggaa

SEQ ID NO: 121618 - DNA, 444 bp, Homo sapiens
gactgacgtacacagaactcaggagcgagctacttcttgcagagtcaggatccacatctgcagactatacaaataacacagattaaaagcacaatcttcattgaaatcacagagcttccaagtgtttttatccattttaatggattaccagctgctaatctgtctgcagctccttcaagcactccagttcctggcattaaggtcaggtgtgctgggatgcttcaaatatctgttctttcaattttgcaatatccaaagacaagtttgtacggtgtccttctagatgcttttttattctttcccaaattttgatcttattaagagctattaacagtttccacaaatccttatgtttagctcctacaaagggccataccatttgaggttgaggtgccactacaccgccatggttccagataataggaacccttgccgtatttctta

SEQ ID NO: 121619 - DNA, 416 bp, Homo sapiens
gctcagggccaccccgaggccggggatagacttggaagacaccaagctcatggtgcaggcggccaccgtggccctcggaggcacccagatccggagggccggatggtcgggcccggcgatcctctcccagcggttcctccagctctgacgtgccatcactacagtcactgactgagcctcggcctcccaaagtgctgggattacaggcatgagccaccgcacccagccagctaacattatacttgatggtgagaaactagatgctttcccccaagatcaggaacaaggtaaggatgtcccttcttccaccaccatgattcagtgttgcactggaagccctttctaatacaataatgtaagaaaaggaataaaaggcttgcagatttgggaaggaagaaataacactgtctttgtct

SEQ ID NO: 121620 - DNA, 152 bp, Homo sapiens
agctgggctctccctgcagtggcacactaggctggatttagcccaacagcctggcacaaaggacaacaatgaggagaggaaaggggaggtgacgcacctggcaaggcactaagggatgagatgcaccaagccagctgtgagtcaccacgaag

SEQ ID NO: 121621 - DNA, 233 bp, Homo sapiens
ctatgcctgaactctctccacagcttctccatggccacatggcccctctttccctccaggccttggttaaatgacacctgtcacaggtgtcctctaatctctccctaggctgagttggtcctcctctgtggttctctcccaaggccctttcattcactcagttaacatttattaagcacttacaatgtgccagaaccacactagaccctggggatacaacagtggcagaaagt

SEQ ID NO: 121622 - DNA, 438 bp, Homo sapiens
ttgggggatgtggataaaataggagaaatgcactacactgattcagcagcttctaagcaacagagaaagggtttggctaaagtactagtatttttggtattcagtagcaaagaacagttagactctcattcacaactatttcaggacaaggtgggagtatctattcagtcatttgggagaatgaagctacgtagaactcaatccttgagagcttaatttactgccaataggactgccaatttcgcggggcttctgcaactcctccccggctctaagcaaaaacagcccctgtacctgttcttggggactgacgtgacatcgttgagtgttttccctcaactctttgatcttcatgcacttgtctatttcaatgttttttgaccatggctgtacatcagaatcacctagggagcttttcactccacagatccgtactgg

SEQ ID NO: 121623 - DNA, 417 bp, Homo sapiens
cacaagtgggagctacacattgggtacacatggacacaaacatgggaaacacaaacatgagactatgagagggggcagagagggggtggggtgattgttgaaaaaacctatttactatgttcactacctgggtgatgagaccaatcgtcccccaaacctcagcgtcacacagtatacccatgtaacaaacttgcacatgtaccccccgaatgtaaaataaaagttgaaattatatattcaaaacaagtggccaggtgcagtggttcatgcctgtaatcctagcaccttgggaggctgaggggggcacggatcacttaggccagaagttcaagaccagcctggactatgtggtgaaaccccgcctctactaaaaatacaaaaattaggctgggggcggtggctcatgcctataatccc

SEQ ID NO: 121624 - DNA, 412 bp, Homo sapiens
agcataaagatcaagctaaatggtctctgggaactctgtatttggagtagtagagcccttacctgtctctgttgttgggagacttggtatcccattcctgcaatgggctgattctgcatttgctgaagtaggagcttttgctgaagtggcaaaggtgaccttagcaaaggctggcttggtagagattgggcaggctgagaagatggttgttgctgctgctgctgctgctgttgttgctgttgttgttgctgctgctgctgctgttgttgctgctgctgctgctgttgggctgaaattgagctctgctgctgttgctgttgttgagctgaaattgaactctgctgttgctgttgctgttgctgttgctgctgctgctgctgttgctgctgctgctgctgctgctgctgctgct

SEQ ID NO: 121625 - DNA, 482 bp, Homo sapiens
actcactgcaaaatattaaatactgagacccgatcctattgtttctctcttccaagaactcagctttctacaaagactgccttgctcagttgtcatcgtgtggctggtcggggtgtcagtattctagtgttcctactcaacagatgcaggaatagagactcacaggggtaggatggtctgccctgggtcacagaacaacagagaagaatcagagtcaccgagaagttacataagcacagcccaccaagctgagagcagcgatttgcctgagggcctgcagaagaatttctccctccatgcatccaagccatgactgattcatttcctttaaaaacaaacaaatgtgtttttacatcaagactactaagacttctccaggaaatcctgggtctctgtcttaatctcttgtagcacagttctctcactctccgagcagaggtcaccatgttgtaaattggtggggacatgtcctgaaggagtgg

SEQ ID NO: 121626 - DNA, 369 bp, Homo sapiens
atttgaaaagattagagaggccagatgggcagcctctgttttcttatctgttcgatgggaatcatgacacaggtctcagagtgaggcacagggtcccatgagaaagtaccttggcagccacctttggccagcagcactgcaggcacttgctgaccgcccatcatgatgtgtctgtgcccgccccagctgaatggggtctcctggagctgtttccaggaagtcagagattcgcaatgggtctttaaaactggttgtccattctcttcaaagagcttgctctgccagggccataaacaaataagaaatctcaggactaataaaaggctcgctatttgtctgagacaatcagcccagaccataaaagacagc

SEQ ID NO: 121627 - DNA, 369 bp, Homo sapiens
tcaccatgttagccaggatgctcttgatctcctgacctcatgacctcatgatccacccaccttggcctcccaaagtattgggattacaggtgtgagccactgcacctggccgaacccacatgttaaggcctggcagcttccactttggtgctctggcggaagccagctgcaatgtaagaaatccaagtaccttgagacccacactgtgaagaagcccaaactcgcccatggagatggcacatggagagagaattggccccactgagattccatcttgaacactgcaggcccagctgatgccatacagagtggagcccagccagcccgcagattgcagaatcatgagcaaaataaatgattgttttcata

SEQ ID NO: 121628 - DNA, 628 bp, Homo sapiens
tgaaacgtatggtgtaaatgctatgaagaaaaaatggggacagggataggggaagtgaatttgtgatagaattttaagtagggtgcttggtaaggccttactgagcaaagccctgaaggagctgagtgagaatacatgcaggtatctgagagtagagaacccccagctaagagaacagcaactataaagccccttgaagcaagagcatttattaaaatgctttatgcttgctgttcttttatactgtcccaagcgtgattacaggtgttggaggtgctgcactgaacaaaacgttaaaatacaattccacctttttggagcttaacatttcatcatgcttggtgtgtttgtaaagctgaggttgatgtgaagagactgaggaggtggaaagccttaggagagttttgaggagagaagggttatgatctgaactatgtcttaaaaggatcactgattactctgaagaattaactaataatgggagcaaaggcagaaacaggaagagcaataaaaagtctcttttttttaagtcattgattttttaatcagtggcttgaaccagaatggatggtgttaaataatggttggttttgctgtgaacctaaaactgctgtaaaaaaaaaaagcg

SEQ ID NO: 121629 - DNA, 347 bp, Homo sapiens
gtcatctagaggatcccgatcagagcataccccttggagcttaacatttcatcatgcttggtgtgtttgtaaagctgaggttgatgtgaagagactgaggaggtggaaagccttaggagagttttgaggagagaagggttatgatctgaactatgtcttaaaaggatcactgattactctgaagaattaactaataatgggagcaaaggcagaaacaggaagagcaataaaaagtctcttttttttaagtcattgattttttaatcagtggcttgaaccagaatggatggtgttaaataatggttggttttgctgtgaacctaaaactgctgtaaaaaaaaaaagcg

SEQ ID NO: 121630 - DNA, 208 bp, Homo sapiens
aaatcatcagccctggcactaaaggggttaaacggcattcaccgagaaacaaatcagagatggagaccaaaagtagtgcagttttaaccaacacataaaccaaaagtggacctgcctcattgtcagcaccaagggtcagggaggagttagggcatgaggatcggtcagggcggagcttagggcaggaggactggtcacggcaggagct

SEQ ID NO: 121631 - DNA, 1030 bp, Homo sapiens
tacaaatccagttggtcaaaataggccatttcctatgtgtgacctattcgtggtatgccaactggactgcttcctaaacaggacgaggaaagtgaggaatatttttatatgaaagccttagcctgtctggcacccatgaaaaaaactatttatgcactcctactttcaccgtctttttgcattctctatttgtagcacaacagagttgaatgccacaaaacaccccgtttatagtgagctgttttcagtgaccaatatcagaaggaggcttgcttctggactagcctcactaattgccagcagccaccattttccatggaatggccttgggacagatgtcacctctgttatggggctctaataggaaagagaatgttttttcccttcctatgatcaatactgcaaattattgctgctcacagcttttataggattctcccaactgaaagttgcaggctttttctgtccctgtgcatcagtactaacaaaagacagcctcaccaagtctgtatatttgaacagaggcaagttaattcatccccccgtgtcagagccacaggcatgttgagggggttgatacgtagcactggaccagggcgcaaagcccagatagttccagccatgagaggagagcacaagaaatgctctgcactctgcactcagcaccaccttgggtctgctttgcccagatgagggaccactaacaaccttctcagcacatgtgaatgtggactggttttaaaatgcattcattctgctaggattgggctggaagctggaacagtgagagtactttttctgctcctagtcatctccctttctcagcgtgacatcctcctgcagcaagcctagtatcactagcagtagttcctgcgactcttagcaacacaacccgaatatttgctccctgcatctgggtcctccaccaggatgggcctgcgcatctgcattgctgtacagacaaacaggccttttaatttacatcctcctttaattctcattaaaatcgcagggtttttgtttgaaagac

SEQ ID NO: 121632 - DNA, 386 bp, Homo sapiens
ggtcctcaactgaggaccatcgttgccacgatggtcctcagctcaacgatggtcctcagctagtcctttttttatttattttgaaaaaggaatgagttagggacccctttataactctcttggctcagactcgaaccccatggtaaagtcaccctttccgcatctatcttcaggagttgctgggacttgttactgtgtagctgcgtggggattctggtctgctcttggaccactggctggtatcctttgtgtgtttcttaagcagctcaaagaccgggtctcgcctaggccggatgtagtggtaccatcataactcactgcagccttgacctcctgggctcaagccaccctttcacctcgctaccacagtagctgaggaccatctt

SEQ ID NO: 121633 - DNA, 1355 bp, Homo sapiens
tacaaatccagttggtcaaaataggccatttcctatgtgtgacctattcgtggtatgccaactggactgcttcctaaacaggacgaggaaagtgaggaatatttttatatgaaagccttagcctgtctggcacccatgaaaaaaactatttatgcactcctactttcaccgtctttttgcattctctatttgtagcacaacagagttgaatgccacaaaacaccccgtttatagtgagctgttttcagtgaccaatatcagaaggaggcttgcttctggactagcctcactaattgccagcagccaccattttccatggaatggccttgggacagatgtcacctctgttatggggctctaataggaaagagaatgttttttcccttcctatgatcaatactgcaaattattgctgctcacagcttttataggattctcccaactgaaagttgcaggctttttctgtccctgtgcatcagtactaacaaaagacagcctcaccaagtctgtatatttgaacagaggcaagttaattcatccccccgtgtcagagccacaggcatgttgagggggttgatacgtagcactggaccagggcgcaaagcccagatagttccagccatgagaggagagcacaagaaatgctctgcactctgcactcagcaccaccttgggtctgctttgcccagatgagggaccactaacaaccttctcagcacatgtgaatgtggactggttttaaaatgcattcattctgctaggattgggctggaagctggaacagtgagagtactttttctgctcctagtcatctccctttctcagcgtgacatcctcctgcagcaagcctagtatcactagcagtagttcctgcgactcttagcaacacaacccgaatatttgctccctgcatctgggtcctccaccaggatgggcctgcgcatctgcattgctgtacagacaaacaggccttttaatttacatcctcctttaattctcattaaaatcgcagggtttttgtttgaaagacagtcctttttttatttattttgaaaaaggaatgagttagggacccctttataactctcttggctcagactcgaaccccatggtaaagtcaccctttccgcatctatcttcaggagttgctgggacttgttactgtgtagctgcgtggggattctggtctgctcttggaccactggctggtatcctttgtgtgtttcttaagcagctcaaagaccgggtctcgcctaggccggatgtagtggtaccatcataactcactgcagccttgacctcctgggctcaagccaccctttcacctcgctaccacagtagctgaggaccatctt

SEQ ID NO: 121634 - DNA, 349 bp, Homo sapiens
gaaaaaggaatgagttagggacccctttataactctcttggctcagactcgaaccccatggtaaagtcaccctttccgcatctatcttcaggagttgctgggacttgttactgtgtagctgcgtggggattctggtctgctcttggaccactggctggtatcctttgtgtgtttcttaagcagctcaaagatagaatgttgctggtctgctatgggttagtggagcataactcagccccaactggactccacgggtggctgaaccattagtagttgctaggggtacaactgaattcaactgccttcagaaacagggaacaaaaccagcctgacttgattcctggttggg

SEQ ID NO: 121635 - DNA, 458 bp, Homo sapiens
tagttatagcagacagggcaagtcatacaggaaaaacaaacaataaaaccaggtaacaacaaggagtgcagggacagactgagaggacagcagttccaaggaaggcacagtcagatctctgaactggggaggggagatcacagaagaaatagcttttaggcttagctctaagggaataagcaaggtctcaagatgccacatcctcctggccacctcctctctgatgtgtgtgtctgcatctttgtaactaaatagcctccattcactcctctgtatgaatgcagactgggagctggctgaggaggaagagccctcaacagccctagcttggatggcagccagggctctgtgtccctgggacataatcccaactgactctccttgctggatgagcacagcaaaaggtataaataacagcagaaatgaacccctcccaggactgctgtgggattaataag

SEQ ID NO: 121636 - DNA, 449 bp, Homo sapiens
gcccgtctgatgaacagggtgagtaagtggccaaggctgccaagctgggaaggggagaagcctggcacggcccagggtggccaacccagctgccgtccctcccgcaggggctgcaggggctcccgggggaggaccacaaggaatacagcctggctgtatgcagaaggttctgtggtttcctggggaggccagtgggagaagggggagcaggctgcagagggagagcgttggagcagcaggtgggcagggtggctgtgcccccctcacctggtctccagcatgccgagtgggtcagcctgaggttccccagcctggctggacaggagcaccctctgggtgctggttacaggttcccaggcccctgcccaggtagattgggctccaggaagaggggtgctcaggaagcaccagtgcctgggtaccccagggagcatcagagagagtgggag

SEQ ID NO: 121637 - DNA, 575 bp, Homo sapiens
catatagaatgtggcatgtggggcagtataaaaagaaattccccctttattgtctcagctgagcctcacactgaccttgtgtgagaaacactgaggttaagtgacttgtgcaaggccattcagatagagaatggtgaaatgaagtccaaatcatacccatggacttcagatatggtgttatctgatgcaactcctctcagctataaaagaggaaccaaagctgtcagaggattctactatcagtgataacacaagctggactagaacccaggacatctgacttcattttgacagattattctcctgccacacattcaactgcttccttggagacatctgagctgtctgtgagtacttaactcacagccggcctcagacagatgggcctcctgagctgttcttggctttcagctttggactgagcccctggtgaagtcacctggctacctatttctacacaatttacggctctccaggtgacaggcctcagagctccaccacaaatccccctcagactttgcctcgtaatcacagctccatctggtacagggagctccccctactaatatttcact

SEQ ID NO: 121638 - DNA, 382 bp, Homo sapiens
gtatctggtatatgcttgctgtatgtatttatgagacccaacttactgagctattttaagagcaaaagaaggatcctacagttagagaacaaaactatattattccatagctaataaagctattgatgacaacaggtgacccatttaggggacgattttcagctttagaagctgagctaatgggattaactggttttcaagcttgtaaatgtgaattaaagccaaagccagggaggactggctggttttgaagctggggccaaagaggtgaagcaagcccacccgtgcactgcctcacccaggcaggcgctttgtatctctcccagggcagagctggctcctccccgatctcagccccaaggctctgccctgccttccccaa

SEQ ID NO: 121639 - DNA, 266 bp, Homo sapiens
aatctgaacacgctgcttgctctgtgatctgcacagaaaagaagtgatttcagagatttccaagagcagtacagagataatataactaagggggtctcagaatagtgttaagggtcttgcttccccctgatttataggattgactatactctggcggaaaaaggagacaatgtcttcaattcctcaggtgtgagttagaatcaactgaaataaattaagtggaatataaaatgcatggaattgccttattaataaagattggacat

SEQ ID NO: 121640 - DNA, 355 bp, Homo sapiens
tttccagaaaatgccaggctttcctttccatgtactcaaaaaggggaggcctcaagccctccccacactctggaacaagcttggagcagtttcttggtgccaggcacatttctggggcttcccttcctgtaagaggaagcctcccggcttccatctcctccaggccttctccatggggcggcagcatgatgcaccccagctctgcacagggtttggggccctggagcagagcaggggacacaggagcattggcaggtgggcagggtgtggacaacggcgacaacgggaccaggggccaccctggtgaacctgacaggccagggatgggctcgcctgtgtttgaatgaggcctcca

SEQ ID NO: 121641 - DNA, 428 bp, Homo sapiens
agtttttcaacttttaactcaaactttaatacattatctattagaatgattatggattttctacaaatttgaaattgtataaaaacatttgtcaaatttatatcaactcaaatgatatatattatttattaatgaatccatgtttttctttcaaagccacttattgaagtcatattagtgattttttaagttgtggtctttggagtcataggactgtggttcaagtcctgtcccctcctaagaacaatattaattttaatgaagttacgtactaaataaaatggagattataaaagtaaatccttcatttggatttgagaagatcaaataatgcaattttggtgaagtacttatttatacatatatcggtgttatatgtgtataatgtaatattttgtgtatcttattttgaaagccaaacatggagg

SEQ ID NO: 121642 - DNA, 407 bp, Homo sapiens
tttggagttactgctttagaaatttgaaagaggtggagatgtcatcttccaaaaagcacatttctataactttgaagagttgagccctcctaatccaaccattaattatggattaagagcctctgataaaaatcctccttatacttattttctatgcctaccatttatagtaggttttttaatttctttttttctttttttttttttttttttgggaaaggggttctaactttttgcaatcaaggcgggggggcagggggtaattttgggcacacggaaacccccccttccggggtaaaggctatttccctcccaaaccttccgaattggatggctctctggggcccgccaaccgcccccaccaaattttttttttaggatttcttagaaaaagggggtttccttgg

SEQ ID NO: 121643 - DNA, 767 bp, Homo sapiens
gtatcatttctatcttaatgtttgataaaattcaccagtgaagacctctggactcagagattttatcatataaggacatctaagtatgaactcaatttatttaattaatctaggttaattcaaattttctattcctttttaaatccttgttgacacattgtcactgtcattgctttttgtgactttatgtaaggttgcatccagtatagccacttgcttcatccacagcatgagatttaaggagagagaaagacagacatgtcaaaactacagtctttgataattatacactagttgaataacatttggcagcttgcttcactcagaggaagatttaagaggagagggaaagacacagatgtcaaaactacagtctttcataattatacactagttgaataacatttgggttgattccagtttgaagtaacatactatcatttgtacctatgctacttgtcagacagacaaattctagtaaaatagttaaagtgattaaaagaggtttcaaatacaaggaggcagaggtcattgggcataatcatgtaggaggctaataaaacatctttactgattttgtttcaaacttctctcattttttcctgatggaagtgaataaagctctccaaataaaaattaaaaacttctatttctatattcaattctgtcaagtttttctgcatatatttcaagctctcttttaaggctatacaatctttcacatattttccctgtgtttttcatttttaatataatatacccctact

SEQ ID NO: 121644 - DNA, 894 bp, Homo sapiens
cttagggctggtgctcctgctatttcctcttcccaggtaaccatgtgaagtgcctccctctgccctctttccagcctttacttgagtgtcaccttctcagtgaggcctgccctcattcctctttcgctgtttgcaacccatctcctgtcccccttcccagaactccctttcctacttcgtttttcttcacagtacttgatactgcctaacacactccatggtttcttacttgccctgtttattattttcccccaatagacagaatgttccatgatggcagaattctctgttttgtttccttccatgtccccagcacctagaacagtgcctgacgcatctcctaagcaatacgaccaataagtatgtgtctggctgccttccggctgccagtgtctgcctctttcctaggggcagtggttgcgggggtgctttctcacatgtcttagtaggctgtgcaggctggaagtgctcagaagtcacacccccagggagcagcctcagccaacagcaccttggctgtaaatgccccagctccctcgccctcaggtaagcattgctgaggcacacgttccatactcttttccacagttcctccgtgggactgagcaccacccagccacccacaggagcagctaacctgataaccaccagcctcaccctccctgccttacttccccgctcccctttaccacatgctgacctcccagatgcatttcttgctttccggtctctgtctcaggattggctcctggatgaacacaaactaacactatgttcacaaatatatttgggaaatgctggatgaataattatacacatcagacagattactagaaattctcaccaaagggatgcacatgttacctctgcatggtgagatctcaggtgcttttt

SEQ ID NO: 121645 - DNA, 295 bp, Homo sapiens
tctccagttcccatcacatttcccagtcttcttctctgagacttggcttaatctcatttctctgcttcaaatgcccctccctttcctcctgtatctggtaccatcctacccatcctttaagggctatcttcattgccacacaaaacctttctatagcccaatacccatgtgtaatcaacctcctttctctgaagtcttgtactaggccagcacatgccaggcactgtatatccaccatctgagttcaccctctgtataaccctgcctgtgaggcaaacattattacccccatttt

SEQ ID NO: 121646 - DNA, 191 bp, Homo sapiens
cttgtcctgcctctgaggatgttactattttagaaagagggtaatctagaaccaaagggtcaggctcttatctctaagaggggaaaaaaaagtaaaaaaattgtactctgagatcaatgggcagcctttaaatctttctagtaaagacctgagactcatcatagggctctctaactaaattcctgagttct

SEQ ID NO: 121647 - DNA, 743 bp, Homo sapiens
gtcacctcaacttcctaatttataacttatttaagcctttgtctactaatagtttttaaaaaacatatcctactctatctacattgtctagctatatcttatcatttaaaatgtttaaaatttttaaaattacatttttgtctctaatattctgagaagacttactatattttaacaaatagttatgaacttaagctgctttgaaaaatataagaatgatttagatatcagctaaaactatagttcagaaaacctgtagattagaggagaaaaaaggcatctatgtaagtgactgtagttgaaatcatttccatgagaaggattattttctcactatcacataatactgagtaatgtttacctgagaggctcttatttattttgacttttgattttttttattggaggtggggagcatttttgtttatatgtaactatttctgtgtttcaaagagctaacatttaaagatttcccttaaactgagtaaagtaatttatatgttgcctaaaaagacagaccttctcaactggacccaaagcaatgatagttgactgtggataattgattaaccttactgattttatatttttattatcttctgaatataatatagcactgctatcttgaattaagtatctaataactgtctaccttttactcagaatcatagttgttcaaaactatgagaaactttagagggcatctgtcaactgactgatgttttttatagataaggagagaa

SEQ ID NO: 121648 - DNA, 736 bp, Homo sapiens
gtgattatatgtgaaagcttaggggagggcttaaagcaagaaaaacatgggaagatgggggtgaccgttgtcctcctggactgcaagctgcatctcaacagaacttgggatgctgcttggaccctagaaaaggcagactgtatgagaggcatagcgtgcttcaggccaagactggaatgccagagcaggggagagagactccaaacctggccagccaggtaggagggcaactgagaagcagtggaacgagaggcataggattcagggcccaagtgcccttaaggtcggtgtgggctctcccttctcggtatatctgcaactaaacaggactggggttgtgcgtccctctccggtgtgatgaaaagtgactggggctgcacagccactcctgaggacccgcctggaacaagtcacttcactgttgagccccatgctgcttctcctaatgcttagttctcaggacagtactggaattaaatgataatgtaagacctagcacggagcctggccaatcactagatttcacgtgtgaacagttgttctgtcccacgtccccctttctaacatgggactaagaattactcccccatcctatttctccgtcagtgtaagcaatataaggattttgagtatcaagttcctgaggcctggacacagaaacattctcattattattacgattgttattattttccctccagcagtcctgtctccttccctcccaatctggggcacc

SEQ ID NO: 121649 - DNA, 705 bp, Homo sapiens
atcataatttgggttttgtggaatccaaagaagagaaagcctacccagacttccaacctacggaagctgtgagataaaacattttgggttgttttaagccattaagtttgttttggcagcatagaaaagtaacatatagagatatggattctaatcagaagttctatttttaccactaaaggttaaaacatacttggggtagccttttctcaacgttttactttctttttatcaggagggtttagtcaggacaaaagaaaccattgcaggtatttcaagcaggaaagatttaacacaacatactaggcactttataaacagaaaacaaaaaaaagcgttgaggaaacaaaagtcaggaaaactgcctcacaaaatatggaagttgaaagaatcacagggaatcaccactgatgatctcagttatctgtggcatcacaataagtgatcatcagcagaatgtccggaagccactggtaaaatttcatgtctgcagtattcctgccttgccctgcgggaagaagaataatggcttcttcctcggttctgctttccaaatctcatgtgactgcctctcactggtggaagctaactcagatcccaggcttccagcccctgtactacagagaagagcacagaaggagaaatatggccccgaggggctagcatattcctctatctcattgttcccattgcattgatacccat

SEQ ID NO: 121650 - DNA, 718 bp, Homo sapiens
tgcagcggctcacacttgtaatcccagcactttgggaggtggaggtgggaggatcacctgaggtcaggagttcaagaccagcctggccaacatggtaaaacccccatctctactaaaaatacaaaaattagcctagcatggtggcaggtgcctgtagtcccaactacttgggaggctgaagcaggaaaatctcttgaaccagggaggcggaggttatggtgagccgagatcatgccactgcattcgagcctgggcaacagagcaagactcggtctcaaaaaaaaaataaaaataaatcgcgtttgaaaattctaatattggcatgttaaatacacataaacacatcactttattttctaataattgagattttattatctgctgaaaatattatgataaaaatctgaggccggtcacggtggctcacgcctgtaatcccagcactttgggaggctgaggcgggcggatcacctgaggtcagaagttcgagaccagcctgaccaacatggagaagcctcatctctactaaaaatacaaaattagccggccatggtggcacatgcctgtaaccccagctactcaggaggctgagattacaggtgtaagccaccatgtctggccaacatgttctattttctattagtgccaagctttaatttttttcattttcaggctgctcactttaaaactgatggcaaaagagctcccaacatgaaac

SEQ ID NO: 121651 - DNA, 285 bp, Homo sapiens
ctcagggctcaaagtgaacacgacaatctctgctgccgtggtagcctcttcttgcccttctctttgtctttctcatgcccacctgttccttgtctggggcattcacccttcctctgggttaagggactttggggcattccaaacatacctcaagaggcatgaggctggtggctgtacagtctcatcaccaccatctgctgcttgctcgagtccaagcatctgtgtcccacagttcctgtttcttgttcaaacttgcccaggtttatgccttaaatcaaaaccttc

SEQ ID NO: 121652 - DNA, 365 bp, Homo sapiens
catggatcctttttcattaaagaaataaaactagagataaagttgaagcatttttgatactatataaccatctctaatctgattttcctttttctttccctagagataattacaagctcaattcactgtttttatatttttattagatgtttgctttctcataaataatatagagcatttatgctatgggttttaattttacataagtgatattatactataaatatccctaaatagcttgcttttttctctcaaggttctatttttttttaattatactttaagttttagggtacatgtgcacaacgtgcaggttagttacatatgtatacatgtgccacgttgatgtgctgcacccattaact

SEQ ID NO: 121653 - DNA, 287 bp, Homo sapiens
gcaaacagttttctcaggattcttctctaagggcactaatccaattcatgaagggtttgccctcatgatccaatcacctcctaaaagtcccacctcttagtactatggtgctgaggattagtgttcaacatgtgaatttttggaggaaggacatattcagacctgagcaagccaggcctggcttgctcaggtctttcagcatttgcttgctttggtctgagtgaaagaattgtctcatttttttgagggccatgtacagcaaaggactcaccatctgtcagacacac

SEQ ID NO: 121654 - DNA, 228 bp, Homo sapiens
gggagccgatggtgtgcagcaggaagccatcccctccctgtggggaaacatgctgtcactctgctttgagcgccgtgcttacctgatacagggagaaagaacctcacctccttgcttttggtaaacgcctggttcaccttttctgcccctttcttttcagcctttctgcggaagctgtctcgtggacatctctcgtcaacagcacaaggctggattgttcaacgcaca

SEQ ID NO: 121655 - DNA, 733 bp, Homo sapiens
tcattcattaagaaggaggagtctagtatgctacttaggtgtttgctatgggaaaagacaaaataagtagactacaaaataacaaaaaattattaaaagaaaaatatttcaacttgattgcagcattaatcttttttactaattttttgtctttgttttgtttttatttgttttatttcctaaactcttagaagtgcaattcttgctcttagaagtacaattgatatttcaactaaaataatattgcagtgtgaatagattacaatgccaacatgtatcaaataattatgagatgaaaagtataagtgtctcctgatttattctaatagaacttgggatttatcacatggattttatcttttgcctttaaataaaatactagtaggtcaattagtcttttgaaatgtcaaagaaattcacctgagattggtattatagagtaggttgttcagatagaaatattcttctctaggcagcaaaagagcttattcttttgggaagcatccatccgtaaacatagttctccctctagtcagagttcagttcacatcaccagcaaactatgttctgaatgattgttctgagagacctccaatcatgcccagtttattaaattctctcaacttactgtattatataccatataccagtcatgtgcagtagtgaacaagatagaataaaaccctacccttggggagcatatagtctactgcagaaggatggaacaagatga

SEQ ID NO: 121656 - DNA, 234 bp, Homo sapiens
gcctgcgaaacagctgccctgctcgaggctggaggggaaaggtctgtggggagagagacaggagggaggccgttgctcacagacctcagaagcgatcatgagatttgtaacagagctcagcagcacaaatgggtccagacacacggctttagtaactgatcacctaaagcagaacctgcctcaccgtggcaggctctgtgcccccttttccagagcaaagggatcgtctagagt

SEQ ID NO: 121657 - DNA, 274 bp, Homo sapiens
ccagcaagctcttacaatctctccaaataccaataaacgcctccccttcctcgcaggagttccctagacttgtctatttcaggaacctcactgccttttaggaacctccttgaatctgcttggatgacgacacatcatccatccatccaacgaaacacacacacacacagacacatacatatgcacacaccccgactcaatggaggaccctcatttgtagaagggtaaaatgggtgaggcggaaatgcctgtatggcaccatggagttctgtgt

SEQ ID NO: 121658 - DNA, 249 bp, Homo sapiens
gggagggcccagaccgaagaaggtttggtggaaagcagaacctttgtctccctctaattgctcataagcctcacgctcccttgccccgcgtgtcctgttgcttccctgatcttctccgtgacctgtagctaaaccttccaccagcgcttgagaacttaatttgaaccggatcctttcccagacccctttcttcttctcctcctcctcctccacctcctccaggtacccaacaggccccttctcctttcc

SEQ ID NO: 121659 - DNA, 450 bp, Homo sapiens
tttcaaggttggacaattcacctcattaagagatgaagaattttgacaggttcatgtgcatttaagactgtccagactaatctggatagctgagaagaattaaaataaatgctttaaaggaaaattttaatacaagaagatacaggttttttttaagaagcccaattccttggggcactttatactttcaaagctaataccaaggaaaatatattttgtattaacaatgaagataattaagtgggtgggaaggcacttggcagaaaaggcacttaaatgaagtaagcaaaggcagttttaaagaggtgactataacatgcgaaattcctatttttataagaaactgtgaggatgttgacagtagtattattcataatagccccaaacttgaaactacccaaatgcccactgacatgagaatgaacaagtaaattgtgtaaaagcacacag

SEQ ID NO: 121660 - DNA, 274 bp, Homo sapiens
tattttccttctttatgggactggcctttatctgaatgtactgctaatttatcattcaacaagacaggcccacagccaaacaaattctgattaaccatttcttgcttaacttgaaatttacattaaattcctataagtgtgcagataatacttcaatggtatatcgcagtcctcatatataagatttaagaaggcatactttaaatttttgtttattttctcgttttggtagtgtaaatgcttagaaccagcatttcaataaagaaggaaaata

SEQ ID NO: 121661 - DNA, 762 bp, Homo sapiens
gattacaggcgtgagtcaccacacctggcctcccctacattcttgaaggaaagcatttacttgttatttcttaaattatggttaaatacaggtaatataaagtttaccatcataaccattacgtttttttctttttgcatagaacatttcattgtcatgtacccattttaaagcataccagtgtcatcaagttttttcacagtgtgcaaccatcaccactatctagttctagaatttcatcaccccaaacaaactccatacctttgagaccagcctggccaacatgggaaaacgctgactttaccaaaaatacgaaaattaggcaggcgtggtggcgcacggccgtattcccagctacttgggaggctgaggcacaagaatctcttgaacctgggagctggagtgcagtggtgtgatctctgcttactgcaagctccgcctcctgggttcatgccattctcctgcctcagtctcccgagtacctgggactacaggtgcctgccaccacacctggctaattttttgtatttttagtagagatggggtttcaccgtgatagccaggatggtcttgatctcctgacctcgtgatccacccacctcgacctcccaaagtgctgggattacaggcgtgagccaccaaacccagctgatacagtgtgttttcttggtatatccatgttgtagcatgtattagtacttcattcctttttatggtcgactatttccttgtatggttaccacatttggttatcctatcagg

SEQ ID NO: 121662 - DNA, 387 bp, Homo sapiens
accctatcacatgagacatctctccacccccatcctgctcaccgaagcgctcaatgactactttccaccaacactgcactatacccccctgtgtgccccctttcatattctgatttgcaggctactggtccaccctgctggggtggtctttgttttttggggttttgtctcccttcacagttgacacaatccagaggacaggaagcatttctcttttctctcaatagcaccatccaactggctgaccagccataggtctccaagttcaggaaactggggtttggaaagaaatgctgagcatctcgaggggttggctatctagatgcagagcatactaggagtctccttccatcacaaggcattcagctgctctcttgggagtcccca

SEQ ID NO: 121663 - DNA, 285 bp, Homo sapiens
ctgagtggagccgagtgtgcacagagtaggaggcgggggaaccaaggtgaggcacgtttcacattgtccctctttgcctaggccatcccttcaatatgtacttcctcactgatcacttgaagtgtttgggtttcaaaactgaatagcacctgtttggtgttagccatggataatggggagaactctgggataaaggccttgtgagaagaggctacgttgttgttggtttttgtttgtttgcttgtttgtttttggcatgctgatttaaccattcagtaagcaagt

SEQ ID NO: 121664 - DNA, 692 bp, Homo sapiens
gggccctaacagcatatgaccccacttgctaatatactaatgacttgattccttcattattgttcattggactcagtattcctgaaattacaagactttgctcatagaagacaaaatgtatacacaaatagccatttaagaggatcttaatactatatggcatagtaaaaaaacaacaacaacaacaaaaaacatgggctttgtttcagatcccacttttgttactttctaacagtatagttttatgctagctactttaaaccttcttttcctcatttatcaaatgagaataatacctgtcttgtcagatagttataggatataatatatgacaattgtcctttctagcagatattaggcatttaataaatggcagctattatatgatgttatatacacatacccacaaagatatacagatatatagatatggaatttttatatagataaaagtgtttaaaggagacattcactagaattgtttacccataacagaaatatcagtgaggaagagaaagtcgtcaattcaaaaaaccaaagataaaatccaaagaatgtaagttgggagtacatgagaagttcagggtgaactctcttatccaattgcagtcaattagaatgacataaatgtaaagtaagaggtcttggttgtctatgtttagatcattttagggtcagaaagaaatctgaac

SEQ ID NO: 121665 - DNA, 379 bp, Homo sapiens
ggttataagacctttgttagtggtaaggccagtctggagcatggtctgagtcttagttcaggatcctctggaccttgaagagaatgaggtgatccccagaaggatctgggccttctgagctgagacgtcgcagcatactgcatgccacattccacatttctgagcaagagatcccttcttggaagggaagcagaaatgaggttggataaaagcctggccttttggggcaggtagacctaaattttgtctttatcggttaccagctatgagaccctggggaagttacttttttgtgcttcagtttcctcatctataaaatcagatgtccatgggtccacatcaaagggtgatgctgaccccatgagagagtgtgcataaa

SEQ ID NO: 121666 - DNA, 105 bp, Homo sapiens
agagagatttctattattaccatttttactattttcaagaatcttaggcccaaaagacattttggtcatttggtatgtagtacctgccttttgtttttgtttact

SEQ ID NO: 121667 - DNA, 100 bp, Homo sapiens
tctcactcacaggcaaggcccttacccagagcctaaaactctcagcttggaaataagcctaactcatctgattagtttcttagtgccactggagaaaagt

SEQ ID NO: 121668 - DNA, 521 bp, Homo sapiens
gaaatctgacaagagaaggaaagttagggttgaactaagggctcttctgctgataagctgtcccttcagaacgggattttttttttccagaaatctgacaagagaaggaaacttaagaatctaggttagaaactgaatagactcttgggtctcttgaaggggtagagtggatcaagagaaagaagcactgggttctaacccaactctgagtaacttctatcactagacttctctgggcttcagtttccttacgtgtggagtaggtagaataatccatgccccagagggtcacagggcagggaacccacaggtagtaacgttgttttgtgaagaaccaatgcaatatgaacacagcgacgctaaacagctaaacctataatggattaaatcagataccggccagcttctaggcagacaagccaaagattggtaccaaagattttttaaagagacttttcacttaaactcctctctattatttgaatatttttataacttttataaatgaacatatttcgtat

SEQ ID NO: 121669 - DNA, 251 bp, Homo sapiens
tctctgaaacaattttcaatatgcttattgaacaaaatccacgtataaataaacccatgcaattcaaacccaaactgtgttgttcaagggtggctgtacaaacttcgctgctagcttttaagtgtacaaatagctgcataaataaccgatgtgcatcatgaccagtcatgtcacttctttcaaagtctgttggtgatagttccctgcaaatctgttcagtttatgcaaagtgtgtagttgtgttgcttcct

SEQ ID NO: 121670 - DNA, 982 bp, Homo sapiens
tttacggtgaagctgagcatggatgttaatctcccactctgtctgcactaagccaggtagtggatgtgtggcaaaattcgtattcatgttcaggctgcaccctctgatcctaaggagatagctgctggatgtgaacccatcgtatgtccatctgtttgctttttgttgtctagggtcactaaggaatgcaaagcttcattaactctcagagagagtttgttaagaaggtagcctcttgggtgtgagtatagaagttgtggcacacagtgcatggccaaacttcttccaggaagaatgttaggcctgggatgagccagagaaaaggcttaggaactgccaagctctggctgcagctgccagtgggctattgtttgtttgccccattggctccccagtgcaagtttattagaactcaagctgtcaagtagccactgggagtgtgtgccatacaccccttgtggagagaaaatgggagctgcatattcctgcccctttttcacactactcaaagggggcatcatttgtaaacatgtttgcatacctgttaagaccacgtctttgttctgtcatctaaggagactcatgtatgcctagtgctttctcctcccagagctaagaagtttaggactgggttctttgggagggcgctgtaaaagttgtgacacttgattagtggcacaaacgtcttccagggagaaacagggagttgcattttattttctgacatggagtcttgatgtgttgcctaggctggcctcaaactcctatgctcaagtgatcttctcatttaagccttagctgggactacaggcacatgacaccacacctggaaggagcttcattttaaaaataaaattttagattcaggggatacatatgcagtttgttaacatggatatattgtatgatgctgaggtttaggcttcaattgatcctatcacccagatagtaaatatagaacccaataaatagtttttcaacc

SEQ ID NO: 121671 - DNA, 1047 bp, Homo sapiens
tttatcgtatgcaattcaaataaagccatggttattcagttacaggaaatgtttccatgttgaaatgcaagcccaggccgggcgcggtggctcacgcctgtaatcccagcactttgggaggctgagatgggtggcatcgataaacaccggtgtttatcgagggcagatcaggtcgactggaagactattcaaagatgtattcagaaaagggatgagccagtctttgattttctcaattgatttgaaaaaaaactgtcagacagaattcaggcatcaaggatttaaacaatcacagccaagcgtttcaatttgctttttctttcacagctcaaagagacccttagaactctagttcaacaacaagatgctgactggacctctagaaggccgcatgaattggcatccatatctgatcgcctctcaaaaagaatagaaaaggagaaagatattcaggcagcgaggacattcaaatgtcaggaagaaacagcaaaactcatggccccacacataaagcagctcaggagccttctgccaaatagcaggcccaatctaaggagcaaaagacacatcagtgcctgataccaaagaatgctctttattatttttgcaaggaagctggtcactttaaatgggattgtaataaatacaaaaaacagctcctaaagaataatcctgattgagctagaagaaacccattatttccccaaagcagactgacactagaccagttccttacttcattacaagaataggggtactgtggggagacaaggggaattttccctctaacaaattaatttaattgggagaaactgatctttaataattgaacagtctgagccctaatagatactgggggccatgctttcagtacttaactccaactcttttatacatccccatccaggagtaaccaaaccatataaacggtcagggtcactcatcaacctatgaccacttttaagtcagcactgatcactgatctgctgggtccccttgtaagtatcacagtatcttgcttgttccgctgcttctatctatctgata

SEQ ID NO: 121672 - DNA, 464 bp, Homo sapiens
ccacatcacagggctgctgtgagccttacatgaaagacgcaggaaagctgctcaccacattgctcgggagtttaaggattgagtaagtgaagctgctattatgatgctaatgatggtaccatcttcagaataatcctcaacagcagatagtgatttcctaagagctgagtgtgggagggcacgggcctctctgaccctcttcagggacggccagccactgagcacacaggagggaggctggcctgaagagcctttctagaagtgtgttcagatgttaataacctcagcaacaaaaaaaggcactgtggtccatgaagtctgggaaatgctggcttaccccaagttaaacaggctcctttgtgcaggacttatcagagcctttatttgacccaacaagcgtcttgactctctagaaatggaggcagagtacacactcgttcctaaacttctctgctgagcaactg

SEQ ID NO: 121673 - DNA, 142 bp, Homo sapiens
aaagatttaggggagtgagagtcaggatccacaaggaagttgtatgttatgttcaacaacctaagagcaatgacagaatgacagcccggataattaagatgccgttgaatatactcccattaacacattggggccagagctg

SEQ ID NO: 121674 - DNA, 383 bp, Homo sapiens
tttttttttttaaacaatgaagcaagcaatgtaaggaagaaaaaagcttggcacatggtatgtactaacaaaatgtgaaacagcagacagggcagttatttcagaaactgtctacctaagaaacattttgaatgttctgcaagatttagatagatgaattaaacatctgtaatcaatgtggccatgagtaaactacacaaaaagttgttctatatttttccacattttatccaaatgtatgctatcatatattgaaagctattaaggctgaaatcaaatagactaggtctcatactccacaatttccattttctaagagtggtaatatctctaaatggctttggtgatactaccagtctttcagagtggcagcaccgtgacga

SEQ ID NO: 121675 - DNA, 790 bp, Homo sapiens
agtccatgcaacagtgatatacaatggtgtggtttgctgtgctgtgctgtgggggcgagtgggagggtactggggaagaccttgcctgctcacgaatcttgaagacgtttggaccagaggacacaagtgatgggctattttggtttttaaagtttctttaggcattaatagcaagtatacttggcctggttggaaaacagtgcagctcatgcagattgagctatggattttcacccattctttgtttaccttaacataaagctagaaagctccattctatagatttaagatgaaccatcctaatctacagatttatcaaatgtaaaccatcctagacctccctccctccaatctttaaacgtgtatttttattttagaaactctaagccttgatttctccaaaagcctccttgtttaagagacaaggtcttactctgttgcccagggtggagtacagtggtgcaatcatagctcactgtagccttaacctcctgggctcaagcgatcctcctatctcagcctcccaaagagctggaactactggtgtgtgccactatgcccagctaatttatttttttatattttttttgtagggacgggggtctcgctatgttgcccaggctggtctcaaactcctggcctcaagtgatcctcctgcctcagcctcccaaagcattgaggttacaggtgtgagccactgttctcggtccccaaaagtcttctttccttttacacagatttcacaaatatatgtgctataaatatgtgtgctatgagaaggcataatatt

SEQ ID NO: 121676 - DNA, 335 bp, Homo sapiens
tgggagggcttcctctgggaggtggcatttcaggcaggcttggtgagagttggtagcctatttggcaacctttataaaggtgagtgtttccaatgtagcaagaagtctgaaagaaggcgagaaacagagagagccaatcagaatccctagagaggagatggggtgaagggggctcattcattcacgcatcctgcatccattcaggcacctctggagcctactgagttctggggatataaaaaatggatgcgacacagtcccaggtctccaagtgtaatgatggagtaccttgaagccaaatgtgtgggagttctgttttggggctaatagtggtg

SEQ ID NO: 121677 - DNA, 546 bp, Homo sapiens
  misc_feature (200)..(201): n is a, c, g, or t
caggcatgagccaccgtgtctggcctagaaactattttaatagaagcaagtagtgcccgaatggttggcatttgttagtgagatggtgaactggcagacggcacctgtgggtcaatgcccatggccaccgtcctgctttcggacaccagttctcttccaggtaaccttctggcattttggggaggattgtttgagcccannagtttgagaccagccagggcaacatggcaaaaccccatgtgtacaaaggattaaaaaattagccagatgcactggcacatggctggggtcccagctacccatgaggctgagttgggaggatcatctgaccctgggaggttgaagcttgcaatgagctatgattgccactgtactctatactacaacctgggtgacatagtgaaaccctgtctaacaaacaaatgaggaacgaaaatagctaggagacagtcagagcagatcttgggcttatgcggctcatatcaccccttaataactggcctgagaagagggtttatctacttgtgcaagtggcccaaaaatctg

SEQ ID NO: 121678 - DNA, 648 bp, Homo sapiens
agggaagctgatggcattctgacacctcttcgccaagaaaagcattgacacagggatgggcctggaacgactggtatctgtgctgcagaataagatgtccaactatgacactgacctttttgtcccttactttgaagccattcagaagggcacaggtgcccgaccatacactgggaaagttggtgctgaggatgccgatgggattgacatggcctaccgggtgctggctgaccacgctcggaccatcactgtggcactggctgatggtggccggcctgacaacacagggcgtggatatgtgttgagacggattctccgccgagctgtccgatacgcccatgaaaagctcaatgccagcaggggcttctttgctacgttagtggatgttgtcgtccagtcctgggagatgcatttcctgagctgaagaaggacccagacatggtgaaggacatcattaatgaagaagaggtgcagtttctcaagactctcagcagagggcgtcgcatcctggacaggaaaattcagagcctgggagacagcaagaccattcccggagacactgcttggctcctctatgacacctatgggtttccagtggatctgactggactgattgctgaagagaagggcctggtggtagacatggat

SEQ ID NO: 121679 - DNA, 384 bp, Homo sapiens
agggaagctgatggcattctgacacctcttcgccaagaaaagcattgacacagggatgggcctggaacgactggtatctgtgctgcagaataagatgtccaactatgacactgacctttttgtcccttactttgaagccattcagaagggcacaggtgcccgaccatcacaccttcttcgagatgctgggctcttggtcttttggagattactttaaggaattggcatgtaagatggctctggaactcctcacccaagagtttggcattcccattgaaagactttatgttacttactttggcggggatgaagcagctggcttagaagcagatcttggaatgcaaacagatctggcaaaattttggggctggatgacaaccaaat

SEQ ID NO: 121680 - DNA, 262 bp, Homo sapiens
attgccgctcatccccctgtgtctctgtgatgacatctctgtgaattctcatcctctgtatgtgtgtgaaatacccagtgaattgtaaatatacataagtattcttctagttccttcccaggccatctgcactccatgcttctgtgtgtcagaagtggagtttgtttcttttaaggtcctgattacctggttctacccttttcttttctttctttcgttttttttttttttctttttctctagagacaaggtcccattattt

SEQ ID NO: 121681 - DNA, 552 bp, Homo sapiens
ttcactccctcttcctcaatcttccaaaccccactcaaatgttgcctcctctgtgaaacttcccaacatcctgaggttgagaagacctctctgccaccgtactctgctgcaccttgtatcctgacttttatcttttggaatggcatgttttagttacatgattgttctcgacaatgtgagctcaccgaaagcaatggctgacccagcatgtaaatgatgaatcctaaaggcatgctgagttccttcagtaagcaagtacatgttaaatgcctaccagagaccaacaatgtcctaagtgccaaggatactgcagtgggaaaagaaaacaaaactctgctttcatggtgcttccacaaataaacaccaggctgatataagtactacaaagaggaactggctgggcgtggtggctcacacctgtaatcccagcactttgggaggctgactcgggagaatcgctttgaacccgggaggtggaggttgcagtgagctgagatcgtgccactgcactccagcctggtgtccggaagagacccggaaagccgaattctg

SEQ ID NO: 121682 - DNA, 334 bp, Homo sapiens
tttttgtgagacacagtcttgctctgttgcccaggctggagggcagtgtctcgatcttgactcactgcagctgatgcctcctgggttcaagcgattctcccacctcagcctccaagcagctgggattacaaacatgaaccaccatgcctggctaatttttgtgtttttagtagagacggggttttgccatgttggccagattggtcccgaacacctgacctcaggtgatccacccgccttggcctcccaaagtgctcagattacagacgtcagcactgtgtctgaccagctcccatggtcttgagtcttggcacccacacatttttttttctga

SEQ ID NO: 121683 - DNA, 402 bp, Homo sapiens
cccaggctggagtgcagtggtacaatctcagctcactgcaacctccacctcctaggttccgcctccttggttcaagtgattctcctgcctcagcctaccgagtagctgggattacaggcacatgccaccaagcctggctaatttttgtatttttagtagagatggggtttctccatattggccaggctggtcttgaacacctgatctcaagtgatccatccgcctcggtctcccaaagtgatgggattacaggtgtgagccaccacacccagccaaatgtaggcagtttctataacccttactgcttaggagtcatgtgccagaagtcacaatatctgtggcttccccaattgtttctacagataacatctcctatagatagtttgagcccaagagatcaag

SEQ ID NO: 121684 - DNA, 464 bp, Homo sapiens
tgagtgaaacaggattgggaagcagaagaaactgagatgagcaaaggtgtgatttcaggggatatccagcttcacttgatccagcaggaaacttgggaacaaaattgcactacagagtgagtctgtcttgccttgaggcaatgaaactgggcttttgtacccccttccttgtatttgttagttattagctgtcagctgccctggaagtatgttgtgtgagtaaacagagaagagggctaggaggtagcttatattgcttccaaagaaagttactggtgtgaaccattagaagcaatggaagaaacacctggggaattggtgtaccaaaccattagaagggttccaggagatctaagctgggcacagacaacagcacgtgctatgggattctatccagactaatccctctgctcagaaggtcgtgttctttgtaatcgagtcctcctcacattgtcctctccaga

SEQ ID NO: 121685 - DNA, 715 bp, Homo sapiens
agagtcattcttgagtgcttgccatgatgagggcaggcgctaatggggaaggaattgtctcaagagctcctactaaagtcattgaccatagcatgcaggtgctatggaagtgcccagggtggcagtctaactagtttcagggagacagagaggactttccagaagagatgtcatctaagacctgaaaaataaatttggatggaggagtgtgaggaggagatgggaaatgactgttcagacaggcacagcagaatctgctctaagaactaaaagtatttctatttcactggaaggtgtaggagaatgggggtcctgcaatacgattgcatttgccttttttccttgtgttgacatttgcactaatgatgcaaaagcagtggtgggtaaaactgctggcactttagcatgaatcaatgcagtggctccaaaccgtagtcattttattcttcattgccacaaagtatctgcagtgaaaaaaatgcggtttcatttgtagaagcaataacattatttttattaaatctccacccttgagtactcacgagtttttattatgcatgatgaaatgggaagtacatagatagaacttttgtcacataccaaagcatgatggttatctctaagaaaagcacttgtgcagttgttttacttgcaagctgaactcaccactttcatagaaaaccatttttacctaaaagaatgacatacaaatatg

SEQ ID NO: 121686 - DNA, 408 bp, Homo sapiens
aaaatgtgtcaacccttattctagattacaagacatttagaaaagcttgagatgtaggaaccaaataggagtacaacttgtttagataccaattagaacaactgcactatatatttttacccaatagggaaaatttttattatggagtagttattagatgatattaaccaattattgttaattttgtaatattatagttttgtatggaagtgattttttttttatttctatcttttatagagacatggtcttgcactgtcacccaggctggagtgcagtggtgcggtctcggctcaccgcaagctcctcctcccgggttcacgccattctcctgcctcagcctcccgagtagctggggctacaggcgcccgccaccacgccaccacgctaccacggtgctatcacggg

SEQ ID NO: 121687 - DNA, 412 bp, Homo sapiens
tgattctttggggatgtctttgctagtgtatcatatagctattgctatgcaagcaccccaagacttagtgggcttaagacagcatcatgttatgaaaatcatgcattttcatctttaataagaagggtttggaataaaagaaggaatactgactattcctcctgaatattggatgatctggggtgtgcctcactgtgtgtcagctcactggcttgcttgcttctgcctgggcagtggccttgccaggggcatcttttctgagcagggctgctccatgcatctctccttctctgcctcctgggacttggaggcatggtccttgcatggccatgacaagcgcatgcaagctctcctgagacctaagctcagaacaggccctggaacttccccctcatttctgtggctccaagca

SEQ ID NO: 121688 - DNA, 137 bp, Homo sapiens
gcccatctcaaatccattaagccctacctagaatacagacataggagagaagggaaatacactcacaccaaactagtcttgcagttcaagtttctctctaagaaaaagcaagtaagaatgagcctgctaagtaaggg

SEQ ID NO: 121689 - DNA, 418 bp, Homo sapiens
gggatcgagatgagtacacaggaaacaccgaataaaccagggaagacagaaacaacaaagaggcccagagattaaaagctccagcggctgggcagcgggggctcacgccatacaagccaccgcacctggcctattttttttagagtaagggtctcactctcactctgtcactcaggctggagtgtagtggtgtgtccatggctcactgcagcctcgaactcctcagctcaagtaatcctcccgcttcagcctcccaagtagctgggactataagcgtgagccactatgtacaggtaagttttttatttttgtagagacgggatctcgctatgttgccaaggctttttcatgttatgctacataagatcatgaaagtgtaaagctagaaggaatcttggttcaatcctgtcatttggtg

SEQ ID NO: 121690 - DNA, 670 bp, Homo sapiens
ggtgtaattttaatgagtagcctttataaggaaactagaatctgatcacttggagctacagaaaaaaatagcataaaattttggcttaaaataagtttgtagtctagtgttcacatagatacttaagagctccagaggtcacatgggcttaaagtattgggaagcactgtggttgaaatcaatcaaatgaaaataaattttttgaattcatatttctgggaaaagctatagtataaaatacactactagtatggtagtcagcattaaatgggcaaggcatgtctttgaaaataggcttgaagaaatatgaccctttttgatgggaaaaacaataaaactgtttaaacaataaccatgtagatgagagcaaagagtgctgtgatttatgaaagtggctttatagcttctcttacttccccaatcctgcccattcccaaaccgttttatactataagcataatggtctctatgaaatgtaaatttaatcataacactcttctgtttaagttactatcagaatatctggttatcctagttttatatttagaagtctgtaatgtttcacccacatttacgaaattcacacacttccgaaaatattcgtagtaagcttgtaaaagcttgacagtaaaaactgaattgacagaaggttagcttttttcccatctca

SEQ ID NO: 121691 - DNA, 241 bp, Homo sapiens
cttccagttagtgggaaatgggatcttaccatttcgtttgcattccagttagcagaaagcgggagcggcaggggagtggaaaaggacttctgccctgctaaggagacttctgctttcaccttactgcccagaccatcatgtggcatccccggctgcaagagcatctgagaaatgtaagtgggagccatgaatcccaccccacagcaggaggcgaatgggagcaggcgaaatgcgaactgct

SEQ ID NO: 121692 - DNA, 455 bp, Homo sapiens
cttttcccctcacctcggttgaggcctccatggtttggacttgctggttttgccttgctcttcccttgataaatacaccatttattccggttcagcccttggaactttaaaccttaacccaagcctcctccaccccactatattagcccaagcctagagtatcagatctggatatttgggtaaagatgcagacaaattttgagttggaaaagaaagaacttaactcattactaaaagatgaccttgatagctatatatatgggaaactcagagatggaatgacatgcaccaggtgtagtgtgagcaaaggatgaacttcctgatacatcctggtttcccatatatatagctatcaaggtcatcttttagtaatgagttcaacgagggtcctcagcttcatcaatcaccaggtcatgaatcgatatcattttattattataattattttggagatg

SEQ ID NO: 121693 - DNA, 366 bp, Homo sapiens
actgcaagtcctaactccagttttcaagtgttctgaccatgagaatcatccggggtcaacccgccctgaagagggcaccagggaagatacctccaacataaccaggtcttggttaccccccaccccacagggttgacctcttctgcaggctggtactcagggtgccacctgcttcagtgacacttaaatacttaaatgaacatagatgctagaagccactctgaagttgaggagggcctgcctcatacaccagagacttataatattgcctcctaagaaacctattttccagtcttttgagaagaagatgcatgtgcatcatgatgactttggtggagaataacttttgataaagaggactccttt

SEQ ID NO: 121694 - DNA, 387 bp, Homo sapiens
cacaatgctaggaggtaattactattacaattacttttccagattactaattgagtcttagagagcttaagtaatttgccaaaagtcacggagctaacaaaaggcagaatctggattttaaccttggtctgcgtgactactctgtttgtagccaatacttccttcctttttcagaaaaatttattgtaaaaaaaaaaaaaaaaaaaacaacacattaagttaccacaattaaaataaataagaaagaaactaaacagctccttaaagcattttgacaaggtctaacattaaaggatttgtcaatttaaggtcatcttaggaagaaatcttcctgggaattcagggtagactgaatggacgtgtcttgcagcagataccagtgcattg

SEQ ID NO: 121695 - DNA, 270 bp, Homo sapiens
aggacactggcaatgcctcactgcccttcagctttctagattttcctcagccctctgacgggagcctctgttcatccttggtggtttagactctacccacaacaagaatgcggattcctgttaggatggcttaatgcttgtgcttctgcaggaccaaatctgagaacccccaagtggcatcaggaccctctaaacccacccatatagttccatatgctgcccttctcatgctggtctctttgcagagtgtgcgtgtcctctcactgacaa

SEQ ID NO: 121696 - DNA, 562 bp, Homo sapiens
tgtcaggggcgtggctgggaactggaacctcctgaagaccagtggaggccacaagcagaagccctcggctccttcccttccccgatgctgggggccaagggtctttctctgaccctgtccccctctcacgttaccagtggagggtgtccaggttcttggcattttgaacaaagaattggacaaaacacacaaacaaagcaaggaaagaatgaagcaacaaaagcagaaatttattgaaaatgaaagcactctttacagggtgggagcgggctgagcaagcagctcaagggccccggttacagaattttctagtgtttcaatatcctctagcggtttaccattggttacttggtgtatgccctatgtaaatgaagaggatgaagtcaaagtcattttctcggctgagcatactgtcacgcctgtaatcccagtactttgggaggctgaggtgggtgtatcacctgaggtcgggagttcaagaccagcctgatgaacatggagaaaccccgtctctactaaaaatacaaaattagctgggtgtggtggcgggtgcctgtaatcc

SEQ ID NO: 121697 - DNA, 225 bp, Homo sapiens
cctggacaggacaccattccatcacagggcacactcatacacacacccccacactcattatgagacaactgatacacaccagtgaacctaatgtgtacatctttagaatgtgggaagaaaccacagagtacccagagaaaaccccatgcagacatggggagaacatacaaatcccatacagacagtggccccagcaaggaattgtttttttttctcttcctcatg

SEQ ID NO: 121698 - DNA, 383 bp, Homo sapiens
cctttccccactctgctttcatggacagaccctaatgaccacctgggttatgtttttgtccctgtcaattcctttgtccttgctgataacctaagggaaccttgagagccagaacgagacaggaagaaaatgcctggctgctgcttgcggggttaattaaaccattcctggggtttcatttgctctctagttagcaccaaaataaatcctccaaatggctttgagccttccagttgacattgcattttgaattctgacagcaccagcattttacatcttcctgaggatgataaatgtttagatagcaccgaagataatggtaaaaggagaaactgggggtagttcaggctgtggctgagcagattgtaactctttggtgtgac

SEQ ID NO: 121699 - DNA, 474 bp, Homo sapiens
tttggaactgtaactgagcggctgttctgttcaggagatggccttcctcctggaggcagcaggactggcaggagctttgtgaaggaaagtacggtccccgccctctgcagcttagatgctcaagacaagtgatcggtgagccctaggcctgctctccctctaggccactgctgggccttctgccccctgggcagcctagcatgcgtgctggggaaccgctgcaggtgtgtgggtgcagagacgggcaggtacctacccacctgtatggaacagctgccacgtcactatttacctatggcaggtactccgagcaagagcaattggagagatgctagcttcaaagacagaaacagcactgtcactgggaactttctcgatcactgtcctgtggtgtggacaagaacatccttattcttcataaacccacactgaattatttagggtaaaggggcacaatgtcttcaattttcaaat

SEQ ID NO: 121700 - DNA, 462 bp, Homo sapiens
gctgttttgtcactcaataaagcactccttcaccttgctcaccctccacttgtccgcatacctcattcttcctggatgtgggacaaaaactcaggacccgctaaatggcggagctgaaagggctgtaacacaaacagggctgaaacacaccccttgtttgccccatggagggcaacgagagggaaagagaggaaagagaaggagagaagagctgtggcccttcaaggagcccagacctaggagctccctgagccagggctatggctcactctttggggctctgcagtccctggcgtctccaagcttccaggcaccaccacattccctggtgccaccaatggaagctgcttgcagtatgcctggtccagcagcagccttgtagggagctgatgcctggagctgcccgtcctgccacagctggcgtgcctgactgtgcgctgtggccagactccacactcactc

SEQ ID NO: 121701 - DNA, 417 bp, Homo sapiens
cttaattaatctgcacagccactttgccatgtaaagtaacatattcgtgggcatgaaaccagggggtgaaggtcatgtggctttgagagcagcactctcggtgacacatactcaattctgctcctccagtgcaaaagcagccactgacaatatgcaaaggaatacatgcagccacaacatggaagaaatacgtgcatcaacaacacatagcagcgtgtgtatgtatgtgcgtaaaggccttggaacacagctgaagaatacttttcaaatccttcactgttatttcctctagggaagagagtggaggccgaggctgggaatccaggagctgttcccattttattctgcatacttccctatcttctgatgacttcacaatgtaaccattaagaaaaataaaaattgctcatgcattta

SEQ ID NO: 121702 - DNA, 894 bp, Homo sapiens
ctgcacagtcattatcagttgagatactaacaacactatatacagttccactcaccaatctatcgtgcataacattggagtagatctttctgtgttgcaattttgatcatgtcacttccaacataaggtcactcagtgatcctcctcccagggcctacagagcaagtttaatctccttggtattgttgaaatgtgggtttggggcttttttaacctgctgcatacctccctgttttaagtcttctaaaataaacttcccatcaattactctatatgccaccacatacaataaatttgtaattcatcagccttgccatatgtataaaaatgtgtgctctcaacgcatgaggattcctcttcttgaaatgccctttttcttcagctatgtacatagttttgtcaaattctaacacattctttgcagctcagatttcatttatttttctttgagaagcagttattcccattagtatttaattattattttgctttgcttttttttttaaatcacaacttgtaaatactcatgctataatattcattccattctccctctggctaatgggcttgaagtgaacagacactatgtcttacttgtgcctctgtttccagctgctagctcagttcccaatgcattacagttggttggcaaatataaagacaaatgaacattattgttcatctcctcattttattaaaaaggcaaaaatggataaaaagattaaaggtataagtaagcaaaatgaagtaactcattattcaattatatcgcacagatctatctgtgattaacattttgatgcatatgcaagcattcacttatgcaaagcctacacaggaaaaaaaaagtagcttacaagacattcataaaatctgtttaattcagtaatgata

SEQ ID NO: 121703 - DNA, 295 bp, Homo sapiens
gggtgcagctgagaggcctgatggacgggccgcagtgggggaggaaggttccggaaccaacacaaccttcaccagaggggccaagggtgcatctgcttcttctgacggggcagctgggtgactacatgcagctttggggccacagtgtcaaggacacagggagtgagcccaatgggagcctttgacgtaaaaacactggcccctgtgcaggccctcccctctcctcggtgtctccaacaccacatggagctgggctccccaggcgtctctgaccgagggcgtctgcagcccccac

SEQ ID NO: 121704 - DNA, 557 bp, Homo sapiens
acggaatccagcgtggaagctcaagaatgatactgatcatgtgtggacacgagcaagctgctctcctgattcagatatcacaagggaaccccattttatgctgtcttggcaagacaaagaaaatccaagttgtgcatggcagtaaaggggagcctggaagcatctctggcagttcctttctttcccaattctgaagtgggaaaaagtgagaaagaagagaaagtggaagtaatgatgaaacaaatgtgcaaagactgacccttactgatgtgcatcaatgaaaggaggacaaagcaggcttctacctcctcttctttttgtattttctttcctctcttctcagtttttcctatttctatttttctttctcttcataagctttcttctcagtttttacactcccacattacatttcatcttggtctttgtttttcttccaatcctgtaatttatttggtacccaggggatatatctcaggaaatctgttaccctatgtctctttgctgtctagttatttgacaatgtttccttctctaataaagttttctccttcttt

SEQ ID NO: 121705 - DNA, 1180 bp, Homo sapiens
caagttaattgttttctaagtctaggtacttttgtatcaaagtctaggtacttttctcatctaaaagtgtctcagaacagacatgatttaaatgtatgaattttttggtaattgattaaaggaaagctttcaataatttctaatagttttgaaaatgattaaaagcaaaacataatttattgtccattcctgtatgacataatgaaaataataggaaaataaatggaactacaaaacatactaagaaacgcagtttatcagacgataatagtttgagatgtttaattacagatgcaagaaacagtacagatattagcaagaaccagaaattatatgttcttatatatgggcatactttaatatacattgtctacagctataatattttctaaaactggacattttgttacaaaaaaggaataatttaaaataagactgtcatcatggccggacgtggtggctcacgcctgtaattttagcattttgggaggccaagatggaaggattgcctgaggacaggagttcgagaccagcctggtcaacataatgagacttcatctcatttaaaaaaaaaaaaaaaagaagaagacatcctatttgatgtggaaacaaatgcttttatcctagaggctttgttttatgtatgttatattgatattgctataattgtatataggatgatgtttttacaagttaccttctcctggaaaaatatcatacatcttttgatttagaaaggaaaaatattgaataatacatcagattagcttttattatttacgtttattattattgaaaatatcagcttacagtatctcctgaagccattgggaaagttgctgaggcagcaggagtggggagacaagatgggaacattaagcatgagacgtttggcttttaacctcacatcaccattcacttaactctgtccttgaatttattgtttggcatttgtcagtggtctgagagaaaggtattaaatattgttgtctagatagtcttaaatccataagtgtatttcatgacataaagatgacattttaaaatgtatatatgggccaggtgcggtggctcactcctgtaatcccagcactttgggaggccaaggtgggtggatcacttgaggtcaggagttcaagaccagcctgatcaacatggtgaaaccctgtctccactggga

SEQ ID NO: 121706 - DNA, 737 bp, Homo sapiens
gctcacagcatggctgccttgggtactcggacttcacgtggaaggccagggctccgagagcaaatgccccagcaagacagaagctcagccgcctttgatgacctagaagctaggcagcatccattgtactgccttctatgggttgtgagtgagtcccaaacctgccttgactcaaggaaacggaattaggctctacgtcttgactaggtagtggcgaagttctggaagcacatgagtaggagatactgtgacggtttcatctttggaaaataccatctagcacacctgaatctgctttcagggggtgtaaggggatttccatggcaaaatttgaagccacatgtggtcactgctttgtactgaggaaacaaagtgctctgggcatccagaaagggggtacgttttttcttactgggataaatctggctgcattttagctaatcctggaaaattgatcgacaaaagcaaaggaccaagaaagctgcttatatcagtgtctcctccaccctcagcctccagtagcatccctacgttttacaattttatttatgtcactttaaataaggacattgagagggaaaaggcctcatcgacataccaactacaggccaggtggaccttcggtgcacacacaccccagcgcccacagagatccaggcctcctgtgtatgaatgtgtgccatgaatttagacctatttctcgccttccgggctctctattcctcatcctccatcca

SEQ ID NO: 121707 - DNA, 954 bp, Homo sapiens
gtaattatttaaatggagtcagtgtgagtataaatgtgacaactatttcttcacttaaaatgccaagggaaggaggatggtaagcagtgggaatttttccttctaaagagcttttttggttttgttttgtttcaattatttagattaaaaggttagaattatgtattactgtggacaaaattacaaatcactgtaatacaatacatgtgtgattggttaggttttacttatttgtgttgaattttataatattcattagtcatttgcacttgtctgcatataaaccgtcatcttaaagtggacatctaaattccaaaaactttatctcccatctgtggttctaagtttgcctcaccagacgctactctacaaaatgtagggcatttctcctactgccacctataaatagcacaggagcggccatatgtgctgctggaaccaggctttctcacagagagccctgggcacattccagaagtgagtccttctgctaacctagcaccactcagtcccaaacatgaagtgtcccgttaatgccctgccagtacagggtatcccagctccagcaggcctttacgaagaaaaaggcaatcacactaccacaaaaactgagaacctcctacctctggacttcctgcagtgcttgttaaaactaccgattctggggctcccttcagaattcttgaggtgggtccaggaatccgcatccctgaccacttccgcaggtagttttcatgcatgcaagctcaagtttgagaagcgccaatgtggaggtattttgctcaacagtctcctggcagatctgctgccagctttgtggggcattagctgtttaccagatgatttgctgttttgaaattgaaaaaaagaaaagattcacaaaactactcctagaatatcaatcttccagctggatcacagttttctgtcttgggacttcagggtctctcacaa

SEQ ID NO: 121708 - DNA, 525 bp, Homo sapiens
cagtatttgatgtaatttgttattcctccttttttaatattcttccttcatttgattcttgaggacaccacacactgttgccttcccttctataccgctggccttctggtttcttttcagttgtttttaaatttgtgttggttttctcttctcaccagcctatgaatttagaatgtgccaaggctcagttctcacccgcctgttgtcacaaatagtcacagggctttaataaaatactgtgtagctacttaagactcctaaatgtatatttccacctcagacatctccaactacttttttgacttcttaacgtgaatatgtgaaagacgcttcagcctaaatatggccagaacaaaatttctgatctttctctgcaaacctgctccatctgcagcctgccccattttattaggttggtgcaaaagtaattgtggttttttgcattaatggcaaattacttttgcaccaacctagtgggtgttagctccatttttttcatgttatttaagcaaaaaaaaaaaaaaa

SEQ ID NO: 121709 - DNA, 460 bp, Homo sapiens
cagtatttgatgtaatttgttattcctccttttttaatattcttccttcatttgattcttgaggacaccacacactgttgccttcccttctataccgctggccttctggtttcttttcagttgtttttaaatttgtgttggttttctcttctcaccagcctatgaatttagaatgtgccaaggctcagttctcacccgcctgttgtcacaaatagtcacagggctttaataaaatactgtgtagctacttaagactcctaaatgtatatttccacctcagacatctccaactacttttttgacttcttaacgtgaatatgtgaaagacgcttcagcctaaatatggccagaacaaaatttctgatctttctctgcaaacctgctccatctgcagcctgcaccaacctagtgggtgttagctccatttttttcatgttatttaagcaaaaaaaaaaaaaaa

SEQ ID NO: 121710 - DNA, 544 bp, Homo sapiens
tggctagtcttctgaaatgcctagtcatttacaagtcatttctatgtgtgattgtattagctgtaacaaatggctacaaattgcttgaagaacagaaatgtgttatagttctggaggtggaagtccaaaatcaaggtattggcaagattggttccttctgagggctgtgagggaaggatctgctccagacccctgtctttggcttgtaggtgaccattttctccatctctcttccctctatgcatgtctaccaccgtgtgtacatttccatttttttaaggacaccagtcactgaattaggacctacccatataagcgcatctcaactaattgcgtctgtagcaaatctgtttccaaacaaggtcacattctgagattctagggaatctgagacttcaacatagaggtgtcccatagaggatggggacacctcaacccgtaacagtaatgatgactgcacattatgagagggactaataagatagtgtgcattggtataaaacatgtacccagagggttctctgtttaactttcaatggcataa

SEQ ID NO: 121711 - DNA, 513 bp, Homo sapiens
tctctgtccgtctgtgtgtgcgtgcgcctcgggacacatgtgccctgtgcgccggagtgtgggtttcttgcacgtcggcctttcttctggtcagcctctccccgcgtctctgcctgggtcgtgtggccggttggcagtcgtcgtcccggcggttccagtttgggggtctgtgaaggcctgggcaacgtgggcatcggcgtcggacccgcaggggttttcatcccctccccatccggagcagcctctttgctaggctggatccagacgagcgctccccaaccaaggacaacggcctcccaggcgctcatcgtccacccgcaggagggtgcccgcagagcttcaagaaggtggttgtcacgcctgtcgccctctgccctcatcgagaaatgtagccacagctcgacgcagggacggagaaggaagccggcaaggggatggggcaagcatgtctgtctctcaaaggctggccttcctggccgagtcacccgtttgacactcctccccggatgccgg

SEQ ID NO: 121712 - DNA, 344 bp, Homo sapiens
cagtcccctgaggttctgctcttctagagttgatggtagatttcactttgcacgtgaatcatctcagcctttgaaattaagttctgctgtgggggccctctccacagtcacctctaagactgcatttattcatttatatttattccttcaacacatgtgccaggcactatgctaggtgctgtgtgtcagatgacactgtatatcctgtttcctttacgacagtaggcctttgacagatttctgttttctcctgtggggcagaccagcgctgtctttgaattctgctttttaaaatgcactggatgtcaaccagatttaaccagatgggcttctccacctaaaag

SEQ ID NO: 121713 - DNA, 475 bp, Homo sapiens
ggactgagcttgacagaggtcctgcttccatgaaactttcaattccaagtcactgtgttctctgggcctcagtgtccccatctgtaacaaagatattggactagatctggctttcccaagctgtggcacagaggagagttttgtaagaaagatgacgaggcattgaaaaccatgggctgcagagcaggaaattattctcttcccaattctcattcaatcatttctgatttggacaaggcgcaggtttcatttgggtgcgaatgtccaacacagctctcaaacactgggtcatctcccttttttaacaaggaaggagtgagaacttgaggtacagctacttagaattgttttcattgcatttacaagtatgcagacttttaaatttaaggtaaggaatattggtattttatttatgataatatataaagtttccttttaaaatctttacatttaggctttaaaaagtaaacttatt

SEQ ID NO: 121714 - DNA, 487 bp, Homo sapiens
tctttccaaagaagtcagagttgtgaaatgcttgggaaactatgagctgtttccccatcccttactggtgtagacaaaaataactgatacagggcttttatttcctgtgggttcacacttagtctcggaatgctttaaaagacaacacactagacagaagctaacatttggtcagtgtcagaaagtgttataacacctattcaccattcttgaactatattatatcccagtgggctagaagtatgggtttgtctagcaccattttaagcttagtagagagaactcatctcagccttgtccctgggtcccttgaagtacaagtgtccttagtaaggacaatgacaattcatgtggaattaattagtagaaattcccacatataaaatttgtccttcactctatttcttaacaggaaaaatcaaatcaaatacattaacaccaattagatgacaacataatcgaaaacaaatgtgtttaccaaaaaaaa

SEQ ID NO: 121715 - DNA, 348 bp, Homo sapiens
ggtgggcaatgccgtgatttacttaattggtctcatgtggttggaaacatagctgggatccagttttcactgttagaaataacttgcagcaaagctttttatacgtgcaaaggtgtctgtatttggattatgtctttaagctggccacctgggaggccatttcttggaggctgctgtgtgacccccaagggcaggggtaggaccgtaggtggtagacgggtgttcacggggctgaaggagaacccttttagttagcttgtgtggactaggaaggaaggtgagccacagaaggtagtgatgggcgtccctgctgagggcatgcagggagctgagaaaggatccagcctc

SEQ ID NO: 121716 - DNA, 195 bp, Homo sapiens
ttcccctcccaaatctgcttcacccagtctttttcatttcagttaatagcaaatctgtctttccatttaggagtcattgattcctttttctctctcactctacgttcattctgtcatcagatcgtttttgtcctaccttcagaatacatctagagtctaatcacttcccactttctccattgttactattatggt

SEQ ID NO: 121717 - DNA, 234 bp, Homo sapiens
tggtcaaaaggatcccatcaggcgatgagtgtggggacgcgctggtgagggtcccgtcctccagcagggtccttgcccacacagcctgcggagaccacctcccagtccctgaggggcagctgcgggtgccccaggctcagcctctgcctcggtttccccctcgcgggtctgacatgcctcatccccaggcagcagtgtcctgggaacgctgcttcggaaggacaccaccgtgag

SEQ ID NO: 121718 - DNA, 801 bp, Homo sapiens
ttcttttttgtttgttttgaacgaataaatgatgtcaagttttcttgcttggtcaactactaggttatgccctccactgagaaagagaacaactggaacagacaggcacatgtagtacttttatgaccactgaagcaacagcaacacaaacaaaaaacagtaaagcgatttctgtttttggaagaaaagtaaagaagattcttcctgttgttaaggaactccagatctactggggagagagtcaaacagataatcccaatatactgtgaaatgggccacaataagagtaggtccgcagtgctgtggaagcattcaggagaagcccttgcccaggcattagggccagataggtttcttttagtaggtaatatctgacttagatccttatgggtgagttgggattagttaagtgagagatgggtgggaattaaagagaagtgaaattctaggctaatgctgctacccatgcaaagtcctggaggcagcatgagcctggtgaattcagaaataggaggctttctgtcatggatggagcaagggagggtcaatcggggttcatgttggctctatcttttcccttatccccctacttctggtcaaggcattattgttgcagccatgggcattcatggtatcactgtggactcttggtttttggttttgttttgtttttttttttttttagacatggtcttgctctgtcatccagacttgagtgcagtggcacaatcttggctcactgcagcctcgacctcccggattcaagtgatcccccacctcagcttcctgagtagctgggac

SEQ ID NO: 121719 - DNA, 377 bp, Homo sapiens
ttgaggttcataagcgcgtcaggttaagcctctaggatgaggtcctatttcagctgggtattgaaggaggagtgggagatgtagtcatgacaagagggaattgtatcctggcagaaacaatagcttggccaagaggttaaggagcatggtattttcaaggtccagtgaatagttgtggccaaagatgaaactatgtgagtgacagagcatgcatcttgagagctgatttggggccaaacttttaaagggctttgtgtgccatgttgaagaatttgaactcatcctttaggtaattgatggtcattgcagattttgaaaaatagagcctgatcagtgtattttgtatttgcttgataattgctttgatcctaccaaat

SEQ ID NO: 121720 - DNA, 295 bp, Homo sapiens
ctcacctgtctgcccccacatccgcacgtcctctccacctgcttctttgtttgattaccaataaatagtgtgggctcctagagctcagggcctttgcagcctccatactggcgttggcccctgagacccaccctatgtactcttgtcttgtctcattcctttgactctgccagacttcatagccccagtgaccaggtgttgggtctgatcaccccaacactttgcctccaccggtcccatgccaccctcgctttaagcccctgcctttgaaagcaggtcatgttcactgagatgc

SEQ ID NO: 121721 - DNA, 480 bp, Homo sapiens
tctcaatggttatatttgaaaataaaggtatgaattttacattactaaagagaattaaaactaaatttaacagaaattattgcaatatttatatttaagtttcttgaggacacacttaaatattacatttgtaatttgccatgttgacttttaatttataagaactatatcattggattaaagatagtttgaaatgctctgcattcaaattctagtaattccttatgtatatatttctttcttctggatcaaatattcttgtacaaattttaatttttaagtagaaaaaaatatttggagttatgacttaccttcccacacgaaacttttaggtggttatgatgatacaaaatttaccaggtcttctacctgtgcattgcttttatttttctttggataagaaaaaataatgctcactctatcttactggctcatctatctagaatatatgtacacaaacacacagacacttgtattttc

SEQ ID NO: 121722 - DNA, 323 bp, Homo sapiens
tgttgccatttcccatgctacatccactgcccaggggctcaagaacccacccaacagcctggcccactgctgccattcccagcacctgatcaagctacctggaggctcaagaattggcctgctaacactggtgccagcagacacactctggggcccagggacaggcatgctcaatccacaactaccaccactgcgacctgaagactggcctacttggcattccaggccccagcaaaactttaccacagcctccactaacaactgcaccctaagtcactgatgaaatcacagacaccactgatgctgtttacagccaaataagt

SEQ ID NO: 121723 - DNA, 200 bp, Homo sapiens
cctgcagctctctctgatgttaatagctcaggagatattttatgtttattgttcttccagaaaaaggcgcaaacatgaaaagttcactaaacacccttgggtcacttacttttctttcttaatttaaagggtatatcggtctcctaactttcggtcttctcagaatttctatggcatatgccaaagggcctattaagtac

SEQ ID NO: 121724 - DNA, 294 bp, Homo sapiens
cagccacggcctcccaatgtgtgggattatgggcgtgagccaccgtgcctggtcacaatccaggaatttttttcttaagagcctaagagtcttgtctttgaaatgtaaacctggaggaaaatagtgtccctatcttcctgttgcctagggagtttagcctaggcaacttgagctgttactacctgcttgtcaaggagatgtgagaagttttattttttcattgaatacaggtaattaactagcatggatggccacgttgatttccaggtgaatttaggatgagtgtttaagaat

SEQ ID NO: 121725 - DNA, 581 bp, Homo sapiens
ggttgtacagatgaggaaattgaggcttagcaagccaggaacttggctgaggtcagccatagcagcggtgcacagagcttagtgggcacatacatgcttggtgcccagctctgggctccttcccccagcatctcacccaatccttacagtcgccctgtggggagcaggctgtttgcacccctattttgcagctgagcagttatgctagagagctgaagccactcaaacccatgtctggtggacttgacctctgtcctgtgcctggagtgagcgctcactggattgcagctgtggttccttctctccctgtcacttcctcccccgacatcaaaccctcagtttcatttagtttttgcctcgggctgcaaatgcagcttagggacctgcggaggctgagggaggggggtgccccacccgctgctgggagggcaggagcaacgctgctgtctgattgcatcattttcccaagcccatctgcccagctcatttctctgcatgcatacactggccccaacacccacacacgtgtgcatgcacacaggcacacatgtgcaagcccaaacacatcacacacatgcatg

SEQ ID NO: 121726 - DNA, 437 bp, Homo sapiens
acactacatacatgatacattaacaccagcccccaacctttttggcctcaagggctggtttcgtggaagacaatttttccatgggcatggttgggggtagtttcatcaggcattagattctcataaggagcataaaacctagatccctggcatgcgcagttcacaatacacttgactcttctatgatactagtgccaccactgatctgacagaaggcagagctcaagcagtaatgctgtcttgcccgccactcacctcctgcattatacctatatctatcttttcataggttggtctgtctaccccatgagattaagagctttttaaaagcaggccacgtatcttaattctctttgcatgcctggtgtctagcagtatcgagaacagagcagaccgtcagtatgatagattggaaggaggataaaatcatcgcaggt

SEQ ID NO: 121727 - DNA, 332 bp, Homo sapiens
cctcaaggagctggtttcgtgaagacaatttttccttgggcatggtgtcacaggcattagattctcaatcatcttctatgatactagtgccaccactgatctgacagaaggcagagctcaagcagtaatgctgtcttgcccgccactcacctcctgcattatacctatatctatcttttcataggttggtctgtctaccccatgagattaagagctttttaaaagcaggccacgtatcttaattctctttgcatgcctggtgtctagcagtatcgagaacagagcagaccgtcagtatgatagattggaaggaggataaaatcatcgcaggt

SEQ ID NO: 121728 - DNA, 369 bp, Homo sapiens
aatctgtcatttgctatttttcatgtggcttgtaaccttgatggttgctttgtttaggtatttgccttagagcccttctctgttcttaatttacaatgtttttctttattaactttttccaaggatagacatgtactaggacacgtagcatgtagattaatttctttggcccaaatatgactatagagatattagtgagtatgaaacaaaacaaaaataaaataaaaactaaaagaaacaaaaaatttggaaaccatcagattgtattaaaccaattcatattcttggtagggttctaattcattcccagggaagaccaggaagttactagagcaagttacatcaaaggatatgtgaccagactccctc

SEQ ID NO: 121729 - DNA, 478 bp, Homo sapiens
aaatgggcaaggccttccctcttccaggatatgtgggtttccttcatcacagtggccaccacatgaatttctaggatgaaggggtcaaaatctcctggcaaccttgagcttaaattgtgtttgtgtaacaccttccctaaggttccaataaaattactagggggttttacagagtgaagtagaagggactgacaaagaccctccttgaccaaaccctagacacagtctcctcacccctttcccacctatgcttggaccttggacattgcctcaagagcccagttttagccagcatcccctatcttcaatatctgattcgccctcgatatctgaccacattccttattctccaattgatatctgatcaccctggtctgcctatagcaagaatactgttaggtcactttagaaaaaattaacgtatccttttagtaattttccattcactaacccctgtcctgccccacgttccatccct

SEQ ID NO: 121730 - DNA, 249 bp, Homo sapiens
ttccatgagaggagggatttgcttttcctcaaaaccacctccctgcacttcctggagttgaagtagggaaagtcccctggggtgaaggagcccagggacccttcctctcccgagcagctcagcgcaggggagtcctggctcagttccactgagaaacagggagggcaatttcctctgatcctgctgtggccatgaaaatacaaattctatacattctaatgaaagagaagtcccttcggtcttctggaa

SEQ ID NO: 121731 - DNA, 637 bp, Homo sapiens
gactctcggctttcggctcggaggaggccaaggtgcaacttccttcggtcgtcccgaatccgggttcatccgacaccagccgcctccaccatgccgccgaagttcgaccccaacgagatcaaagtcgtatacctgaggtgcaccggaggtgaagtcggtgccacttctgccctggcccccaagatcggccccctgggtctgtctccaaaaaaagttggtgatgacattgccaaggcaacgggtgactggaagggcctgaggattacagtgaaactgaccattcagaacagacaggcccagattgaggtggtgccttctgcctctgccctgatcatcaaagccctcaaggaaccaccaagagacagaaagaaacagaaaaacattaaacacagtgggaatatcacttttgatgagattgtcaacattgctcgacagatgcggcaccgatccttagccagagaactctctggaaccattaaagagatcctggggactgcccagtcagtgggctgtaatgttgatggccgccatcctcatgacatcatcgatgacatcaacagtggtgctgtggaatgcccagccagttaagcacaaaggaaaacatttcaataaaggatcatttgacaactgtggaaaa

SEQ ID NO: 121732 - DNA, 535 bp, Homo sapiens
attccattgagtactttgtaaatttttaaaaatcccaagcacaggatcattaataagttaaacactatacctcgcttattttctgtgacttctgtacaacagaactattagctacagattgacagatccccagcacctaccgcagggcccaacataacaaaaagtgcttagtaaaagtttctgggaaggatcgatggatgtaccaaagtacactaagttaaagtaaatgaagacatttttacatgtgtgaagatattaagtagcctactcccagtgcattccctaaataatcatgattgtgtcatacattgcatcatatttttctttcaaaaagcattaagcaaatctagttactaagagaatagaaagagtactttgttcggggtgattcttaggcctctgtccatggtctcagggaagccaaggaagcccattctcctatagactttattgactgatttttgcctgaaacattagataagagaccatgatgctgtttatactccattttctaatcttcaaatgtagttttaaa

SEQ ID NO: 121733 - DNA, 345 bp, Homo sapiens
ccgtgccaggcagatcctacgtgctttatatcctttaaattcccaccatggccttataaggcaggagttgcgattttaacctctatttacaggttagctagatgaggctcagaggagctaagtaagttgcctacggtcacacagtcattatgttgcagagccaagactggaacccagatctgtctgactctaagatcaagctcttcttccttatccccaagatatgccactaagaccccagacccctcttcatacacctcccttccacagcacactctacaccacctccaagcaaggattttctagacacagatatcagatatcccttctcattggcactgggaa

SEQ ID NO: 121734 - DNA, 432 bp, Homo sapiens
taatttttgtatttttagtagagaagcggattcaccttgttggtcaggctggtcttgaactcctgatctcgtgatccgcccgccttggcttcctgaagtgctgggattacaagcgtgagccactgtgcctggcccttataaggatttttatatgcctttagtgtcagttgcagtgagtgtgggaagacacttttgcctttccagaactaactataaattgcttttaattctgaggctgatgttttttttaaatcagctttgcaatttaatgatcagctgcctcctcttaagctacgtcttgctttttatcttcgtttaactgatgttccagtggatggtatgaataatagtctgttgttttgcattttgtactttttgacttttgcatggcaaggaagttaaatcagcaagtgagtttgaggtcttggattt

SEQ ID NO: 121735 - DNA, 462 bp, Homo sapiens
aataaaccaccacctccagggatgggaatcatgagaggggttaaaaagcagctaggattgagaagcagtattctaggagttgcagtatctagtatgactaccacatctaggttaatttagctactacagatgagcttgttctgagctgacagccattctcaacaaggaactactttcgctcaagagcttacagtccactggcaaagacagacttgaaagaccagtcatcagatcacagtgaagtaagtgccaacagaaagattaaacatcttctgaggagagagcaagtaatggctggttaagttagggaaggctcgtcaggggaaattatacttgaacgaggtctggagggaatcatccagcccaaaggatgaggggcaaaagacgttttcttagaaacatacattcattctttaaaatattttaattacctatgcatactgacacataacatttctatta

SEQ ID NO: 121736 - DNA, 890 bp, Homo sapiens
gtctgtagtttggtggtattcagtacatttgcaatgttgtgcaaccatcacttatatcaagttttgaaacattatcatcgccctaagataaatctacccatcaatcggtagttctcccttcttacctcctctcagccacaggcaactactaatctgctttttgtctctatgtacttgcataatctgggcatttcacataaatggaatcatatattatacgaccttttgtgtctggcttcttccacttagcatgtattcaaggttcatccacattgcagtatgtatcagtgcctcattcattttttatagctgaataatattccattgcatgtacatgtcacattttgtttacctattcattcatctgttgatggaaatttgggttatttccaccttttgactattgtaaatagtactgctgtgacgtatttgtttgagtaccattttcaattcttttgggtataacatctaggagtagaattgtcgggtcatatagtaattctatttaactttttgaagaactgccaaactgttttccacagcagctgcaccattttacattcctaccagcagtgcacgaatgttcaaatttctccacttcctggccaacacttgttattttccatttttttggtagccatcctggtggttgtgttatttattgtggctttgatttggattttcctagtgactaatgatgccgagcatctttttgagcagcttttgataatgtcagcacatgatgctacagtgttagtgactaagattcattacattgtagaatatttgaaaagcagataagtcagcatttctggcttcatcctggtgtcctgtactctttgttgacctctcagcgagttatgtgaagttccagtcatgccatcaagagg

SEQ ID NO: 121737 - DNA, 824 bp, Homo sapiens
ggcatcgaatgggcaaatataatcataaatcctggttcttggggcttccaacttcatgtctggaaaataacagatgattcatacagaagatagcaaaagggtgcccagtgcccgtcataatcctatccttcattttataatcctaggtctgatttttggtttatttgtttgttttgtatgtttgcttctatttactgcctagaattcaactatggaggtttatttggtagaatttatctgctaaacaaggatttattacacttaaaaaatgcacatattctgagaaagctaagatgccagcgaatattcactcagttcagttatttttaaaaaattttccacattcccggtggaatctgctataggggaagctgttttaatggaggccgagagttggacaattttgtgttatggagaattctgggaagaaggaaagacccggatgggactgtttattaaggcttatgactggactggagataaggtaaattagcattgagaacatacagaaccacaggcaaagttctagttttttagtaataaaggggcttatctatacattttcaatatgaaggagtcaaaattgaaattcagctttatttctttacttcacaactcaagtttatttcttttatttatccattcagcatttgttaaattgttggattgtgccaggcatagaggtaccaaaaagcatttttagctcagatttgtagtatcattcaaacatatcaaaagtctagccaggaaaaccaagcgatatttaatatttgtctttataaactggagaatgccaatattctactcccatccttcaaggatga

SEQ ID NO: 121738 - DNA, 225 bp, Homo sapiens
tgcctgttaagataatgattatatccaaaataacctctgtattagattcacttatgaggtaagtagggtagaagacacgttggtgaaaaaggtaagcacaccagagctgataatgtaaagttaagaacaaataacacaatataaagacaacatcacttctaagccatacaaagaaagacccacgacaaggaagagattcctctaagggatggtaataacatggcc

SEQ ID NO: 121739 - DNA, 716 bp, Homo sapiens
gagattggctaatgaatacaaaaatacacttggagtaataaattctagtgctcagtagcatagtaggatgactattgttaaaaaattttttttgtgtatttcaaaatagctaaaagggaggatttgaaatattcccaataaaagaaatgataaatgcttgaaatcacaggtattccaaataccctgatttcatcattacacattgtatttatgtgtcaaaatataatatattccattaatatatataattattatgtatcagtagataattgtaaaaacaggagccttttaaggttttgatcaaataatgtcaaggatgtacattaacaaaataaatctggtaatggattgcaagccagcagagtgcactggtctttaaacttttattgttgacatatttcttaatcttgaaaaacctaggtgtctcctcaaagattttttaaatttgtaaatttgtgaattttaagtctttgtagacaatatacattcaggaaattattgaattattgttttcaaagacaaaattatggtcctcttttagattaatgaaatgtaaatgctgtagcaacttttattcatctctcttaaaatgtataaactctcaactgtaatcccagcactttgtaaggtcgaggcaaaaggattgcttgagcccaggagttggagaccagcctgggtaacctggtgaaaccctgtctctattaaaaaaaaaaaaa

SEQ ID NO: 121740 - DNA, 718 bp, Homo sapiens
tgactttcctggactgattgtcttttatataatgacagagctgtctgcttaaattttattaataacttccaagttctcagtcatatattttgattctatttagggcatttttctcggagccctctgacttcttgttctaatgtggaatgatgaatttccacacttcctatactaccattcctggaatttcatttcattgtactctctgggttacttctgtcatttattggatattgtgtaatagcttcaaatcagagagatagggaaggttgtgagcacacatcaagtgattttctgctatgtaaggagcacctttgggtcttgatatatctgacaaaggtcattttttttatgcttccacactagattaatagtgtgattggagtacaaaatttgggttcaatattcatttccctcagagaacttttagcatctgtttctgctataggaagtctgatgttaatataattcttatttctttgtaggttactaccccttcccttttctggaaactgtgagaatttctttgaagttccttagagtactaaaattgataagggaagtgatgaaatcatattgcatgtagcaaactactttttaatgtttgcctgtatttagtcattgtagtttcctgtgactttgagttagaaagtaaacttattggcccagcgcagtggctcacgcctgtaatcccaacactttgggaggccaaggcggt

SEQ ID NO: 121741 - DNA, 866 bp, Homo sapiens
tctggaaggcaaattatatgccacctaacaaaagaagttggcaatcctagtaagtcaggcaaggcggggagatttgtttaagtcgtctggatacttggttacagttattctctgttttaattggttagtagatcctggaaatagtctggccactgtgcatgcagctcaaacctcacactttctaatgccaccagccttgaggcatggctaggcaccatgcagagtacacaaatcaggcagcctcggttcccatcataggttaacactcgacaaggccggaaatgggctgtgagagaaaactgagtccttacacacaaaaggtaggccttgaggaggaatgatggtgtcattccacttaaatattaagatcttatatctagagatgtggagatataattttgctgactagagctaccatttggcctccaacccaaaacaaaacccaacaaatgtctggcctcagagcactgcttagcttacctctaagtgattctctccaacactcctgtgtaatcaggttctctgtcttctggaatgatttgatgttgccagttactctgagcacacccttgcctggggacaggtagaatggggataagtgaacttataacttgcagaatctatgtcaggatataaatagcaatatgaatataccaataattattactcatatctgttctatttcaaagaagtgtgcacttcatgaaaggattagtgcttacccgactaaacctagcaaagtaaattcttgaataaagatatcagtctgtcagagatggtgacagtgtacagacaggcatatgaaagcttctcaacccccaagccctacccagtctggtccggtctttgccagtagaaaattccta

SEQ ID NO: 121742 - DNA, 210 bp, Homo sapiens
tcaagtttgtggtaacttgttacagcagccacaggaaactagttcatttatcatacaggttttggaataatgactagcatttctccacttctgaggttttcattgcttagtctagcatttccaaaacacacctaataagaatcaacctggttgcttgttaaaaatacagaatctggctgggcatggtggtttacgcctgtaatcccagca

SEQ ID NO: 121743 - DNA, 525 bp, Homo sapiens
aatgcaagcatgatcacctcgctctgcaggtagaaatactcgtgtggcttctgtcaccctcaggatcaagctcgaactcctccgcttggcttagagggaccatctggactttcccggccctctcatccccttgcggcctatggctgttcttctgcccccgccttctcccacctcacctttctgggtgcactggctaactacagtttttgtgtctgataagagcttacaaaggactgccttctgggagctgtcccaccgtgcccgcctcagctctctgccctcttgtatgctgggccagcttccccaccctccatcccagccctcgcccaccctgtgctgggccagagctgctgtctccctagctgggctgtgcgcaaagagcaggcaccatccctcctccccacagcaagcttccagcagggttctggagcacagtagacactcagtatggactggtagagctcttaaagaattttcttgaagaatccttttgagaagtaaaatgaagccagcgaggaatgaaac

SEQ ID NO: 121744 - DNA, 581 bp, Homo sapiens
gaacatagctgaagactatggatgtccaggtcttggctcccaacaactcaggacctcaaattcagatgttcctccctataacaattcccttaggaattatgatacccattttagtgattgattgatagaaacctggggtacagagtgatcgtggggttgtaattacaaccccacgatcacctatcaatggcaaaactgttggtccacagagcacgtgtccaggccagagacagccccacctctggggtgcaccttttcctttcatttccaaatgtcccccaaggccatggaagggctctgctccctccaacaaaggaacagcatcccaaagcccggtgcacacacagatgaacttcctctcctatgcagcctgagacgtggaaatgaggaaagcagtgattctcaaaactggcagggaagggctgtgggagagtttcattcattgtagggagggtggatctgagaactgtacactcttgagcatgcacacacgtacgggcacacacacagagcgtagcgtggcagctgagaagcagtggagaagcacagagagggaacagaatgggggccaatttggaagt

SEQ ID NO: 121745 - DNA, 366 bp, Homo sapiens
tgagccaccgcacctggcctaaacccaactcttttgacatcaaaccctttccccttttttctgtgccatgtgtgaaggacaggcaaatggtctgagaagagaacaatgtgctagtgtagggagttttgttcccagcgggagggaccatgtcttgtcccttattgtttccacactagtctctagggctgggcccttctgtcttggagcttggctcctgtgtttgactgagcgacggttcttttggccagtctcaccgtgtgactagttatggtcatgttgccaagaaatttccttttgccccaattttgccttctgatttccactcgtctccatgaatttggatgtttcttgaccatggaatgctta

SEQ ID NO: 121746 - DNA, 384 bp, Homo sapiens
tatgtaacaaacctgcatgttgttcacatgtaccctagaacttaaagtatattaaaaaaaacagagtgctgaacccatctttttaaacatctttaaaaaaatagttatgttgcctgtggagttttagaacttaatgtaatgaaagtactatctttctatgaaccttacagtttgtttttgttgtcatttttaccattatttgataaaggtaagtagacaaatagataacacattcatattggactattcattaagaggtctaagaagaaaggtactcttaaattcacaagtggggactacaaagcaatatgaaaatgatcaggatttccgttttaatgaaataatggaatcacatttaaaacattattttatttttttccaatt

SEQ ID NO: 121747 - DNA, 770 bp, Homo sapiens
gtctgttttattgttgtaactatctgagagctggtaagttgagaccaaaacaacaacaacaaaacaaccaaaatcatgcttaaaactggttctttccaaggttgcatttttgttaagatctacttaatagttgattggatgatttttttttcccccctccggtctgagggatggttgcttctactgtataccactgttatcgccagtatttaattatatttgttctggtctgtgaagtttggtaggaagggaagaaagagctctggttggcttttctagattgacaagttagaaatttcacttaagagttaactgttctttttattttaaaggacaatttgataatgtcaacatttaaaaaccaaactactagatacactagttaagttcacttcatagtatcttctctcaggaaatgtgcctgcatatgtatacagaggagaaaatacgaggatatatattgctgtagtttcacacccctctgcccttgtaattggtcaggggaatactctgcctccactatgagaaaataaccagctgtctcaataaatgttatgtattattatatattgttagaaaagcaggctgctgaacaatattgtttctagtttaaaaatgcaaaggaaaactattgtttctgtagacatacagtatgtgtgtaaactttgtaaacaaagttttaaaggatatacagacactccccaatttttcgacttaatgatggtgtgaaaatgatagctattcaatatacccctcagtttatgatggga

SEQ ID NO: 121748 - DNA, 400 bp, Homo sapiens
gcaccaggcagggtccaccatgtgccccgcctcacactggcactgagggcacagagaagatcagccccagtccctgccctggaggaactcaccaacgacagtggagagggtgggtgcgagtccaggccactgggttggaagacccaaagccaaatcctagctcttcatatcttcgctgggtgcccctggtcaagcgacacttcactctatgcctcagtttacttttctgtcaagtggggagagcaccagaaaccacttcatggggctcttgtgaagagaaggagagagaatgcaagagaagtggtcagtacacggcctgacacacagtgtgtaacaaagggaaggcagtgctattgtcatcattgtcaagaaggaaatgcataaagtcatgcaaaatgtg

SEQ ID NO: 121749 - DNA, 360 bp, Homo sapiens
cattggtggtggcacagctgtggagatatgaaaacgcgaaacctacgggtgagctgggtgaaccttatgaggcgggaattaactgctccggctctggcgctgaggaaaaggaggaccggaggatggtaggcggaaccaggcccagcaccacccgctagaacgccgtgatgttcccacagccctacagggccaagggtgtctatgcaaggtgggtacagggtcggcctgcatctggagggccacacccccatgttacaggcgaggctcctgtgcagagggctgggggcctgccaggacgcaccccttggcagtgaccgggcctcttctgaggtgggaccctcagcctcaaaccaacgcatg

SEQ ID NO: 121750 - DNA, 288 bp, Homo sapiens
tgttttggatcccaagtaaagcccttttgatgtcctcaggggtctgcgtgttcacacaagagttatcaagtggacagaagtttgttattcttctgggcttcctagggcctcttcttcaaggatttaattatttgtgaacctttcaattgtactcatgatgtgttatttaggagtagatgtgtttttctatcaattactgtagtattaatatattgctaactcttagaagtggccaccattatcttctaaacaaaaaacatattttatgtctaagattatttgcctatg

SEQ ID NO: 121751 - DNA, 513 bp, Homo sapiens
atgataccaacagaacacatggtcaacttatttttttcccatgttgaattgctttcaatatactatcaaaaaactcttctcaaacaaaaataggacctaaaggattttgaatactcttactattccaatacttctggtacctagagctgattgtaatgcaatattgaattggccagttagtttaagaaatcagattctgctttttaattcagtagataataataatagctaacagtgaaagttactctatccctgaaataattttgtataatattcacaatgaccctgtgaattagactttatccagtagcacagatgaggaactttaaacaggttgcctaatttatccaaaattgtagagctggtgcttggcgaggtctgcagttttaactagtacattgtacattcttaacatgttaacctcactgtagtatccctgcagccagaagatcatacagggttgaagacaagctgttattttacagggtgtaatggatattcccaaggccctta

SEQ ID NO: 121752 - DNA, 323 bp, Homo sapiens
tgtttcccaggctggagcgcagtggtgtgatcccggatcactacggcctcaacctcctgggttcaaatgactacaggtgtgagccaccgcgcctgaccgtgagccaggacttctcaatatagttttcttctcaattcccactcccatgtttttctagaaacatgattgtaactcctgtcttacttgatacaaaagctcttgttctctttaccttgtggcatgcagtctagttagaccttgccagattctatttcagtttttaataagcctttttatgtggaaggatggccttctcttgttaactgaagtttacatagtcataa

SEQ ID NO: 121753 - DNA, 407 bp, Homo sapiens
catcatggggcctttgctcctggtgaccccttggcctgagcactcttccttcccagactgctccatgttggcctctgtcctcctccaggtctcagcttgagagctgggaatgggcctgcagtcactgggctcccaggccttcccatccaccatgctcttaagcctttgctggacccatccccacagcaatgacctcatggtgtcataaggcaaatgtggaaactgaggcccagggcgcttcatgtttctgacacccactcctatcatgccccgtccacctccatcacaaagtctcccctttgtcctgcaggtttggaagtgcctcaccctcttctggcctttgatttgtgtgccacaagcaaaaaagttaaaatcaggctgggcatggtggctcacgcctataatcc

SEQ ID NO: 121754 - DNA, 363 bp, Homo sapiens
gcctaccgagcttttcgacggtgtctgtatctacggaagtttcatggcttcaaagaccaatatcttatcgctgacctttctgttccttccgcacctctggtcttggtctggtgtctggaatgagactggggcctaataaaaaggagcgtctatacaggagcttaaatgggctgtaccttgtagcattctgaggacaggtctgacttctgaaaagggaaagtggtaaaagtattgtccagtcctttttaagttggtggctgagcttggtgaggtgtgtctttaaaagaccattagtccgttctacctttcctgaagactcaggactgtaagggatataaaggtttcactgaataccaagagcct

SEQ ID NO: 121755 - DNA, 184 bp, Homo sapiens
tgcctgcctcggcctcccaaagtgctgggattacaggcgtgagccaccgtgcacagcccacaagcctttatcttaacccagacacccctttcttttttctttgtgtgtgtgtgtgtgtgtgcgcgccaaagatttatttcttcatttcttgcatttgaaggactcttcgatgacatccttggcc

SEQ ID NO: 121756 - DNA, 510 bp, Homo sapiens
actctgctttccattgccaagcatctttggcacaagagctgtaataagaagtgtaatgaacataaaacagtttttagaatcactcctttggtagctggtatatgaagctgacaaggccccctctgccaaagctgcagaaggtcgggcatatccttcccttagctcatatggctgcagaggaaggaggtgtctttctttgggcttcatcgccaggcaacccacacactttgatgctcacctgtctgccttgggggactggagttgaatgactgcttgttttgctcctgggatctgtgggctccacagtcgtcccaggcctccttgcttaatcggactcccacccatggcatctgagtagttcctcttctggtcctgtcactatcatctccctttctctctctcaaggcctgtccttctgtagtacatctttttaataactggtaagagtctcctccgaccttccctttggagaccttttctcttcagtcaatccccgccccacccaatccc

SEQ ID NO: 121757 - DNA, 675 bp, Homo sapiens
ggaggagggctcagggcaccccctgagctacccctgctggccattgcaccaccccataaagctgctggcagtcacttctctgaggggttagcatgtaagaaatgtcctcctgaatgctggccagacaaatggaaatctgccagggttgggtacccccatgacagcagccagcctgccctcttagtccctgacagctgcagtgacagcatctgtgattgcaaagcgtgacaatttatatctctcatttcatcacaccatctatcagcagacagtcaggctttaaaaatcaatcccacactgactcagtccccagcagagatggcctctgacaacagtatccacactgcaggctggacaagggccctattaattttgagactcagccaaatttccttctgaccctaagctggtgaatccctgctcctttgctttggttggggttggtgtgagctaaggctgtgatcccatttgctcctatggcctccaggtggcctgggcctccatgaatgggccacatggtcatactgaatgcttgattacactcagacctagcagtcgtctgggcgcagctggtttatggatcactttgtcacaatgttccatccttccaggtccccatccccgcggtgggaaaacattgctttaggcagtgctagaggacttcagcaggcattg

SEQ ID NO: 121758 - DNA, 1098 bp, Homo sapiens
gtgatttccacagacatggcataattcctgtgatttgatgtgaaatgagagaccagctcagtgctgagtgatgagatctgaacggggaataaaatatgcttgaattaatttgcataatagaattggattggttacaaagctgtgtttgttgaaagggataccagagccccttagctcaccaacaaggggactttgcagatacagaatggggttttgagctctggtgtgggccgtggtaatattcttaatgtaataataacctgtctctaactataaattagctacctggaaatgaaaaaacaggtcagcctgtctgatccttccagctctgtggggaggggacagctgaaaaaccaaatctgcttgctttctgctaagcgctttcgtctttcattctccacccaataacaatttccagcaggagtccaaatatacttaaacacccgtatatgtcattttctttaacggagacaaaagcaggcacagcaagagagttttatgctcaaggcacggtggcttctgacgggctatctgctctcaagatagaggggtgatccttccctttcgagctggtggctttgcacatctattttcctgtcatgttattactgctgtgactttcaacaacatttatttttccctccaagcaatatgctcccatcataaaataaagtcctcctatatgttttagtagaatcccaatgcttaggcatcctggcatactgctaaaaagtgttttaatggattgttcaagaactaccttgggggtctttattaaaaccaattagaacattgatatatttccctaattattaccaacatcaaggtctccttaggagggcagcctcctattaattttcatgggagattcctactaagtccctaccactgaatacatcaatcagttctctcaattctagaaatatttcataaaacaaaacaaaacaaaacaaaaaactgaaacaactctgaatacacttttgtaacctacacatttagaaattctgaaacaggtatttaaaataaaaaccaaagatcaaattttgtgtcatatgttgtttaaagacctggttatactatgttattgatggttattga

SEQ ID NO: 121759 - DNA, 435 bp, Homo sapiens
cagtataaatatgtcactcataggagcactgccatctgcacccaaatattcctacgatcctcatgaaataaatgctactcctattgttctctgcaacaacagagacagtctctcaaaacccaatccataacatactcatatttttcagaggccatctataaatctaacagatgggtcgggatggtttgatggcctatcctccctcccttatgtaactgtatctctctcttcctccactgtacctctcacagacattctctttagctgaactgcaggaatcctctctcactctgacagctgaggttccagagcagcccaggttgaccataaccacagcagaaagattctcaaggcccatccctgacttgctttaagccaccagacaatggaaaccccaaaggacatggagttacatcagtgacgttcctcagggtt

SEQ ID NO: 121760 - DNA, 455 bp, Homo sapiens
agtttggtcgtctcctcatttaagggagggattatggtggtatccaaccccaggggtgctggaaggacaaagggagttaatgtaagaaaagtgctttggacagagcccagcacagggcccttgggaattcatgtgcaggcactgccccagagccagctgtcactgatgtgaggatgccaccctccagcccagggcaggggcaccgatggtcaggaaggttccgtccactgcacagacttttaactttcagtgcacaccacagccgtcagggaagcttttaacacatgcagtcgggagcctgggtgtgcctgcgtgcgtgcgtgtgtacgcgtgagtgggtgtgcatgaggtgtgtgtgatgtgcctgtgtggggtgttttaactcctcagatgattttgacatgtcccacgggtgggatgactgggaaaacggccttttaagagggctttctttt

SEQ ID NO: 121761 - DNA, 245 bp, Homo sapiens
gcgcgttgggacatggaggaaatgaggatgtcctggaaggagaggagtgccaaccacatcgtgctggcttgccatgttgttcttattaactgcctgagttctcataacaagcctgtgtgtagggactcttacccctattttacaaacgggcaaaatgagatggggccacacagctagctaggaaagggcccagccaggatttgggtcctagctggtctataccacacatacacttcaagtccagc

SEQ ID NO: 121762 - DNA, 659 bp, Homo sapiens
acttatagcagccaacacgccaaacaatcaaaaacaccagcatgtgaaaccctcaaagtacggacaccaagaaagagtttggtgacaatccatcagctacatagaaatagaaagtgagccaggcagcataaggatatatgatccaacgtgatctttttttatttttttttttgaggcagagtcttgctctgtcacccaggctgcagtacagtggtgtgatcttagctcactgcaacctccgtctcctggattcaagtgattctcctgcctcagtctcccaagctcactgcaacctccgtctcctggattcaagtgattctcctgcctcagtctcccaaatagctgggactacaggcgtgtgccaccatgcctggctaatttttgtatttttagtagagacggggtttcaccatgttggccaggctggtctcaacctcttgacctcaagtaatctgcctaatctgcccatcgcggcctcccaacgtgctgggattacagctgtcagccaccgtgcctggctgtgatcctgttttttttttctgagacagagtcttgccctgttgctgttgcccaggctagagtgcagtggcatgatctcagctcactgcaacctctgcctcccgggttcaaggattctcctgcctcagcctcctgagtag

SEQ ID NO: 121763 - DNA, 428 bp, Homo sapiens
tcttctgccttcgggccgcggggagttgcgcagactctaaaaaaaaaacctttaaaaacccaaaacctcccctccaagtccctttcgatctacgccaccttccctctcagggctgatttcttgaatttggggcgtcgaggcctccccacccgttgctaccagcccttttgcagcacttcctgggcaggccaggggagaggacggaaaagtgaaaaaagaacgtgtgcgcccagcggacccgacttaacctgttggtggaggaggaagctggcgtcgggctgaagtcccccgagccacccctggagccagagcagcccccgagcattcagagaaagccgcccgtccccagtcccctcggaagccggtcataaacccgacttctcatcacccgaattacttaaatgagctttgatggtgttaggtccttt

SEQ ID NO: 121764 - DNA, 179 bp, Homo sapiens
aagttgtagtatgtaatttccccttgaaaacttgaatttcatcattgacaacacatgctgtcagttgtttttttttgaagtgataggctcagtttgtttgtttctgagaaattgtctgccaaatccacaggtctgaacaacgacaatttgtcaatcttggaagttaaaatggtgctccg

SEQ ID NO: 121765 - DNA, 413 bp, Homo sapiens
ccccatctctacaaaaataaaaaaaattaggcacagtggcacatgcctgtagtctcagtgagctatgattgtgccactggactcaaccttgggtgacagagtaaaaaaataaaaggagagaaggtatagatacagatatgtggggaagataaagttagcatgtttatgaatattctggctgcttctatttttttcagtgtattacatagtaaggtcagcaagtgagagtgggatctgagaaaaggtatgaaatattcatctaggggagagacagtcattggcccagtggaatttcatctgattgccaggagctagaaatcgccaagtagtactggggagtgattcaggctcccacagataactacagccaaaggtagtttgtggtacgatgtaatgactgcaagattcaaaac

SEQ ID NO: 121766 - DNA, 172 bp, Homo sapiens
cagcacacgcctgtgtgtgagtctgtgtacttgcgtaaccatgctcttactgcattctccacaagcgctttgccacgtgcacccataccattgcgttagtcaccttctttttaataagttgactgcgttttaaataccaggagcgtgtccaataaaaatactttctgaatga

SEQ ID NO: 121767 - DNA, 446 bp, Homo sapiens
agccctgcaatctcaatgcatcttcaggaaaaccttcagcagtgactgctgccattcacttttcaatagaccccaaaatggggctccaagcctcagtccaatcagcgtaactaagggaaggagctggaacaacaaggattgtgggagattaaccagctctcccactgagaggccaggcaacctatgttactaaatccttctaccggattaagccagagcccacagatcacccacaggcttgaacagatgtgacacaacggggcactttctgggccttggtccaaggaaagagctaaaagtagatggtgcatgggcacaaggcacttgtcactctctcccttgtagaggcagtgggccgtctcagaaagaacatgagtcaaaagacctggttagcccagcttggccatgtgccagctgtttgaccttgagtgagtcacttcactgct

SEQ ID NO: 121768 - DNA, 479 bp, Homo sapiens
tgtcatatacatgttttcatgttctagtatggtagtatgtggataccaggtgcttcttcaatacctaagtgaatgaaagatgtattagtctgttttcacactgctataaaaaaccacctgagactgggtaatttataaaaagaagcggtgtagtggacagttctgcatggctggggaggcctcaggaaacttatagtcatggtggtaggtgaagggaaagcaaggcacatttaacatgatggcaggagagcgagagagagtggggaactgcgacacacctttcaaccatcaaatcttgtgagaactcactcactatcacaagaccagtatggggaaaccactcccatgatgcagtcacccgcaccaggtcccccctcgacacgtggggattacaatttaagatgagatttgagtgaggtcacagagccaaaccatatcacaaggtgacttggcctgaggaagggttggaaaaccttcat

SEQ ID NO: 121769 - DNA, 127 bp, Homo sapiens
tgctgtgattacaggtgtaagccactgcgccccgccccagttaacgttttaaaaattttctgtagagacgggtttctccatgttggccaggctcatcctaaactcctgacctcaagtgttctgcccg

SEQ ID NO: 121770 - DNA, 530 bp, Homo sapiens
agatctaaatgtagaacttagaactgtaaactcctaaaagaaagaacaagaaaaaatctttaggacctgtgggtaggtaggcagagaattcttagacatgactggaaaagaatttatatataaattcttatatataagaaaaataaattagagttcatcaaaattaaaaacttttgttcttccaaagacactgttaagggactgaaaagccaaactacagactgggagaaaatacttgtaaatcacatatccagtgaaaggacttgtatcccggctatgtaaaaagctctccaaacttaacagtaagaaaacaacacaattaaaaaaatgggcaaaagatatgaacagacacttcaccaaggagaatttagagatggcaaataagctcataaaaagattgaggggcatctggacctgaacttgtatgtgtgaatgagtttgtgttgtttagagtttctcctagaggcacaagagactaatggtgatgtcatactcccaagtggctttgggaaaaaaatgaggcaaagtta

SEQ ID NO: 121771 - DNA, 433 bp, Homo sapiens
acaagagctcagcagcagaccaacgattgcgtcccctttttgaaaggggtgtgttatgggttgaaatgtgtctcctgtctccaaattcatatgttgaagccttaacctatagtacttcagaatgtgatcttgtttggagatagggtctttacagaggtaatcaagttaaaatgaggtcgttagaatgggccccaattcagtgtgactgatggctttatgagaagaagaaatttggatacaagaccatacaattcatactggactatgcataccgggaccatacaatgtgaatatgaagacagctgtttacaagccaaggaaggggcctggaacagatgcttctctcacagccttagtaaggaacaaaccttgcagacaccttgattttagatttctccccttcagaacagagacaataaatttctgttgctta

SEQ ID NO: 121772 - DNA, 995 bp, Homo sapiens
aggcaggtagatcacttggggccaggaattcaagatcagcctggccaacatggtgaaaccccatccctactaaaaacacaaaaattagctaggtgtggtggtgtgtgcctgtaatcccagctgctcgggaggctgatgtgggagaatcacttgaacccgggagccagaggttgcagtgagccgaaatcgtgccactgcactccagcctgggcgacagagtgagatcccatctccaaaaaaaaagagagagacagagaaacatagggaagtatttcagggtgacagaaatgttctcttggttgttgtggtggttactgctggacagacagtcctccgtgggcctcacgcactccgacatgtcttattgagtatgccaggaatgcaatcactcttgaacctgggccattctgtacctggtaaccttgaaagacgagataacatctcccgctagacaaagagcaggcttgctcactgctttctataaaagtagtggattccccaagtttgatgttcttcagctgcaacacagaaccactgagagagcatccatcttggtcatagtatgtcaccctcttgggacttgggggaaggggaaactatgcaaatatagcaattctcatgctgtgtgctatgacaagaaaaataaattccttcatctctcactcaggagtcccccatcttatgtcagcacccagtaatacaagttgagaatcctaaatccaaaaatccaaaatctgaaactttttgagcaccaatatgatgcttaaaggaaatgttcactggaaaattttggattttgaatttttggatttgggatgctcaatcatttggtataacacaaatattccaaaatccgaaaaaaatctgaaatccaaaacacttctggccccaagcattttggatgagggatagtcaacctgtaacagtaataggctaccttttaagtattagtagggtaaaatcaaattccacaccagacggcgacatgggttaaa

SEQ ID NO: 121773 - DNA, 529 bp, Homo sapiens
taaaaaaatgtgattcaccacataaacagaattaaaaacaaaaaccatatagtcatctcaattagatgcaaaaaaaatttttcaataaaatccaacattccttcatgataaataccctcaacagactaggcatcaaaagaacatatctcaaaataatagccatctatggccaggcgcggtggctcacacctgtaatcccagcactttgggaggcggaagcaggcagatgacctgaagtcgggagttccagatcagcctgaccaacatgaagaaaccctgtctctactaaaaatacaaaattagccaggcgtggtggcgcatgcctgtaatcccagctactcgggaggctgaagctggagaatcgcttgaaccaaggaggcagaggttgcagtaatccgagatcgcaccattacactccagcctgggcaacaggagcaaaactccatctcaaaacaacaacaacaacaacaaaaaagaataattactattactgaatacattgcatagggcaatgtaaattacctctttc

SEQ ID NO: 121774 - DNA, 387 bp, Homo sapiens
gaaggcaaagtaagatattaaactttatttttattgattttattcaaagaattaagctagtgggagtagcagattcacacttctaagatcaagggccagcttctattattgaacacttggtgtgtgcaaatgccatgaggtagggatactttgttttgttttttattttttattgggttcgatctcttttgtttatgatgtatccccaagtgcctagaatagggcctggcatatggtatatactcaataaatatttgttgaatgaatccatgatggaatgtgaaatggctagcattacatagaaacctgtagcattgctggagagataaaatatataaacataatccattgcaggtatattgacaagttcaaaataatataatgggt

SEQ ID NO: 121775 - DNA, 431 bp, Homo sapiens
ggactggcatatggcgctcgactctccatcatgaggagtaggattgtcgtgcagtgccagcctgcagtgacagtgagacatggtgtttgaattgctctacaagagatgaaaacaaccagcctatctcaggggaatgaattggaagtaagcattatgatggtggtagaagcactatgtgaacttcattgtcctgaagctatacagggaattgctgtctggtcatcatctattgttggaaaacatcttctgtggattaactcagtggctcaacaggctgaagggaggtttgaaaaggcctctgtggagtaccaggaacacttgtgtgccatgacagttgttgattgctgcatctccagctttgacaaatcggtgctcaccttagccagtgctgggtgtaagagtgccagcctgaaacattgtctgaatggtga

SEQ ID NO: 121776 - DNA, 449 bp, Homo sapiens
cgcggtggctcgcgtctgtaatcccagcactttgggaggccgaggcgggcagatcacgatgtcaggagatcgagaccatcctgactaacacggtgaaactccatctctaccaaaactacaaaaaaatagcagggtgtggtggcgggcgcatgtagtcccagccactcgggaagctaaggcaggagaatggcgtgaacccgggaggcggagcttgcagtgagctgagatcgtgccactgcactccagcgtagataacagagcaagattctgtctcaaaaaagaaaaataaataaatcaataaataaaaattggccttgatacttatctacttatagcagctttcttcagtcactaaaaactggaaaaaaactaaatgtccataaacaggtgaatgaatacacaaattgcagtctatatactggaacactactcagcaagaagaaggaatg

SEQ ID NO: 121777 - DNA, 557 bp, Homo sapiens
ctcgaactcctgacctcaggtgatccacctgcctcggcctcccaaagttctcggattacaggcttgagccactgcgcccggcctatttatttatttttgagacaggatcttgctctgtcacccaggctggagtgcagtggtgtaatcctggctcactgcagcctccaccttccgggctcaagtgatcctcccacctcagcctcccaagtaactgggaccataggcttgtgtcaccatgcctggctaattttttgcatttttagtagagacagggtctcactgtgttgcccaggctggtctcgaactcctgagctcaagccatctgcccacctcggcctcccaaagtgctgggattacagacatagccaccatgcctggtctcataacttgctttagagcataccaagtggctgtagttttgcttttttccaacttatcaataggatggaagcatgtataaaaatgggactaatttatcagaactttttattgatttggacacaactagagaatgggaccttatatccaccagactggaagtgggttcaagagattaa

SEQ ID NO: 121778 - DNA, 358 bp, Homo sapiens
gacacgtgggctttttctagtttgaggctatgctaaataaagtcactatgaatatttgaacaaagaaaatctacacacagtcacacatccaaattaccatgatccacaattgtattttaaaaactcattggagaatttggactctagaatttatttcagagagatctaatgatctaagggcaaattctacctctcccacttactaactgggtgagctcacgtgagtcccatgacctccctcggtcaccctgagtgagatgcatggtggatgctccacaagctgaagctgctaagatgaaatgataagcacggatgaatgctgtctgggcaatggatgcatcaagcctccctcttctct

SEQ ID NO: 121779 - DNA, 541 bp, Homo sapiens
attgttaaagaaggggccctggagcctctgattcttgttctttattgtccttgcccctcagtaaaaaatcctttaggaaaacagatgcgttgatgactgtgctggtcaaaggtcaattttggaccccagactcctttgtaaaagcttaatgaatctgaccaactcttctaagctcttctagaggtagctgccactcccaagggagagattcttgagctcctttggcttaccaagtgggatggggtgagatggtatgcaaagagggaaggtgaaagaaagaagggggtcagtcttggagaaaaaggcgtattacctctattcaggtagaagcaagagaaaactgcctaaaacctgggattccagggatgagcttgccaatcctccccctactcaggcctctgcccagattcgggactggcattggagaaggagttagggagaccttgagaagtggttaggacggtggactccacctagaggcaagtagtgactctgattccttcccatatgacaaaccagccttctgggaaaggtgaggaca

SEQ ID NO: 121780 - DNA, 269 bp, Homo sapiens
aaaagagttccttagagaatagctgatgccctgtcctgtgtggaaaatgtgcttaccacatacccggcactgttctgtgcatttatatgtattaactcgtttaaatctcactgtcagttgtctgataagtactattgtcacctcattttacagatgagagaactcaggcatagtgagatgaagttactaacttaggttacagttaataaatgcagaacctagatttgaaccctagcagtctagcttctgaatctgacttataactgcta

SEQ ID NO: 121781 - DNA, 618 bp, Homo sapiens
agttgtaggaagaggtcctgggtaaaggagcaggtgtgttcttagaaggccctcctgtctgctgctggaacacatcacctgtttattcgtcctccatttcccgctttgcagagcactgaaagtctcttaagttacagcttcacaacagaagtctaaagtctgcgcagaactagcacatctgcagccgtaggagcagcagaatgaccaggcagcagagctttattccatgttttcatctccattcctacaacagcagcggcagcagcaacaactgctactacttctaattgtggtaaaaatacttagaataataatgcataatgacaattgtagttgacatttttggtttatatatgattatttgtaatgttctacaatttacctttagtaatatacacataacttttgcataaacatcaggaccctaaaacaccacacctgatgattgaatctcacctatggacctaaggtcttcacatgctggtgcaggccctctcaccactccatctccaaacagaggatatggtccaccttctgagtcaatatagtagccctgacactcacatgatctatttgaggtcttggaaaacaagcttgccttgttaaaaatcaaaggat

SEQ ID NO: 121782 - DNA, 471 bp, Homo sapiens
tgtagagatggggtcttgctatgttgcccaagctggtcttgaactcctgagctcaaacagtcctcctgcctcagcttctcaaagtgctgggattacatacatgaatgcacctggcctgaaagtactttttaaagaatactaaggctattgaatgaccaggtggggtagcagagaggaacactgtgagtctgtggcagtgtctggataagggattatgtaagtaccactaagatggctatgttgaagagtgagggagcatttagtttgtctgttttataagtagaggccatcagacttcagaggaattcagacttaaaattcatgtgcctttgaatggggaccacatacatgtcacatcacactaacactaatgtttcattgattcattctatcccttcccaggaatcaaattctgattaagagaaagaccctaagtggctgaaggaacaaaaagagttattgcaaaaaaaa

SEQ ID NO: 121783 - DNA, 209 bp, Homo sapiens
aaggtttagtctttttattaaaatatagtctccatgagtagactttgtattcttcatcatatatttcctagcacaggcagcagtcaataagtatttgctgaatgaacaaaaaatggggccgggggtagatggcaaatggaaacctactctggaagcaacattcattctaattcttttcctgaaaaaaaaaaaaaaaaaaaaaaaaaaaa

SEQ ID NO: 121784 - DNA, 455 bp, Homo sapiens
tgtatttgtgatagtgtagcatcaatgaacaaagtcagtgctaatggttttctctaaagtaatgttgcttctttgtggactctcccaaacatgtattgattcatagacaaggcctggactctgcttctgggaggaaaagctgagctgggaactggccctctgcccaccaccttggaagatcagcccagaatgctgagggtgacaagtcagtgtggtaactgggagccagggggctggagaagggctccctggactgacatcatggttactgaactttgaaggtcaaaggtggtgcagtagacctgcattgagaggaaagataggttcaggtttgggagtacaaggggagaagaccaaagatttagggaggcaaagagagctcctgtctttggacagggaaggaaagccttgagttggagtggaggacaaagcggggtgatgatgagctatgctca

SEQ ID NO: 121785 - DNA, 264 bp, Homo sapiens
actgtaggttctcacttacatgtggaagctaaaaaagtagatctcatagaagtatagagaagaatagtggctactagaggagaagaaggggagccaaggaagggaagcggagaagggagagtagccaaaggttggttaatggatatataagtacaactagagaggaggagtaagttccagtgttctatagcactatagggtaactataattaacagcaacttgttgtatattttcaaataactataaaagcaggatttaaatgt

SEQ ID NO: 121786 - DNA, 476 bp, Homo sapiens
attcaacacttcagaaaaaatagaccaattccttaaaaaacaaaagttactaaaatgtacccaagatgaagtagagaatcttagtagtccattaatgactaaagaaattgaatttgtaattagaagttcccaaaaaagaaatctctgggcccagataatttcgctggagaattctatggtacatttaaagaagaattattactagctgtatgcagtctcctctagaaaatagaagaggagggaaccattcccaactaattttacgaaaccagtattacactgataccaggaagaaagacagtgtactaaaggaaatcatggaacaaaatctctcaagaacaatggcacaaaaattctgaacaaaatatgggcaaatcaaagccagcaatatcttagaggaattatatgccatgaccaagtgtgatttattccaggtgtgcaaggctgtttgaagagttgaaaatcaaccagtgtat

SEQ ID NO: 121787 - DNA, 92 bp, Homo sapiens
cgccccaggtgagtcctgcgcgttccctactctggggcccgcgggaggggctggagcgcaggcggagggccggccggggtaggggaggaccg

SEQ ID NO: 121788 - DNA, 238 bp, Homo sapiens
agagcaaaactcccatctcaaaacaacaacaataaacttagtagccactcatttattgaatgcttactatttgcttagtgctgtccatgcgctctctcatttaatcctcattaaaaactctttgagaaagcactatggcccccattatacagatgaagaaacctaggtttggacagattaagtaacttgccaaaagtgatacagcaaaaccttggcaggattctcattccagagcctc

SEQ ID NO: 121789 - DNA, 157 bp, Homo sapiens
cccgccccgctggaaagagcctgaagaaggtggagctcgactctcaagcccaggctctgctgccgtccacgtcttctgagcaagcctctgtgccctggcccagctcaaacaggctctctgcctttgaaccttccccctggatttgtcagcccccagg

SEQ ID NO: 121790 - DNA, 613 bp, Homo sapiens
ggagaatgggagagccacgacgggttaaggtctgttatcattcatcccctgggactgaaactactggggttctgctagcaagaaagacaaagggggatgagtggcaacaaatagtgactgccacaatcatttgcttggtgcaatcttgggtgaattacttaacatctgttttggtcagcttgggctggtataacgaaataccataagctgggtaacttataaacaacatgagtttatttctaacagtactgaaagctgggaagtccaagatcaaggcagattcagtgtctagtgagggcttctttcctggttcatagatggcaccttcttgctgtgtcctcacagggtagaaggggctagatagctctccaggtctcttttatatgggcactaatctcattcatgagagctataccttcatgacctaataatctagaagcccccacctcttaacactatcacattagtgattgggtgtcaatatataattttgggttgagaaggacacaaacattcagaccatagcagcatctgtgccttgatttccatatcagcaaaattgagatagtgataaaacctaactcctaggcttgggatgagaattaaatgacat

SEQ ID NO: 121791 - DNA, 786 bp, Homo sapiens
tgcaggcaaactccaccccggggagctgttgtgcttgcattgctgggctgctgatagactgattgagtggtggcgtgtacttttgtcacaagaaccataaccacaatgacagccacacagcatggacctagcgtgtgctcagctctggacaagacatggatgtaggcagacatgcttcctgcctgctgggcttagtgcaccaatgctaaggacagacatgaagggcttgggaaaggcatgaagatgcagggagtctaggagagaggataagaaaaacaagcattttgtggtgggttgaattgcgttgtcgtttttagaggcatttcgtgatccatggttgcgctcccgtgaagagcgagtctagagaaggaatccgaaggtgggtgagagttgagggaatttgaattccataattacgactcgaatttctgcaatcagctcgcggctgtgttgcctgctcctgccacaaaaacgccatgcagcgccgagccaagtcggatggaagtgggttagggtattatataagcccttgcgggagggaagatggtcttttatgtgtgtttcttttgcagcggcggcggcgagcgcggctcaggttgatttagaatacgggtgacagtggcctggcgcgagcccactgctgacgaaagcggcttatcccgcgcggtttccatggagacgagccggagccgcggcggcggcggggctgtcagcgagcgcggcggagctggcgcgtccgtgggggtctgcaggaggaaggcggaggccggggccgggaccgggacc

SEQ ID NO: 121792 - DNA, 486 bp, Homo sapiens
gctttgaatgtagcccaacacaaattcttaaactttcttaaaacattatgagttgtttgtttgttttagttcatcagctgtcattagtgttagcgtattttatgtgtggcctaagatagttcttcttccagtgtggctcagggaagccaaaaggttggacacctcctgtcttagacccgttccttaaaggaagtaaggcaaccaggacttaatagatgattgcatattgcattctttactagtcaaaggaaattcgtgtgactaataccagaacaccactagcagattgtgtttgattggcatatcaaaattattcattagcaattgtgagaattgctgaaatggtacaacaaagtaaattaggaacatctggatttttcaggggaaggcaagagatagcaggggtagtcgggttgttaattcctaaattaagtgaattaacactggtgcttagtatcctaagtacagaaatagcctgaggccctt

SEQ ID NO: 121793 - DNA, 273 bp, Homo sapiens
cctgcctcggcctcccaaagtgctgggattacaggtgtgagccactgcacccatcctaaccttttcactgtttagagatttgtttcccagtagatttatgttcatctttctgtccatttatcaggaattttatgaagatttgatgagtgacagaagggctgcttagcaccacaggatttaaaagatagtaccttccctcaaagagctcacagtcttcgtgttccaactgtaatatgggatggattctataataaagtaataatagagttctct

SEQ ID NO: 121794 - DNA, 473 bp, Homo sapiens
  misc_feature (435)..(435): n is a, c, g, or t
ttgcttatgttactaagtaccgtggtcagggcaaagaagagaccattcattgtgacaggtagagctttgtaacctgggaaggagaaggatgaaaccacactgcaggggcgtaaaaggaaatgagcagcaagaaagtggaaagatctgcaaaaggaaagagaaggaccagagtgaggggcctcgggaaagcaagaaccagccatgttgccagtggagatgggaatggaaaagtgaagtgtcagaggatatagttggtataaggcagaaaacattaaaagcacagaaaagacaggagtctttttcttcctttagtagatctggtccagggtcacaactaaacactaaattacaaaaggcacagtcatttgatgtggccagtgtcccaccagtggcagagtgggctgttcctcagtcatcaagactgaaatacaggcnattattcaatagtcatgacaaaactatgagtggacact

SEQ ID NO: 121795 - DNA, 514 bp, Homo sapiens
attttattctactgtggtctaagaagatacctgatacaatttttatttttttgaatttaataagactcaatttatggccaacaatgtggtctattttggagaatgttctatgtacagataagaacattgtatattatgtgtttgttgggtagaatgttctgtaaatgtctattaggtgcctgtggcctagaatccagtttaaagttttctttgctgattttcggcctcaatattctgtctagtgctgtaagtggtatattgaagttctcaaccattactctattgctatctctttccttaggaccagtagtatttgttttatgaatctgggtgctacaatgttgggttcatatatatttgaaacagttatatcttcttgttaaattgaaacatcattattttatgaccttgtcttttttttaggtttgttggtttaaagtacattttatctgatatacacatagctactcctgttcatttttgctttccatttgtgttaaatatcttttctcgc

SEQ ID NO: 121796 - DNA, 599 bp, Homo sapiens
gaggtgggatgtgaagtgtggaagctgcggacagaaaagtgctataccttacactaaggagtgtggatgttctcccgtaagcactgaagtaccccgaaggctatggccatttaccaagactaaaatggctctgtcaactattctgagaaaaatctttgattcttctatctaggtcataaactataaatctggctaaattggcagtcatagtggattaacataggctttctaaccagaatgacttccgttaattgacaaaagtgctgccaaatggcttcatctgaatagaagacagcatgggggaaaaccagtaaacagaaaactaggaagcatttactctgccttttcagtactaactacattttaaggtaaccaaagagttacatttaaggtaactctcttgataagggaggaaaaactctttgctacagaagaaagtttgccaaaaaaaaaaaaaaatgtaaaagaggctgggtgcggtggctcacgcctgtaatcccagcacttagggatcacctgagggtcaggagttcgagaccagtctgaccaacatggagaaaccccatctctactaaaaaaaattacaaaattagccgggc

SEQ ID NO: 121797 - DNA, 720 bp, Homo sapiens
ggatctatagaacttcatctcttacccccacagacctattaataaaaggatacattcataggagactgtgttgacccttttacacacccattgcctgtgtgtgccgattaatggacttaggtaaactttagcgttttggtaggcaacgcaatttttcaatgccttttctttctttttcttgtacatctttaaaggccttactccagtaagtgtgcattgcagtttattaatgcctatcccttaatgagtccttgtcatgcatttttgttattaatcataattcacaattcttataattcagagacaccagagattcacataagaagaatggcattgagtttttatttatttatttgtttttttctgtagattatcaaattcattcatttgtatcaagtcactaagtgtatactttgttttctaaaaaaaaaaattccaataattttttttttaagacaggctatcgctctgtcacccagactggagtgcagtggtataatcatggccactgtaacctcagcctcctgggctcaagtgatcctccctcagcctatgtagtaagctgagaccacaggcatgcaccaatatgcccacctaattaaaattttttttgtagatatgtgtgtctcactatgttgcagagactggtcttgaactcctgggctcaactcattctcccaccttggcctcccaaagtgttgagattacaggtgtgagcca

SEQ ID NO: 121798 - DNA, 381 bp, Homo sapiens
gaaacttggagaaattaaggggctttaccaagtacacatggcaagttagtgaagatactaagataatatataggccgtaagacatcagagtctgtgctaaatactgaagagagaaatgaataaagtgaacaaggaacaaacccctgctgtcacagtgctcacaatctcaagggggaaggcagcaactaaatagtttcagaaaactatgtgcagatgagaaacacacaatgtcacatagtagttcagagtattaattacctaactctaccacaagagcaagttgattaggaccttccagagaaagtgactcttgattggcatcttgaagaatgactagaagttcagcgtgtgggcagagaaggcactggcattaccagcaga

SEQ ID NO: 121799 - DNA, 242 bp, Homo sapiens
aatcagatgttggctaaacgaagaggccttatatcactaggattaaattagagataatggtgtgattttataagcgcatactaggaaatatgtcttaaggagggcctgtttggatgattgtgaaaaatgaggtgtagctgatgtttgctgcattgaaagaaggtgaagtggggattttctgccccttctccaagtaccatgtgcagagcttctcttttggttccattctttgtttttttgct

SEQ ID NO: 121800 - DNA, 236 bp, Homo sapiens
ggcgagtgctgggtcaggactgaccaccaggttgtttcaactcagagccggggccaggaccggaccttcctgccacaccacacagatggccatacaccacacattccccacatctcctgctagctgacccagccacagctggagccggaagccctttcactccctccagccctctgcagggaagcacgtgctcaaccaacaaggtccctctggggccgggctgggggcctgtgtcc

SEQ ID NO: 121801 - DNA, 451 bp, Homo sapiens
tgaggtttatgtgcgggtaaaattaggagggcacccttaaaggctctgaatgttagaaacggtgctatgaatttgtgagtgtccaaaatcttttattgttgcagaattttctggtttaggacaacattgtttacaatccattaattagctggaactcaggaacctttttggtatgaagtaatttcctgtgccaaggaatttgacctgtttatcagtatttggggaagttcctggaatgtccgtccttccttctttgccctccctcactgctgtatctctttgtcacatttcttctcttccttcaaatcatagttcccacactgcctgtcatactgggttatcctgattggaattactcttcccaaaaagtatgcacagtgttttactttttctttattatcaggtacgtcatttgtccttttcccctgaattagtgggtatattgaccaaa

SEQ ID NO: 121802 - DNA, 681 bp, Homo sapiens
aggtggctgggccttcctggtcccctccttggctgcggtggaggccgaggacagccaggacccaggggaagacacagttctgtggtggccaggcctgtgggcaccaggagcagagggaagggaggatggctggggccaggggtctgggagcagagggacgctcagccacctgctgcggtgggcggctgatgggctgtgcgagagacactggtgtgggcagaggactcgggaaactgcagcctcccaagcgggtcgggagctggcccagccccgggaggcccctctgccggggaacgaagccaaggcctgagagtgacgcagcctcccaaggccacgctgccggcgaggggccaggcctgtccttcccgagtgcagcaccacttctgggacacacacgtggttctcagtgctaggggccggagcagcccccgccggcctggccaggactgagtgcaggaaggggctgccccaggcagtgtgctgggagggacctggggccctcacggctcgcagctgccaccagagctgcccccatttttttttcttttaatgcttaaagaatgcagctttattcatgtccattggggcagctcaaaacgtagttgataaatctattcaaatttattttcctagtagaagccctgaaggggttgtttgctgtttgttgaaatgaaatccacg

SEQ ID NO: 121803 - DNA, 412 bp, Homo sapiens
taggtaaagctgcaacaaagtccagactcagctccactgcagattaaatggaatcagccctccacatcactggccttacagaggaaagggcatgccttagagaagaagtccccaacccccaggccatggacccccaggccatggaccagtactggttggtagcctattaggaatagggccatgcagcaggaggtgagcaacagccaagcgagcattaccacctgatctccacctcccgtcgtatcagcagcattagattctcataggagcgcaaatcctattgtgaactgcacatgcaagggatctaggttgtgtgctccttctgagaatctaaagccttatgatctgaggtgaacagtttcatcccaaaaccatgccccacatcccccacctcagtctgtgaaaaaattgc

SEQ ID NO: 121804 - DNA, 469 bp, Homo sapiens
acagatgactcccagctctgttacacaattctaaatttcagtttttcaactctacaaatgaaagtgtctcagtccagaaaacaacgactgtgccagtggcaacttcctcatttgctgaagtcttggctctcctggaccattctaacttaataactgcttgctgcgtggagaaagaggacatcctagactggaaaacagacgagtggtttagtgatgaaggtgacattctggaatgttcaggaaatccccccatgagcaaaacacagaaggcatgtctgacactcatgcttctaggccagacgctgagaattttccccgggtcctcattacattcccacaggagcccggggagtgcacctgcccatggagctatcgtggagtttgcatcttccacccttcacctccagactgtcctccttattcattaggaagttagtgtcagctgcaaattcagggacctgcttctgaa

SEQ ID NO: 121805 - DNA, 471 bp, Homo sapiens
acattgcttgttttctgatttaatatatatattttttgtttttggagggtatccttgagtaattctttgagaatgttttgagtccttggatatctgaaaataactttatttatttattttaaaattttattttagagatgggttttcactgtattgcccaggctggagtgcagtgactactcacaggcactttcatagaacactacaggctttaacgcctagcctcaagtggtcctcccacctcagtctcccaagtagctgggaataccagtgcatgctaccacacctggcaaatggctttatttttgctttcatgtcagtaaatatctttttacttgggaacattgactacatggctccattatttttttccatctaatgttatatgtaagaattctgatgctaatcccaattcttgtattttgcagttctctactacttctgctacttctctttgatagaagattgtac

SEQ ID NO: 121806 - DNA, 277 bp, Homo sapiens
  misc_feature (46)..(46): n is a, c, g, or t
ctggtgtgtacgagcagttgggattgacagcagcaggaggatcttnagcccaaggaagaggttctgccatctggcagaaccctcttgtgccagatggggagctctatccttgagggaacctatgccctcccccagcccccactcccatgacaatcctggcgtgtaccttccttttgtgctgccctgcctgcttctcaaggtgagggttgggacacaggaccttgagtactaaggtcctgagtcactctcaatccttgtgccagggtggtggtgtacg

SEQ ID NO: 121807 - DNA, 310 bp, Homo sapiens
tgtggagctgacctcccctatccaggccacctagccctcttaggcgcacgtgaagggaggaggccggatgggctagaggttggagtaagatgcaacgaggcactattcttggctccaccacttgatatcagcctcagtttcttacatgtaaagtggatacaaccgtaccccctccaccgtaggtttgccgtgagattgaaatgagagagcgttcgaaccgtttggcacagcacctgcacgtaaagatgcttgatcaatgttgtcatgattacagttgagctgactgggcccttgggacccggactggagt

SEQ ID NO: 121808 - DNA, 234 bp, Homo sapiens
gattagaggatccatagtcacggtttggtacgatatacgatgaggaagatgacagctcaagccaaccgtggacactagtccaggtgggctgctactacaggaccttccgagtattgatttctttcgaggttgctgtttagttaatggaatacgcagttagtgatgaggaagaggaaaaggtctcagaactcacattcttggtgtagggaaatctctgcagatgcatcatacatt

SEQ ID NO: 121809 - DNA, 427 bp, Homo sapiens
ggacaggaatgttcgtaatgttcaatgcccctcatttttgccacatgtgggaagtgaggtatagagaaaggcggagtgacttgtcctagtggcagttagcctcgtgagtagccaggatcaagatgggaacccgggtcttcatgaactctccgaatgccttctttcagcagttactttggaattagaaccgattaaagtgtttgctgccttgatgtggggtgtgagttgtgttccacagacacagagctcggtggattaatggtgtgctggaacgtgtttaactgtgggctctctgaggggaaaaagcgtgattatccataagtacgtaagtttattatacattttgctgttatgaaagatgtggaacatgcaatttataataacgataaaatatataacactctttgttataaattccatagaacca

SEQ ID NO: 121810 - DNA, 201 bp, Homo sapiens
gtgaaaggtggtggggggtaagcaggtgtttcggaaggagtagaggagggcccggaatggggccacgtaggaaagggtcacatccattcaccctggagtcagcccgagggcccaggcagggtggggtcctagtgatgcctgtcggtgggtgacatcaggccatccacagcaccgggagccagcagaaagggctgggccagg

SEQ ID NO: 121811 - DNA, 243 bp, Homo sapiens
agtttgggatatggttgtcatacggtgatcagaaatgcctttctggagcttgaaagagggtcagagagggagctacgggtgtatagtttaacagctagagatggttgttgaggtagaggaagtgtacactgtcaccaaggggaagagtacaggcagaagagtggagtgtcgcgggcgaccttgggaaatatctcctctttagaggcaggaaaaagaaaatatgctagtgatggaagaaggtgc

SEQ ID NO: 121812 - DNA, 463 bp, Homo sapiens
aggtgtgagccactgtgtgcagccaagaatgaccttttcttgggaatctaatcattgcagagccaaacattactcactgaggcatgactcttccctcacctttataggtcctttcttctacttttgtccttttgagcttattctctaccaaaggggccaaaactttctgtgcaacggaatgctgtggaatgcatcctgagactgctggcattcacatctccaagagctctggctactaaaaccatctatcatgagcagttgacagtagctgcaggctaagatccaaagggctgtccctcctgaagtgtttcaaagttgagtcgtgtttcccagcagcaagagagccgcatatgtatcgcggaagcaaatctctctagaccacacttggcgagaccgactttgatttttcttgataaatgtttctttactatctttgttgaaactcagccagcccagatggtac

SEQ ID NO: 121813 - DNA, 265 bp, Homo sapiens
gatgatgggggtgatgaggatgaggatgagggggctgatgaggatgaggggggtgatgaggatgaggggggtgataaggatgagggtgatgaggatgagggtgaagagggtgatgaggatgagggatgatggggtgatgaggatgaggatgatgagggtgatgaggatgaggatgatgggggtgatgaggatgaggatgatgggggtgaggaggatgaggatgatgagggtgatgaggatgatgagggtgatgggcgtgatgagg

SEQ ID NO: 121814 - DNA, 444 bp, Homo sapiens
taaatggaattaaccattatgctttagtagaagtccatattagaaccttattggaattcaagggcttaaatcccaggcagcgtgttctcattgcctttatgctttcctagtcctgcttggtcatttaagagaggaggggaaaaggactgctaacgtgggaaagcatctaacatagagagacagaggaagaacgtctagaacaagcttgtccaacctccggcccacgggccgcatgtggcccaagacagctttgaatgcatcccaacagaaattcacgaagtttcttaaaacgttacaaaatttttctctctctctctctctgtgtgtgtgtgtgtgtgtgtgtgtgtttcctagctcatcagctattgttagtgttagtgtattttatgtgtggcccaagaagtcttcttccaacgtggcccagggaagccaaaagattggaca

SEQ ID NO: 121815 - DNA, 337 bp, Homo sapiens
gcaggaaacagcgtatacggggcagacgggatcacggaggaaaagagcaactgaccggcagccgccagacacgcgagaaggcaaagaaagaaaggaaggaggtggcctgcagccaggagatcctcactttcaagaaggcaataaacaatgatgctcaaaaagcacaagatttccatttctctaatagtgagcaagaagaaaagtctagttcctttcatgctggaaggttaaggatagaaggaggccatgtgtggtattatagagagatattgaaatgggagtcaggagactcagctctgcttctatttagctgtgtgactttgggcaaatcacttca

SEQ ID NO: 121816 - DNA, 1068 bp, Homo sapiens
tgctaaacttacgaaacaaggcagtaaaattttaatcactactgatgaaacttgattttatataagagttttaatattctgcttaaaatgtaaaatgcaagaagactttgatggtttcgttttttgttagaaagaataacatctaaaataccatatcaaacttcactgttagtacttgagaaaaaaatggtttcagtgagagaaatatttacattaaacaggttttatatagacagcacccttgtaatgcttggtaaacaatctagaattccaaccaatattttagaaaaatttctaggtattttattatggtgttgtataagtcaccacattcaattttccgtggatgaggtatcaatatacagataagtaaatctcttaattgttttctaaataaactttatatttaccacacacatgaaatcatcaaagagaattacagtacatctgaagaactggaattgaaataacaaaaataggatcctcagtgggtattctctggtgatagagcttcaatttttaatttcaattaaaataaataggcttgatataattttcaaactgttttatatcaagcttgcgtattttaattgaaattctgaaattgaaatagttgaacatttagaaaatgagcatttttgagtggcttggcttcagtacacaatattccaacaccattgtcaatacttagcgttataaaaaggtttcagttactaacatgaactgagagatacagcaaatattaaagatgattgaacatatgaaactgaaaaactataaaaaggtagaagctattgtaaaaatgaagaaaactgaaaaactgaaaagataagaagttactgtaaaaagaaaacggttataccatttgaagcagaacaaaatgttccaataaactttttttacttaataatagaaatattgaaaatgcaaaactctgaaggtattacaagggctagacaaattttgaattgtttggcataagaagggagaggatttattgaatattattaatatgaagacaaaatctgcttattgagatatctcacctattatcattttaatagagaa

SEQ ID NO: 121817 - DNA, 272 bp, Homo sapiens
caaatgccactttctaatgagcagagatgttgaagtgttctgctttactgacttgaacatcttgtttactacacaatgtatttgtagtaaataaaagcaggcttttaacaaggtaaagattaatattctagatttgttactacaaagaataacaacttaaaattgaaattagtcagaaattataacaaactatctctcagaccacagtgcaatcaaactagaactcaggattaagaatctcactcaaagccgctcaactactcgggaaagtg

SEQ ID NO: 121818 - DNA, 354 bp, Homo sapiens
tctcctattccattgatctgtgtctttcatttctctatcacctcactgttgattactgtcaccttagagtaagttttaaaatcaggtagtgtgagttatcttattatttttcagaattgttttttgggtattttagttgcattgccttttgtgcatattttagattacaggcgtgagctacagcgctgggcgtgatttctttttgttactttgctgaactatctaggaccctcagtgtaatgtgtaataggagttttacaagtggacatcctttcctttttcctgatgttagaggggaaaacactgagtgtttgaccattaatatgatggtagccataggtgtttgtttttgta

SEQ ID NO: 121819 - DNA, 557 bp, Homo sapiens
actgctcttttcttcctggaggctctctctaagcaagggtgggcaaaccatttgctttaagagattgattgtaaatcttttaggctttgccagccatatggtctctgtcccaactactcaactctgccatcgtagcataaaatcaaccatagacaatacgtaaaagaatgagcctggcggtgttccaataaaactttatggacacaaaaatttgaatttcgtgtcattttcacgtgtccagaaacattttttgatgttttcccaaccatttgaaagtgtaagatccattcctagttcctatcactctaagcacattccattataacatctccatgggccgggcatggtggctcatgcctgtaatcccagcactttgggaggttgaggcaggtggatcagaaggtcaggagttcaagaccagcctgacaacatgatgaaaccccatctctactaaaaatacaaaaattagccgggtgtggtggcacacgcctgtaatcccagctactcgggaggctgaggcaggagaattgcttgaacccaggaggcggaggttgcag

SEQ ID NO: 121820 - DNA, 700 bp, Homo sapiens
agcagtggcaacccacttatgtttcctggctttgtttttttgctctttgtaataagtcttgctgctgctgctcatctttgggtcctggccgcctttatgggccgtatcaccgtgaaggtctgcagcttcactcctgaggccagcaagaccgtgagcccaccagaaggagcgaacaactcgagacgcaccgcttttaagagctgtaacactcaccacaaaggtctgtagcatcactcctgaagtcagcgggaccacgaacctaccagaaagaagaaactccatacagatctgaaaatctgaaggaacaaactccggacacaccatctttaagaactgtaacactcactgcgagggtccacggcttcatttttgaagtcagccagaccaagaacccaccaattccgcacacacttctgctgtttcgttctattctcaaggaaaaactgtgatgggtccatttttaatcacatgcaaattcatgggcaaatctttgctatggttatgtattttgatttagtagagttgtatcacatgttcactcatgtgcccacaatagcagggtataccaataggctgcttcaaaacaatcatgaaaagtaggaggtggtgtttccaaaggtagtggtcttgccagaaaaaatggaaatactgtgaagataaaaataaacatctattaacacaaaaatagaaaaataatata

SEQ ID NO: 121821 - DNA, 185 bp, Homo sapiens
ggatggagggggctgggaaggggtccagcgctaggatggagtggagggggctgggaaggcgtccagcgctagtatggagtgaagggggctgggaaggcatccagcgctaggatggacggagggggctgggaaggcgtccagcactaggagaagagctctgagaagctgaactgggccgaaggcca

SEQ ID NO: 121822 - DNA, 540 bp, Homo sapiens
taatcagtgggttcccacctgtgtgtctgaataaaccagggctgccagtcctagatctgtgggatgcttgcagacttttcatgccctactttgttcttcctgaccccagccagatgctggatgcactgtcttgggtgaaggaaagctgggaaactcaggcaggccaatctgaggcttggcccagtttggaatagctgggccagcctctcagcctaaaagcgccttgtcacactgcctaaattcccactctcaatgaatcacctaaggtttgcacctcagctgcataggctaagatgcatgtatccctggggaaaccacctgtgaattagtctcaatcccgaacatctaaagtgaattgcttgaaaatattttctttgagggtgtgaggcagggagaaagaaagtgaagaatagagaggggagtcccagaggtgcattaggaacccaagcaaagcccataaagaaaaaaaaggcacacacgaaggcctccacaggcccccgtagacaagttattgaagggtgggggcgggtagagagaagg

SEQ ID NO: 121823 - DNA, 515 bp, Homo sapiens
ggacatttcacataaaattatataatatatggcttttgtgtttggcttatttcatttagtaaaatgtttccaaggttcatccatattatggcatataacagtatttcattccatttgacagctgaataccttaattccatttgtatagatacttcatatcttatttatccatgtacggacacaggttgtttcactttttggcagtgaataatgctcctatgaacatccttgtacaaagttttgtgggtatatatcttcatttctcttgggtatacacctagaagtggaatggctcgctagaactcatatggtaactctatgtttaacttttcttttttttccccaagacagagtctcgctctgtcacccaggctggagtgcagtggcgtgatctcggctcactgcaagctccacctcctgggttcaagggatcctcccacttctgtctcttgagtagctggggctgcagatgtgcaccacaatgcccagctaatttttaaaatttattttttgtt

SEQ ID NO: 121824 - DNA, 517 bp, Homo sapiens
tgtcactttgatatggcgtcacaataatacacacattttgctcacttgtgcaggtatagataaaaaataagttgcctggatcagaaaactgaactttgttaaaaaacaaataaatacatttttaaaaagaaaagtgcatttaaaaagaaaaaataagttgctaaggaagcaacttctggaattaagaatatgaacatttacagttttaacaagcaagactaaactaccctacacatgtacaaagtcagtatacactcacacctcagtgtatgagactgtctgcttccctaaacccttgccaacacaggtattatgaatctttttaatctctgccaatctgatgtctgaaaaattatatctcgttgttgctttgatttgcatttctttgatcatcagtgaggctggacatcttttctcatgtttgactctataaaaggctattttcttcttctgtggatagcatgttcatatattttgccggctttttactggcttgttcatttaaaaaaaacttttt

SEQ ID NO: 121825 - DNA, 324 bp, Homo sapiens
gaaactaaatcctggtggagaagagctgcaccatgccaaacagtcgatttccttttcagcagagtcatacatcactgacccacccttccctcctgacagaatgacatatgtcatttatcatatgggccccagccagactacggggaggggagggaagcccaggtccatgtgaggctgtctcttcctcctcttggtactgtaccctgtggcttgcaggagggagctctgctgatttggcaagagggaaagggaggaaagaggctgggcaggggagaagggggtagagcctgcttctggatggctgggtgcgtggcgtggcgggtg

SEQ ID NO: 121826 - DNA, 263 bp, Homo sapiens
agtgagaggaaagtggcttgaactgaggtcagagccactggccggagtgagatcatgagggccttacagcactaatactggaggccctggattttgttttagggcagtcactactaatttagtgactttggtcaataaatatcctgactgagccttggcttcttttctttatagagtgtcactctgtcgcccaggctggagtgcagtggcgccatcttggctcactgctagctctgcctcccgggttcacgccattctcctgc

SEQ ID NO: 121827 - DNA, 679 bp, Homo sapiens
caggccggctgcggtggctcacacctgtaatcccagcactttgggaggctgaggcgggtagatcatgaggtcaggagatcaagaccatcctggccaacatggtgaaactctctctactaaaaatacaaaaattagctgggcgtggtggcgtgtgcatgtagtcccagctactcaggaaaatgaggcaggagaatcgcttgaaccaggaagttggaggttgcagtgagccgagatcgcaccactgcactccagcctggcaacagagtgagactccgtctcgaaaataaaaagaaaaatcagtaattccatcactaagagatggccactaattaacgttttggcccatattcttccgactgtttctaggcatatatcaataaatattttaaacagaaatggcctcattcagttctataacctaatttttaattttatttttattttatgactatttaaaacttatctgtattgatcttttgcttaacgcatgtatctatggagtcatttttgatggttgcatttttaaaagatatcatgttattaaccaacttctagttttgatcatttattttcagtttctggggtatttttcgggggtggttactgctgcaaaaaaatttcttaatgagtgactttgtcttatctgggggcagttatttccttaagattcattcctaga

SEQ ID NO: 121828 - DNA, 202 bp, Homo sapiens
cacagaggtggtaggtgggagacaggtccatccaatatacaccttgccttccaatagaagccaaagccctattgcctaatctcttcactttaagaacatgaagaatagtgttgagttcccctttgagatctgactgtggttaaagcttcacaaatttcagaaaaacagaataactcactaaaataaaaatttaaagctaccc

SEQ ID NO: 121829 - DNA, 360 bp, Homo sapiens
aaaaaatgctgctgtcaggaatctgattttatttcagaaaaatgaagcctcttttttggtaactttttgggaatttcttagaaaatggcacgtgttcattgataaggggcagtggagtgtagactgggtgactggcaaaatgaaaagactcagttgcctatgacttctcttcccctgggaaaccttgttaatgctttggtgcaccacctccttctggaacattttatattacttttccaatgtttccaaacattttccaatagctgtgaatggctaaacttggtcaaatgaatgtcctttaatttcatatttagataatttctaactatttttcctataataaacaatgaactgtaaaac

SEQ ID NO: 121830 - DNA, 1585 bp, Homo sapiens
ttactggtaatgaaagaaaacagtactatgatagctcatggagctaagatagcatatgaaagttagtcttacaaaaggactactaactttcatatgctatctttgctccatgagctatcatagtactgttttctttcattacccgtaagagtggctctatcacagcatttactgttaagggctacagttagacctcttgttaactctacttttatttgtgatggctgtgtttcacactaccttgatttataaatgtagtaatgtgttaaataactatatgttgtggtcccttaatacctcttttgattggtgaggtaacagtgatgtggatgatgaaataaaaacgtttccccaagtcactaaacacagttttcaattcatttttttttacatatttaatttacatctaactactgttaggtatgcagcccgttcctttttgccttcagtagaatatagttatataagtagtctcatttagattcttgggacagaacggcctgtgtattgatctttctttaatggcttggaacagcttctatatattctgacaggtcttggaagcatgttaatatccgtgtgtttaattgtcatcttcctgcctgggaaggcagtagaagaaagaatctacatttgtatagtctgtagtacaggctctgtgctgattgcaaggcactcttgagagaaattcattcttattttgcagaagaagaactgaaacttcattaagtcattaagcaacttgctcaggtggtggaactgagctttaaatatggactttttccagtctcaattcagcattatactaggctgcctccatgtgtttttcaaagccccattcaagttttacttctatggtaaactaattttacatacacaaatcttttcattttctgaacttcctttatggctttactgtcaccccactagtatttgatgtcttagctattaactaattcctgattatttcacttgtcacatcaggaaccctatcctcttagttctcccattgagatttcactgctggactaagattattcttgattcgtagtcattggtttctgtttccattcattttcagcactgattatgttaatcgtattgcttgagttttttctttgttcaatgttgtttattacattcattttgtttcatatacacacattttttttttttaactggcattttgaggatattggtttaatggaaggaaaaaggaatggtgcaaagcacatggtatttgaattccaaagaccttgaccctcagcattagcaagtcacttgttttctgagcctcagttttcttactctcaaatgaggtaatatccgaaagtactttgacaacacactaaagcctgatgcagatttcctttttgaagtaattgtgctgtttctattcatattggatatggtattctatggtattggctatagatacatacattttaaaatgttatttaacagcatgtaaatgttcatttcatgccatgtgatcatgttcccctttatgattttttaaggctgtcttacaagcctaacagtgtactaagtcattaaaagatatatttaaagtaaaaaaaaatct

SEQ ID NO: 121831 - DNA, 1609 bp, Homo sapiens
ggcgtgagccacagtgcccggcctgtatttggtgatattttaaaaaattctactttgaccttaagtgcttcaagaattgtgttcagttagtagtccttttgtaagactaactttcatatgctatctttgctccatgagctatcatagtactgttttctttcattacccgtaagagtggctctatcacagcatttactgttaagggctacagttagacctcttgttaactctacttttatttgtgatggctgtgtttcacactaccttgatttataaatgtagtaatgtgttaaataactatatgttgtggtcccttaatacctcttttgattggtgaggtaacagtgatgtggatgatgaaataaaaacgtttccccaagtcactaaacacagttttcaattcatttttttttacatatttaatttacatctaactactgttaggtatgcagcccgttcctttttgccttcagtagaatatagttatataagtagtctcatttagattcttgggacagaacggcctgtgtattgatctttctttaatggcttggaacagcttctatatattctgacaggtcttggaagcatgttaatatccgtgtgtttaattgtcatcttcctgcctgggaaggcagtagaagaaagaatctacatttgtatagtctgtagtacaggctctgtgctgattgcaaggcactcttgagagaaattcattcttattttgcagaagaagaactgaaacttcattaagtcattaagcaacttgctcaggtggtggaactgagctttaaatatggactttttccagtctcaattcagcattatactaggctgcctccatgtgtttttcaaagccccattcaagttttacttctatggtaaactaattttacatacacaaatcttttcattttctgaacttcctttatggctttactgtcaccccactagtatttgatgtcttagctattaactaattcctgattatttcacttgtcacatcaggaaccctatcctcttagttctcccattgagatttcactgctggactaagattattcttgattcgtagtcattggtttctgtttccattcattttcagcactgattatgttaatcgtattgcttgagttttttctttgttcaatgttgtttattacattcattttgtttcatatacacacattttttttttttaactggcattttgaggatattggtttaatggaaggaaaaaggaatggtgcaaagcacatggtatttgaattccaaagaccttgaccctcagcattagcaagtcacttgttttctgagcctcagttttcttactctcaaatgaggtaatatccgaaagtactttgacaacacactaaagcctgatgcagatttcctttttgaagtaattgtgctgtttctattcatattggatatggtattctatggtattggctatagatacatacattttaaaatgttatttaacagcatgtaaatgttcatttcatgccatgtgatcatgttcccctttatgattttttaaggctgtcttacaagcctaacagtgtactaagtcattaaaagatatatttaaagtaaaaaaaaatct

SEQ ID NO: 121832 - DNA, 316 bp, Homo sapiens
catgccgggggctgctggagaaatgggattcccatttaactgcccgtcatctcatttctccagcacagtgaccatctgagagaaatagtattgttccatttcacaggtgggtaaactgaggccattaagtgacagaactgggagttcttctaaattcaaatacggtgactgtccttcaaattggcagaaccaaagacctctgggaattgaaggttaggggcctccataaatgggcctccccctcccctgtggctgtttatgctgccccagagtgggtatttcttctactctgtctccacacacagacgcgcacacc

SEQ ID NO: 121833 - DNA, 523 bp, Homo sapiens
tcaccattgcactccagccccggcgacagagtgagactctatctcaaaagaataaaacaaaaacaaaagatgaagaaaaagtcttaacgtagttggacttatctcttactttttgatttggagagtgagagagagagagagagagagagagagagagtgtgtgtgtgtgtgtgtgtgtgcgcgtgtgtgtgtgagaaagagaaagatttaagaaattgttttctactttagactcataaaaatattctatattgtcttctagagatatttttcattgttcttttgaatccgtctttaaaccatgtggaattgatttttggtgtgtataggatatggggagagatccaattctgttttccccacatgcagataatcacctgttcagcaccatttattgtccattccctttttttctcagtgctctttagtgaccttgctgttgtaaaacagatttcaacatctgtttctggtctttccgttctattccatgggccagtttgtctctaccctggtgccattccat

SEQ ID NO: 121834 - DNA, 1160 bp, Homo sapiens
cggggctacgaccttgcccgtggaagcccgtgcctccgacccccttgggttgtcccaacgcgtcgggtcccgcggcgcttttttattgggggaaacccaccgccatgttcgcggcccgggggttctcttgggcccccgtttgccccgaggtcgctgtaaccacatggggccccggcgccccacacgaggggtttgaaaaccttttctctgggccccaggcggcccccacaaatttttttttttttttttttttttttttttaagtagagacggggtttcaccatgttagccaggatggtctcgatctcctgacctcgtgatctgcccgcctcggcctcccaaagtgctgggattacaggcgtgagccaccgcgcctggcctaacctgcattttaatgatgggcacgcatgctcaccgtggtgggtggcctaacctgtcttaatatcaaatgatcagccagtgcattctctgggcagggaagtgacacagatgtgtcaccccaccgccctcttggtgactgcaaaagtctaaaaagaaagacaacggcaatgattctaattgtcatcaaggacaccagtgtcaccaattgcgactggttttgcaggcccagtaaacagactacatttccagtgtgttttacagtctgtcactggccacaagtgcttgaccagggagctgaaggccaaaaaaaactaaagccaagatcagatctaacagcacagatgctactttgagccccaaagtggccaaggaacacacatcccagcctgccccgtccagaccatggggcaggcctttggtccaagtgctgccccctcccacagcagacaagccactcatggtacaaggggaggtggggaagagaagagcaagacacaagagctgcctgaacgccacacaccactaacggggacaacttgccagatatccacctaggctgtgttgaagtctgcccaatccatggaccacggaagccacagcccagtctcctcccaggtgaagtaaggaaatggagacggtgagccacatcggcaatggcaagtccttctttccaagacctctgcgctttccttcatgacatggtcttccaaaaaaatagctgcataaatcagatcctgtcttgattacctctctaccagagatcagcatagtacctggca

SEQ ID NO: 121835 - DNA, 812 bp, Homo sapiens
tggaagacttcatgctgcccagtaagactttagaggcactgagagcacatcataaattcatatgcatcaggtaacatagccccagagaatataaaggaaaactgatagaactaaaaggcgaaataggcatatttggagattttaacacgcttctctcattaacgaatagaaaaagcaaatgaaatttagtagagctatagaagatgtaagtaatgctattaactactttgtcctgactgagctataaaacactgcaccagacaatagtggattgcacattccttctaattggccacagtatattcatcagaattggccacatgcactgtcaaaagatttcaatgaattaaagtccttcagagtaagttatcaaaatggaggggaaaatgtgatctaatcaaagtagatgaacaaaagcatttgataaaatttaactcctgtttattagtttcaaaaaaaaaaaagccccacagaacaaatttctaacaaactgggaataaagggacttttaaaaagatgataaagggcatctacaaaaaatatttatagtggacattaagcttaatggtgacttattgaaagctttcttcccagagatgaggaaagagacaagaccctgctctcatcacttctattcagttttgtatgtaaagctctattgggaggctgaggcaggaggatcccctgaggccaagagtttgagacttggcctgggcaacatagtgagacccccgtccctacaaaaaattaaaaaataaagttctagtcagtgcagtaaggcagaaagagagataagaggtataaaattggaa

SEQ ID NO: 121836 - DNA, 735 bp, Homo sapiens
ggtcccccctgatatttctggctgccgttgagccaagaggtagatagatcccttccctttcaaaaaaaaaaacccgaaagcccccacctacacaaatataaacctggaccaaagtgtcaccaattaccattttagggctaatcaaccaaaggccaaccaccaactaagaagtatttttggccagacccagtggattgcacattccttctaattggccacagtatattcatcagaattggccacatgcactgtcaaaagatttcaatgaattaaagtccttcagagtaagttatcaaaatggaggggaaaatgtgatctaatcaaagtagatgaacaaaagcatttgataaaatttaactcctgtttattagtttcaaaaaaaaaaaagccccacagaacaaatttctaacaaactgggaataaagggacttttaaaaagatgataaagggcatctacaaaaaatatttatagtggacattaagcttaatggtgacttattgaaagctttcttcccagagatgaggaaagagacaagaccctgctctcatcacttctattcagttttgtatgtaaagctctattgggaggctgaggcaggaggatcccctgaggccaagagtttgagacttggcctgggcaacatagtgagacccccgtccctacaaaaaattaaaaaataaagttctagtcagtgcagtaaggcagaaagagagataagaggtataaaattggaa

SEQ ID NO: 121837 - DNA, 696 bp, Homo sapiens
tgcccctttcacctaaaacgtgtcctgattttccaaaagtatatttgagaaaattatggattttccttgaaacaagtgaaatcgtatgcttcaaaaatcagatcatcagttgattcctataaccaggacttaccttatttatctcattcaatcatttttttgatttattagtttcgataaattggcacactatgagaaacaatagtgattgtcaaacatccaatattatgtagtaagtagcatttattgaattcttactatgccctagttgcaatgttaattttgtgatatttcctaatcaatgtaatactcaaaacaaactatcagatattattattgtactggtgagaaaacagaggtgcagaaatcaataaatcatgtctttaaattgaattcacgtgtctacaagaaagataagagcagtcctgttagcttggagcaggagcccagttaggtcttgtcgttatgctgaatgcaaacaatttgagaaagaatcaacatcagacaaggccattgtgggactgtagtaaataagacaaaaacaaggccacttcatattcatgtctaaacacagacaaaacttgacaattgtctaagccacaaaatagcaaacatttctctacatcggctaatataagtgtctgctgtttccttcccaaataaacctggagcttcaaccttgtcatctctccttct

SEQ ID NO: 121838 - DNA, 435 bp, Homo sapiens
agagttggatcttgttggatgaggagaagtttgccagggaataaaggacattctagacatttacccaaaaacatcctgaaaaaggactcagtcctgagatagaaaagggccaaaaaatttgttagaccaaagccctgccctagaagggctcctagcctggcaagagaatggggtgggtgtggtgggagacagacttggacacaggaaaagacatcgcttactctgttcctcccacccaccatcccctaaaggcaagtaatggcaagaggcctctgggcccagaggataatgaggagcaaaggggacgcctcacactgccactgtggctgtggcttcagatccaggggctcagtgaacaggagaaggaacatagtcctcaggcctcccgtgtcctgggcactggctgggcagagggtatatacactaattgtgctg

SEQ ID NO: 121839 - DNA, 170 bp, Homo sapiens
ttcttctcttcaggtgttttttgcacaccgactttatgccccttatggttcagactccagatatagccatgaacaggacccaggacccttcttgctaggagctcacagtctagtggaggaaacagaggtagtcaccaggtattcctcagtgctgggtgaaggggaagcag

SEQ ID NO: 121840 - DNA, 462 bp, Homo sapiens
ttgctaagaaaaactaaagaagatataaataaatggaacaatattctgaattcttggaatgaaagaatcaatattgttagttgtctccaaattgatgtataaattcaaagcattcccagtgaaaatcccagaaggctttttttttcttttatctttttttttttttttggtagaagttgataagatgattctaaaatttatatagaaatgcaaaggacttagaatagccaagataattttgaaaaacaacaaagttgggggactcatactacctaattttgagacataaaactattgtaatcaaggtagtgtggtaatggtatcaagatggacaatatataagtagatataatggaaacatacatctcatgtatctggtgaattgacttttataaaggtttaaaggcacttcaacagagaaagcatagtcttcttaacaattgatcatccattcataaaaac

SEQ ID NO: 121841 - DNA, 525 bp, Homo sapiens
atgatgtaattggctggcggtgtagtctttcttattccattagcgctctaacacataaaccagttatttaaacatttttctaatggttccaaaatctgtcatgtctgagtctgattctgtgattgcttgtcttctcaaactgtttttataattgcccttggtatacctcaaaattttttgttgaaagccagacatttgtatagaagggcccagcaaacttgctctgtggaggatcagatagtaaatattttaggctttgaggtccacatacatgcagtcggttgcatttcttgttcttttcttccttcctctttctcctcctccttcttcaacccttaaaaatgatggaccctcaaggctgctgaacaggttcagactaattgtactgactcagcctcaggaagtcaggaaagcttcgtggaagaggtggctttgagagtttcgaaggaatacccggcatttcctgaggagtaggtggaagaaactgctggtgccaagtgccaagatatgttagaaccaagcatg

SEQ ID NO: 121842 - DNA, 715 bp, Homo sapiens
gagacacagatggtcactgtatcctcagatgtgtttaactccatttcagtggggccacctttgttgtttataacttctaggtatagattcttgtgggagttccaagatttgttttaagcagtttttcctttcttaacaaaaatagtaagcaccatataatgcttgcttcgtttcagtgatattttttcattcttcactctctcttgcacatttatttgatgctcaagtgatgatatacaaatcactgagaatattatttcctagttttctggaatattagaaggacaatattacatagaattttactttcacatatataattatttcaataatgttgccagaagaattgagtatctcttctgaacaaatgccgtgtctaagaacaagaaggatagaattaaatcaatgaggggatggaaagtaaaaaatgggtcagacgcagtggctcacacctgtaatcccagcactttgggaggccaagacaggcggatcacctgaagttgggagttcaagaccagcctgaccaacatagagaaaccccatctctactaaaaatacaaaactagctgggggtggtggcgcatgcctgtaatcccagctacttgggaggctgaggcaaaagaatcacttgaacccaggaggcagaggttgccatgagccgagactgcgccattgcactccaacctggacaacaagagcaaaactctgtctcaaa

SEQ ID NO: 121843 - DNA, 471 bp, Homo sapiens
gtttctgtgatttcgactaccttaaatacttcatatgaagggaaagtatttgtccttttgtgattggcttatttcacttagcataatgttcttgagattgatccatgttctagcatgtgacatgatttccttctttccgtaggctgcttagtcttccattgtatgtatataccatattttatcctttcattcaccaatggatatttggattgcatctcttggctactgtgaataatgctgtaatagggattgtatggaatttgtaaattgttttaggtaatatggacattttaacaatattaagtcttcaaatccacatgcatggagatgtcttttcatttatttatatactctttggtttcttgtagcattgttgttttgtaatttttagtgtccaagttgtttgcctccttggttaagtttatttctaagtattttgttctttttcatgctattataaataaaattgtg

SEQ ID NO: 121844 - DNA, 348 bp, Homo sapiens
tgacattgttgcaggacttttccttagttcagctaacgatggggtccttgttcgtcccatggccacaaaaatttaggctttcagacagtttgaagggtgagtgaagcacagttttactgggggaaaagggggaaaacagggcctctcgcaaagccagagtccctggtacagtgcttcctgcccggcagttcaaatcccaggttccacacaggaagaggaagggccaggctcctccctgctgcaaaggcggtgaacttcccgaggctccacctcagtgggcaggcagggtgcgggaataccaaggggggggtaccggagctcgaaattccgtacatcaatggtcaatag

SEQ ID NO: 121845 - DNA, 149 bp, Homo sapiens
atacgaaaaactagccgggcttgggggctgacacctgtagtctcagctccttgggaggctgaggtgggaggatggcttgagccagtaagtatgaaattagctgctgtgtaaaaaaattttgggccaggcacggtggctcacgcctgttt

SEQ ID NO: 121846 - DNA, 753 bp, Homo sapiens
cctgcctcggaagaaaagaaaaagaactacctgagattggtaatttataaagaaaaggggtttaactgactaacagtttctcatgactggggaggcttcatgaaacttatggtagaaggtgaagagaaaaaaagcaccttcacaaggcaggagagagagagtgagcaggggaagtgccacgcttttaaactatcagatctcctgagaactcactcagtatctcaagaacagcataggggaaaccgcccccatgatccggtcacttcccaccgggtccctcccttgacacatggggattacagttggcaatgagatttgggtggggacacagagccaaaccatataactgggcaaagtagcaagaccctatctcttaccaaaaaaaaagaatttttgttatttttattgttcatatattgagggcaaactgtccctctcactcctgaactcacacaccgcagttttggtttttcatcctttgtcaagtcaatttttaatgtgggtggtctctttcttttttttttgagatggggtcttggtacgttactcaggctggtgtcaaactcctgagttcaagtgatctgcccgccttggcctcccaaagtgctgggactgcaggcttgatgagcctccgcacctggccataatgtgggtggttttaattcatataaataaaaaatatttgaatgcgtgatattaattggaatcagttgcaaatctttccagttttttctaaaaaaaaaaaaaagcagc

SEQ ID NO: 121847 - DNA, 445 bp, Homo sapiens
gcagccgcctactactactaagttcgcggccgctcgacctgggcaaagtagcaagaccctatctcttaccaaaaaaaaagaatttttgttatttttattgttcatatattgagggcaaactgtccctctcactcctgaactcacacaccgcagttttggtttttcatcctttgtcaagtcaatttttaatgtgggtggtctctttcttttttttttgagatggggtcttggtacgttactcaggctggtgtcaaactcctgagttcaagtgatctgcccgccttggcctcccaaagtgctgggactgcaggcttgatgagcctccgcacctggccataatgtgggtggttttaattcatataaataaaaaatatttgaatgcgtgatattaattggaatcagttgcaaatctttccagttttttctaaaaaaaaaaaaaagcagc

SEQ ID NO: 121848 - DNA, 214 bp, Homo sapiens
  misc_feature (26)..(26): n is a, c, g, or t
tgtgtacgagatagctggcttctaangtgtaatttaaccaggtatcgtgagccaccatgcctggttcctatctctattataataaaaatgaattttttttaaaaaagaattagacaaaagcttttatgtgatttccccatgtcatgctagttactgtttcatagaacagcttcttgaattcactagtcatttttatacccatttatattacatt

SEQ ID NO: 121849 - DNA, 460 bp, Homo sapiens
tgcctttaaacaattttccctgggcaagagttcagcatgtaagaggttattaaagttccatactcctgtctctctaggcctgataaatactgcaaacttcatgtagctcagactgctctgagctatttttcttttctcagaacaagtggtagtgttttcaaaaaatgttactggaaaaattgtgcatccatattaaaaaaatagaaatcttaacctatacctcacaccatttataaaaattaactcaaagtagaccctatatctaattgtaaaacctaaaactctaatcaaacttttatcaaaaatcatagaagacattttttgattgtaggctaagcaaagtttttttaaagataggacacaaaaaacataaaccataaaagaaaacataaataaattagacttcgttgaaattaaaatgttctactctttgaaagtccctgttaaaataagacaagtc

SEQ ID NO: 121850 - DNA, 484 bp, Homo sapiens
tgggtctgctaaaagcaacatttgtcctaagacattctgtatacaaatagggcgcgtgactatggttttgtgagactatgtacaccaaaacaagtctaaaatcttaaatggaaagcaaaagaagaatgtcccagaatattagcaatgccttccatttcttggacatatgctaataatattcttttgattgttactaatgaatggtacagcagtcttaagatattatacaaacagatgataactactttctataacagaacttatttgaaaggaaggaacttaacacctcatcagtgaatagagataaaagccaacatttttaacccatttcacagtgggaaaattgatcagttaattatccaatgaaatcttagtttcctacattcccaaataagttgcgctccaatttattttaatggggcaaaaatatttctttggatgactcatctgacttatatttgtcttcacccctagaaactccttt

SEQ ID NO: 121851 - DNA, 423 bp, Homo sapiens
gtatttgggactgctttccttgcaagagttaaggaagacttacttggctactacaggaaatatctttccttcataccaccaatgctagataattttcaaaaacaagaatgaatcaactctttaaaataataattcaaaattatgttcactgatgagatttgaagtctattacatcatgaatgtgatggaaattgtacacctttcatcagagacaataaataatatagcttttaacagctttattttttttaatttataatagagatagggtcttgctacgttgcccaggcttttatcaaaaccctaggctccagcaattctccctccttggctcccaaagtgctgggattaaaggcatgagccactgtacccatcctttttctacttttttcttacccaaagagcaaagaccccaaaaggggt

SEQ ID NO: 121852 - DNA, 139 bp, Homo sapiens
ggcattgagagagagaaagagggacagagacaaagaaaacaacaaaacagagagatagaaaaagacaaagacacagggagagacagaaatttcaggaggcgagggcagccttgggcagggatgagtgggctctgaaata

SEQ ID NO: 121853 - DNA, 689 bp, Homo sapiens
aagaaaggtctgggctcaatggctcatgcctgtaatcccagcactttgggaggctaaggtgggtgtatcacttgtgtccaggagttcgagaccaccctgggcatgtggtgaaacccttctttattttaacaaaaaaattttgaagaagcaaaaagaaatttatactagggccgggcgtggtggcttacacctgaaatctcagcactgagggaggctgaggctggtgaatcacttgaggtcaggaatttaagaccagcctggataacatagcaagaccctgtgtctaaaaaaatattagccaggtgtggcacatgcctgtagtcccagctactggggaggctgagggaggagcatcacttgagcctagcaggtcgaggctgaagtgagctgtgatgacgccactgcactccaatgtgggcgacagagtgagaccctgtttcaaaaaaataaaaataaaatccatatataaaaactgcatggttaagttttcagagcatacattgtattgaatgtattttttctgcagttgatgtggtaggtgaaagtaatgagattggtaatgaattataagtggcatggtgtttttaataagtgctgttgggtgatatttgagaagtatactgtagtaactacaattcaagaacctgaatggagttttgagaaatcaaaaattgagaataataattaca

SEQ ID NO: 121854 - DNA, 305 bp, Homo sapiens
ttatgtaaatttcaaccttaattctgtgtttattcttttgtgtgagtgaaataacaacagagtctctataaaaagatgttactaatatatctgaggtgacctataactactatgcatgatatagttatgtcttttggattaactatatattttatgcatttataatacttatacatgcacagttaaaattcttttaggaaaagcaataaggtactctgttctgaaattgtttctacaaatgctgcagtatgagtttttcaatgacttaaaaatttccatatgaggagaagtgttagaaatgtatt

SEQ ID NO: 121855 - DNA, 220 bp, Homo sapiens
gttctgagagactggctgtttttaatgggttttatttttaaaaataagagaatatatttatgggtgtaagtaactgaaaagagagcctaagtagaatcagaaaaaatacaaactttggggtgtggcttatatgacaaagcacacccccttagtggcaggtcccaaaatcagatggttcattttacaaaggtgaaataatttcttttctttttttttttgg

SEQ ID NO: 121856 - DNA, 306 bp, Homo sapiens
tggctaacatggtgaaaccccatctctactgaaaatacagaaaattagccaggcatggtggtgcatgcctgtagtcccagctacttgggaggctgaggcaggagaatcgcttgaacctgggaggcggaggttgcagtgagccaagattgcgccattgcactccagcctgggcaacaagagcgaaactcggtctcaacaaacaaataaataaaaaccagaaacacgggccaatttcatctcgcagaaatctttccctttgttttcacaggtaaagaaggcacagacaccctcacctcctgcactcta

SEQ ID NO: 121857 - DNA, 572 bp, Homo sapiens
atgctgcttagttggctatttagagtttccactttgctaacagggcagctgggccctgatttaagtgatctaaatatgtaaacctggcaaattaactgatgaagatccacactttgagaagatatcactgcaatcagagttttagcttataaaagtctgagccccagttttcaggagtagagctattacataacatgaggtgctagaagaagagacatgaactgataaaaacaaacatcctattggtatttttttttttttgagatggagttttgctctcattgcccaggctagagtgcaatggcatgatctcggctcactgcaaactctgcctcctgggttcaagcagttctcctgcgtcagcctcctgagtagctgggattacaggcgcctgtcaccatgcccagctaatttttgtatttttagtagagacggggtttcaccatgttggccaggctggtctcaaactcctgacctcaggtgatccacccgcctcagcctcccaaagtgctgggattacaggcatgagccacagcgcctggcctcccattggtatttctaagtagtccctg

SEQ ID NO: 121858 - DNA, 640 bp, Homo sapiens
gtcatgccactgcactccagtctggcaacagagcgagactccgtctcaaaaaataaaaacaaaaaaataaaataaaaaaataaagttgtaatctaacacaatcccaagtacaaaatctcatactatgtaattaagtcctttgattgctagcagccagagtttttggatatggctactcagccagcaataaatcagcaactgtggatccacccaagtatcttactatttactttagttcatccgattcctgaagatatcatgggagacttaaatgacttgttggaactaaaatcagttgtgattatatgttttttccattaattactgttagaatggttttataattctgtctaaaaggaaagtaagtgattttaacctggatctcataaactatccttattttctaagcacttataaactagcacatgctaatattaaatcttatgatgttccaatgtttatatttcctgacttctctataaaattagcagttcatcataggaaaaagtcacttatacttccacatgtgttttataagttaatacagtagcagacttagccaataattattgattatttcagtaccccaataaaaaatatgataaagtaatataaacaaaataataaagcaaaatctctg

SEQ ID NO: 121859 - DNA, 171 bp, Homo sapiens
aaaaagttaaggaaaaataggacaagcagaggcactgacacatcccaaaaggggcatagaaaacacgattcacacaaggcttgtaaaaggcaggccaggagcatgagggccttataagaatcacggttctcctcaggaaatctctgcctgtcaccttcctcctgcccaaat

SEQ ID NO: 121860 - DNA, 478 bp, Homo sapiens
cctgaacacaactcaaatttttttttttctttttttgagacagggtctcactctgctgcccaggctggagtgccatggcacaatgacacctaacagcaatgtggacctcctgggctcaagcgatcttcccacctcagcccctaccccagtagctgggactacaggcactggctaatttttttgtaaagatggggtttcagcatattgcccaggttagtctcaaactcctgagctcaagcaatcttctgcctcagcctcttaagtagctgggactacagttgtgcaacaccatgtctggctgattttgtttattttttgtagagatgaggtctccctattgctcaggctggtctcaaattccttgactcaagcgatctgccctcctcggcctcccaaagtgttgggattataggtgtgagccactgtgtggccaactccaggtaatttcttacagtagcttcatttatcttgaccttca

SEQ ID NO: 121861 - DNA, 455 bp, Homo sapiens
agggggctaggtagaggagaaacgctgaaaccggaccgaaacctcgccctaggcttagcgatggctaaaaaccggctgggataagagggaggcaagcaacattccgactcgctgctttctggctgtctggagtgcaaggtgactgtggttcttctctggccaagtccgagggagaacgtaaagatatgggcctttttccccctctcaccttgtctcaccaaagtccctagtccccggagcagttagcctctttctttccagggaattagccagacacaacaacgggaaccagacaccgaaccagacatgcccgccccgtgcgccctccccccgctggcccacacgccggctgctgagtgcccaatggggcttgtagcggctcggctggaaaatcgctcactgagcgctcccctgtgctcctagcctagtcccccacacccttgcgtcttgtactg

SEQ ID NO: 121862 - DNA, 378 bp, Homo sapiens
cttacatttattgttttttgtggagcaatgcccatgttatattgtgcagaaaaaaaccatttctgatcatcaaagatggtatgatgctatctatctgtctaatcatctatgcacacacactcatacatgcatgcatctgttatgtgtgtatctgtgtttggcgtgtgcttgtacatacttgtatgcataaaaagatatctggaagaatttctgccaaattttggtaacttttatttccagccatttgtcctctgtgtgaccagaactccctgcatatactaaaatgtctattgatggtctttgagggcagagactgcctagttcatcttaatgtccccagtgctttactcggtacttggcataaagttctacctcaat

SEQ ID NO: 121863 - DNA, 828 bp, Homo sapiens
cgtgcagtagcgtcacgcggaggcggagcgaggactcggggacagttaccacctatttgcaattcaaggagaatataagacagagaagaaagctgtgaatgaatttcatttgattagcaatagattggacactctactgatcttgcctctctacaacctctcttccacctgacctctaaatgttgaagtgtttcaggaattgtcttagaccttcttccttatctacacttcctctccaatatggaattctcttccccaagctgttggcatgtctagttcatttgcattttgggcatttcagctcagctgtcatctcagtgaccagtttttatctgagcatgaatcttgatggctctgcacaagatcctgaaaagagggaatattcttctgtgtgtgtgggcagagaagatgacattaaaaaatctgaaagaatgacagctgttgtccatgatagagaagtggtcattttctaccacaagggagaatatcatgctatggatattcgctgttaccactcaggaggacctttacatttgggagatatagaggattttgatggacgaccgtgtatagtttgcccctggcataaatacaaaattactttggcaacaggagaaggtctgtaccagtctataaaccctaaagatccatcagcaaaacccaagtggtgctccaaaggaataaagcaaaggattcacacagtgacagtagacaacggaaatatttatgtgactctttctaatgaaccttttaagtgtgactctgatttttatgccactggagacttcaaagtaattaagagttcttcctgataaaaaatatatagaa

SEQ ID NO: 121864 - DNA, 253 bp, Homo sapiens
agtctgtagtcgatgtaggtcccgaggcaggaccacaggatgaggcgtgctagcaggatcaccaccagcagggccaggagcgggtcagggccaaagctgccacctggccaggaggtcatgcctgaagtcagccccaaagggcagcagcagcctctgccctggaaccgagatgcagtggggccctgccaccctagcccggcactgccaagtggctgctgtgcagacccaggacaggaagctccgtccagcctgg

SEQ ID NO: 121865 - DNA, 791 bp, Homo sapiens
gagtaacctcagggcttcctggtgagtcttctccaatcagacccaggacagggacctccgtgagattccctgactggaacagtctttatggatcctggtcacagacaatagagaggctgaaccagggtcagcgtcatgtagaacctcacagatttcacgtctgatccttctcctgacacgaaagtatgcaaatcagtatcagcaccgatctggtgcttcttttgttcctaatccatttactttcttttttcgtcgtttttctcctttttccatttgtttttcctgctttttgcaaaaggaagatgttttccctgtgagatgcaggggatgacaattttgggagatggctggaacatccaatatcctcagggccggccatcagtaagtgcaggctggaagtctcagaaagagctgaagctgcttaatcaccgtggagttttaccttctccagttctgctctgatggaatcagggccaagcaggttatcaatgataatctacctaacatagagtcaaccgattccagtttcaataacgtctgttaaaaattcacaccaccacctggattagtgttttgtcaaatcaatacacagtattgtccagctaagtagacccaaagacggaccgttgcccatggagaaaaacattaacctgagttctaggttcttacagtgttaaaggtgtaaaactgattattaaaaatgaggctatttttctttttgctgttgagttgtagaagtttcttttccatttggacattaaaactttttgagatatatggcatattatcca

SEQ ID NO: 121866 - DNA, 431 bp, Homo sapiens
cagggcagctccagatggctccagagagcagaagccccagggaagcaagtttcaggcaacccaaggaaagctgtctatgatgggtttgtcttagtcagtttctgctgctataacaaaataccacagactaaggctgggcacagtggctcacgcctgtaatcccagcactttgggagactgaggtgggcagatcacctgaggtcgggagttcaagaccagcctggccaacaaggcaaaaccccatctctactaaaaatacaaaaattagcccagcatgatggcaagcgcctgtcatcccagctactcaggcggctgaggcaggagaatcgcttgaacccgggaggcagaggttgcagtgagctgagatcgtgccactgcactccaccctgggcaacagagtgagactctgtctaaaaaaccaacaaacaaaa

SEQ ID NO: 121867 - DNA, 482 bp, Homo sapiens
ggacccacagcagcccaggagcaccatgcatcctggcttccagaacatgccaccacacacaggagctgctggggcagtggctggttccaggactgggacaaggaagacaagatgagcaaagagcaggatggggctataggaacagggactcgtcgggccttggggttctggccaaagcaggggcagcgagggcatcggagcaaatcacgtggtcatggaaggaaaagccggggaacaacatagcaacctgactcccagaggatagaaacacatgctctgaaagtctgaggacaggttcctgggagcggctgacaggcacaccccgggacagagctgctgccacgttcctgccaacggccaggagacctagaccaaggcatgggtgctccacacacgctgtgcagaaagtgccgactgcacagtcaaagccgacgacctactccaggtggaagggacttgagacaggggaccaggggatgctt

SEQ ID NO: 121868 - DNA, 168 bp, Homo sapiens
acctttgagaaggggagagggagcctctctgagggagtgacatctgaatgaagacctgaaggatgggaaagggacagccacattaacacatttaacattagtttttaaagacttttttttttttttttggaaaccaagtttaattttttcacccaggttggattgcgg

SEQ ID NO: 121869 - DNA, 516 bp, Homo sapiens
tgccacacactttcaaatcgccagatctcatatgaactcagagtgaaagctcacttatcaccaaggggatggcccaagctattcataagggatctgaccctgtgatccaatcacctcccagcaggccccacctctaacattagagattatatttcagcattagatttgggtggagatgaatatccaaattatagtgacattaatatgttttgttgctgtgaagacctggactatgtctgctgtcttcccaccataacaactagaagagttacttataccaaacagatattcaataagcatttgtttactggctaatttaatgtgttatggcttcctctaataattgtctgcttaattttactcatagagacctctttgttccaaaatgggataagaattcctgctttctattcatctctcagttttctaatgcaatgactagtatttctatgtgggagctccaataataacaggaatcaggttgagccagatactagaatggaaaagatagagatt

SEQ ID NO: 121870 - DNA, 657 bp, Homo sapiens
aatgttactgcaagctccttagcaactacttatgtaaacagtgtgaaggtttttatacttctgccagaggacaacgtaatatgaaacaccgagttttatttgtctctacagagagtagtagtgtctttcaggctgggggaagggagatttcttatactttattccctaaggatagttatttgaatataaatacttaaaatcttttcatttctgactttgccactatgtgacctcagcaaagcccttgattttacataatttccacatcaaagtcagggataataccctttgcttcttatcttaaaatattattttaagtattaaataagaaaagtacatatcaaagtagttagaattactattttaaaaagatttgcattagtgaatatttggtagacaattcagctaaccgttatttagagtctaatgtggtgaggtaaaaaactacacttgatactcagctgtttatagaacagaactatcctgatgattaattataaaacatatccccaatgacagtgtgctagcattatattcccacagcagaaagtttttgtatgcttgggattttagtttttgcaataaatctggggcgtatttggaataataatgatatgtatttgagcatttgatagcatgtttagaaatcagtttttg

SEQ ID NO: 121871 - DNA, 270 bp, Homo sapiens
ccgtgtcacgggctggtgaagattaaatgactctctggaaagctcttagaacaacacctgcttcacagtaagcattcaataaatgtttgttgcagttcttgacattacttcatgctttaaattctcctgtataaaagttatggtaaaaaaggttgtaaacgcttgcctgccatcatctgtcagtcaccagactaaccataatgacacgactcataaattttcggaatgaataaaggagtactggagtgttatcttggtggctcagcatgg

SEQ ID NO: 121872 - DNA, 392 bp, Homo sapiens
ttctgtctgttttgtctactgctagattcctagcatctagagcagttcctcattcattgtagaagttcaataaatatttgttgaatgaatgaatgaatatatgtgtccaaaaaggacaagttaattgtttacaatcactagaaaacatgaggacttcacttgttctcccacctgcccccttctcactattttaggttcattatttgtgttgttaattaaaaaaaaaaaacaagagagatctgctcacctcatagcaagctgagatctggtcacctcatagcaagctgagatgtggttacctcatagcaggctccaattttttttttttttttttgggaaagggatgtctcgctcgtggtcccccaaggggggatgtgcaaggggggtggatc

SEQ ID NO: 121873 - DNA, 352 bp, Homo sapiens
agccaactttcctactctttattgttggacttggtaaatatatcaacttctgaatataaaatctcccttcaggttttcattaaatattcggtttcctctgactagaatactccctagccatctgctctggataatacttaactagtccttaacttttaggtctctttttaatcattacttttttaaaaaaatctattttttttcttttgctgttacttctttcttgaagtcttccatgtttaatggtaggatcaggtgctctttgtatgtgccccacgcaccatcaaacctacagacttacttgcatcgcacccctactatccttattacctcctcttggaataaaagatct

SEQ ID NO: 121874 - DNA, 691 bp, Homo sapiens
ggatattattgtcttacagtttagatctgcttatcaggaaacatctgagaatccctagagggtcagggaagaggaggatgagtttacattaaaaccagactttgttagtgcctgttagagtcccgtatttttgagcagctatatgggctgtggaacataacactcatccatgtttttcaaacccatagttttaattacttgttctttttgctaccagtgtctagatgttgttcaataattataacatctggactgctgtagacacaaagaaatccgttttcttgtatttttcttttagttttgctgccttgaccttctagtcagctgtgatagttctgtgggatagtgagccagtattaaagtgaaaagaatgaaaattgttgaagtatgcagctgtgtttggatttatttagtgatttgaagggtgtaagaagaaagtatctcaatgtcaatattttcatttaaagtcaaatggttaataagtcaagactaaaaatctaaactagaaaaagaaagacattcaataaatttattataaccctacttaatacttttattattattttactagctggttattttaagtaaggattttgctttgattaaagatgttgaaaacagttatgaaaatcttttgggttgaattttatttttttaatttagttggagtctcgctttgtcactcaggctg

SEQ ID NO: 121875 - DNA, 551 bp, Homo sapiens
tagagatgtgacatttcagactgacttttgtgcagttagatgtaagcattttacctctcaacccacaccagttcctttggccccaggccacacatttcaccttaatagctcaacaccatacatgcatttattttctgactatacagtagccgcaaccaaggcttgaaaacttgttaaaaggccagggccctattcatgagacgcctgacggtgccttttacccttagaaaagcaggttgacttttcccccactctagttaaagagaatgttgcacacaaaagaaaaagggtggaaaatctcaaacacttggcaacaggcaaacaaatttgatcatctcctttcctcctcctcttggtaaaatacagtatttatattttccagcctcagagaagatagcagaacatgatctttcacaagagaattatagacctgcttattataaaacagatgtgctcccatggcaaagtgccttctccctccgcccccagctccctgtcactgtagcttacttttgccttcgctgtaattaatgtatccgtgattccaactg

SEQ ID NO: 121876 - DNA, 369 bp, Homo sapiens
atctcatcttgaattatagctcccataattcccatatgtcatgggagggacctggtgggagataactgaatcacaaggcagtgtcctccatactgttttcatggtagtgaataaatctcaagagatctgacagttttataaggggtttttcctttcacttggctctcattctctcgtacctgccaccatgtaagacatgcctttcaccttctgccatgattgtgaggcctccccagccaaatggaactgtgagtccattaaacctctttttctttataaattacccagtcttgggtatgtctttatcagcagtgtaaaaacagactaataagatctccgaagttcttttctccaaaacttaaaatagca

SEQ ID NO: 121877 - DNA, 939 bp, Homo sapiens
agccggcggccgggggccccctctctcccagctctcagtgtctcatctccctatctgctcatcctctggtcgcacataatcgatgtttgggcgtcccaagccagatgtggaccccatttccgcactctacactggaggttttctaagggtggtgcccggaccagcagcttcagcctcatctgggaacttgagaaaatgcagattctccgtcccacccagcctattcggtttttcctgcactaaaaccatgaaggtggggcccagcagtccacattctcgcaagcccgtcaagtgattctgaggcgccctccagtttgagagctatgctcacggcctcacctccgccccgcaaggagcccggtcttgcctgtggcgctagccgcacacggacacctcatcctgcggggcccgcccccccgctgcaccctcaccgcccaacgcctcctccgggatgcagcggaggcgcctggaagtcggcaaggtcaacatccccctcagcatcttccctaccctcacggctcctcctccaggggtgcctcatggccaggggttagaaagagccactgtgtttcttgacatggaagtggcctaagaccttaatgaaaactgcaggagtggaatgacagaacctttggtcatacttgagggcgtgaagctcaaatgaggaggaaggaaaggatccagggagaataaccaaccctggcaagttgtggcgcccaggtagaggggcgagcctaggctagcggttctcgaccagggccggtgttgcccctcctcgccgccccgcgtacatttggggaggtctggagacatttttggttgtcatgatgcgggagttgctactgttgcctaagtgggtagacacgagggtgctcctcaacatcctacctgaaggacaggactgccccacaaggaagaatgatccggccccaaataaga

SEQ ID NO: 121878 - DNA, 291 bp, Homo sapiens
tcttaagctttgtttcaggaagcagttacttggaaacagtttgatcctttcaggtctcgctgttaagacttattaggtaagatcagagtagtgtttagtctagagttcattccccactattgagacaaggcccttctgaactctacccagcatcctgtgaattatgaggttttccatagatcagagtagtgtttagtctagagctcattattccttactattatgaggttttccatagatcagagtagtgtttagtctagggctcattatttcccactattgagacaaggc

SEQ ID NO: 121879 - DNA, 577 bp, Homo sapiens
gctagaaacctcactgagggcaagcatcacaggagccccatctttgatagcctgaggacatgttgccatatcttgaatgcagtatgtgctccataaatatttggcacattgaaccaaactgcattaatctcatatgaaatcgaaaaccaggtgaattctgtgcctcccccaccctgtaacctcttgttcccaaccctgactcccacctatcaaaacctactcccagatctttcaaacacataaaagactgtgtgattgatagaaacttaaaatgttactcatcacagtaggtaataaacttgaatctaaatggatgtggctctaatttctggtatagcccgaaagtcttggaatgatctgggaatgtcagggccttttcagcagaccagaaatcacatttagaacccactggcccttgagcctataccaaaatcgcaggcatccacagtcacccacctcacttctcatctatgagttgaaaagtatgagtcataaactgttggaagtatttttaactcacgaattatgtggatagtaaaatgtaatgcttcaaccctaactggatacgaagcccaat

SEQ ID NO: 121880 - DNA, 778 bp, Homo sapiens
gaaggattcgatttcttctttgggatcagaataatagactttgagtaagaagaaatttagaaatcatctgatactccaagtccctcatttttaagtgaagagattaagaatcagagagatgaaatgactcgccccaaaaatccagaaattatttacaaagctggatctcacagtcatatctcccgaacacttacttacttcgatgatcagtgattcttatgattcaaggttaacgaagaagcctttagtgggggtgattgggagttcaagcgctgaaaagttagggttgacttttttgattctgttattacaaattttacctcatctagtagtcacaatgtggttgtttgttgttgtttttgaaaagacatatagggtgccatactttgaggcttaatgtttaaattcctatgacaagtgagatgaaagtgaacttgcatacactctggcttttggaatatttgaatatctagtctcagcagactaacagataaggggggtaacagaaaagtattaagaggttcttcagaaacacttatttgtaacaaaataggttgtttgaagcagaagttgaaattttgtatttgaatattttctcctgcaaaggcttctaattttgaaaatacaaggactgctaaacaccttcagtgttaaagttcaaattggtattggtgagaagtctcgggaacatttatgtcaattaaaataccttaaaatatagcgcttgacaagattatgagggacgttaacatggaaaacttagatttgatcttgagaa

SEQ ID NO: 121881 - DNA, 567 bp, Homo sapiens
ggaagagagttttcaaaagtgtccattggtccaggtgcagtggtttgtgcctgtaatcccagcactttgggaggccaaggcagaagaatcgcatgagcccagaagttcaaggccaggcctgggcaacatagtgagactctgtctttagttaaaaaacaacgacaggccaggtgctgtgactcacgcctgtaatcgcagcacttgggaggctgaggcgggcggatcacgaggtcaggaggttgagaccatcctggctaacacggtgaaaccccgtctctactaaaaattcaaaaacaaaattagccaggcgtggtggtgagtgcctgtaatcccagctactcgggaggaggaaagaattggtcgaggcacaggatggttgcacagcgtggatatagcagtgagaagatagtagaattgagtacaggttctacatcagattcaagcttacactttagaagcagctaaccgggcaagaaatgccagatctggactgagggtggaagggaagagcctaaggggaggaaactgtggatgtaaattagaacgagaaaggccgggggaaagaga

SEQ ID NO: 121882 - DNA, 157 bp, Homo sapiens
tttaactccattccacaaattttctttttatttatttatgtatttacttatttatttttgaggtaaagtctcactctgccacctgggctggagtgtagtggtgtgatcatggctcactgcaacccaggtggcatcgataaacaccgggtaccgagct

SEQ ID NO: 121883 - DNA, 730 bp, Homo sapiens
aattcagatgccctcttagggtttgaaatgtgggggaaaaaaaaagagaatcactgcttatcttagtctgttcgggtagctgtaacaaaataccatacctgagtgacttacaagtaatagaaatgttatttctcacatttctggagtctgggaagcccaagatcaaggtgctagcagatttggtgtctggtatctactgacctggttatcgcttcttcctttaaggagtattagaacactgctggggatgggctgacaaacataccagggattttactttgtgtcagccaagaggctttccttacctccttgtcttcagtactcttgtgcacaagcatgcttctcagagaaggtggattctaccttggaaggaaatgagtcgtttcctcccatcaggacaactgccacagcatggtgtcaactcactcttgcctttcgtaaattgagtttgtcagtgctcagcgacacagctgagtgaaatgttgtgtgatgcgggctgtctcctgggagagagaaactggcataaaccacatcctaatgggatccagaaacaaagaagcgtgaatgaagtgttaattgcattcataaagacattaacaaaggaattaaaatggcagaagcttcagtcccccactcaagattcacagaaaaatatgttatccaaagaatgtttcaacaataatcatcaaagtttattgcttgcccattggggaaataactcttgatacat

SEQ ID NO: 121884 - DNA, 797 bp, Homo sapiens
cataaaatgtatgtaacataattatgctcatttttcttgagtaatttttaaaaaattagtttcataactaattgtttccttaatagccaactagactttatttaaaagttaatagaataaacagcattaattgaaattaagaaacaacatttatgagagaaggtaacagttctgcttctactcagtaagaatttattcacatccattcaccagccatatcctttttttccatttacatggtaatttacttttcatttaagtgcttaatgagaaagtaaggactgcaaggagctttctgagatgcatatatttttgcttgactttggttctgacttgtacttgaagtattcagctttgagtttcaccagtccccaggtggttgtagagccccagcaatgtaccagggactgtgagaggggctaagtgagatggttaggatcaactttctcttacccagtctgctttcaaaaagatgcttaaaataagtacatagaggaccacaatgcaggtgaaagtacataaaaggcctgaaaatgattcaagaaaaggactccctggttttggaggaaagaggtaaagcatttctttaaaaatcagttttttgtaataacttctgctatagttatttatacttcaaactttttttaattaaaaaaaataagataaatgatttggtaacgtgtagagagcagacattacgaacacactgtgctccattgtccttcatctttagtgttttagtatcttccatactagtggttctgctctttttatctaatctctactttttttttttt

SEQ ID NO: 121885 - DNA, 483 bp, Homo sapiens
aatgacttccccagtgacggccctggtgcgaccctctccacagggtctctcctttgtagttctggaaggtcggctgctccccgcgacagcgtgcaccatgcccagagtcctactctctgtgctgaatgaaccatagttcacacgacagactctcttcagggtgctcttccagaagttttctggaagagcagcagtcctgtccatatggaaatactagaaattttaagaatgcaacagtaaagagattctcttccctgaaggcctttctttccttaggttaacctcatgctgaggaaaagcatccacagctgcagccctttggctcttggcctttgctttcacaagcatgaaaatgtgtgctttcaatattttgctaaattccccaaatcctttaaacaaggagcaacagtgagggcagagtagtaaactacatcagacttgggtatcctccatgccagctccttctcattaaatgctctaggg

SEQ ID NO: 121886 - DNA, 253 bp, Homo sapiens
atccttcaaaggtatgttagcaaaaaaggaggggggcagggaacaaagctaaacacagatgagaatagctagtgatgcccttgattttgttgtgcgtgctctggatatctttctcctttgttcctcaaggggtgtctggcaccagctttgatctgctgccttcacagtggtatctggtcagtagaacaagtttcaaccatgtgttttgcttgactcctacttaatatggtattggcagcggtggttttgatac

SEQ ID NO: 121887 - DNA, 405 bp, Homo sapiens
aaaacaatgatcagccagtggcaactgctacatagcaatatattagtgagcagctccactggtttaaggatttctatgaggaggtgacgtttagtctgaaacctaaatgacatgaatgagcctcccagagaagagcaaagggagcacgttccaggtagaggaagtagctggtgcaaaggccctgaggcaggacaggttcggggtgtggaacagaaggatggccagtgtgcctaggagctagtggggagggagggctcaggtaggcaggagccagattggtaggaggttgtatgttggatttcagattcagaattttgatttattgttgttgctgctgtttttatagttattttttatagttattttggatgtagtgagaattcttttaggctcccaatggcaggg

SEQ ID NO: 121888 - DNA, 749 bp, Homo sapiens
tggtgagagacatgatgttctactggttgctgtcgattgttggaagacaaagagccagcccaggatggcagaactggtcctctgcaagaaacagcgcatcagctgccgaggcgcgttccatggccctgcccacccaggcacaggtggtcgtctgtggaggtggaatcacgggcacttctgtggcccatcaccaatccaaaatggggtggaaggatattgtccttttggagcagggcaggctggctgctggctctaccaggttctgtgctggcatcctgagcactgccaggcacttgaccattgagcagaagatggcagactactcaaacaaactctaccatcagttagagcaagaaacagggatccgaacaggttacacaaggacaggctcaatctttctggcccaaactcaggaccgactgatctccctgaagcgcatcaacgcagggctgaatgttataggtatcccttctgagatcatctcccccaagaaagtggccgagcttcaccatctcctcaacgtgcacgacctggtgggggccatgcatgttcctgaggatgcagtggtgtcttccgctgacgtggctcttgccctggcaagtgctgcctcccaaaatggtgttcagatctatgaccggacatctgttcttcaagtaatgggcaaaaaaggtcaagttactggagtggagaccgataaaggacagattgagtgccagtattttgtcaactgtgctggccagctattgtca

SEQ ID NO: 121889 - DNA, 350 bp, Homo sapiens
caaaaatataaactccaatgttctaggtttctgtgaagtgccttaggtgactgcatggagggataggttactaggtcagcattctgtttccattgcagtgctgctgatttactaatattacttttatatattgtgcttgtagatgagattatgttttaaaaagggctttagctgctaagtaaatgatgttcgaatcaactgcttttttgaaaggtcgccagtcatctcctttaattaaaaaatcaagataattttcacccttttttactggatcatttagcattagtctatattctgttcactctttcttgaaatactttcttttatggcatctgtgacaccacatgctc

SEQ ID NO: 121890 - DNA, 586 bp, Homo sapiens
ggaacatggccacacatttatttatatatcttcttgtggctgttttctgctacagctgcagcgtcttatactaaacagactgtatggcccataaagcctcaaatatttactttatgggactcgatggaaactttactgacccctgatctcagtgtttcttttaagcattgcaaagatagtttgcaaaaatgctatgagagctctatgatggcattagatacctaaatgtagcagctgaaaaaaatttcctaaagtggtattaggcctaaaaaaaagtgattctagggctacttaaacaagaagtttttacagcaagagttacatcctctactcattttaatgtctaggtaagccagagctttaaatcctgtattaatttacctgtgaaaatatttcatattctcccttttgtgccgtgtgtgcgttggattccccagtgggtgtatagatgaatttataatttatgtggctggatggaagcctgggtaaatacaagcataaacaacatcaggcaatgccagtcgatagactgcgattccaggatgtgttctgtccaggcctgccgttcattccaaaggcctgcatt

SEQ ID NO: 121891 - DNA, 564 bp, Homo sapiens
ctttcttgtgatgacggaaaatgatgataaaatggcgaaatgaggttaatgacatgggcactgtgtaggcattcataagcggttaaagcttgtgagctgtttatttctagagttttttctttaatatttttggaccatggttgaccataggtaactgaaaccgtagacagtaaattgtggttaaggggagactactgtatagtgttggttaaaactcaccattctattttcttgactatcttcccgccatttctctgatgtatccttatccttattctccacttgaaattttacttttaaagatcaactcttaaacttctttcaggtttttcctttagaattaatagctgtcccttccgttttcccatggtatttggtactttgttatttgtagcagttaccatgctttattagaacattcttctgtgagggacaagttcctgaaaatctgcatggtaaatacgggaagtacggttgagtaacatatgtaataatcttatgtaaaagtagtcatgggaactgaagttctgagtgaaagccctcataactgtgcatttaattaaa

SEQ ID NO: 121892 - DNA, 374 bp, Homo sapiens
ctactaattcgcggccgcgtcgacctcaccattctattttcttgactatcttcccgccatttctctgatgtatccttatccttattctccacttgaaattttacttttaaagatcaactcttaaacttctttcaggtttttcctttagaattaatagctgtcccttccgttttcccatggtatttggtactttgttatttgtagcagttaccatgctttattagaacattcttctgtgagggacaagttcctgaaaatctgcatggtaaatacgggaagtacggttgagtaacatatgtaataatcttatgtaaaagtagtcatgggaactgaagttctgagtgaaagccctcataactgtgcatttaattaaa

SEQ ID NO: 121893 - DNA, 770 bp, Homo sapiens
ctgttatggtcagttctcatttgtcatgttaggattactgcaactcttacccagccgggtgtggtggctcatgcctgtaattccagcactttgggaggctgtgggcggatcacgagtctcctcacattgtgatccgcctgcctcggcctcccaaagtgctgggattacaggcgtgagccagcacgcctggccttccaaattccttttaacagcctagcaaaagaataataaggaaggtaaatctgcccctacaagaaaataatgcttcgacgatccggctttccttcctgctacccccagccataagaataaatgaccttgctcatcactgaaattttacctgacctttgaatttttaactgcgtcagccaaagaacttatattttgagtattcctaaggtgattgctattgtagttttgaaacacttggttggtatgtttgagggtttcatggtccaaagttactatagcagttaaaagagtggactatcaggtcagacctattgggctttaatcccagttctgccttctcttagaccttgggcctgttgttttcacttctctggttttcagtttctctgtccacaattgtggaaacgaggtccacttgtagagtaattgagaggatgaagcaagatgatgcatatcaagtactttgcatagtgccgggcagacaggtaacattcaagtgctaataattactattattactatttattttttgagacaggttctcactctgtcacctaggctggagtgcagcggtgaga

SEQ ID NO: 121894 - DNA, 238 bp, Homo sapiens
aatttggtcgggaagggaggggaagattattaaggttaacttctagaattctgctttatgcagctgtggatggtggtgccattcactaacaacgaaatactgagtaactaggattgggaggaaggtcatgaatctagttttggatctgtaggatttaagctgcctttgtcctcacatggtgatgtcggtaggcaattagatacagggatgtagaactcagaggagaggtctgggctag

SEQ ID NO: 121895 - DNA, 343 bp, Homo sapiens
ttaaaggaatgaggatcatcatttagcactgaaaaggggcagtaaaagaagtgagcagagccttaataatgatttttgagcccaaagttggttgagagagccactctaccaaaaagctgttctaccaaaaaactaccttctggtaactactagaaccttcaaatccctgtcttgctggtgtatagctgaaattcttgcataaaaaagggagcgaggccaggtgtcgtggctcatgcctataatcccagcagtttgggaggccgaggcaggcagaccacctgaggttaggagttggagaccagcctaacatggtgaaaacccgtctcaaaatgcaaaaattagc

SEQ ID NO: 121896 - DNA, 183 bp, Homo sapiens
gggaatatgagagaatataatatgatatagattttatcaccaagaaggtctgagtctcataagttcactataaagtagaaggtaataaattcaatgagaagtatacagataaagtgccacacagtataaaggaaggagattactttgagctgggaggataaggatttggcactggcactagga

SEQ ID NO: 121897 - DNA, 345 bp, Homo sapiens
ctgtgatgcatcaatgaataaaactggccggtatctctagccttggggagcttataatctagcctattaatagctcatgttctaattatgaaagaaaataaaaaacatgcacaacaattaggtagtaattgcagttactaaacttcaaaagaataagcaagtatatggattaaaagctcaggtaatttaaataataaagaaataaatgactaattaaagtggggttcaattaattcagaagatgtcttaaaggaggtatatcttttatttttttttggagagtttattaaataatttttttttattatactttaagttctgggatacatgtgcagaacgtgcagg

SEQ ID NO: 121898 - DNA, 301 bp, Homo sapiens
agtaaggtagtggtctgtgttccagattgcggggcgggggggcggttctcttttaggtggttggagttctagtacctttctcagggttccagcatggacagtcagagaagctccaacatgttctctgagctagggtaaaattgagactattggtgatattaacaaaaagaaaagcactaagtaattacaatccagccttaggtttatgaagtagctgctctccagggatgaatgagataggatggatgcaaataaattaagcatagatcactatcaattggaataacaaaatgattagctt

SEQ ID NO: 121899 - DNA, 196 bp, Homo sapiens
gtggtgtccccccttatctcaaactacttccaaaccttctgcaatgtggacatgtgggaacacagggagacatggaaggtgcactctgcccgccttctgccttcacacagaggacacactgggcacacacaccctgaccagtgggcagttgcacagaaccggaccctggcttggaacagtagctccatctcttatt

SEQ ID NO: 121900 - DNA, 591 bp, Homo sapiens
ggattccattctaggtacccacgatggaataagcttagagctgaccatgaagacaagtcatttcattcgccatgagacagctcagtagctataccacaaccctcacagggaaaggtagagatgagcgacaaaccaacagcaacaataacaacaaccatttcttgatgtttttgtgttccttttaacctgtcctatctgttacggaagcatgtttttctagggccaataaagctgggttgggatgaaattcagtacacaattcagacgtgagcatcttctaattcctcatccatccttcacccattctcaggtctagatttctaacatgggcaggtcaatgccttgggaacacagtcaaacaggtaaactggcattgggaccagcaaagtgctaaacttaccactaagtcattgagagaccacctacatcaggcacagtcaattactgtggaactggtgaggtggcactcagaaaagataagatgagaaatcgaaggagaagagcctttttttccatattgcttcctaagcacagtggcccaagccagctaatacaatgaatggcaggtatacagccagtggagccttcagg

SEQ ID NO: 121901 - DNA, 253 bp, Homo sapiens
ttctactttgggaaagtgaaaggtgtcatcatccatggaagagacaagaatattctacttttgcagcctaagctgaagactgataatacagatttagaagccaaatcagtaaacactgtagcagaagcttagaaacttctagaagggaaataccaatctggaatagtcttctttgtactgcacataaaacaaattcaatctggtgtgttgtacatgttttttaataataatggtaattaatttgaattattgg

SEQ ID NO: 121902 - DNA, 553 bp, Homo sapiens
ttgcagatgagcaaactgagccccataacgtgggatgacttgcttggggtcagccagtggtgaggctagcctgggaacgtgggtaggtgtggtctccagctgtgctctgtctgggtatgggagtgggcttgcagttaatgggtaggaagcatccagaagacaccagcattatcttcatgattaagcaaataagtttgccactcttctgcctcagttgccctcttgctttaggagtttgaaatcattgaatcactggctccctaaatcactgaatcactggctccctaaagggccctgggaagtggagtgcagtgctctagcattctggggatgttcccagacttccttgggctgttggactctagcttcattataaactgtggccttctggccctctgagtcacttagagagtgggcaactcaagaggaatagcccgtggtgtgtaggaaagagactttctagatcaggggttgaaaactcctaggcctctgagggccagctgcttaaaaatcagactggtgagagattctagcaagccatgaggcctgtgtg

SEQ ID NO: 121903 - DNA, 434 bp, Homo sapiens
tgaaacaatgcccaagaaacagcatgagattgacaaaggaaaaggcaaaataaataaataggtaagtaggcaggaaatcaagggaaaaagatcagaaatgctattatagagcaaaggttgtcaggaataataataacagtagtagtagtaagacaccctagagaatctttttctgttcaataaattatgggatggagtggccagaattaaatggagaccagagaggataccgtgataatgacagggcctcatctataaaatctttggagagttttctattgctgactgagtcttgggtaggtaaaatgccagcagcaaacatcacatactaataacacttctaaggacttttcaaggcaaaccaacaaagttacagagcaatgcacagaatccattttttttttgtaaaaaccacaacaaaaatgctgtatgtt

SEQ ID NO: 121904 - DNA, 708 bp, Homo sapiens
cgtagtggcgcgcgtctgtaatcccagctactcaggaaactgaggcaggagaatcgcttgaacccgggaggaagaggttgcagtgagctgagatagtgcccctgtactccagcctgggcgacggagcaagtctccgtctctaaataaataaataaataaagtgtggccgggagagcacaagcatttccaagccgctgcctgaccttctccgtctctgttgaagacaggggccatcttgaaagaaaaaatctctgaggagttgtgtggtcactgggggagcgggggtgttgtgaaggaagctctaagactccaatgggcctgacaaaagtataacggggtcttcttcttagaaagtgtccccttcctccgggtgcagtggctcacataggaagtcaactagtggaaaaaagcgtaagtgtttaggaacctggaatctttcctggagggaaaagggtaggatttgtaggaagggaacgggggtagagggaggagataaagcatgaaagatacaccagtaagagtgtgtcctctggtggatgctgaggttaagaagaaaaaagagtgggaggactttgcctagaaaggagtttgggctttatctaggagatacggatcccatgaaggatctttactagaggagtattattgtctaaagtcttggttttcaaaggctaacactgagaggagaagactggaagaggctattaa

SEQ ID NO: 121905 - DNA, 492 bp, Homo sapiens
aattttttttgtagagatggggttttgccatgttgcccaagctgggtctcgaaatcctgggctcaagtgatccgcctgcctctggcttcccaaagcactaggaatacaggtgtgagccaacacatccggccatggatgcataggggtttaccagaagggaagggtcacataggaagtcaactagtggaaaaaagcgtaagtgtttaggaacctggaatctttcctggagggaaaagggtaggatttgtaggaagggaacgggggtagagggaggagataaagcatgaaagatacaccagtaagagtgtgtcctctggtggatgctgaggttaagaagaaaaaagagtgggaggactttgcctagaaaggagtttgggctttatctaggagatacggatcccatgaaggatctttactagaggagtattattgtctaaagtcttggttttcaaaggctaacactgagaggagaagactggaagaggctattaa

SEQ ID NO: 121906 - DNA, 329 bp, Homo sapiens
agggacccttcagaaatgcaaatcagattactgaactcctcaccttaaaagccttcaattactccccactgcactgaataaatctgaactgctacccaggtgaaagacattggcagtcatgacctacctactctctgacctcatccagcaacacccaacgccccatggaaaaactgtcttccacaaaactggtccctggtgccaaaaaggttggggactgctgatataaagcaccaattttataagcagactatttttaggccatagaatacacacatgaagtttactaatgctaacttgtaataattaccaagaacaatgacactacc

SEQ ID NO: 121907 - DNA, 391 bp, Homo sapiens
gactaaagtccacttcagcatcttacagatgtcccaaccaaacccagcatgtgtaaaaccagatttctcttctctccacaaacctgtttctgttaggttcttttgttactccagctaaaaagctggtgtcattctaagctgtttatcctcaatgaggtgtccccttctctaaccccatgatgcctctacccatgcacattgaattgtctgtaagttactggaaggcaagactggaagggtttttccttcccttttaaactacaaaccaggtttcccccatcttctgtaaaagcaccccccaatattgtgaatttcaagcatgcaggaaaagtgagagttttgcagtcgacacccatatacccactatctatattccaccgttaacatttca

SEQ ID NO: 121908 - DNA, 529 bp, Homo sapiens
aagccctttctttaaaatttctctcagtctcctattttaactttgggttccattgtcatactcaattgcagaatctcctcatttctgtattaactttctcgttctttcctttaggtttatctgcacctgcgtgtgaccacaccatttggcctgctcaggtgatccagtgaccattcattatgtggttaagccagttcaaacaccagttatgatatttataaggccctctgcagtatgtcttcattcattcatttactcattcattaagtcaacacttattccctaacacttgttataggccaagcactattccaggcactggggatatcatttttattgaaacactaattttattaatatagaaaggacctggttatgtcttcttggattattcccttgcctaattcagctggttttctcctttacaaaatgggaaaacatcttgcctgccttatttaggtcactggatttctggaaaacttaaacacgaggtagggcagtgaaaaatgtttataatctctaaaagaaa

SEQ ID NO: 121909 - DNA, 313 bp, Homo sapiens
atggggtcaaggatggctggggaagattactaagtctcctatggatagaaaggtgagccaagccttgaatgtggacagtctaattatggagcctgacacataaagaaatgcatcactttaataactgaggagggctattgggcaagtgattacggaatggtagaaacaatcctggattttgagtcaaagccatggatacaaaccctcaagtgttggcccgaacacaataaagctttgagatcttgagtcagtcactcagtatctatggaaatggacataaacaaactttattgcacacgactattgtgaggat

SEQ ID NO: 121910 - DNA, 204 bp, Homo sapiens
ggtgaaaccaagcatatataccttaaccaagtaatcaaacctatcaacaccaataacgactcaaactgaccttatgagcctcctgatgtgattcaatgggaaggacacaccactgcccacatagtattcttaccaaaaacatttcatacgactctaattggttgtgggacactgcagaaataactggcctggaccctttaaaaa

SEQ ID NO: 121911 - DNA, 174 bp, Homo sapiens
atatttcctggcaatcaagagaacccatttgaatttcaagagtgtaaacccacattcaattcagtgagcatggtttcatgactttatttcagcaataatgagcactgtgaaggtagaaacaggacatatgtctttggcagtactggcacagtgggatgttatggtatttaatta

SEQ ID NO: 121912 - DNA, 698 bp, Homo sapiens
tgagtctgcctagttcacttcctgcaggtctgttgcttgctgcccagtttttgtattcattgatctgcggggcagtgacatggttctcagaatgggggctctatttttgcacctgtgactctgggcagatggcaacttccttgatttcctgtgagagtgtttgtgtcatttatctaggtcaatttcaaggacataaagtcttttaattttttttgagacagagtctcactgtgttgtccaggctagagtgcagtggtacaatcacagctcactgaagcctccatctcccaggctcaagtgaacctcccacctcagcctcctaagtagctgggactacaggcacatgccaccacgcttgactaatatttgattttttgtagagacagggcctcactatgttgcctaggctggtcttgaactcctggacacaagtgatcctccaccttggcctcctgatgtgttgggattacaaagtcttttctagtcccatagtcagggagtcgagcctagccagccccctttcctcaatgggccttgagtcctcctcagtccccactgcaccctctggctgtggttccttagtacgattcaccccgacgcttttttcctttcttactctggtgataattttgtgatctttttttccagtgtgtctctatgcatggagtaagaaagaaaccatcctacaatagcaccaa

SEQ ID NO: 121913 - DNA, 634 bp, Homo sapiens
cgtgcccagcttacagaagagcaaactgaggatcagaagggatgaagggattgtccacaatctcacagcagggctgggattcaagggcaggcctgcccattgatggcctgagaccttttttaaaggcaacatgtctaggccagcccctaaaggggttctgtgcttgtcccttcctgttacccctaccaaggatcaaggggtcatcctccaaggctttaactgaccttggagcaggaacctttccctttcttattctccccacatgcccttcctcccagtatcttctcagcctagcacaaactcagccatccagttagagtaaatgtcactcccccgctcaaaaaccttcagtggctccccactgcccaccagatacagtcccagcccatgaacttggccttccagcctcactctactgggcctttctgtcttctaaacaagcccacctcagtgcccttcctcgcactgttcccttacctagaagccttccactctgcccatctacccatcctcattcaagccacacctcctccctgaagcaggaacaccctagctctcgcacgctcactcctctggcctcctctaccccagagcgtgcacagccagcatttggctcctcaccctgtctccccag

SEQ ID NO: 121914 - DNA, 325 bp, Homo sapiens
ggccactgggaatgtgaggagcaactgggaacagagcactgcacatccattgtgtgttgtaagacctttttaatatctggggactgctttttattatccctttttcttataaatggcatgtaaagagtgtaaagtaatctgtgctacaaattgccttatgattttagttggctttatgtctgtttcaggtttaattttgtttggaggttttcagactagagaaaacaacatgtcctaacatatttagactctggctctccatgagaactacagccatatgataagataatacaaagttagctggggagagggatgcttccaacgt

SEQ ID NO: 121915 - DNA, 880 bp, Homo sapiens
cttttgatattgaatcctcttccccaatatttcattggaagccaggcagcttccccatgaccgtcttcatcttatgactgtaagttggaatgagtatccatatacccgtcagaatcgcctagtgcagtaaaacccacaatgaaatgctcttccctattgcacgttcattatacagtatgaaaaatcgcatcccccaaggacacagtcccagttggcatttctctctcccgctgtaatctacaatgcctgggatacaggtgtgctcctcatctgtgtctccagtgttgggatgggagaatgaacagccagattcaaaccccatgcccctgttgtctctgagggaagcaccagcagtctgaatgacgccttctctcatgtctccagggctgtactccctttgagatcccctgctttctgaccagcacaacatgtcagcaggaactaaatgatgacctcagcagcagtccaagattattttggttacattactctctgtgattatccaaaagggaaaacaaaaagtcatttaaacatgcagctcgtgctcttccagcacaacaaaggatctcctggaaatctttcattttttaaatgacattataatgttatgctttgttttcatcacttttatcatcatttcttagcagaggcccaagtggctcagctagggtaaaagggaaaaaattataatgattcatttgtatacatttgtcctagtgggaatttgacgtgatggaaacataagaatattaaattagaggcactcactcccttattctctgttctatttgaaccagacacaagatacaaacgttatatggggcccaagaatgcgacagtaattcagtgatgcataagcccccaccagaacacttggtta

SEQ ID NO: 121916 - DNA, 852 bp, Homo sapiens
ataaaagagtgatattatgactttaaaaaaggctcttaggcattgaaattctgatagtaaaaaccaaaagcttcgtagaattatcagagactaatgtgctgaaagaaactctgaaaaaatagagcaaaaggacaaaaataagaaacgaaggaggagtgttaagaaaaatcacaggatcagtccaggaatttcagtattcaaataatagttgtcaaaagaaacaccagagaaaatggaaaagaaatcatcaagatgattcaagataattttcttaactgaagagcataaagtttcctgattgaaaaggctcactttgtgcttagtacaatggatgaaaatagatccaaactaaggcacattgtggtgaaatttgaaatcactggagccaaacagatcgttcatgcttctggggggtgggagggaatgagttggctttgcacttctcagtcgtagcattggaaactgaaaaataaagcagcatcttcagtattctgaaggaaaataattttcaatctctgaattccatatgcattgatactattattcaaatataagaatagaattagatgtatacattttcaaaaacaatctgcctgtcttatacactttctaaggaatctgttggaggatgtgatccatcaaatgaaaaagtcagccaaatgaaagaaatgaattacaagagacaggaaagtcaataaagcagaaagatccttcagaatgacaataaaaagaaggggatagagggctagcagttcagattggagtgggttagaagcctccagaagagtggtcttcaggaaaatgagattggtagaaacctgatgcaattaattgtctttagaaaagttttag

SEQ ID NO: 121917 - DNA, 445 bp, Homo sapiens
gagagaggtctaaaaacagatacaaaacacaagaaaactgaaagaaaacccctaaaggactggcttaattgataacattcatgcattcatgaactttggaaaagtgaaatgcttactgcttatgagtttgatgacagtggttgttttgagattttcagtggccacagattgactagcagccatttaaaatatgtccttatgggaagagaagctaatgccgcaaatcagctaacaagtagtgggtagttggggtccttcttgacctatggatttgtttagcactcagatctctcgatagagcacttggccatgacagggctcaggtttccagctccatttggaggaaaagtgagcatgctaggctcaggaagacaccacacaggctccagccgccccatcccactcagccaggttttcatccctgccttccttcatcgtttatgtc

SEQ ID NO: 121918 - DNA, 144 bp, Homo sapiens
agcacatcatctccccgtttacttaccgtattttgttgttgttgttgttgagacggagtctcattctgtcactccgtcagactggagtgcagtggtgcaatcttggctcactgcaacctctgcctcctgggttcaagcgattct

SEQ ID NO: 121919 - DNA, 691 bp, Homo sapiens
cgagaaagggcactggggtgtgcgtttgagaagctgcaaagatggttcggggactgaggtcgcctgtggtcacaggacccgataggtaggcacagaggcgacttcgtgggcgtgtctaccgcagatatctgtagatcctctgaacgtcgctgttagagccttaggttctctagagggacagagtgaataggataaatgtatatatgaaagggagtttattaagaattgcctcacaggatcacaaggtaaagtctcacattaggccgtctgcaagttgaggagcaaggaggccagtggtggatcagtccaaggcccaaaacctcaaaagtagggaagccggcagtgcagccttcagtctgtggccaaagccccgagagcccttggcaaaccactggtgtaagtccaagagtccaaaagctgaagaacttggagtctgatgttcgagggcaggaagcatccagcatgagagaaagacgaaggccggaagacttcagcaagtcagcttcttccacctacttttacttttatttatttatttatttatttatttatttatttatttatttatttgagacggagtctcgctctgttgcccagactggagtgcagtggcacgatctcagctcactgcaaccttggcctcccaggttcaagcgatcctcctgcctcaccacccccgccccgcccccct

SEQ ID NO: 121920 - DNA, 413 bp, Homo sapiens
aaataaaatccaaattacttggcattcagtaacattccacagtctaattccaaaccaccttttcagcctcatcttccactactaatctgataagactctgctatttaactcaatacggtctacccactccttcctgaacacagcttatgatgctacattcctgcttccatggctctactcacactgactcctttccttattcttttcttatattcaaattatctctcttcttcacggctcagtatacattctccttaactacccagagtagtaggttttgactatgacccacagtattttatatcataatccagtatacacaggtttcacaattccatatttcactttacttcatgcagtgtactttggtattttcttcaatttctttttcaaaatgattcactaaatgatca

SEQ ID NO: 121921 - DNA, 728 bp, Homo sapiens
acgagtttgtggtttggccattctgatagataagagaaaatagtttctttttactaagaaatcttctagacctatacagttctaatttatgaactgtcacagtataggacaaagagtggggtttaagataataatgaaaagtataaacaagtcatggggggtttataaatcttgtaaagagaattttgtgtgtaattgggttggctgggattagaagggaattgcttgtaagtttttctaagaactgggcattaatgtcaggagtgtgctgatacaggaccagaatctgattctctgtgtttgaagcaacaaggttttcctagaatgttgatcaactcttagtaaaaaaaaaattgcaagaggtttggattttaattctcaaatccatttctttaaattttcaaccatcttgtgacctacagcttttccatgttttacagcttctacctaatttcaagttagaagtgctgttttcacttaaaatgataattacattttttgagtagacttttcctcttaaagcctttcagattcatatgcctagggtttggctttttactgcatctcactacgtgtgatttgcaggtcatgcatcattgctttctgcttttcttccttagctccttgaaaataggatacatattttgcttaactagagtggttactttattccttaaccttttcatccatttctgtagcctttttccaggtttgactctgctattgtg

SEQ ID NO: 121922 - DNA, 940 bp, Homo sapiens
acatcaaagagaaccagatacccatccgctccctctagcacggcagtaaccatatgatcttgccaaatttgcttttataatttgaattgacttgtgatttctctcttctcaattgaaaattctagtggttgcccaaatgacgtgttgaattaaatctgcatatcctaactgaaagtaagaaaacttttggctgaggaaaagggagcatttttcttacaatgtcattttctctccttgctcattcatgtctctgctgttcaggtattctgtttctctttagaatgtgggatttccttgttttctctcctacccagtggccaaaaacctactcatttcctgaaactcattgcaaattctttttagtaacgcctaccctgaacacattttctttcttccctatctcccccgcctcacatgcctaaagtgtggctataacagccctgcatacactggaattgttttcatacctctcttcccagttgagctgtgacatccccaaatgcagagctggcttagatttacttttacagctttctttagcactagcagtagattgaataaatgaatggctttccataaaatagttcttgtttgtactggtgaaagactgaataatgagctcaatagaatggtactatgattgaatatgaaatttatgatcttaaggagtctaagtttttagtgcaaatcagaacatagatacctttgaaataaaaggctgtctctttttgcatcagtgatgtatacacataaatagaacatacacacaggcagtgttcagagccccttaacaggtaagcactgtctaaatgcacagtcatgtcttatgaacacagcatataatttggaggaaattaactttaatgtagccatgaggatgattttatgttggtgtattattatggagacgggcataattgtgttagccatgtgaatggca

SEQ ID NO: 121923 - DNA, 498 bp, Homo sapiens
ttctggcggtggctggcaatcctttgtgtggcttgtagttgcatccctttagtctctgtctccattgtaacgtgacgttttccctgcctgtgtgtcttctccccttcttataaggagaccagtcatactggtttagggcctacccaaataacttcatcttaacttgattacatctacaaaggctctaattccaagtaagatcacattccccggtatggggggttaggacttcaacatatctttctaaggaacacaattcgattcaaaacacttatagaattttgtgaaattaaagagaaactaaaacaaattcaaggttaaccttatgcagatttcactcttaattgcttcctgataatcttgattagcgaaaagaatggagtggagtcatatgctgctgacactggaaaagccaggactctgagtgagttttgggagtgtcttgaatgtgaatgtcactattatcgtataggtcccccaaaatgaaaggttttcctc

SEQ ID NO: 121924 - DNA, 123 bp, Homo sapiens
gacactccactgacagttctaaagcagaaaattagggaaggaatagtcaggggcttatcagctatgcagtagcttctagaagtcaacagctggctctgggagggaaaagattgagaaaaacaa

SEQ ID NO: 121925 - DNA, 672 bp, Homo sapiens
gaatgaattcattatgttcatcatttcatcagtctattaaagtatgtcattatgtcaatatcaagtacatgtgtttgggaaattaggattcctaaaaaacaaatcaacatataatgtcagatactgaggaatgttttgaagaaaacacgatgtcagggaaggagagagtttaatggttatgggaatgctattttataaaggctatactggcttttttgctattgcttgaatgtagcaaatatattcctattttagggcctttgcacttattatggcttctggctggagttctttccttcagatatttgcatcagttgttttctcagtttattcaggagtctgaccaccctgtctaaagtagcaccttccaccattcaattctttctccttactctacaccgtctgaccttggggaccaaagagattcaaataaattctttgataaatcctttgctgtctgaactcttcatacttgctatctgaaatttggtaattgaagagattttctaaaatatttattcttatttgatctggatatctaaatcagggaccaaataattttgtatagtaaggcaggggttcccaacccttagcccacagaccagtaccagaccatggtctgttaggaactgactgcacagcaagaggtgaacaatgggttagtgaatgaag

SEQ ID NO: 121926 - DNA, 356 bp, Homo sapiens
ctggttaacagtagcctatctcagaaaagaaagattcctgctgtggaagatgggccagcagtcttttcacttctttatttcccaaagttcgttctttgatggggagtgctagctggtctgtccttgtaggctgccgtcccactggcccccagcaccacccagtacacagctgaggggacaggctctggacgtgggggcactgggctgcgaacccaagtctgattgcaaacctgggctctttctagaaccaggtgctttgtccttgagctgcgtgtgtctttgagtaaaatgagggccctgtccccaaggctggcccactgcccacgaatggacccaggggatttcagcttcatcac

SEQ ID NO: 121927 - DNA, 194 bp, Homo sapiens
gcccagctaatttttatttttatttttttttagagatggggtctcagtatgttgcccaagcatgtcccaaactcctcaagtgatcctcttgtgatcatcttgctttggccttccacagtgctaggattacaggtgtgagccgccatgcccagccaatttcgtcataatttttttgatccttgatagcaaaggaa

SEQ ID NO: 121928 - DNA, 118 bp, Homo sapiens
atcctgcctcagcctccaagtagctggtattacagatgcacgtgcccccattcccagaggttcttaaatttatgacaaaaacccagaagcttggctgaagcagcttgttggggcccac

SEQ ID NO: 121929 - DNA, 766 bp, Homo sapiens
tatgcacactggggatttattttagttatttatttaccatataaagctttgaatatttctttgcaacaggggtaagtagtctagaaattaaaataccctttaacagagagacttacatatccataacttccaaatgtgaaagagatagtatagttacagaatttattatttttttggatgtacttgtattttggggggatgcaaatgatgaatgggctgttttctgcctttgtttctcatccatttagaatctactgttatatattaatttatcacttttccccctataaaaatggttgcctacacaaatgagatttcagtgaggttttatggataatgcttctctagtgtagaatcgtttagttaatttatataagtatatgaataaaaactgattgagaaatatagttaccatctctgcttgacaatggtgagaagagctaagttggtatgtttttaaaatgcagaatgactcttgatttctcagtcttttccactacagagcaaatttagtaggaagaagagattaggataccatctataggtgattttatatcagcgtaaaatatgcaaggcaatttagactagtggttctcaaatttttcaatcttaggaccccttcatacttaaaatgtttttgaagacctctacaagcttttgtttttgtgaaataattaacagtatttaacatattagaagtcaaaattcaaacatttaagtatatatatatatttaaaataaactcattacattaacgcaaatgcca

SEQ ID NO: 121930 - DNA, 162 bp, Homo sapiens
agagcacatactgtgtgattccatttctgtaacatcctagaaaatgcaatctaatctatagtgacggaaagtagatcactggtttcctagagaagaggatggaggggagggatggatcacaaaggaacataaggaaattttaggggtgatggaaatgtttgc

SEQ ID NO: 121931 - DNA, 636 bp, Homo sapiens
agcgagctgcctttcagatgtcgagtaccagaactcagagactaactccagctttgcatccaaagtacaaaatggcattcaaaacgatgtatcacagagaacacagtttccttctacggagaacattgttgtactgtctttatctttgttaatcatacccttcgtacctgccacgaacctgtttttctatgtccgctttgtaattgcagagcgacgtattatatattcctagatatgggcttctgcctactgtattacagctggcgtgctaaagcccttgatgtcaaagtccaaaagcggttcctcaagagcttgattttttatgctacatgctacactaactcgtcttctatggactcaagactgcgatcaggaatggagactgacagaatgaggaacactgctttataccgatcaggcatacaagtaaacccagctaaagcatggggtaaccttggaaatgttctgaagagtcagagcaaaatttctgaagctgaaagcgcctatagaaatgctttgtactaccgcagcaacatggctgacatgctttataatttagggctacttctccaggagaacagcaggtttgcagaagcactacattattataaattggccattgggagcaggcctacc

SEQ ID NO: 121932 - DNA, 799 bp, Homo sapiens
agtgagattaatgtacagacttcagggctctacaacccaaaagaagagtctccagtaataacagtagtttaaatttgctgactgccttctaggtgctaggtacaaccccagttgctatgtatggattgtatctgttcatttttacaagattgctgtatttgtcacagtttcacagatgaggagactgaagaggatagttgaactgacacagaaactgagtgatagggtggggctttgagtcctggaagtgtggttgctaatcctatactcttaccctcagcacacagagcccctcactcagtgtccccagacatttgagaagagatgtgatgaggccggccatggttctcttgtggtcagctcttgttctaatccttagcgcccatttggaaaccagttatggggaaagcacaatgtaggactcttgggactctgcacctgactggctggctttccaagatcactgagatggctcttcctccagcatagaaattgatggctggttatccagacagcaacctcttttgcccatgtgcttggtgctctgtcatggcgggaaaagtaactatgcacagatcatgattatggtattagattgggtacacatgaaattgctagtatgcacctattttgatgtatgaaaatatcattttcatgagattcatcctaatttatgctatgtatggggcctgattgccctaacagctcatcattgattggtagcatgttgtaataatgaaagagagatggatatctagctaccctacccaccccccatcagcataaggaagccgagaag

SEQ ID NO: 121933 - DNA, 339 bp, Homo sapiens
tggacgtcgaggccccgagagcaaagctggatggtgcacggctggagggtgacctgtccctggccgacaaggatgtgactgccaaagacagcaagttcaaaatgcccaagttcaagatgccgtcgttcggggtgtctgccccaggcaagtccattgaggtctcggtggatgtgtctgcgccgaaggtggaggccgaagtgagcctcccctccatgcagggggacctgaagaccactgacatcagcattgagcccccctctgcccaactggaggtccaggctggccaggtggacctgaagctcccagagggccacgttcccgagggagctggcctcaaag

SEQ ID NO: 121934 - DNA, 160 bp, Homo sapiens
attttatccgtccagtcttaatctctaaaatacatcttatactccagttatgttcctcaggagtttgtgacctttcatctttttcactaaagtggaatctaaaactgcaaaggaaatattagttggctgggcacggtggctcatgcctgtaatcccagca

SEQ ID NO: 121935 - DNA, 326 bp, Homo sapiens
gcgcattgggaggctgagactccagtggggacctgctgaccttcagctcaggggcctccacctgctctgctgtaaaacagggggctgagtgaggtggcagctaacagtcccccagcttggacagcctgtgtgtagataatcctggcgccacgctgtactgttagcacagaccgtccccagggaaatatgactcgcccgggtcaccggtagggccacggccgaacccaggtgccagctgactctcctgacagcgtccagcccactttccaccacagcccagctccccggccactcccggaatgctcctgacacgtttaggaatcatg

SEQ ID NO: 121936 - DNA, 590 bp, Homo sapiens
ggtagttcctcaccccatgaaggcgagagaaggcaaaatggcaccggcgcatttgatttaaactaattaaaagcagagggttgtgcaattcaatatattgattttaccagtgggacttaaatcttttataataagtgtacacagctgcagtgctctcccaccactacgctgtaaaggctaatccgcacattccttctgacaataacatgacaggtcccacacatccctgcctgtgccctaaccccggtgacagtgccagagtgcattaaggcgaagccttgcagtggcttgccaagaaaccagtgtgccaacagcccccccgctaagactgaagagtgagcgtgaaagaattaatgtggccagaagcatggtgcaaagggctccccattcaaaatattcaggctgttacacggatgggcagatggggaagggtggagacgggggagacttagggcacgctgattcttgcaatgggccaaatatgaccttaccaaatgagggagagatattaaagtgataggagtgatcaatcaacttagatgggactctccctggaatgaagtcaccagttgtctctgagttcagcggac

SEQ ID NO: 121937 - DNA, 175 bp, Homo sapiens
tcacacactgacagagatggttatggagcttgctcaaggctgctgttgtctttgtatgtgtcagaagccccacaggtccttggagggtgggtttctcagtaccaacagtggatgaactgttggagactactgcaggacatttctttttcttttctttttctttttcttttttttt

SEQ ID NO: 121938 - DNA, 199 bp, Homo sapiens
tgtgtatacatgtgtgtaaaattcgtaaggacagccacacctaggctgttgttaaaaatagcaccttaacagctaacacaatcttaaggtcacttcacatgagaatttttctctttttccaaataaagccaggcatacttattcttattatgcaaaatagtgctctcgattaaaaatatattgtaaaatactgtaaatc

SEQ ID NO: 121939 - DNA, 373 bp, Homo sapiens
tactgggaattagggcgttaatgtatcttcttaggcgacataaattaacccgacacagccaggatccctagttgtattatcagatccgaacttttctcacctttccaagaacatcactgtaactattcttccctctcttccagcatcattagctctcctctccctctacaagtccttcttaatcagggtacaacatgtggggatgtttttgcatattgaaacaaaacgaacacacacacaaaactctcttgacctctgaaaggtattagggttctcaagagaagcagaattgataggacgtagatagatttgagagagagagagagagagagagagagagagagagagagatctatagatggagattaattgc

SEQ ID NO: 121940 - DNA, 815 bp, Homo sapiens
agtcacaaggtgtgggctatcagcattttcccagcccgtaaacgcccttcacctggatggcgaggaaaggcgcattcatcttatgattcattcagtgtggatgtataacatttatcacaataaaaaatcatgtttcagcagtgataactacgtaccctcacttcctttaggagatataaatagagatattctgaagcctgttgagacttccaggatgaacctgtcagactgaccacatgcatttattatcccacttcttctgaagcccattaaaataacagtaagggggctgggtgcggtggctcacgcctgtaatcccagcactttgggagactgaggcaggcagatcacctgaggtcaggagttcgagaccagcctggccaacatggagaaaccacgtctctactaaaaataaaaaataaaaaaaactagccgggctagtagctggtggcgggtgcctgcaatcccagctagttgggaggccgaggcaggagaatcacttgaacccgggaggcagaggttgcagtgagccgagatcacgccacgtacactccagcctgtgcaacaagagcaaaactccatctcaaaaaaaaagaaaaaagaaaagagaaaaagaaatatgatgaaaagactaagttgaggaaatctcccaaaaagtagaacaaaaacataaagatacagaaaacaaaagagggaagagaaaaaagatcaaatagccgaccaagaaagttcccagaaagagaaaggggaggggagctggcagctggtatccaaagctggcatctcttggtgctgatggctttgtgtgctcccct

SEQ ID NO: 121941 - DNA, 426 bp, Homo sapiens
acagcagtctccagtgagctttgtcaggaggaatcaatagaaggaagtttggtgggataggatgagatgagtagtatagtgggcccctgaagctagtccctggaacaatgccagttcatgacatattaaaaatgataaagacaacagagtacatttttcataaagctaaatttattttctattatgagattatgcccttctcaaatttttaatactaaaatatccttccttatatgaaattatagtaatagtagatgatgttctttttattgttctcacttggcaaaatataaagttggtaagcctatgttctcaagtctcaaaatatttttcaaattgtaaatcacaaattctagaaactattgggctgataggtaatggataataagtgttccacaaagaagtaacagagtgacttccagatat

SEQ ID NO: 121942 - DNA, 301 bp, Homo sapiens
gctgggaggggagacgcactgggaggggcagaagtgatctttctgatgacaaatgtttcttttctttttttttgagacacagtcttgcactgttgcccaggctggagtgcagcagcatgatctcagctcactgcaacctccgcctcccaggctcaagtgattctcctgcctcagtctcccgagtagctgggattacaggcatccgccaccatgcccagctaatttttgtatttttagtagacggggtttcaccatgttggccaggctggtctcgaactcctgacctcaggtgatctgcccg

SEQ ID NO: 121943 - DNA, 385 bp, Homo sapiens
tctcctgccccagcctcctgagtagctgggactataggcgcccaccatcacgtctggctaattttttgtatttttagtagaaatagggtttcaccatattggccaggctggtctcgaactcctgacctcaagtgatctgcccaccttggcccccaaaagtgctggaattacagacatgagccactgagcctggccagacttttctttagcctgcattctgttgattgacaaagctcatctgctctggacctccgctttcacctcagtaggaataactcccaagccatttgctgtagtcctgaccttccctcaacttttaggcatttccagacatttctagatgtttgcaggacagcttctctttactgtgcttttgatacttcca

SEQ ID NO: 121944 - DNA, 246 bp, Homo sapiens
ctcctcttcccgccactcttcctccccctcctcctgctcctcttcccgccacatttctccacccgtccgtttcctactgtctcccaccatccctccctttacctcccttacgcacaccccacttctggagacaggagcaggaaaaactggggtcggcttgctcagcctgactggggctgaaacagaagtttgccacaaggttccaatgtttgaactgacctttggaggacagacagtttgccagag

SEQ ID NO: 121945 - DNA, 361 bp, Homo sapiens
ttcccttttggggtctttgctacactaatcaaaacagtatggtactggcataaaaatatacagataggccaatggaacagagcagagagcccacgaataaatctatgtatctatggtcaactgatcttaaacaataacacacaaggatcgactctttattagatggtgttgggaaaactggatattcacatgtaggagaatggaattggacccttacctcaccccatgtgataaagtcaactaaaacagattaaatattcaaacataagatctaaaactgtaaaattactagaagcaaagataggaagaaagcttcttgaccttgttctgagcaatgattttttgaatatgaccccaaaag

SEQ ID NO: 121946 - DNA, 655 bp, Homo sapiens
catttggtgaaataatctaaagatgtccattaggtcaagctaactgatagtgttagtcttctatatcctttatggtttttatactagtttttctattaattactgagagtaaattattgaaatcttcaccagttgttattgagttgtcagttttccttttcttaattctttatgtattgttttcagtattttgaagccctgttgttaggtgaagatacactaatattgttatttcttcttgacatattgaacctttctttcattatgaaatattcctgttattctcacatagcagttcttgccttaaagtatctttggtctaatattaatatatctacttgagttgtcttatggttactgcttgcatagtatatatatttttatttctactttgggtttatttatgctttgaatctaatatatgctctcctataggtagtgataaccgaatcttcttctttacccagtctgtctgacagtctctgacttttcatttgggttttcattataacatttaatgcaattattgatatagttttacttaaatttaccattttgctatttgttttctatatttctcctgtcttttttgatgttgttattttctgcatccttaactggcttcctttgtgttaaataaatattttccaatgta

SEQ ID NO: 121947 - DNA, 688 bp, Homo sapiens
taaattgtgcattcccacccaaaacattctggacactcttattttcatgtccttagactcccgaagagaaatacatgggtctagttgcaactaacacacacctaccaccatcatcaaaaaacacaaaaccaaaaccgatcattataccaaacttcttttgaaactccaactcagaataagtaggaagaagagacagccttttcaggtttgctttaagtctgcttcccagacaatattttgttccctgcctgcctgcctttcttgggtatccgctgcatgccaagcaatgtgttggcattgggaattcaacagtgaatttaaaaaaaagctcacagttcttagagtctcagttcttttcagtgggcacctctaattctaacgtgcaaaatctgacacagatttggattgaatggtgggagaatgagaaggagtaagggacacatagcaatttcaactgcttggtaaacaataactaaatgttaacttggaaaaaagcctgagaagaagctgatttgatgtgagtgaatgtaaatcatgaaaatatccagtttcatccgggtgtggtggctcatgcctgtaaactcagcactttggaatgctgaagtggtacggtcacttgaagccagaagttcaagactagcataggcaacatagcaagacccccatctctacaaaaatttaaaaacta

SEQ ID NO: 121948 - DNA, 255 bp, Homo sapiens
ttgatatttgcgtaagggacaaatttaactctaaatctcctggcagacctgccttccccatataatcagagcccatccacgtgtgacccttgtctaaagcttcaggaagatgctgccccttcccttttgccgctgctctctgatctgactttcatgcttaatctgatctaatcctgccagcattatcttcatctgtgcaatgaaacctggaggattctttctcatatttggtgaggaaaggcatttactaaatta

SEQ ID NO: 121949 - DNA, 191 bp, Homo sapiens
atgtagcaaaggggtcaaaggagggagagcttctttaggtctgagatctccattatctccagttagtcaaaggagccgagctttcctacctcacagaaatacacatctcaaaaaagaagtccgggccaggcactgtggctcacacccgtaatcccagcattctgggagcccgagacaggcagatcacctga

SEQ ID NO: 121950 - DNA, 238 bp, Homo sapiens
ctcggccagtactgggaaaagcacacacacgtggtatcagaagtgttctgtaggtagaaacagggtttaagacttgggcatctttattttcaacaattttcccattttccaccatagttcctaagaaaatggacaaggtacagtacgtcaaggtacaacgtgctgagtaccatgagagaaatgagatctgggacttggagagaatgggatgcccttaagacctggggccttgagttgg

SEQ ID NO: 121951 - DNA, 303 bp, Homo sapiens
ggcacaggctctggaacgcagagctacctgggttcaggttctagccttttcacttagtgggatgatcctggacaagtcgcttaacccctgtttgagcctcagttcttctttcctaacaggaggatagttgtgtctctttcttggcactgcatgagagctgttttaacccaggtggagccttgtcatagtgctggcaatggcactcctacccatttatgctagcttcattaatattctacttgtatgtggcactttttaaacaaaaatggtactttctgcgtatatcttgtaaacgttttgtgt

SEQ ID NO: 121952 - DNA, 230 bp, Homo sapiens
ctattccattatttgtatgtgtcatattttatttaaccatcctgctattagtgaccattgagttggcttcctgtgttttgccgttacatggttgcaacaaacatgtttgcatgtgtctgccctcatgtgcatgatacatgattgatttgatagattttaggaattacatcattcattcatacactcagcaaatatttaatgagtgcctactctctgataggtgctgttgg

SEQ ID NO: 121953 - DNA, 513 bp, Homo sapiens
cctcccaggttcacgccagtctcctgcctcagcctcccgagtagctgggactacaggcgcccgctaccaagcctggctaattttctgtattttcagtagagacggggtttcaccttgttagccaggatggtctcgatctcctgacctcgtgatccgcccgcctcggcctcccaaagtgctgggattacaggcgtgagccaccgcgcccggcctgttgcagtttctagaagcctgcttgcttctagaggaaggtgagataaagggaaactcagacctattagtagcacaaagtgcacacttcagcttggggtttagtaggttgtagaggagcctgtgagcgtgtgagttcagtggtgccaagatgtcctctgcccacagaggaagcaagaaagggggtgcctgtaccccttcagactcccaacctgaggttctcagattttctccatctcctactcttctagtgactcctgtgagggagctgaaaatcatttaagttagtgaatgaaaatacct

SEQ ID NO: 121954 - DNA, 412 bp, Homo sapiens
acactacagagatatgcagaaggtcagcagagtgaagaactccccatcccacatacgttgctgtgggttctctcattgtttctgtccagaggagaaaacaatctgaaatgtctgagaacagtgaacttaataataatacaacagataaggactaaagttgttgaattgcaaataaagttttaacgaaaagtaattaggtaattagtatgatacttaaaatactatttaaattcacgaaagaataacgataggaaaataacaagattttgagtgactatagtagattagaagtcaacaaaaacataaatgtaaaaagcatagtgctgagattagagttcaaataggtgagataaaatgtaaggactcattaatagtaattaccaaaaaaattaggtgagatagtttaaaatct

SEQ ID NO: 121955 - DNA, 826 bp, Homo sapiens
ggccaacctggggctgcaagggcagcaggaaaataaaatcacctctgggtgcctgacacatctcagcactgcctgagcaaaggatccacacatcttcccttgtggtgctggactgagggcccagttctcagagccccctcccaggaaatctgtttctgctaccttggtggggaccactccccagttccaaaatatcttacttggaacttcagagcactctggtcacaatttttcacagcttttctgatttcagaaaggtctcttggttgcctggtgaagaggaaagggagattgtagtatttaaccaagcaacatttaggggcactttccctgtgcaacctgctgtgctggcctctgtgcccagggtccagggcccttgtaagaacccagcatctacataaacatctggaacacaggtggtgcagtcagtccaggtgggggacatacagaagctacagtgagtccaggcatcgacagcaacaatgaaatccagccgacagaatcagagggagggcagactggggctgggctctgaaagaaaattaggactttgagagggcagttccatctctaaggtaatgttcttgcaccttcagatacccctgggctgtgagctggtagggagtaggacggagagttcctatgtggtaaactgggggaggggaggagtctcttcttaaggaagacttgggagctaaggagaagtgggtaggatggccagccacggagtcgaaagggacttgtgatgggtccagggtccgtggttaccacatgaggttgccactggacgcaaagcatcaaagaagttgcttgccaacttttacaa

SEQ ID NO: 121956 - DNA, 353 bp, Homo sapiens
ggcagccacccccgcggcaggatgccggggtaagaaccagcaggaagcgctcccctaacgtctttcccgctcactgtagctgccacccattctttttaatccccagagagcatacagatgagccccagtgggccatctcagccacataggggacaggccggggagaggatctagagctggcccaggaaaggaggcccttttcattttgagggaggcctcccatcagagaagggtccagtcctgccccgaccctgtccttcccatgatacccacaatcccagggtgacctgtctccagggcagaagtgacagacgagggctaggagactggctgaggcctaagtcctctgcaat

SEQ ID NO: 121957 - DNA, 542 bp, Homo sapiens
gctgggactacaggcgcctgccactacgcccggctaattttttgtatttttagtagagacggggtttcaccgttttagccgggatggtctcgatctcctgacctcgtgatccgcccgccttggcctcccaagacaatacattcttaaactttgctactcaaagtatggtttgtggaccagcaacactggcatcattgggggcctttgagacatgcatactctcagccctcaccccagacctgctgaatcagaatctgcaggttagcaaaatcctcaggtggtttgtatgtacattgtggttggagaagcaccatgacagttttggaggccagaagtccaaactcatggtgtcggtagggctgtgctccatccagaagttctaggggagaatgcttccgtgcgtctcccagcttctgatggctcctggtgttccttggcttgtggctgcctcactccaatctctgcctccatcttcacagggccatctcctgtgtgtctgtgtcttataaggacacttgtgaagggatttagggcttacctgg

SEQ ID NO: 121958 - DNA, 271 bp, Homo sapiens
ccagggagacccacacacccacagacaaactagagagggccagaattttctaaaaatgctgaccagcaggggattaactgctctttttgggcagaacttctggccgccacggctggtatccagaggcggcctcaaagttaccacagacagaagttctacagatgcttctccatggtcagttgctttgctgtttttatggccctccacggagtgtgcacacttactatctcagctgccatgtgacttcaatttctcgtcaggtcttagggtg

SEQ ID NO: 121959 - DNA, 153 bp, Homo sapiens
ttttttgagacagggagtttcgccatgttgcccaagctgagtattaaatatatttcaaggaaataagttttttcttacatattcaagggaggtattctagaaaaatgtaagatctaaaaatatgagtcaaaagaatttctctgcaagatatat

SEQ ID NO: 121960 - DNA, 545 bp, Homo sapiens
aattgttggtcctcagatacttaggagtttagctgaggaagctgttttttttatatccttaataagcagttaacggcccacaacagaagatggaaaatctcccatcagtctaatactgtatgggattttcccttattgctctactgtgtagtttttttaagtgtgttaattgagttccctacttctctatagggaatcttaagatataaacacatacataaacagacaaacaaacaaaaactagactgaatctgccagtgtttcctttagtccctagtaggccttattattttatgtttgaattgatttctgtggttatttactccctagttaattattaaatagaacaaacaaatctatattccccatttatgccaacaacagtaaaatatcatcacgtaggtattatttttttctctcaactctttgggaagaaaaggtttgcatgaacatatttatgcctattgcatcttctaaacatcttgacctcttttcttgtaaaataactaattgaaattaatcaaattaattatgtatttttctct

SEQ ID NO: 121961 - DNA, 235 bp, Homo sapiens
gatgctctcctgtcgtgcaggacccggagcttaagccatggactcaagagtgaagttctcaagtaaaaataaagaaaaggaatctgatttgacctattttttcttcacccgtagaaatctgacttccttatactgctttccttgaggaaagtccaggttccccatacttaacagctatttgaaccaaaaagaatgttagttacctgggccaagggcaaaagcactcggccaaaaa

SEQ ID NO: 121962 - DNA, 136 bp, Homo sapiens
gcttcacatcacatgatttaaggagaccttgacttcaatggctgcttttctctggagaagaacctagagatttggtggtccttcctatccattcctcctccctctcgtctaactcccatcccctagtgtgacaatt

SEQ ID NO: 121963 - DNA, 353 bp, Homo sapiens
ctttattcagtatggtggtgtgtgtgtgtgtgtgtgtgtgtgtgtgtgtgtgtgtgtgaatctcaattattaaccaaaaatgtgtgtgtgaatctcaattattactcaaaaatgtgagatagtgtcatacttttactaaatttcaaataaattcttagtaagaacacatgtagcagcttctaatttgtgaaactgcaaactagaattattcaactttcactatataattactacctctgagaatagagaagaagaaaaactaacatattcatgtctctaatgaatattaaatattatgctctgatggtgtaacaagaatcctctcataacagactttgtttacatcactggca

SEQ ID NO: 121964 - DNA, 676 bp, Homo sapiens
cataggagaagagctgctgcttgagagatgggttcctggaataaccaatgatcaagctgccaaacgctattccaatgctagcccctgaaccaaccacaccaactgtgtctgcctcagcaccaataaacttggctgcggtgtcaatgtcccaggagacaacctggtctagaactcctgtctggccacacctaaagtggggagctgctgtaggaaggctgtttagatgaatgctctgggctattcaagaaggaggcagacacaggccggattagacccctagtacaacagcggatcagagctggagaaataagtaatgccccggtgggctgcattttctcagtctcccaactttagcccttggtctctccctgctcttcttaaagggagcccatggaagggtctgatcgttcaggtcttttatgtccaagcactgcccaggccttttcttctctttgctcctattaacacctggcctcctgtctctgctccagagatgactgatttcctgaaggaaaattaattcacgctaagttgtaaaagactgacagtaatgttgtataacctattgacatatacctcccatgggatatttgcctgttaactaaatctctttggggagaaatttcaaacttcatatcaagcctgcaaggataatactccagtaaacttgcatctg

SEQ ID NO: 121965 - DNA, 211 bp, Homo sapiens
atcacttcagccaggggttaagccagcctgggcaatataatagtgagactccatgtctaaaaagagaaagaaccagcaaaggagactgaaaattgagtagtgaaatagaaagaaaaacgagagatgttctgggattggcccagtggctcactgctgtaatcccagcactttggaaggccaaggtgggcagatcgcttgagcctaagaattt

SEQ ID NO: 121966 - DNA, 113 bp, Homo sapiens
caaggctgcctcgggaggtgcactgtgggaggtgtgcgaggtactgcgtaaggtactacaggagcaggaaaaggctggaggggctttctccccctctgtggctgtcccaccct

SEQ ID NO: 121967 - DNA, 508 bp, Homo sapiens
attactagaatctagtggtctggagggaggccttggatatgtcgatattgaatatcaatgcaaatcctcaagatatatatattttttagttggatgaccctgttgatggggattttgaattacttttctttggtttccaatctttgaagtaggaagtgttgtattttaaagagcataaaacaaattcacaaaaggttaagtgatttgctcaatgtcacatagctaataagagacctagacaggatgtgaacccagctagactgactccagaggctaagacattagcaactaaactatgctgactaatggttgtttatttttatgtcaccaaagtccaaacaggacagagtaagatgaggatggacaagccacagtgcaaatgcagaaggacctaaatgttggaaattaatccagatagcaaatgatacctaggtcaaagagtcttggcaatctctggtaaatatttttcccagaaggtttcaaacataattcaagtttatttaaaagt

SEQ ID NO: 121968 - DNA, 942 bp, Homo sapiens
agctgactcacatgatccaactctctgtgtaagttttacaaattcaatatactgtggaagtaccaaatacttttcaagttttgaggcaacaaaatacagattccaggtagggtaagaagtttattaatcaaaggtaaactgtatgaacaatattgctggcaggattcctgtaaacttaaaaatatttatgaatgaaataatgtgatgtctgattttgcttctaaataatcagggagcataggggtgggtagaggtataaaatttgctgtaagaattaataaatgttgaagctggatatgtttacacatggggtcttgacaattcactctaattaatgtgtatatgtatagtatttttataaccaagagtttaaaaagattcctctactggagcagagcctattgcattggttaggaagttataattagcatcttcttatgtggtaaatctgcagagactgagataagaacttggcctctgataatttccctctaattggataaaatgccccttcactgaaagaaagtaaacctgaagagtagctttctctaaactagcaaggattctttaccatatgtaattaaaattcagatacaacaagctctccccactgctgcccatctgcctgccagcgcatcatatatggggctatgcaatgcagcacttgcgggtatttggaggaaaccagaacagtctgctccctctctccaatcccactgctcagagagaacacacacctaagccaaaggaagagggcagcaagtacattccagagaggctcatgttccctcgggtactggaacaaaatgaaagcttttcaagtggaagccggagtgcttccctcccacaggcaacacattatctcatcttaagccctggagttctaagagctacactcagggcacctggaagacaagatgggaaaaacaagcccagagaata

SEQ ID NO: 121969 - DNA, 242 bp, Homo sapiens
ccacagcctcaaggaattcatctgtgtaaagggtctgtcatggatgatcagacccatcccagtctgagcatttctggggtcccaggcaggtgacccttggggagtcagggtgaggagaagctggtctgagcctgcgcagcagcccagaagctgggagtagaaggaagctgccctcccccacatgcccggcctggcctggaatcgttctcggatttgatgagtgattcataacctgacgctgc

SEQ ID NO: 121970 - DNA, 684 bp, Homo sapiens
taggcgtgagccaccacgcccacccacaaatgtatgatcattaatttctatttttttcctttttatcagcttagataatagtatgttctctcatcttttccctgtcatataccttatttccttctgatgtacatgatgaattgaaaggatattaaaactcaggttgaggaagtttgactctaaactcatgatgtgatttagatacctttgaaatgtctgaggaagcagatacaagacttcataaacgtgtttaactagtcagcttaacttcaagaattggcatatattataaattagtttgtgctccataaaatttaatatttcctttagaaatactagatggttataaaatcaaaatggagtttattatagtcactacttgtattgatattttcctaacccaaataaatcggtatgtatgtgtgtatatacatacacacacacacacacacacatatataattaatagcatgaggcttgtgtcctgtttaaggtttcttttgtattcaattatctttattatcactaactttgtagcttaatctctaatgagtaactgaagtaataaacttttatttcctgaaagtaatgttgagttgctttgcaaaccattttatgaaattacagactgatatcttttgtgttgtaataaaatattactacaatgcattattaaaatcccat

SEQ ID NO: 121971 - DNA, 197 bp, Homo sapiens
gcattaaaattatcagacaccaattataagacagctgtatttattatttgaagaaattaaaatgagcttgaaaataatctgcagggattatagaagatttgaaaagatccaaatgaacaatatgattatcaatatgaaaattcagtggacaaattttgtagcagtttgaacacagcaaattagtaaaattagtaaac

SEQ ID NO: 121972 - DNA, 717 bp, Homo sapiens
ggaagaggggaggggctgctccccttcctctttttaggtctttgtgtgaggggaggggaacagatgtactattatgtggattagggtcctagggatgttatctctgtgtcactttgcctattgaatttatgaaggaaggattgatagcttcattttgcctcctatcctgctctctctggtttgctgtcttcctgagacacttccttatttattagaggccatagtaaccatgtccattgttatcctggggccttatccacaaacaactttcatattgtttttaaattaaattccagcctgggcaacaagagtgaaagtccgtctcaaaaaaaaaaaaagaaacggggccatagggccttggaggcaaagggattaacaccctgggctaagaccttaaagttaaggggtaagggcattaacgtttaaaggacccttcccacaagtatacacagtgagagatgataaatcaagccttgattggccataatgatgttgacaagggaattttaaaaattcacggcaataagttagtacatagtttacacaagcgaatttcaaaggaagttttaccacaaaggggcaacccgcgactgtgcaaaggcttggaacatgtggacaggctacacacccctgtgctaacttcccacgacaaatgtgaggcacatgcttcccaccacgccgaacgcacatgcgttagacccccagagacattgggaa

SEQ ID NO: 121973 - DNA, 124 bp, Homo sapiens
tctgttactccacttccttttctactcaaagacctttttataaaagaaaccagggagcacttaaaatttgttctctaagtttagagctggactcaaaccattactggcaaaatcaatctggtcc

SEQ ID NO: 121974 - DNA, 371 bp, Homo sapiens
agaggctttggataagtttcctagcctccctgagcttcagtttcctcatctctaaaatgataattggaaaaacctttctgaaaatgactgagctaatatttgtaaaggctgcatatgacttttgtaagccctaggcactttcgttttgtaggtgccttcctctattaaaaaaaaaaagaataactaaataaaaatgaggctttacaactgtatcagtataaagatggacataagacagattcattattgagaatcacttgaacccaggaggcggaggttgcagtgagccaagattgctccactgcactccagcctggcgacagagcaagactctgtctcaaaaaaaaaaaaaaaaaagatagattcattat

SEQ ID NO: 121975 - DNA, 480 bp, Homo sapiens
gtaagtgccttaaacttagtttttattattagttttattaaggactgagcagatgagaatagattcaatatgaaaacttagggaaccactgaagttccttgaagtgggaaatgagaatggaatgcagtgtttgggaagaatcacttggcagaagtattcaggctgggtcagaaggcaatggtgtagccccaaagggtgaagaagggctgaccagggactagaagcaacccctcctgaaaatgagaaagcctgtccacttgctggtacatggcatgcacaggcactcagtaactctactgaatgaaagtctgcaccaattgaacaatataattgtggagctcccaggctcaatcgcaaatactatcagaattctccctcagtcaagtatagagaggtttaaagcactggagaagttcactgagacttggcctctggttcatttcaatttctcccccgagtagctgggactacaggtgcaca

SEQ ID NO: 121976 - DNA, 105 bp, Homo sapiens
ggggccaaattaaggggtagtaaaaaagtaaaagagataacccttaaaagggagctcttggaagagagttttctttcatggagttagggatgaaggagaacgctt

SEQ ID NO: 121977 - DNA, 659 bp, Homo sapiens
cgcgcggtggctcacgcctgtaatcccagcactttgggaggccgaggcgggtggatcacttgaagtcaggagttcaagaccagtctggccaacatggcaaaaccccgtctctactaaaaatacaaaaattagccgggcatagtggcacacgcctgtaatcccagctacttgggaggctaaggcaggagaatcgcttgaacccgggaggcagaggttgcagtgaacccagatcacaccactgcactccagcctgagtgacagagtgagactctgtctctaaataaataaataaaagagcagatgactcctgtgggcaaaagaggtccacttgggaagtagctgggcacttcctgctggcccaaatttacccctatgcccaagtcctcattcactgtcttttcgtggctgtgtcccccattataggaaaagaaaaggtcatttaatgctctgcgtttgcaacctgcattctccgtggaaccccaggacttctgggaagtacttcaaagggctactgggaatagaagactagtggtcagggctgtagtccacactaccacttcaactggaacaacatttttctacctaaaattttgggcttccacttacaagatttgttgaacggctcagcagattaaaagtaaaggccagatctacttctg

SEQ ID NO: 121978 - DNA, 583 bp, Homo sapiens
gtgcacagttgctaggaacagtgaatgattgtagttcagcatcacactgagtcctgacaaagatttcacatgcgattttcaccgatgttgacaactgagtaaattctttaaatctcgcttttgacgctggcgtacacctctcccattcgcgtgaccatctttgccttactgttttgttttttagttttgcttcacgtcattctccagtgaaaatatatacgcatatacttgtgttttccttcagacttctcttaggttcctggtattgtgttttcaatccagcattcctgccttcctgcgactgaaacgtatccaaatgtgatatactattaaggatttttcagggacctatcttaggggatacttacatactcgcatcaccttgtcctgtttttttctccgaatccgtgtgtgttttggaagtatatttcagaatcacagactaaacactaatatattcaatggatcataagtgtctgccgccttcttgcaaaatggggttcccaagagtgtaacagatttaatagtagttttcctctcaacttattttgctagatgttaatgagaatgagttaaattgctt

SEQ ID NO: 121979 - DNA, 275 bp, Homo sapiens
aggaatgttgcattggcaactcagatgtctccagcagggttgtcagtggtgatgtcatcttttgaaatgatgagcaactgttggcaaagttctgagcaaaacaaagtataatcttccctcaatatacgtgatggttttgtttctggaaaatttattatgtcataagatgattttaagaacaccttgttcttccttgcaaaatggagttgggttctagactcagctaaataattagtttttttttttttttttttttgctttgtttttaaatatac

SEQ ID NO: 121980 - DNA, 418 bp, Homo sapiens
tataatgtttcctgactatcaaattaggtctgttctggttttactaagaagctgtcacttcagaagtgtccccataagccctggcaattatagaaaaatagaggagaatttgagggccctctcagatttgcatagctatgagagaagagcattcaagatggagaactagactgcaggaggtagccaataaacctctgcgtggccatgccctgtccttggcttgtaaggaggcttggctgctgcagaggtttgtaatggctagtaatcaaacatctctagagaatgtctcccaaatgagttcagggagaacaagatcaacccttcactgttgtatttcagtccatggcattggcaggttttcttctgggcacttacctgtaaaatcgcaagaaaatgataaatttccttgcaagaaaaa

SEQ ID NO: 121981 - DNA, 645 bp, Homo sapiens
atgtcactccaagtgagattccctaaatatatgatatacagacagatatatgggtttgaaactctggagatgaatacaaatttaggagtccctggaacacaggtcatgacttaagtaatgggagtcaaagattactcagagaaagcacagaatgagaagagaagaagtaggacaaggaagaagagatcggaggagaccaagaaagggtgataagatcaaaacaggagaaaagaatccgacagaagtctcatttgattatcatgtcccttcccagaggacagggacatgtcttttttgtcttttatacccaattatcacaggtcctggtgcagcagacacacagtttttttttttttaattgtgttgtactattcacagtttcctgtattcaccaggggagaaaaaagtaagtataaagaagcacagacacagatgtttttacactgtgtactaaaggggtcagattatacacaatattttatgccttacttttttacttaatatatcttagaagtttgcacgtgctcttatggaaagactggctgcattttttggtccacaacagaacaacagaatattctattataaaacggtacactataatttttatttaaccaactctttattggtggacattaagaatgg

SEQ ID NO: 121982 - DNA, 406 bp, Homo sapiens
taaacacgttctcttccttgctttcctgcactaatatacagcaggtgctcaagacatgcacggtcactgtctttacatgtaaggtctcgcaaattgcataatcctgttctgtgtgtgtagttggtgtcttataagtgcatgttctctccccttgtgcagcagcagctctgggtgcgcagccccttctcctgtatacagtgtgtgcatcctaagtgcacatcctctcccctggattggcagcacctccataagtgcaccggccttcccctgcatacagcagacgcctattaagtgtctgctctcctctcctctgtacacacaagatgttcaccatgcgctcattccctgccttcctgtcaggaggtaccaacagagctcagacagatggggctcctgaagggtcccg

SEQ ID NO: 121983 - DNA, 454 bp, Homo sapiens
cattggagctttgctcaagaagtgaatttgttcttccacccagcatgaagcacatttagcttctgttaccaaatatgagctttattcttgaccatcaggatgggtttctgcagctgaaacaagagacgtgtggtttgggctatgtattcctttgctggggccaccataacaagctaccacaaaccaggtggcttcaaccacagaaattaatattctcacagttctggaggctggaagtctgaaatcaaggtgaggttggtttattctgaggactgcgagggagaatctgtcccatgaccgtctcctagcttctggtagccctgagtttcctttacctgtagatgacattctccctgtgtctacacattgccttccctctacctacatctctgcgttcacattccttctttttataaggacacagacatactgggttaaggtccaccctaatgac

SEQ ID NO: 121984 - DNA, 487 bp, Homo sapiens
tcgaggaaatgcaattaaatccatggagttaccactatacacacattaaaatgactaatatttaaaagactgacaataccaagtaggtgaaaatgtggagaaatagcaaatcttatatttagctgataagaatgcaaaatgacgcagccacttggcaaaacagtttgatactttcatataaagttaagcttacacttaaatacaatcctgcaatctcatttttagatatataccaagataaataacatatgtcaacacaaaaacttctaagtgaatgttcatagttgttttatttgcaattagccaaattacagacagtaaaaaagtccatatacctgtgaatggataaaacattattatatatttatgtcaaggactatttttcaacaataaaaaggaacgagcattgtggtaaatgaatgaaaccaggtacaaaatattacatgccatgaaattgtagaacagacgaactattctctagtgaaaa

SEQ ID NO: 121985 - DNA, 298 bp, Homo sapiens
aagtgttgccggtgactagaggatcccgtctacccacaggttaggacaggtgcgggggctcattttatttttaatactagtaaaattaatttatctcaggggttttgtccccttcactccaacccccacacttccaaaggcaactttaaatattggttatctgtaccaccaggaagatgctgactattacttcatcactaagccatttgttggtattggcctttcggggaccagcttcttgcaggtagcctatggcccccaaggttcatcgaggtcagaatgggccgggggttaagag

SEQ ID NO: 121986 - DNA, 351 bp, Homo sapiens
gtagttttgcattcctgggataagccttacagggtcatgttgttgttgtagtagttgtttaaataataggttcagttcatcaatatttttctgaggattttatgtctgtattcatcacgatcccactacttactggggttgtggccttgggtaaattacttaatttctcttagtttctcatctataagaagggaataatagtgagagatcttgcctcccagcattatggtgaggtatataacccttagaacagtctgtgagacatggtaaacactcagtaaatgttctcattgttgttattgtaactgacacgggtctcctctttcctgggtgtgtgtatgtgtctctgtg

SEQ ID NO: 121987 - DNA, 408 bp, Homo sapiens
agggaagagtcctgaacaattttgggttctaattctggctcaaccgcaaaatcgctatgtaacattagactggtcacttaagctctctaagcctccgtttatttattttcccaaattgggataataataccagtccctttattgagaaggtcaaatgaaagagtcaatgagaatgtgaagttacaggcacatgaatagggaggttcatggggcagggccctaggatccctgaccataaaatagccagtcaggacacccaagaagtcatgatctgggctgtaaggggcgcgatcataaggctgcgctgccaggctgagccagtgagtggtggtgggagagggagaaagacagctttaaacacagacttgaacagtcttctgagaaacacccaccaccctggtcctcaca

SEQ ID NO: 121988 - DNA, 253 bp, Homo sapiens
agaggaggtatgttatgtgaccagcatcaccctgtgggtctttggggacatccacagaaccttcccaggcaggctgaggagagccggcctcaaactaaaggagatacaaggggtattgtgggaaactccagatgaccttggggccactttgtggcctttcaggtccttgcatataattacagagccatgtcaagctcaagtgtcatagctgttcattttcagagtaactcagaggaggaaagacaagagcagg

SEQ ID NO: 121989 - DNA, 339 bp, Homo sapiens
acggataataactcaaccaattaccaatcagaatatgtttaaatctacctatgacctggaagcgtccccactctttgatttgtcctgcccttccagatcaaaccaatgcaaatcttacatgtattgactgatatattattgttacagtaggtagctatagccaggcatgaggtgggcaggaaagggtttcccacctacccacccaccaggagtgtcaggtgaccgtcaggtgatggtttggcagttatcccactgcctctctaaaaatgataatcggcagttggcgccagggagaagcagtttcctgatggtccccggttgtcacactaaagtgataat

SEQ ID NO: 121990 - DNA, 1379 bp, Homo sapiens
tgcttattttaccagtctgtcttatcctgagaatatctttgacattcaactctgcatgcagacccttccttacacgttctagagagaggacctgtcttcaccctgtgtttattacccacatacttgaacagctgtttcctccaggcatcattatgcaaaaggaatgaaacccggtgtgtgcagcttttttagaggacgtaaaaggagtcagctcttgcctctcatcaatagtattgtttatcagtcatttctcttttgaggcattggttgaataaatgggaaaattcctgctttcaaggaacttagcagacttgttgacagataagaccataagaagaaagccagtgaagtacccagtgatgtgaacgccatggtatgagcaagtacataatagagaccacaagtgctttttagaagttagagatagtcattctctggggcttcctcaggaaaatcctcgctgaatctgggatctaaactgggccttatgattcttggatataaggtttgttgtataggttgatacaagttacttattaatagttgtttgcccccctccctttcactatctttaggtgatgatgtccacacctttccacatctcctcaggagctggtgattcccagatactatttgttaacctgcatcaccactcccatgcacacgaacacaggacaaacaaatccagctgcttcctggcatctctacttgaacaacttaaaggcaattcagatcccacagggtgaaaagctgaattcatctatcagagtgttttctaaaatcccaagtagattatgtcccattcctgcttaaaatgatctcctgattctcattgccttttggataaaatccaatcctgagtatcaacaagggtcttgtgatttggtccttttctgtgtcattctttagaatttctggaagcagcctatcatcgctccgtctgccctccatacacagcgtttgtgtgtgttatgccaaactgcttggtgttttccaaccgtggaccatgatatctcacttccttaaccttaccttcatatgcttttcctttgtgtcttcttctgaaatgcttcttccttttgtccaggctgactcctgtttgtctgagacatgtgtctcaggaagcctttccgttcccctccagtcattcatacctctgtcataacacatagactgtatttttaatttgatttccaatctgtctcttttaggttgtcaccttttttgagggcaagacctttttgtttcatggctttagtttgctgtgtttgttacagtgcctggcatttggtaggggttgagtaaatgtatacagaataaatgaagcctgggagaaggagttccagttaagagttctaataaataactgttttttcaaa

SEQ ID NO: 121991 - DNA, 394 bp, Homo sapiens
tagaggctagggatgctgctaacgtcctgcaatacacaggacagccccaccctaagaattacctggccccaagtgtcaatagtggagaactctcgctctgcaggtttcgcctagttcctatgcatggggatgtttgtgtttccgagagcgtctgtacattgtcatcagaccctaaatcatgctggccccaggtgtcagttacttgacctgtatttgcttaggacacagtatgtgcaagacactcctgggtgctctgtgggttacacagccttactctacccctcaccaccatgtttagtgagtaaatgatttacccaaagaaccacagttaggaagtggcagagcctaggtctgaatccttcactaactccagagaccatgctttttttttttt

SEQ ID NO: 121992 - DNA, 172 bp, Homo sapiens
aatggggggcaaaggtctcactgagttagaaatgagtgggaggtgagggaataaaggacatttcatccaagatgccccactgcggaaggaatagggacgcgggcagtactggaggaggatgtggggatcaagggaggtgtgttttctaggatcaactagacttgagctagtg

SEQ ID NO: 121993 - DNA, 451 bp, Homo sapiens
ggttataaagtgatacagtaaaatctcaaagccaagatacaagtgttgtgggttctattttggggttatctattctcatgagaaattgagagctgacaatttgagagtagcacagttatcccaggccagaaaggaagaccacactaagtactcagttcccatttttcacagtcttcattccaaatccttgattatagaggactgatagaaatctttacagaagctcttgggaatgacttagaaaggtggcagagagagtgagctatgttcccacgaatttcaggactatccagggtcccaaagagtatatacattttatcactggctaccttgagaaatgacagtaccttggacaaaaacactacttgcaattcctttctaagagcaggagctagcaaacaagtgcttaaggacagggttcaagggtactaagtaacatggaaatattcga

SEQ ID NO: 121994 - DNA, 438 bp, Homo sapiens
ctcctccctttgaccaggtgatactgttaaaagcctagttatttcattgctagtcatgcaaatggtaattagtgtacattagagcaataatgcattcccaggttcagtgtaaagagcatggtgtttccatgctctggttctctctccttgtcacagataataaatcacaagccatgtttaaaatacattctctgcagtctttgatactgtgtagtgcaagcaacagattcatagtttctttttaagaatctgaacttttacagaatatgtatatctccatatacttttaaaaacatattaacataatatgtggctgggcatggtggctcatgcttgtaatcctagcactttgggcggccaaggcaggaggattgcttgagtccagcagtttgagaccagcctgggcaacatagtgagactctgactctaaaaaaaaaa

SEQ ID NO: 121995 - DNA, 768 bp, Homo sapiens
ggacactgatattcaagaagccatttcaagctgaaagtcattattctgctccttgtatgtttagtggttcggtaatcatttattcattccatatgttgaatgtctttgtacgaagtctatgaatgagtcctcttaaggagctgacatccagtggaggaattcaacatgtaaataaataattttactatagcatcagtataaattagagatattaacaaaatacaatagtttccaaaatattttaattccaacttcatttgttttttgtttttttgttttttatttttgagacagagtctcactctgttgcccagcctggagtgcagtggtgattttggctcactgcaacctctgcctcccaggttcaagccattctcatgcctcagcctcctgagtagctgggattacaggcacccactgtgcctggcctaattccaatgttaaaatcttgaacatttattcgcaaacatactactcatttcaaaaacacctacacattttttcttctaatcctatattctttattttatctgagtttaaaacttagaatttaaactgtagatttaaaagtagcaaggtgagattgatcagtatatttaactatgtgctgaggttgataagtatatttaacccacggcatcctgagcacagtattgtgttttcacataaatgcccaagacttagttcgtaatgatctttcgctaaaatgtgtatccttgatccaggtggagctgagagaatatacatgaattaaatttaattaattaa

SEQ ID NO: 121996 - DNA, 486 bp, Homo sapiens
ggacactgatattcaagaagccatttcaagctgaaagtcattattctgctccttgtatgtttagtggttcggtaatcatttattcattccatatgttgaatgtctttgtacgaagtctatgaatgagtcctcttaaggagctgacatccagtggaggaattcaacatgtaaataaataattttactatagcatcagtataaattagagatattaacaaaatacaatagtttccaaaatattttaattccaacttcatttgttttttgtttttttgttttttatttttgagacagagtctcactctgttgcccagcctggagtgcagtggtgattttggctcactgcaacctctgcctcccaggttcaagccattctcatgcttgtaatcctagcactttgggcggccaaggcaggaggattgcttgagtccagcagtttgagaccagcctgggcaacatagtgagactctgactctaaaaaaaaaa

SEQ ID NO: 121997 - DNA, 241 bp, Homo sapiens
catacctacctctgcccacaagataatgtactacaaataaatatcacaccctattccatggctatatccacactttctcctctccctgaaaacattgtttatttttcaagaaacccagaatatggccgggcgtggtggctcacgcctgtaatcccagcactttgggagactgaggcaggtggatcacaaggtcatgagttcgagaccagcctggccaacacagtgaaaccccatctctact

SEQ ID NO: 121998 - DNA, 256 bp, Homo sapiens
gcacagtgcaacatagttcatatttggaatgttggtgctttcaaagtactgaatgtttttagtgtctccacacctctggaaaaaactggacagttcccaatatatgacttgtctcttcaaggttaaataaatgctcaaacagtgaataaggcaagggaccgaccagaaggagcttgagttcgtcatgcatcaggaaccttcattgctccctttggactgtgctggccaagactgctaaagcatttccattgactat

SEQ ID NO: 121999 - DNA, 372 bp, Homo sapiens
aaattatcaaaatttgcataatgaaaatgaagaaaatcacccatgataatgccactttgaactgttgatgttccttaacttacgatggagttacatcttaaaagtcaaaactaaaaatcatccaggtgtggtggctcatgcctgtaatcccagcactttgggaggccatggcaggagttcaagaccagcctggccaacatggtgaaaccccgtctctactaaaaatacaaaaaaaaattagctgggcctgatggcgcatgccatcaggaggctgaggcataagaatcgcttgaactcagaaagcagaggttgtagtgagccaagattgtaccactgcactcccgcctgggtgatggagtgagactctgtctc

SEQ ID NO: 122000 - DNA, 243 bp, Homo sapiens
ttcttgcctcagcctcccaggtggctgggactgcaggcgtgcaccaccatgcccaggtaatttttttatttttagtagagacagggtcttgctaaactgcccagactggtctcgaactcctgggctcaagcgatcctcctgcctctgcctcccaaagtgttgggattccaggcatgaaccaccatgtccagctctgatttttcttcttattactgctttttagcagtttgattatgctgtgca

SEQ ID NO: 122001 - DNA, 276 bp, Homo sapiens
caaagtgctgggattacaggcatgagccactgcacctggctgattttatctctaattactaatattttaggtcctaaacaggtcctcgattactgatattctagaatttaaaccaaatgtgtaagtaaattttgtcttttgtcttttcttgaggtatatttttttaaaggaagagtaaatagttctttgtgaactattcttgaagtgtattgtttttgaagtgtattaaatttttgaagtgtattgttaaagaacttgggttataagatgaaaatt

SEQ ID NO: 122002 - DNA, 354 bp, Homo sapiens
aggggtgcatagcagatacatatatttatgggttacatgagatattttgacacaggcatacaatgcataatagtctctttttcatttaatacataataattgtctttctgtttcagaaataataaaagtatcaaaattttaatggctgcatagtattccattatatggatataccgtgatttccaaatttccgctgttttgaacagtagtgtagtgaactttcctttacacatgtctttgagtataggacagattatctccttggaataaatatctaaggatggaattactgggtcaagggcaatgtatattttacattttgctacgtaacaatacagcagtcatctgagatac

SEQ ID NO: 122003 - DNA, 303 bp, Homo sapiens
gtaaaatggaaacatttcaaagaaatatataagaatatctttatgaggtagtgagttcttaagggtcaacaaatacaaaccatgaagaaaaagactgataaatctgactatgtgaaaatttaagatttatgtacatgaatacatcggaagcatgtgaaaagggaagtcatgactgtgcagtgcacgtaggtgacaaaggttagtatccaggataaagaaaaactacgcatacggaagaaaaagacaagtaaatacaggtagggaacacataaaagatgaaacctaagtaaccagttaatatat

SEQ ID NO: 122004 - DNA, 816 bp, Homo sapiens
atttccagctagagaagtccagcttccagagggttcatgatgcctttgattaagatatgaaagatgggaaccactgaaaacagctagatctaagagtgcatatagagagaaaattataccgcaatgtactatgaataaccacgtaaaagataaattgctggacctcttatttagctgctaagttaattggagttgtaactctcattagttgacaagaaaggaaatacatttttggatctcttgataaacaaaacatttaatgagtgttaaaagttacaaaatcattctagtgaacaggagagctgtgtgcgtgacagtgctaaaatgataacaataattacatggaaaataaaggcagaagtgagcgattttgaaaaggaattacatttatcttacgctagatttaattcttgtcagatatttatagagcatctacaacaggcttccttaattgtcgttagcattttttttaccttgtactccttttctacgtcctattttctttctgacatgtcaccgctcacccatatcagtgacctcttaatttctgactttaaaaagaaatctcttcctgtagagccttccctgtttcaacccattccctaacttttgtgactcttggcattcttacagcactcataaatggcattctttttgaactattaattgtaagttatttttgtttcctgtgctaggaacacctggctgtttatagtccttatggcacaataactgtataataattatgtactttatgattaacacttatttaattattaaacaaggtgaggctgttgaaaatatataaggaatgtg

SEQ ID NO: 122005 - DNA, 609 bp, Homo sapiens
ggcaacagaacaagaccctgtctccaaaacaacaacaataacaaaatactaaatttgtctgtaaactctacttttctaatattaagtcctcacagtgaactgaagcagaacttcctcttgttataagttaaattcctttgacctcttaggttgactctgcatatgctccatgaacagtaaaatacctgttcagtttcactttctaataggttcaagtcaattacttaaaggttgtttttcccctctcatgatttcaactctaaaataattaactaacataaaaatagctgcttacacaaagtttaagaaaacttacttcaacattttaagaaagtttaagaaaacttacttcaacattttaagaaaatgttttgttcccaaaagtttgccaaaaataattttaactcaatgtggaaatgaaaataatgggaatgctacctatccagatgcaccaaaagttcattgttattagaaataaaaaatacttggccaggtgcagtggcttatcctgtaatcccaatgctttgagaggccaaggtgggtggatcacttgagttcaagctggagttcaagaccaacctaggcaatgtggtaaaatcctgtttctac

SEQ ID NO: 122006 - DNA, 402 bp, Homo sapiens
cagaggcccagctgggtggtttaccaacatgctgtccttgaatctctgtagccagctattttgcaaaggagaaaaaccagctctggggagaaggtacttggtgaagggaacaaaactagggcatccaggtctggctcctaatcacctgggaagaggggtaaaaacagaatcctagggcccaccccagacccacagagtcatggtttcctactggcggcttatccgtgaacacagcagtcatgctaggtagggagtggccttcccagcattcagtgtgccctgtgggagctcagtggtggcaggagtaggttggatgagagaggggttcgtggaggagcatttcaggccgcaggatgtgtggaggggagcaggctgggttccacaggctacaccagccacatc

SEQ ID NO: 122007 - DNA, 436 bp, Homo sapiens
ttctccaacttcattgtgccagtgaatctattgaaaagctgttaatatttccgtgtcctggaacacatttctcatgagttttgttcaaatattctgggataaggtagcaagatcttgtttttaaacaatctcttgaaggcaattccaattttgagaatcactatcttcaaattacctctcttaaatagggttgggaatgaggacatagaatcatgttctccctttggcactctgtttcctttcctcaaactcaaagactcccatttatttaaagttttacctgaacactccttgttcaggacaggctcagtcctgcctcacactagcatttcaagtccagtattcctgctaaatggtccttggacttttagctgttaaatggtatctcattttttaaaacacatttcacatttaaagtcatacatgcttaagctaa

SEQ ID NO: 122008 - DNA, 486 bp, Homo sapiens
caagacaaagatattccctgtcatcatgatcattcagtattattctggaagctactgcccatctaagaaacagaaagcagagaaaaggaggagaaagatagccatgatttgtatgttatatttctgtttacctagaaacttaaaagaatcaacacaaagtaataaataaaaatttgataataaaaatctgtatacaaaataaaactaaaatcaatagctttcccgtgtatgggcaataagtagttataacatgtaatgggaaatgtcccatttacaagagtataaaatattcagtaataaatctatatttggaaaactaaaatactgagcaaaataaaagaaaatttgaataaatactatgttcctagatgagaaaactaaatatttgcaagacacaattctttctatattattgttcagcttaaatacatttttaacaaggtaacaattttagatgatgattttaaaaatatcaggaaggataaa

SEQ ID NO: 122009 - DNA, 201 bp, Homo sapiens
ggcctccgggggaacagccctgcccacaccttgactttggactcctggcctccagaactgtgagaggatgaagaaactgaggtttagagaagccacttgcccagtgtagacagcgagaaggacaggtccaggtctgcttgatgatgaagcctgtgtcttctttgctgtgtgatcctcatcacgttaggggattcctgagga

SEQ ID NO: 122010 - DNA, 677 bp, Homo sapiens
gttatcagggggcatttcacagaaacaagcaaacaccaccgttcctccacctctgctataatatcatgcatttctacgcttgctgtcttctgtagcagcagggactcatggcttcacaacgccagagtttgacagtcatcattgacaaagtaggggggaaatgcctctctcttttcctttagtgcggcactccacctgtgtaccaagtagtactgcttatgcctcagactattacagataattttagagaaagagctttcaattttaaatgacaccctcccccgcccaccatcacagaggatttgacccaagatggcaagagccaaagacaagctcataacagatcccacgtaatactcagcatcatcttgatgaccaaggtctattgtggttttgtgcttgttttgttttattattactaggtcttgctggtcgttcattccaagctgtttacttctttctccctgaagataagttcttcttcatgaactttctcagtctctgttttataaatgtcagaatcttatactaccacactaagccccatttagtctataatacattcattatattgtaatatacaattaaaatctggttttagaaagtaatgcaaggaaataaataaaagcatgacattcatccaagtaatacttattaatcaaatactaggggccagg

SEQ ID NO: 122011 - DNA, 220 bp, Homo sapiens
cttcctgactgtgcaggtgacctctccatgtgctaccggctggtctctgaaaataacccctgtctggcccagaatgagggcagggtcacacctgttctctaacctatcaacagaactcctgagtcctgtgtgtgttcagtttcctcctgcccacccaccagcctggggagagcaatattcccaggctcctgaatctcctcttctcatagctccctggtgt

SEQ ID NO: 122012 - DNA, 306 bp, Homo sapiens
ttttgaaagtcactcttcagtggcaatccttggagttgtgatgggcagataggggatgctctgagaccactggggccttcttgggcctctcacacagtttccattgcagccccacctggaaggtttggagctgcaggtgggtcttggctctggagtccaggaaagctatgggttcttcagggatcttttggaaaattatgttttggaagactgcaattttattcctgaggatattaaaacataaataaaggcatattatgaaattcatgcagtgaatgaagattttaaaagttagaaagtaaaggc

SEQ ID NO: 122013 - DNA, 214 bp, Homo sapiens
tgctgcgatacaccaggcaagcgaaggagatctaaagatactatgttgctggctttgaaaatacagtaaggtggggtggggtggggggtgataaggagcagaggaacgtaggcagctttcagaagatggaaaaggcaaaggagattctcccctagagcctctgcagggaatgcaaccttcatcttctttttttgagacagtctcgctctgtctc

SEQ ID NO: 122014 - DNA, 760 bp, Homo sapiens
gttcatgtcatcttcatgatctcaggatagctctatcattccaaacatcgtatccatatctgtggtacaaactggaagaaggaaaaaggaggaagggcaaaaaaccacaggcttctgtcagctgaatttgtaccttcttttatcagaagaacaacagttttcttggaagccccacccagtaatgtttacctacatctccttggccagaactgtgtttaatggctacccgaagctgcagagaggactttggaaaatagagtttttagcccagcacattgcttccaggaaaaccagtgttctgttagcaagtagcactcgatgtatcccaaaaccatcattgaattagtcctttttaaacagaggtccatgttttggtcttcactgaatctagattcagattaacgctgcagatatttactgagtgctttcagtcataaaccaagcacagtaattgcatggaggaatgtgtatggcaaattacaccgtctgccttcaaggtaatcacaatctaaatagaaaagcagagaaatagctacacaaataactccaataaagtttaataagtattatatatatgatcttagaactgattattggactaataagtaaaataatatttgaaatccatcctatgcaatacagataatatgtacatcatatccactcctaaggaaagaaatctaatggtcagagtttcaggggaaacggtgcaggttaggtgaaggtgcagaaaagaaaaaaaaaaaagttggattataac

SEQ ID NO: 122015 - DNA, 717 bp, Homo sapiens
tctttaattagttatttttaaaattaaagtaagttttgatttgaattgttaactaattatcattaattcagtatttacagctttttaatattaaaacttcatgacaaagaccttagttttgacattgaagtaaaacttaattaaggcaggcattagaataatttgccaaatcttccagcccctaaaaagatactattttaatgtaattaaaaaacaaaagcaggtaaccctcctgcattttttgtaaggtgtactttaacttaaaaaaattagttctctagttgcaaagggtgggaggaggagaattctaaccctggttttagaactattttaatttttataataaatgatctgtatcaattttttaaagtattacgttaataaatgtaatactttgctgagcttctatgtgcttatgcctcttctgtattttaaaaaagttatttcattagagtatcagaattgaaaagattgggttaaaatacattactacatatgtaggtcgttactctttctgagagagtgtatccatttatactccctgtcatgctgttgtggaactataagtttcatcccactttatgattttttttctcatatgttgggttggataaataggaaaaacaatacacattcatgcccagttaacagcaaacaaacacaaaacaataaaaaaacacaaactgaaggcccactgccactaaaaaacataaacaa

SEQ ID NO: 122016 - DNA, 578 bp, Homo sapiens
aaccatcaaataaatgacaagagtaagtcctcatttatcaataatagtcctaaatgtaaatggattaaataccccatttaaaatataaagattggctgaatgtagaacaaaaacaacaccttactatatgctgcctacaagaaacttacctgacctgtaaatcctttcacatagaattaaagtgaaggataaaaagtattccatgcaaatggaaacattaagctagtaagaatagctatacttccagccaacaaaacagatttcaagtcaaaagctgtaaaaagaaactatgaagaacattatataataatacaggtattaatttagtaaaagaatgtaacaactctaaatgtatgtacaaccaacaccagaaaacccagacatataagggaaatattattagatttaaagggaaaaatgaactccaatacaataaaagttggaaacatcaacaccatactttcagcattggacacatcatctagacagaaaatcaacaaggaaacattgggtttaaactgaaccatagacaaaatggacctaacacattgacagaacatttcacccaacagctgcag

SEQ ID NO: 122017 - DNA, 863 bp, Homo sapiens
agtcgaaggggcccgaggccccgagaagggcaggatgcgatgctgggtgtgtgacctcagccatggaagggccacctgccaccggggggctgggccgtcgggcctttggttgtggagggaaaagagtggccacttgctggagctgggaacgtgcagtgatgagcactaggacaagaggaccgtgacaaacagacatagaagatctggagactggggaagtccaagatcaaggctccagcagattcagtatctggaaacctggttggggcttcaacaggaacacctgcaaggaccagctgacttcctgcccagacacccttgcattctcagcctctgcctgggaggaggaagaggcacttccacatttcttgtgacaggacagcattgagttcattgcctcaaaattgctgcgctctccttctgccagtgcccagagatgctccccacaccacactgcactgctgggggatgttagaggtgattcaagacagtttttcctacctcttcagtgcctctttcagcaatatgaagttaaaaccaggtactatgagaactcacctgatttttagttcttatgaaggtgctttccttgtgtaaatatttgttaaattgttttccttgccagaggaatgatcagtggagccttctattctgccacctttctctgcctctctccaatcctcttacctttttcacacagccttcgtggttatcacagagacttaagatggaatgttaaatacactcttttatattggaaataaaatgaaaaccagatataaacaaataaacaagccacggagaaaagaaaacaaactttgaataattaatttattgtaactcataagcccagcgttgtataa

SEQ ID NO: 122018 - DNA, 480 bp, Homo sapiens
ctctagcggatctgtgaggtaccaacaacagaatatagaacacgccaccaaacaacagaatatagaacactctacccaacaacagaatatagaacatgccacccaacaacagaatatatatgcttttaatgtctgtatagtatattctcaaagacagacaaatctcaacatacttaaagagactgaaatcaaggtacattctcttgacttcaacagaaattagaaatcaataataaaaagctatctagaaccccctactaaatatttaaaaattagcatacttctaaataattcacagcaagaaattacaaggggaaattgctccctctgtcgcccaggctggagtgcagtagcgcgacctcggatcactgcaacctcgcctccagggttcaagtcattctccggcctcagcctcccgagtatctgggattacaagcacaagccaccacacctgactaatttttgtatttttagtacaga

SEQ ID NO: 122019 - DNA, 499 bp, Homo sapiens
tagaacatgccacccaacaacagaatatagaacatgccacccaacaacagaatatagaacacgccaccaaacaacagaatatagaacactctacccaacaacagaatatagaacatgccacccaacaacagaatatatatgcttttaatgtctgtatagtatattctcaaagacagacaaatctcaacatacttaaagagactgaaatcaaggtacattctcttgacttcaacagaaattagaaatcaataataaaaagctatctagaaccccctactaaatatttaaaaattagcatacttctaaataattcacagcaagaaattacaaggggaaattgctccctctgtcgcccaggctggagtgcagtagcgcgacctcggatcactgcaacctcgcctccagggttcaagtcattctccggcctcagcctcccgagtatctgggattacaagcacaagccaccacacctgactaatttttgtatttttagtacaga

SEQ ID NO: 122020 - DNA, 396 bp, Homo sapiens
tggagcaagctgggattttgggggtttctgttaagaattagcttcattgaggtataattgagacaataaaattatctcccattttaagttctagttgatgagttttgagaaatgtatatagtgaagtcttgatcatcaaatcaacatatgaacatttttcatctcccaaaaatgtaggagctgtttttttatcttaggagaattttaatgaaatatacgtggaggagctaaatgtttcaagtttgcctcatattcatatctaatttattggtaactaatttaaaccactttcttacggctctcagtttctgttcctacaggatattaactcccacagatggcaacagatggcaggagtgagaccaaacagtttgcagtgttctccattcacaccct

SEQ ID NO: 122021 - DNA, 206 bp, Homo sapiens
ccaggaggaagcccctagttccacatgtgcagactgggaggcaggaacaaggaggaactgggccaaggtgtcagaggaaagccattctttcgtaggctctccagccagcccagcctactcatttctgaattccggaaacccctgccatttaggatataataaatcactaggaaaagttaggtgagttatttgcatcactgattgtg

SEQ ID NO: 122022 - DNA, 207 bp, Homo sapiens
tgggtaacagagtaagaccctgtctctaaaactgaaaagtaaatagaaacatgtagcggtgaattctgtgtccagctcaaaatcagcaatttcccttatctcacttttttacttatttcctctttatttacacacatagctcccttagctcataaacacttctgagggcagggaccatgccttttattcttattcccttttcagctt

SEQ ID NO: 122023 - DNA, 858 bp, Homo sapiens
agctctccctttcacagctgctccttgcgctgctgggggaggttgctgaggtatggggaagaggtacgctgtcgctaagcaacaagaggctgtgcacctggaggtcctaggaggagaccctggcaccatcggtatgggggaggcagggagacagtaaagggttgatcaagctcaaggctccctctcccatcctccccaagacagttacagaggagggatgtacccatcgctcaagaagcctgttgaattggctcacaatcctccagaaggctgcgattgtgcatgcaaacctgtgtgacattccatagactgagagttggagagggcaggggctagggcatgaaagacaagggtgagcatctttcacatcaatcttggaggaaggtcgaggacttgcctgtctgctaaaaggtaggaacttccatggaagtgtaaaggtctgagggcggaaacttagtagggaggcgacagaatgggaagggaagccggttggaccctggggcagcctcccagtcacagaggctaccaaggagcctacacagaagggaggtggcagggcagcaggggccccacacccatcagccatctgctggaattctcagtgtcctcaaagctgaagtgctgcactgtatgccgttatttttcttctcttttattattgttttttggtggactggagtttgaatgaggtaacgatcaagagggaaagactcgtcgattgaccctgtcacccgcctcactgcatctctaacaggcctgtagccctgtaaacgtgaggagcagctcagggttgacagagggccattgcctccctttttctgtcacttcctccattgcctcaacccctgtccagaagag

SEQ ID NO: 122024 - DNA, 324 bp, Homo sapiens
tgtcaggtatgaggttgggcagtgaatacacactggggaccaagacagaaagagtccctcccacaaacagcctgcagtttagtagaggacagaaacaaacaccagaaaaagtaaacatataaaatcattaaaccttgtgaaaggggtctggaggggcacaaataaaagtggggaagggtcagaagggacctgcatttcatgaagtggtcagggcaggcctctctgaggaagtggtgtttgagctgaggccatatgaagaggaaggacagtcagagagacaaaacactccaagcaggacagtgagtgcataggccctgagtctga

SEQ ID NO: 122025 - DNA, 383 bp, Homo sapiens
cattatactttgatgggagtataatggatccgccctcagaactgtaggctcagaagcttgaacctagaggtgatctgatgaatttgatggagcttagtccctgctcatgtaattaaaaaaaaataaaaagcagctgtatgcttctaaatgtttgcactcagaaagataactgctagaagggtaggatgcacttagaaaatctgcctggggagtaaattacaataaaaaagttagtgagctgagatagctagaggagaaggatgccttcagagtagcattatactttgatgggagtataatggatccgccctcagaactgtaggctcagaagcttgaacctagaggtgatctgatgaattggatggagcttagtccctgctcat

SEQ ID NO: 122026 - DNA, 226 bp, Homo sapiens
acagggtgtcattctgtcacccaggctggaatgcagtggcgccaccacagctcactgcagcctctacctgctggactcaggcaatcctcctgtcttagcctcctgagtagctgggatcacaagtgcacactgccaccaggcctatttttttatttttatgtagagacacactcttgttttgttgcccaagctagtcttgaactcttaggctcaagcaatcctctca

SEQ ID NO: 122027 - DNA, 391 bp, Homo sapiens
tcactgcctcaggctgaaatctgagctcctgggtacattgaaagctgccagcctttccccagactgccgggttccgggctgctgcacgggtccctccactgtctcaaaggccgtccctccactccagggatccctgctcaggctcctgcagatcctcagccacaacagtgcaggcgattttacacggcactgtctacgagtagccctgccactaaaccggactcctcctacgggaaaagcactgcgtggtttcatctctgtatccccaatgactggcacattgactggcacacagaaaggagctcaatgattcttattttgttttgttttgttttgtttttgagatgtaggttggctcttgtcgcccaggctggagtgcaatggcatgatc

SEQ ID NO: 122028 - DNA, 256 bp, Homo sapiens
cagcttcttggggctctcagactcacaccccatgtcccactcagagcaaaccaagccctcccccaccagtccaccagggagaacattcagccacatgcagacagtgactctggtggtctcgaggtgaacctcctgcctccctgttccctctggtcatgcctttggccactgtgcccaggcagtgtgaggtgactcctccgacaccacccactgacttttctgtggccccttcagagactccaagagcttccacggg

SEQ ID NO: 122029 - DNA, 268 bp, Homo sapiens
ctgacctgtgtgtgctttgcggggaaaaattgatgaaagccccggaagccccgttaaaaagacaagctgtatttctgtttttttaacaaaatgaggaagctgaaagccagccagtgttttacataatggtgtctctcccctcagctgatcagtgtgacatccagagttgctgttgctgctacctgtctagtctctaagacccttttcaacccttgtgacttaagactctgtgaacttttacaaagtatcttgtgatctggacagatga

SEQ ID NO: 122030 - DNA, 366 bp, Homo sapiens
taaaaatagaaacatataatagcagcactttataaagggaactgatttcaagtaagcaaggcctgggttaaaaaggaaaggagattggctcaaggcacaataattctacctgtgttaatagcatcatctacaaaatacctaagggaattcattctacccagcatccttttgcttcctctgccagggtggatgactaggctctgactaatagaaccaacacaactggtgagtatcaaaatgtacaactgtttcaccagactaagttggtcactatgttttcctcctaaataattagctttaaagacaatctaaaatactgcagagccccagcaacatttcagataacttgtaccttatatttcagat

SEQ ID NO: 122031 - DNA, 539 bp, Homo sapiens
ttattcaaaatacaacctcacacatcaatcttttcaggaaatctgtgagaccaacctccccaagcctgtttctgcatgctctcaaaagccctgtgcacgcgtctatcacagccctttcactaactctactaaatgccaggctgtcatccacactcataggccaggaaatacttgaggaaggaatgtctgtcttttacctctggatctctaaaacttatcaagttgcccagcaaagcgagtgctaaaagatctaatgatgagctgaataaacgaataaaaaatgtgcaactattatctaccaaacccatttaggaggctatctaaaagagttgaagcagccaggcacagtgagtagctcacgcctgtaatcccaggactttcagagcctgagatagggggattgccttacacccagaagttcaagaccaaccagcctgaggaacacagagagactctgtctttaaaaaaaataaaacaaacaactacttgggcatggtgccacatgactgtagttccagctactcaggaggctgaggcag

SEQ ID NO: 122032 - DNA, 257 bp, Homo sapiens
ctggaagtcggggctacatgtgggtgccacagcaggagtgcccagggccctagccctgcacaatggtcaaccctgcccccttctccatgccccgccaggtgcgcccattggagcgccgcaagtatatgctcaagtcgttggaccagattgagacagtgaatggtggcagtgtggccagtcggctaaccttccctgaccgggaggcgctggcggagcacgccgacctcaagagcatggtggagctgatcaagcgcatg

SEQ ID NO: 122033 - DNA, 528 bp, Homo sapiens
cttgaggaaatcctgtcagctctaccttcaaagcacaccaagaatatccaatctcacttctgttcaacactgtattagaagtcctagccagaggccgggtgcggtggctcatgcctgtaatcctagcactttgggaggctgaggcgggtggatctcaaggtcaggagtttgagaccagcctgatcaacatggtgaaacctcgtctctattaaaaatacaaaaattagccgggcgtggtggcggacacctgtaatcccagctacttgggaagctgaggtgggagaatggcgtgaacccaggaggcagagcttgcagttagccaagatcgcgccactgcactccagcctgggcgacagagcaagactccatctcaaaaaaaaaaaaaaaaaaatacaaaaatacaaatacaggtgtgagccaggcccagtggctcacacctgtaaccccagcactttgggaggccgaggcagatagatcacgaggtcaagagattgagaccatcctggccaacatggtgaaaccccatct

SEQ ID NO: 122034 - DNA, 165 bp, Homo sapiens
ataagagggcgcggggtggggaaggcagagttagaaacagaggagagaggccagaggagaaggaaacaccacgaggaagggaggaggagaatcagagaggaggcacagagttggggagaaaaagccccggagacagggaccaaagcaggggggtcagagagagag

SEQ ID NO: 122035 - DNA, 419 bp, Homo sapiens
cacatccacaaccacttccatgctggttattaccacataccccagtttttaaaaacttacacacactccaccaccatgacaaccaaccttgaatgtttaaccagtctgcccagtttgtggtcagacttcccctgaaggggctcttaaaccacctcctttctccactcatcaggcatgaggccatttcccagaacaggactggcaagttgacttcacccatataccccctgtaaaaaaaggaaagggccaactacagcctgggaaaaatatttgtgaaacctctatctaataaatgatgagtattcagaatacgtaaaacatccctacaaatagcataaacaacacaatttaaaaataggcaaaagttcaagaccagcctgggcaacatggcaaaacactgtttctacaaaaattagcta

SEQ ID NO: 122036 - DNA, 403 bp, Homo sapiens
tgtcacctaggctgtatgtagtgcagtggtgcggtcatagctcatcgtagcctcaacctcctgggctcaaaagcgatcctcccacctcagcctccagagtagctaggcctacaggctcataccaggaccagctgcttacattaaaacaaatttttgtagaaactgggtgtctccgggcacagtggctcacacctgtaatcccagcactttgggaggccgaggggatcagagaaacactgagtgagccaacacagctagcatcctgaactcaccaacccatggtagccagggccacagcatgactgagaagtcatggccactggggaaggtgaatcctcagtcactgcaacaaggactttgcatgccaccaagacactttcaattcccaagtcaaggaccactg

SEQ ID NO: 122037 - DNA, 595 bp, Homo sapiens
atcctgaatcattaaaaccacactgtctagcaaactacaccttagatccccactatcaaaaatatacttgtattataccttttattcattttttttctaatagcacttgataagcccctgggaagcggttgatcctggaattttggttggttagtttttattttccttttttctcctatagataatatatatgatatagaataaaaaaggcacaaaaagagtgtacagtctaaagtaagatcctcactgcaaagcatctgatgttactaagttcaagaaataatcccgtggcatagatttttcattttgagaccttcctatcacagactcatctcttagttatcaatggcagtagctgtggctgaaaaaatcccctaccacctatatccctttacttccagctcttctagaggtttaggtcatgtgacttgagaacatcaaaggcagaaaagtacccttctgccctaagatttctctcataaatgctgagaaagaaatcaattttgctattgctgctgtgggagtcctcagccagattgctttgtcttgaccaggaattcttaaaatgagatacatggggaggagttcatgaaat

SEQ ID NO: 122038 - DNA, 351 bp, Homo sapiens
agcttgtgattagtatcatgacaaagacacaaagatggtaaaataaaaatgcaaggatggggctgggtgcagtggctcacgcctgtaatcccagcacttcaggaggccaaggcaggtggatgacaaggtcaagagatagagaccatcctggtcaacacggtgaaaccccgtttgtactaaaaatacaaaaattagctgggtgtggtggcgcatgcctgcattcccagctactcaggaggctgaagcagaagaattgtttgaacctgggaggcagaggttgcagtgagctgagatcatgacactgcattcagcctggggacagagcgagattctgtctcaaaaaaaaaaaaa

SEQ ID NO: 122039 - DNA, 446 bp, Homo sapiens
gattccataaaagttaactccagagcagagaatgatgccacagtcgggataacatccaatatttgcaatcagaagaaatatgagagtcttgctccatcacccaggctgcagtgcagtggcacgatcttggctcactgcaagctccacctcccgggttcacgccattctcctgcctcagcctcccaagtagctgggactacaggcgcccaccaccacgcccagctaaatttttttgtatttttagtagagatggggtttcactgtgttagccaggatggtctcgatttcctgacctcgtgatctgcctgcctcggcctcccaaagtgctgggattacaggcgtgagccactgtgcccggccgtaattattcttttcgtgttaagcaatggtaaaagaactgactgaaaataagaatattaaaaagtttctctgctaaaaacagaaaa

SEQ ID NO: 122040 - DNA, 347 bp, Homo sapiens
tgaaattccactgaacaactgctgttatccaacttctctctgattctctcccacctactactcccactgttctgctggctttgtctcctctcccagcagccacccccacaacagaggtttgggataaattagggatatcaaagaatggtgccctcatcagactcagtccttcttggtttcgcttcctcaccatggccctgcccttggtccctcatccaactgagagccactgggacctgggggcctaactgtgctgcgctctccattgtgggaaaacatggggcctcctactatttctgcatccctggacttcactcctggcaggctcaagagtgactcattcttcc

SEQ ID NO: 122041 - DNA, 388 bp, Homo sapiens
cctaaaagctttaagatcatggaatagttgataaaacagtcagtattctgtgctgatgacttatccttttctcccttaagaaagagtaaatgtttttgcttggattgagtttagagacaccagatagaataagattggcaacactgttagccacctgctgaccacagctaaacaggcatatgtgcttctgcatggggaatgctatggcgttaacagtgccttccttaaaacctgtaagttcgttaggcttccgggtaccagggttgttagagtaggccacagtttacttcctttttcataagtgcttttctttcctggatctcagtataggaaggaaaatcagacagcatttctcagttgttggctcggtgggcattgtgaatgggta

SEQ ID NO: 122042 - DNA, 619 bp, Homo sapiens
aaaagattacttttggacatgttaaacttgaaatggcaaacaggtattttgactggtgctataaacctgtaagtcattggcatgtagatgatagtcaacatatgcctatgaaactggacaaaagtttcatggtaattaggtatcaataagcaggaaggtagcaaaaaactaactttacctatctcacaattttgccttgtcccaggattgcccatagcccaattcttttgattcaagcaccaaaaccaactcttagagttttttgtttgtttgtttggtttggtttttttgagacaggttcttgctctcttgcccaggctggagtgcagtggcatgaccatggcctactgtagccttgacctcccaggctcaagtgaaactcccaactcagacttccaagtagcttggactacaggtgcgcatcactacacctggctaattttttacttttatttttgtagacatgagtctcactgtgttaccagggctggtgttgaactcctgggcttaaccaatcctcctgccttggcctcacaaagtgctaagattacagccatgagatgctgcacccggcctcttctcaagagttttttggctaagcaattaatatatgtgaaga

SEQ ID NO: 122043 - DNA, 698 bp, Homo sapiens
taatggaggaagtaccttattctccaatatagataagttttctgcacaaacgcaggttttattcttctgtgggcagacaacacaaacaaagaaacaaatgatttccaaatataagtggcatttggaaaacaaaatagggtaatgtgaaggagaatcatggtggttatggaggtcatttagtggtgacatttgagctgaatcttgaatgacagaaaaatgacaaaaccatttaagacctggggtaagaaagagttttcaaatgcaacaatggtccttaggcagagcatgtttgctgcatttatgacagaagctggtgttccctgaatatagtgagaaggagagtggtaggaaataatgtcaaaaaggtagttatggacttgaaaatacaaagccttgtaaatcatggttagattcagattttattctacatgtattgggaagtatttgactacctaatttatattttagaaggatcactcttcgtgctctggggaatggctcatagggttggcatggggagagactagggcacaaagacagttagaatttgcaggggacccagtgagacctgatggaggtatagactaggtggtagaagtgggaatgaagaaacatggatgaattaacttatattttggaggtaaaaaatagatcttaatgatgatttgtatatggcagatggggaaaaaaagagagtc

SEQ ID NO: 122044 - DNA, 363 bp, Homo sapiens
agacacagacggtagctttccgaccgagcggggcacaggctgaggcggcgccagcacaactgccgccgcgcgccccgaggagacccgggcacgaggaaacaaggagaaatcaggactccttccccggaaccgaccggcagctccgcgcccccgcgcgacacccttcgcagccacttcgcggggcgggccaggacttggggacgcggctcgggaagagccggggcgggcggcggcggcggcggcacgggcgcgagggtgcgcgcactgggactggagaggagtgagtggcgggctgggcggcggcggccgtagccgcgggtgcctccccgcctcaccgcttcgcaggcagcaccgcctcccggg

SEQ ID NO: 122045 - DNA, 231 bp, Homo sapiens
aaaaacaaaaaaaacagaacaacaacaacaacaaaaacaaaccactttccaatacttgcaccttagttccagcccttttccttgttagccatacctatgatgggacatcatctaagatgtaattgagggccagacaccttactggatttcatccccagacagaggtaattcctttcttctctgagcttgtgcaaccctttatctaggcctttcttaccacttactgcttag

SEQ ID NO: 122046 - DNA, 376 bp, Homo sapiens
caccatgctgtgctgttgacagagcaacagagattttaaaccaaccccagctaagccccagctaatagctgaaataaacagggctccagatggctgtggcttagagatggaacaggacagatcacagccttcactctgcaggctcaggagcctgaagacaaggttgcctccagttgccgtcagtgcagccctcactaaagaaaagcaaaaagagccgagggactgtaggaaggctgtttccaagccagagatccagacaaactgctcttgaagagagaaagcccttccagattcccccatgtcccaaaagaccagccgggattctggacctctgctaaaacatggacaagaagccaggaacgagacctgaaacaga

SEQ ID NO: 122047 - DNA, 154 bp, Homo sapiens
tgctggcattacaggcgtgaaccactacacccagccatctattaattctttagcaattacaaagtagtagcatttaaatctctgattctttcttcatttattagccagaaatttctgtaaagagaaacttccttttatgtactatttggttgcc

SEQ ID NO: 122048 - DNA, 468 bp, Homo sapiens
aaaagttgcccacaaaacatgacgcataatgatcacttagctcccagcatgctttgggagatgcagcattgcaaaaaacaaacaaaaacaaacaaacaaaaaaataaaaccccaacaaaatggggggaaaacagaagctcaatcaagaaaaaagttttttgcatattaaataaaattgaaaatatcttttttcaaaatatgaaaacacagcttcagataacaccacaaggccacctccggaaaagatcacccatacacaaagatacagtatacataatacagcagaacatgcactcccaaatgattctatcagacaatacagaagaagtaacggcatatcactcttggaatgcttttgtgcaaaattctgaaaggccatgacccaaatcacagactaaaagtacagagccatctatctaggttcgtgggtgtgcatccacaccagggtgtttaccttcccctaaagcc

SEQ ID NO: 122049 - DNA, 723 bp, Homo sapiens
gtccccctcctcatcttgtgcatagctcagctggttcctggactgtgggcctgacagcggctttacttcattgccaatagtgtcttcctccttgagaggttcatgtgttgcacagaacagtagccacacttattgagtattgtacttattctttgtttttgagatgagatcttgctatgttgcccaggctgctgtcgaactcctgggctcaagtgatcctcccaccttggcctctcaaattgctgggattacaggcctgagccatcatgcttggccccctacttattctgtgtcagggcctgccaaacattttatgttttcttatttaatctttcaacaatgctgcaagttgaagatgatgaagaaattgaagcttaatgaaattaaatagcctccccaaggaccacttttaatggtggaactgggatttgaagccagatctgcctcttctaaagcctgtgctctgaaatagaatggtaactggagtggggcagacctgggttcatatcctgggttcaaattctctcagcctctgttttctcattttaaaatgggagaaacacttatgtcatggaaagatgagacctattaagggccgggtgcagtggcttatggctgtaatcccagcactttgggaggctgaggcaggtggatcacttgaggtcaggagttcaagaccagccttgccaacatggtaaacacctgtctctactaaaaataaaa

SEQ ID NO: 122050 - DNA, 287 bp, Homo sapiens
ttgtcactaaattcctccagtgcttacaaataaaatagtatctatgactaagatacctaactgtacctgacacaaagtagatttgaaacaaactcccagcctatttttttcttctcctttccccaatgtcagtatcatgtgtccaacacagtttttaatcatttgatcagtttttcttcaacttgttacaatcaattcttatctatctttgtacctctttattcccaatggcacctaaaaaagagacataattgctcaggaaataccaactgactaacctaataaag

SEQ ID NO: 122051 - DNA, 374 bp, Homo sapiens
tgggaggcctcaggaaacttacaatcatggcggaacgggaagcaaacacatccttcttcacatggcagcagcaaggagaggtgctgagcaaaagggggaaaagtcctggataaaaccatcagatctcatgagaactcactcactatcatgagaatagcagcatgggctaaccgcccccatgattcaattacctcccactgggtaacatgtggggattatgggaactgcaattcaagatcagatttgggggggacacagccaaactataacacactctgtctgaattattaataaaatattttctaatctaaagtaatgttccaatgatattttagcatttgccaaatagagttccataaaagaaaagtctttag

SEQ ID NO: 122052 - DNA, 283 bp, Homo sapiens
agctcctccccaatggaacacactgtgttccttagtgactcgttttctttctcttccctcctagaatgtgagcatccctaggacatcactagggatttgagtccgtgttgctcactgctgtatccccaggtgcctggcatgcagcagactctcaaatagtagctgttgaattcatgaatgaattgagttgggggcgggggctaccctcccttactcaggttcctactccagagtcatctccacagagagctggtccctgacccactctcttccagcccccagc

SEQ ID NO: 122053 - DNA, 424 bp, Homo sapiens
ccattaccataatgaagatatagaacattttccatcacccaaagtgttcccttgtgccattttcctactcttgatctctggtcccaggcaaccacttctctgctttcatccctttagttttgtctgttctggaatatcatgtaatggggtttaaacagcatatattcttttgtttttgatagctttcatttggcatgcttttactgagattcatccatgttgtgttatgtacccagtagtcattcaggagcaggttgttcagtttccatgtagttgagcagttttgattgagtttcttaatcctgagttctagtttgattgcactgtggtctgagagagagtttgttataatttctgttcttttacatttgctgaggattgctttacttccaagtatgtggtcagttttggaagaagtggggtg

SEQ ID NO: 122054 - DNA, 404 bp, Homo sapiens
ttttgttttgagatggagtcttgctctgttgccaggctggagtgcagtggatctcagctcactgcaacttctgccttctgggttcaagtgattctcatgcctcagcctcccaagtagctgggattacaggcatgcgccaccacaccccactaattttttttgtatttttagtagagatggggtttcaccatgttggccaggatggtctcggtctcctgacctcgtgatccacccatctcggcctcccaaagtgctgggattacaggttgtgagccaccgtgcctggcctcaatcttttcttaataagttgaatgagacaagttgctgctaagttaaaaaaaaaaatgaataaaagatgtaattaatagtcattaaataaattttggaaaaggatttttggatat

SEQ ID NO: 122055 - DNA, 259 bp, Homo sapiens
ctttttagtaaaattttggcatttatgtttttccacaaagctttatattatgtccacatttccatatgttttaggatagaattgcacgagtggctcttatgataaaatgtcctcagtaactggtattgttttccgtttctttctctgattactgtaagtcctctccctcttcttacattttctaggccaaaatatgtcttttggttgatatttttaaagaggaaacaaactaatttttgtttgtcatttaaatattttg

SEQ ID NO: 122056 - DNA, 372 bp, Homo sapiens
  misc_feature (182)..(182): n is a, c, g, or t
aactcttgcaatacaggagaaattctctgcaaacagagggattaagaccccacctctgcgacccccgtgacctaacagaagtaaagccacttgatcatatttatctcagagtccatttcctttcttgtgtctgatgcattggttcttgaatgtggaaaacctctttcccttggggtagagancctaccaccatgtgggacttaaggaccaggacagctgaataacacgtgtggcattctagacacatggccttcctttcagtctctaaattacgtatattggtttaaagaagcctttgtttcttaaaataagggctcaacgagacacaaaaaaaacagctggaaacaaaggggaaggggcagaggtttcaga

SEQ ID NO: 122057 - DNA, 476 bp, Homo sapiens
gagttgctcctaaagccatgtttttataaccaacatataacttaatatcttaaaggtattcttataaatactttcctgagaatgacttattattataagacaaatctaaactttcatccatctataatgttaatattatttgtaactataatttttgagttgtagggcaaatgttaggttgattggttaagtacatgaaccctgtccagattctctgtggtgtaggggcaagaaattactttgaatgaatttgttagtataatagatgtaaagaatttgttacaagttgtttgaattcagagataaacataaggcaaggagatatgtcagataagagagggtatgctggaacttcgctttctctagcaagggcttggtgttagcacagtactgtctcaccaaaacagtttccaacttaaactgaaaggccattatcctccacactaaattataaacttaattcatgactagatatt

SEQ ID NO: 122058 - DNA, 575 bp, Homo sapiens
tcatccctccatatgaggaggggagtgggaattggttgtgggacttccgtggatatccaaatcagtggatgctaaagtcccttacataaaatggcatagtatttggttatcatcctccccatacatcatctctagattatttatagtacttaatacaatgtaatgctgtgtagtcatactgtattttttacttgtatttttgttgttttgtgggatttaaaaaatatttttattctgaggatagttgaatccacaggatactgagggccagctgtattcacaacccaaatcacatacaaagcgacaagttcatacacaataggcctattagaacaggactgttctctcttgtttatcattgcagcctttctagcacaaagcctgggacattctggacatttagtatgtgttaaatttctcttactacattatttccaacagtatttactgcaatctgcaattaccttccttttgttttgtaactgtgtcccccactagaatgtaagctctgtgcagatagtgtctcatttattgatgtatccctggcatctaataaaacactgacaacacaagca

SEQ ID NO: 122059 - DNA, 874 bp, Homo sapiens
cccggcctcccaaagtgctgggatttcaggcctgagccaccacgcccagctgcaaatattttttgattactgtcttccattataaaaataattattcagtctacctttatgggtaacagtccaagtttacatggctgaatcagtcagctattgcccagtaaaaatcacaacagagcaggttgtcccaagcagagtaaaaaagcattcatatggaagagcagttgactgcagtgtgtcagaaccagacagtggtgaggagagcatcttagaggcagcccagaatgtcagtctaccaagcagaggaggtcactggcatagagtcctcaagtcaagcagtgtgagagggcattccagtgaaggggtgccctggggtgatgatgtgtcagagagcctagcaggaagaggagggaatccatattggaattcaacaaggagagtcaaagcccaagcagtgtgaggaaggcttacatgtggggtaggaggcagcagtggaaaaaggacattggtcacatataggaaaactgattaaataaatgtgttaattataactggagccaggccttgcactgtagaagttagttacaaatatggaaaggagaaaattagaacaatccttatatagatattttttgagacaaggtctggttctattgcccaggctggaatgcagtggtgcaatcacagcttattgcagcctcaacctccccagggtacaggtgatcctcctacttcagcctcccgagtatctgagaccacaggtgagtgccaccacgtctggcaactttttgtgttttttgtagagatagagtttcaccatgttgcccagactggttttgaactgctaggctccagtgatctgcccgccttggcctcc

SEQ ID NO: 122060 - DNA, 858 bp, Homo sapiens
actcctagcctaagcaaactgcctcaagccatctgctcacctttacctcccaatgtgctgggattacaggcatgagccactgctctcagcctaagaaaaaatatttttaaagttgacaaatgtagaaatgagctaagatttgtcaaagggatcaataagtaatgaaatattctggttatcaaagtttatcatatatgaatgaacagtgaaaaaattggaaataacagaattaacaaattttaatttgtctttaatggttcagcagtcacttaaaaatttttacagtattaccatgatgctatagtctttatcatcacaaatcccaacgtaaagataaaaaaaaaccccacttaataaaatcattattcaagctttctggctcttcgacttgggctaaataagtgttctgtataatggtatgtccttaaagagaaattatctccacctactgaaaaaaaaaacaaaacagcgagggcctatcaatttgagagtttaaacaggcctgtggttcgcatttttatggaagcatcataatacaaccccaagacatcaaatgtcactagcacagaagacatctaggatccaaagttcttagaagaatattacttttaaaaacattagaaataatactttacgtgggactcaaccttgactcttctttcttcctctatatccaatcaattaccttgtcttgccaattttacctcctcgatatttgttgagttagtccccttctatccatacttaccattactactactacctggtaggctacctggatcatgcgatagatgcggttggagtgggtctggggatcctcaagggaaaagccagaagatagcagggcggtttcaaaca

SEQ ID NO: 122061 - DNA, 630 bp, Homo sapiens
gggatggtgggaatgggaagggactcaggctcagagggacccatgtccagtgtggctgtggtgcataggctgagggtgagatggaggcaaggggagctgcctcgagaagagactcatcatgggcatggcggggacaagggagggggtggtcatgaggcacaaagggtaggaaggttgtagccccagagaagtttatagtggggtcagtatcccagaggggagcaacgaacggtgtgggcttgggttcaaagtggaagagtagcatgacaaggccccaggacagcaattggatggaacagctagtgtccactggcgaggctgagcaggtgacaaagagtcagttgatcttttcagcaaatagttctgggggcagggggtgttaaaataaaattggacccttaatttgcactatatacaaaaattaactcaaaatgaatcaaagacctaaactctacactcaagaactaaaacctaaaaatttcttagaagcaaacattggggataatgttcatgacataggatttgacagtgctttcatggatatgacaccaaagcacagatagaatagaaagaactgacaaagtagactgatgaaaattcaaaacatctatgcatcaaagggcacaatca

SEQ ID NO: 122062 - DNA, 520 bp, Homo sapiens
acaaacaaggtgggaaatcattcccttggagtatgatgggagcttaccgtgtgcctggaactgaagtggatcttgagatgagctatctcatttaataatcctaacagccctgatattgtcccattttatactcaagggaccgaggttccagaaggctagggaatatgcttgatatgtcatcatgaataacggatagagccataaaccaactcaaatctacttaatgtcaaagccagttattcttaatagacttctctgatggatgagggttgaaaaagtcctgcccagcaatagggggaacgactcaaagacagctagagggctttgccagccagagggcatgcaggaactctgaagtggtgggttgttaagaactaaaatattccatttgcaccgcagagctcagaattaatttccactgtcctgatggagcaggtgggaaggaatttgacctctcccctttgcctagaaactggtcctttctggaagcttctgagcttgctatggaaaaaaaaaaaat

SEQ ID NO: 122063 - DNA, 295 bp, Homo sapiens
gtccctatagcctacgtgtagtgtacagagtacctgaaagttcccaagtgtcctatttggatgacatgaaggggttgaggcctgaccagatagccaaaatctggggtcaggattaagaagcctcagcatgtagtgttgttttgttttgttttgcttttacatcagaaagacatgtctgagaatccggtatttgtgtcaggaagagacaaaaaactagatgatcaggcaagagaagagggagaaggcagaggacatgtgaatctgaggcctcctccctgtgccataagatcatata

SEQ ID NO: 122064 - DNA, 122 bp, Homo sapiens
tggccaacatggtgaaaccctgtctctatgaaaaatacaaaaattagtggggtgtggtggtgttgtgcctgtgggcccagatacttgaggggctgagatgggagacgcttgagcccaggaga

SEQ ID NO: 122065 - DNA, 472 bp, Homo sapiens
tgggtttttactgtaccataaaaatgaacaagctgaggatttgacatcgagagaaaggttggtgcctccatggaaaatattttgccttcaggagtttaggatgagacaaaattaccactgggtaagggtaaactaactattgtgatggaactcagatattgaaattccacttgtgagtggcacaaaaattacagcgcagggaagatgactccatttctaagtataagttgattactgatgcaaacttggtttcaggatcctttcacaatattaccactaacataaccgttcctttaaaaatgtgaagaccggctgggcatggtggctcgtgcctgtaatctcagcactttgggaggccgaagtgggcagatcacctgaggtcaggaattgtagaccagcctggccaacatggtaaaactccgtctctaataaaaatacaaaaattagccaggcatagtggcggatgcctgta

SEQ ID NO: 122066 - DNA, 307 bp, Homo sapiens
ttctttagttctagtatcaaataaaccccctatttctgctttaaaaaaaaaaacagtgtgctagacctaaaaccagattcacaacatattttattatttggtatacagaagacacgcagattacacacttttcctaccatctttaacctcctaaactaataattcattcaaataagtactggaaaccctagtaaatgttttgtatttgtgggttagtaaatgttttttgacttgctaattcatgttaataactaagtggaaaaaccaagggcatagcacttcacaaataaaggtgaacaaacaacag

SEQ ID NO: 122067 - DNA, 1083 bp, Homo sapiens
attcgcggcggcgtctacgagagcagctggtgcctgtaattctagttcccttatgacttcattatttctcatcatttaattaacatttttcctaatcctcttcaaaaacaccttgcacaccaggattgctttttttgtttgtttgttttttatttttttaaccacagcagtacatttctaaaggatgcttagtgtatgattccctgggttggctacacaattgcaagtccctttgttaaaaattaaaaatttttaagatggcagtaacagagctttaaaccccaagtgccagacctgcataacacaggtttcctgcccatgaagctgaccctgatagttccagatattttgcctgaaattttcttttttaaagattaacatgtcaaactttatgcttaaatgttttgatatgccacagagaatagtaatttttttgtaaaataagatcattttctatctttctctgttgatgaggttatgctgggtaatatcactgaagctcttcctgagatttcttgaggaagaatattagaattatataactcagaaataagcagtgtatattctacttggagttgtaatgtctagaatgcaggaaccaagttactcaatggagttcaaaaatgatacttagatattcactgtccactatataattggatttggtcttggtcatttaatttgtagtgggatgtttggagatgaataattttaaaaagagtgtgtctattaagatgtgactattttcccaaaatctttgaaaggagacagcttggatcagctatagccctttttatattaatataaatcacttaggtggtgacgcagatgggttttaccagatatgctgaatttcacctaagtgaaatgatggtaatcttcttacacataagtcagaaataatataatctgatgtttgtatatacatacttttatatgtaaattgattagctttttgtcacatctgatttttctgtttgaataatatccagtatttatttgaataattttgataaaagtggaaaagttacttttaaagtaaatagtatttgaagatttgcatagggaaaagactagcctact

SEQ ID NO: 122068 - DNA, 320 bp, Homo sapiens
attcgcggcggcgtctacgagagcagctggtgcctgtaattctagttcccttatgacttcattatttctcatcatttaattaacatttttcctaatcctcttcaaaaacaccttgcacaccaggattgctttttttgtttgtttgttttttatttttttaaccacagcagtacatttctaaaggatgcttagtgtatgattccctgggttggctacacaattgcaagtccctttgttaaaaattaaaaatttttaagatggcagtaacagagctttaaaccccaagtgccagaccaagggtcgacgcggccgcgaattta

SEQ ID NO: 122069 - DNA, 418 bp, Homo sapiens
gcccgctctgcggtcctgccaccagtgccctctgaggtccatggtcccacggcaccacggccgcccagtgcactcgcctccacactgagttttcatttttcccagttaagccccatcttccggaaatgcagctccagagggtctctgtcccctcttgctggtggggcaagggtctgcgcatcagaccacatggacccctgcaccaccatctgctccgtcctctccctctggtcagctcagcttattaaacaagccttggtcaggaaaatctaaaccacttaaggaactgggcagaaagaaactgaatgcagggagaagaaggctggggagccaaggacaggagaggagacataggggagtcacagggacctgccacccagatccccactgcctgatgtcctggctgtggagggcacct

SEQ ID NO: 122070 - DNA, 606 bp, Homo sapiens
aatcttggttcacatcattctcctgcctcagcctcccaggtagctgggactacaggcgcctgccaccaccccagctaattttttgtatttttagtagacagggggtttcaccgtgttagccaggacgttcttgatctgatcctgtgatccgcccgccttggcctcccaaagtgctgggattacaggcctgagccaccatgcctggccgaacatgagccatttcaacccagtaagagcttctccaaggagagttcataattgttccaatgttaggtagtcttttctgcagtccaacctcagtgacttccattcttgctaaagctgcatttttcattttttctttttttgagagggagtcttgctctgtcgcccaggctggatagtggcactatcttggctcacttcaacctccacctccggggttcaagcagttctcctgcctcagcctcccaagtagctgggattacaggcattcaccaccatgcccggctaatttttgtatttttagcagagatggggtttcaccatgttgtccaggctggtctcgaactcctgacctcaggtgatctgccgccttggcctcccatagtgttgggattataggtg

SEQ ID NO: 122071 - DNA, 959 bp, Homo sapiens
cagagtaatcccagcggccctgcctggtcctggtggatcctggccgtgctgcccctggagcgcaaggctcagctggccatcctcggcatgacctcgctcaaagagcggctccttgccatccgacggatattagtcatcatcacgcgtaagatgaatagtcggcaagagctggctaatgccagggagagaaataattgatttttctctctgtcaaggtttctggcagcccttgtgcttttataaatgtcaggcatggacgaatagccgtccattcattgtgcttcatcaagtgcttgtggatgaggttccaaaatgggacgcttgccaaacattgagtcctcctcaaaaatgacaattctgtgtctggtgggatctgaccttgtgtgaggttagcctgaagtctgaatggagcccatagttggaaaacaacctaagaaaatctcttagaagcaggtgcttggggaatgcagttcactgacagcacaggaccctgcagatggtttacatgtggtttgggtttcacgagaaagaaggattcacttcccagtcagcatctggctctgccagatggtaaaggcgtgctttagtgtgtagacaatatgggggaaccacgtttttatctggaagtggatttcttagaacacaggctaaccaaaactacgcttaggctttgcgtgttgctgtgaagttgtctgtgaaatcgaataatcacaccattgttcagtgcaggagcccaaactagtccttacccaagaagtagtagcctctggatagaactgtgtttaatgtcctgttgtagtcccaggtgttgtaaattgcatgttgtaatcaaacgaatgtcaaaacataagaaagtataccttggatatagaaaaacctgagaacagtatcattcacttgaggatatatatatatatatttacacacaataaagtgagttaaaattgtatatgcattgg

SEQ ID NO: 122072 - DNA, 334 bp, Homo sapiens
agctgggacctgaaaatatcaatccccagccacaccaaataatcacagaaatatttaagtaagtaagctttgttctaacatgaacttcaaaaagaaagacaagtcagggcaataaaaacaagcagaaaacatccatttcatttaaaaagaatgaaagagagaaagggaaggagaaaaagaggaataataaagaactatgcccatgtttaacatggccacagttatgtgtaacaattcccataaagaagtgcagttcgtctcaaaaaaaaaaaagagtgtagttcatttccccaccccttgaatatgagctggccttgtgacttgcttcaaccat

SEQ ID NO: 122073 - DNA, 434 bp, Homo sapiens
tatgggcagggaggtggcagggcctgggcactccgcatggtgacggcagcatgtgcagcagctcggacgctggactcaaactagcgctagcaaagggaaattgaacctgaggagcctggggtgtctcgggaccaagaggtaggaaccacattgggctttggggctgccgagccccaggcacgtgctcccaccctgagctgggcccctctctccacacctgctccgtttctctttctctcactccggcctggctcccgtatgtcctctggagtcgagcgtgcaagcgttgggacttgcaagtgctcagtattccctaatctcgtgacctgagatgacctgagccttagacctcaccccaaattcctggagaaggaggtagactggcacagccgggccaggcactcgccaggaacaatcaaccatggcggaggggg

SEQ ID NO: 122074 - DNA, 841 bp, Homo sapiens
tggaggtcgcacgcgctggccaaacgggcgcaccagacacttttcagggccctgccaaagacctcccaatgtctactggcgtcccagacacaagagatccaggccaagactcacacttcacaagatacacagacacgggccttagggaacaggaaattccatgaaacttccatttacccaattagccggactcactgagccccagaatagggttttcaaccaactcctactaaaattaaaaagtaatgtgtggtatagattggaataatagacattggaggctacaaacgatgggaggcggagaggggtgagggttgaaaaattacctattgggtgcaacattcactatccgggtaatggggcactagaagcccactccaccactatgcaatatatgtatttgtaccccgtaaatctataaaaataaaaactacattaaaaataataataatgtctggtcatctaaatagtacctctacagcttattaagtgctctggagacgtcccagttgcctgtccttcccattaaaggtgatatccagtgctgatttccccttcaacctcgggttcccataaacctcttctttctcactcctgctgccctccggtactccaataaagaatgatagatgggccgggagcagtggctcacgcctgtaatcccagcactttgggaggccaaggcggatggatcacctgaggtcaggagttggagaccagcctggtcaacatggtgaaaccccgtttctactaaaatacaaaaattagctgggcatggtggcgggcctcagtaatcccagctactcaggaggctgaggcaggagaatcgcttgaacccggg

SEQ ID NO: 122075 - DNA, 253 bp, Homo sapiens
tgtttagttatatctgaaggattaaaatataagtcaggggactttggagattcaaaatattcaacagatgatggtggggtataaaactgatctaactcagatatttcttcactggttgtacttcccacaccaatggaaatgtcagactcaggagaaagtggacgacctagtgattcctgtttctggttgtagtattcatacacagtgttgaaagttacttcttccacctccattgaagtgattgattcactct

SEQ ID NO: 122076 - DNA, 208 bp, Homo sapiens
ttctcatgttaaaaccacaaaaccctatcagatattaatggcagtcaatgaatgtggtaacaacctagtggaaagtatatgggcatttattagtctttccactatttggtatgtttgaaattttttcctttttttttttcccttttttttgtttggagacagagttttgctcttgttgcccaggctggagtgcaatggtgcgacctct

SEQ ID NO: 122077 - DNA, 133 bp, Homo sapiens
agggaaaatagtgcaccgggaaactgcaaagagttcgcgattcctgaaggatagtagaaggccagagggcagtgaataaggaggactgcaccaaatcagcagcagtggagtgatatttaggaggtggaataat

SEQ ID NO: 122078 - DNA, 421 bp, Homo sapiens
tggggccccacccccagagattctgactgctgcatgggtacaggaatgtacacctgatgattttgatgttctagccaaaatttccacccacaggtcatgattttccacacctcccagtgtttgcataggctgtcccttcagcctggaccaccatttctccacagggtcatcttttaagactcggctccgccaggcacgatggctcacacctgtaatcccagcactttgaatactgaaagtagggctgggcatggtggctggaggccgaggcaggtggatcacctgaggtcagcagttcaagaccagcctggccaacatggcaaaacctcatctctactaaaaatacaaaaattagccggacgtggtagcgcatgcctgtaatcccagctactggggggctgagacaggaggattgcttgaa

SEQ ID NO: 122079 - DNA, 273 bp, Homo sapiens
gttagagtaagaatgctagattagattaagaaaacctggttaatgccagacagaaataaattataatctttagtgttaccttatcagacagaaattatttgtatcactgctggacaaaaatctataggttacgttgtaattgcattaagtctaggacttttaatcagtagtaaacaatgaactgaataaagtacaatttccccacataagtaatctttgggatggcctgtcattattttatgacattgaagtgacattccacttatcttttgc

SEQ ID NO: 122080 - DNA, 354 bp, Homo sapiens
tctcagtctgagctaacctcatggcagagacaactagttgtctcccaaaatctgttcttcccttcttcctcagtattagaactactaaatattctctggtcatctagaatagattattatatcccagtctcccttgcagttatatgtagccatgtaatttggccagtggaatgtaagtagaaatgttgtctattcttctttgctccttcctgttgactggattgttgatgggatggctggatcttgggcagccatattgaatcatgaggtgcaacccatactgaggaaggtggaaggtaaagctgcccatctgccctgtgctcactgactctggacttctgttacatggcagga

SEQ ID NO: 122081 - DNA, 392 bp, Homo sapiens
cctaattacggactgtgggtgataatgatgtgtcaatgtggatccatcaattgtaacaaatgcacatctctggtggggggatgttcataatggaagaggctatgtgtttgtgggggaaaggggtatatgggaaatctgtgaaatgagttaggtattatcattacatcaatttacagataagaaaatcaaggcacagaagttaaacaatcttgtgcaaggtcacaaagctaatgagtggcagaggcaggctttgaactcaggcagcctatctcaaggccaaaagcccactctcctgaccattacactctgctgccaccaagtcatgggcacaccaccatttatcaccatgtattccatacttcagatcagcttttccctttcatggcacatga

SEQ ID NO: 122082 - DNA, 304 bp, Homo sapiens
tgaaagatcatttcatacatccccaaacttaagtgaatcaaaaccattcaaaactcatgataatctctcacagaatgtgattaattatctccaggagagggagatggaacatgtttcctagaaaactcattctaatattccatgaccttcactctcagataatttttctaattaagtactttgcatttgaatttgaacccatgttttcatttttgagttggagaccaaaatctgaataacagccatttctattgttgatcacaattgtttatttatccctcagcatcttctccaactgaaacag

SEQ ID NO: 122083 - DNA, 417 bp, Homo sapiens
ttttatcagctgcaacaaaaagtaaaacaaaactgttttactgttactgttatccttgccaaatataacctctgtaaaaagtatggtgaaatatgttcatacatataaacatgactgcaggcgacagagcagtctttaacttataagcaacctaaaggtcatcttgtattaacgactctgctaaagacatcttgacagcacgatatgctaaagatttctttccaggctttcaaagaacctatctgtaatataccaaactgtaatttttctaccttacaagaagaacggttgggtatttacactttttacaacattcatccttatattgttcaaatatacagtgaacatgtgctaatttcataattctaaaaaaagctaatttaaaaaactacccataatattattgagtaacatgta

SEQ ID NO: 122084 - DNA, 418 bp, Homo sapiens
gggtgggaagcgtctttggaccctcaggctcctggcgtagacttatctcctcttctgaggttcaaatgcacattctacttgccaacccaggctctctcccatgtcaatttcagaaggcagtcaaagcaaacatttcttttctaattgtgtcacctttccctgttaaacaacctcctaatcctaaacttgctggtgcgaggaggcctcattcctctttggcccttctgtccatctagggtgaagggtaaatgctccctcacacctctcggtggggggtcacacccaacacaggtccttttcccttctccgtgtgggcccctgtgcttccctctcttcctgacctggcacagcaggctcctacagccttggtgtctcctgttcgtgcatctttggtgtgaccccacatgatgtgccttct

SEQ ID NO: 122085 - DNA, 310 bp, Homo sapiens
atgtcgggagcctttgctgttttgttgtgtatttaagtgaaatgtactttgatggaagttatttttctattgtagctgtggtttcttctggtccattttccttgtcactttctgcttaaccctttaagaaattaaatacaggcattatttcaaggagtgttaaataattttgccttctaggacacccttttgaggatctttcttcttttcttttcttttttttttttttttttttagctatttatatttagagatgagggacttgctgagtggcccagactggtcttgaacacctggccccacgtgatcc

SEQ ID NO: 122086 - DNA, 151 bp, Homo sapiens
cgccccagtctgagcgcacggctcctggcgccctggacgcgcgcgcgggccggtgccccccacccccgcccttcccaagggcctccaggggtgtcctgagccccccgccactgcgcaggtcccgagttaccgctggagggagaggggctgc

SEQ ID NO: 122087 - DNA, 512 bp, Homo sapiens
tccaaatgtggctccatgattggcaccaaaggcatcacttgagtttatatctcttaaaagctttctaaacctgtttaaaatattgctacctactgaatcagaaactctggggagtgggacccagaaatcccttaacaagtcttcaggtgaatctgatgcacaccaatatttgtgaaccactgcattctgccatgttttcagagttgataatcaaggaattctagcatataatgagaccagaagaaaaagggagaattataactagtagatcaagtttcctaaaaatagatttacagggctacaaggtagcttcagttaacatagtgagtgtgaactttctcaaactcaaaaatgcttatgatgggatgaaaaatagatcctatcacatgtgtcaagtcaaactagttggctgtgactacctgaaacactctgttagtccattctcacactgctataaagaactacctaagactgagtaatttatgaagaaaagagatttaattgactcacag

SEQ ID NO: 122088 - DNA, 1099 bp, Homo sapiens
cagatcatgaggtctggagattgagaccatcctggctaatacggtgaaaccttgtctgtactaaaaatacaaaaaattagctgggtgtggtggcgggcgcctgtagtaccagctactccagaggctgaggcaggagaatggcgtgaatccgggaggcggagcttgcagtgagccgagatcgtgccactgcactccagcctgggtgacagcgagactccatctcaaaaaacctcagtggtagttgtctgctatctaaggctaacaataaaaggctgttacagagctgtatggcagggccacccctgtatggagggcagactccagacctgtagagccatcagcatgcaatacttgcctgagagagcccaggtacctctcttcaactgctgagagctgctgggttggaactgtgcccatcaaaaccatggggtagggctgccccggggctttgggggtccaacccccagcccaatgcatcctgaaggcaagatactgagtcaagaattattctcaagcttcaagagttaatgttgttggccttttgggtttttaacttacttgggacctattactcctttcttcttgcctatttctccctcttggaatgggaatgtcagtcctgttcctgacccatcattgtgttttggaagcacatgtatttgatttcacaggctcacagctgcaggagaagttgcctcaggatgagtcatggccttgagtctcatccatatctgatttaggtgagactctggactttatagttttgagttggtgctggaatgagttgagacttttggggctactgggatggataaatgtatttttgggttttttttgtttgtcttttgagacagtgtttccctttgtcccccaggctgaagtgcagtggtacgatcttggctcactgtgaacaacttccgcctcccaggttcaagcaattctcatgcctcggcttccaagtagctgggattataggcatacaccaccacgctcagctaattttttttatttttagtagagacagggtttcaccgtgttggccaggctggcctggaattcgtgacctcaagtgatccgtctgcctcagcctcccaaagtg

SEQ ID NO: 122089 - DNA, 334 bp, Homo sapiens
tacaaactggttcagttaaggaggaaaaataattgaatttgaaacaatatacgtaacacgtagaaactaaatagtctttaatgaatacctactagcttgaaatctcattagggaaaagagttttctcaagtgtatgaagttattaaccaagagcagtgaaaagctgacataacatatgtcagtagagactggtatttcccaaatctatcgaacattgaaaacttaaacatagtaatttattgaaggcactcccatagaatcctatctgtggtgtactcagattaaaggaggtagtgaaaatgaactcagatgaattaagtgattgttccccgct

SEQ ID NO: 122090 - DNA, 443 bp, Homo sapiens
atcaccatacgggggcttccctggcaaggcccatctccctccctgacagtcctgccattgagggatccatctaattttatgtacaactgtaaagatgaatgataagtagaaaggatgaaggcaagaacaagatgaataaattataaagggcaaatgatgacaagacaggggtccccagagacagtgatatgataacagaaactaaagacgaatttatgatggatgtagttagcatgtatggaggctgttaattcttcggggtagttttacaatttctagtgatcggtgcaatcaaagcttttcattttagaaatgggatgtatttccacttgtttgtcctgtaggcacagtgttggtttttgtctctgaacagtgagtctgggtcccatcagcacctgcatcttccctcccagcccctgccaccttctgtttctctgcagaga

SEQ ID NO: 122091 - DNA, 341 bp, Homo sapiens
ctgtgcgtctcagggttgccaagcccacctcagtccccagcgcatgatgggtgctcagttaccacctgaggggtggatggctagatgacctcctccttctggagaagccaggaccatggacctgaaaggggccgcatgatgttgtcctgtcccctctctgtgtgtgccctgtgctgccagcagccggcatcgattggtacttggctcaccaagggggctggtacgttttggtggtgagatgcctgaggcctggtttgcttcactgctgaagagacacctgtgatgtgctcttctgccctcaggcaaattcacctaccccgtccccacccatttatccactc

SEQ ID NO: 122092 - DNA, 85 bp, Homo sapiens
tgattcttggagagaagttagggttgttttagcctttacctacatttcagtttaaggcttatccacaatctagaaatgcaatgtt

SEQ ID NO: 122093 - DNA, 396 bp, Homo sapiens
tcagcctcccgagtagctgggattacaggcacccgccaccatcccgggttaatttttgtatttttagtagagatggggtgttgccattttggccaggctggtctcaaatccctgacctcaggtgattcgcccaccttggcctcccaaagtgttaggattacaggcgtgagccaccgcgcccagcccactgttatattttctagctgcagcctaactctcttccctaggccttaaacctcttcacacctgaactcttccaatattgaatgtctaaaatgtgtgccctttttctcagcccctcgctgctcctcctctagcctctttctacaccacacattctctgatcaccacacattctccgcctgaagctgcggcaggaccaccaatatcctccaa

SEQ ID NO: 122094 - DNA, 794 bp, Homo sapiens
tcagaggtacatgtgaaggtttgttacataggtaaactcatgtcattgaggtttgttgttcagatcatttcatcacccaggtattaaacctagtacttaatagctatttttttctgctcctctcctaccctcttcccaccttccaccctcaagtagaatccagtgtctgttgttcccttctttgtggtcatgagttcacatcattcagctttcacttataagtgagaacatgtgttatttggttttctgttcctgtagtagtttgctaaggataatattttacttttttttctgtctttctgaataatttaaaactgctatgcaaataattggataaaatatttctgtgttttatatataaactatatttaaactatatatataaactatatttaatatagaatcaaagttgtttcataaggaaacacttgacataggatatttgaaatactctaagtagtccatgtcattgtaacaccactttaaaagattccttcagaactgttccactgagtgatttctaaaatggaattttacagtacagtgaatggatatatgaatgtgtgaaaaaataaatacaaacctattgttgctggcatacatgatcattacaccatgaaatacttaaatacatagggcattaatcactgcattatttactcattgtaatttcatttacttattgcaagcaattattgtaattattatttaatgatgagtctgtgtgagctctggctcaaactgcctacagtattccttaaatttcagtgaagaaaattaaacaattaagaaga

SEQ ID NO: 122095 - DNA, 241 bp, Homo sapiens
attaatgattatattcttgatttattcatgaaaatgcggtttttgtaaactaggtaagtaaagtcattttcaagggacagaccagacattacattttggagcatttcatgttaacttggtagaataggagagtgttagatttttagagtaggaaattctgataaatgttaaggctaattcaatcaaaagcaaactcaacccatcattaatgatgctttgatttcaaacacagagttatctg

SEQ ID NO: 122096 - DNA, 252 bp, Homo sapiens
tctgacagtcctattaggtgaatattattacacatgcagaaatgagaactgtgagaagttaagaaacttgattaaaaacacacagcatgccatgcatcattgagagcactgtgatagagagaccgagaactagggcaagagtgagagtgagagctggagagaggcagatgttgggtatgggatgttgagtaggtgtccctgcaggggagaaaaaaggagaatggaaggtaaaggagtagctaaattctggcc

SEQ ID NO: 122097 - DNA, 213 bp, Homo sapiens
tcctagctgccctcgaggtgatccatccatgacagttacaccagggctaaggcagagatgagagagaaatgggcctcttgggaaataccccaaaatgaatggaaacctgggggttccacccttgctttctccttcccccaacaggagaaactgcaggccaatgagatctctttcagcactgccatggcttgggggagacctgagcaagccagg

SEQ ID NO: 122098 - DNA, 547 bp, Homo sapiens
aatagaggatataacctccatactgtagaaggaaaaagaatggcataagaaaacaaaaatagaacttagtcaatccaaaaaaaggcaagaaagacagtaaggaaagggccactggttttgtctcttctgtcccagcccatgtgtgattgcagatgggtagatctgctgctttgcatcagactcagggccttggcactcacatccagccccatggtgccgtcccagctgtcagacccaggtgcttgcttgccacaccttgaagtgatactggcggggagctcttccctgctcctgggaagactcccccaaagcacatcacagccccttgcatgtcttaggcgctttccaccttctctgtgtctgttttctttccccctatatgcccctcccttacccacttcctggatgaatttacaaatttctccttaatagacctcaatggattagaatcataatctccaattctttgtcaagagtaaggtggggaagagaggccttaaataatccattttggtgttaaaatgtttctttttggctgcccgcgtgg

SEQ ID NO: 122099 - DNA, 451 bp, Homo sapiens
aaaaatgacagtcctgggtggggtgaaccctattgtgcagggaatattcaaaataatctgggctgagagtcagtggatgtgaattgaaggcccaactcgatctgttagttgctaaaaaaccttgagcaagagtgactaaaatgctgggccttggttctctcacctgggaaatggggagatagaagctatagccctgcagtcctcactgggcagatggcaggtaatgtgcattaaagtgctttattacaaacaaacaaacaaacaaacaaaaacaaaaacaaaaaacgaaaagaaaaatggtaacacctaggaagaagttaccttttatgggaggatataaagtcactaatggggcccagaccccgacctgattgttctccattcttaagcctcactgttcacagggctccaagacacctgccacctgggctgtctcaggcattcagctgac

SEQ ID NO: 122100 - DNA, 266 bp, Homo sapiens
caggtgatccacctgccttggcctcccaaagtgttgggattacagccatgagccaccgcgcccagtccctcacattgtcttatttaagtctcctgatagtcccgtgaagtagcttagggattgccctcatttttcatatgagtatactgagtaagcattagagagctggggtctgcaggactctaagccctccataatattagcccctacactctgtacagaaggtggtacataaaggcatttttaaaaatgtccagcccaactga

SEQ ID NO: 122101 - DNA, 500 bp, Homo sapiens
agcgggtgatctagagcatccgtgaggggttcggtctctccgtcttcctagaccactgcccctggctcccaatcacttctgccatttctagtccccaccccattatctctaccctctgtctctggctcctggcccctgtcacccaggctctcagagcctatagcagctcctctccccagtgttctcacatccacaccttcctgccccctacaagcttctcttcgtagcagccacagctggggtgtggcttggcaacatctcagctcccctttgtgcctgctgaccctgaccactggctccccaggatgacattcctgctgagcaaatgtgcccaggatctgctgccctctatcccaaaaggttctaggtcatacccaccttgggctccatccactctctggcctccaccaaggatctgttgggccatgtggccaatgggggccaccttcctggaggcctctaagaccagcagtgattccacccatccctgccttcctgcc

SEQ ID NO: 122102 - DNA, 380 bp, Homo sapiens
ccatcttacaagggtacctaatagtacctaccaagtaggttactgttgttatccctattatatcacaaggaaactgagacacagaagttaagaagctcgcctagagtcatgtactataactggctgagccaggatttaaacctaggcactctggttctagagttttctagagttctcgttctttttttttttttctcttttttcttttgagacggagtctcgctctgtcacccaggctggagtgtagtggtatgatctcagctcactgcaacctctgcctcctgggttcaagcaatccccctgtctcagcctcccaggtagctgggattacaaacatgcgtgcgccgccaagtccggctaatttttgtattttcggtaga

SEQ ID NO: 122103 - DNA, 777 bp, Homo sapiens
aacaggactgagccaaccagtcctgaggcaaccaaacatgagtccaccaggcatgtggcaaccaggcgtgcaacaaccaggcatcagccagcaagtcccaagccacccagacatgagtcaaccaggcatgagccagcaagtccccagccaaccaggcataaggcaaccagacactagccaatcatgtaagaaccaaacagacatgagccaaccagacgcaaaccaatcaagtttatcagattccaaccaaacaggtataatccagccaagcccaagcttacttggtatgaaccaaatggacatgaaccaatggagtgcaagcctatatgaaatgaaccaagtggacatgaaacaaccaagcatgagccaagctggcatgaggcaatcaggtacaaacctaccagacataaaccaacctggcatgaaacaaccaggcacatggcaattaggtaggagccaaccaggcatgtggccacaaagcctgagcgaactagtcctgagtgaagcaagcataagccaaccaggtccaccgcaacgagccccaagccaatcaggccccagacaatcaagcacgagccaagcaggcacaaaccaatcaggtataagccaaccagtgatgtggcaactagacatgagacagtcaggtgggagccaaccaagcatgagacaagtaggcaccagccaatcaggcacaagccaaataggcatgagccaaccaggcacatggcaaacaggcctgagccaaccagtcccgaggcaaccaaacaagagtccacc

SEQ ID NO: 122104 - DNA, 457 bp, Homo sapiens
gacacacacacttttctactgctttgtcagttcagtattgacatattgaacgtattgagaatttattaatatataatatctctgccactagtaataaaataaagattaatcttgttaaattactctatacctatctgagaagtgaacaatatagtcaactgctagagaaaagatatgcaaaaaacgtacagtagttcacaaaaaaaagatacaaaatggccaatgaacacttgaaagtatgttgtctcacagcaaataaatatgtttttaatgagatattattcttttacttatcagactgggaaaggtaaaaaagagtgttaatatctagtaatggtgatgtatggaaaacaagttcaaattcaaattggtatagttctcacatttgagggcagtttggtaatctttattaagacttaaaaaaatctatactccaggccatgcaccgtggctcatg

SEQ ID NO: 122105 - DNA, 438 bp, Homo sapiens
gctctgagctcaaggagttgattttgttaaaaacaacaacaaaaaggttatctcagtcaaaaaaggccacataaagccctaatatgaaatgtccaaaataatcaactctatagagacagaaagtagatttgcagtagtctagagctgtagtgggaggaaggcttgggagttactgttaatgggtatggtttcttttaggggtaatgaaaatgttctaaaattgactgtggtgatatttgcaaaactgtgaagatactaagaatcattgaactgtacactttaaatgggtgagttgtatggtgtgtgagtcatctctctcagtaaaggtgttattttaaaatacgtatatatgggccgggtgtgatggctcagacctgtaatcccagcatttggggaggctggggcaggcagatcacttttgagctcaggagttccaga

SEQ ID NO: 122106 - DNA, 669 bp, Homo sapiens
tcacctggtgagattgattatctttagggaatggtgcagatgggatagtttctagacaatttgggaacctcagaaatgggagtacttatattagaatgacataaaataactttttgccccagggatcttgcagtaaagattatcatcacagttggccataccatgaacttttctaagttatttaaatttaccttgaaatgttatcagtgtctgctgtcacagagaataaatgtatctggtattaacattttactcatgcttgccttgcctttactaaatcttatcttgtaattgaagaacttgactatttttaattctgaatacaatatgcctcagaataaggttttaagctttaggtaaggtaaagtttaactttagtttgtatctgtgacacctaacacaatactaaggaattcaactgaatgagaaatttattctaggcatccaccatgttcaaaacatactaagtacctaggaattacttatagaatagatgtaactctattgaactataaatcaaatatcaacatacaaagttgagtgagcagacttgtttgcctcttttcattttttgttacactgatggataccacatgtcttaggtgattgggggtgcggtggctagtaattactgccattattgtctgtgatacagcagtgttcagatag

SEQ ID NO: 122107 - DNA, 505 bp, Homo sapiens
caccatgccttccttctctcagagtgcaatcttgttcttcaatttccaggcccctatctgctcacctctgtgcattcatcaccttctgccctcattatttgctcatatgacctatctgaacccatgctggctttccttacgcagagacaccttatcacttcatctctgcttcccctccaagcccccagggcctgaagcagtgattaccagcaagtatgccctaagctgagcttggggaagctccttctaagaagttattacatgaaaatgcttggctttccatattctaaaccatactggtcaaggaggtctaacggttgctatcccctagaatagcaaaggaaaacccccattcacaggctctgtctaaacagcagtgctgtcccaccaaccacagaagccaggagctgcatgtggcaactgagcgcttgaaacatggctgttgtgacagaggaattggtattattaatcttattcaatttaattttatttaaatagccacatg

SEQ ID NO: 122108 - DNA, 634 bp, Homo sapiens
ggaagaatctgaggtctccagtacaacaggaaagacagctgtgtttgtacctccagtacaacaggagggttagagaatgaatgctagaatgttgccagccctgatctagccccactgcctcatttcacaggtggaactaaagcccagctgaatgatttgttcttgctttctccttctactcgagatagaaccaggacctgaatccaggcctacttgtttctagtcattgctgttttcactataaccaggtctctcatatccctgtcccttttttttttcctggcttcattttcagatttgggagaacgatgggggaaaataaaaggaaaaaataaaatctatgttttttggagttccattacatatatatacaaaacatacacagcctttgccaagtgggagtaactcttctgctgacaaaggggtattgtgggatgggcagaagtgacctcgtctcctttcttgagcctcttttatacattccagctcagcccagctttcagattgttttacagggccgaatgcttctagacaatgctttatttcctaggatttggtatagctgagtttttaagtgtggaaaagagtgattatgaaaaatgtttgagaagacagcactgtcctcagagactgt

SEQ ID NO: 122109 - DNA, 583 bp, Homo sapiens
ttgaaaattttcacaggggtagattttaagtgttctcactacgaaaaaatgcatatgttaaatagcttgatttagccatttcactatgtatacatgtaggaaaacatcatgttgtacactacagatgtatacaatttttacttgtcaattataaacaacaacaacaaaactgcaaagtctccttagacccacccaatcacatgttgtctgctcatttaatgagtaaatgctatataggttcattctggacctgggtaaaatgatttacagactgggaccaagtgggaggaccctatttcaattcattaggtaaggtcttccaggtcaatatttgaccattgattggcacatctggggtatagttatttaactgccttctagtttacctcaatatgacccctcagtggagggaaaatggagcacaatgactagaagaatgttgagagatgaggaaagagagaatgggatggaaagaacataaaataggaaagcattgacattgtcacttcttggctatttcttcctgtaaaattttgcctggagtgccctacaatggggtccccatcctctgccctgataacat

SEQ ID NO: 122110 - DNA, 269 bp, Homo sapiens
cccaggctcaaaagactgttggagaaacgtctgccctggagatgaaaatagaaaatgattctgtgctgatacagtaattgagccaaaaagaaaagctaacaaagcaaggaatggttggccttgaatgcttatactggaagaggaatggatttcacctgatgttgtggtggaggcagctggggatttccaaggtgcctgtgggtccttccaatggcccaggctctttgcgtgttcagtttaaagcctgggcatgttcttcatcctccaca

SEQ ID NO: 122111 - DNA, 253 bp, Homo sapiens
catctacttaatcccaaaacatctattagtttcgtcttgtttcacctgattattttagctacataaaaggaatcaagttcatttcctctccaagcctcaattttctcatctgtaaaattgggaaggaactagcacccaccccatccagtgttgtgagacatagagaagatagcgcatacagtgagcttgtcctgatgccggacacatggatagaggcacatttagtaaatctaataatcatagtgatgcaaag

SEQ ID NO: 122112 - DNA, 602 bp, Homo sapiens
cccgcccccgcgtcaagctccttctcccacttcctactcccacacaacttcccagccactgaaacttttctttcaaatctctattatcctcttaacagttgcttgaataaatttatttttgcactatacattttctttttgccagatgtgtctaacaagtgtgtttggagagacctactcccagccccgtctccttccccgcctccccccgtcacattctctcaggccttctctggtatttataatatatcacagaagtacccagtcttatagccctcggttatgcctttttttgacattttattttttttaagctttttatatatatatatatataaatatattactttgtcaagtttttttgctgtacaaaagtcttaagatttaaaactattatttgtattatatgatggtggtatgttaatgttacaaaattattaatgaagaaaaaatttatttttgttactggtctgtttcataattcttttttaaattggtatattgtaagatatctatgcaaaaaatgttatgtgacgcatttttatttaagaatgtaatatgtgtaataaacagtagaatgtgtttggccttggaatacttta

SEQ ID NO: 122113 - DNA, 419 bp, Homo sapiens
tgcgtgagatggatgcacaaggaaagaagtggccagcagtaggaatcacgaaaggcttatcaagcaagtgaccactgtggtgggcctttcccggcagaagctaggacctttgttttaaaagacattgtaaggctgggtgtagtggctcacacctgttatcccaacactttgggaggctgaggcgggaggatcacttgagctcaggagttcgagaccagccagggcaacatggtgagacctcctctctacaaaaaataaaattagccgggcatgatgccgtacacctgtgctagctgcctgggagactcaggtgggaggatggcttgagcccaggaggtcgaggctgcagtgaagcatgatcacgccactgcattccagcttgggagcttgggttgacagagtgaaaccctgtctcaaaa

SEQ ID NO: 122114 - DNA, 2143 bp, Homo sapiens
  misc_feature (2143)..(2143): n is a, c, g, or t
ccggagccgcgcggccgaagcacccggcccggatcgcagagcccgcgccctgcgccggcggcaatgaagatctggagctcggagcacgtgtttggattttgggaaccagtaggacattgacatacatccgagaacattctgtggtggatccagtggaaaagaaaatggaactttgttctaccaatatcacactcacaaatttggtgtcagttaatgagaggttggtgtacacacctcatccagagaacccagaaatgaccgtgctcacacaagaagccatcatcactgtgaaggggattagccttggtagttatttggaaagtttaatggccaatacgatatcatccaatgcaaagaaggggtgggctgctatcgagtggataattgaacactctgaaagcgctgtgagctaaggaggcctgtgcctgtgcttgtcataaatggtgatgcttcccagaagaaaggaaagaaggaggtgaggagaggacgagcaaggacgggacggaagagcacgtctggctgcgagggcacacagggccggggaggaggattaggctggactgatcgcgggtcgcaggtgaccccgggaccagatgtccctcccctcatgagcgtgcaacagggagcagccccagccagacccaccgccgccgtctgcgtggatggagggctcgaggccctcgcccgtgtcccttaggggcggcgcccatcgtcctgcctgccgcggtggcccagccccttctctccctgcaggtgacccgcgccgcccccgcccgcccgcccacgctgtcctccacttaggcgcctccacaaacgctggcgggtgtgccgccctccagcctctccgcccccgtcccctcggtcctgcagatcaccaagcagctctcctgggcccgcggctgctccgggcctcacatctgctgctggcctcggtgggctctgactgcggggctcacggggcctggggccatggctttcttctcggcccccaaatgcctttcctggagtggctaagcctctcctgacgaggctcctcatgcggggagagggctggggtccaggggtttcccggccctttctgcaggctgtgccagccccctccagtctgccactgccgtgcccgggggacatcctgcgcccaggctggaggccctgcctcgctgcttgccagcctcacctgctggggctggaggccatggatccctcatagtatccaaggtttgagttcctgtttttcgccttatagttttgtgagtgtttgagggacaacgaccaaaggtcttttccccaccatctttaaatcaaagttgtttaaaacaacattaattttaaaaaatacataaaagcaacccatgcttatggttaaaaaagagtacaggagtctggagtccgttgaagggtaaaggcctcccgcaagctgccagtcggctctttttcgcaaagccttccagaagttttctgtgcttatgaaagcgtatgtgtggcctttctcttcccttcttttattaaacacagataggtttatgctggaaaaaaaaaaaaaaaaaaaaaaaaaaaaaaaaaaaaaaaaaaaaggggggggcccccattaaagaaatatcactccccggaggggggcgcccacatacgattacgccgcctctcaccccaagcgtttttttgtggtacaccaagggaggcgccccaaaattagagaagacggccgttatattataacagcgacagaggagaaccgagggcgccggcagtatataaaaaaaaacactgtgtacgatcgtggagaaaaaacccgctgcctaactgagggagaaactccttggtgggagaagagaggaaccccctcttaatcgtcagcggagggggggggagaccaacatatgggtgggacagcaaacaacctcactctaaaaggagagatattattaaacggacccctcaagaggaggagagacaactatacaaaacttttacaacggtgcgtattatagggggtggttaaaacacataccgctcgcaaatattatcacgtggccccagtctgttaaaaaagacttgcgagctctaacaagaggaattatgacgatttgagagacaacacttttttttaccaccaggagacgcctggtgtagtaaacatacacan

SEQ ID NO: 122115 - DNA, 2355 bp, Homo sapiens
  misc_feature (2355)..(2355): n is a, c, g, or t
atgttcacttgagcctgggaggtttgagtctgcagtgaccctgatggcaccactgcattcctgcctgctgggcgacagagtgagaccctgtctcagacaaacaaaaaccaaggggctgccaggtgccgaggcgtgcagccacccgtgggacacggtcatccaggcggccatgcgcaagtacccgaacccgatgaacccgagcgtgctgggcgtggatgtgctacagcgccgcgtggacggccgcggccgcctgcacagcttgcgcctgctcagcaccgagtgggggctgcccagcctcgtgagagcgattttgggaaccagtaggacattgacatacatccgagaacattctgtggtggatccagtggaaaagaaaatggaactttgttctaccaatatcacactcacaaatttggtgtcagttaatgagaggttggtgtacacacctcatccagagaacccagaaatgaccgtgctcacacaagaagccatcatcactgtgaaggggattagccttggtagttatttggaaagtttaatggccaatacgatatcatccaatgcaaagaaggggtgggctgctatcgagtggataattgaacactctgaaagcgctgtgagctaaggaggcctgtgcctgtgcttgtcataaatggtgatgcttcccagaagaaaggaaagaaggaggtgaggagaggacgagcaaggacgggacggaagagcacgtctggctgcgagggcacacagggccggggaggaggattaggctggactgatcgcgggtcgcaggtgaccccgggaccagatgtccctcccctcatgagcgtgcaacagggagcagccccagccagacccaccgccgccgtctgcgtggatggagggctcgaggccctcgcccgtgtcccttaggggcggcgcccatcgtcctgcctgccgcggtggcccagccccttctctccctgcaggtgacccgcgccgcccccgcccgcccgcccacgctgtcctccacttaggcgcctccacaaacgctggcgggtgtgccgccctccagcctctccgcccccgtcccctcggtcctgcagatcaccaagcagctctcctgggcccgcggctgctccgggcctcacatctgctgctggcctcggtgggctctgactgcggggctcacggggcctggggccatggctttcttctcggcccccaaatgcctttcctggagtggctaagcctctcctgacgaggctcctcatgcggggagagggctggggtccaggggtttcccggccctttctgcaggctgtgccagccccctccagtctgccactgccgtgcccgggggacatcctgcgcccaggctggaggccctgcctcgctgcttgccagcctcacctgctggggctggaggccatggatccctcatagtatccaaggtttgagttcctgtttttcgccttatagttttgtgagtgtttgagggacaacgaccaaaggtcttttccccaccatctttaaatcaaagttgtttaaaacaacattaattttaaaaaatacataaaagcaacccatgcttatggttaaaaaagagtacaggagtctggagtccgttgaagggtaaaggcctcccgcaagctgccagtcggctctttttcgcaaagccttccagaagttttctgtgcttatgaaagcgtatgtgtggcctttctcttcccttcttttattaaacacagataggtttatgctggaaaaaaaaaaaaaaaaaaaaaaaaaaaaaaaaaaaaaaaaaaaaggggggggcccccattaaagaaatatcactccccggaggggggcgcccacatacgattacgccgcctctcaccccaagcgtttttttgtggtacaccaagggaggcgccccaaaattagagaagacggccgttatattataacagcgacagaggagaaccgagggcgccggcagtatataaaaaaaaacactgtgtacgatcgtggagaaaaaacccgctgcctaactgagggagaaactccttggtgggagaagagaggaaccccctcttaatcgtcagcggagggggggggagaccaacatatgggtgggacagcaaacaacctcactctaaaaggagagatattattaaacggacccctcaagaggaggagagacaactatacaaaacttttacaacggtgcgtattatagggggtggttaaaacacataccgctcgcaaatattatcacgtggccccagtctgttaaaaaagacttgcgagctctaacaagaggaattatgacgatttgagagacaacacttttttttaccaccaggagacgcctggtgtagtaaacatacacan

SEQ ID NO: 122116 - DNA, 1535 bp, Homo sapiens
ccggagccgcgcggccgaagcacccggcccggatcgcagagcccgcgccctgcgccggcggcaatgaagatctggagctcggagcacgtgtttggattttgggaaccagtaggacattgacatacatccgagaacattctgtggtggatccagtggaaaagaaaatggaactttgttctaccaatatcacactcacaaatttggtgtcagttaatgagaggttggtgtacacacctcatccagagaacccagaaatgaccgtgctcacacaagaagccatcatcactgtgaaggggattagccttggtagttatttggaaagtttaatggccaatacgatatcatccaatgcaaagaaggggtgggctgctatcgagtggataattgaacactctgaaagcgctgtgagctaaggaggcctgtgcctgtgcttgtcataaatggtgatgcttcccagaagaaaggaaagaaggaggtgaggagaggacgagcaaggacgggacggaagagcacgtctggctgcgagggcacacagggccggggaggaggattaggctggactgatcgcgggtcgcaggtgaccccgggaccagatgtccctcccctcatgagcgtgcaacagggagcagccccagccagacccaccgccgccgtctgcgtggatggagggctcgaggccctcgcccgtgtcccttaggggcggcgcccatcgtcctgcctgccgcggtggcccagccccttctctccctgcaggtgacccgcgccgcccccgcccgcccgcccacgctgtcctccacttaggcgcctccacaaacgctggcgggtgtgccgccctccagcctctccgcccccgtcccctcggtcctgcagatcaccaagcagctctcctgggcccgcggctgctccgggcctcacatctgctgctggcctcggtgggctctgactgcggggctcacggggcctggggccatggctttcttctcggcccccaaatgcctttcctggagtggctaagcctctcctgacgaggctcctcatgcggggagagggctggggtccaggggtttcccggccctttctgcaggctgtgccagccccctccagtctgccactgccgtgcccgggggacatcctgcgcccaggctggaggccctgcctcgctgcttgccagcctcacctgctggggctggaggccatggatccctcatagtatccaaggtttgagttcctgtttttcgccttatagttttgtgagtgtttgagggacaacgaccaaaggtcttttccccaccatctttaaatcaaagttgtttaaaacaacattaattttaaaaaatacataaaagcaacccatgcttatggttaaaaaagagtacaggagtctggagtccgttgaagggtaaaggcctcccgcaagctgccagtcggctctttttcgcaaagccttccagaagttttctgtgcttatgaaagcgtatgtgtggcctttctcttcccttcttttattaaacacagataggtttatgctggaaaaa

SEQ ID NO: 122117 - DNA, 760 bp, Homo sapiens
atgttcacttgagcctgggaggtttgagtctgcagtgaccctgatggcaccactgcattcctgcctgctgggcgacagagtgagaccctgtctcagacaaacaaaaaccaaggggctgccaggtgccgaggcgtgcagccacccgtgggacacggtcatccaggcggccatgcgcaagtacccgaacccgatgaacccgagcgtgctgggcgtggatgtgctacagcgccgcgtggacggccgcggccgcctgcacagcttgcgcctgctcagcaccgagtgggggctgcccagcctcgtgagagcgattttgggaaccagtaggacattgacatacatccgagaacattctgtggtggatccagtggaaaagaaaatggaactttgttctaccaatctcacctgctggggctggaggccatggatccctcatagtatccaaggtttgagttcctgtttttcgccttatagttttgtgagtgtttgagggacaacgaccaaaggtcttttccccaccatctttaaatcaaagttgtttaaaacaacattaattttaaaaaatacataaaagcaacccatgcttatggttaaaaaagagtacaggagtctggagtccgttgaagggtaaaggcctcccgcaagctgccagtcggctctttttcgcaaagccttccagaagttttctgtgcttatgaaagcgtatgtgtggcctttctcttcccttcttttattaaacacagataggtttatgctggaaaaa

SEQ ID NO: 122118 - DNA, 581 bp, Homo sapiens
acccgggaggcggagcttgcagtgagctgagatcgcgccactgcactccggcctgggtgacagagcaagactccgtctcaaacaaaaaagtcattcaggtttggtggcacacgcctgtagtcccagctactggaggtggggcaagaggaggctgaggcaggatgttcacttgagcctgggaggtttgagtctgcagtgaccctgatggcaccactgcattcctgcctgctgggcgacagagtgagaccctgtctcagacaaacaaaaaccaaggggctgccaggtgccgaggcgtgcaggtgctgagccggcggccggggagggctcgcgggactcctcagatttgtcggaccagcctttcattaaagtgaagagactagcgcgttgcccaggcctggcgcggctttttgcactccccgtcacccttgtcaggccccggccccggcagcttgctcaccaccgcactatgctctcaccgcagccacccgtgggacacggtcatccaggcggccatgcgcaagtacccgaacccgatgaacccgagcgtgctgggcgtggatgtgctacagcgccgcgtggac

SEQ ID NO: 122119 - DNA, 273 bp, Homo sapiens
ggtacttgaggacatactggaggcagacccatctgcgattacatcccaaccgtgctgtgttgctttgaacaaggcagccacatctccgaaccactgaaaaaaggcataataatgatagctggatcctgggatttctggattctgtaaaaccaattgtgtaaaagttctttgtaaatggttagatgtgcctggtttcttcagtaatcagttatttttgaaattatttttaatttgtcccatagtaaggaatatattttaatgttgtgatgggca

SEQ ID NO: 122120 - DNA, 780 bp, Homo sapiens
atctgaggctttcttcacagctagctgatcggatccttgcagctgtttcttctgtaggtctcggagctcactgagaacgtccagcacgccttcccggcggggcccggcccaggtgcgcactagatgaggcagtcaaccaagtcaattggttcccgatcaactaaatctctcctaaaaataaacactgccgcgagcttcgagagttcagcgtgtcagagcctctatgatggcagagcacctgccgcgatgcctgattggtagggagaaggatttcccgggagggggccaataccaaattttagggctgttaggctctgagcagtcccttcgtgaccggataagtcagagacccggggtttgagccttgcccggcgctgagcggagggcccagtttcgggaccacagccttgctccctgggagctccgggcggccaatgccgggcaagcccagcccggcacaggaggaggcagggcccgtctccggaaagagggccagaggcagaactgagggcctggttttgtgtaattcgatttggatacaaacaggccagacccaaactggaaacggcgaagggctggattagcaccgaagggattcgaggaggcaaacgggaagtaaaaatgctgtgtggagctgcagagggcaaggggacaggggttgcaaaggaaagagcttcgtgagactttctccttcccggcgtagggaccagcagagtgcgggcaggtcagccctgtcaccggttcgtttagggaaaaagcgcgacatggggcctgggagac

SEQ ID NO: 122121 - DNA, 538 bp, Homo sapiens
cagagaaaattacagatttggaagatctacaaaggacccatcatatatcccagaatagaaaactcaaataggggaacataaatatttaaagatatcattcaagaaaattttcttgaagtaaaagaagataaatctacaaactgaaagggcacaccatgtcttggggaaaatgacaaaaatctgtcaataacaaggtaatttctatgaaagtaactagactaaaaatataaaagaaagggggaaacagctaaataaaaaagactttggacagtcaagtgaaaacatcaattcataaagggtaacaaaatagaagttagactcagactttcccacagtggcatttaactctagagacagaagtgacatctgtgaagttctcaaggaaagaaagtgtggcctaagaattttatattctggaaagctgtcaatcaaacacaaagactagaaacctttttgaacttgcaataactgaatatttttttttcatttagtcccttttgattaaactactggagaaggaatttcagcaaatcaagag

SEQ ID NO: 122122 - DNA, 107 bp, Homo sapiens
tcttacttctatgctctgccaggaggaaattccggacttttgtctctttatgatgtaattactggttggggagggccccaaatattcctggggaagggaggcctgtt

SEQ ID NO: 122123 - DNA, 165 bp, Homo sapiens
tacctgtatttagtgatcaggtggagcatcaggcagctgagggacagagcttcagacctcagggtgtctgttcagagagaaccactacagcagagattggatgagggaaatcaagcaggcacttagcatctccaaatggtctgtgtagaggaatgctgacaaagg

SEQ ID NO: 122124 - DNA, 272 bp, Homo sapiens
ataaccccgtttgggaaatactactaatatagctgtttcacagagatgaaaaccaaggcttagagattaagctagatgtcttagcgcctgactctgaagttcttcccctactgcctatagggatactattgtcagtaacattgtttgttgaacaagtacctatgtgctgggcataatgaaaaaagtagacaaaaatcctgctttcagccgggcacagtggctcatgcctgtaatcccagcactttgggaggctgagactggtggatcacgag

SEQ ID NO: 122125 - DNA, 233 bp, Homo sapiens
ctgcagtgaaactttggaattttactattttattaaaattcacatgaaggctatatattaggacacatttgcattacaaatatatgtaatatatttgtataataacaatatcatgttcaataatctgaaatagttttcaaaggtaagtcgtgaaagtatgactttcttcttggggttatatcctgtggtgacttaaaggtgttttttgtgtttgagagtttgtgcttttaagc

SEQ ID NO: 122126 - DNA, 398 bp, Homo sapiens
attcttgttcctcatagtcatattttcattgtaaatgtcttcacgacactctgttatacaaatatatcataattatttaatcatttttctattttggaacacagcatttgcttttactttctccttattacaaataacatagctataaacagtacatgtatctttttccttcttttgaattatttctctggaagcaattcccaggagtggaattattaggtcaaaggatatgagtgtctcttgacaagcattgccaaatcagccctggccttccttccttttgcaaagactcactgtatgtacctggtgtgtacaattgcaggctcagcgagatgtgccaggtaggagacatgaggtgagagccctccactaagccggtttagcaaagagccctttcc

SEQ ID NO: 122127 - DNA, 323 bp, Homo sapiens
ctccttctttataggcgaaagaagcagttaaatcccaattttccatgtccttcctattcagaataggcacacggcttatttacacactgtgagatctaaaagtttacaactttacgacttacagactgtgcggtttaagagaaaggttcccaccagagccaatgagaggaggtgtgctcccaagaaaataactgctgtgcctccccctcagccagaaatgacctcagacattcaccggcacactgcagactgtggtaatgtgacactctagagctcctaaatagaacgcttttattgttatttttgtctttttttaaattatg

SEQ ID NO: 122128 - DNA, 704 bp, Homo sapiens
gtcacctgaggtcaggaatttgagaccagcctggctaataccatgaaaccccatctctactaaaaatgtaagaattagctgggtgtggtggcgggcacctgtagtcccagctacttgggaggcttagaggggagaatcgcttgaacctaggaggcggaggttgcagtgatctgagattgcaccattgcactccagcctgggtgacaagagcaaaactccatctcaaaaaaaaagaggtgttgttccccttctgcagatgaagaaattgaggctgagaagagaagttgcccaagatgatgaagctaataagtgacctatccaggattcctgctgatgcctaagccatgccattctccccgcatagcagtcatctcagatagacaaccttcaggcattccctataaagctcaagccttccagcagccttgggacttcccaggcatgggattttccagtcttatttaactgctttccatcttcacattacaatctagacctggtgattttgctgatgattgtagtttggttttggatacatttaaacaaaagaacatcttcatcctaaatcttctctcccagcatgtattcataatcttgacctgcgtttcgagtagaagccaattcttgtagagtgtgcctgggctcagcctaggctcctcactcatggtgagattcaggctatgcatttttggcgggagcacccc

SEQ ID NO: 122129 - DNA, 1079 bp, Homo sapiens
acacacacatacactttaagttctggggtacatgtgcagaatgggcagtatttcttaatgtccttctattccctcataatacttggtgaatactctgacaatatgagtgctcaagtattaaagtattaagttagctcttgctgcctagatatgactccatcctaagccaagggatgacagcacttgactgcaaactctctatggcaacaaattaccagaccacctggtaatgtttgctgtcctgatctagaattccacagtccctgctgtggtttcctggttggtcttattacttgttggaatcagtttacatcttcattctcgtttcatttccagcctctgctaggcggaatatgtgatagtcattattcatcctccgaggatcagagaactctctttagagccaattcaggtaccaagttatcaacttcagaccttgcttgggtgctccttggaaacacagattcctggaatcttctaggtttaataggtttgtatagggcctattacatctatatttttaaaagctcctcagattatttcatgagcatctggatttgagaatctatgttctagattcttttcacattcctccttgagaagcaattaccaaagtacaaagtgaagaaacttaggaaggaaagttgtttaacagaatttgcaagagtgttggttttttactggcttggtaactggtattagtccttaatagcttatgaaagagggtcccatgtgcctcagtctctctcttttctcagttactgaaggcactagaatgtggaatgtgtgcagctatgccctgcctcttaaatggaaagccaaagaagacagaatggtgaagaggttaagagcatggcctctgaagtcttgattacatacgtttgaatctgtctgtatctcaaagtttccatctgtataatggggataataataattaataatacctgccccagggagtttagatagagaagatgaccaagagctgagccctagaatatttgggagtctgaggtgagaggattacctaagaccaggatttcgagaccagcctgggcaacgtagcaaggctctgtctctac

SEQ ID NO: 122130 - DNA, 216 bp, Homo sapiens
aggttaggcctttgctcattcaaaaacagttattcaagcacagatgcatctgccactgcattaggcactgagaatgtaaagccgacagcttctatgttagtaccatatgagctattctttcttcagcctagactttcataacatggaaaagtaaggcaaaaccttcagagccgagtccaccagttatgattctgcttagcagggcttgtgcatata

SEQ ID NO: 122131 - DNA, 489 bp, Homo sapiens
cagcatccacgtctctatttttctctggattcgcggagtccttccaaatgcgctcctgtgcccgcgccgcggcccaagtgggcaaaggggggcgggaggcggagagcggctcagggacacgatcctaccgaggagccaggacccttcagagcgccccgctgccgggctccagaccccaccgaaggttggagaacccacttcctcgtgccgcaccttgactctggggagagtaggtagtgagtgacctggattgccctgcgggggcagatggttcggtgtgtaggaagcggacggcaacactggatgtccctggcaggtccgggtgtctgtctccgaagaggacagagaagggcagccacgatctgcccgcctgccctcgcgagcctctcggcactgggtgagaggcaactctggccatttcttgctgccctctcgccctctcccggccgctcccagtccagccgggcccggcgctacccgagcgagggt

SEQ ID NO: 122132 - DNA, 478 bp, Homo sapiens
aagtgagagcaggggaaatgccagatgcttacgaagtgtgtgagaactcaccaagaacagcatgggggaaactgcccccatgattcaatcaccttccatcaggttcttcccttaacacctcggggttataattcaagatgaggtttgggtggggacacaaagctaaaccatatcaaagcaatagctttaaaatgctagtttgcccttgacaacagataatagcttcaaaatatagcttttggaaccatttctttccactatttttaaagaatgacatgagtagatagagggttcagactattctttagctacaactcaaagactacattcaaatcttttgagaagaattccttcttcccttttcgtcatcttagcatactctaaagacctactggtaattcatttccgtgaaacagaattgcaaggcagtctttaataaaagatggcaaatgcaataatttacagatgtgttttttta

SEQ ID NO: 122133 - DNA, 245 bp, Homo sapiens
atgaaaaataaacaagaaaaaagatgcagcagatcaactcaagagattcaacaggagttccagcaaaaagaacacaggtatttatcaaaataatgcagtaagaacatccagaactgaaggctacaattatcaagatcagggctgtccaacagaaatacaatgcagaccattatgtaattttaaattttctaatagttacatttaaaaagttggtcaaatacatcttaataatgaatttattttaa

SEQ ID NO: 122134 - DNA, 756 bp, Homo sapiens
ctcctgacttcaagtgatctgcctgccttggcgtcccaaagtgctgggattacaggcatgagccgctgtgcccggcctcaattaagtaacattcttgattttgggttagtaacttaattgactcagctacaaacctatcctaccaattggaggagaattaccaaaactgctaataaaaggagcactggactcttgaaaccagaaaatttagattaatttctttgccccatgtttattaagtatccactaaatattggattctggtgatatatagattaacaaggtatattaatagtcaaagctctgacattttaaaactctgtgacttggcatattcacacagctgagtttcttcatctgtcaagtagagataacatcttccctgactacctcacaggattattataaggatcagaaacatgctctatgatataaaatgtgctatgaataaaaatattatttcagaattaagagatatctagttggtgtgttcaaggcaatcagtcataacatttacatgcatagttttcccctttttacaattttcactggaatatataaaaattttccctgcatactttgctgcctatctcaaggccttgaatgctgaaagaggtcttgaaagcagaaaaagaatgagctgttactgttcaagttcagactttctttttctttttttaatttaaagtgtcacaagtgttctcatatttgcagttatcttgagcataatgtattatttcctgctgttgtgagcaa

SEQ ID NO: 122135 - DNA, 503 bp, Homo sapiens
  misc_feature (230)..(230): n is a, c, g, or t
tgatagttgtctatggggaatggaggataagaacattattcaatttgtgcatggagaggaagacctgaaggttcagcatagaggtgaggacagagggcccggctgttgaaggaccagctctccctgggaaatgctgacttcagatcacagatgtgaaattgcaggatgcaggggtgtaccgctgcatgatcagctatggtggtgccgactacaagcgaattactgtgaangtgaatgccccatacaacaaaatcaaccaaagaatttcggttgtggatccagtcacctctgaacatgaactgacatgtcaggctgagggctaccccaaggtcgaagtcatctggataagcagggaccatcaagtcctgagtggtaagaccaccaccaccaattccaagagagaggagaagcttttcaatgtgaccagcacacatctctccatgtctagactgtagttgcacctgttagacttggagagatgtgtgcaagtttcgtaggaaaat

SEQ ID NO: 122136 - DNA, 476 bp, Homo sapiens
atgtagggaggagagaaacttcctatagaggaaatagcaggcgtgaaggtttagggcaataaagaacgccacgttcaaggatacgtaagttaacaaagagggataaaaagaaatgtgtctggaaaggccagaccttgttaaccatgaaatgaaattctgactttatcctaagtgtggagagctcttgtaatattttaaacatgagaatgttgagatcagatcaaattcgtggtttcagaaaatcactttgactgcagcatgagaaacagattgcaaggtaggagtagaaggaagataagggagttaagactagaggctttgagactcatcttgaggagactgagtaattaagagatgatgatggccatccttagaataaaggcagtagggatggagaaaatgggaagatttgagagttgcttatgtaaatggattgacaaaacataatgatgtatcgctacaggataatgaaaaag

SEQ ID NO: 122137 - DNA, 500 bp, Homo sapiens
gtatccgtgtccggggttgcatgtgcaggtttatttcctggttatattgcatgatgctcaagtttgggtatgagtaatcccatcacccaggtactaagcatagtacccaacagtcagttttccaactcttgccaccctctatcatgcccctgtctaatagtccccattgtctatttttgccatctttatgtccacaagtccctgatgtttagctcccacttataaatgagaacatgtggtattcagttttttgttgctgtgttaattcacttaggataatggcttccagctgcatccatgttgctgcaaaggacatgctttcattcctttttatggttgctattttttacttcttctttgtttactttttttttattatactttaagttctagggtacatgtgcacaacgtgcaggtttgttacatatgtatacatgtgccatgttggtgtgctgcacccattaactcgtcatttacattaggtatatctcctaatgctt

SEQ ID NO: 122138 - DNA, 290 bp, Homo sapiens
gcttgttggctgcctcagcagcatggtgacctttccccttccaggatccccaaaaatcagcatgcatagcaacaggtaccatgggaaccaactcacaggtgcccctggttatatctgattgtacaaaccttcatataaatcagtaggagatcttattttgtgaccctttctaaactatagcctatacttcctaaatttagatattcaacaaagctgtaaaatgcattagcaatccacaccttctgcatgtgtctgataacttgatatctgagccacgatgaagttcacat

SEQ ID NO: 122139 - DNA, 315 bp, Homo sapiens
aattccaaacacatatttgcaataattaattataaatgggtaaattacaagaaatgaatctgtgagatgaagaaaatagggcctacacattctaatggataatgtcaggttgtccttcaaaaagcaggtattaatttatattctctccaaaatgttatagcagggctaatgaaactagattccattcctaaatttattgctttgaacatagtaaacacatcctcaaaacaatgtttcaaaaatcccagtatactattaattttaatatagcaactttagttttttatcatgggattctacatttatttttcattt

SEQ ID NO: 122140 - DNA, 455 bp, Homo sapiens
gtgttggtggatggtgtgaagattttaaatgacagatggtggtgattattaaatgataaataatggcaacttaccaggaaccaaacagaaaatagtcactttatgtttctggtatgcatctgaattattcttgttatataatgacttttttaacactgttgtagatgaacagtgcttacgactatggaagtttggaacttcagagaatttaaaactctatcatactgttacctctcattcctctgattagaatttacatagattaagcaagtagtctgttgagggatagacttctaagtaagcataaaatggaacattataacttggagtttgcatcacagattttttataagttgttggtcaaagaaaatgtcatgattttttaaagtaccaaatgtaaatcgtaaaaagcttaggcacagggctaaccaacagggatacaaaatgaatgtagt

SEQ ID NO: 122141 - DNA, 240 bp, Homo sapiens
tgaaaatctgcgtgcttttgtgggagctgctcagctgctatagggagacaaccgccttttctttggatgcccaaggtcaatgcaaaactggatttgatgttgaagattgcagagggtgggcagtgatgtgaaggaaaaatggagtcagccaggaggccttcttgaggcaaggaataagagaaagccccaactcactgggcattccctatcaccaggcctttttgatgtgtacataataca

SEQ ID NO: 122142 - DNA, 546 bp, Homo sapiens
cgagatatgttacgggaattacaaaatcccattcttcatttcctcagaactagaaagcctcatgaacaaactgcttaccctcaaccccaggaagaggaacacaataggctagattatggggcatccatgagtcaataacgaccaggggatactaaggccacaccaggagccactccctcattaccaagtccacggaaagacacagctcatggtgtccatggggttcaaggcagaccacatccaggagtccttgttgggaaaacaaatatgactacaccatggccacatacctagtcctggtgtataggaaactggaggaaggctccatcaagagagtgcagcccctgccttctgggggtcccaccaattcttccccattccccaaagtatattccaccttccctgtctactcaaagaggaggagtctaagctagcctgcctttcccacctttaccttggttacttctaaaagtcagccagctgagaagaacaagtgttagggcagaagaccaccagaaaagccaccatgcctgccagtcccttact

SEQ ID NO: 122143 - DNA, 522 bp, Homo sapiens
acatctaccacggggacgctcttctcttagccaaggccacgagctagatccccaagagtgggaaattaattctagccagtgaagggaccaggctctaccatgtgctgaaagcaaaaaaaacaaaacctaactctgagaattcaagcaaaatactgtagaaagaattatgcatttcttatcagtgaacctgagttttccaagactatattagtctatggttaactctccaatgtctggaaggacaatatcagctctaaagaggttctcttagactcatacatttttggatcacagatatcccaaaaaaatttcaagtttatgttcactactaggtatttgtccccaagattattacagacaatatttcaataggttatatcatataaaactctgtcttcccaaagggttaaaatgataaactgattttgggccaggcatggtagctcacgcctgtaatcccaacacttggggaggccaagtcaggcggatgaagagatcaggagatcaagaccatcctggcca

SEQ ID NO: 122144 - DNA, 823 bp, Homo sapiens
cagtggctcatgcctgtaatcccagcattttgggaggccaaggtgggcggatcacttgaggtcaggagtatgagaccagtctggccaacatgggaaaaccccgtctctagtaaaaatacaaaaattagccgggcatgatggtgcatgcctgtaatcccagctgctcgggaggctgaggcaggagaatcaattggacccaagaggcggaggttgcagtgagcggagattgtgccactgcactccagcctgggtgacagaataagactctatctaaagaaaaagaaaaaagaaaaactgaactgacaaaagacctttttttcaatcccagtcctgccattgtctttgatcttggcaagtcaaagcctttctgaatcttgtaaactctgagactagatggcctgcatcacaacaattgtcaggattgattcatatgggagcactttgttaattatacaatgtttttcacatataagaaacctaccagccaggcatggtggctcatgcctgtagtcccagcactttgggagactgaggcgggtggatcacctgaggtcagaagtccaagaccacctggacaacatgatgatgtcaggccactgagcccaagcctgcacgtatacctccagatggactgaagcaactgaattaccacaaaagaagtgaaaatagccagttcctgccttaactgatgacattccaccgttgtgatttgtttctgccccaccctaactgatcagttgaccttgtgacattccttctcctggacaatgagtctcagaagctcctcactggccaccttgtgacccctgcccgcaagagaaaa

SEQ ID NO: 122145 - DNA, 193 bp, Homo sapiens
tctggggtacctagaggatcccagacgtcattttgcatggagtgttggcagctgggggccgatggaggttttcagagaccacagataagcgtctgaggagaggttcagaggggtgtgtgtgtgtgtgtgtttgtctgaatgcctgtgtgaagagacagtgtgattaccccagcagggacgtaagggtggtagg

SEQ ID NO: 122146 - DNA, 379 bp, Homo sapiens
aggggcaaagagagagagaaagggttctaagatatttcttgggtttgggtgagttagatgaaagcttttactaccaaatgagatcaagaatacaggaagtgttggtttagggggaagacgatgagtgcagtttggcatattctgaatccaaggtaactgagagagatccaaaaccaggtgtctggcagctagtttgtaaatacacagatggctgaggctcaggagtgtagcctgggctggaagcactgaaagagatttgggagtcatctcatgaatgctaaaaccaaggaggctgaagaagagtagtaagtgaaggacaaaattctatgaagtgccaatgtttaataggcaggaggtggaagagggccaatgacagaga

SEQ ID NO: 122147 - DNA, 684 bp, Homo sapiens
gaggtggctcacctgaggccaggagttcgagcccagcctggtcaacatggtaaaaccctgtctctactaaaaatacaaaaattagctaggcatggtggcaggtacctgtaatctcagctactcgggaggctgaggctcaagagtcgcttgaatccaggaggtgaaggctgcagtgagctgagatcgcaccattatactccagcctaggtgacagtgcaagactctgacccaaaaaaaacaaaaacaaaaaaaaagtgatagcttgattctacctgtttctgcccagtggcctgttactcattgttgccctgggagcttgctgggtgaattgttcagctacaaaacttggactaaggacacatctgtttcaagagatgttcatgtggtatgtggaactgtgcatgttcttagggagataaagaagtgattaattttcgttatggtataagttttggaaattatatctgtgttccagtagttatgggaataatgttgcgctctgtccttttccctctgtcaggccttggactgtgaccattacatagtagtgggctccttagtcatttgagacccatgaaactataagttcttaagaaaagaactgttagaacccctaaagtccagtcttggtctccagtttaagaaacacctggtgccatttgttggcaccataaataaaatagc

SEQ ID NO: 122148 - DNA, 432 bp, Homo sapiens
actgggcactgtggctcatgtctgtaatgccagcacttaggaaggccaagagaggaagattgcttgaatccaggagttcaaggctgcagtgagtggcaattgcaccactgcactcaagcttggacaacagagtgagacctagtctcaaagaaaagaagaaaaacacaaataaaactctctgcggcttatcataaaatgaaatgtcagccaaggcaagaggccacgcccgaaggagaaaacagataggtctgagtgtgggggtaatgctccaggcagcaggtggtgagcaaaggggtcaagctgggttcctgggaagttccccataaatttcagccaacgatgcacaggcctcctcccaaacaccgctgagcagggcttctagatctcactgtttttgacaacacagccaacctcagctaccagggtcatttg

SEQ ID NO: 122149 - DNA, 691 bp, Homo sapiens
ttacttaaatctttgttggtttccttatctgtaaaaactctgccttacaaggtggtcgacagcactaagatattgtgaacttagcacaatgattgatatgtatcactaatgagtggcagctatcatcaccaccacactcatcaaccttgactgagatttgagacatacataaatatgagttggtattatagaattattgcctatctcaagtatctgttagcacccatagttgcagtgacagcaacccgactcacacagtttaagcttgaaaacacagaacttatgcagggcagttctgaggaccccaggccctagagtaccttaaccttatgcatgatggttgtaatagatgctttacattttttagagaatctaatatttgtgacattttggtggtgttatatgttgattgtcttttctctggagcattagtcggattttccttgttctttgtatatccaagtgatttttgatcgtattctggatatttttaatattatgttgtgaatctctagatccttataaaatcctctgtagacggttggtttgtttcagcagccagttgacctggttaggttcagaccacatgttttttctcccttttatgtgtggtggttccttccagtgtctattcagttttcaaaactttggctgtttttatcttttgtgtgtgtggagggggcaggtgagg

SEQ ID NO: 122150 - DNA, 802 bp, Homo sapiens
gcacaagggcatgagaattgttgagggctttcttggaacctggctaccaccatgaccagaggagcaagttaaagtgttctgaggggtcagacagataacaaaccagctgggataaggagatgtagggagtagaggggattgcttgttgaacacttatggcctgcaggaatttccaggatgctggtcaagtgattccttattgtacagttgtttaaaatatctgaaatttaggttatgtaaaatgttcagttttttttaaatgttggcaaactaattcagtttttaaaagaggcattttaaaggtcatcctggggattactaaatgaacctctgtgcagactgcatgtagtttggtagctgccaggttatgacttctgatctacttaacacttatttagtggatgaggaaaatgaggcctggggaagccgaaatgaccagcagtcatacaacttgtgaatgatagaactggaattagaatccatgtctccagcatctccattaaaccataatgacaacattgaaaaactaaggggaactagatgcataaacagccaatgtgatctaagtggttaacttaataatctaagtggttctcaaccttcaatgtgcattgaaatcacctggtgcgtttttgaaaatacagatgcctgggctccacccccagacattccattaccttgaggctataggcatcacttttttgaaacttctgaggtgattctgatgtgcagccaagattgaaaccagaggatttaactgctttaagagccgtatttacttgctctagctgacttgagatac

SEQ ID NO: 122151 - DNA, 293 bp, Homo sapiens
tgcaaacataggacagcttattactgtactgaatactgtaggcaattgtaacacaataataagtatttgtgtatttcacacatctaaacatagaaaaggcacaggaaaaatacagtattatgatcttatgggaccactgtcatagatgtggcccgtcgttgaccgtaagtttgtcatgtggtgcatcccgcctaccttaattctcttctcgtctctgtttgagatctttgtcagttacaccaccaattacagaaccttagtattttctatggttctggctacatgctggaatt

SEQ ID NO: 122152 - DNA, 100 bp, Homo sapiens
ccggccaagattgttctttttgaaggatctttcttacgctgagtttctacctctctatcgtctatgtatcatttctagaacagcacagaaaaagccaaat

SEQ ID NO: 122153 - DNA, 305 bp, Homo sapiens
tcccatcctgttctatgaaaacaggttttcccaaatccaggacttcacagctctcttaccaagtagccaacggctcctccttcagtgttcactctggatactggaacatttcgcaatcaaaacccccttctcctccaggaactgcacggttctgccgctctatggcggcagcctcagggcccgtcagagggaagcttagctgaataactaccgtggcgtcacctcgtgtttccaaagggtctccaggctgaaggatgcagcgtgtgagaagtttaacaaatgcacatccacatcccgatggccag

SEQ ID NO: 122154 - DNA, 585 bp, Homo sapiens
ctcctgccggcccggcccgcgtctcagctgtggggacccgggggcgccgcgactcgcccacagtcggacggcgggaggcggttcctgcagggtccagtcccgggagcacccccaggaggaggggagggtgggagcgcctctctttgagtccccgggtttggtcgctgggatgtgaggaagccggagaggccgcggctggacgcaggggctgaggatccggcggctcggctgcactatgcccttcccgcccatgccgccgccgcccgcccccgccccgggggcccaagccgcgcgccagttaccccggaggccctgcgccgcgggggacaagaagaagaggcccccacagcggcccgaggggctcctctccagctcctggccctccgccacgctcaagaggccgccggcccggcgcggccccggcctggacaggacgcagccaccggcccctccgggcgtctccccccaggccttgcccagccgcgcgcgggccccagccacgtgcgccccgccccggccggcaggctccggccacagcccagcgaggaccacctatgcggcgacctcggcggggacggggaccac

SEQ ID NO: 122155 - DNA, 661 bp, Homo sapiens
ctcctgccggcccggcccgcgtctcagctgtggggacccgggggcgccgcgactcgcccacagtcggacggcgggaggcggttcctgcagggtccagtcccgggagcacccccaggaggaggggagggtgggagcgcctctctttgagtccccgggtttggtcgctgggatgtgaggaagccggagaggccgcggctggacgcaggtgggtgtggaggggccgcccggactgcggggacccgctccgcgcacagtggctgagcgcccgcctctctttccaggggctgaggatccggcggctcggctgcactatgcccttcccgcccatgccgccgccgcccgcccccgccccgggggcccaagccgcgcgccagttaccccggaggccctgcgccgcgggggacaagaagaagaggcccccacagcggcccgaggggctcctctccagctcctggccctccgccacgctcaagaggccgccggcccggcgcggccccggcctggacaggacgcagccaccggcccctccgggcgtctccccccaggccttgcccagccgcgcgcgggccccagccacgtgcgccccgccccggccggcaggctccggccacagcccagcgaggaccacctatgcggcgacctcggcggggacggggaccac

SEQ ID NO: 122156 - DNA, 500 bp, Homo sapiens
attctgatgcacagctagatttgcaaaccactaacttagtggcttccctgactgtatgtgaacccatgtgggtccctaaagattctgtttggaactttcaccaaagcagcctttggacaggtcttttacatctgtgaaatgcgctgatttggggcccacaatgttcttcgtttgttccttcataggttcctttattcagaaatatctattgatcaactctatgtacaagcatgttctagatgaacaaaacagaccaaaacccctgcccctaggaaaattatattctaaagggagccacagtgaattatctagtattagaatgtggtaagtgctacagagaaaaataaagcagagaaaagtatagcgtgtgtgaggtgggaagggttgcagtattcaactgagtggttagagatggcagccttgagaagctgacatttgagcaaagacccccttttggggtctttgctccttgatgtgcttggcgctcttgtagtggatga

SEQ ID NO: 122157 - DNA, 593 bp, Homo sapiens
attctgatgcacagctagatttgcaaaccactaacttagtggcttccctgactgtatgtgaacccatgtgggtccctaaagattctgtttggaactttcaccaaagcagcctttggacaggtcttttacatctgtgaaatgcgctgatttggggcccacaatgttcttcgtttgttccttcataggttcctttattcagaaatatctattgatcaactctatgtacaagcatgttctagatgaacaaaacagaccaaaacccctgcccctaggaaaattatattctaaagggagccacagtgaattatctagtattagaatgtggtaagtgctacagagaaaaataaagcagagaaaagtatagcgtgtgtgaggtgggaagggttgcagtattcaactgagtggttagagatggcagccttgagaagctgacatttgagcaaagacaagaagtgagagagtgagccatctaggtatctgggaggccagcaaggacacaaccctgacgtgggagcctgtccggcatgctgggagagcagctaggctggcgcagctgggtcaagactggaggggcaggtggtgagaggagcact

SEQ ID NO: 122158 - DNA, 224 bp, Homo sapiens
agtagcaaatgctgcgctccagatctggaatccagacgaactcttagctccccataggagactacgggcatgccaccccatgagaaaaaaaataataatgttctgatttgatatgaaggcgagagatttcctctgacacccttgattgtcttttttcctctccagtccagaccagaacaacgagttggaagtcgttttcgaatgccacctctgcgccctagctc

SEQ ID NO: 122159 - DNA, 187 bp, Homo sapiens
gcctcccgagtagctgggattacaggcgcctgccaccacacccagctaatttttgtatttttagtagaggcggggtttcatcgtgttggcctggctggtctcgaactcctgaactcaggtgatccactgcacctggcccccgttcatgttttttaaagctttatggttgctctgaaatagagttgtt

SEQ ID NO: 122160 - DNA, 367 bp, Homo sapiens
acaatgtgggaagtgcccctcctcctataaaaggtcaaccctttcacatttgctttggatacccagccctgttcctccaaacaccttcttcagctgttgtctctctcacccaaaccatcttcagtgctttacaaacaagttctcctgactcccgcattaagatggatctcactgacccttcatacccttccagctcatactttatatttctagtccctttcattgcacattttcttctcaaaagagttatctgtacttctatttatccagatataagccatctctgattccttaatgactattttgtcttatcccatcccactctcacttctgtctgcacttccctacttgtgatgattaatactga

SEQ ID NO: 122161 - DNA, 147 bp, Homo sapiens
tggttttagccctggctcactgtctctccaacaccctctccatgcggtatgcctctccaggcataactcctgctggtcccaacacccatgtttccagtccccgtagggtctctcacatctggcccaccactcctccaataactttgt

SEQ ID NO: 122162 - DNA, 367 bp, Homo sapiens
gtgtaaagcaaatgggaacgttgaggcatgtagaggttttgaagcagagtgtcggtccttccttccatacgcctgaaacgcataatccggggctttttgagagcaaaaacatagtcagaaatgtgccctgagggagaatgtactattttggcacacatatgtatatatgtatatataatttttaaattttttttgagagggggtttcactcttgtcgcccaggctggagcgcaatggcgcgatctcggctcactgcaacctccacctcccgggttcaagcgattctcttgcctcagcctcccgagtagctgggattacaggcgcccgccgccacgcccggctaatttttgtagagacagggtttcac

SEQ ID NO: 122163 - DNA, 442 bp, Homo sapiens
gatttactcttgcatctgagttcagttgtgggtcagcaggaaactttgtttctggggtgccttggctctttgccacatcatcttatccttcactaagctagcctgggcttgttcgcatggtggtggcagggatctaagatagagtgaatgcatgcaggctcagaactggccattatcacttctgcctcattccataggtcaaagcaagtcatgaggctgggtttcattcaaggaaatagactccacctcttgatgggaagataggcaaagtcacatggcaaaggacatggatactgacagggaggggtagagactaagggccatttggcggtcagcataccaccccagcagtcacaagcccactgcacccaggcctggcagggaacaagggctgaaaaaggctgtgtcaggaggagataactgaggattaaatgcctcatgg

SEQ ID NO: 122164 - DNA, 270 bp, Homo sapiens
gggtccgtcgacggctccagttgcagaatctttgcacgtacccactctgactttggctaccaggaacctggggcttggtttaatcctctgattcaggtattagtcaatcttagatacctgggacagtcgtaacaatctacatgtatagaccccttactatgtggcaggtacggtcctcagatctttacatgaactagtaacttgcatcttcaccagaaccctgtgaagcaggtgctttctgggctggaggtcgacgcgcccgcgaattta

SEQ ID NO: 122165 - DNA, 250 bp, Homo sapiens
tcaaatctagcctgggcgacatagaaagaccccacttctacaaaaagcagaagaaagaaagaaaaaatattgaatgggtaccatgttagatgctaagaacaacgaccatagttcgttcccttttagagcttactgtcttctggagaacttgcaaaattaaataattcaaatttaaaactgttggaactttattctgagccttgagagaaatggactgagtcacatagcatgccgttgcaacttctgcttt

SEQ ID NO: 122166 - DNA, 600 bp, Homo sapiens
aatcagatttaaacatcttaggcacactggtgtgtgtctctagtcccagctacttgggagactgaagcagggggatcttttaaggctagaagttcacagctctagtgcactatgatgatcatgcctgtgaatagccactgtactctctttagcctgggcaatatagcaagatgttgtttctaaaaaaaaaaaattcttacctgggcagtcagggtcccagcttcctttttcttggtgtatctctctttcttcttcctctcctggctcctgtgccctgacaaactggatcgctcacacaacctcaaggtcagaatgatccttaaggaccagttggtccagtctcctctctgaaatgtttattgcctcttgctgttccccatagtgttctttcctctgcttatggagtttctccctcctgaaatgccccatagccagacccgctgttaacctctgctgttcatcaaagcctagctcatacaccttcatgaggccaactcagtatggccattttttttttcttttttcataccacaaagcattgggaaccactctagagaggagggagtttatatttacttagtacctgagatgtgtgaggaa

SEQ ID NO: 122167 - DNA, 600 bp, Homo sapiens
ctgggattacaggcgcacaccaccacgcctggctaaggtttgtatttttagtagagatgaggttttgccgtgttggccaggctggtctcgaactcgggtgatgtgcccgtctcagcctcccaaagtgctgacattacaggtgcgagccactgagtccagcttggccagctaatcctgaccttgcttgataagaatcactggggcattgtttaaaacacagatttcctggcaccttccccggagcttctgattcagaaggctttgcgtggggcccaagattctatatttgaacaagcttctgggtaatatttatgacagggaagtcttgaggaaatttggactataggtcgtcttttaaggttcttgccaactctaagactgccatcccataaacacaaaaagggtaagagccacttatgtggagaaggagccttagaatccctggccgggaacacgcgtgcttctgctcctgaggcccagccttcctggccaggaacacgcgtgcttctgctcctgaggcccagcctacctggccgggagcacacgtgcttctgctcctgaggcccagccttcctggctgggaacacgcgtgcttctgct

SEQ ID NO: 122168 - DNA, 617 bp, Homo sapiens
acttgtgactggtgtctgaagtgggggcagtcttgtgggctaatgataactcccaatagtaagcatgagaactggtatagaaaaaggacaggttggccaggcgtggtggctcacacctgtaatcccaacactttgggaagccgaggcggacagatcacctgaggtcaggagttcaagaccagccagaccaacatggtgaaaccccatctctactaaaaatacaaaaattagccaggagtggtggtgggcacctgtaatcccagctacttgggaggctgagggaggagaactgcttgaatccaggaggcagaggttgcagtgagccgagatcgtgccacactgcactccagcctggacgacagagcgagactccatctcaaaaaaaaagagaaaaggtatttgggggtcagaaaacagtactgcagcaggcctcaaggactgatacggtttggatattcgtcccctccaaatatcattaacacgtaatctccaatgttggaagtgagctcgaataggaggtgtttgggtcatgggggtgggtccctcaggagtggctttgttaccagtggagggtcttgcctaggagttgtccaggttgttcacatgttcaacaaaga

SEQ ID NO: 122169 - DNA, 441 bp, Homo sapiens
agcctaggcgggtaccctatcctgctctattcacaatgtctctggatatcaactccattagttgattactgatcttcaaaatatatcgacttaaaaaagaaagacaaaatgaactggcctttaatctgttaaataatacagcaaacttcagaacattgttagtgattctaacctgaaactatcttgtctaatccagagctgtccatccaaaaccctatacagttcatccatcacagctagatattctgggctgtatctagctgaacgtcagaaagctatgcacataatgcttcttaaactatgtatagaacagctttccgtgaactgtacttttagagtaagggcctcatcttatgttgacggatcttctatgaaacagcttttcaaaaaccaccactggcttcatgataggaatgttgctgtggccccttccatcccatc

SEQ ID NO: 122170 - DNA, 286 bp, Homo sapiens
cctgcttcagcctcccgagtagttgggattacagatgaccaccaccacgcctggcttgtatttttaatagaaacggggttccaccatgttggtcaggctggtctcaaactcctgacctcaggtgatccgcctgcctcagcctcccaaagtgctaggattacaattgtgagtcacagtgcccaacccctacttcctttttgtttccttattcttaaacaccttataaggtttttactgctacccatgagaaacaaacttcctcttgttcgctctagtctatacctga

SEQ ID NO: 122171 - DNA, 390 bp, Homo sapiens
gagaaataaattgaacagcctggtttctgtaagctccactgagacacacactgttcccaggtctcccagcacccagtaccccctccccagtaatgtgctgtctctagtggtttgctgcatgggatagcactattgatgtcagctctcctaaggcagaaagtctgcccacagtgggaaaatgtgtcaaacaaagaaaaggctttaggttaacgagaaggcaagttgagtcaccagggtgtgtcaagtctgggaggcaacttggggagtgggaccaacgtgccagcacgtgcgtatcctgaggactgccagtcagcaggattcctaagtgacacataacaccaaatttgtcaatcccagcaaaacctggcagggggcatcaacagcgccgtg

SEQ ID NO: 122172 - DNA, 310 bp, Homo sapiens
ttatctctttgttccaaggcaagcttaggaaaaggcatctatactaagctttgtccatcacagtaagagactcctaactgttgtgctggctactcatcaccacaaacaaaatttagcagagggacaagagtaaggaaagtaaaggacttcatatctctttgttgttgttagtttcaattcactgttctagatatttaagaaaccaatattcagatatcaaagtagtgcccatctggaaatgtctaccttatcattccttcacaatggcaacaaaactgagaagctactgtattcggtaatgtaaatgtat

SEQ ID NO: 122173 - DNA, 786 bp, Homo sapiens
gaagctgtttggcaggatatgaactttttggctgccatttttttttctttaagaaggcaaaaataggcttcagtctcttctggcttgtaaggtttctgctgagaagtctgctgttagtctgatgggacttcctttataggtaatttgggccttttctctagctacctttaaggtttttttttgtattaaccttgggaacggttgtgttgtatagtatctctcaggtgtactctcagtttcttatatctggttcttgacctctctagcaagattagggaaattttcctgaattatttcctcaaatatgttttccaatttgcttgctttttctttgtatttccaaaggctttgttcttttttttgctttatctgggttaatttgaaggaccagccttcaagttctgaaattctttcttctgctttgtgtaatctgttattaaaacttccagctgtattttgaaattcctttagcaaaattttcaatttcagaagttctatttgtttttttcttaatacagctatcttgtctttcataccctgaattatttttctagtgtctttgtattggatttcaactttctcttggatcttactgagtttccttgatatccttattttgaatattttatcatttcaaatttttcagtttggttagtatccattactagagagttggtgcaatcctttggaggtgtcaggacatcctggctttttatactgccagagttcttgctgattccttctcgtctgaggagctgctacttctcatttttgagtttgctatca

SEQ ID NO: 122174 - DNA, 349 bp, Homo sapiens
caatcctgtaatgtttctaatttgctatggtatggaatagcatttaccatatatagcttaggtttgtaggctttatcttttagaaatccttaattcttagacttctcactcatttatttatttttgataaatattcctgtatctgctctgtacctggtactatttctaggtactgctgaaaagtggttaacaagcagacaagtgttctgcttttaagttgatacttgaatgaagaagactgaaataaaggaagatactaataatttcaacaaatgataaaaagccatgaaaatcatcttaggaatagagattgaaatgagcttggggcattgcattaagttgttggtaa

SEQ ID NO: 122175 - DNA, 817 bp, Homo sapiens
gcgtcatcacctggctcagctctgcactcggccacccttggtttttgactccctaagacagtgtcatcatcctcagggaagtgggtttgctgcagttcaggatttctccaattcaactcatgtgtacattcccttggaaagaagaaaaagtgtggagtcctgtgttgatttgtgattgctaacctaatgttatttaaatatgtgcaaacataaattagattccttatgcttagggttctttcttaatacaactttcaatctaaggcatcacagaagtgaaatgaaaacaaaattataaacacacactgttgttgccacaacccccagtagctctccgggccagccagtggcttctgaggccaacccatgagcttcacccaggaagagggcttcacaccccacgatggttgattggaacctccttctgggggctgcagggcaggggacagcagagcagagaggcccagggaggggccaggtgtcaggagctgcagaagcttaagactgtgcccagggcacccaccataccaccgtctgggccctgttccttcctacccctccttccccacgtacctgcgatgtgagcctcacctgagccagagcaccccccgacgtgccacccagctgcacgccaagtgttgactaaggtcggtggtaccggggacaggattgcgagggggaccctgcttcatctacattgtttaaatgtctgcagcaagaatgacttcatgcatcatgtgattgaagatacagaaaaagaggatggccagcaaccgtttgtaagcctcagataaagtgtcaatttttaaagtactca

SEQ ID NO: 122176 - DNA, 352 bp, Homo sapiens
gaggagcgagtcccccaaagtagttttatttatctatttagagacaaggtctcactctttcggagtgcagtggtgatcacactacttgggaggctgaggcatgagaatcgcttgaacccaggaggaggaggatgcagtgagctgagaatgcaccactggactccatcctgggcaacagaacaagactttacctcccaaaaaaaaggtggagaggggaggactactgcactctaccaggatagcgaaaataaaaatgacttgacaataccaagttttgggaaagatagaagcttgaactgtctgacactactgaaggagcatacattggtacaactactttggaaacctattt

SEQ ID NO: 122177 - DNA, 681 bp, Homo sapiens
gctgccgcctactactactaaattcgcggccgctcgaccagggatcagaatttccctccctattagggaaatgcgtttaaaaaaaaaaaaaacacgccagtttggttgggatgtttttagtatgctaaaacgtttatgtttacccagctcatgagtcagaagttattttgctgcttataaattcattttgccatagtatgataaatagcttttaatgttgtaagcaaatagggcattggatagcagcactaagtcattgaaaacaaaaacttctttattggtgtttggtttttatatagtttagggaaaggctctttaaaccaagtttcaggtgaaaaaatgaaaaaactttttaaggattttagataacatgccaagcacagtgactcatgcctgtaatcccagtagtgaatctgagaagcgcaggcttcccagatcgcttgagctcaggagttgaagaccagcctgggcaacataatgagatcccgtctgtacaaataatttaaaaattagccagccatggtggtgtgcgcctatagttctagctatttgggaggctcaggctggacgctgagcctggaggaccacttgaacccaggagttggggctgagtgagccatgatcgtgccactgtacttcagcctgagtgacagagtgagatcctgatgcttaagtttaaaa

SEQ ID NO: 122178 - DNA, 591 bp, Homo sapiens
aaagaacaaatattgatgaagtcaatcccaacatgctcattccttttccctaatctcatctattagatgagttcctccttctcccaaagaggagtaggtgagaggaggtgagaaagaggccatgtcccactctcctgtgcttccagggatcagaatttccctccctattagggaaatgcgtttaaaaaaaaaaaaaacacgccagtttggttgggatgtttttagtatgctaaaacgtttatgtttacccagctcatgagtcagaagttattttgctgcttataaattcattttgccatagtatgataaatagcttttaatgttgtaagcaaatagggcattggatagcagcactaagtcattgaaaacaaaaacttctttattggtgtttggtttttatatagtttagggaaaggctctttaaaccaagtttcaggtgaaaaaatgaaaaaactttttaaggattttagataacatgccaagcacagtgactcatgcctgtaatcccagtagtgaatctgagaagcgcaggcttcccagatcgcttgagctcaggagttgaagaccagcctgggcaacataatgagatcc

SEQ ID NO: 122179 - DNA, 1310 bp, Homo sapiens
acttttaacttactacaggtaattaatcataaaatatagctaagcagtttccaaaatttgtaattatcactagaggacatatgactaatttgagatgactcaccagagagatgaataaattaagtctgtcataatgttatatatctattaaaatgtttttaaaaattcactgcatacacattttaactaattttcaattattaataatagccattaaaatgttaaaaagtttataaatatctaagggacctcatttaagttataaattaattgtgaaagattgtcttaaaaaaatgaatgtaatgaaagtagcctctgaattgtaatacttaaaataagacattggaatagccaattatttttatatctatttgcaaattaaaagttataatgcaaaaacaaatctgggttgggtacagtggctcacgcctgtaattctagcactttgggaggctgaggtgggcagatcacgaggtcaggaatttgagaccagcctggccaatatggtgaaactccatctctactaaaaatataaaaaatcagccaggtgtggtggtgcacatctgtagtcccagctactcgggaggctgaagcaggagaattgcttgaacccaggaggcaaatgttgcaggagttgagatcatgccactgcactccagcctgggcgacagagcaagactctgtttcaaaaataataataataataataataataataataataatctgtcaaataattatcaagcagattctaatggttggggatgatgttaaaatcagagcttcactagaaaattatataaagcagacactcctttctaggaacaattgtattagttataggtctgtacttcatgggtggccatcattaattaataactgaagacatgctatttgaaaattgattttactataacagagaatgagaatggttttttttaattaatattttttctgtaatgagaacattctatgtgtttcaacattggtgaaatagtccagtgtgattaaggatacaactattgtctatgattgattttgtatgtagggtttcaaaatggaattcagaaaacacagtcattttataaacatttacctagcatctaacatgtgcactgtatagcgctctgtaccacaagaactaaaaataaatacaaggttttatctttatataaaatgtattcagcacatgtataaatgaaacagctagaagttctatacaaacgataaaataagtagattcataatgtattattagaataaaattgtgaatgtgtagtttgagaataaagttatatttaatcataaaa

SEQ ID NO: 122180 - DNA, 978 bp, Homo sapiens
tctctctagcctgggcaacaagagcgaaactccatctctctctctcacacacagacacacaaagaggccaggttaggccaggcacagtggctcacgcctgtaattctagcactttgggaggctgaggtgggcagatcacgaggtcaggaatttgagaccagcctggccaatatggtgaaactccatctctactaaaaatataaaaaatcagccaggtgtggtggtgcacatctgtagtcccagctactcgggaggctgaagcaggagaattgcttgaacccaggaggcaaatgttgcaggagttgagatcatgccactgcactccagcctgggcgacagagcaagactctgtttcaaaaataataataataataataataataataataataatctgtcaaataattatcaagcagattctaatggttggggatgatgttaaaatcagagcttcactagaaaattatataaagcagacactcctttctaggaacaattgtattagttataggtctgtacttcatgggtggccatcattaattaataactgaagacatgctatttgaaaattgattttactataacagagaatgagaatggttttttttaattaatattttttctgtaatgagaacattctatgtgtttcaacattggtgaaatagtccagtgtgattaaggatacaactattgtctatgattgattttgtatgtagggtttcaaaatggaattcagaaaacacagtcattttataaacatttacctagcatctaacatgtgcactgtatagcgctctgtaccacaagaactaaaaataaatacaaggttttatctttatataaaatgtattcagcacatgtataaatgaaacagctagaagttctatacaaacgataaaataagtagattcataatgtattattagaataaaattgtgaatgtgtagtttgagaataaagttatatttaatcataaaa

SEQ ID NO: 122181 - DNA, 312 bp, Homo sapiens
ctttcctgtggctaaagtgaattcaaaaggtggtttttcttttccccctctctaaatctaccatgaacagatttgccttcagcaatttagtccagcccacttcaagtcttactcattcaataaagcacacacattcactatggatccctcaaagattccttccattctcaatgcagactaaaatgccttatcccaattataacttttcacttttcctcagaaaagcaaacatataaccagtcctcacctcacaaatactccatttgtaacataactctgctaaccttggcaagtcatctttgattcttcttt

SEQ ID NO: 122182 - DNA, 520 bp, Homo sapiens
accctcaccagaaggtaggcagctgttggtgtcatgcctgcacagcctgcagaaccatgaggcaaaataaacctcttttcttcataaattatccagtttcacatattcctttatagcaacacaggctaacgtatttctaattcaaactttgaatccaggttctagcacttaataatacatgtaacattgtgctttactatattctgtcttcctccctttcatatccaagcttctagaaaagaggagtacttatttctccagacttcatcatggtgcctagcacaaaggagttcaaaaaaatgtttaataaagtttttcaaatttaacagcctttgaatctatagggcaaaattggttttaagacttttccaatttaagcacactacagagaacatcgaaacactctattattagaaataggggccaggcgcggtggctcacacctgtcatcccagcacttcggaaagctgaggtgggtggatcacctgaggtcaggagttcaagaccagcctcactaaca

SEQ ID NO: 122183 - DNA, 200 bp, Homo sapiens
aagtaaggaagtagggagagtggtgagagcaagatgaagggcaagctagctgagagttccaatattatctacctgcgataaatgtttaaagacatttaaaatacaacctcataagaagttttttaacttcactgacagaaaaggctctcagatcctctaaaagcctttcttagaataggcaaggtaataagctctttatt

SEQ ID NO: 122184 - DNA, 303 bp, Homo sapiens
cttgagtataaatgtaggaatggaattactggattttggaggagacctatctttagctttagtagatcttgccagacagtttttcaatgtggttgaaaccatttacacctcaatttgtacatcaatgaatgaaagtttcattgcttcacatccttggcaacatgtggtactgtcacgcaaattaatttgagctacattagtgggtatgcagcagtttcttaggtttaatttgcatattcttgataagtaatgatgcagtggtagatggttgccacaatgacttcttctatccctctatgtata

SEQ ID NO: 122185 - DNA, 660 bp, Homo sapiens
gctagtcattaagaatagcttcaatctttaaaaagtgctaccctgtcagtatctcaggaaagataaattgacaacaacaaacctcccagacacaaactcaaaagctagatgcttactgagaaattatgatgtgccaggaattgtcttagtaccttacctaattcaatttaatcttatcctcattttgcagaggagggaaccaaggcacaaaaaacttaacttggtaacatcatacagctagagggtggtagagccatgatttcaactctaacagtatgactccaaagcctgcacaattattgtagcacagggatcagaaacactcaacaccatcagtcataaagctatataaacattttacaggctgggtgtggtggctcatgcctgtaatcccagcactttgggaggccaaggtgggcagatcatgagatcaagaccccgtctctaccaaaaatacaaaaattagctgggcatgctggcgcgcgcctatagtcccagctactcaggaggctgagacaggagaatcacttgaacccaggaggcggaggttgcactgagccaaggttgtgccactgcactccagcctggtgacagagcaagacactgtcttaaaaaaaaaaatatttttttttaccctggatggggaagacattaacatag

SEQ ID NO: 122186 - DNA, 823 bp, Homo sapiens
agcagaatttctcagcattccagagagagattatatgggggaagaaagaacaagaaagtcagacctgagccaggcctgagaggtcaaggccaacaccccagggagacccatttcctctctggcctcttcacacccttctcccctccttcttcttcttttaacgtttctctctgccccctgtcttctctacatccctctttcctggctcccttccctgagcccctgcttacaggaggtgtctaatccacatgtgccgtgtgccaggcacaggttcatgcgcttcacaagtggggactcattgaattcccctgctctgtgtaggaggcactatgatcactcccatttcactgatgaaaaaatggaggctcagggaggttaggtgacttgcctgactcacagtagatggtggacttgggagtttgatgggactccaatgactgcaccctcagttacaaggtatttggatggtctctgttgtctgagaaactcaggggcccccagtgaaatgcaggtgagggtgggaggcagaaaagaggcacaggtggcccatactctggagaccccgttgggcctccgcactctctcttccttctgtctacaccccatactgacaatcctggtttgggccagggcagaggatgaggctggcagcccattcctcccgaaacactgctttggggctgattccctggccttagccgaccaaagcactctcattcaggctcaggaaagactccccagtttagggatggcactggaaagtccagggggcctagagacctaggtaccactcccagcactcacacattccccagagatgccc

SEQ ID NO: 122187 - DNA, 578 bp, Homo sapiens
agccacactagcacacctcgacagcttaatagccacatgtggctactagctggctatcatattggacagcacagatatagaacatataagtcatcacaaagagttctaccacgcagtactgttgctaaactactggaacacatacaaaagggaaagatatctttaacaacagcaatatgcaaaactttacagattccctaaccctttagttatgcacagacagcaaatatctgagtggaaataaatctggcacaaaggaataacctcaactatatgcaatgccatctttttgtatgtatgttgcgtatatatgtaaatgtataaatacacatacagttcaagcataattgattatatgaatgtgtatataagcacacatgaacatacattatgatagggaactcaaaacagttaagtgtaattgattatatgtgtatacttacatatgtatacacaaacacactaagtcaattatactttaactgttttgaattccttgccataatgtcattagctcaactatcctacggggatactaggaggagtattgataactgccattcatggaacacctgtga

SEQ ID NO: 122188 - DNA, 212 bp, Homo sapiens
aactttcagtaatattaacacatgaaaaaaaatccttacacctaactataatcagtaatatgttgctggatcttccaaaacaagagatgaggtattcttttatttttgttttattttgttctttttctttttcttttttttttttttttttgaattttttgattgattctatattcttttttcaaattttattttactttaagttttagggt

SEQ ID NO: 122189 - DNA, 295 bp, Homo sapiens
actgacacgggaggtgggttagggggcatgagtagaggatccctgcccctcttcaggggtctgagtgagaaggactggttcccacggcttccccgaacccccaaggaccctggcactgctcagcagatcagagctatgcacataggtttgttttgttttgctttcaatctagctggaaatacaggacttgtccatggttgtgaaaaaggcaattaattcagaccccagatgtctgggcctcccagagatgaaaacacacacacacacacacacacacacacacttgcatacattg

SEQ ID NO: 122190 - DNA, 461 bp, Homo sapiens
gaaattcagctcggttccgtccatttcacctgcacagtgtctacctcataaggttggcatttagatgaaataacataatgtactttatgcatagtacatagcttaaagtaagtcctcagtaagtgttagctgctgttattgttgttgttcttactatcattatcatgattcctaccttagtatctcccacctgggctagaagccttctacctagtcactcatggagagtgaccacagcagtgtggaatcatccatggctactgtgggaatatttgtcccttgaaaacagccgatgatgaaagaaggcaccaagcagaacagcctcataaccacgcacagacatcagctatgagaccattcctctcccagggggcccaggcagagatatggtattctagggatggaggtcccttggagagcatctaattcaatttcctgattttattcagcaggtgaaatgt

SEQ ID NO: 122191 - DNA, 622 bp, Homo sapiens
gtgggggtagggacaaaaggagtgagctggcgatgagcacggtgctatttgtagactaattataggcacccagcctattaaggagcagtgttctgtgggtttgggaaggctggcctcctctgcttgtggaatgatgggctttgtttgttcctatcgtaccagccctgaggacacatgactcccagctgattgcagcagagagaggtctgccagggaagtgtgagatcagaggcctggcctggatccaccgagtgaaacattaactccaccctgaagttgcagctgaatggaatcattttccctctgtatctttctcccatactgttatgtgatgctgcagtaacttgcgaggcctcatcctggctcctggagacctgctgatacagctgccttgtggctactgctgagtgggtcaccagccagggtggcactgtttgcagaacgtctccgaggtggagatgatgcaggaggaacaattgtcttcacagctaacttccccaggtttaatgctaggcgattatggttttgattctgttgaaaacaccattcctgtcctcttgatctagatccaatagagtaagagaagaggcctgggctgcaaactcaaaggctggcaggggcc

SEQ ID NO: 122192 - DNA, 252 bp, Homo sapiens
ctgagtggaactgagaattactgaaaagacaagatagttagtgaaaaattttgagcatcaactatgtgccaggcattctgccagttctggggaatatgacagttttcaagacagacaatgtctgcatttttctctgttgagcaatacatgtcaacgatgaagataaactccatcagagcaacctgccagcacctgaatgggagattttgttcttgagtatttcccacaagttctaccagcagatgaaatcgt

SEQ ID NO: 122193 - DNA, 330 bp, Homo sapiens
tagaggatcccttatttccttctttattgatacaaagtggatataatgcagttaaagttaggaaacacggtacatattgagaactgttagttacatgattacatgatcacagcgaggagctgtttctgtaagatcagaatgaatggagcatgctgcctgggaacctgtagctgcttggttagaatgagtgggtgctcagctggtggtaaattttttgtttacctttttgggttgtgaaccagctgcactgtaatttatgttaatttgtgctttaaaagttttcagggttgtactcgatcttaattgtgggtgagaaagatgaaaattatg

SEQ ID NO: 122194 - DNA, 494 bp, Homo sapiens
ccagggtagccctcaaaatcctttaatctatatggagattcagcattagaatgctatcagatctaactatcatgttcttagagatatattacttccaagttctcacatgggatgacaaaaatagatctcccttaaactaatcaattgggacacaactgtatacaagaaacactatagaaaatgcatgttcatattcagggagattacacgggtgtctgaaaaagaagtatttgcccttccccagaaagacattctagacaaatggagaatactgagagctaatgggatcagctttaccacctgacatatatctgcaggcgaaagagctggagaaaagagaaaccaatcagacaatatcaaatcgcattaacgttctcgaaacccatgagtggtggttatattaaagtaactctaccacagacactgcctgtcccatcatcaacgtcctgagcagaaaacatgggagacagttttccagagttttacttaactgt

SEQ ID NO: 122195 - DNA, 232 bp, Homo sapiens
gctagccgctgactctgccccaagcctctaggacactacctcaggcactaagctaaggtctctgcttcttagctcatcctgtagcctcaagggctccccatcctcaggcaaccaggggtatgggtccctcagtgggcctaggcacagctgtgactccttgagtgtggctctggctggcctgttgctacgtgctcgtctcttccctctctctgctcagcagcacccccttgac

SEQ ID NO: 122196 - DNA, 857 bp, Homo sapiens
gcgtaggctacgccaccgcggacgggtcggatccggtccctggacgcggaacagagatcccctgattcagccacccccagactgagccccgtagagtgcgttcttaccttcctgccccgacgaaggtcccagagacgctgcggacaacaccagcatgtcgagcgagcagagcgcgccgggggcctcacccagggccccgcgtccggggacccagaagtcttctggcgcggtgaccaaaaagggagagcgcgcggccaaagagaagccagcgaccgttctgcctcccgtgggggaggaggagcccaaaagccctgtgctggtggatggggagaaggaattataggagctggagaaacaacatcttctggaagggaagacaagacagtatacaatcccctacagaggagtaccagtgctccggggtcctcgagaccgacttcgccgagctctgcacgcggtggggctacacggacttccccaaagttgtcaaccggccccgcccacagccgcccttcgtcccctccgcctctttgtcggaaaaggccaccttagacgatccgcggctgtcggggtcctgcagcctcaatagcctggagagcaaatacgtgtccttccggcccaccatccaggtggagctggagcaggaggacagcaagtcagtgaaggaaatctacatccgcggttggaaggttgaggaacggattctgggtgtcttctctaaatgtctgcccccgcttacccagctacaggccatcaacttgtggaaggtggggctgaccgataagaccctgaccaccttcatcgagctcctgcctctctgttcatccacgctcaggtcagcagactgggaggccccc

SEQ ID NO: 122197 - DNA, 769 bp, Homo sapiens
gcgtaggctacgccaccgcggacgggtcggatccggtccctggacgcggaacagagatcccctgattcagccacccccagactgagccccgtagagtgcgttcttaccttcctgccccgacgaaggtcccagagacgctgcggacaacaccagcatgtcgagcgagcagagcgcgccgggggcctcacccagggccccgcgtccggggacccagaagtcttctggcgcggtgaccaaaaagggagagcgcgcggccaaagagaagccagcgaccgttctgcctcccgtgggggaggaggagcccaaaagccctgaggagtaccagtgctccggggtcctcgagaccgacttcgccgagctctgcacgcggtggggctacacggacttccccaaagttgtcaaccggccccgcccacagccgcccttcgtcccctccgcctctttgtcggaaaaggccaccttagacgatccgcggctgtcggggtcctgcagcctcaatagcctggagagcaaatacgtgtccttccggcccaccatccaggtggagctggagcaggaggacagcaagtcagtgaaggaaatctacatccgcggttggaaggttgaggaacggattctgggtgtcttctctaaatgtctgcccccgcttacccagctacaggccatcaacttgtggaaggtggggctgaccgataagaccctgaccaccttcatcgagctcctgcctctctgttcatccacgctcaggtcagcagactgggaggccccc

SEQ ID NO: 122198 - DNA, 513 bp, Homo sapiens
gcggatcaagtgggaccactgtagatcaggcacggcgggcgagttgcagtacgcctctgaaggggactggagggttccgccatccgtccctcgctgcagctccaaagacgtgggcactgcccctgatggctgtgttacgtctaggtcgacctagacctaacacagtgatattcttattgggaaataatgatccaaaatgagaattcaaagccagggagaggagtttttccaaaagcacccttttctcccagtatcatcatcccctccacacccccatttcaaatcaatagtctgagaggtacgatgtcttactggtaaaagaagtaatacaaaggctgggcgcgatggctgaaagaactgagagatcatgctgatagtaacattgttatcatgcttgtgggccataagagtgatctacgtcatctcagggcacgtacctacagatgaagcaagagcttttgcagaaaagaatggatagtcattcattgaaacttcgggcctagactctacaaa

SEQ ID NO: 122199 - DNA, 311 bp, Homo sapiens
acatctccccaatccaggctaagcctccacaatagtacgccaaaactatcatcacaatagtctttgactcccttgtcccactcctaggtaatctacactctgttgccagattaaccttgtgagtacacatatagcaacatgatgttccctggctcaaaaacttctccaacaaccccatggccttatgaatgaagttcccagtccttagaccagaacactagggtccagtcccaccatacctttcagaacttacatgtccttgccctgcacatcccacccaccctaagcctcctgtcatactggattactgc

SEQ ID NO: 122200 - DNA, 301 bp, Homo sapiens
aaggaaatgaggggaatgtactgcagctatctgggtaaaataataagggtcacatctggcagccatctgggggaaagggataggatatgtcctgcagccatctgggaaaaggaataagaggcatgtcctgcaaccaacttgggatgggaatgaggagtatatcctgcagccatcggggaagggaatgaaggtcacatcctgaagccatctgggaaagggaatgaagggcatatcctgcagccatcaggggaagggaatgaagggtacatcctgcagctatcattcccctcatttcctttct

SEQ ID NO: 122201 - DNA, 204 bp, Homo sapiens
tacgttttccacatggatacaacttcacagtttacaatgcgttttacatatacaatctcatttcatccatacaacaaccccatgagatcaatgacagtttgataggattagttctcacagttgctttatgaaaatccaactgttaatagtaacaactttcaaacactctttttttagtgatactgaatattccttcccttacat

SEQ ID NO: 122202 - DNA, 534 bp, Homo sapiens
ttattgtggaaagatgtgaagtttacagaaaagttgcacaaatactccaatgaactccaggagtccatccacctagtcttgccaactgccaacattttgctacattgctgaatcctctatctgaatgctgaaatcatttgagagtaagttgcagaagtcatgttcctttgcccctaaattcttcctaagaacaaggacattctcttaacacaccagagtcagctatcaaaaccaggaagtgagcactgaggcagtcctaagccacaccctgttcaaacttcaccaacggacctgagtctccgatcacaggcctgtccctccccgtccaggaacattgagctgtctccttagtctctgatctggaacctttcggcctttctttgtttttcctaactttgacatttgggaaggcccatttactttaagactgaccctgagtctgggttggctgatgtttctgcgtggtttgccctagatggacacaactggccagaaaaccctggaaggacctctgtgtcttctcgagcatccgcc

SEQ ID NO: 122203 - DNA, 715 bp, Homo sapiens
ctcccagcctccctctctcaggcttcctctggcaacccatggaaccagctccagtgcctgcaagaccaggcctgaagggctggtgggatggaggatgtgtgttaactacagccctgcctttcccttcccgtcttgttctcctctcccttaggtgctgctgagcctgtaataacagtgatgcccaggtgggctacagggctgtcctcccttgtcttagcatccctgacactcagaaaagggactcctgagctctgaccaccccctacaccctgccaaaccacctctaatctgcttcagcccagttcagccctgctgtgctatggagtgtgaaatgccctcacttgggggttaggagacctgggatcctgccccaggtctgccacttcttggctatgtacccatgatttaaattacccctctgtaaaataggactgatagtctgcaggatgatgagacacacagataaaataatgaatagcagaggactttgtgaacactaagtgatgttaggctctccactccacacctctgctcacatcttcaccaactggtcaaatcttacacaacccgtagacgccactctgaccattccttccctgtcctctgaccattcctgctctgtcctctgagcgctgtcccatcagttccagtcacacctcaccttgcacatacacacgacgctaacaaagggctgtgactggagtggggacttccc

SEQ ID NO: 122204 - DNA, 474 bp, Homo sapiens
ggtctatgcaggctggatgtgagcagtggagattagacacctggtgacagcacacacagggcagggcaagcaccagaaacatggaacaaagagcctgatggcccggcaagcacatgcatgcctgaaacagtctggagcacctctgggccccaaggtggccagaacctgagcccagactggtggcagcaacagtgacagcatcagcaaccacaggaaagagaaggggctacatgagatatcagtgctggaaccctgcttgggaagcctgcttgtctgtccctggctgtataaaaaataactcatagggctgggcgcggtggctcacacttgtaatcccagcactttgggaggccaaggcgggtgtatcacttgaggtcaggagttcgagaccagcctgaccaacatggtgacatcctgtctctaccaaaaacacaaaattagctgggcgtggtggcgcacccctgtagtcccagc

SEQ ID NO: 122205 - DNA, 419 bp, Homo sapiens
ttttttccacatgagaggtccatgccacagctcccacctcacctaggagcagtgttcaccatgccaggttttggagtcagacacacccaggctcaagtggtctctgaatttactcttggaccttaagttactaaatctctccaaaactccatttactcatgcatggcattgtgttaacaatagtccctcacaggattgtttctcagtttaagcaagaagtggccatgacacagtgtaaccctccagtccagcagctctcattcttatttgtctgtttgcagcagccctaacatctggcatgccagcctagagtgggagtgaggataggaaggatcgacttggaggaagggtcaggccacccagaaccctcatccctccctttctagctgctgattcaggctccatccacctccttcaca

SEQ ID NO: 122206 - DNA, 449 bp, Homo sapiens
atctggccacttctttctatcatcctcactgctactgccttaattcaggcaccctcacctctgaacaagattacaataggaataatagtgatgatggtaaacactgtgtcctaagtgcttcacatacattaacttattcaatcccatgagttaggtactatgattgccatgtctattttatagatgggacatctgacagggaagttacctaagattagaatcagtatgtagtagagtcaaaatttcaatccaaatagtctggctcaggatctacactcttaactactatgacctagtgcttctcgccctgacacatacttcctacacagcagccacagggacttttctaaaattcatacatcaacatgtttctttccctgcttaccatattccagcagtagcccactgccctctggagaatacacactcctcaagggggttggcaaggc

SEQ ID NO: 122207 - DNA, 573 bp, Homo sapiens
agaatggattcagctggatactgttatcctaagcaaattaacacagaaacagaaaaccaaatactgcatgttctcacttataagtggaagctaaaatcttgtgtatacatggacatatagttgggaacaatagacactgggaactctggaggagggagggggcaagagttaaaaaaactgcctattgagtactatattcactgtctagacgacaggatcaatacgagcccaaatctcagcatcttgcgaacatacccttctaacaaatctgcacatgtaccccctgaatctaaaagaaaaatggaaataaataaataaagctacagtaaccaacaacagcaacaaaaacaataaccaaaaataacaataatctactttacctgtactccagaaatggaacatctaagcctggatgacagcgcatctgtttatggcatggtttacttaatattttaaacccgccattgagacctactgctcagaaaaagacattcctctgaaaatattactgctcattgacaatgcatctggtcacccaagagctcttatggagatgtacaaggagatgaatgt

SEQ ID NO: 122208 - DNA, 435 bp, Homo sapiens
ggaattaaggaagtttgggtgcccctagcgcctcccaggatgaaggctttatcaatgaattactaaatgattgttcacgaagtcttcaacaatggtcatttgtaattcaccctctcttcctatatgtgtggtccttcaaggccgctttttcctgttgttacactagtgagagggaaccgaacgggctcatattcagcttaaggcacaagcgaaccccgtttgccttcaaccctgagacccgcctcccagcttggcagttagggtggcccttaaggtctcatttggcatcaaggagagatttccagtctgccaagttttcacagtgagtgaatcattgtctgagaaaatgacctctgaatatacatatatgggactattcagaagggctatgcagcaggattcagaggaaagactattaaaattccagtgtacacc

SEQ ID NO: 122209 - DNA, 594 bp, Homo sapiens
tcagctcggtaccgggcagtacggatgtgcctgaccgcaggtgatccaccgcctcggcatcccaaagtgctgggattacaggcatgagccactgtgcctggccagtctttctttcatactcaattgctacaaggttctggggggactaaagcagtcatgtgtatcacaggtccagcaccccatattcccttaacttactgccatgactgactgactgcaggaccataatatctaagactgttccatattaacaatcacgaactctagtattctcttctcatcttcctgtttctttcatctcttcctctgccttattcttctatacttaatccctgatctcatgaagacgctgtcccttgatgactattttgtcatcatcagcctctacctacattgactttcttccttgtctagcccacactccttgttttattatttacccacatcagtatccacaatttctttgccttttgtgtttcttccacttttgtccagcatacctattctagtttagtctagccatttgctttctctcctcatatagaaagggtattgtattagtgaaaatcatgtaaccagattattgccatgatg

SEQ ID NO: 122210 - DNA, 362 bp, Homo sapiens
atctgcctgccgtggcctcccaaagtgctgggattacaggtgtcagccaccttgcccagcctcttagttcactttcaatgttggttttgtcttgtgtaagtgagtagcctttgaaatagcattattttcaccatgtgtttaatgatgaatatgtatttcctttgtgtgaaaaaaagtttttgtgatttgaaggtaattttcaagaaaatttataattctttattttttctgtcttttttcctaaaataattgttgtaaaaacacataacatataatttaccttcttaaatctatttcaatgtacatgtcagggccaggcatggtggtggctcacttctgtaagaccaggattttgagaggcc

SEQ ID NO: 122211 - DNA, 331 bp, Homo sapiens
cacacccagctgatttttgtatttttagtagagacggagtttcaccatgttggccaggctggtttcgaactcctgacctcaagtgatctgcccgcctcggcctctcaaagtgctggaattacagacgtgagccactgtgcctggccgccaatgtctatttccagaatgctttcagcattctaaacagaaactccatatccattaaatattaactcataatttctcctctccctggcaactgctattcttttttttttttcttttctttttttttttgggaaacagagtcatggcataggccacggggagcggaagggggggggatctttaa

SEQ ID NO: 122212 - DNA, 381 bp, Homo sapiens
gaatagtcagacgttgagcagtggagggggactcgaggcatctgaggaaaaggaaaagtagagaaaatctttcagattgaatggagaagttactgagatagaaaatacggaaagggccaggcgcggtggctcacgcctgtaatctcagcactttgagaggccgaggcgggcagatcacttgaggtcgggagttcaagatcagcctgaccaacatggagaaactctgtctctactaaaaatacaaaattagccaggcatggtggcgtgtgcctgtaatcccagcgactcgagaggctgaggcaggagaatcgcttgaacccgggaggcagaggttgcagtgagccaagattgtgccattgcactctagcctggacaacaaga

SEQ ID NO: 122213 - DNA, 827 bp, Homo sapiens
gggctgctggttggctatttttgtggttatttcttgatcatatgctaaatagtgaattattaatatgtatgagtttcttaggaaaggggtagggaattcctggaattgagggttgttccctttttcagaccatatgtgataatttctggaagctgccgtgggactggtgggagtttctttattatattaatgtattataattagcatataacgaccagtgagcacaagcagatgtcacttttgtggccatctttgttttggcaggttttgactggcttcttcacctcatcctgtttcaccagtggggtcttagcgattggtttctggtaaaacaagtcctgccagattcctatctcaggagcaacagaatgcctaaaatataaaaccaatatgtaaaatcagtttcctaaattcctaaatttgtcacacagtagataaaagagtttattattttttatcatcttgatcctgacaatccaactgcaaaatgatctaaatgatctaaattgtttgttcctcacgccatcaccctcctgctgcctgattattgatttgatcattagcatcatttccagaggaattgtcaggaaaaaaagaaagagattgaaactgcatctagcagattttgtttccttgtgatggttaagaaccactagagcaatgcctacattataagatgatgagcttgtcctggttagcacaggactgacttagttttagactataagtcgtataccatgggagccttctaagtctcaggcaaactgaaatcattggtcatcctaatttgacaatctgtataaatccttaacggaggtcagaaatgg

SEQ ID NO: 122214 - DNA, 325 bp, Homo sapiens
ctaagttcttttttctcaggacagctttggctatttggggtcttctgtgataccacacgaattttagaatttttttgtatttttatgaagaatctcattggtattctcataggaattgcattctatctctatattgcttttagtagtagagtcatttttgcaatattatttcttccaatccatgaacatgggaagatgttccatttttgagggaccttttccatttctttcatcagtgttttatagcatttcttgcagagaactttcaactacttggttaaatttattcctaaatattatatatgcacctattgtaaatggcatt

SEQ ID NO: 122215 - DNA, 248 bp, Homo sapiens
agaaaggaagggaaagtcttccatttatggcttgctttacccaacactgtacagtccttgataacctgaggatttggctctcagcttctgcctttctaggctctatgccttctttctgtggctgggatccactgtttccaagtaatccaaaggaaggtgcaaaagtgcttttgtagcctgatgctttaactataaaagccagttcttctgcctccagatttcagctttaacatctcatctttgcataa

SEQ ID NO: 122216 - DNA, 174 bp, Homo sapiens
accagtgactggtcaatgaagaaattaagaagaaatttttaaaatttcttggaacaaatgaaaatagaaatacaacattccaaaccctgtgggatagagcaaaaacagaattcagagggaagtttatagcaataaacatttacatcaaaaacatagaaacggctgggcacatgg

SEQ ID NO: 122217 - DNA, 557 bp, Homo sapiens
agcggacgggggcaagttcccggaagagggaaggtggctgaatccgggaagagcggcggccgggagaaaaactagtgaggctctgacaacccggcgtggctgtcggcgacgctgctacgggcgtgagccaccgcgtccggccccatctgttattattcaaggtattttagtgcatcaccgcgcacacgatcttgggtctcgccattattttgttatctctgtacttgaagaagagagacattctgactggcattaactcaacattttgtgtgatggactattacatatggctcggaacgcatttttgtttgctatatagaaatgatcttctcttctgtgtgataaatgatacagctaaaagtctcagaattaatcaaacttaccatcaattaatttcaaatttttgactagcttccttaagtatttaaattattatgatttgcaaaataaccttgaaagtcattcagtcaaaatggctttgaaataaaatcatcacatgttaaagtaagaaattatatcctacctaataaggacaatagatacattaaaatagtctc

SEQ ID NO: 122218 - DNA, 524 bp, Homo sapiens
taccatctatgaaaagatcacaacccagaaggcataggcaactgccacggatctaatgaataggtgatcagaagacctcccaatactcttgaaagtactgagaactgattccctattctctcacctatgaccagccggagagaaccatattttctggtcttccagatgaatcctattcaaaatattattcactgtgaggctataattattagtccttaacttactacttaacagtagccctcttctaagctgttatctctctgcctgttgtttggcttaggaaattcctgcaggacctgccttgactttgaaccttttttatctcaccttatttgtcttattcccactacattagttaaaacaaaattcccctttcctgtccagacacatcagacagataccaccaataagaccctccctgcttactggcaagagcatatcaaaaacacctagacagttttcctaaaaggagaccattaaaaaataaattcagaacctaaaccaaacttctaggtgtaattcat

SEQ ID NO: 122219 - DNA, 340 bp, Homo sapiens
acagtcaagtcctaacatcctacatggggaaatctacgcagttagcagagccaaatatgacagcgacatgagccagccactttgggaaacagtcaagtcctaacatcctacatggggaaatctacgcagttagcagagccaaatatgacagcgacatgagccagccactttgaacctgacgtttcatcgtcacgtgagactgtagctctctgagtcccacaccctggtcaccttgtcctggttcctgcacctttgagggtgagttattcaagtcagccggtggagtagacggtgctcctgatcattcctaaaaggcaacagccttttctgcatttcttgc

SEQ ID NO: 122220 - DNA, 221 bp, Homo sapiens
gtggtgagagtaagtggaaatcgaggcaggcttgtggagaggatgtcacctggagcagatgtggccgggttatggggaagaaggacctctgagaggggattcagatctgttccctgggtcacagggaggaatgttgtaatggagccagtaggttacagcagttgctgaaagagggtgtgagatgggacctttgcatcatacacacacaaacacacacacac

SEQ ID NO: 122221 - DNA, 395 bp, Homo sapiens
ctgacttaaaaaacttagaaggctgctgaaatgatgtctacattccatacattctgtaggagtagaggaaaggggcctctgtgtaatctcctcttaagtcactggcattataaactactacataaatatattgccagtcttctgaaaggggcacagagaagtcttagagtgaggggctacctccactctgaagtttaaccctgaatgcagaattgccggagcagagtaaaggaagggaaggaggcaaaagaaatagatgcaagaggcaaagttttctttcttctacaggcttacagaagcttatataactgggttattctgagagtgaggaaatatcaagaaagagtactaacttgactatcactacagtctaattcaaacatttaaggaatggg

SEQ ID NO: 122222 - DNA, 627 bp, Homo sapiens
cctcattccaagtatatgtttcttttttccccttaattaaaaaacaaagatagtgaaaattacaaaacagcaaacaaaacaaaaatcaaagaaaaaaacctgaattgctgtttgttctctgaagtcttccaagaaatagcttatagttaaatttggttttcttgactcgaagtttcaaatgccaaactacacttatgaaagtcatataatccatcattctgaagaaatgtaatactctggctaacaaagaaattctgattaaattgaagtaattagcagaacaccaaacgtatggcatgagctctgccactcagttgtcctgtgctcatggcagacttcacgtgattgaggacagatccatcaatgttctttttatccctgagccaaacagggcctgagaattcttattatcaaagagctccaggcagagactaaccaccattggaagttaatgaataatttgaacgtatttgctatttttatactatatcatataccttcttcgttcctctttcatttctctttccaccatttccctatcctgttttaccagagtagaaacactaaatacacaagagaaatactcccaaaaaatactgcataacccgaaactacataaaactaaag

SEQ ID NO: 122223 - DNA, 392 bp, Homo sapiens
tgaatattttctcttattctgtaggttgcctgcttactctattgatagtttcttttgctgtgcagatgctccttagtttaattaggtcccactcgtcaatttttgtttttgctgtaatttttttgaggacttggtcataaattctttcccaaggttgatacccagaatgatgtttccttggctttcttctaggatttttacagtttgaggtgttacacttaaatttttttttttaatttttttttttttattatactctaagttttagggtacatgtgcacattgtgcaggttagttacgtatgtatacatgtgccatgctggtgcgctgcacccactaacgagtcatctagcattaggtatatctcccaatgctatccctcccccctcccc

SEQ ID NO: 122224 - DNA, 500 bp, Homo sapiens
acactctctcacacaccttcacacatgcatccatgggtgtatgtcaaagagacacaggagccagtgaaaagaactctcaatagccaaagtaggaacaatttgaacaataaaataaataagagtattggattatattctaaagtataaaataaatacctgtattagtctactctcacactgctaataaagacgacccaagactgggtaatttttaaaggaaggagatttaattgactcacagttccacatggctggggaggcctcacaatcatggcagaaggcgaaggggaagcaagacacatcttacatggtggcaggcaagagagcatgttcaggggaactgccctttaaaaaaccagcagatctcgtgagacttattcactatcatgagaacagcatgggaaagacctgcctctgtaattaaattacctcccaccaggtccctcccacaacatgtgggggattgtgggaattacaattcaaaataagatttgggtggg

SEQ ID NO: 122225 - DNA, 186 bp, Homo sapiens
gtgaacagatacaagagaacctttttaacaaagtgttgtgcttattgtaggtctttaataaatgctggatgcttatttttgcatacttctgttacacttaacattgttctgcaattatataaatttatctgtaattgattgtttaatctgtcagtgagcttcataagaaaaggagcaattatttta

SEQ ID NO: 122226 - DNA, 649 bp, Homo sapiens
atgccctgaaagggagcacacaaaacagattcaacaccaccattcagatcaagacagtgatggtctccaggtcctgggagactgccgtgctgcctgagggccattctctggcacggtgccctctgcctcatctgagctttccatctgtggaagcagccattactcctgagtttggcttctctcccgaaacgttatgcttgtgggacccatccatttgtttgtgtgcagcaatgtttgctcgtctcatctcacaagtgtgccactgttgaacatacccacctccagtgtccattctcttggggacatttgggttgttttcaggttggagctttcactgggtggaatggctcgcgcctgtaatcccagcactctttgggaggctgaggtgggtggatcacaaggtcaggaattcgagaccagcctggacaacatggtgaaaccccatctctactaaaaatacaaaaaattagctgggtgtggtggcgcacgcctgtaacaccagctactcaggaggctgaggcagaagaactgcttgaacccaggaggtggaagttgcaatgagccgagatcgcaccattgcactccaccatgggcgacatagcgagcctctgtccccccaaaaatagaagttaaaaaaaaaaaacagaga

SEQ ID NO: 122227 - DNA, 485 bp, Homo sapiens
aggcagaacactcaagtgggaatggcttttactgagaggtaatcttgtggcaggttagagagcaagtctgtcagcccctccatgtactctctttcccagcagaacgtgccagctgctcttctccagtgtttctgaggctgtgtttcaggaagctgtaagcagccacacaggttcaagctggtacactgtcctcttctctgtaccacaatggccaaaccagaaatgattagggatgttactcatagaattcactaaggaaaattttgctaggtcttgtgttcaacaacccgtgttatcagagaaatcctcttgaagcttaacctaaatctcctgcaatcatttggattcacttcctcttctgatgtgagtcagcctttcatttgttagttgatgtattcgtccagtttccttctccacacaacccacccccaacctcaaacacacgtgtgtccacgtgcacactcatacactctcctcacactctc

SEQ ID NO: 122228 - DNA, 126 bp, Homo sapiens
ccactacgtcattcttctattaacttttcttttaaagaaaagtctccaaagagttgctctttccacttcttcaccttccagtctcgtttttttttttcaatcagctttattgcagcataattgaca

SEQ ID NO: 122229 - DNA, 228 bp, Homo sapiens
tgtatctctaactagagagaatagtatacttaactacctcagggttgtaaggattaaatgagttaatatattactcaaatttctcaatgttattgcatgttaatacattagatatagtagttcctggcatgtggtaagtgctaaataagtaaattactgttatttggggttatttctttaggatagattcctaaaatgggattatcttctcaaagtatataaacattt

SEQ ID NO: 122230 - DNA, 221 bp, Homo sapiens
aagagaggtgctatgggaaccaggtgccaggtgaggccaggtgaagacaggtgaggccaggtgaagataggtgaggccaggtgaagacagatgttacgggaaccagcaggtagaaagctaagtgctgtggagaaagagcgggaagaaatggaggaggtgtctgggacaacagaacttgaaaagaacctgcttctcagtagccccaagtcctgtgtgtgcct

SEQ ID NO: 122231 - DNA, 358 bp, Homo sapiens
tctgactccagctcactgctggcttcaaggatggcactgtttttcctggcacctgggcactgccagaaaccatgtctcttccatgaagcaccacttctggcctaacacagggtttggcacatggcagaagtttggtatgtggcaaacaaaaatgaccataacccagtgcctgctctaaccagcaagtaacttggcctatctgagcactgtatgcattatagtatgcagcactgttgggaagcacttagaaaagtgcaaagtgctaagtgggggatggggagaggatgatgatcatgatggtgatgatgatttgcatgtattgaggccagaaaaggcttgtggggggcatgttgcggca

SEQ ID NO: 122232 - DNA, 297 bp, Homo sapiens
tgcacacgccgagtcaccagactcgcagaaaggtcactatggacgaagttgttgcaggtccgaatggacgaagttgttgccacacgccgagtgaccaaaccccagtgcctgctctaaccagcaagtaacttggcctatctgagcactgtatgcattatagtatgcagcactgttgggaagcacttagaaaagtgcaaagtgctaagtgggggatggggagaggatgatgatcatgatggtgatgatgatttgcatgtattgaggccagaaaaggcttgtggggggcatgttgcggca

SEQ ID NO: 122233 - DNA, 691 bp, Homo sapiens
gcagatatgtcagtgttttctccgttgataagaatgtcttgggagtaagagtcatcttccctggtacagaaaggaagatacctttacaaggtagatttctcttataaatgttaatttcccttagaaaagggaaacttaggatctgtcttcagagcttttcctgtgtctgctgtttcttaaaataattgactcagtgtaatccttatgccaaaaagacatgttttcgagtggcgtattttggtcttctgtagtcatataagaaatttaaggcaatagcagatatttgtatattttcaggaaattttaactaaaatttattttaaatagcacaattccttaaagttgcttttgcaatgggatttttttggtataaagttgaacagaaaatgacaaggaccagccaggcgcagtggctcatgcctgtaatcccagcactttgggaggccaaggcgggcggatcatgaggtcaagagatcgagaccattctggccaacatggtgaaaccccacctctactaaaagtacaaaaattagctgggagtggtgctgcacacctgtagtcccggcgactcgggaagctgaggcaggagaatcgcctgaacccaggaggcggaggttgcagtgagcagagatcgtgccactgtgctccagcctggtgacagagcgagagtccgaatcaaaaaaaaaaaaaa

SEQ ID NO: 122234 - DNA, 268 bp, Homo sapiens
cactgcaagcatggaataggcggctaggtaagttcagccaagattgaagttttactctgtgggagtaataaaaggacaaggaacacgaaggctaaggacattaacacatggaggaatgatttcagtggaggttcagttggatgaagataggttagtgctgatggagaatgacctggcagtgtcagggggcaataaacagggtagtggtagtacctgaataagggaactagctatgagtgcttctccaactgtaatgctaatgtgaatc

SEQ ID NO: 122235 - DNA, 195 bp, Homo sapiens
ttaccaatgtcacaaattacatctttttaataaagttcatccatttacatggtttttttagttatttatacttttgccttctaaaccctataccagaattaaaagtgattcacgcaccactgttacaatattataggattctttgtttaggtattaccagtaaactttatatttccatatgctctcatgtttctg

SEQ ID NO: 122236 - DNA, 351 bp, Homo sapiens
cgagctcttacccctttggggtctttgctgcaccttctgccctttacattccaggcctcactctgcagccacataaatttgataacttagatgaaaccgtccatttccttgaaaattgcaaatcaccaaaattcatccaagatgaaatagataacctgaatcatcctggaatttattaaagaaggactagatggtttcactgatgaatcctactgaacatttaaagaaaacaccaatttgagaagaagacggagtacgtacttcctcactcattttaaaggccaatcttaccctgctatcaaaaccagatgaatacagtaccaaaaaaactacaggcaaatatcccttttg

SEQ ID NO: 122237 - DNA, 474 bp, Homo sapiens
tcctgaatgttgatgatcttcgttcctatccatattctgaattctatttctgtcattttggcttggttaagaaccactgctggggaactagtgcagtcaacttagcagcaagaagacactggcttttggagatgccagagttcctgtgctggctctttcttatcttcattggctaatgttctttcaatctttgaagctgctgtcctttggatggatttttttgggggtggtgcttttatcttctttgatgtctttgggggtttgattgggttcagtcaactggcttcatttctgacagatttttgggggactaaggctcagctcagcactcctgggctatgtcctccaacactggggggctggtattgggcactcagctttgttctctggctctctgaggttgagaacatgcagcactggaggggttgaggtgttcttgggccacagccacaacactctgaagggtagtgccag

SEQ ID NO: 122238 - DNA, 419 bp, Homo sapiens
ccacgccccacactctggccactcttcctctgcaggactctcctcttctggccacattgcctctgcaggcctctccctctcctttgaccacagtctctctgcaggatcctcctctagtttctccctctcttttggcctcaccgcctctgcaggctccgccccacccacaggccccaccttctatgactacgccccctatgcaggccccgccctctctccagaccattcccccaatacaggtcccacattctctgacctcaccgtctctgcaggcacctccctctgctctggctttgtcctctctgcaggccacaacttctttgggctcacccactctgcaggccacacattctttcctgacaatgtcccctaggcaaacccaagcttctttgatctcaccttctcggccggcctctact

SEQ ID NO: 122239 - DNA, 346 bp, Homo sapiens
caatctctgtgagcagtgaatgtggaaacttagaagccagataatttgattttgacaaaacatactttagggagaggtgttatcttttctgctttcccaagttttttggtcttaaccacaaataaacattaaaaagaaccaagccaaacaaacaaagaaaaaacccacagtcttcgacaggagccacgcaggccttgtgccgttgtgaggctggctcctttcactcaccattggtctttgagatctgggcctgtggttgtgtgcagttgtgtacggctcattctcgctgctgagtcctattgccctgtctccacacatagggggtgttcacagcagccccaagaag

SEQ ID NO: 122240 - DNA, 349 bp, Homo sapiens
tggaaggatatagggaaccccaggaatacagagattacattttgagaactattatactacttatacaagtgtactcagtttctgaaaattcacttatgacacgggcactcttctataagtacatcatacttcaataaaagatgtattttggctgggtgcagtgcctcacgtctgtactcccagcactttggcaggccaaggcagacagatcatctgaggtcaggaattcgagaccagcctggccaacatggtgaaactccatcactactaaaaatgaaaaattagctgggtatggtggtgcacgcctgtaatcccagctactcaagaggctgaggttggaggatcactt

SEQ ID NO: 122241 - DNA, 108 bp, Homo sapiens
cataattatgttatttgtatcgtttcatagaataaattaaaacctaccctgtgagagaacaagaagaaaaagagagtcagttgaaaatgaaagtgattaagtccatct

SEQ ID NO: 122242 - DNA, 336 bp, Homo sapiens
gacaggcattaatcacacaagcaggaagaaagctaccagctgagccacatgctttgaaggaaaagatcacatctctaggctgaaaagtgagggaagtgaagttgggtgggagcctgaagagaatgagcgtggtctatgataggtggtgctggtgctagtggatgtggtggtgatggtggagttgatggtgatgatggaggtggtagtgatggtggagttgatggtggtgatggaggcagtggtgatgatggtggtgatggtgatgataaggtggtggtgaaggtggagttgatggtgatgatggaggtggtggtgatggtggagttgatggtggtg

SEQ ID NO: 122243 - DNA, 560 bp, Homo sapiens
tgcagtggtgcaatcatggttcaagtaatcctcctgtctcagctttccaagtaattgggtctacaggtgaacaccaccatgcccagctaattaaaaatgttttttgtatagatgggctcttggtatgtttcccacactgatcttgaattcctgaccccaagtgatcctcccgcatcggcctacacttcaatgcttgctttcctaacaaaattgatcctaaatttgtgcaaagaccctgctgtccaaaaattttcaaatgaatactgaaagcataaagtgaaaaattactgtttatgacaggttgagcatcccagtttgaaaatttgatatctgaactgttccaaagtccagaactttttgaatgccaacatgacactcaaaatttcagatttgggattctcaactgcaagtataatacagtattccaaaatctgaaaaaaaaaaaaacaccaaaacacttctggttctaagcattttggataatcacatttattttgtgattttcactagggaaatctgatttacaagtattttaatgactactagatacattaagctag

SEQ ID NO: 122244 - DNA, 140 bp, Homo sapiens
tttatattttataaaactcaacctctgtatatcatacaaacattatctatgttggtaaatttgtagataatttttgaaattctctcatccacaagtctaagaactgaaaatccctaactcacttagagcatttcattatc

SEQ ID NO: 122245 - DNA, 319 bp, Homo sapiens
ccatactgcaccggctcgctgagaaatcagactatcagactttgtttcctctttaaaaaaaactttttttagcaaggtatgggaggaagtgaagagtgagatccccatccttggagttaggacaaaatttattttgtgcttttcattgctaaactaatcattaattaatacttcccatgagaagcaacttggagactgagtacaagtgaacgcggtcagccttgctgtcagttggttcctggcttgcagtctcaaacctgaccgctgagagcacagacaattctgagtatagccccagtggtttaagaaaggtcagatt

SEQ ID NO: 122246 - DNA, 362 bp, Homo sapiens
gagtcaagcaagcctcccacatcagcctcctgagtaggtgagtaggtgggactacaggtgtgtgtcattacatctggctaatttttaattttttgaaatagagacagggttttactatgtttaccaggctggtctcaaactcctggctcaagtgttccttccacctcagcttccctgtgttagtctggttccacactgttataaagaactacctgaaactggggaatttatgaagaaaagaggttaaagtgactcccagttctgcaggctgtacagaaagcatggctgcgaggcctcaggaagcttacaactatggcggaaggcaaaggggcacaagcacaccttaccatagcaaagcaaaa

SEQ ID NO: 122247 - DNA, 330 bp, Homo sapiens
aaataaatgaaaagaaaagctgggtttgcagattagatgatttcatcttggaatgatgtcaacactactcgaagtgacctagattcaatacaatccttataaagattccaatgacatttttgataaacagaaaaacctatcctaaaattcatatggaatctccagggcccatgaataggcaaatcaatcttgaagcagaacaaaattaaaggtctcaaaacaattacaaaactgcaataagccaaaaaaaaatgtggtcatggcataaagacatacttgacacacttatggaccaacacaacagagacctcagaaaccaaccctggcata

SEQ ID NO: 122248 - DNA, 498 bp, Homo sapiens
tatggctcacaggctaaaatggctcttgcaattttaaatggttggggaaaaaggatcacaagaatactattcttcaacacatgaaaatgatgggaaattcaaatttctgcatccataaataaagtattattggaacacagccacacccatctgtttacatatcatcaaggcagctttcacgctacaaaggcagttgaatagcaacagagatggcacagcccaaaaggcctgaaatatttcctgtgtggccctttacaggaaaactttgcagagccttttcctaggagaggatgatcgaccagccggacatggtctctgccctcgtggaatctgcagtgcagcaggggagacagctattaaacccgtgccctataaacagcccgtgcagaaactgaccaggtgaatgcatgataatgcgatgaagtccacttgctggaatcccgagggacacagggcagacccagttccagcagcagcagatgcggtagccccaggcat

SEQ ID NO: 122249 - DNA, 800 bp, Homo sapiens
gattactgtttaaaagtccgttcattctgcttcgtgtactggaggatttgcttcatgcttgttagagatgacactcaaagttctttacagaatttaatcctgaccctgtttttaaggggtagacacatttatctctttcgcagatggagatttttgcctaaagtctgtgctgagggacagagaaaaagaaatagttctcttcccgtttttaggctacatgggttttcaagatatatttgtatcccctttctcaacatgtaaacctcagtcataagaaaatgaagggctccccctcacacctctgttctgtcttcacgcctccctcgtttctccatgactcctcttcctccttctccttctgttcctcctcctccttccacttttccttcctttcttccccctaatccctacccttggctccttgggtctgggtctgtctgacaagcaggcatttagtccaaagggaacgattcagcccatatcttctttctcaacccagtactaagcagggcagccatcttagtccacctgaactgttttcttttttgccgtagacctcaatggacttcatttgttccctttcagctctctggtcttgaaggagacaaagtttttaaatagtgcagactaacatttaaggtttgctttgctcttagcttaggcattttccctttccctcttttcacaatgtggttttcttttacctagttaaaaagaaaaattagagctttcatgccagtcaggttggggcatgctctagagagacaaagtcaagacttgcaactggcaagaagtcaatc

SEQ ID NO: 122250 - DNA, 236 bp, Homo sapiens
tcaataaatggtgttgagaaaactggatatccacatgcaaaagaatgaagtcggatccttactttacacaatatacaaaaataaactcaaaatgaattaaagacctaggcataagaccttaaaatataaaactataagaagaacacaggagaaaaattttataacattgccaaatccactgttataaaatttttctcctgtgttcttcttatagttttatattttaaggtcttata

SEQ ID NO: 122251 - DNA, 567 bp, Homo sapiens
aacccagtgtggtggtgcacgcctgtggtcccagctacttgggagtttgaggtgggaggatcgcgtgagcctgggatgtggaggttgcagcgtgctgagatcatgtcactgtactccatcctgggtgacagaatgagaccccatctcaaaaacaaaaacaaaaaccccccaaaaaccttattagtattttagcacaatttggggaagaaatgaagttaaatatatgtatgttccatcttctctttacccagaacttatttctaattttttttttgttaagcatcttttttgttgtggtaaaatatacataaaatttattatttataagtatacagttcagtgacattaagtacattcacaatgttttacagccatcactactttctagttctagaacttttctatcacaccaaaaagaaaccccatactcattaagcagtcactccccattccctccctccctcagcccctggaagccacgaatgtgctttttgtttctatggatttgccttttgtggatatttcatataaatgaagtcattcagtatgcggccttttgtcacatgt

SEQ ID NO: 122252 - DNA, 315 bp, Homo sapiens
cagagtcacctttttgctgtgctgagggaagagtatctaggcctctggctctggctctcatgagctaagtgacctcaatcagatcacttggcttcttcactgcagtgtaaaatgcaggagctgggaaggtgaccctgtggttcccactggccctgcgttgctatgattctgtacttcttaaggtgctgtgttttttcccatcatcaaactaatcaggcaccaccttcatgccaaacccccgatagcagaaagtcctctaatagcaaagccagctcccatcaacagggcaggaattggcactatttgtgtacagtt

SEQ ID NO: 122253 - DNA, 262 bp, Homo sapiens
tctgcattggaaattggctgaatgacagtatgtgggtcctttgcaatttttctctgtataaagagtgccatagtggctgcatctgagcatgcctgcattcctacagatatctaaagattcctccatgtcaggcagttgaaagggtgattgcttcctctaggaggggacatttcctgttttcttagatctgacaagattcctccctgtccccaactatcaaagtatccgtttccagcaagatgagattcctcttcagttaaac

SEQ ID NO: 122254 - DNA, 337 bp, Homo sapiens
caaaaatagaccaatggtgcttaaactaaaaagtttctgcacagcaagaaataaccacagagtaaacagacaacctatagaatggaagagaatatttgtaaactacgcatctgacaaaggactagtatctggaatctacaaggaactcaactcaatgagaaaaaaaacaaccccactaacaagtgtgcaaaggacatgtacagacatttttcaaataaaaaaaaaaaacataaaaatggccaataaacatataaggtttatattctttcattttgccaatgagaagaacaacgcctagaatggttgctgactatcagggttcatgtgccaataagca

SEQ ID NO: 122255 - DNA, 325 bp, Homo sapiens
tggaaaacatgcctgtaatttattttcctggttttttttctttaaatttttacctaagttcttaaaattctaaatcaaagatcgaaagtggatctgtaccagcctccacagttttctttgggccagaggggaaaaggaggtaaaaatgaaggaaagcaccactttctttgtggagtattcactcctcctcaataatatctcaaggctcacaaaagggtccctcattgagactctgcatgcacatacccttttttctctttgctgcttatggtatccatctgagaatttcactcagaagtagcaaacattggcctagcatggtagc

SEQ ID NO: 122256 - DNA, 268 bp, Homo sapiens
cccaaataacgctaccccaagatataatgatcaaactctcaaaggtcaaggacaaaaggaggatcctaaaagcagcaagaaaaaagaagcaaatgacatgatgcaaaggagctctaattcatctggcaagaaacttcactggaaactacacaagccaaaagggagtgtgacaacatattccaagtgctaaagaaaaaaaattaccaacccagatgacccagcaaagctttcctccagacatggagagatcaagtatttcccagacaaa

SEQ ID NO: 122257 - DNA, 452 bp, Homo sapiens
agatcccactttgctggatcgacagtctcggtctgttgtggatgtcctgaagaggaataagaacttcaaagccatcgagaaaatcaacagtcacttagaaaagctagctacgtgttctaaggacctatcaggattcagcaatggtgatggacccactagtgaaaacgacattttcaggaaggtcttggagcagctggtgaagtatatgaactcaggaaaccggttattgcataaaaactttctgaagcaggaagtagttcagaggttcttgcgtctcctttctactctgcaagaaattcctcctgacctggtctgtgatattaatcaagactgtgccaccaccgtcttcaaattcttattggaaaaacagagatggcctgaggtgcttctgctgctgacccgcaaagtaagtggagaaccaccgcttggggattgcctcatcaaagactgca

SEQ ID NO: 122258 - DNA, 239 bp, Homo sapiens
acacaatggatggctcttcttaagtgaagaaagactctataggcttttacacagcacatgaagcagtaatccagaaagaaggaaatgcagaattttattatcaaagtaagcgaattgactgtgcagaaaaattgtagggttctgtggaaggaggtattctgccagcctgaactatatttaagaaactttgtaaaaaataaaaatgtatatagctgtgagctcaaacaaaaactgcagac

SEQ ID NO: 122259 - DNA, 539 bp, Homo sapiens
taaggtatgtaccaaggagggaaagacatcaatgaaactgcatagctggaatgattaccaaacacagaggcaagacagtgtccctggttagctttagggtctgcctgtgcagtcctcatcactgtggctatcgacttgcttgtcctagaaaggtgaagaatagtaaataactcctaaggcttttttttttttttttctgagacagagtctttgctctgtcacccagactggagtgcagtggcatgatcttggctcactgtaacctctgcttcctgggttcaagtgattctcatgcctcagccttccaagtagctgggattacaaacgtgtgccaccacacccagataatttttttgtattttcagttgagatggggtttcactgtgttagccaggctggtctcaaactcctggccacaagtaatccgcccgcctcagcgttccaaaatgctgcaattacaggcgtgagccaccacatgcggccaactcctaaggctcttatctgactggtatacaaaggaccagatgaatctatctagt

SEQ ID NO: 122260 - DNA, 119 bp, Homo sapiens
atatatatgtatgagtccatttacatgaagaccaagaacaggcaaaagtacgttatggagatagaagtcagaacaatgattgccttcgtggggtgagaggggtggtttcttttcttttt

SEQ ID NO: 122261 - DNA, 353 bp, Homo sapiens
aactaaaataacttgatggaagggagacaagaagagggaaagtagaaatattctaattttgatattgttcacagtagggagaaaataagcgctgtctagagaaataaaaggattaaagatatcatgtcatattataattatgaagataaccatgggatcaaaaacgcagctttccaaattatcagaagacatacacacagaaaataaaacaaagacaacagagaccgtatggtgaaaactgacaacccccacaaaactataaaagcagaaagcctatcaaacaatgatgacagaactaagaccaaatgcatctgccatatctgtaaatgttagtgagccatacacacttgctt

SEQ ID NO: 122262 - DNA, 640 bp, Homo sapiens
ttgtacttggtccttgctgttcaatttccctacttgcactgtggcttcttgacatcctgccaagtttcagacactgaaatatgaatgggattaataaggattaagaaagagtaaatgctattaacagctcttctattgcatgcatctatcttactcaggagccaatgacccaccagggaaaaagaagggctgggagggaactgagctcattcaacacctgctcacagatggcaaggtcagcagttaatgctgggctttctccaaccacaatcatgtgtctgtcaaaggtctgcaccactcatcttgacacttaatcaaagaacacttcatcgaggatcgtcagagccgcaggagccattagcaaccagtggcttccctttttgtctttttctttttcttttttttttttttagggcagcaaaatcttcttgagaaatacattttataagaaacccaaataaactcggataaaatagttaacattattagtaagcctcaatttgaaaattccaaattcacaacatttgcttattatagagtatcaatctattttataaaggcaatttgagcaaacaaaaaatacataaaatcgcttgttacatttccttcatttccgggtttcatttagttgtacacgatc

SEQ ID NO: 122263 - DNA, 186 bp, Homo sapiens
ttctccgtgtagtctgggcttgctcacgtggtagattctcaagggttaggagaaagagaaatgtaaatgaatatgtaaatagtatttgtttcttgttcatcactggaattcagtatccttacccccaaagatttcaaaattccttactgaggccaggctcagtggcttacagctatgatcctagca

SEQ ID NO: 122264 - DNA, 1424 bp, Homo sapiens
  misc_feature (601)..(601): n is a, c, g, or t
ttttccccaaccagaattaagagaaaaaaagtgaatatggtttttgctcacagaatggataacagcaagccacatttgattattcctacacttctggtgcccctccaaaaccgcagctgcactgaaacagccacacctctgccaagccaatacctgatggaattaagtgaggagcacagttggatgagcaaccaaacagaccttcactatgtgctgaaacccggggaagtggccacagccagcatcttctttgggattctgtggttgttttctatcttcggcaattccctggtttgtttggtcatccataggagtaggaggactcagtctaccaccaactactttgtggtctccatggcatgtgctgaccttctcatcagcgttgccagcacgcctttcgtcctgctccagttcaccactggaaggtggacgctgggtagtgcaacgtgcaaggttgtgcgatattttcaatatctcactccaggtgtccagatctacgttctcctctccatctgcatagaccggttctacaccatcgtctatcctctgagcttcaaggtgtccagagaaaaagccaagaaaatgattgcggcatcgtggntctttgatgcaggctttgtgacccctgtgctctttttctatggctccaactgggacagtcattgtaactatttcctcccctcctcttgggaaggcactgcctacactgtcatccacttcttggtgggctttgtgattccatctgtcctcataattttattttaccaaaaggtcataaaatatatttggagaataggcacagatggccgaacggtgaggaggacaatgaacattgtccctcggacaaaagtgaaaactatcaagatgttcctcattttaaatctgttgtttttgctctcctggctgccttttcatgtagctcagctatggcacccccatgaacaagactataagaaaagttcccttgttttcacagctatcacatggatatcctttagttcttcagcctctaaacctactctgtattcaatttataatgccaattttcggagagggatgaaagagactttttgcatgtcctctatgaaatgttaccgaagcaatgcctatactatcacaacaagttcaaggatggccaaaaaaaactacgttggcatttcagaaatcccttccatggccaaaactattaccaaagactcgatctatgactcatttgacagagaagccaaggaaaaaaagcttgcttggcccattaactcaaatccaccaaatacttttgtctaagttctcattctttcaattgttatgcaccagagattaaaaagctttaactataaaaacagaagctatttacatatttgttttcactcaactttccaagggaaatgttttattttgtaaaatgcattcatttgtttactgta

SEQ ID NO: 122265 - DNA, 156 bp, Homo sapiens
accttttccacagatatgttatctctcttaggcaatttggagagggtgtgcttcctgtactttatatacagctccccttcccactaaccttgtgcattagctgggcaccccaaagcaatgactgccccgattacaagggcaatgcaaaaagaagtt

SEQ ID NO: 122266 - DNA, 532 bp, Homo sapiens
aggagccagacaggaactagtattaagcctcactccattgttagcctccaaaatttgaggacattttgttcctgcagtataagttagcctaaactgatctactcttttttctccctttaggcaccatcctccctctttcaggcctaatacacacacatacacacacatgcacacacacacacacattctctctctctctcattcacacgcagcttagcctcctttttatctcgagggatagagttccctatcaactgttccactgctgtctttctccttcattgaagatgtcaaccttcatcagaatttaacaattcaaataaggtttgaattctataaatgtttgtagaacatatcccatgtcaaagtgtggatttctggaggtttaaaataacccaagccctggacccagccttcaggaatcgaagagtatggtgtgggtgctgtctattcaagtagctatccaacaaggtagacaatgttgggtgctgataaagggtgtgctttgatcctcagtgacctgtttatgtag

SEQ ID NO: 122267 - DNA, 456 bp, Homo sapiens
ttctggcctcatccccactttacagatagggaaaccaaggcagagagaagtacctgacccaggagtggaaacaccaggtctaagcagatagagtggcccaaaacctggcatctgattcctgggcagttaagttggcctttgaattaaggaagtcctcattagtgagctgcacacacacacatcagaagtgtccaacacagatggtcgtgacacagtggccatccttaacacacacacacccaggcccctgaggaaagaaactgctggaggttgtctgttcaaatgtgaaggtatgacatgttcgacacataagacaaacctggtagctaccagtaccccaaagtttctttaaggaggctctgaagataaccaatgaaagtgacatctggccgggcacggtggctcacgtctgtaatcccagcacttcgggaggccaagaagggtgggtcacttgag

SEQ ID NO: 122268 - DNA, 376 bp, Homo sapiens
aaagaaagaagaaactcttcatgcaattcaggttacattatggccaagttcaaaaatctaggggcagaacagtgcagggaataccccactgtgcattaaaggagagaggcctgccctggccaatatgacaaaaccctgtctctactgaaaatacaagaattagccaggcatggtggtgggtgcctgtaatccctgctactcgggaggctgaggcaggagaaacgcttgaacctaggaggcggaggttgcagtgagctgagatcacgccactgcactccagcctgggcaacagagcgagagtctgtctcaaaataataataataataataataataataataataataataatgaaaagaaaaagaaaagaaaaagg

SEQ ID NO: 122269 - DNA, 601 bp, Homo sapiens
ccttttctgactcagatattcccaccgtcctcttgtcccttataattccctgtgattacattgggcccacctggatcatctaggacaggggtccccaactcctgggccatgaaccagtagcgagcagtctgtggcctgttaggaactgagtcatgcaacaggagctgagtggcgggcaagccagcattaccacctgaattccacctcctgtcagatcagtggctgcattggattctcacaggagcgtgaaccctaacgtgaaccgtgcatgcgagggacctaggctgtgtgctccttatgagaatctaatgcctgatgatctgagggggaacagtttcatcctgaaagccacccccctccatccctggcaaaactgtcttccatgaaatccatccctggtgccaaaaagcgtggggacctctgatctgggacattctccccattccaaagtccttaatgatacctgcagagtcccttttgccatgaaaggtaagagactcaggttctggggacggggatgtaggcatctttacgggctattctgtgtactgcacctgttcagcttagttccaggcacatagtaggggctcagtacatcttt

SEQ ID NO: 122270 - DNA, 245 bp, Homo sapiens
cccgctaccatgcccgggtaatttttgtatttttagtagagacagggtttcaccatgttggccaggctggtctcaaactcctgacttcaagtgatctgcccatcttggactcccaaagtgctgggattacaggcatgagccaccatatgcagccgattttataatgatactctaaataacacttttcctacactggatatgcacaaagatcaattggtgaacccttcccacccttgtttttgaag

SEQ ID NO: 122271 - DNA, 366 bp, Homo sapiens
gaaatacagtaaggaggaaaccacgagcaccagagtgggtggcagagggtggtgacgaggcagagatgtgagctggaggattcatcctcagggaccagcggccaggatgaggggcaggtcagtgactccagaccccagcatttcacgaaccattaaaatatttaaagactgaacatcctactgtgatatggtgacataaggatatttacagaaacttcatatagcagcgcagtggctcgcatctgtagtcccagctactcaggaggtggaggcaggagaatcacttgaaccagggagttggaggttgcagtgagctgagatcgcgctactggactccagcctgatgacagagcgagacttcgtctc

SEQ ID NO: 122272 - DNA, 344 bp, Homo sapiens
ggctcactgcaacctccgcctcctgggttcaagaaattctcttgtctcagcctcctgagtagctgggactacaggtgcacaccaccacacccagctagtttttgtatttttagtagagacagggtttcaccatattggtcaggctagtctcaaactcctgacctaaggtgatccacctgccttggcttcccaaagtggtgggactataggcgtgaaccaccgtgcccagccacaatagcattcttaaattgcttatgagtagagtatcaaatccttcatcataaataacaaaaaataagattctatgataacatgatgcagtttaaatatttttcctccatata

SEQ ID NO: 122273 - DNA, 875 bp, Homo sapiens
atatgtaatcttttttaaaacttgtatgtctgagaatttatctctggtgaaggagtctcaccggcacttttccaccttcccattcacagtcgccacctaccttgcccctcaaaaagaaaaaaaacttgcttgtcctgaatcttgctggattagttccttcttgccctgctatatagaaatacctgacactgggtaacttataaagaaaagaggtttaattgcctcatggttctgacagctctataggaagcatagcaagggaggcctcaggaaatttacagtcatggcagaaggcgaggcggaagcaggcacatcttacatggccagagcaggaggaatagagagagtggggaggtgctacacacttttaaacaagcagatcttgcagtaactcactattacaagaacagcgccagagggggagtctgccccatgatcctgtcacttccagctaggctccacccccaacattggggattataatttgacatgagaattgggtggggacacaaacccaagccatatcacttattatggtggattaccctgaattgtaaaacaaaaaaacccttgagtacaacaaagagacagttgaaaataaagatccaatttttctctgaaattcttggggccagaatttttttcttttggattcagaatattctggattttagaaaggtagtgctgtacatatgctatattacacaacaccacttgagggcctgcgacagtaccctgtaatctaacattggtatatctgaagtaaaacatatgaatatttatagtaaaagggataagaaaagactaagtagtcttactccatgtaaataggcttactttgtgtcaattttgagccaagtgaatcatgaaaacct

SEQ ID NO: 122274 - DNA, 2761 bp, Homo sapiens
ctttgcaatagcccaaagttaatttgtttctttgccatttgttttcgaatgggtgtggcattgcttataaaatgttgaatgtaagttgcctaggacagcgcctggcatatggtggaaactgaataaaggctgctaggtagtgtagactagatggactagaaaacagtacagatgcagatgctttcagatgttctctctgccacagagagacctttctgtgtgctttgttcaaagttgacagtgtgagtaaactaccatccaccaggcgttacttttgggtaattttttccatgtttatcccagttccttcatccgcttttacatagcctcttgtactgccagctacactcagttttgaagatggtgggttagccttagagtggtgttctgtggcccgtggaggaggaagcttgctcactttaatgcagaatgtctaagcatcctgcgctaaccattggcaggaaggttatttcagtgagacgctggttccttctcacccctgcacccttcctggaatcaccactggttgcagaagcctatatagggtggctcatttggacgaagtattgttaaggtggttattagaagactcgcaacttagaaaaggaagtaaacatgttaatactagctttcataaatccccctctctaaaaaacacccctttctaaaaaattcacattactaaggcatcccctacacagaatgtttagtagggaggtattaaaattaatagcaattctgagtaagttccttctcatgtagttaatgcagcatgatgaaagaaataaaagtctccttatttttttactttctgtgttgcttcttaaatatactccttcaagtcaggttagcttaccttgggtgtttgtattttgttggcttatgtttgcatgtgtgaattaaaaaaaaaaaaaagagaaaattaggttattaaaaggaggatatgaaccaaaatgttggcatgaattaagaaaaatcagtgaagaaatgttgcttaatttgtacacttccctgcagtgctggaaatggacttttcctttgcatttccatgagtcagggagaaaacagaccagcctggtttcacgttccagacagcatgaagtacctcaacagcaaagaaggaaataggggccttagtttttaaatcctctgtaagatagtcaaggcttctccagtagaaagttaggttttgtaataagggaccattttgtcctttctgttcaggattcaacaattgcttgttgatttggggtgaagatgccatgaactcaggagcgggtgaggagggcctttctctgcctcccattcccaaagcattctccctaaccccatggtggaggctgcggagagtgttgtaggcagttgcagtgcccgtcactctctgggtgaagccagtatgtcctggtggtggccttagaagacagcccctgtgaggctcagtaagccgcagcctagattggaacagcgtgactgcctggtaggataaaggagacgacatctgaaaagagggtttcaggtgtttgcaaagaggtcagatccctacacatgaaacgctgcggccacagctgcagccatgctacctgccacatgccctggcctgcgtcagcgttatggagtaggcaacctggttcggcgcaaagaggaaatgcgcgttctgtgcccagtcctcgctcccctttgccaaccgggctgctgagtgtgatgctccctttgtgaagtggacatctgtctaatgggaactggacggtgaccaccagtccgttttacacaggccaccatacagctgccaggtggcgctggctcttagctgttctgcaagtccagcacagggtgtattcagctctagaggtggcaaacacggggcccttccaccaggcccactccctgcaaaggaagtgcttccgagagccaaggctttgctctaatctctgtgaaggaagaaaaagacttggggaaaggtaatgaataaattaaagacacacttttgtaatcgtatattttaggctttcctctctacctaattgtgctctaatctgtacttaggagtatagttttttaagtgggacatgtcaggcttttatgccacagattaaactccaaggcaaataaatgtgtgacagcttaagaggcgaaaagaagagtcttcgtcaaatggcagagtttgattgtttaacctagactaatcagtctttggagggcctgccacatgtcttccagacggctagaatgctcaggagataagagtggggcctatcgctctgtggctttctccccctgcattagccgcagagctgagtgagtctatgaaaacccattggtcgggctgccctagcaacacagaatgctgtgctgacacatactccatcacatgtttgcgatgaaaatgctgtatttttagaacacttcaaagtcaggaaaccgttaaaccacactgcatcctctcttgccctctggccacttcctccacacccccaggaacattgcccccatttcacagaaaaggagcctgagacaaagattaagtgatattttaagcaaagctgataatcccagggaaaattgctgatcaagtcttgaaatccaacacatccttcggagtaatttttaatgctttcgcttcttttacctaagccatgtgtgttccatatgaccttaaatctaagccctaatattgtaaatggagttcagaagacaacttagtctcccattttctttcctggcattcattcaaataaaaataggcacgtaatactgtactgtt

SEQ ID NO: 122275 - DNA, 2099 bp, Homo sapiens
  misc_feature (24)..(24): n is a, c, g, or t
caaggccgccggattgctatcaangcatcccctacacagaatgtttagtagggaggtattaaaattaatagcaattctgagtaagttccttctcatgtagttaatgcagcatgatgaaagaaataaaagtctccttatttttttactttctgtgttgcttcttaaatatactccttcaagtcaggttagcttaccttgggtgtttgtattttgttggcttatgtttgcatgtgtgaattaaaaaaaaaaaaaagagaaaattaggttattaaaaggaggatatgaaccaaaatgttggcatgaattaagaaaaatcagtgaagaaatgttgcttaatttgtacacttccctgcagtgctggaaatggacttttcctttgcatttccatgagtcagggagaaaacagaccagcctggtttcacgttccagacagcatgaagtacctcaacagcaaagaaggaaataggggccttagtttttaaatcctctgtaagatagtcaaggcttctccagtagaaagttaggttttgtaataagggaccattttgtcctttctgttcaggattcaacaattgcttgttgatttggggtgaagatgccatgaactcaggagcgggtgaggagggcctttctctgcctcccattcccaaagcattctccctaaccccatggtggaggctgcggagagtgttgtaggcagttgcagtgcccgtcactctctgggtgaagccagtatgtcctggtggtggccttagaagacagcccctgtgaggctcagtaagccgcagcctagattggaacagcgtgactgcctggtaggataaaggagacgacatctgaaaagagggtttcaggtgtttgcaaagaggtcagatccctacacatgaaacgctgcggccacagctgcagccatgctacctgccacatgccctggcctgcgtcagcgttatggagtaggcaacctggttcggcgcaaagaggaaatgcgcgttctgtgcccagtcctcgctcccctttgccaaccgggctgctgagtgtgatgctccctttgtgaagtggacatctgtctaatgggaactggacggtgaccaccagtccgttttacacaggccaccatacagctgccaggtggcgctggctcttagctgttctgcaagtccagcacagggtgtattcagctctagaggtggcaaacacggggcccttccaccaggcccactccctgcaaaggaagtgcttccgagagccaaggctttgctctaatctctgtgaaggaagaaaaagacttggggaaaggtaatgaataaattaaagacacacttttgtaatcgtatattttaggctttcctctctacctaattgtgctctaatctgtacttaggagtatagttttttaagtgggacatgtcaggcttttatgccacagattaaactccaaggcaaataaatgtgtgacagcttaagaggcgaaaagaagagtcttcgtcaaatggcagagtttgattgtttaacctagactaatcagtctttggagggcctgccacatgtcttccagacggctagaatgctcaggagataagagtggggcctatcgctctgtggctttctccccctgcattagccgcagagctgagtgagtctatgaaaacccattggtcgggctgccctagcaacacagaatgctgtgctgacacatactccatcacatgtttgcgatgaaaatgctgtatttttagaacacttcaaagtcaggaaaccgttaaaccacactgcatcctctcttgccctctggccacttcctccacacccccaggaacattgcccccatttcacagaaaaggagcctgagacaaagattaagtgatattttaagcaaagctgataatcccagggaaaattgctgatcaagtcttgaaatccaacacatccttcggagtaatttttaatgctttcgcttcttttacctaagccatgtgtgttccatatgaccttaaatctaagccctaatattgtaaatggagttcagaagacaacttagtctcccattttctttcctggcattcattcaaataaaaataggcacgtaatactgtactgtt

SEQ ID NO: 122276 - DNA, 2198 bp, Homo sapiens
cccgactctgaggatcccttcgattggcgggcacttagaaaaggaagtaaacatgttaatactagctttcataaatccccctctctaaaaaacacccctttctaaaaaattcacattactaaggcatcccctacacagaatgtttagtagggaggtattaaaattaatagcaattctgagtaagttccttctcatgtagttaatgcagcatgatgaaagaaataaaagtctccttatttttttactttctgtgttgcttcttaaatatactccttcaagtcaggttagcttaccttgggtgtttgtattttgttggcttatgtttgcatgtgtgaattaaaaaaaaaaaaaagagaaaattaggttattaaaaggaggatatgaaccaaaatgttggcatgaattaagaaaaatcagtgaagaaatgttgcttaatttgtacacttccctgcagtgctggaaatggacttttcctttgcatttccatgagtcagggagaaaacagaccagcctggtttcacgttccagacagcatgaagtacctcaacagcaaagaaggaaataggggccttagtttttaaatcctctgtaagatagtcaaggcttctccagtagaaagttaggttttgtaataagggaccattttgtcctttctgttcaggattcaacaattgcttgttgatttggggtgaagatgccatgaactcaggagcgggtgaggagggcctttctctgcctcccattcccaaagcattctccctaaccccatggtggaggctgcggagagtgttgtaggcagttgcagtgcccgtcactctctgggtgaagccagtatgtcctggtggtggccttagaagacagcccctgtgaggctcagtaagccgcagcctagattggaacagcgtgactgcctggtaggataaaggagacgacatctgaaaagagggtttcaggtgtttgcaaagaggtcagatccctacacatgaaacgctgcggccacagctgcagccatgctacctgccacatgccctggcctgcgtcagcgttatggagtaggcaacctggttcggcgcaaagaggaaatgcgcgttctgtgcccagtcctcgctcccctttgccaaccgggctgctgagtgtgatgctccctttgtgaagtggacatctgtctaatgggaactggacggtgaccaccagtccgttttacacaggccaccatacagctgccaggtggcgctggctcttagctgttctgcaagtccagcacagggtgtattcagctctagaggtggcaaacacggggcccttccaccaggcccactccctgcaaaggaagtgcttccgagagccaaggctttgctctaatctctgtgaaggaagaaaaagacttggggaaaggtaatgaataaattaaagacacacttttgtaatcgtatattttaggctttcctctctacctaattgtgctctaatctgtacttaggagtatagttttttaagtgggacatgtcaggcttttatgccacagattaaactccaaggcaaataaatgtgtgacagcttaagaggcgaaaagaagagtcttcgtcaaatggcagagtttgattgtttaacctagactaatcagtctttggagggcctgccacatgtcttccagacggctagaatgctcaggagataagagtggggcctatcgctctgtggctttctccccctgcattagccgcagagctgagtgagtctatgaaaacccattggtcgggctgccctagcaacacagaatgctgtgctgacacatactccatcacatgtttgcgatgaaaatgctgtatttttagaacacttcaaagtcaggaaaccgttaaaccacactgcatcctctcttgccctctggccacttcctccacacccccaggaacattgcccccatttcacagaaaaggagcctgagacaaagattaagtgatattttaagcaaagctgataatcccagggaaaattgctgatcaagtcttgaaatccaacacatccttcggagtaatttttaatgctttcgcttcttttacctaagccatgtgtgttccatatgaccttaaatctaagccctaatattgtaaatggagttcagaagacaacttagtctcccattttctttcctggcattcattcaaataaaaataggcacgtaatactgtactgtt

SEQ ID NO: 122277 - DNA, 595 bp, Homo sapiens
aaacgtgttcggggttgcaggcatgagccactgcagctggccatgagtgggttttgagctgggaagggatgtttctggttggagtccctgagaggattcatgtccacgtgatttcttaagaaagtgctcccagaacagagtaggggaagtaggaaggggaaggggaggaagccaagcaaggatgtgacctcaggcaaaagcccagaaccagtcaattatgcctcagggttgaaggtaagagagctaaacctcagagttactgattaatttctccacttggcagtcactggttaaagtcagttgggaaagtgaacagctctattaacctaaggatggttttttaagaagagcctcaggtgctggtgtgggtctttgaaagcacatcaaaggtaatctgggcacacagaaacagcaagaactcccagaggatctgggtggagcacctacattgtttttttgtttgttttgtttcgttttgtttttttaaacggagtctcaatctgttgctcaggctggagtgcagtggctggatcttcgctcactgcaacctccgccccacccccccccaaccccgaacacggatagggaccgagca

SEQ ID NO: 122278 - DNA, 233 bp, Homo sapiens
tagagaggtgagcaacctgtcgaatcatccagtcatcgtgggaaagagccaagactcttaacattaggctcacctctccactgcccttccagcgtcttcccaatccacaaaggtatagcagctacaaagaagaaaagcatggcatccccgccacacctgagaaatagatctgccttgcaacgtacttgaggcgagcactgacattctgtgctttggtggaacagccccggtga

SEQ ID NO: 122279 - DNA, 372 bp, Homo sapiens
aaggggagccgatgagggaagacacgaaattgagaccagatacgtgccaagcagggcacacaggtgacatcgaagcagtggtagctggtcagagaggagtcacagctgctgatctgctcaggggcaatgacaaattccacagagtttgtcacaggaaatctggtgtcatcttctcatctcaaaaccatcacacagctcgcacacaatcacacaccattcactgagagccttttacacacaaaggaccacactgagctcttaacatgccatttatttctccaaaaagattgttgcctgcatgatccacatagagaaacctaagcttggcttagatgaaaccacttacccaaggtaacacagcaagtgatatag

SEQ ID NO: 122280 - DNA, 118 bp, Homo sapiens
ggggcctagattttgcctgaaggggctgctgacaggaagggagataaaggcagagggagaaagagattagagggagaataacagaaaagagagaaaacagaagattcagcagaaaagg

SEQ ID NO: 122281 - DNA, 593 bp, Homo sapiens
tgctggaaagagagggggtgttggaatggagggaaaagagggaagtgttgcagagaggaagggggctgctacgtggtaaaatcctgaatgccagaacaggacatcattctgtaggaaaggaaggcttttgggtaggatgtgaaattacccaatcagtattctagtaggttaatatgagaggggcaagatttgagtcaggaggccagctgggaggccggtgaatagtcttggtgtgaagtaaggagggaggccctggatttggtggtgttggcagagagaacaagggaggggaggatcacccagctatgctaaattcgtggataactggagtctgcgaacctgggaaattggtctcagtaacagcaataaggaggttgggatagaagtgcaggtctgctgaccctgtatgtgccctccatggccctggggcaaagagcccaccagcagggcagagtgcttctgctcactcactgttccattccaagacaggactgactgcgcacaagtgtgtgaccctgggcaaatgacttgactctgaaccacagtttcctcatctgtaaaatgggggtaataacgagggttcaggagactta

SEQ ID NO: 122282 - DNA, 309 bp, Homo sapiens
ggcgtgtgagatctatggtagtagatgatatgattccttgtctgggcttttgccgaaagctagcttgaacctcaggagttagctgagggctagctaagaactcttcccctgcaaatctgcttcccacacataattaattgcttcacaagttactgtcaacatgaaaatggcctctgagacatcccaagtggctttcaggtgtgagtggatcctcttcaatttctttcattagtgttttgtagttttcattttacctccttagttacatttatgtctgggttttttttttgggtccttagatggttacag

SEQ ID NO: 122283 - DNA, 334 bp, Homo sapiens
tttaatagcttttctgattaaaattcaccatcacaaaaaagttaaccactgaatttaatttcctattcagtatactgttttacatcacttttattaaaaacatgttttattagattttccaatgaaattaaatggtgaacagcacatagttcttgcttttactgctggtttatacactttaataattacataaaactatcttattcaaccaaattaaattcaattttagccacaagcatatttttactaaaattttattcacatataaactgggcagtaaaaacagcatttcaaaggagtatttcatgtgtgtttgtgtgcgtgttctaaagtc

SEQ ID NO: 122284 - DNA, 416 bp, Homo sapiens
aaatgatgttctgggagaaagggactgaggctgccgtggacagtggtcatctcgggcttcgaagtatctattccagcttcctaagggctcacccttgtcctggggtgaaatgatcctcccaccacgcccacagcccacggtggaggggtcattcctggcacctcctcccgcaattggattacaagggttcccaggccgagtccactccgcggctgcgtgagaggtgggatgcgggcagagctcagccgcccgcacccgctctcccagggcccttagtgttgagcagcagtgggagaaccgtaaggctggctggagacgtaggtggaatcctccgtataagtctcagctgtcctcttcagtcaattgtgtgcgcctactgcacctttcccggcgtggccggttcccaccaccccacc

SEQ ID NO: 122285 - DNA, 496 bp, Homo sapiens
ttttgtacctattccctgtttcagtgcatgtacaggaagagttgtctcataaggtgccactaaggaaaactttctccataaagctgcctgctgtgcacgttgcctgggctttgctacccctggtgctgcatctgcctgtgttctgtcttctggttctgctgtgctgtgggggaggggacgcttgtactcctctccttttggcaggaagagtcacttccacattgaggtcagaattgaaaatgggatttccccgttgggcagaggggatgggaggcctgcacttcctgtgtagtgtaaattaatcgctgccccttccctgcctgcagccgtccaggttcaggggccggccctgattaaaccattttcctgcccaacgttgtgaaggctaagaaagacctgtgtgagctttcgcatcctttccttcctacaagttcggtattaatctcttgtagggcatccctcaggttagggagctctctgtgctgggctcgtttct

SEQ ID NO: 122286 - DNA, 119 bp, Homo sapiens
ttgtgcagtagaaagagcttttggaagttggcaagtagcaaggctagttctcatacattctatgctctggccacctttttctgtggcaggaaaacaaaacaggcaaatgcacacaaact

SEQ ID NO: 122287 - DNA, 284 bp, Homo sapiens
ttcttatttttcccctcatcatgaaaacgtcttcgtgacgttcagcctgtagctggctattttgttacattaacatttttaaagaaatgtgtctgtcggtcagaaggagggttggtcagctacagcacagaggaagagagacgtcgcagagagactgtcaggcagtagcctgtctgcactgcccagaaaagagccatcgccaaatacccatttgattccactagggccagatgttctgagttcacccccaccagacaacgttctgattatgattggtttttcca

SEQ ID NO: 122288 - DNA, 430 bp, Homo sapiens
caaaaatggttagatcaagtgaacatttaatattctttcaatcttagtttctaaatagagctgtctgcctatttactagctgtgtgaccttaggtaagttacttaacctctctgagtcttagacatcacatctgtaaaaagaagataatattattatggtaattaaatgaactaatatttgtgaagaaatgagaatagttcctgagacatagtaaatgctaaatacatacttatctaagtaaaataaatataactatttctcaagtaaactttttatacaaggataaaagtgtaacaaatgttaagcagaaaattactcttgagctaaagaaaggaaagtagaattgcttatactgaaagagaaatgatttttatatagctcacaggattctgtgagaaattgtatcggtgaaaacaaatgacctagttt

SEQ ID NO: 122289 - DNA, 424 bp, Homo sapiens
tcaagtgtgcacacagaaacatatagatcatgttccatttgacattgcttattttagcagaaaattttgactgatctaaatgtccatcagagagggagtggataaatcagttgtggcatatgcatacagtggaatcctgtgcaatggttaagtgaagtactgcaaaatgtatcaacatagaaaaaaataaaaacaagttgctgaatgatttgaagggggttttattagttttgaaggactgccataacaaagtacaatggattgaatggtttaaacaacagaaatttattttctcatagttccgtgtgctagaagtacaaagtcaatgtgtgatagggtttgactctgtgtttccacccaaatctcatcttgtagctcccatgatttccacatgttgtaggagggaccccgtgagagatgattg

SEQ ID NO: 122290 - DNA, 696 bp, Homo sapiens
cacttattactgagtaaattaaaatatgtttagccttttctttttatagtcactgatttcattttcaaaatgaaatccattttattttctaactcagcaatctgaaaggaaatgaaaatataaatttagcgtgcttgtagattctgatttagaggaaacgaaagctttttctttccctttttcttttctttaatgaagtatttaacaaagaaaaaaagccgtggtcttaaagagttgcagagttccccatctttcaaaataccatctgtagtcatatcagagaaagcttcagggtcattaaacattgatgactaatgtcagattgtaggaaaatcggaactatgttatcggcggcaattttgttagtctgggttgagttacggtataaagtgggcaagatggagtgaaaacacatcacttgcttctaaatattaagctttgtgtttcttttctaaaatagaaactacaaaatgtgaagtctaagtatgattttgggttttcttccatcttggggaaggacatttttaattacaaaatttccaggcacagagtagccaaatcctagtaccgagaaatttaccaacaaaatatatacccttgttcctaagatagttgcttctcaaatcccttgtcttacttataggttaaaggaacactttctctttgaatatatctccttcaacattttatcttgtg

SEQ ID NO: 122291 - DNA, 817 bp, Homo sapiens
attttgtgaaacacaagaatattggagtttgtttagaaagatgtcatgatggcaactttcaaagttgtatttttaaacatttttaaatgtgatccataaaaaggtatttaaaattttttttctttttataggtgaaaggtatttaagcccatcttagattgaggggatggaataactcttgggatttttaaaacaggatttgttcccctttaatagtaaatactgtctaaaagcattagaatattactgctaagaaagagcagccaacaaatatgtttcgagtgcccatgggatgcctagcagtgtcctaagtagtagaatttatatgaaaaaaattaaagcccaacattgtgttgtaatcccaacactttgggaggccaaggcaggtgtactgcttgagcccaggagttcaaggaaggcctgagcaacatagcaaaaccctgtctctgtacaaaatacaaaaattagccaggtgtggtggtgtgcacctgtagtaccagctacttgggaggctgaggtgggaggatcacttgagcctgggaggcaaaggttgctgtaacccatgatcacaccactacactccagcctaagcaacagagtgagaccctgtctcaaaacaaacaaacaaacaaaattaaagccctcatctccagataattcagtgtttcactggacatggtggtgcacacctataatcccagctacccaggatgctgaggtgggaggattgcttgaccccagcagtttgaggccagcctaggcaacatagcaagatcctatgtcaaaaaataataataataatttagtgtttaatggg

SEQ ID NO: 122292 - DNA, 398 bp, Homo sapiens
cttttgggtctttgctctttttgggtctttgctcttttggggtctttgctcttttggggtctttgctcttttggggtctttgctcttttggggtctttgctcttttggggtctttgctcttttggggtctatgctctttaggggtctatgctcacctgattgagaatgaatgcctcttttaaataccttctaaggtttaatctaaactataactatcctagaattaaatctgggcccataatgcatagaaattataccatttctaaccagtctggacacttaaagagatgtttattccttttttcattcctttaacatgtaggtgttaaatgccttatagatcaaatactaaggtggggaagaaaattattttttataaaaatacaaggcataccctg

SEQ ID NO: 122293 - DNA, 197 bp, Homo sapiens
cttgggagactgaggcaagagaattgcttgaacccgggaggcggaggttgcagtgagcggagatggcaccattgcactccagcctgggcaacagagccagattctgtctctaagtaaataaataaataaaaataaagtggtagaagcaaacataaaatttcttcttctaattactgaaattttatgaaatatgcacc

SEQ ID NO: 122294 - DNA, 218 bp, Homo sapiens
cattcgggacgtctttactaaggtctgaaacagatgacgagagcgtgaagcagaagcttcaacagacaaactgtgactacttctcccctgtgtcttcaacaagtgatttcttaaagcttaaccattaaatagtacagaacttaaatggttatttaagaccctaaataatcatcaccatcctgtattttaaacacacacacattcacacacacacagca

SEQ ID NO: 122295 - DNA, 597 bp, Homo sapiens
actcaggctagaaggtgacataaagcacataggtggccacgcccccatccctgtatccacagagaagaaagaggctgtgcagcagagtggctggagcctgatctccagatccagagcactggacacacatttccaccctgccaatgactgacagtgtgaccctgagcaagggacctacctcatttccttcatctgggcaatggattaatacgagtccacatcccagggctgctgggaagattcaatgagctaattcacgcaaaccactaagaacggcgccaagcacacagtaagcgctagtgagaagtgtcagcgaccatgatcactaactttggctcaaatgcctgctcctggaagcaggcccggcgcatgcagatgcctctagaagggcttccaagagagggacagtgacaggtaccctgatcagagctactttctgaaatgacagagtgtgcaccagatcctgagcccagggtcctaaatgggtccctattctgcagggatccagaggaaacaccctggtttctctttttatttttggccctttgtgttttgtgagagagcttctcaaagaagcaaccaatcctccaggccatc

SEQ ID NO: 122296 - DNA, 319 bp, Homo sapiens
ctgtaaataatgaggattgactgtgttgggtcaaagactatcaagagttttggctttagattttaattcacaagtagtcataacaattatactaggtattaatagtgctcagaataaacatgtcttaaagtgcctggtacatggaaagcatctaataaatgttcatattagccacgcatggtggcatgcaattactgtagtcccagctactcagaaggctgagctgggaggatcactttagcccaggaggttgaggctgcagtgagctgtgattgcaccactgtactccaacctgggtgacagagtgagaccctgactc

SEQ ID NO: 122297 - DNA, 375 bp, Homo sapiens
tccatagttaaatgtttcctttacctaaaacttacaaaataccttttgaaaaattaaaacttttaagtcataaaaatgacgtaaatccccactacataatcctctcatttatattctttcccgtgtctcaaaattcatcagatctcaagcatttggcaaagctgcagacatacaaaccaagcatgaaacatgagctatgccttcatctacctgagctgtcggcagacattgttactttgacagaatatttaagaaaagaagtcaccaaaaacttaccacagcctaatactggcaatggggggtcttaaagatcagttctcatagaaccactaacaagcacgggtgcagtgtggcaaaggcagccactgtgtttca

SEQ ID NO: 122298 - DNA, 229 bp, Homo sapiens
gaaaactgcagcctgtaggacaaatcagggctgtggtgtgttttcaaaaggctaatgctatagaataaactgtgttcccaaaattcacatgttgaaccctaactcccaaagtgactgttgaagaaggtgattgaccgggcacggtggctcacgcctgtaatcccagcactttgggaggccgaggcgggcagatcacaaggtcaggagttcgagaccagcctggccaaca

SEQ ID NO: 122299 - DNA, 405 bp, Homo sapiens
aacttgttcctgactggagcagatcagaggaaatgaatacagaagtcaatcagtgttacaagttcatttttgactagtaaatttcagattgggaatcattatctttggttgtgtctaatattcgaagcccttttaaatacacaatctcatttgatactcacaataatctcagtttatagatgaggacactgaggctcaaacaggacaagcaatccacctggtcacattactagtaattgacagagccaagagtcgaaagacagaacccagatccctcagactccaaagcctcacggaaggagcagcaccagacggccgagtaggtcaggccccccatttgctcactgaagacatccccacgtgctgccctctacccccactccacacatgccaagtagttaagac

SEQ ID NO: 122300 - DNA, 405 bp, Homo sapiens
tggtaaagacagaaaaacagagcctttccctcagcgagctctctgagtacaggagagacagacacaagctcatatttatctgccataacatcactggggcgagggaacctgggggcagggttccaggaggaggtggttcttgagctgagacttgaatgacaagggcagccaagcagcagaaggcctgccaggcgaggggtcctcttaggtactgtccttggtcagaccagtttctacagccaaaggccagccctgcctcctgcaagggaggacaggcggtgatggccaggaaggcccagattctggccgaggcccaggatgccattgggcactgagctctgtccttagctcatggcatccctcagccctacttcccaagtgatccctccattgccagctcatggc

SEQ ID NO: 122301 - DNA, 242 bp, Homo sapiens
ggtccttggagtgtgaagcctgcactcctgggcactgtcgctagagagatttcaaccctgaatctcagggtgggcaacgcttccttaggctgagagtgggtaacgaagcggcatcgcccaggcagcctctgcctcgaacacctctcttcttcctccttttcttccaccccccttattcccatctgtgcggcaaggaaaaggtcagtaagcacagccctatcttggtattctctccaaagctc

SEQ ID NO: 122302 - DNA, 557 bp, Homo sapiens
ggcacggtggctcacgcctgtaatcccagcactttgggaggctgagatgggcagatcatgaggtcaggagatggagaccatcctggctaacagggtgaaaccccatctccactaaaaatacaaaaaaattagccgggtgctgtggcgggcacctgtagtcccagctaatcgggaggctcaggcaggagaatggcatgaacccgggaggcggagctggcagtgagccgagatcatgccactgcactccagcctgggcaacagagagagactccatcttgaaaaaataaataaataaaataaaataatcatatgatcaatagatcatatgattccatttatatgaaatatccagaataggtaaatctatacagacaaaacacagatacacagattgatggctgccaggggaaagggagagggggaattaggaacaactgcttaacaggtatggatttccttagggttgatgaaatagttttgaactacatttatgatagtactaaatcccactgaattgtacactttaaaatgattaattttatgttatgtgattttcc

SEQ ID NO: 122303 - DNA, 705 bp, Homo sapiens
cgcagtggctcacgtctgtaatcccagcactctgggaggccgaggcaggcagataacttgaagtcaggggttcaagaccatcctggccaacacggtgaaacccgtctctactaaaaaagtacaaaaaattagccgggcgtggtggcgggtgcctgtagtcccagctactcgggaggctgaggcaggagaatggcgtgaacccgggaagcggagcttgcagtgagccaagatcgtgccactgcactccagcctgggcaacagtgcaagattccgtctcaaaaaaataaataaataaaatttaaaaattacctgggtgtggtggcgcatgcctgtaatcccagctactcagaaggctgaggcaggagagtctcttgaactcaggaggcggaggttgcagtgagccgagatcgcaccactgcactccagcctgggcaacagagtgagactccgtctcaaaaaaataaataaaaaagaaacactgacattcaacagcaaagtggcagaggcacccactagagctcaggccatacagagcagttgttcccacccttctgtttcttagtaccactgctctggcaaagagccaggtcccactattctagaaacaaaaggtttactttttgagatagacatttatgcctgcaatctgatttttccctcctcttaaaacatactcgaattttattcgagtatggtttttgtaaa

SEQ ID NO: 122304 - DNA, 394 bp, Homo sapiens
catgccacttctcggaatccacaatgctgggctctgggaaaaggcattcgctacaacttccacagccctgataggttccacacaatcggtttcacgaagacacacaatggtctcctcaaacaactccatttcaaattctggtctgcaaacagaccccgaaatgggcctctatcttgcaccacaaacctgaatctctcttaatttagggcctttcggttgactcacacctcacacaaactttaaaaaacattaccatagtcccctttaaacataaaaagagggctatgtcttgcattcttgtatataaaagctcattacatattggggccttccataatgtttccccctattcctataaatcttgcatcttatccccaccccatcagggctggag

SEQ ID NO: 122305 - DNA, 512 bp, Homo sapiens
agtaatcgtacataggtggggtgagttgaaggcaatctgaattataaaacaccttcctttgaagtcaaatcaatttttattcttaatctgtgaacatgagatgggaacaaataacttctgagtgaaataaagatttcttagcctgtcaagatttatcttatcaggctgaagaggtgggattcctgttagcaactggcagttttaaaaatccattcgcctgaggaagtgtgaaaacagtctgcagaacaaagacactgagctattgctgcattgagtgcttatttgctccttttttacatttcctgcttgagacctcgccaggtccaactttaaaacgtttgcaggctaatgggagtgtgtgcacagggagtatcagaaatcatttccttaggggaggaggtgttttgtggtgcaaaatgttgaggttctgttgccaaaacaccaactgccaagaggggtatttttctgtggaacttcatgggtggctttcatagggaattctccatgtcatt

SEQ ID NO: 122306 - DNA, 255 bp, Homo sapiens
ccctgagccgctcgaggcctacacagcgcaggctgacccacccagggaggcagtgccagacaggcacaggccccaagctgccttttaggcatcagcaaagggatgcgttgtccttagcagtttggtgggggggatagtattctccttgggctggactcagaaggtgtctgggaggggagaggtggctgggccggcatcatggccctgcagcatccagggtgtccaagcgcctccagcttccacccttcggtggca

SEQ ID NO: 122307 - DNA, 539 bp, Homo sapiens
  misc_feature (493)..(493): n is a, c, g, or t
  misc_feature (525)..(525): n is a, c, g, or t
cattctcagctatggaaacagcagaagcaaaaacttgaagacaggcataacacagcttcctttccatcaagctaatgcacagatgctggggagtaccaggaactaacagtggatccctacagcacaggattactaaggacctgtttcattacttgattctaaggaccctggacttgatcctaggaccacaagaggcacgttctgagtatttggagctggcaagtccatcagactaagggaatggtacaggaactggttcagaggccaactcagcatgtagtcagagtcaatgcaggtctgcactggaccaggctggatcccggaataggggtcaatctgagcgatttcaagtgactcagtgagatcgaaaggcaacattcaattaatgagtctccccagaaaaggacaggctgcagaactgaaactgaacaaattccatcctgagcggaggaccatcgtggggggctcaatctggactcactggaacctctanctcccaggttcaagggattcttgtgcctcagntacctgagtagctg

SEQ ID NO: 122308 - DNA, 662 bp, Homo sapiens
ctggaccactgcagtggcctcctccgtggtcttccatgtgccctcctcaccccagctttcagtgtgttctccactcgagcccactaattgggtcgatcctctgctcaaacctctacaaggtggcccacgtcactgggagtaaaagccagtcctaactttcatctataagcccaacttggcacctgtactttcctctcctcctgtgtgtccccaccccaattctatgccagtttcagcaggctccctgctgttcctcaactctgcagtctgggcctcagaggcacctcagcctggtgcggcctcccgactcatctctttccagccttagctcacagaccaccttctcagggatgcctcctggtgatccagctttaacactgcaaacccacctcagaccctcccagcccccacaactgctgcatatttctccatatcatgaaccaccttctaacaagctgcatcatctactgcttatgctgtagcccccactgcaacataagctccatgaagatggggggttttgtccactgctgtctaactgagcctggaaccatgcctggcatgtagaaggcacttggtaaatacctgttagatgaatggctcgattctgggaactcagaaataaataaatgaggtaggatcttggccctccagaggctaca

SEQ ID NO: 122309 - DNA, 477 bp, Homo sapiens
acatgtatactgggaaatatatataaggaggtcatactagcagagtatgaattataaaaaaactgtagaaaaaactaaggtcccttagtagaacagtagatagagacagtcataaaagggaatattagaaagcaattaaatgaaaaaattaccatggcatgcatcaacatggatctcaaaaatgaatactgagtgaacgctattacatctggcatgacataacatataaaattcaaaaccaaaaagcttcattaattattggggggatataaataggaaaactgaaacaaaaaagcaagagaatgataaaaacaacatttagaataatggttactcctggggagaagaaaagggaagaagagtggggcagggcacacaaggaaactgataataaactaacactggataatggatacatgagaatttattattttcatatcatgtgtattatattcatttttttgtatacaggaaata

SEQ ID NO: 122310 - DNA, 275 bp, Homo sapiens
gaattacagatttcttttttgatgacggtggttagggtaagaagcggcttttataagctttatttatctcttttaattacctccttctcctgtctcaatgctcacacttacactcactttaaaaaatttttatctttcatgggatctatatctaaataacaccacatcatatgtaaattaagaaacattccaaatattctccgggacattgaaaggaaatcaagcaaaacattctgtaatgtgtaggcaactttaaaagtgcttgaggcagaagc

SEQ ID NO: 122311 - DNA, 326 bp, Homo sapiens
ctttggtagggtgtgtgattggagagtgttctttatctccatcagccacccccttggccttgctgcttcatggataagacaggccactcccttaatgagtagccatcattccatgctccagggcagcttgtctcttgaggtgggtccatatgccattagacccatccccagcattagggattcattccttctacctaaggagttgggctgtaataaaatgctgttctctgtagcatgacaccaggcctagtgtgaaagtgaatttgtggatgtaatccgttccagatgaaccccaatttggctgagaggtagcaggcagaaattag

SEQ ID NO: 122312 - DNA, 394 bp, Homo sapiens
ggaaagataaaggtaactattttaaacaaggacatttgaggagtgcaaagtgggaaggggtaaagatgagttcagtttgggatatattaaatttaaggccctggtgagatagccagatgagcacacgagttaggaagatttgcagtcccgtgtcctttgctccatgctctgtggtgttggacaccttatttagcttcttgaagtctcagctccctatctggcagccgatacttccctgtaaggattaaagtgagacagtgaataaaagggtttagcttattgcctggcaattaagtatcagaaagtatatattaatagggtgatgaaggccccgcgtggtggctcacgcctgtatcctagcactttgggaggccaagacaggctgattgcttaa

SEQ ID NO: 122313 - DNA, 272 bp, Homo sapiens
aaggattgaaaggagaggagggttcaatgaccaggggaaggattggaaaatgaggtcccataagatcttatatgtcatgctattcagtttgcatggagggtcttagcttgaaatgatttatctcctagacctttattggttttttgagacagagtctcgctctgtcacccaggctagagtgcagtggcgtgatctcagctcactgcaacctctgcctccccggctcaagcaattctcgtgcctcagcctcctcagtagctgagatgacaggt

SEQ ID NO: 122314 - DNA, 143 bp, Homo sapiens
tgtttttcttgcaagactattgactgcccaccattcattctgctaaataagttgagtagggaagacctgttgcattgtgagtagatattcataaactggaatgtgagccatgtgtaaaaaactttggtttcaactttaatggt

SEQ ID NO: 122315 - DNA, 609 bp, Homo sapiens
ctttttcaccagacgcatatatctttttcaaatatcaaaagatagtaaagctatgcatgtaaaagtcataatagtaatagtaattataagtattataagggtaagaataatgtacatgattcttactgactcccaagcattggctaagcactttaacttttcaaaatctcagaatgctatgctgtacatatgataagaaaggagaactttcttagtttagaaaactgagttgcagaaaggttaagcaacttgatcaaagcaaattagtaatgggaagagcagaaatttaaacctaactcatctttcatacctatgaagatgcaaataagtcaaccaattacattggtgtgtaatatatttgccctcttgatgaatactgaaccagagttagagcatcttctattggtttcatgaaaaagcattgacattatacacgattggtgtgttctacttggaaatcacacttggttactctaaacattatttgaataagaagtggctaataatttgagcagttatttcaaaatatttatgtactattactacacagatggattactcttgagcttggatccaatttttaaaattttctaactcatgtgtacatga

SEQ ID NO: 122316 - DNA, 565 bp, Homo sapiens
aaaagcctcccttcaaaggtttctctgtgatacctcactccaacctaccaaaacataaggactgagtatatctatatcatttcttaacatcaaatgctgaaataccatgattttcacagactcaacatttcatatacagtcgctgcttcagagaactgacacttttttactaagcacttcctctcttcaagtgtctgatgtgacataaatgttttaaaagatcatcaaaacaaagttaacttcaaaatcgacatttcggaaatgtttcaagaataaatcatgagccaaccgtcagcatctgtattttatccagagaaagctgtcattcacactcaactcttcggaatggagatttcatttcttacctgactcgggctagtcttttcttcagcagctgtggaatgttgatgtggatcttcctttgctccctcagagggttctcttataattcctgcctggccccctggatctctgaagacctttggctccatgctctcgcttctctttgccctatccaagatcccagatgccacagaacctcctgctgtggagtccactagcccac

SEQ ID NO: 122317 - DNA, 530 bp, Homo sapiens
tacaggcatagcagatgcaaacagtgatgagctaaggatgccttttgaattgaggaagaaatctttcagaggcgtatttctgtgttttaaagagtgggacagtttgctcatcacccaacagatggcagtaaatgtcagcactttgtccacactggtggtctgactccctttggaagcccttcaatccttagggaatcccaattcccatggcatttcattctcttttgatgacttcatttcatccttgaaaatcccctagggaatattatctcattttagagatgaaaaaaactggaacttagagaagttttgattttatgctgttactgagtttttaggttttttttgtcatctaattgtactgtgttttgtattatccatattttgcaattaatccacatttccttaaaatttcatggatccttcctttgctttttatttttgttttgttttttttttttgctccagtaagtgtcttcaataatttcattcaaagaaagcaagataacctagtgtctctgaagaaaaaa

SEQ ID NO: 122318 - DNA, 357 bp, Homo sapiens
gttatatcttaaagtgagttactttgggtgaggtaatgtaggtggcagtgcctctgtttgagaattattttattttgtcctagattttggaatacagagtacttacgaggtcttttatttactccgtttatttgtattgtctaaaccaagcctttaatactagtgtgtgctttggcttggttataaaatatctgcagcaaaataatgataatttggttgtttggaaacatatttatacagagaggtagagtatttaggccaatggctgtcttagttgatgccccagagggcagtctagaaattagcatatttagcaaacaagctggtctacttttcctttcttacacttattcctcc

SEQ ID NO: 122319 - DNA, 277 bp, Homo sapiens
ggagatactacagcatgtttggatcatgaccggaatgatttagtaagaaggaaaagccaataatgtaagaaaggcgattgcaggagcaaagactttaaggaataaaaaggacaaaattgtttgtttctcagggaagtataaaagaaggtcatcatctgacattgagatggaagaaagggtgtggaaaatcaaagagaaagaggaaaatgtaaacagacatctttaaaggagaggacaaatgaattaactagggaaatgtagtagggtcacctactgg

SEQ ID NO: 122320 - DNA, 656 bp, Homo sapiens
ttgtatcacagggggggatccctgaaaatctatcttttaagcttcaaaggactttatgccaaaaataattcaggacatagcagatcctatcacttcactgtttaaaacattccagtggtttcccttcacacttaaggcatattaaggaattttttaaaagtaattctataaagccaaatataatctaatttcttgctacttctctgaccccatctcttatcttcccctcacttattctagtctccacttcactggcctccttccctttatctaacacactaagtaagctcttactttagcacttcccgtttctttgccctggagactctttgttcatatattcttaatatttgcttccttgatttattcaaatctctgtgcatgtattacattctccaggaggtcctccctagttaccctatcacagcagcagcctccatcactctctgccttattctgcttttcttcatagcactcatctctgtggtcatttctgttacatgtctattttttattatctatagttcctactacaacataggatccatgaggacctggactttattttgttctctcctgcatctctaggcactgtctaggcatgcagttatagttgaataattttggtcaacaaggactcctttataattgctaat

SEQ ID NO: 122321 - DNA, 381 bp, Homo sapiens
tcttttttttcctgatatccatgacgatttcacaaaatgccccaaaattccattaggaagtaaacatgtcttgaacaagcaccactttataattattaggtgttttaggttgagtttcttagaagcagaacctgaggcaagaattctgtgtataaatgttttattgagggagtgaataaagcaggataggacaagggaagaagataggcaaagaaatgggttcagaggaagtctagtctgtctgatcccgtggggagctctgaagtatgaattaccacctaaaatgtatgccacttacacaaaaggataccagcctcttatatcccactatcagtcaggggtacaacagtcacacttaggggcacttgtaagtgacatgag

SEQ ID NO: 122322 - DNA, 103 bp, Homo sapiens
acatccccagctctgtgactcttccaatccattctccagactacagccaaggccaaggtaatttgtccaaagtgcaaatctcattccaccagtccctttgccc

SEQ ID NO: 122323 - DNA, 301 bp, Homo sapiens
agtgaaagtggaagccaggatttgggtgtgtgtgtgttgaggagtaaaaggccaatggagaagaagaaggagtaaatataaacaactatcttaagaattggcaatgaagggaaggtgatacagggaagcacatacaagttttagaagatggtagagagcttaggaagatcttgtatgactgaaaaccaagagcaagaaaattaatgggggtggggagaggagaggagaggagggagtgataccttacataaagatacgtaagagaagtgttcccatttaggatttgcttcctggcatttct

SEQ ID NO: 122324 - DNA, 397 bp, Homo sapiens
tgagatcgcaccattacactccagcctgggcaacaagagcaagactccattgcaaaaaaataaaataaaataaaaatcacatccctggttcaagaactcaaagaagagaggtttaaagaagaaaagaaaaaagaagagagatccagactctctaagcaacaagaagggctggcagagacgttatctatgctggagtccctggaagaggccatgggagtcaccccatcacaaggagcttttccacaccagccaggcagccaagagccaagccctgctgctcccttccccaggagggcttgggtcttagggcagcgctgttctctcccctccactcaggcctccagagctgccaggccaggttctcccatgttgactccatccgagggtccctgaggcc

SEQ ID NO: 122325 - DNA, 452 bp, Homo sapiens
agaacacattgaaactgttgctgggtcaagttcaaaaggattccaaaacagtaaaaaaaaagaggaagggcccaccaagagcacagaggtcttcatcgctccagactcccagatacagcacagggaacaagaaatggcagaaccatcatttcatagacaagtggtcaagatgtcctcaaagccgtacagctctttggtggcagaaccaggaccaaaaaccaggtctcctgccctgctggagaagtcctctttccggtgggccgtgggctgcctccactgccacccaccatgttggaggaaacgtaggtggggaggcacattcacaccaattagggttatacaggatgcccagttacattggcaattcaaatagtaagtaatttttcatagtaagcatttcccagatatttcatgggtcacacttattctaaaaaatcttactataccagaaa

SEQ ID NO: 122326 - DNA, 183 bp, Homo sapiens
cacctggcgcactcctctgtcttaaagagaagaggccagttcctgagagggctgtgggtggcccgtgcacactggactgctgtccccagctgtggacagagccacagaggggctgggcttccagctgtcctccctgtgctcccgcagggctgagtcccagcagcagagaacaaagcctgcctc

SEQ ID NO: 122327 - DNA, 838 bp, Homo sapiens
tttttgtgattgggggcccggagggaggaagacaggttggttgctcagcagtaaggtttgaattaaactctcttcctcagacacctaagtcaaaaagatgaatagaaagcaagggacatttttcactcactggcatccttaagctgaccctgagaagttattagtcctctgtgcttccgttttctcatctgtgcaatgaaaataataacagttcctcttccataacatcgagggtgcaaggtttaaatgagataatatgtgaaaaagcccgaggcactgcagtgcaaggcatacagcaagtgctcaatacatgtttagctgtggctgctgctgtggctgttttgtgaaaaaacaagaaatcactttggcctgaggaggacttggtgtccctgcttcactgcctctcacaacacctctgggactcgaaacccgaggtctgcaatcaggcagcagagttagaagctggaaggcttcctggaggagtccacagatatgagatgacccaacccaaatggttcccaccacagctttggcctcagagcttggggcctcggccagtgttctgactttgctgggcttcagttgtcccatctataaaatgggcacaacaaaaatatctccctgacaggactgttatgcacattaagtgagatgaaatacatatcgggccaggcgctatggcttatgcctataatcccagcactttgggaggcgagaggatcacctgatgtcaggagtttgagaccagccaggccaacatggtgaaactctgtctttactaaaaatacaaaacttagccgggcgtggtgacctatgcctgtaatcccatctactcaag

SEQ ID NO: 122328 - DNA, 486 bp, Homo sapiens
aggagccccgtccagtaaggtgtgcccagcctagtttttcttttcattcacttaatagtgtcttttgcaaagcagaagtctttaattttgatgaagtcaaatttaatcagtcttttcttttatgaattgtgttttggtgtcgtatctaagaaatctttgctacagtcacaaagattttcttctatgtgtaattttagaagttttatagttttaggttttacggtttaggcctatgattcattctgggttagtttttatgggataagatatggattaaggtttatttctttgcatatggctacccaattggtacagtactatttgttcaaaagactattctttctccgttgaattgccattgcatctgtgttgaaaattaattggccaaagtaaatgtgagtctacttcggaactgtatattttgtaccactgatttatgtgtctatcctttatttaatactatacagtcttaagtattgcagcttt

SEQ ID NO: 122329 - DNA, 493 bp, Homo sapiens
atgagaatacagtctggctgacaccttgatcgcagccttgtgagtccctgagcagagaaatcaactgtgaaataaatgtgtatacagggcaatttagaaagccactccacatacctagagaaatatgcaggctcagaagagacctgggaagactttaagctttcacctcaagctgatcctgagataccctcaacagttggtgtggggagacgagtaaatgcttgggggggaaaaaaggagaatctgatttccagagttataagattcaaatgtccagttttgaacaagaaacaatcacaagaccctcaaagaaatagaaaagtatggcacgttcaaagaaacaaatcaacagaaaccatcactgaggaagcgctgacagcagacttactagacagtaactttaaaacaactgtttgaaagatgctgaaggagctaaaggaaaacaaagacaggagaacagtatatgaacaaaatgagaatatcaataaataga

SEQ ID NO: 122330 - DNA, 767 bp, Homo sapiens
agattgtatttaaatcatgtgaagtctgaggggctgtgaaatatgcaggtggtgatggcaggcaggcgattgcacagcaaatccggagctggatgggagagcagagcttgaaacacagatctgggggtcgtccatgaagagatccatgctgtctaatgcaggttcctgggatgatgggaatgttgtgtatctgcactgcccacagggcaaccaccaaccacacctgcttttgagcacttgaaatgtggcagatgtgactgaagactgaatttttaatttcaattttcatgttaaataaccacatcatgtgtggctgccatgttggacagcatgggcacaaatggaatttaaagccattaagagtggaggagagcacccagtcccttggtcttagggaagcatacagagggaggaccgaggaacacacctgggaaccccagtgtttgttgtggaggtagaggaggaggacacagcaaaggggaccaggaaggagcagccagagaggtggcctgagctggggccacaggcttcagcggcctcacgggtcacaggtgtcatctatgcatttattccctccctgccctcttgatgtcttagtgtctgcttttctgatacgatgttggagagataactgaggaaatagtgggcataaaagcactgaaaatagtcagaaggcctttctaacactgtgctgggtgaagcccacacatgcacacacctacgtcctcctgacagtgtgtgtgcgtcactccctgcagtcatccaga

SEQ ID NO: 122331 - DNA, 236 bp, Homo sapiens
ttttggtgggggagggcagcagcgaaatagtttggcagccttctttagatttccttatggtttgagtcatgttaaattcttcaacagaagaatttagctctgccttatgttgtcttgaataccttacttgggatttgggagaactgctttcccagttcctgagagaacctagggcaagttagaagaaaacttaactcctatgctgctgaaagaaaaccataagtttcaagagatcc

SEQ ID NO: 122332 - DNA, 167 bp, Homo sapiens
ggtcgactactactactaaattcgcggccgcgtcgaccaagcctgtgggggcggaactgtcactcccagtccacaggtgaggagactgggttccctcagagttgagccgcttcccacatgcacacagccacatgtgatagatccaggattcagatcttcacctcagg

SEQ ID NO: 122333 - DNA, 285 bp, Homo sapiens
  misc_feature (15)..(15): n is a, c, g, or t
tagaggatccgggtnatcgatgccaccgaagctgtgtgcactctcatggatccgaagccaagcgtggactagggtgtttatcgacgccatgcatgttgttttctaccgagagccctgacatatttatctctgtgtggtctcctgtcaactctttgttggccgggatcaatatgtgtatcggaagacaggtggggtgaatactgtttaaaacaacatcaactctcacctgctggagtcagaactcgccaccagcacgtgttgttcaccagctgggttcccccacca

SEQ ID NO: 122334 - DNA, 251 bp, Homo sapiens
ggggaaaaagagctatggaggggaagttagctttaaagaacccagaacccatgcggaagccagacaggcagcgtggccactctcctgtgcatccagatctagagatgattataaggaagagctggagggcagaagaaagaggtcaggaggcatcaccaggtcagagaatggctggggtgtaattgagaagttctttggtggtggtgaccacgagctatgtttaagggggcaaaggaagcagtgaagtaaat

SEQ ID NO: 122335 - DNA, 201 bp, Homo sapiens
aaaaatccaaaaagttacgagttctaagaaaacctgagaagcttggacaaagtttttatcgtgacattagacaaattaagtttttttcactgtattatcagttccaagataataaagtatcagaaaattccaggtgataaaaggaaaacacacatcacatgctaagaagtctcagaagtgaaataattaaaactaacaaaa

SEQ ID NO: 122336 - DNA, 450 bp, Homo sapiens
tttagataaggtggttcaggaaaacagcaaaaatctgaaggaagacatagaatcagagatcagggaatgtgacccagagggggccaaatacaaaggccctgaggcaggagggctgaactgggtgatgtagatggagattggtgggagatgagatcagaaagggggcaggaaccagatcaaagaaggtcttggagagctttggggagaaccttggtgctatggttcgaatgtccctgccacaactcatgttgaaataaaaaattcaattgctactgtcttaagagatgggactttttttctctttgagacagggtctcactcttgtcccccaggctggagtgcagtgggttgatcatggctcacagcagcctcaactgcccgtctctactaaaaatacaaaaaaaaactagccgggcatggtggcagacgcccgtagtcccagctactcgt

SEQ ID NO: 122337 - DNA, 436 bp, Homo sapiens
tttagataaggtggttcaggaaaacagcaaaaatctgaaggaagacatagaatcagagatcagggaatgtgacccagagggggccaaatacaaaggccctgaggcaggagggctgaactgggtgatgtagatggagattggtgggagatgagatcagaaagggggcaggaaccagatcaaagaaggtcttggagagctttggggagaaccttggtgctatggttcgaatgtccctgccacaactcatgttgaaataaaaaattcaattgctactgtcttaagagatgggactttttttctctttgagacagggtctcactcttgtcccccaggctggagtgcagtgggttgatcatggctcacagcagcctcaactgcctgggctcaagcagtcctctgccttggcctcctgagcagctggaactacagatgtgtg

SEQ ID NO: 122338 - DNA, 548 bp, Homo sapiens
ttcggatcggcaactgctgctgatgccatcaaaagaataggtttatttctcagaatcttgcagcctaggatcctttcgtaaggtaatttgacaatacgtccaaaaacttacaactcggactaaggagtttccacttctagaaaggtatctggaaatagtcacacaagtaactaaatgtaaaaaattaagtatgttcctcaccttaatatttataacagaaaaatttggaaataacttgtcaataggtacatacttcatataaatccctataatgggatacaatacaatccttatagttaaaatttataagacaaaagtgcccaaaagaaactagtaaagaaaaaagaaggctagaaaaaagcatgtataatattgtcccatttagtagttaatcaaacatcagtaaatagaccacagagagataaattagtcagccagctagtcattgggaaggatacacaaaactgctaacaatcataatctgggtgccgagagtatgaaatttacttcattccttacatcttatggtactctgaattatgtgtccc

SEQ ID NO: 122339 - DNA, 376 bp, Homo sapiens
gtttccagggtctgacatgagggtactgactctaagatatacgcttccactgggaaacctatcaatccaggccgtgagggaaggccttaaccctcctcagcgctggagctgatttagggaagagtggtgagtatatgaggagtggcattgggatgtgctttgaatctccagcacattcccagtttctggtagaatggagggaagccattgctgattctacctcagacaggacctcctagaagtctgccaggtaactcagatggttgtcacaggttgagacaacctcccaaatgaaatgtgtgatataatcttgactggggacaaactccccaggccagaactgagagtgagtgggaagtgtgctgcagcagcaagc

SEQ ID NO: 122340 - DNA, 346 bp, Homo sapiens
cctatcctctttgggacccaccccccacttcatttggaacaggcagcacgctcagtgtttactagaactgaggcttaaagtgccatctggtgccaaaaaggaagcaatgacgtagtgggaagaaaggaaaaagaaagaatatcaacatgcaaattgcaaattacaaagaatctctaggcaaacatatctaataaccaaaaaaaagcaaagcagagaagactggaacaaataactaatccttcaatacaaagatgtacatttacatccacaagacacagtagcaaagaccccaaaagagcaaagaccccaaaagagcaaagacccaaaagagcaaagaccccaaaag

SEQ ID NO: 122341 - DNA, 397 bp, Homo sapiens
tctttctttgattgtaatgacatttatgtttttggagagtataggtcagctgttttgtaggcgttctctccattttggtttgtacagtgtttcctcatgattagctttaggttgtgccattcgggcggggctttcacacaggctgagttctctgcaatgcagcatctggaggcatctgctgtcactcacttccattactggccaatgttgactttgattatttgatttgttgaaataatcaaagtcaacatcctgccatgtttgtccatggttaagctactatatactttgtatttcataaatatcttgtataaagatactttgaggctttgtaaatatctggctactactcagaacttcacccacaagataaagcatttcattggtgatttgtgct

SEQ ID NO: 122342 - DNA, 617 bp, Homo sapiens
acttctggagctctcttctagtgcaaagtttttcaagcttgattttaacagcaggatcttctttttttcccaaagaaatccttacatgaactccaaattgttaattagttaaaggagttccagttgaaggtggtggggaaggggcaggagcaaattgaagtatttcccttcatcttctctgtcccactttgcagcccctgggacaccaagagactgatgcctaaaggtaaagtcacttgttcaaagtcacccagcaagctgatgaaaaagcctgcagaactgtgaatcgaatgtaggtttcttaattccagatacgttgttctttccacactgagcttttttctatataaaaggaagtactatatatcatgggtttaagtaaaggaatacacacacacacacaaataaacataaatgcgaggggaaatgtctaaacagaacacaccacctgattaatatgaacattataggggaatagaattagaagggaaccagcaattttaacgactgacaatgatcctatgtggatgaacctatttgagaaataacaatatttgttttgttttgttctgttttttgagacagagttttgctcttgttgctcaggctggagtgca

SEQ ID NO: 122343 - DNA, 989 bp, Homo sapiens
tcccagctactcaggaggctgtggcaggagaatggtgtgaacccaggagacagagcttgcagtgagccaagatcacgccactgcactccagcctgagtgacagagcaagacgctgtctcgaaaaaaaaaaaaaaatagattaaaccaactaaaaagaaaataataaatccagcagagagagctgaataaattatcatggcataaactacccagaatgcagtagagagagataaaaacatgaaatgctagttaaaacacaaagacaaggccgggcgcggtggctcacgcctgtaatcccagcactttgggaggccgaagcaggcagatcatgaggtcaggagatcgcgatcatcctggctaacatggtgaaaccccgtctctactaaaaatacaaaaaattagccgggcgtggtggtgggtgcttgtagtcccagctacttgggaagctgaggcaggagaatggcatgaacctgggaggtagagcttacagtaagccaagatggcgctactgcactccagcctgggcgacggagcgagactccatctcttaaaaaaaacaaaaacaaaaacaaaacacacacaaagacaaaaaaactaaagtctgtctacttggaattctagaagaagagaacagaaagaatatagataagatagtatttaaagagataatggtagaaaaatttccaaaattaaaatgcatggaagttcagattcaggaaacaaagaattccaagccaaacaaagcacatttgagggcttcttaacaatgtgtttcaaggaggaaaattccaaaaggaaagtctgaggtacaataaagaatgatgaaaaatgaaaatggtatacataaatgccagtctaaattaaagaaaagggctgggcacagtggctcacaccggtaatttgagcactttgggaggcagacggactacttgagctcaggagatcgagaccagcctgggcaacatggcgaaaggccgtctttactaaaa

SEQ ID NO: 122344 - DNA, 278 bp, Homo sapiens
gtgctgagattacaggtgtgagctactgcacccagcccacttttttaagtacagaaaagtaaaaataagaaagctacaatgtctcataatctcttcacctgtataaatctctttgatgttttatgtgattagaacattcaaatagcacaaaaaggtttaagataaaaaagcaagtacttcccttctcccaagtattaatctgcaaagtttaactaacctcaaacaattctatgtgtaaacatcttgtcatttatttagatagaattagttatatggac

SEQ ID NO: 122345 - DNA, 153 bp, Homo sapiens
ttttggggtggtttgctatgcagcaacagctaactgacacaggacctactctctactgagaactggaataggcatggaggaagcagtggtgagtgagacactgctcacaaccttcaggagctcactatctgtaggggaaacaacaccaaaaaa

SEQ ID NO: 122346 - DNA, 275 bp, Homo sapiens
cccggtctctataaaatacaaaaaaattagccaggcgtggtggggcgcacctgtaatcacagccactcggcaggctgaggcaggagaatcacttgaacccggaaggaggagattgcatgagccaagattgcaccactgcactacatcctgggctcaagcaatcctcccatcttgcccacccaaagtgtacaggcctgagccactgtggctgacctactttcattttttatattcagggtttcatttgtttgtttattttgagacagagtctcgct

SEQ ID NO: 122347 - DNA, 734 bp, Homo sapiens
ctcccaccctggcctcccaaagtgtgggattataggtgtgagacaccatacctagcagaacctaactcttagatgaagaaactaagatccaaagggaagacacagctcacctcttacaggcctatgcagtgaacgctatttgtgccctgtactctgttatgggctcttattacttcatctaaatcccatgacaatcccatgagtgagatattaccagctctgttttagagatgggaaagcagattaactcatccacagtcacacagctagtaaatggtaaaactgggattcatgcctaagtttttttgaccaagttttattaaggactactttaatgtattcctgataagaatcctccatataacttttttaaataatcaggtcacataaaataaatcaagtgcattgactgaataaactgaaatcttgtcacatatcaactaatgatggaaaccttgcaactcaggaagagaaaaaagaaaacaggaaggagaaaaaagaagaaagggagggaaaaaaataaaagagaggcaaggtctgagaattagaggaaatttaatttgatggtaagagcttgggtttgattgtctgttcttcagtctgctggttacattaaccagaacattgggaacattaatttctgcaaggtcttagtttcttgaaaatggggataactttgattgtctgacaatacaattgctgtctatctccccaactagactataagtaccaca

SEQ ID NO: 122348 - DNA, 333 bp, Homo sapiens
acttaatgtgtttagatgctaaacaggcagtaacggaagaaggaatggctgggggagccctgatgagaggtcgcagcacatgtaggaaggagaaaaaagaagaaagggagggaaaaaaataaaagagaggcaaggtctgagaattagaggaaatttaatttgatggtaagagcttgggtttgattgtctgttcttcagtctgctggttacattaaccagaacattgggaacattaatttctgcaaggtcttagtttcttgaaaatggggataactttgattgtctgacaatacaattgctgtctatctccccaactagactataagtaccaca

SEQ ID NO: 122349 - DNA, 473 bp, Homo sapiens
  misc_feature (394)..(394): n is a, c, g, or t
aattagtgcagagatatgtgaatgaagggacagatctctccatgcagtgccccaggcgctggggagccatattgttcgtgctgggtgatatttttccaaacaatactccgcagtgcagcaccagccaagcaacagcccagcaaccacatgcaacctgttcctgccagtggggatcaccacattccgtacaaaaataaagagctgtgtttactggccaattcactcatcaagaacactctgatcccagagcaagcatagggaaccattatattcctccttcacagcccttccaggggaattaggaatacagctctgctgtcattttattttctgcccagagccctatgaaagtgaactctgattattaatattttaagcatgtaaacagcaaaancccatccatgtcctcggtcttggtatcaggatccggcaccgtgtgggaggacccagaagctgaggggcaggctgtggtt

SEQ ID NO: 122350 - DNA, 377 bp, Homo sapiens
tgatgtgaaaatccctgcgttcatcaacataacccagttagggtcgcactcatcacggggcccccattgcctctgggcaccccacgactgacatctgcggggccttcgcgctaggcttcgagtttcagcttccgcaccaggcctgcctttctgcaggggccagggtgggggtcgtgtgctgattgggccctctgaaccgccaccgctgcagaggggctgttccttccgtcacatcccttgtgcccgaatccaccctgtgtcttctcttttctcagcaggacattttaaaagcccagaccccctccttacagagcaaatgtccaggcttcggaggtcactgtcacatcccaagaacccccttcaccagggtgccactc

SEQ ID NO: 122351 - DNA, 617 bp, Homo sapiens
gcaagtgtaccaagaaaggggctggagaaagagatgagaaaaacagctaaaagaaaaggctgactttgtttatttcttccaattattctgcatgcccgtgttctacgtcaccatgaaaagctgagtgactgccacgagctttctgatactggcaatgaaggtgaagtgcattcgcttgggctgagctgtcatactctcttctctaagctcccttaggaaagggaggagaaaaggacttgctcgctgccttggccccgactccctgagcagccaatactggggaaattttttgatcagaggtaactgacagtctaggccttccacaaactgaagctgttagctactgtcattcagacgatgacaaagttgaaaagaaagcatccctgtcttgtgccagttttcaaagggaatgcttccagtttgtgcccattcagtatgatatgggcggtgggttggtcatagatagctcttattattttgaaatacgtcccatcaatacctaatgtatggagagtttttagcatgaagggttgttgaatctggtcaaaggcttgttctgcatctatggagataatcatgtggtttgtgtctgaggctctgtttatacgctggaatgg

SEQ ID NO: 122352 - DNA, 337 bp, Homo sapiens
ttggtgagcagaaagaaaagaatattaataaagaaagcagctgaaaatctgtataattcgcttgtagaaaaagtactagaaagtaatagtagaaagaatagaaattgacctaataaagaattatgggtacaagaatctaaaagaaagagcttgagaggcaagggagatggaggagtccaggaaaactctaagtatgtgtaacagcagacttcaaaggagctgttgacatagtttaattggggagtactctcatgatcagtgtcttggaagagtaagggaaaagtagattggggcatagccctaagttcaactactgctatgcaaacaaaggccccag

SEQ ID NO: 122353 - DNA, 374 bp, Homo sapiens
aaggcagaacaactgtgtggctatggcagagactgctaattgtttaccccatatcgattcacccttccttccttagaaacaaaaccaagattttattcaagggtccaacgcattaaccatgagaatacatttccctgtttccctgggtacagatatggtcaatgagagacaagtggataggttgtatcttctaggaagactccttaaaggcgaccgactcaactcagcaatgtgctcccttcagcctccctgattccccttctggttggagatttagtgatcagtttgcaccatgaaatgacactgagaatgaaagtcccctgctgaggatggtagagcagaacgataaaggaatcccagttctctactgaccc

SEQ ID NO: 122354 - DNA, 389 bp, Homo sapiens
tcttgatctcctgacctcatgatccacccgcctcagccacccaaagtgctgggattacaggcgttgcccaccgcgcctggctgaaaaaatacaattcttgttccattatattttaactcttgtctaaatcagttttgtggaaatcatctaacttgaaccctagtgttccattattggaacgctgagcatgtgggagttattcatatcctactgctcaaggtcatcgccaagatctaatttttccactcatgcaaaaattaaaaaaattgcagcctccggcataaatgggttaatagcagagaaatacctcagtatttagagactacagaaggtgactttaagttgttttttaaaaattgtggagttattcaggaagatgatgatgttga

SEQ ID NO: 122355 - DNA, 304 bp, Homo sapiens
aaaaaccgtgaagagccctaaattctgtgcctgtaatcctggcggggtttcattttacaggttacaaataacccagaatagtaactattgatggtttaattacttgaaagtgccttataatcacgaagtcattaagggtgttatgagatctaaaaactacaagtcatgagggggttgtgcatcaagttatttggcaactcattgatacaatatgaggtggaatgaaagtattttggactaaagcattctaaatacttcaaatcaaaattgagcacacgagtgccaatccatgtccatccctaac

SEQ ID NO: 122356 - DNA, 467 bp, Homo sapiens
acaatcttacaagtaccttccctaactccccttttttgagacattcttgagattttgttgcaggactactcttccttgcttatcatatttaataaatccagcttagtaagataaccagtgttccctggtggtggttgcttcaacaggaggcaaccacaggagccaggagagcaggaagtagggtgaggcattgctttccatgcctcactctgtttcagtactgactctggctgtagctgtacctgcccaacccccaacagtagcttctgcttgggggccccttctttatgagctccaacaacatatcttcctcctcttgtcccttcaacttgggggcagtaatagagtttgaaattgctagcttctgccgcttcaatattcctcatttgttcccttatccttgcccattttctacacaacttcccctcattaaagagttttttggggggttttttgtttgtttttgt

SEQ ID NO: 122357 - DNA, 382 bp, Homo sapiens
agaacattcattctagagtcagggtccagaaccgtggtattcattctttcttcaccggtctgtgtggagccaggcattccctttcctaaccagtcatttttttgatgcggagaaatccagaactaacactagatcttggggtgtggtcaagtcctcaaaaagaaaacattgaaggtatgggaaataactagatggtgcctgtcctcatgggtctcattttctccagaggaatgataaatagcatgaaatttgtcaacagataaagaaaacaacagagggtaattggtgaagaatgacgtggtggggccgggtgccgtggctcacgcctataatcccagcacttcaggaggctgaggcaggcggatcacctgaggttgggagt

SEQ ID NO: 122358 - DNA, 326 bp, Homo sapiens
ttgtaatcaccacgtgcaagctcattcacacagtcttacggactaagtctatttgtctctgtatcctctacaactatcacgtgtcgagcacatggcaggtgctcagtaaaaagttctaaatgggctgggtgtggtggctcatgcctgtaattccagcactttgggagtctgaggtgggtggatcaggaggtcaagaggttgagaccatcctggctaacacagtgagacaccttctccactaaaaatacaaaatattagccgggtgtggtggtgggcgcctgcagtcccagccacttgggaggctgaggcaggagaatggcagggag

SEQ ID NO: 122359 - DNA, 471 bp, Homo sapiens
cagggactaagaccaaatacagttatggtcccttagctacagggagatacttggaagaatgatgcatccttaggtgatttccttgctctgtgatcatcatagagtgtccttacaaaaccgaaatggcttagcttactgcacacctaggctctgtgctatagcctgttgctcctagaatacaagcctgtacagcacagtactgtgttgaatactgtaggcagttgtaacaccatggttaagtatttgtgtatctgaacatatctaaatatagaaaagatacaataaaaatgctgcattataatcttacgggagcatcatagtatatgtggtctgtggttgactgaaatggcattatgcggtgcacaactgtatttatttgtggtaaatctttactttgaggccatactaaaatttttaggaggaaatcagttctagccagattgtgtgaccaagttcaccaggaccattttt

SEQ ID NO: 122360 - DNA, 440 bp, Homo sapiens
gtatgggggagggaataggaaggggagatgataggcgatgataacttttcattagcttctcaaaggagtctgtacatcccccgcccccactgcgaagattaaaaatggtttcttagaggcttttaggcagggagattttccctttaaaatcagcagaagaagtctggatgcagcatagggaaaggaggcgtcatcaggaagtcctaagtctgaatgtcagctccaccttctctttttctcttatattgtggtaaaacatacataacataaaatttaccatttcaaccatttgaagtgtacagttcagtgacatttaggaaacccacattgttattgggtaaccatcatcaccatccatctccagaacttttttcatcttcctaaaatgaaactctgtacccactaaatagtaactgcctactacccccaacccctggccg

SEQ ID NO: 122361 - DNA, 524 bp, Homo sapiens
taatgcagggtatcaatgaaagtttgttgcattaatgattggatggatgaataaagtaacaaatgtgggtttttaaaatatcatttaaaggagcacgtctatttgatattcagattttgagtcaaatcacttcacacttctttgtgcttttccccatgaattatgataacgagaaaacatgcataatgattaaatgactttcatccccggatgcttccttaatatgtgtgaacttgtaggactataagtaatgctctgtgtgagataacatactcaacaaatgttctaatagagaagaaaaaacgtaattgttgtttttaaatgtagtataaacttcataggatgctgtaattttccatttatttttcttgcataaaatacatagaattacataggaaaaataatttcagcataactcatatgtcccaactctcctctaggattttctaaatttgatttaacaagcagctaatgagcatttatgtctgacattaagctaatcacaatagagaatatttaaaacc

SEQ ID NO: 122362 - DNA, 665 bp, Homo sapiens
actggaactctctgatcaaggtacagatataagacggtgagaaatccctgtgtactcttcaacacaaccctggccctttagggaaagcaggtgttctgtgcagggaagttcccatgactgtcagataagatgtgttgaataccaggattttcacattttccatcctggctgctttagtgaactcctatcttaaacacatgtgcctagctccatctccatggagacggctgttttaactgactaggacattccacttgtgactcacaccctctggggcacaccagtgagctccattttccacacctgcagccaaggagtactgtgggtcacaaaccaaccaattcaaataggtttgaaactgggagagaagagaagaatgcttctgagcttcatctcagctggagaaatggggtagaaaatggggctcaggcccaaacagcctttggcgtgagggtcctagaaaggaaggggaaggtcctcaggcccccagaagtaatggaagagtgtctgattcacagctctgagttcagactctgctggggactagcctggaagcattctgtaccccagcagggctagcctagaaccacactgtgaaacctggcgtgcttttccctaagttacctggagtatgggaagaaaaccccatttccagacaccaggga

SEQ ID NO: 122363 - DNA, 493 bp, Homo sapiens
caaccgaatagccacatgcaaaagaatgaagttggaccccctgtctcacaccatatacaaaaattaactcaaagtggatcagagacctaaatgtaagagctaaaactatagaactcctagaagaaaacacaaaggtaaatcttggtgaataaagcaagatcagaatggcaggtcttagcatcctggcccggggacagcatgggatgcaagcaacaaaccagggctcctagctgagctgggcctctcgcaagggacaaaccccatgcaggctgatcactgagggctgcttcacatgctcctggctgacatggaactaaaaaggggagggctgctttggctagacaggcccttcaaatttcctaaccttgttcctggaggatttcccagcagtccctatccttcctccaaagtttcctgagattcagacgagagagtcacagaacaggtgcaaaatgagagagatacaagggaaatggcaaagaaagagaaagag

SEQ ID NO: 122364 - DNA, 417 bp, Homo sapiens
tccttcaggaccacatgatcattgtgagtggctgggtaacccaggccaggcactccccacagacctgaggaagaggaccccgggaagcagaggcaggttttcctccagggaggctggcagctgctggggtagccaaactgtccctccctgtctctctgagctccagctctcactctgttctctctcctctctctctgcccctttttgctcagctgtgactgtcactcagcctgagccagtctcgctgttctccagacaatgggatttgagagagtgtctctgctgtgtctatgctgcgacaaccttttctggcagtggagtaagcggatgtgaggcgggcagcagtgcagggaggaaaagccctgaagatgaattacgtccacttcagcaggctgaccctctcgggcaggagggctt

SEQ ID NO: 122365 - DNA, 353 bp, Homo sapiens
atctactccaaaaaattgttttggttgtacaggctaactattttctagcagtatattactctacacagttgttaagtttcagggctcaaagcctaacatgtggtttaacagaaactaggctgctcctaggaaagcatatgacagaattctgcttctatcattgttgtaacagaattttttgaactcagaaaacccccataaacccactaagttgcatcaactgtgtttgctacaatgctgttcaaatctgccccctcacccaatgccaaaaatctttcccttgaggtgtcctaaagatgttgccacagtttaaatatggtttttctgctccaatactcaggctgaaatttgat

SEQ ID NO: 122366 - DNA, 722 bp, Homo sapiens
caagaccattttgtggagctctttggcaatgcctagtaaagtttaagattctctctacctcatgatccagtaatttcattcataagtagataccccacagaaactcctgaatacatgcacaaggagaccgataaaagaatgatggctgtttgattgtttgaaatagtggaaaaactcaaaataacctaaacatccatcaactgaaaatggatcaatagattgatatataatggaataccatacaacagtaaaaatagctggatttcattgagtacaaacagcaaagtacaaaactgtactatgatgtttacagacaactatgtattgaatgtacaaaatgtgcatgggggtgataagtagtggtaacctctgggcacgaggaggaagcaaaatggggatagctttagtgcgggctacttatctgtaatgtcctatttaggtatgtggtgggtacataattgtaaatctctctgccagtgagtatattttggctcaagttttgtatcttgttgcagacttaacagtttttggagtggtagccagttcacaggccacacttggaggagtactgtactactatatatgactgaagtgtattgtaatacagaaagacatactgggagtcgggtgccgcggctcacacctgtaatcccagcattttgggaggtcaaggcgggcagagagttcgagagcaatctggccaacatggtgaaaccctgtct

SEQ ID NO: 122367 - DNA, 578 bp, Homo sapiens
ataaccacaggcctgacctcacgagtttggcacttagatgtacactagaattttcatgggaagagattaacttaaacatgttctgtgctggtaatatccattgggtacctggcagaagccattagaaaatatctctgaaaggtcatattcttccactgggttccccactgagattctacagcagatgagcttagatccaaaattataaaatgcatggggaacaaatgcactatgagaaacagtagtagaagtagatcccagaaaccataacaatagatatcctctgatagacatgagaaaacatcatgtgttaatgattaaagatataaagaatgaactgaaaatataggaaaagatgagactggtttggaaaacagaacttttagaaatgtcaaaatataataattaatagtaaaaatcaatagatgggttaaacaggaacttagactcaccttaagagaaaattagtgaaccatataaaagaaaattattgagaatgcagtctaaagaaataaggagataggaaatatataggagagtttaactgtacataagatcaggtcatctgcaaacaggaa

SEQ ID NO: 122368 - DNA, 542 bp, Homo sapiens
cttttctcttttattataataggttatttggatttagtaaggatatcataactcaggcagggaagaaggtgaattaaaaacagctttaaccttaagagatagcattaggagatatacctaatgttaaatgtgagtcaatgggtgcagcacaccgacatggcacatgtatacatatgtaacaaacctgcacgttgtgcacatgtaccctaaaacttaaagtataataataataattaaaaaaaagaaaagacctacaatcagacaaagcaggttagagaatttctttatggccatctccaagacagaaaggtaggggaagactcctgccttcaggagagaaagaaggaggtgaaagggcaggagaaggtcacagagagagattgttttctgaggcctgcttctgagccctgaggcaccccaatattagaacaaaaggctataacaagtgttatgggagttatgttgcaggaactgtggatgaaaacatatacgtattacagtaagtacgatgaataaaaattatttgcataatatagctaaca

SEQ ID NO: 122369 - DNA, 441 bp, Homo sapiens
taaaataagtataccagcccattggtaaacaaagaatagaaggtctctatgatttcagaaaatgcccttttctcatatccaagtcagaatgacttgggcaagaatgggagaagacgtgaagataaaagggaagtgatgactggtctgtctctgtcagttgcttctttttctccctaattttaaaaccgtaatgtctgcaaatgaaaggatttagtgttcaaagggataatacatctttttagagggaatgaacagtatggttactgaccaagtgtaaatttacttaagtgcacatttaggggcttctcaggggttctagtattatggttgcatatcacctgaaattgaattttgtcctgccctaatgtttcatgttgcaaagggggaaatgaagataaactgaaatgaatgactaaatctaggctttttaataattatttt

SEQ ID NO: 122370 - DNA, 758 bp, Homo sapiens
aggctggtctcaaactcctgacctcaagtgatctgcccgcctcggcctcccaaagtactgggattatagctgtgagccactgcaccctcccggaaatgctttttaacggtcacctcctaggggagatgaagagagttaccgcataatcagttttaactgtatttgtaatgtttgtttctttacctgggaggatatgttgtagatacgtgagatagaatacctaagtgacacaatggtgtgcaggctatggctgcaaagtagaaagtttctaaatagcatgcttggatttttatttgaattggatgaagtttttgtgtcctagagaaattcacaaaatgttcctagtttcagataaaaggttatgatttaacatctttgcttttgttctttcttgtctttgaatagaacagtgggggacggtaaggtctgtttgcaaagtacctatgaccatcttacattatttttatgggtggggggcattgactgtggaatgtgggcagtaacttgcacagtcagtaaccgtttgagtaacttcttgttggcatccccattctggcactcctcctctaggtctccacctcacacgctggtttgtgggcggaggggcaggttggtgcgtggggtgtccgggcactggctgtgcatgccttcttcctcttctgtctcttggccaccttttccaaaaagtcaccagtgaccaattctcccagtgtttctttgggactcaatgccttgggcttggcattgggtaaagccaa

SEQ ID NO: 122371 - DNA, 593 bp, Homo sapiens
agggcgccttttttgatttttagtagagacggggtttcatcgtgttagccaggatggtctcgatctcctgacctcgtgatccgcccgcctcgcctccccagccacgtggaactgtgagtccattaaacttctttttctttattaatttcccagtctcgtgcatgtctttatcagcagcacgaaaacagactaacgcaggcagcctgtgttgggaggagttggcaaggagggaggaggtgctggccagtagagcacatgtgtctctgtgcatcagagcaaggacccgggctctccccgtgagtgagaagagtccatggggttttggggctgaggaggagttttacagatgaccggtctgttcttggcacttgcaattagcggaccgtctgtatccgagtgttgatcgggtggattctaaccctgtgggagaactccccagcccgtagcctgcgctcactgtacctggcagttgtattaatgacgtcaaatgcacagtccagcttgagtcccctctagaacgtgggcagcggacactaagccgagaggaatcgctgtgggttggcagacactgtggagactgactcctggacagg

SEQ ID NO: 122372 - DNA, 832 bp, Homo sapiens
tggacccactacttgtctttgtaaataaagttttattggaacacaaccatgatcatttgtgtattgtctgtggctgctttcacaccacaacagcactgctgacagttgtgagacagggcatatggcccacaaagcctgaagaattttctctctggccctttacagaaaatgtttgctaagctctgatttagagttatagcagattcaaatcctggcttcattaataactagcagcatcacttaagaaaagttatttctcttctgtgggcctcagttttctcatctataaaatgggatcataatggtacccctggcatgggtcattcgtggggagatgtctttgagcagttgacccagtatctggcacacatgaggtctttaatcaagtcacattactctggacaccagctaaggtgccagatagagatgtaaggtgctattttaaggaactcacaacacaaacagctggagacagtgcacagaaggtactggggttgaggcgtgtcccgggcttgtgagaacccagaggcagagtgcccttctttccatactggcatctgggggaggagcactacttagcgattcaaagacaaatgagctgcaggtgcacacagccacatggatgaagctctcagacatcatactggccaaaacaagccagacacaaatgtgcatctgctgtgtgattgcatttataacatgttgaggaacaggcagagctaatctgtagagatggaggtcaacactccggaccttctgggctgggaaggggagcaggggagcccccagggcatggagatgctccccatcttggcctggctggcaggtgcac

SEQ ID NO: 122373 - DNA, 599 bp, Homo sapiens
attcttactgaagtgtcctttcagtcttttcttggtctttattacaatatgttatggaaaactgtagtgaagaagtatcctgtcagccatcactgctgtgtctcaacacctgatgctatggttccagccctgcacgtttttctgagtgactattataaaactggtaatatatgttagcccggggttgacacactatggccatatctgtttttctgcctgttctgtatggcctaagagcatttaaaatgtaaaatgttaaatgccttttatgttttttaatggttgaaaaaaacaagaatatttcataacccatgaatattaaattcaattctcagtgtatataaattaagtgtatctatgcttctataaaacattttcatttcagttttttcaatagctgctttcataccataatgtcagcattgagctggtgtgacagaaaccctatggccagcaaaatatcagctggccctttacagaaaatatttgaccactgttagtctgtggctgtgctctcattttggacacagccttccagaccccatctaactcttcttctcaggaccttccctgtggtttctaaaatctccagtggaaga

SEQ ID NO: 122374 - DNA, 354 bp, Homo sapiens
cactgccaatatcatactatatcagaatcttgcctaagtatgaaagaagaatgttccagaaatcacttaaggtgataaactcgtccccaaagagatttagaattgattcctcagctaagtatttctccacctctttcattatgcctcctgaaaataagaatgcagataagggaccattctacacagaaatgctcctcagcagaaagctgtggtttgggctctaggatcttgatatctcactggcttgagatttctgctgcaccccttactagctgcaagaacttcagcaagtttatctttgtctctgtacctcagcttctccatgtttaaatagaaacaatttcagtacctcgg

SEQ ID NO: 122375 - DNA, 849 bp, Homo sapiens
gctaagccagatgacacaggtttgtcaggtaccaggcataaagccaagctcctggttagccataggcagagcaagaataaatgtaattcagccagaaccccgacctttgtgctaaagtggatgcatctcagcaccacctggagtgggtctgggctttagcatttcacaagcatttatcagccgctgccatatgctgagcaccatgctcctgcctccgtgccaccatatgtgcgtgtatacacacgtgcgtgtgacagtggtgagagattggggaccaggatctatttggagaagaaggacgggctctaatggaggtgtcaggggacaagcagagtggcctgagagctctctagagcagtggctcaggtgccagttccaaaatctcacttgggattattgtttattattgatgattatttatgagggtattattggcactgaatattaataattctttccctgggcgtgactgtgtttggataagaatgagggtgaactgaggatcatgccaaatgaactctttcaggattgataactggctctgtattagggtaacacctgactcgaatgttacacccgactgagtagtgttacggaggaaaacgacccagaagaacctgcaatatgtaatttggtgtgggaaatgctataatcacaaaattttggactctggttatctttatatataaatctttaatgctagaaggaacttaagcagatgttatgtgcaatctctgcatttaacaggccacaaactgaggtccagaaagctgaagagagtggcattactgggatttggactctatttactggtttgctcttatattcttttgtttatttgctcattag

SEQ ID NO: 122376 - DNA, 531 bp, Homo sapiens
agatacttgtatcacatctatagtccagaggcaaaccataaaagatcagaaagcttaactgacctgcccagatcacaagtcccacttcccatgatgcttccccctcccttcatctcaatttttatgataatccgaattaaggaagaagcaatccccttgctctcatcccaccatcttgtatgcctcaccaaattaatattcctaaaactttttgttgaacatgttacttccatatgtacagaccttcaggaaaataagtaagtaaataaataaaaacaggcacaatgatactcatactcttccaaagtctggtcccaacctgtatttctggtcttaattcctactctcccagtgaaaatcctttggtctagatgcagctgaatggtcattatctcttggaaagacttccatcttccactttatatctttacctaagctatcctttactttgagaaccttcttctctcctctctgcctgccttatacatcttagtccaggcaccttttcctacatgaatcttttctagtgta

SEQ ID NO: 122377 - DNA, 332 bp, Homo sapiens
atctaaacctgattacctcccaaaagtcctatctccaaatagcatcacactggaggttagggcttcaacatatgaattttggggagatacaaacactcagtccttagcaacccaggccaataacgatttgctgagtaaataatcatggctggcactcttaatagctctttgaatgggacaggacctaaatgttttgcatatagtcattaaaattcattctcaaacaatctcactaggtatggccattatttattatccccggtttacagatgaggaaacccaggccctgaagaatttaagtgatttgctaattaagtgtgaagctgggattc

SEQ ID NO: 122378 - DNA, 834 bp, Homo sapiens
aaaactagagtattgtaatctcaggaacataagattatccaagaagcctgaaccttgctcttttcatgataaatgacatccaaatttcctttgtctaggagataagcatagatcccttttatcatgcttctctgagattttcacagaacaaccctgcaatttgattttgtttgataattttgctttttggcttttcagtgaggactctattttccattggaactgactcctttggggataataagctttcacttaaaagaacattccattagatagttctaacttcaatgaacctaaaagtggcttcttaatttgaataatctggataacttttgcaaatgggtcaaaacagcacaagtatcaacaatcacgtatgtactgagtaatatttgccctccagttagcaaagtcaagaaatgtctaactctggcacacagcactggttttaactactctttagttcatctttgccttccaaattggttgaaaatggcaagcttagaatggaatgcatattaataacagaaccacttaatgttttaaaatattcataccttgagattctttttgagagaaaaaagaaatcttaacatccaattctagttgttttggcttttcacatatgctagacatgaaaaaggcagttacaaaagtgaaatccgattggaagtcagtggtgtccgccattgagccgtgctaaatgtcgtgtcacaaaaggagtttgtgaaaacaggatgagtagaaaatgttatactgttgtttctatcgtggcaccgctttcttataaattccatttgctttttgtcatctgaactgttacaaccatgggaaacc

SEQ ID NO: 122379 - DNA, 846 bp, Homo sapiens
agcacaggggccttggtccttccattgattcataagtacaacaccctacttcttggatacagagccatcgcggaatgttcgctggagtgaggcagcgtatggagcacatgggacatgcagacccagatggacatcttacaaactttcagaggagctgaagccagattgttcttacaaatggtcaccagaaggaggacaatcacaaactgtctcatcctcctctgcaaatccaacagaaaggacacagtagagtgggcaagaatgcaaagaaggtctgtggtttggaactggcccaagccgaactaaacttttctaaatatacattaaactgtcaacaaagagcaccgtgacccacagcctgaataaagggagagccccaaggccctctgaagccactagttctgtgagttgttttagggagaagacagacaaccaagaattatttaccttattagactgtgcccatccaagcccaggtaaaactttttgatcagcagaaaactggaattatttccctttctctatcctggattgagtgtgaattccccagagaaacttggctttgagagcactagctggacatataggggtccatttccaatctgctctgagaagggccctgtcttcatcctaaaggaaggctttagaaaactgttatctaagatctaggattgaagatggtgagaacctgaggctgagcaattggccccaattcttcctgaagcattatctgagagagagagcctagcctgtggtttttgacccctggcagaagggtggagagagggaagaagaaagaaggaagatgaagacaacttcctgctcaagaccaacccatctcccctc

SEQ ID NO: 122380 - DNA, 453 bp, Homo sapiens
tgtgttagccactattctagatacctgggatacaccagcgaataaaacaggaaaatccctattcttcccttctgggacaccagaatttaaataataggaagttttggtacagtttaaacaagaataaaataaagtagaaaaaagaaaagcaggtaaggagaagggaaaggtgggggaatctctgtttaatgagagcacaggagcttttctggtgattgcaaaccaaatgaacaaaactgtatctagagtctccaagccatcatagaaactactttctgcaagtaatggttctggaagtacaaggcctcatactgccatcagagtgagcaaagcatgctgggaggcctcatctctttgcactgtcaggggagaacgttcagtgttattgacaaaatagtgaatgatttcttaatagaatacagtcagcagagacaggggttatggcataattaa

SEQ ID NO: 122381 - DNA, 332 bp, Homo sapiens
tcctgggttcaagcgattctcccgcctcagcctccagagtacgagtagctgggattacaggcatgcaccatgcccagctgattttgtatttttagtagagacagggtttcaccatgttggccaggctgatctcaaactcctgacatctggtgacccgcccccctcagcctcctgaagtgctgggattacaggcatgagccactgccagccagtgtccagcgttttttagtggggcttgatcccttactgccagtgtggctgacctttcatctccagtctctcctgagctaactcttgtgtatccagctcatctggaggttggaactgataca

SEQ ID NO: 122382 - DNA, 699 bp, Homo sapiens
atctttagcacacagtaggtctcaacagattaggacattgggtgaatgaatgaataaacacattctgttggtaagaaggtaagggtaatagaataataatgttcatatatctaatgcaggactggtgatataatttgggagactgaatacaaaatgaaaatgcagggctccttgttcaaaaattattaagagcccaagcaacgtaatgagacattgtctctagaaaaaaaatttgtttaaattggctgggcatgatggtgcatgcctgtagtcctagctactcaggaggccgagttgtgaggatcacttgaacctaggaagtcgaggctgcagtgagccatgatcaccccactgcactccagcctgggcaatggagtgagaccctgtctcaaaaaaaattattaagaatttcaagatgatgacagcagaacaagtgtgaccctctggagctgcacgggtcagaaatcatgaagccactcttttgtaatgcagaaaaaagccagagatttgaattcccattttttatttttgcttgtgaagtaagcatactttattctttgttttccagttaatagtatgaaagctttgcttctttgcttcctagtgaaatagggagaacagctatttaatactagtacctgtcacaccacaaattggaactaatgcttaatttaccatctttgatgtcagcctccacca

SEQ ID NO: 122383 - DNA, 282 bp, Homo sapiens
caaacttctatcaggcttcctcagggtacatgttttcagggagtacagaattaatggggaccacatagccaacataaacaatgtgggagacgattaaaggccaccaggaaaatgtggacagagtgctgtggggcacgagtgccaggcagaggctcagagagttttacggtgaacagctaatgttttcatgaaaggcagtggcgttcctatttcattcttcccagcagtttaatgtctccccatacactggacacccgggataaaacatacttcgctcccatc

SEQ ID NO: 122384 - DNA, 723 bp, Homo sapiens
ggtgactcttcattctaccaccccaaggtggttctctccaacccccctcctcttagattgttctcacacagaggccatcatttcataacattgtgctgggccagaagaaccataagcaggtcccttcccataccaaagccgtaactattttggaaaagcctccttcatattgcagccattggacatgataatacatgtgatgtgctggcatttgttgagaatcatgtgaaaattaagcttccaccccatcacactaacgttccagccctccacggttttctccctaggctaagatagagaggaagaacatgaaatgtgcagaaagcattctcttaagcaaatgtgtataacttgcataaattgtaataatttcctggaacaggatgcacctctaacctctacaggcaaatcatagattccattgtccagctgtataatgaaaacagagttctcagagaagaataccggagactcccccgacttgcctgaatcaaatttccagaggtaagtggtgaaaggccacaatatgaagtcactctcagatgggtcccttctcttgccacactccactgtagaaataaaagaggacggggaggccagagctgctcaaaaccttataacccacaattctcatagctattctcaacttagagagggctgctttctagacacaccccctccaggcccccagactgccaggctccaggaataagtagctctaag

SEQ ID NO: 122385 - DNA, 238 bp, Homo sapiens
gcttctcctagaaacctcagggacaaccaggcaggccccacaaatgcctgcagctctcagcacgtgtgaacctcagattcctggcctcacacatcacagtggcaggcaagcccctaaacctgtactgcagacagtgcccggaacccagcagaaagggagcaccattggatgccaagaagaatctggcacctgggccacgggggtgtacaaaagcagcaactaggagatggctcctcaa

SEQ ID NO: 122386 - DNA, 376 bp, Homo sapiens
actaaaatcagaggttgcttgcagtgagccaagatcataccattgcactgcagcctgggcaacagagcgagactctgtctcaaaaaaaaaaaaaaaggaatttacatagttgaacaactattctttggacatcttttagtccagtagacggtgttaaacttgaagacaaataacgatttgacctgtgatatttgtttttccctcttatcttctaagcccattcatccagatcattcatcacctttaaaggcatccccagagggaggcaggtctggacagagctgaagattgcacaggccatttgcaggctggattagttctgtggtgacccacctgtctgactcgagttatttttttcccatgtctggacaagact

SEQ ID NO: 122387 - DNA, 330 bp, Homo sapiens
accaccatgggttcactaagtgatcgtgagtcccaaggcctgtcttgtttccagtgacactgctgcaaggaagggtcccatgctagagatggctgggcccctccttcatgagatcactcctttgctcaagatccttgcagtggctcccccacttccttcgaagtaaagccaaagctggtgagtggtaataaaaggacttgacatgatgcagtgctcccatcatctctctctgctcctccgactcctcctcgtgttcatctgctctgggcatattggtctctttgctgttccttaacgtgcgtggcgcacacccccccacatctccttgaa

SEQ ID NO: 122388 - DNA, 161 bp, Homo sapiens
aaacattccacatggaacagtaacatttaacatcgagagaaaggggataacagagcataagtgtggctttgaaaaaaaaaagagtgagaaggggatagaagaaagggttaatgagccaatccaatgagagcaacgtggatgagagtgtcctggcctgttcc

SEQ ID NO: 122389 - DNA, 396 bp, Homo sapiens
agatcctttagagggaggtggctgaaattcaggggtgtgatgttcttgggttattattgtactgctcttaatttaagatgaggcagaagcaaggaagaatcttgaaaggggagaattttatttaaatcaatttatgccgagtgtcaccagcttgcttgagaaaccccacatctacagtagcttgcataatgtgttcctgtttataaaaggaagaaatagggaatagccttcataggaaaaggggagggctggaatgacttcagcctcaggctgtgggtgctgtccattttcttctcgtggtgtgtctgattctatataagttttgtttgcaatgatgttggtgaagggagtgaaacaagaaaaagcaggtactgctgttgaaagtggttgtgtgtg

SEQ ID NO: 122390 - DNA, 411 bp, Homo sapiens
agaagctctgtatgccacatcactgatgccgccacagtgagacagaattcgaagtacagccagatgcttttagtaaggttctctttggcctgaccttttttccactccattcgccttgctttctgtgggaataattctctcaacttaaaattaccaaatagcattaaaaattctgcaatatttctgaaatcatattgacacataatggaggatttttcagaataaaattagatgactcttgtaattgttttattaaggaactgcaaacttgtttccattcttcctgaaattaagtattcatttccactgtaaggcaagaaaaaccagctaacattatacagtcaaagggtgacacctattaaacctgatcgaggtttttggaatttatttaaaatacagaactaaattaca

SEQ ID NO: 122391 - DNA, 360 bp, Homo sapiens
aagaaatgaaggtattggactggataagccattcaaggtaattgaatcatgggcagtcagggtcatgtggacagtacctggcagctctcccaactttgccagagtctctcagaacaggagagagtctgttgagttcaaaacagttcccctggagattttgattaggtatcataacatcctctgacattgagaaccactgaagtaaaggacctctaagatccttttggttttaattttctagaattctatagtcagggaagaaaaaactttaaataggaaatgaagaagaaatacttgaacttaagcaaaaacaaaaattatttaaaaaaaaatacttgaacttaaggactgttcaaaaaa

SEQ ID NO: 122392 - DNA, 427 bp, Homo sapiens
tgtgaatttattttttacacaaatctgagtgctcactctgtgctggccctggacggatctctgtggatgtctggtgagcaggatggacacagcccggtcattgcaacgctaaaagcttgaatgacaccagtcaggctggggaactgggagagcccttgacatgcagagtgactcagccagcgtgagcaggggttgtcagcatgcctagaggagcaagagactgtgagagatgtgtgtgtatacttgtgtgcctgtgtgtgtccgtgtgtacacatgtgtgcgccgacacagccaggtgttggccaatgcaggtgtggtgtcctcaagagcacagtgcatcctgattcttcaccctcccaggcctcccctgcccctgttgtgtgccagctgggcctgccccatgttatgcctgacgcccacgcaaaag

SEQ ID NO: 122393 - DNA, 110 bp, Homo sapiens
aggaggggaggacaatgggagatgagatctcagaaataccaggagttagatcatgtgaggacttgtgagtcttagcaaggatttttggcttttactctgagcaacatgag

SEQ ID NO: 122394 - DNA, 187 bp, Homo sapiens
atcaagtgaggggaatgcccaccatcgctatcatcaccatcaccactacttctgccacagccatcacattcacctctacctccaccatcaccatcactactcaagttggagaaatagaggccaggggaaggggataaagggagggcaaagaaaagtaattccaaaggaacatgagcaccaataatgc

SEQ ID NO: 122395 - DNA, 610 bp, Homo sapiens
gcccccacaaaactatggactgagcttagtgcaaaagagaaagcccttcttacccttaaagttcactgcacgggccattgtgggattagtcaccccagatgataaaacataatactggttttcctaagtaggggtgattcagctttctcttagattggaatatgaacttaatgtatataatacatacagtcacttcctgaacttgtagttttttgcatgttttatttaatattctagccaggtttaagtttttatggcaggaagtatgtgaatggttatgacaggagtaaataacagttgattttatgattacagtacaggaagtaacttttcacaccaaataaatctttgggaaaaaagtgctggcttataaatttaacgtacataaattttccagaatcttgcatacagtcgcctgtgctctcttaaatggaactaaatacctggctggtcttttttcttttaacttttttttgtcaacgaatgtctttgttttagaaagaggcattttcaagtgttttgatgtgacccaacgtgacctaaaaccattaaaagattctaagcaaaaataataaggccaaactttagtgtaaatagcatgaaaggcttg

SEQ ID NO: 122396 - DNA, 397 bp, Homo sapiens
tgaataaaaaggcacgtgggcctccatatcaagcagatgtactatcgatctcatagaagagatgccttggcctgatcaaggataagaatatgtaactgaaccattttattcctaacccttctccactgacacaaggaggcttatttcctggagcactctagttatcatggcatcatctcgctgtgcttttcccccagtgttctggactagtcaagttccctgatggcattcagttaaccaggtccttcataaccagttcatcctctgggaacctcaagggaagtatcagccaggtgtttctgaatcatttacactacccctaccaggctggcgtttgcaaagagctcttttcatgtcctgttggccagctgcacctctattttatgagccgaacttc

SEQ ID NO: 122397 - DNA, 674 bp, Homo sapiens
atgatgcggataattcttaacctctctcactataggatttgtaagaatatcatatacttcatacagttcttactcatgtttccagtcaatggaagctattgctatgccaacagtatcattatctctaaagaataaaagcaaagtggaagtatgtattttggaacttcatgtttgtttttactttaaaaaaaagattttttgtagcttttttccccctgaaagtaggtatcatggagttttatataaatataaaattttcatgttgcccactatgatattaaaattcatgagagcagacagttttattattttgtattttattcccaaagttaagaaaatgcctggtacctaactagattctcaggtgatatttttattgaatgaatgaatttattgacctgtgttcacacccctggctaagtttacttttgttttggtttactaagtttgttcctttagacaagtttaatctgaattgtaatttctcatctgcaaatggaaaccctaatgatatgaatgtattacatgtaatgataaatgaagtcatgcatgtaaagctacttagcattatgagtggtatacaatgaataactcaataagtattagcaatgattatgattatgattttatgtgccatttacttaggacatgtggaggaaagaagagcatttgtg

SEQ ID NO: 122398 - DNA, 333 bp, Homo sapiens
gaacagtttaaatttttttgcaaatgataaagtaactctcagcttctggatgtagtatctagcacagattcccactcttgaaaagcagtttggccacttgtcctcaccacccccgactatcaaacagcctagaatagggcttgcatactggaggttaaaaacaagtcacaaaggtaacacctcctcttcctgcctagtcctccaaccacccaatacctcctggcccatgcatatacacacactcagcctctgtgatggcctgaattgtatgggggagggggagggcgcaagaattgggctgaatctaccaccatatgcttagccgcagatcaa

SEQ ID NO: 122399 - DNA, 275 bp, Homo sapiens
tacagatgcctaggtccttcccccagatattctaattgctgtcatgaggatatcagtgtgttttaaaactttaaccactactttcaactcataggtgttattaccaagttcctgaattctatggcttgaggaactgagatgggagttataaagagtttgcaaaacaatattcctggatgatgtgtaatttgtctcatctttcagttcctttaaaatctaccccctggatcaagccatccaaaagctgggtaccttggctatgttgtactatgttc

SEQ ID NO: 122400 - DNA, 230 bp, Homo sapiens
ttggccaggttggtctcaaactcctggcctcaagtgatttgcccgactcggcctcccaaagtgctgggattacaggtgtgggccaccacgtctggcctccagattctttttttttttttttgcctttgtttgtcacatatctgtgacccagctggaaaggttatccacttttaagagctcatgtaattagattggacccactcagaaaagcaagaataatccccctatct

SEQ ID NO: 122401 - DNA, 327 bp, Homo sapiens
ctggctgatgctgactttggtgggcctgaagttctttggaacctgcactccatctctgaacactgtggactctgcaggtttccaagacattccaacatggcagaggggccactcacctctctcagcactcacctgttgttatgttcccaaagcccagagtgatgagccattccttgtgctcattgagttggtgctttgactcattgaggacgccgttggcccacagaagcaggttggtgaacaccaagtggatcaccccaaacctgaaaaacacaaggactcagttctcaagcagccctgggagagcctcaggcaccatagggtgag

SEQ ID NO: 122402 - DNA, 478 bp, Homo sapiens
ttcccaacacatagaaatgatcaatactctaggtaacagataccctaaataccctgacttgatcattacacattgtatgcatgttataaaatatcacatataccccataaatatgtacaaatattatgtatcaatgaaaaattttaaaattccattcatgaattttgcctgttttaaagtctgactctttttcactattgagttatatgagttccttatatattttggattttaaccccttatcagataaatggtttgcaaatattagaaacgatactgattattcttttctttcacttattactgtcaatatcaggaaacgaggcagcaaaaaatatatcagttttctaaaacagagctgcacacactaaatggggaaattatgaaacatagtttagaaatctaatttgctcgtttgtccaatgatatacttagcaatttataaattgttctcacatggattatctcatgccatcct

SEQ ID NO: 122403 - DNA, 793 bp, Homo sapiens
agtagtaaaatagtatataccaggttcggtttgagcaggtccttcaggcacaagtaagtttcaagagcaagtggctgtgacttccatagcatctattcttgctgcaattttaattcaccatcagtccacatctgtgacctcttaggattgactgttgacagactaagaaaacatttgggcctggttcgcagatggtcccttgcagtttgcaggcaccaggtagatgtggactgctgaagcattgcagcccaaatcaggaacgtggtaagaggagctctctcaggaccaaacactgagcatgttatctggagggagagatggccagaagtcgagatatataccaattgatgggtcattaatggttttattagcatactggtgacaacgaagtctaggaaaaaggtttgcagatggacctttccctatgggcactatcacatatgaattctcattagagggcatccactgatgaggccctcagcagtccactgacaggatagcctgttctgtggatgtcagtcagtccatttccagcaaccccgaggcttgcttaataggctcatgaagagcatggccattgtggcagggagagaagccagacatgagttcaacaatgtggacttcccctcatcaaactggtctggctcctgtcactgataaatgactaacttgctgacaggggctctaccatctctgagtctctgatgtggagtcattccccagggggaccagtcagccatcagattattgcatggaacttctattatgaaggacatgattttgtcctctagaa

SEQ ID NO: 122404 - DNA, 660 bp, Homo sapiens
cacattattattaactaaagtccatgctttattcagacttcctttgcttttacccgatgtcctttctctgttccaggatcccattcaggataccacattacatttatttgtcgtatcctctggctcttcttggctgtgatggtttctcagactttccttttttgaggagtattggttggaacttatccactattttgtagactgttcctcaactgcgatttgtctgatgtttttctcatgatcagactgaggttatggatttgggggaggaaaaccataaagtactgacctgtatccagggtcggtactatttacaggagttatcactgcttatgttaaccatggctgagatggcatctgtcagatatctgccctgtaaaattacttcacttccctctctttctgtttcttactttttggaaggaagtcaccatatgcagtagagcctgctttttttgtgttgctgttgttgttttggagacgggatctcactctgtcatccagggtgaagtgcagtggcacaatcacaactcactgcagcctcgacctcccaggctcaagtgatccttcccacctcagactcccaaatagctgggactgcaggcacatgccaccacacctggcgaagtttttgtatggatggggccaggctggtctcaa

SEQ ID NO: 122405 - DNA, 292 bp, Homo sapiens
caaaaaaaactcaaagtacttcttaaaaggaaaaaaaaaaccaagaggcaactgaaaactaatacagtaatacctcagttatgactgcccttcagagggtaagagataaggcagtgagttgcttatctcagtaccataggaggtggggtttcagtgctcacacaggaatgagagatgaggccttggaccacacaaggataggaaatggatctgagatcatctatatagagctgagatgcttgtggggctacttaatagctagatgaaatagaaaagtaaacacccactagca

SEQ ID NO: 122406 - DNA, 245 bp, Homo sapiens
agtgggtgactaaattcatcttcatcaaatttatttatggaaggcaaagtctttataacagctttctatgaatagcctcaattttcaatacaaaatttctactttgccttatgctacaaggtggatggcgaagagaagtctcctcattttgcagatgaaggcataaggcactagatgaaatttcagaagttaggattttgtaggagagcactttcttttcttttcttttcttttttttttttttt

SEQ ID NO: 122407 - DNA, 787 bp, Homo sapiens
cgcggtggctcatgcctgtaatcccagcactttgggaggccgaggcaggtggatcacctgaggtcaggagttcaagaccagcctgaccaacatggagaaacctcatctttaccaaaaataaaaaaattagccgagtatggtggcgcatggctataatcccagctactcaggaggctgaggcaggagaatcgcttgaacccaggagacggaggttgcagagagccgagattgtgccatttgcactccagcttgggcaacaagagcgaaacttcatctcaaaaaacaaacaaacaaacaaaaaaaacccaaaaaaacagaggatatcaaattgtagtgcagtacaacttcaacctcaacaaggatttaaaaaaggcattgaaaaacgaccagaaggagatatgccaaagcataatgaaaaataataatttactcttattcaccaaaatgaagatttatgattgaatgtaatttagaaccattttatccataaataaagtaggtcccaacaaacactttaattgggttaccttcattgaaaacatgccataagtcaaatatctaattttatttttccaaagaaattacgtttaaggatcataggaccaacctttatttttatcaccataagcagcacgttttaccaactggcactttttaactatcacataaagccaaacaaataaaagaatacaatcattacacaaaagttttaatatgttgtatgttgcaaccatcagaatcttcttttcagtttctatgcatttcttcaggattctcccattgcatt

SEQ ID NO: 122408 - DNA, 165 bp, Homo sapiens
cttaataattgagacggaagggacagaaagctaagagttttctggagagtgttttccagtagacttttttttcgttttctttttttaaaccatcataagcaagtggaagaattccaggactagttgtctggggttttttgttttttttttttttgaagacttttt

SEQ ID NO: 122409 - DNA, 684 bp, Homo sapiens
ttgtatattattttttatatatcaagtttaaaatttttttattgcacatgtatgctcatataaaccttcagaatgttacagatgtatacaggatagacagtaaaaatctttagtgattctgcctactagatataattaatggtttggtgtgtattactccagattttttgtgctatgatataacagtgtttcatattattggttattgttttattattgttatgatcatcattattatatatattttccttttacaaaaacagggctatattatatataattgtacaacttttttttgctttgtaatgtatgttgtgcatttttttcatgctaggaaaaggtatatatcttcttttttttttctttttaatatggtgtttcagtatatggttatttattatatttaacttactatcttttgatgatcatttgagttgtttccttttcctcctcatctcccccattacagacatttctacagtctttgtgcatatcgtttgagatacttgaacataagatagatttcaagaaatagatttggatcaaaggatatgaatatttaaaagttgaataaatattgccaacttatgtactaaaatgtaccaatttatactacagtaacattttatttcggtgcctgattttctatgctattatcagcattaattattaatttaaaatttt

SEQ ID NO: 122410 - DNA, 265 bp, Homo sapiens
agccaagatcgcgccatcgcattctagcctgggcaacaagagggaaactccatctcaaaaaggaaactaggaaatatttttcataatagctaaaaagtacaaacagtccaaatgaccatcacttgatgaatggataagatactatgtatccatacagtagaatgttatttggccttaaaaaggaatgaagtggccgggcgcggtcgctcacacctgtaatcccagcactttgggaggccgaggcgggcagatcacaaggtcagga

SEQ ID NO: 122411 - DNA, 596 bp, Homo sapiens
ggctcaaggtcagaaaggacagtgtaggtaactctcaccttcctgccagagctagccatttgtgatgcacagaggtgccttcagaaggaaccaggctcttaggtttaaatttctttcagctgctttaaggagacccagaagttgcttgagagagagctatttttagcagctctgaataccctgagatgtcatctgtccaggatgcagggaaacatttcactcttttcattggttctgaaagcaatgtgggtatttggagctttttcccaagctcttaatgatttcagggatcttatttaagaactctttggccccacaagaggtaggagccaatcaagacttggctttcagaatcgagggacctattaatggtaatctggcttgaaaataaatgaagggacggataaacaggttaactaatacagataaaaataaaataacctcctcatgagaatcttttgacaaaacattttcccctattgtctcatttgatttcactgcatccctataaagtacaaatacattattcccattttacatacaacaaacttggagaagggtagggaaaaggaatttgtgctttctgaaccctgccc

SEQ ID NO: 122412 - DNA, 300 bp, Homo sapiens
taataacctttaacccctgggtgctgataagctaatatctctgaattaatgctataaagaaaattaaaacccaaaagactctgacagactctgacttctaagcccttgcatcaagaacaaataatgctatagggagtgaatgcaaatgtagcatttttgaaatctaaatacagccagagggagaaaatcgccaatacatcaacaataacaaaaacaacaaaaaaacagccatttatactaagccaaatctctgagatctttctgaaaatatatatttaactctaaccaggttcccaggct

SEQ ID NO: 122413 - DNA, 716 bp, Homo sapiens
  misc_feature (112)..(112): n is a, c, g, or t
gacaccgagagtttcagaggcaggaaaagatctggaaaaagttaagcagcgattaatagagatgctaatcacgttgacaagttttacagaccactgaacattcggatcgtgntggtaggcgtggaagtgtggaatgacatggacaaatgctctgcaaggaacccacgcgcgtgggttccttgcagagcaggtgtcagattctcaaagggttaaatttaagaggtttagactttaagagtctgggaagccctgctctggaagtcatacttctctgatatctttttggtcatctgtttcttggcttaagaaatgtggtggaaaagaggtacagaaccctggggtaagcagtggaacataaaaccagatgttccaaggatgagaaacttataacacacttgagaagtctcctgctagcctactgctcccctagcacaggtatactagactatctctttgcagaacagtttgtagttaagtaaaaaccgatgtgtataggcccatagtacttccatccacaggccttacagttacacttattgccttacagtgacccagatgctgatttcccaaggtcaaggatgtctgaagacaatgtgccaatgtgcccagattcttctagttaaggatctacttgagtctcagcccttatgctgtttttgttttccaagctgggatatgaaaaagcagaaaacccaatagggtaacattaatccaag

SEQ ID NO: 122414 - DNA, 226 bp, Homo sapiens
aagatcgcaccactggactccagtggaaaaaaaagtatcacaagctcagttcctcagtcacatgagccacattccaagtggctgctggaggcagccatggtgggacatctcagccactggaaagatcccgtgggcagggctgtggtgggcgtggccacatttggaccgcagcattcccacaaccaggctgtgtgacttggggaagtagctcccacctctctacgcc

SEQ ID NO: 122415 - DNA, 172 bp, Homo sapiens
acgcctggcctataaaatttattttcataaagtgatcttatacgctgcaaccatgctaaactgatatatcagttcttagtagcttcttttaagattccatagaatttgctagctagacaatcatgtcattttcagattaggaaagtttaacttcctttccatttagatgcct

SEQ ID NO: 122416 - DNA, 485 bp, Homo sapiens
tgtctgagaatgtctctgccttctaatccagccagcatatcttctggctcgccctgaactgaggagaaaccccagatccctttgggaaggtccaggaagggcaggagtggacaggcacagctctgctgtcagcactgctgtgggggtgactgtagccccagtctgccctggtgtttttctctcgctcttctccatgccggcctttgcctctagactgagaaaccggggttgactcaagtggcacctgcaaaagtgatcatggcagttcacttagcctgcaggtgacagggactgtgaatctagtccctggcgagcctggaaagaggggcaaggtagaggctctggctgccggggtttctttggtgagtccgttcactcggctggacacagacggatcaggaaagattcctgttgctactcggctggtggccagagggagagaggacgtgtccgtaactgaagcaaggtggataagcttcgggaac

SEQ ID NO: 122417 - DNA, 447 bp, Homo sapiens
gggcgtggtggctcatgcctataatcccagcacgttgggaggctgaggcgggcggatcggttgagctcaggcgttcgggacccagccctggcccaacatgatgaaaccccgtctctacccaaaaatagaaaaaaatatagccgggccctggtggcgcacgcctgtagtcccagctactcgggaggctgaggtaggaggatcgcttgagccctgggtagaggctgctgtgagctgaaatggcgccactgcactccagcctgggtaacagagcgagaccccgactcaataaataaataaggatggataaattgtagcgtatgcaccattcattatgctaagacattttaaagtaattatgagaaacgctctactaatgatttgtttttatttgtatttttctgcttattagacaaatatatactcattttaaaaaggcgtgtgtgtata

SEQ ID NO: 122418 - DNA, 415 bp, Homo sapiens
cagggagccagtcatgtggaggtgagggtaggagagccggtccgttgctttccagggtttccagaattcttgccccatctcccccagggcagaagtccccatggcacctccccagcttatttcccacaaggagtgggggacttaaaagaatgtatctctgatacttactgatattaactttgcctatgttttccctttcccaggttccttctccttggataaccatgtgcaattgacaatgtagttattatcacctctgttctaggcagtgataagctcctacctggtctccctaaccccagactcttttgttccaatccacctcctccctgatgaaagatccatctttctttttgttttttgaggtggagtcttgctcttgtcgcccaggctgtagtacaatggcacaatctca

SEQ ID NO: 122419 - DNA, 267 bp, Homo sapiens
aggaaagggaggagaggtgatatggtgtttctttttgaggtgatgaaaatattctaacactgactattgtggtggttgcacaactgaatatactaaaagccacatcgaactaattattttctggtttttgtaacagctttattgagataatttacataccacacatttcacatatttaaagtgtttgatttgaggcttttagggccgagtatggtggcttatgcctgtaatcccagcactttggaaggctgagatgggaggatggct

SEQ ID NO: 122420 - DNA, 591 bp, Homo sapiens
cagatgaaacagagattacaaacttacaaagattactagagttgtgtcaataggactcggggcaatttgaaaagactctgacaggacaaaaatggaaccattttagcagtaataagcatcataatagcaatgcattgtaatacatcaaatatatttaaatctatgaattcataataataccaaattaactcatcacctttggattggtaaggaaataattcattaaattcattgaaaactagttaataaaggcaaagaatctatcattaatcttacctttcctatgtgacttgcactgttagataagcagataatagacaaagaaatatttctcttggtagcattttctactaataaatgaataaggaataagattacattagaactcaccattctgcaggctctaatgtatttaggcatcaaatatcagtcactgatgacatcacaataaggaggataaccagactctacgtgcctcctaatgagaacacacaaccacttatgaagcagtcttggaaaaaccaataataaataaaatcagagttaagtctctagatcagtgctgtccaacagaaatacaatgccagccac

SEQ ID NO: 122421 - DNA, 123 bp, Homo sapiens
actgtattaaagggaaactcagctgtcattgacatttcaaccccaaactcctgaagccagccagcacacatttgattggctgtttttgacaaagtgtggaatactgtatctgaaatatgttgg

SEQ ID NO: 122422 - DNA, 366 bp, Homo sapiens
atgatttccttttctactttgaaaatatttataatggtttatctgaagtctttttctgttaaatttaatgtgtgagccctcgcaaaggcagtttcttttacccacctttttcttgtgtgtaggtcacactttcctgtttctttacagtcataattttttgttgaaaactagatgttttagggaatatattgtagcaattttggagaatattgattctcctcctctggggcttgtttttattgttgtgtgcttgtttatttgtttagtgacttggctaaactcatgtaatgaagtctgtcttttgcaacatgaagccttcctccctcttcagagagctcatccttggctgtgcccacagtttacttg

SEQ ID NO: 122423 - DNA, 214 bp, Homo sapiens
tggaaagtggtttgttgtggaccccatggggaggcaggaccctaaccctgccccttggcctgggggagtcttctgaccttgggtccatcctgggcccattcataggccctgaaggctgcactcttccctgagcttcatggccagtgaagtgtggtgttggggaaatcctgtggcattctggggtgtttagaacttcctggagtcatgaagaatg

SEQ ID NO: 122424 - DNA, 991 bp, Homo sapiens
gaaagacatctcatcagcagataagtgtctgtacttctgccctgcaaagccagctgccattacactgtctgaaattggggatgtggacttcttgggaagaggacactttcatgcttgttgaaatttagggagttaatgatagttatttcattctctttcttctctgctccaagtgccctactcctctggtatttagcccttgtagtttagctgaaatcatgtcagtgtattacaggctgatccagtcaagtgcattctgcagagaaatgacaagtggcctggtggtggtaaaagctatcctaatggcaggtggcggcatggtgcattagtgcttcttgatggacagctagggattcaatgtcagtttccaggttctgtgtcaccatggttctagaaaataatttgtattaactatcaccaaggagaagctaccctggcagagagctgctgttttgtaaggtggcctggacacctgcataggtaaactgaggtattttgacccttctgttaataacccctactggccatttggcttgaattgaagccccacatttggcttgaattgaagcctcacatttccaagtggctcaaggccacttggaaccaagactgtacaggagtaactatttctgagttaaaatggtaccattaagtgttcctgcaacgttactattaaatgttcatgggcagagctctcaatttgtgtaggattagaataaagatgttttgcattccaatctgtggatcatctgagattttctttctgtgttctgatcaggcccagatatggactactgctgcagggctgcaggctccctcacaatcactgggaatcatgaaacaaaacagcaggcaaacatcttgtgttctgtaattctctagtactcttcttgttaactctgaatgcttgaattgtgggttctgtctctcgcccagtttctctcactttagttagtcccagcaggataccaagaacatcttgagttagaaa

SEQ ID NO: 122425 - DNA, 351 bp, Homo sapiens
actcaccaagtgactgacatgataaaaaagcaaagttcttttagataaaaatggccactttctccttgatatttttctatgggttgagatttagatgaaaatcccttgtggcaaattttaatgactatttctttaatgtaataactgaattcatctagatgatcccacgtccctcaacagagaaaggtgagagtctgttatttgttaggtttccttgtccatatttcttggtgggtcccacaaaagtctcatgaatctctacaagtgggaaaataaattgcccatttcttggcacaccgaactttccatgtcatattttaaaactgtaagtccatactttacatagctaaa

SEQ ID NO: 122426 - DNA, 374 bp, Homo sapiens
tcctctatagcggccgcctactactactaaattcgcggccgcgtcgacctttccactcttgctttccactcattaaatacattctctccacccattactgacctctggcacagattgccacctatatgtgtcctctctccttagattccaggctttgcaatgccaactaaatcttctttcagttgccgtacctggtacagtataccaggcaccacttcctctctacagggtatttctaaactatagccctattcaggcagctccaacctgctcctactaatcagattatgccaatacacctcctcagatcggacaaccaaccccagggccttggcacttgctgccccctctacatgggctgtcgacgcttcccc

SEQ ID NO: 122427 - DNA, 422 bp, Homo sapiens
tcagaggatcaccgatatgcggtctcatcagaattaggtaagtagataaatctcgtaataagtcacggcagccgtgcagtaattgcagaacaagatgctcactaaataaaaaataggccaggcatggtggctcacgcctgaaatcccaacactttgaggaggacaacacgggaggatctcttaaagccaggtgttcgtgccagcaagacataaaaatttcttcacccataaaagagattagaagccacttggtgggaacaaatgcattaatcaggttttcacaaaggcctatcaatctctgtgcaccctatgcatttcctgcatagcatgaactagctgattaatggaccagactttcatggttcctcccatctcttctgcagacaaagggaggcccaatactttccaacaaatcaatagat

SEQ ID NO: 122428 - DNA, 401 bp, Homo sapiens
cccaaacgatttgctgttgaagcataagcaaatacatatatagcatacatgtgtcaagagctagctcaagtgtctccaaaacatgaatccttatatttctatcattacattacatgcaggtgctaggaatcactaggagaaaaatgattagtcatatagaaagtaattgacatattgtgcatcctgcaaataaatgttacacggcagttggtagctttactttgaaatgtaatctatccaagtttctgtgtagctataaagaaagtttgactacaagaatgaattcacatcagttggctgtccctctttcacatggaatttaataaggcttcttagagttttctgtgcttgaaagagaggcaaaaaaacgatctaaaggccttaaacatgtaaggaagaag

SEQ ID NO: 122429 - DNA, 469 bp, Homo sapiens
agacatttgacttcagggccacatggaatgcatcgtttctttggaacaaagaaaactggactatgaagagccacagagaagtcagcaaaccccagagaatccaaacttctcaaggatcaaggcagtctctcacaggctctgaaaacaggaggcggcagtcatgtcccttctaattaccagcacaaccacctgcaccccacggtaaatggacggttactgcacgtccccagctgccctctgtggacatggagctaataagatgtgaattcatggaggaaaatctacgaaaagtggactttgcaagtagttacaatctgatactacctgcacaattattaaaataagccacccaagactatttcagccatattagcaaagaactaatgaggaaacagacatcataaaagaatgaattacctacataataaacctgcatcttccagaatgaagccattagaaattgatcagt

SEQ ID NO: 122430 - DNA, 500 bp, Homo sapiens
tcccacttacagctgtcaccttaattttaaaaaatccccaatgccactataatctatgacttttaatgacaacctcaaactccttctgtgcatgtgcagatctagattaaactataatctctcaacatcccccaaaccactcaaagtttcctcctttcaactccttagggtatctgcttatgggggggttacctggtatcaaatacattgaaggggcatggccaaagaatctgctcaaaagagctttccctccactcggaaataaggccttcaaccaatacagttcccacttgtggaaacatttaatttaaatctagggccacaggtatacttcaggaagggagacaggaggagcaagtccaacattatgaaaaactgatagcctggcttgctacctaggctgtgtgcagaagtacaaacagagctcagcacaacttagaaaaccctccaaatgtaattgtgacagaaggccagagatcaccatcaagaattctaagaac

SEQ ID NO: 122431 - DNA, 281 bp, Homo sapiens
gtacatattttattgaatcacagacatagatgggaacaattatttaaaactttaagggagaaaaacttcaaactgaggaaactatactttaagtacttcctagaggttgagcataggcaaatgactcagtctcactgtgcctccattttctccgttttactataaggtgatgaggcagaaggcctgagactattatcaaggtttctggaatgtattacattctccagtaatgcctgttttccttccattttatttttttcctctaaagactggaagaatgt

SEQ ID NO: 122432 - DNA, 148 bp, Homo sapiens
aacaccgcctttagtttttctggagctgaagttttacacttggcatattactttttagttcctttaggataaaacccgcacaggtgaccttggtgacaaagcccctcacagcagtccctcctctacccttggaggggctgccgaccac

SEQ ID NO: 122433 - DNA, 215 bp, Homo sapiens
acactaagctctggctctgtgcccctcagggatgagagagagctctggcatgttactggactacagatgtctcagaagggaagcaggagaggcatagggcaacccagaatgctatctgctctcccttctccaggtgtcaccagattgaaataaacatctgaaaagagggatctatcatgtggcatctgggtggcaccagatgttgggagggaacg

SEQ ID NO: 122434 - DNA, 218 bp, Homo sapiens
agggctgagaatggggttggatcttctatggtgatgcaagtcagggatgaaggctgaattgagctgactttcctgctgctgccaagagaaggctaatcaatggaagggagttgggggtaggatctagaataaacatttgttgaaattctcatgtgttagaggatgggaggaaccatgccatagctaagataaagccaacatctccgatgtggttgtac

SEQ ID NO: 122435 - DNA, 345 bp, Homo sapiens
catgtcagcgaagagtagccataactgctctaaaagtttatcaaggcccgcaagagattttctacaaggaaaaaaaaaatcggaaaaaaaaaatcagtagtttaagtgtgcttttgttatttttaaatgctgcctcttttttgtgggaggggcaatgtttcaaagctctagatgtaacagctctcttattttcttgtcctatatctacttcaaagaaatgtagcaagaggctgggcgcagtggctcacgagtagctgggataacggatgcccactatcgtgcctgggctaattttggtattttaagtagagtgggggtttggccaggtctctactcgggaaagtg

SEQ ID NO: 122436 - DNA, 419 bp, Homo sapiens
aattcggcacgaggtggactgagacctacaggacacagcgactcttaaataggtggctcaccaggagaaaggcatagcagaacctggactgagacctacgggagacagcaggcagacacacaggaggttggacgtcgagaggagcacatcagtgcaagaacacatgggtggctgccacttctctccctttcctgagagggaaaaactctcgacgctgagaggaatccaccaacaggcaccagcactctggcaggccaccgaccaatggattgacatagagtttggctggggcagccagaggagagcctgggccgctgaataacccgacttcaggggaaaactattctcccttttggctcccccatctgctgagagctacttccactcaataaaaccttgcactcattctccaaaaaaaa

SEQ ID NO: 122437 - DNA, 450 bp, Homo sapiens
gggctccaaacctgggcttgtgcccctggacctagatgaggacaggcatttttgttttcctgaccaaatgttgcatttcccaagatcaccctggcccaccatgccctatcctgtgcctaaaaaaaccctgggaccctagcaggcagacacacaggaggttggacgtcgagaggagcacatcagtgcaagaacacatgggtggctgccacttctctccctttcctgagagggaaaaactctcgacgctgagaggaatccaccaacaggcaccagcactctggcaggccaccgaccaatggattgacatagagtttggctggggcagccagaggagagcctgggccgctgaataacccgacttcaggggaaaactattctcccttttggctcccccatctgctgagagctacttccactcaataaaaccttgcactcattctccaaaaaaaa

SEQ ID NO: 122438 - DNA, 491 bp, Homo sapiens
gttttaaattttatttatgtttttagatcaaatagttcagattgcattggtttttaatctgctgttgttggattaacatatgctttaagcgactcttaaataggtggctcaccaggagaaaggcatagcagaacctggactgagacctacgggagacaggtattgctttttctcttctaatcattttaaatttaatttaccatctttcatcaaatagctccgatcatatcattattttttcttttctgttttgttggtggttttattggtggagttttattttactattttagaaaagcagtcttttaaaaaagacttttaaaaagttttattactctttttttaaaaaaaattatgttttcccttgatgtgcttatttcctttataaagatcatcaccattaaattactaggagatactgcggctgattttgtcatgcgtgagataagaaattttttgccaaagcaattagtgatgagtgcaatggaaaa

SEQ ID NO: 122439 - DNA, 485 bp, Homo sapiens
gttttaaattttatttatgtttttagatcaaatagttcagattgcattggtttttaatctgctgttgttggattaacatatgctttaagcgactcttaaataggtggctcaccaggagaaaggcatagcagaacctggactgagacctacgggagacaggtaacaaccgcgggatacagaaagccctctgtctttgggttaaggaatgggtctaattgagctggttaccacaaagccacctatagatggcaaaactaaaagagcacatggtaccacatgtccactggggcttcagcagctgtaaacatctacccctagatgctgccatggggttgtagccccacaacttgccagtctgtatgcttccctagaggtttgagcagcggagtactaaagaagcaagccacacccccactccacctcctgtgagggggacaaggaaacttttcccatttcaactggtggctcgtctgggatctcggaag

SEQ ID NO: 122440 - DNA, 722 bp, Homo sapiens
aacaaagcccggtactttcagtcacctgatctttaacaaagcatataaaaacttccatctaagacctgaaagtctaaaaatgctacaagatagcatccaaaaagcttttctagacattggcttaggccaagtagtcatgactaatgccccaaaagcaaacgcaaaaatataaaaatagaataagatcaataggacctaatgaaaccgaaaatcttctgcaaggcagaagaaatatcagcagggtaaacacacaacccacagtataggaaacagtagtcacaaactaggcatctgacaaaggactaatgtccagactccaaaggaactgaaagaaatcagcaagaagaaaaggtgccatttacctgattatgggttgtactgaattaaaaaagatcaattgtacacttactcctcagacaggataaactgtcctggggtgtacagctttaacaccatcattaaaattgtttgcaaaaggaacagagaattaaaaaacaaaacacttttctttttggagtgaagagtctttcatttgctgttataaccagcaaatgccattcactaaatcaaaaatggaaggaagggcccccacaaacacagatctatctgagcaagctgaccagtacacattacagtcttaaaaatgaaggttatatactctatgttacaagtcccgactaggcagtgtcaaaacgacatctatttctttgcttgttccgctg

SEQ ID NO: 122441 - DNA, 861 bp, Homo sapiens
aacaaagcccggtactttcagtcacctgatctttaacaaagcatataaaaacttccatctaagacctgaaagtctaaaaatgctacaagatagcatccaaaaagcttttctagacattggcttaggccaagtagtcatgactaatgccccaaaagcaaacgcaaaaatataaaaatagaataagatcaataggacctaatgaaaccgaaaatcttctgcaaggcagaagaaatatcagcagggtaaacacacaacccacagtataggaaacagtagtcacaaactaggcatctgacaaaggactaatgtccagactccaaaggaactgaaagaaatcagcaagaagaaaaggtgccatttaccaccttcctgactcattggccagaaccaatgttagtggaattaacatatgccccaccccaagtgacttctaaagggctaactcaccacaagggagtcagagcagatcttggactgagacctacaggacacaggtggctcaccaggagaaaggcatagcagaacctggactgagacctacgggagacagcaggcagacacacaggaggttggacgtcgagaggagcacatcagtgcaagaacacatgggtggctgccacttctctccctttcctgagagggaaaaactctcgacgctgagaggaatccaccaacaggcaccagcactctggcaggccaccgaccaatggattgacatagagtttggctggggcagccagaggagagcctgggccgctgaataacccgacttcaggggaaaactattctcccttttggctcccccatctgctgagagctacttccactcaataaaaccttgcactcattctccaaaaaaaa

SEQ ID NO: 122442 - DNA, 250 bp, Homo sapiens
cctggataacagaacgagaccctgtctcaaaaaaaaataaaaataaaaataaaaaaagataaatgatagaagactgggaaagggttcatcaggttttataatgatgtcttccattgatggacatttgtaaatagcccctacaaaaggcagaatatgtccttctatcagtaatttatatgttgcaaaggataaattgaaaagggctggaagaaacatttggttttgggaatgtacgatgtataaaaacatc

SEQ ID NO: 122443 - DNA, 360 bp, Homo sapiens
tcaagatactagcccacccctttttcttccccagggaaagaaatcctcattttgtaaggtcatttactacataaaagtaaccacaagtaggaaagataacagaaggagaggaggacaggaaattctcatcacagctgaacaaacctctattattttaacataacatgggtggcatttatgcgcttatttgaactgatggaaatttccagtagggggaaaaatgcattaccaacattaaaaataaatgtccaactattaaaaaataaaataagatagctatgcccagctttaacattttatactctactccatgtagtagtcaaacatggaataaatttctgtaatgacctatcacaatag

SEQ ID NO: 122444 - DNA, 628 bp, Homo sapiens
tgcagcgcaccagcatggcacatgtatacatatgtaactaacctgcacaatgtgcacatgtaccctaaaacttaaagtataataataaaaaaaaattcctatattactaatcaagtatattttacaaaataccactgagtgtggtgcatccaagattctgaggatctaatataaattctggatctaacaattttgtttctgctcacagtatctccaaaatttattgagtttccatagattttagatctgatatgagccattttaccatgttaacttattaaccctcaccatatcctctgaactggatatcacaattctcatttctaaggtgaaacaccttaagctcagagaggtagcatcagttatttaaagtcacgcagcaaagaaagaacacaggtcatgcctgttagatttcaaaatcacaccatcttagctctctctgtaccagtaacctgaagttacattcctccaattgcagataacagtacaacataaaacggtagctcttcttattattatcttgccaggaatttaaaaaatgaataagatagaatttgaaactggaagacaatctcaccacattttggaaagattggtttccaaaatgtgactaaatagtttacttgag

SEQ ID NO: 122445 - DNA, 150 bp, Homo sapiens
atgtcccacctcttcctcctcaaggtagacacaaaacatcttctatatccttacccccagctttcaaccaactatcttattacaccctggaaatgtctacattgcggaaattatagccatgttgttttcgctcataaactgtaaatttct

SEQ ID NO: 122446 - DNA, 587 bp, Homo sapiens
ctttttctcaagaggtaatggtgtttaggcctgaaatctgatgcaatgacaacctaaccaacaataattaggctcatcagtcaaggaaattacaaggaccctttgactaaagtcttttgctgaaatgaataaaacgctcaggggttgaagaaaatatcctcagataaatagattttgagaaagatgaatagacccttagaaggatagatgatggtttgtaacaaggtctgtctgggtgtggtgaagtctcctttcccgcaatgagttaattttcagaggattaatgacaattgagtttcttttgtaaaagctatcttaaggcagatggagggaccctcagagagccttgcatcttgtgtttttcaagttcctgcagctcaaaataatcactataataaagcaatatatttttagggtagcattacctaaatttcttcaatgctggctttgtttaatgagcaatttaagcataattgtttagaatgagtaaattaggaggagtataaatgggatggaagtttgtggatgaacttgacatggtttctgagcccttttaaagtaaattaaaatgctgaaatatgctgctc

SEQ ID NO: 122447 - DNA, 121 bp, Homo sapiens
ggtctacaaatcccttggggatcatgacctgcctgaggactacctctgacatgtcatctcctactactcacccctttgctcatccatacatacaccctggcctctggcctcttctcaaaca

SEQ ID NO: 122448 - DNA, 159 bp, Homo sapiens
tctgtgctgagctcatttcagcctcacaactgtcatgtgaggcaggcagtattgttcttcccatttcacagacaatgagattgaagctcagagaagctaggcaaccagatagtgtgatggacccagagtctgcactcttaaccccaccgccaaaagaaa

SEQ ID NO: 122449 - DNA, 233 bp, Homo sapiens
gcagcagggatgagtgttgcagtaatccagatgaagtctgacaggggcaaggaccagcatagtagcaatggtggggagagcaagtaataaactgaatgatttgggggagcaggggaagaggttaggatgggtgctaggtgacataaccaaggctaattatccaatttctgccttaggcagaaacctattcatatgggataaggagtatgtgggggattatgggattatgagtt

SEQ ID NO: 122450 - DNA, 225 bp, Homo sapiens
caacagaatgcaaatgatgatgtgacatgcttgcaaagctaatttctccagtttcttatgtaagggcagatggataacaaaagttctctttctaaaacatatattgagaaaaataatagagaacaggctatcagctggcttctttaaaaactcactaacatttttagaattaaaaatgttttgaagaaaagtgcagtgtttttacaggtaacatctctcctttgt

SEQ ID NO: 122451 - DNA, 937 bp, Homo sapiens
agcaggatgacctagcttaatttgaagagacagtaacttgctggcatctggctactgaaaagaacaaaatggttgacctcctagtagtgccagggactatcttaaaagcaacaatgatcaatgggtcagaagttattaaaataaagagacaaagaagagggacattatgaagttaaaatggcaagatgtcatgattggttgctttagaaatggggcagaatgaatgaaaatggatgcgaatatttctcacccaggtaacggtcaacatgatagccacatatggaaggggcgtggagaagaaaggataggggaaaaagaagaaagcatcagattccttgccagaggaaaaaaatgccatccttgaaggcagctatagaatcatcatcatatggaattctagatacaggcctacaaaaatgtttatacttgtattcaaagatctagaggaaaaaggtttaatcgactcacagttcagcctggctggggaggccccaggaaacttacaattatggcaaaaggtgaaggaggcccgaggaaacttacagttgtggcaaaaggtgaagcaaacatccttcttcacatggtggcagaaaggagaagaatgagcaaaatggggaagagccccttataaaatcatcagatctcgtgagaactcactcactatcatgagaacaacatggaggtaactgcccctgtgattcaatgacctcccaccgggtcccttccacaacatgtaggaattacgggaactacaattcaagtattcttccttggatgaaaggactaggagaaagccctgcaaccccacgagtccgcccgtttgttgaaatcagttcaagatcatccaggtctgcaaaactcggctgaagcagcttgttgcataatttaccagagaaaagagggccatctggagagccaatctggagaactcgagcaa

SEQ ID NO: 122452 - DNA, 853 bp, Homo sapiens
aaaatagatgactgtattgtggaatgggatataagtatttcaaaaaatctgagtgcctataaaataaaacttcaaggacattttagaccattccatgggctgcctcagattgtgccttcaaatcctctggaatcatacatttactctcatattctaagttgactgtctctgtcatgaagattatagtcgtaaaaactgaagcagcattatttaagccaaggtatgttaaaaagactgtttctttaaaaattatctttttcttggtttctgtgcctagatactaactttgatatcactcttttctatagtacaggagagagaacagttagccatgaaaagatgtatagataggacaaaaacttcatataaataaatacctttcttcttataagccaaaaaatttatttttacatagaattggataaattttagaatacctattaggacaaagaaacaaatacaaacctctcaactctaaccaattagcttttcttaaaccctctcagttttggcttattctcagctaaataaacagcccagatcacaagattatagatacctctttgcttttttgtccaactgataccatgtgtctttttttttttttttaatttgcctgatatgactcttgtttcttagagcaaacagctatcattccacattttctcctggaatgatttcctcatctctggttttctgccttccttgtctctcccaattatcagaacactaactaatgccatggtgtctgctgtgactaccatagctttttaagattatgccctcccctggtaaaactgttggcatggcataacaatctgttatcttttgtgtttcggaagtggaggggaga

SEQ ID NO: 122453 - DNA, 128 bp, Homo sapiens
caggaggattgcctgagcccaagaagttgaggctgcaataagccatgatcacaccactactgcattccagcctaggtgacagagtgagacactatctaaaaataaaatgaaataaaaataaactagag

SEQ ID NO: 122454 - DNA, 221 bp, Homo sapiens
cccctccagttcggctaagaaactctagtctatatatcaagttttgtatcatatgtattgctctgaactcagaaatttcccttccatttatggattctatgaataaaatatcacatgtacaaaaagactaagtcgaaaaatttcagctgtgcacagtggctcctgcttgtaatcccagcactttgggtggccaagggaggaagattgcctgaggccagcag

SEQ ID NO: 122455 - DNA, 417 bp, Homo sapiens
actgcctctctgaccccagacgtctcatctgtcgaatggggacatttgggaacagcacccactctacgaagccaccatggagacgaaagagccaatcgtctacacgggcagtgtagaacgggcgcctggtgagtgctcagggatgaccctcctcggtagctgccccacagaggccaacaccgcccgcaccgtagccactgcccccaagtccgcctggagggaagagagcaggtcacgctcacctgattctgatgaatcagctggcctgggtcatgcctctcagggagaaaacctttgagtccacagagctgctcacagataccactgcctgtgtgtaactgctgtagaccactgaggcagaccagagagcagataggtgctaagcaccagtgacattctgaggtcatggcacgaatc

SEQ ID NO: 122456 - DNA, 290 bp, Homo sapiens
aagggtggagtttgtgggggtggtaaaagagatattggaggcagtaccggagacagaaagctagtaatgatgaatgtgtggggcagaacagctacaatgtgcagccaaggttgtaaagcattgatctggtattatcagctgttgatctgtaaccgttaattgccaaagtctaccacaataaagcacagatgggctaagaccatctttcctgtaagggatagtaggatagctgtgcatgtgaaaggggatagacacctggaggtttcaagggatggcgctgcctgcacctg

SEQ ID NO: 122457 - DNA, 453 bp, Homo sapiens
caaagtgctgggattacaggcgtgaaccaccacacccagcagtctgtgcttctcaacttacagccatctctgaaccacctctcagagccaaagtcagaactcccctgatgtgaactgccacccacagggcctagtgtagaccccagggatgggtgtggagataaacaggccagattctaggtaccaggagatgcccaggcacccataaggagtgggtgtgtctatgtgggagagagagacttaccctcccagtgccttggttcctccccctccccttccatccccacattccaggtcaggcccagggcttggggacgctcttgtctgaagcagctgcaggcaaggagcctgttaactctaccatccatcaaagtgttttggcacatcctgtttcctctctgcttctcaggcactaattaaataccttcagcctttcaccagggtgggaccagg

SEQ ID NO: 122458 - DNA, 775 bp, Homo sapiens
caagatcggtcctcctctattggggatggtcgtcctctttcacccagtgtgcagctttggaagggatgcgcatggagcgatgagggaggaagtggacacccacctagccagccagatcagcccagttacccctggcgatcaatggggtgacagatgtcgcagccagatcaccctcacattctttcttttgaaataaaatttactacaatgaaatacataaatcttaagtatataaaatttgaaaactacatatccctttctaaccaaaatccccatgaagacatagtagaaatggtatcagcaccttaggaaagttccctcatgttctttcacagttagtccctacctcttccccctcaaatgtaaccattgttctgatttttcctagcatagattaattttacctgttctaggacttcatgtaaatggagtaatgcactatatactcttatgtgaggcttctttcattcaggatcttattttgagactcatccatcctggtgcttgcatcaatagtttgtttctttttaacattgcattgtatgagtataacaagttatttatcgattttcctgataatcgataatataaataatcgataaacaacacctgggttgtttccagtttttgtctattaagaataaagctgctatgaacattctttttatgaaggatctttttttaacttgattttttaaatgtcttctatttatatcgaacctgtatatagatcactcttacccagtaatatcttccatagtctccccttttgtgc

SEQ ID NO: 122459 - DNA, 427 bp, Homo sapiens
cattagtgtctctgctcaaactgctgaaacctccccagcaggagccacacacctagaacaccatggtaaaatgaggatgtgtgaaaaatactcaagtcaggtctgaacctatggtactgtttggatgcttggagtctctgcgtcactgagtaagtcttgcccctgcccacctccagtaaagttgcgtgggacaagcgagagtctccctgccgtgtgtgtgtgtgtgtgtgtgtgtgtgtgtgtgtgtgtgtattcctgtcagtgtagttctaagggtgatatatatttatatttaaccagagaggagggggggagatattcctgggctttcgctatttaaataatcaattcatgagagagactcagtgttataagaaaaaagtgcagtggtatttaaattcgaacatatacagaattctttgctctc

SEQ ID NO: 122460 - DNA, 854 bp, Homo sapiens
caaccaaagccgtctaagcctgagaaccttggagtaaaccgtttaatttgatttcatcgtgttaaaacaaacactcatttgttagtttttgttttcattcccatcaggattttgaaccttttggtgacatcacctgtttttccttttttgagaagaattcgtttttagttctcttcagcagttctagttcattaattcccatagttgctgctacatgggaattagcaatttccctgagcaatttccactctatatccaacacgtaagtgaacagatattttagatgtggtttcaccttttgaaatgaggcagcaattcaacagttcttatgcaatgaataagaaaatgttccgttctagaactctacagaagctgttgattttattttgatattagtaataatcatatctgaattcttttggctgtgaagagcagaaatcccaatttatagtagtatctgaatggtgtaaacagcagagaaagttacctctcgaagctggaagtcacgagacaaggcacctcattttcattaattcaacagctcagtgttgatgagggcgtcaaaacaccaagttctgttttttattttgccatctcagcatattgactttgtcctcaggctagctccttgtaagctaaagatggaccctgcacatgtagacgtgccaacagcaagtgtcacactaagagtaagaaaggcctttccaaaagctctgtgtcatgcttcatcaaccagacctaagttttctgcctcccataaaccagtcagttgcaaggagggtgagatgacagtgatggggataccatagccaggatccctggaatagtacgtccaccttttagaagtgagagaa

SEQ ID NO: 122461 - DNA, 209 bp, Homo sapiens
aaaacatttaaaagttaatatactttaacaaccatacatacacattaagtgtgggctgtttttcaaatttctaattacactgttttgaaacctacttatcttaggaagggatggaacactaagggagcagtaatcgaatgtcttcaggagggacacagagcccgccaggagtctgcaccaaaggctcagctcctgaagtctgcagtgaa

SEQ ID NO: 122462 - DNA, 791 bp, Homo sapiens
agtttgagtgcacaaaaaaggccatataggggcccagggagaaggcagccatctacaactcaagacctcatcagacactaactcttctggcactgttatcttagacttctgactttcagaagtgtgaaaagataaatttctgtcgtttaggttaccaagtttgtggcattttgtgatggcagcctgaggagactattaggtagacattttgatgggtgcttaccatgaatggagcttgaaggactggaagttgctctggacatgaatctgaaatcactctaccccaaaacaacaataacaacaacaacaacaacaacaacagtctttgtttaagctagagtagcagtggaaaagttcactctattcttgggaagacataaaacttcacttgctatgctccatgaagtatccagaataattctatgcatagccattaaagaactctataaaaggcactgaatgttgagaccactcaagcaatctgattgcttaattaaatgtctagaaatgctcaatatgtgccaattgaaactgtatcacccataaaaaacagcgacatgctttctctttttcttttaatttttggtttataatagcaataacaacgttggctgtgggcatttcctggagattaatgactggttaggctttatggcccggactgcttctcctgtggacaatcaactcctccccacttgtcgttcatccactgaaaagcaccacacagctccctctggtttgttaaggaatgtcagtatttgtcaaagctggtggggattggtttgtgaata

SEQ ID NO: 122463 - DNA, 275 bp, Homo sapiens
gagatcaccccactacactccagcctgggcgacagagcgagactccgaaaaaaaaaaaatggagaaaaaagaactcaaaagatttgtcaaacaaggcaatttctggtccttgcttagatcctgattaacggggactacaacggtgccctaccacgcccagctaattttttttctttttggtagaggcagggtctccctgtgtggtctaggctggtctcaaactcctgggctcaggccatcttcccaccccagcactttgggaggccgaggtgggt

SEQ ID NO: 122464 - DNA, 570 bp, Homo sapiens
gggcagtgcagcttgcttctgcggtcgatctaaggatccccttttccacagggtgtagaaatgttctaaaattagagtagggcgatggttgtacaactctatacatatacaaaagcccattaaatgtcacactttaaattggtgaattttatagtaatgtatataaattgtacgtcaataatgttagaaaagaaggaaagaaagagagaaagaaagaaaaaaccctgccatggagagggaacaagcagtaaaagagcatgagttcctgtcctggagagatttgggtagtcagtgattgaatgggtgtgtaccgaggcccggtaccatatggcgcaccagccagtgtgaacacaacacaattctgtcctatggagcttacattctggtgggaaggactgacgctaagcaaataaatgtacagactacaggttgtgataaggggaacgaagaaaagtagagtgaggggacatggaactggggatgccttttttgatggtgtcgatggccatctggtcgttcacacccctggctcagcgtagggagagtccagacacatcgtgggaggaacag

SEQ ID NO: 122465 - DNA, 316 bp, Homo sapiens
aagggcaggcagtaaattcaatgattaaatattctaagtttggaaacatgcatttgatatcaatctctcttgtagattcacaatgcctagtaacattctaacagctatgagaagtcccgtgataagaagctatttaacttatttagcccagagttctcaaaatccatttggtcacagaattcttttggttcggttgtatctacttatatctcataggactttttttccccccacagaacagaatttggggatatagaaaataccattattttaagtttatgataccatatgaacaataccagttctttttattgac

SEQ ID NO: 122466 - DNA, 394 bp, Homo sapiens
tcagctcaggtcaggaacacagatcttatcccggctcttgcactaattatctgagggggagtcatgtgatatgggccagtgagacttcctaggcctcagtttccttgtttattcgataaatatgtttgactagttaatacaataggtgtatgtgtgtgatgcggaggtgaggagcggcttaactattttgcaagaaaaaccagtaactagtttcattgtcttctacagtgagcctctcaccctatcctagtcattaaactctgccagtgtggtcaagaagtcctagccagggtgaaatggaagatctgaaaagtcctcattgcaatgtgtaagaaatcaaagtaattgtcctttgcaaggctcagtaataccttttcatacccagcaggatggg

SEQ ID NO: 122467 - DNA, 756 bp, Homo sapiens
gctattttaaactatatattattgttaactatagtcatcctacagtgttagagaatactagaacttattcctccttaaggtaatgttgactttttagaatgagttaggaagtgttctctctgcttcagtttttctggaagagattgtggagaattaatatcatttcttcctgacatgtttggtagaattcaccatctgggcctagtgctttcgttgtagaaggttattaattatttattcaatttatcttatagatataaatgtattcagattatctgtttctcctttgtgaaatatgatagtttgtgtctttaaggaattggtacatttcatctaagttatcaagtttgtgggcataaaatttttcataacattcctttattgtccttttaatttccatggcattaatagtgacaattcttaccatttttaaatggacttctaaattttatcattagtagttgtaaagaattaactttctatatattgtaaaatgtattgcttttgctgaaaaattaaatgattatatattttcttaaaatgtatctaatgggccaggcgcggtggctcacgtctgtaatcccagcacttttggaggccagggcgggcaggtcacaaggtcaggagatctagaccatcctggccaatggtgaaaccccgtgtctactaaaaatacaaaaattagctaggcgtggtggcatgtgcctgtagtcccagctactcaggaggctgaggcaagagaatcccttgaaccca

SEQ ID NO: 122468 - DNA, 153 bp, Homo sapiens
ctataatcccagcattttgggaggccaagatgggaaaatcacttgagcccaggagtttgagaccagcctgggtaacatagcaagatcccatcctgcaaagacatttttttaaattagccagacatggtggggacgaacgactgtattcccagc

SEQ ID NO: 122469 - DNA, 758 bp, Homo sapiens
ggatttctgacacggtaggactggggaaagacctgagaatttgcatttttaacaagtcatcagtgtatgtcatcagtggatactgatggctttggtctgtgaccacagtttgagaaccagtgctatagaaataatggggttaatttggctttcttcacatgtgcagttaagcatatctttgtgggtttttttggatgctagctctccaaatactgacaaagtctgcttagtggtagaaaatgtcagttttaagtggtaatgcgtaaacatttttctttatcccagaatgcaaatctaccctcaaaagcactgttatttgaagtgaagcaaattgtaaccatagagtagatatcaaaacttgtgtgcctttctaaccaaagaagcgcatctgaacaagattcatagggagattttggttgtttcccatctttgttcagtcagtttagctggctatttttcagttttgaaaattgtaaaaatggaatggttttccatctgattgtgttactgcttcacaaatcaagtgtcttttaataatactgtcctgaagttactaaatgtagtgccattttttgccacatgacatttatgcagtgcaaagatacttcattattatataaggcatgaaaaacaaagtgttaaattaataatattgtttgacacatccttgaaattgtccttgaattatggtagtatgaaatacctaacaatttgcatcatgtttaaactcagattgctttgatataggaatctagaat

SEQ ID NO: 122470 - DNA, 853 bp, Homo sapiens
agagcatttgaggccaggagttcaagattggccaggccaacatggcaaaaccccatctctattaaaaatataaaggttagatggccatggtggtgcacacctgtaatcccagcactttgggaggctgaggtgggcggagcacttgaggccaggagtttgacatcagccaggccaacatggcgaaaccccatctctattaaaaatacaaaagctagatggccatggtggtgcacacctggaatcccagctacttggattgctgaggcatgagaatcgattgaacccggggcagaggttgcagtgtgctgagatggtgccactgcagttgcgcctgggtgacaaagtgagactttgtctcaaaaaaaacttttttttaagtagtataataatcaagatgaaaaaatcactagaaagactcagcagtagatatgaactggcagaagaaagactcagcaaaataggttgatagagattaaacattctaaagaacagagggaagaaagaataaagaaaacagggccttaaaataatgtggggcactattaagcacaccaagatatgcataatgggagtaccagaaggagataaagtaacagaaaaattatcaaagaaataatgctgaaaatctcccaaatgtaatgtaaatcattaatgcacacattcaagaagcccaaagaatccaagtcggaatactcagatccacatgcagacacatggtaataaaaacgctgaggcctggcatgttggcgcacacctgtaatccctgcactttaggaagccaagaagggtggattgcttgagctcaggagttcaagaccagcctggggaatgtggcaaaaccccatctctttga

SEQ ID NO: 122471 - DNA, 433 bp, Homo sapiens
gttactatccccattttacagataaggaaacaggttcagaggacattactgcattgctggaggacacatagcccgtaagtagcagagccagaattggaacgcaggcctcctgatgccaaagtaatacggcctttccattatgtctactatatgtaacctaagaggacaaaatggagagaggaagaaaagatcaatctgaaagctgcgtcctttggttgttctagctcaggtcaccacacatgctaactccctgttcccatcaaaaggcagctggccttgaagggctggagcagggtcgagtatacaggagactcagttgacaggtgaactctgtcccagtccactgtcttccatgtgtgcgtcccagtgaaggcagagtcctgggaagaaaccatccgtctcatgcgcctgggtcgagagagggaatccgggt

SEQ ID NO: 122472 - DNA, 1538 bp, Homo sapiens
cttctgctcctttgctctggggaagagtcctgtaatgaataatcctgtgtcgtttcacatgaatgtctgtaggataaatgcttaggagcagcttttgaggtcagagggtttgtgtatccatcattttgagaaatgcagctgctcggctgtccctaggagttgttgtgacccacactcctaccaggccagaggggagttcctgggtgctccacatgcctgtcctaggcttttggacatgctggcccccagatctgcccctccatggctcctcactgccctcagcagagagactccagggcccttgtgacccacctgtcagctctccagctcctggttccctcagaaccatcccttggggcccgggtgttcaggtcccgcctcctgcacaggggaggaagagttagcacatgagtggccgtgagagggtcactccatggggaggaaaccgcaagggctgtttgagaggagggagtggctgggctgaggctggagggtcttcagagcagtgcggggcgggggggaaaggggcgcctgcatcttagtcctgaggacagagagaatccacgggggtcaggggacagtttgagacaggggagtaatagctttgtgttttgtgaaaagatcatttttctgtcgtcagtttctctaggagaacactgcagcccctgccaagctgtatctgactccctccaaatcccacttatcacagttgtaattatgggattaattcactgtggttttgtttcagagggagtttccattcaattttatttaatgagataaaatttgcacaacataaaattgaccattttaaccatttattcgtttttaaacttgagatatggtgcacatagaaaacatttgctatggtagatggattatgttcaaagaataataggccaggcgcggtggctcacgcttgtaatcccagcatgttgcaaggctgaggcgggaggttcgcttgaacccaggagttcgagaccagcctgggcaacataggaagaccctgtctctaaaaatataaaaatacaaaaattagccaggtgtggtggcatacacctgtagctctagctacttgggaggctgaggtgggatgatcacttgagcccaggaggttaaggatgcagtgagctatgattgcgccactgtactccaacctgggtgacactatgagaccctgtctcaaaaagaaaaaatagtacagggaggccaaggcaggagggttgcttgaggccaggacgagagagagaaagaaagacaaggaacaacagtgtcctaactacccagctttgaaaatagcagctcaaggccaggtgcggtggctcacacctgtaatcaccagcactttgggagactgaggcgggtggatcacgaggtcaggagttcaagaccagcctggccaacatggtgaaaccccatctctactaaaaatacaaaaattagccaggcatggtggcacaagcctgtaatcccagctacttgggagactgaggcaggagaatccttgaacctgggaggcagagcttgcagtgagccaa

SEQ ID NO: 122473 - DNA, 318 bp, Homo sapiens
aaaagatccaaataaatctcatcaaccccgtctaatggctttccatttgcatcatgattccttttctgcctatctctccttttcttttctgcctcatcttttaccatagccctgtggtgacattatgctaagccactagtgaccctgcagccacagtggacttctttcagcttttcaggtttttgttgttgttgttgttattgttgaaaaaaagtcttgctctgtcgcccaggctggagtgcagtgttgcaatctggactcactgcaacctgtacctcccaggtgcaagtgattctggtgcctcagcttcccaagtag

SEQ ID NO: 122474 - DNA, 460 bp, Homo sapiens
cgcctgagaaggcagagcgcggtgcggacctgtgctccgcgcgccggctggcagggcagggccgcggctgccaggaggcccgggaacagtcccgacggagcggcgcggagagggcgctccccggaagcccgtccgcccaacggatgcgcagcgttggggcccggccggaggtcggagccctcggacgccgcagccctcggacgccgctcagcacagcccctctctccgtgcgcccgccctggaccccctccatccctaagccccggcagccgattcggagactcgggaggccacaggctcagcgcgacaccacgaccacaactaggaggcaccatcgtcgatctacctggggaggcacctacaaagccagcagactgacacccgtgtcctagccgtcggcggcctgcgaagcgatagtcaaaggaaccaggacccaggaccccggcgctctgcttacccg

SEQ ID NO: 122475 - DNA, 755 bp, Homo sapiens
agtttgcatttagattacctgcaaaaatggaacaatttactactctgcctctaaccatctctttcctcctttttcccttagtttgacttcttgtaactaattatttaaattctgccctgagttaaaattagtcatagcttacatgtttcacatgtatgtaaatgcacttaagtcctacctcaagctgtatgatgagtccatctagacagaagtgacaggaagggaagggaatgtggattgtttgataggcagaagccacagtttataatagtttcacgattgaaaggcatatttgaactttttcctggcagtgtttaacctttaaaaacaaaatcaggtggagagaatgaactcagtagctttttgatgataacatattgtagcaagaaaggtaaaacacaaagtgttaagtaaatgatggtttggggatttgattcctatagatgtcttatctgtaattttttaaacctgacagtttcctctatggtacacaagatgtaaatgaaaattacatcataacattttctgtcacgaacaaaagagtggtagtccttcttttccccccttcctctctacccaaaaccttttctgggtaagtttattttcaaaattattgagagccaggtaacattgactattctttaactgcttcaaattgttcatagtcaaatacttctcagtactttaatttttaatttagagcaaaatataagaaatcaattttaaagcataaaatgacactgaacagagatata

SEQ ID NO: 122476 - DNA, 530 bp, Homo sapiens
tctttagagaagactgtccaagtcagtgactctcagctgcatgtgagatgggataaaggacgtgggatggggagtagatcctgactcctgatggtgcatgtcacctttttaaagctatggacaaattattgcttgattctggttatgtgtcaggtagagaatcactactggagagagccactgatacagacagggaatgtccttttctttgggtgtgctatgtgttatcttgggtgttctaaaacagaagagaattgtgaggcaatgggctaacgaactgccacactagtacacaaccttatagagaaagaatgaagccttggctagtctcttcctaaagtcctacagggaagtgacccaagctagttcaaaaggtactggaaaaataaaaagccaaaaattctcaaaagaacgaagtcaatgttcccttacttttcaggttacaactttatctttaatatcatatcacttaattttttttcatttaaaggaccttacttttttctcttttcgtgattcattacataagt

SEQ ID NO: 122477 - DNA, 298 bp, Homo sapiens
gccatgtggaactgtatgtccaataaacctttttcttttgtaagttgtccagtcgtgggtatgtctttatcagcagtgttaaaatggactaatacaatcactctatcaaatgagataatatttattcctttaccactgacaactctctctcggctcttctattcaatcatgttactgatagacgctttgctttttgtttttgttgtttaacctgattgttatagcttattttatgaatttctgttcttcttttaattttacaacaattttactatttctccttacatgtttataagtc

SEQ ID NO: 122478 - DNA, 332 bp, Homo sapiens
ggttgtgtttgtatttgaagtcatgggcacagcgagattgaagaactcacctcgaacagctgagtaaaggaagatgagcctataaaggacccagaaaaagagcgacctgagaggggcccagaaagccaggacagagttgtatcccaggggccagggtgagtctgcttcgtgggatggagtggtcagcttggcatcgcggctgtggtgagtgatatggaggagatgtggctgccttcactgctttggtgggatgatgtgagcagaagcgaggttggagtgaatgggtgaggagtagcaggacgtgaggatctgatgatagacaggctctgaaa

SEQ ID NO: 122479 - DNA, 394 bp, Homo sapiens
tgggtacaagcaatcctcctacctcagccttctgagtagctgggactgtaggcacacgccatcccattcagctaatttttaattttttttgcagaagcaggatctcgctatgttgcccaggcttgaaattcatttttaataaactgggtagacatctaattttattttcttccaatcagataggtagttatgccatcaccatttattatgtaattgacacttttctcactgaactgaaattccacagagtatgagctctgttaattttagaaaagaggaaaatttacatttaacacaataaaatgataagaattatgatttaaaaatggattaaaatctacactctgttgaaatgttttcttgtgaactcaaaacctgaagaaataaaaaataa

SEQ ID NO: 122480 - DNA, 460 bp, Homo sapiens
cagaagacaaaggggagcctgcatgtgcagaaatcacatggtgagagaggaagggagagaatggcaggggaaggggtggcgctaggctgttttcaacaaccagctcttgagagaactaagagaggaagaacttgccgtggacccaggaaaggcattaacctattctgaatggctatacaagattacatcttctaaggtcacttcacgctctagaatgctttgattcctccagtcacccaggcccagaatattggacctaacttcatttcatccctgtcactcaccctgattgttctagattctcctcccatccaacatccccctctattccaccattcctttttcatcatgtgactccctcactctgaaatctgtgcctccagacttggttggcccttagaacagaatccttggtcttttgctggtggtgtggcacctccagtccactgcctggccctcc

SEQ ID NO: 122481 - DNA, 427 bp, Homo sapiens
tgcctctgaacaggcagcctctccttgaggtcctcaccctgccccagtcctttaaggccctttaaatcccttcatccatggcatccactgtaattccctaaatgcaggtgcagcttccggaagaggaggtgagtcatggagagcttagcgtgggcagggagattggagaagctactgcaagttcaaaggcaacataccccttccataaccctgaagcacttcttgcccctgtcacatgtgagttgatcacagtcctccctcgttttctcctctagcaccatcccccaccctatagatggagggtcctgagagcaggggtgccacatggctctgtgctgcagtggcttctaaggtgagtgtggctggatggggcgcaaaacagtcctgagtgaacgatgatgtttgtgtggacttggggagggaatgc

SEQ ID NO: 122482 - DNA, 297 bp, Homo sapiens
cgaaaatctgggaaggcttcctagaaggggcatctgaaccaatctagaaagatgaggagcataatacaacctgctgttctgtgtacaatgtgtgatgatcaaatcggggtcatttccaccacctcaaacatttaccatttctttgtgttgggaacattatcacacagttccccataaatatgtacattatgtgtccatttaaaacaatacaagcaaacaaatgtgaatttctaaactgagactactgtaaggcctttctcctaatagcaagattgtaataaaacttcaactagtcat

SEQ ID NO: 122483 - DNA, 262 bp, Homo sapiens
gtctgatgacacattgcaagcaacttagggggtggggtgactgtaagtatttatttcactatgggctcttctttcctggattttggcagatgaaaggaaggtaaagaactttagcttgtaaaggtactgcagttctacgaaggagtataggtaggagaggttggcaaagggaaaaccagaacatggctgtagggagaacccttgaagataaagatacaggctaaggggatgggcacggtggctcacgcctataatcccagca

SEQ ID NO: 122484 - DNA, 435 bp, Homo sapiens
aagcaatacaagtgcagaatcttcctagatctgttttctcttaccccctcctaattcaacagcagggatttttttgtttaacagcctgcttttactgattctttctgaaagattcatcatatttgctgtgggttgaatgtgtctcacaaagttcatgtggcgaaacttaatctccaatgcaaacactgggagatgggggtctaataagaggtgattgggtcatcaggttcctcgtgaatggattggtgtcattatgtagttaggttagttactgtgagaatgggcttgttataggagcaagttcagtcccctcttgctctcttgcccttctgccatgggatgacacagcatgaaggcccttgccagatgtgggcccctcaatcttgcacttcccagcctccaaactgtaagaaatctgttcttcataaattaacc

SEQ ID NO: 122485 - DNA, 146 bp, Homo sapiens
ggtagaaattgggttcaaatttgatcccatctttttaccagctgtgcaaccttggacttgttacttaacctctctgtgtctcttattccacatctttcacgtggggttgctgttatggttaattagaaaacacacgtaaagtgctt

SEQ ID NO: 122486 - DNA, 303 bp, Homo sapiens
gcggccgcctactactactaaattcgcggccgcgtcgacacctctagcccaccattcttagaggtatggaaaggaaggagaaggggcctctgtttattttctctgctgtgaaagctacttgtactcaggaaatatctactgcttccttctcagggctgggaatgccctagtctgttcttacccaagggtggtaacttttcctccaagtgtgcagctgtctgaaaatatatttgctcttgatgtgtcaccgggtcatgagtagttatctgagaaatactttacacatgggtgtctcctgagccc

SEQ ID NO: 122487 - DNA, 582 bp, Homo sapiens
gtgattttctgatattcatgaattctagagtcaatatatacttacatcccatcctcctttctttgccaaaattcgggacaaattttaactcagattatctagtgacattattttgtggacatttaaaaatattcttctaatttacaaaaaaagagaatatatcataatagtagtggaaatttaaaatatgagtggttaagagtaaaaacatccatgcccacttatcctaacaaaattctgtttttctagagttgtagtctaggagctaaaggcagagggcttagagtcagaacagatttgaatctcaacatctcctctgacttgctttttatgacactctcagcctcaattcctcatctgtgtgaccctcagagatagtttaaacattttgaaagattacatataacattttgacacacggtaattattcactaccataaattagattgcatagaatatttatgcatttggtttttatccctacttttaaaataatatttttgtatgttgtgaaagggagatttggcaagtcaaaggtaacagcatgtgtatagcttttaaagtatattgcccaattgattt

SEQ ID NO: 122488 - DNA, 373 bp, Homo sapiens
agccctgccctcgtgggtttatgatctcactgggaagcaaataaaatcacaaacctgagggcacaaccaggagaatcgccatgaactcgtgatggatcaggttttgcaccaaaatgtaagtcatttttgagtgtgaaaccaagaaccctctgggcgacacagtgcattggttagagcacgagatctggattcaggttctatttctgctgttcatttcctgtgtgaccttgaacaagtttcctcacctctctgagcttgggttttctcatgtatacaatgataaggaagtcttcctcatacagttttggagtttaagtaaactaatacagatcaagtcattgatgaaagagtgtgctaccatttatggtgctct

SEQ ID NO: 122489 - DNA, 318 bp, Homo sapiens
gtcagctgtaccttcatacaaattttcttttatttcctgttctcttgggatcttggaggaatatttatataaagctccactcattccacatttattggatgtctgagtggtaggtactggcctgtgcattagagacacagagatcagtaagtcatgggtccgtgcttgccagaaacctgtgttctgtccagggtttcttctttggaataaacaaacaaaacatctcttttttccaactttctttctgctaagaaaacataatttcttatataagaaatacctcacatattagccagatttgaaacttttcccagtatt

SEQ ID NO: 122490 - DNA, 512 bp, Homo sapiens
  misc_feature (63)..(63): n is a, c, g, or t
  misc_feature (70)..(70): n is a, c, g, or t
  misc_feature (74)..(74): n is a, c, g, or t
  misc_feature (84)..(84): n is a, c, g, or t
  misc_feature (90)..(90): n is a, c, g, or t
  misc_feature (103)..(104): n is a, c, g, or t
  misc_feature (109)..(109): n is a, c, g, or t
  misc_feature (116)..(117): n is a, c, g, or t
  misc_feature (121)..(121): n is a, c, g, or t
  misc_feature (141)..(141): n is a, c, g, or t
  misc_feature (174)..(174): n is a, c, g, or t
gggcgtcgttccatcagggaaggggacacagtgaatatggagtgctgtggcggctagtctaanagagggnccanattttagatntcaggngtcatattatacnnagtcnaaagtanntgtnaaagaagacacaaagtgtanaatatcagaatcagaatacttttccttcatttntaaaaaggaggctggccgtgagccaccgcgcccggccttcatatttctctttatacttaacttcctttttccttatctttcccatttgcaagttactttctagttcttatcgatcatttccttattactgttttttcctccttaatgagttggttgctagataataccttcggtgtttttgagaatctgagaatgatggaggagaaatggaaagataggaatagaaagagattacattaggaattaaatttcttgttcctctttttctgatatgaaaccaaattggaggttagatcatccagaaagagaattcagtgttttccagttttccaacctgc

SEQ ID NO: 122491 - DNA, 740 bp, Homo sapiens
aggacttgaatactctgcaataaggacagtaaacctttttttttttcattttataaaataactaacatatattatagtaggaggatctccatcttacagatgaggaactgaggcttacagaggtgaaattatctgtttaaggtcatatagctaggaagtggtatagctggggcttaaaccagggcacatagcatttccagtttttctaatgcttttgatcaactgtcctctggaaccttcttccactttacctgcttccaaaacttagaaccatgcctggccctagtgacctgtcttcttaatgcctgagcttagagtttctcctcttctagtttccctaacaagcagttagggatctgtaaacaaggtcaggaattacaccaggagaatgtcctgtttatttcagtggcctagatctgacaatggctcccctgtggagaattttttttttttttgtactctataccatcataatttaggatcttttactctggaaaatacacctgcatggagactagtggatgtgtgtattctttgggtaccggagccaggatgtagcaatcacaataaatctgcctgatttctctctctttttcactatccctttagggagatcccattaaacctttagaagctcttttattcgggtctttgggttaatatgcaaccaaaatttgttggtttgaattcttccacttaacccgttggttggttaaaatgcctggggtcaactttcgctg

SEQ ID NO: 122492 - DNA, 660 bp, Homo sapiens
tccctcttctttccccaatctttggtacccttataacggcacctaacacactgaagtatatccatatgtttgtttcctctactactgctcctccctgacccttaagaaacactgccatagagccctacagcttgatgggagaagtcctatcccttaggcatggaaagctattaagaatgtgagaactgtgtatgaggaaactaatttaataattccttagaatggaaccagttgaaaatttccagctccacaaactgaagtgaaatcattttttctccactccttactagtaaatttactgttctatgttaaaagaaaaaaaaaatcaaccagcatttaaattatggcaacctaaaatgtgtccagtatcttagaataatttccccactgacctattcctctgtaatagtaaaacatatacacaaatgtttatagctacattagtcataatagccgaaaggtaaaaacaacccaaatgcccatcaactagataaatgtatttaaaaaatatgacccaggcgaggtggctcaggcctgtaatcccagcactttaggaggctgaggtgggtggatgacccaggagttcaaggccaacctgtgcacctattttctacatactctcatctagttgtgacctggcgtgcgtgatcctctgaacgc

SEQ ID NO: 122493 - DNA, 251 bp, Homo sapiens
cttactcagcagctcccgccgtgctgtgacaccccagaatgtgtcatttcgaaacgtcacagctgccactaggtcatatgggagcgtggagctggctgggggagaggtgcaggtcagtgatggtttttttttcccacatgggatctttgaagaaaattttaaaatggcactcttattttcaatccaaatattcatatattgtattttccagaaacataatgagggaatgaaattgtggtttaagaggctgt

SEQ ID NO: 122494 - DNA, 405 bp, Homo sapiens
aattaaagtatgtgtgtggatatgtgtgtggatatacaaaattcttatttatgaacagagagaattgatatcctcggagttcaaggaatggtcatttttcctggcttaggtagccaactccacccactctgtaagatttctttaatgtcttctcagcttatcagtaaggtatgcatccattgaactttaaaaaataaaatttgttaataatacttggctgattatttgaaccttctaactttttcagttcaaacttttctgaggccatactgtatttttgtctatagagagctttttttttggggtgggggcacctaagagatttgtgggtcactttggccgggaagcagactaagtctaaatggagtattgtgtgtcaacaagtcagttaaatgtaaaaaaatg

SEQ ID NO: 122495 - DNA, 304 bp, Homo sapiens
agactctgcaggcctcataagcctatcccattaaatccaagctaaatatatacctaactcaatctccatttagctggatctttgttgttgttttttttttttatcttagaaatggggtctcactctgtcatccagaccagagtgcagtagctcaataatagcttaatgtaaccccaaatccctcggttcaagcaatcatcctgccccagtctctcaagtagctaggactacagatgtgtgccgctacacctggttaattttttaaattttcttgtagagaaggggtaacactatgttgcctcga

SEQ ID NO: 122496 - DNA, 673 bp, Homo sapiens
atctgtatgtttttctttgtgacagcaccataatgttttgattacagtggctttgtgtaataagttttgaaatcaggaagtgaaagacttccaactttactcttctttttcaatgttattttagctactcgggtcccttgagagtccatgaattttaggatagctttttctttttctgcaaaaattgcctttgggattttggtagggattgcactgaatctgtggatcacttttggtggtattgacatattaacaatattgttttccaatctatgaacatggggtgtctttctgtttatttgtgtatttaatttttttcagcagtgttttattattttcagtttacaagtctttcacctcctcaattacggttattcctgagtatttatttcttttcgatgctatcgtaaatggaattgttttcttaatttcctttctagattgttcattgttagtgtaaaagtgcaactgatttttgcgtattgattttctgttctgcaactgctgaatttgatttttagtaaaaactgtaaattttcttaaaatcattctttacaaatttcatgctttgttcagtccttatttataaaaaattttagatgagtatggaacttgtgattaggccatagttaattttttaaatctcttcacagagcctagtttttaagtatat

SEQ ID NO: 122497 - DNA, 216 bp, Homo sapiens
gtggccccaattccacagtgtggcctgttgtgttgggggtgaatttatgtgggagtgtggagagccctgtccactccctttgagatctggggccagcctcctgcagagaccacagatgctttcatgcgagaggccccttagatgagctgaaatgtctgagaaggaggagttacagctttgattctacatctgtctgaatagaagccatacagttgt

SEQ ID NO: 122498 - DNA, 395 bp, Homo sapiens
gactaaaatgttctttatttggtcgtttattgcctatctcctcctactacaatataaacaccctgaaggcggacagtcttgccaccattatgtcccagtgcccagaacagtctctagcacagagtagaaacctgatgtgcaaataggcccaacagttctactttgaagatttcatcccagtgaaatgatttgaaagccatgcaaaggtttcgggtcaaggaatgctgtggcagcactgtttataatataaaaatttagaacaacctaaatgccaggaatagaagtttaattaagtaattccatgcaatggtatactacaaaacaatgtccatagaactttaagatcagtggttctcaaagtatactcctggaccagcagtattagtatcacctga

SEQ ID NO: 122499 - DNA, 300 bp, Homo sapiens
cacctgccaatcagagctcaccagcgcccactctgctatcgccaattaactttctttgaaaacaacttacatcttctttctcctttcccaataaaactccagccctttcctttgttctttggacacactggaaactgccctggtctctgtgtgcatgtccttattgcaagcctactttctgtatattactctcaaataaaatcctcttgcttagagatttgtctctgcatatatatatatatatatatatatatatatatatatataaatttttttttagttttcacaaaagagaagaga

SEQ ID NO: 122500 - DNA, 320 bp, Homo sapiens
agcacacacgtgcaagcacacacacacaagcacactgctccactcttcccaccaaattgtatctttaatgactcctctctagatcataatatacctttcagaatccatctctgggtggcaccaagatctgcagaacctccatttcctcctctcttctcccaaaccttattacaaaagccccacatgggaccatgtcagggctgcaagtgaagccattcaacatttttcccccatcaaaaaaatttgagaactacaatgtgcgtaaagtgcacataacataaatgttgtttatatttaatttaatttaatttaatttaatt

SEQ ID NO: 122501 - DNA, 205 bp, Homo sapiens
gcagagccgcccagcagcaaccacattaggaaggaatcggaaaccaacgctccgctggctgtcaccccttacccacttgctgtcaggtgtccaaacagtgtcatccggtgtcctgacatgcggccccaatggactgatccagggtggaaaggaagagtgagaagaaatcagacagaagaattcaggagatgtggcaacagagtgg

SEQ ID NO: 122502 - DNA, 742 bp, Homo sapiens
ttcagagatcatttggacttctacctagagaatgaattgcaaaagaggaagtgggaaggaccaattcaaaggccatttaacagttcaggtgggagtttatggtggcttggaaagagagagagaaagtagacaaagtgaagataaattttaggttgggcatggtacctcacgcctgtaatcccagcattttaggaggccaaggtgggagaggtgcttgaggcccagagtttgagaccagcttgggtaacataccaagactccatctccacaaaaaatgttcaaaattagcccagtgtgctgatgtacacctgtagtcccagctacttgggagtctgaggcaggaggatcacttgagcccaggagttcgaggctgcagtgtgctatgatcatgccactgaactttcatcttggcaacagagtgagacccatttcaaaaaaaataaataaataaagatacattttggaggttgagccaacaagttatctgctaagtctgagaacagaaaaaggtgttttttttttttttttttttaatgtcactaggttctcctttgagtgttgggtatatgatgataaggtgggctgaggtagggttcaagagttcttttctggccacattaagtttaagtttatgcttccacatagagagtcacattagcagctggatattcagctgtgaagctcaaggaagaagtcagggctggagatatatgaatgagaaccatctgcataaagatgatct

SEQ ID NO: 122503 - DNA, 627 bp, Homo sapiens
ctcctgagtagtgtgattacaggcatgagccaccatgcccagctaattttgtatttttagtagagacgggatttctccatgttggtccgactggtctcgaactccccgatctcgggtgatccgcctcgcctcaggagtttttaatataatttattaaaccataagtttatataagttaatttttaacattggctatgttgaacgcttggctgtcaagcttaactgttagctctcacagacctggctccaacatgctactgtttctccttggctgtgttacagtacaaagttataccatgaattagcaagttcaggaccatcctggaaagccagcgtggaaaatgcagtcataaatggatttttatttctgtggactttggactggctgtctactcttggtctcacattctctactgcatatctctttggctaagaaaattagtattgaaaaatggtttatggatctagttattggagctagtattcaactttttagttacttaaaagataggacttaaacagagctgaattttatagggtcttttattttcttctttggtccttaagagaagactgcagaaaactagacaagaggaatttgaatgttctcataacaaagaactgata

SEQ ID NO: 122504 - DNA, 218 bp, Homo sapiens
tatcttaagagatgcagaagaaaacattgctaaaatttaactcatttaagacaaaaactcttagcaaactacagatatgagagagcctccttaaggtcataaagcataactaccaaacacagcaaatgtcataaacccagtaataagcagatatataaaggaaaacagatataaaaacatactggctgggcacagtggcttagcctgtaatcccagca

SEQ ID NO: 122505 - DNA, 146 bp, Homo sapiens
tgctaggattacaggcgtgagccacggcgcctggccagaatcaaatgtttcttatttgttcttttactataagttgattctctttaaaaataagagtttgaaaaaaaatgagcagctaaaccaatatttcattaactaagcaagat

SEQ ID NO: 122506 - DNA, 316 bp, Homo sapiens
tttcccagtaagacagagttgggcctgaattctgactcaatctttttctagttgtgtgaccctggaaacattacataataacatcaataatttattggctattttctatatgctagccattgtgctaagtgcttggcatactctgtctcgtaaaattaaatcttcataaaaaccctgagaaggagacaatattattcatattttagacagggtgggattattgctgagagaggataggtcaaatagccagcaagtgaatggcaacccaaaattgagttggaaggaggtgcagacagaatccccttgctggtaccag

SEQ ID NO: 122507 - DNA, 306 bp, Homo sapiens
ctggaatgagtgttctgccgtgacagctgcatcagggttattctgtttgtttctgaagggcaggaagaaatgaagggactggatggtatttcgacaatttaacattcctctcataaatgtttctgcaaccacttatctatattagaacctagtataagatggtatctgattaagcagagatgtgtttacttagttatttaaagttgactgtccatttttgtggggagttctgcaaacagtatcattatttccaggtacctgctggctgaacaaattaaagaaccagaacaccgtcgaattagctct

SEQ ID NO: 122508 - DNA, 293 bp, Homo sapiens
tgctgggattacaggcatgagtaaccgcacccggcccgaccagtatctttttcttatgcagtgaaacaactttagcaaaagaggcaatgaatgttatactgagtttgtacctctttaactccacctgcaatttctgtcaatctacaaatacaagtgtcgcctcgcagtgtttcgtatggacagaatatcttgtgtttgctttttgtcacttatttcacttgcacattttcttttgtttgtttgtttgtttgttttttgagacggagtctcgctctgtcgcccaggctggagtg

SEQ ID NO: 122509 - DNA, 281 bp, Homo sapiens
ctgcctcagcctcccaaagtgctgggattacaggcgtgacatgtgatcttgagcgaaatatttaatttttctatgtcttaatttgctcttgagtaaaacggtcacaacaagaacaactttagaggttcgggggattaaaggagatatgcaatgctcttgagacaacgtcaggtacattttaagcgtgcagtcagtgtacatgattatcatgataatgatgtaaatttttccccctcttcttgagttcttcttgagttggaagaaggaattcttttctttga

SEQ ID NO: 122510 - DNA, 403 bp, Homo sapiens
acagagggaaacatgggatacagaacaacttgctgcccacctcattggcttccaaagctgagcattcctggctgctggaatgaggcagggcaccagctggatatagagagcactgagaacagtggcctggatctcaggggaacagctggcaattgaaatccattggaatgtgctttgggttagcagagatggcctggatctcaggggaacagctggcaattgaaatctattggaatgtgctttgggttagcagagatggcctggatctcaggggaacagctggcaattgaaatccattggaatgtgctttgggttagcagagatgaccttgacactgcagtctggcagcagaaaactgcaatctgcatggcacttgaggttgtgacagggagacaggggaata

SEQ ID NO: 122511 - DNA, 565 bp, Homo sapiens
gacgctcacgctcatgtcacacacctggctaatttaaaaaatattttgtagaaatggggttttgccatgttgtccaggctggtctcaaactcctgggctcaagcaatcctcccacgttggcctcccaaagtgctgggattacaggcacgagccaccatatctttaaaaatgtaatagaatggaaaatggcaaagcgcgctgcttttcatagaagagactatcgcattggggttcttctgttgcccctgcctgtgctgcacgtcctgcttcacagtgtaaagcgcaactcttgctgtgccttattgtaacaggtatagggtggatgctgccatcatgaagagagaggagagctctttgcttataaaattccgtagagtggagaacagggtgtgccggcttaggagagggaagaggtacaggcccgctctgcccgagctgcagatgggacacacatttcccgactcagaggggagtcgtgtctttctccagggtcaccgagcagcaagcgcatccactgtgtgttcttattttctgagcttgtgacatgggacgtgagtaccgagtt

SEQ ID NO: 122512 - DNA, 340 bp, Homo sapiens
tttcataaggagcttgcaacctagatccctcgcatgtgcaattcacaatagggttcgggctcctatgagaatctaatgctgctgttgatgtgacaggaggcggagctcagccagtcatgcttatcgcccactgcttactttttgcactgtggccttggcacccgggggtgcaagacccctggtctaggagaccagtaagagccaaactaacaaactgagaatggagaggatgaacagataacaaaaatatggcagaaacagaacaaaaaggacttggaactttccaccaggaaacagaagattgaagtttgcatgtgtgcccagcagctaaaggtagctg

SEQ ID NO: 122513 - DNA, 454 bp, Homo sapiens
tttgacaagaactcatctaattttccacggagccatcttctgcctgctaccctcatcatcacttaaaaaaacagctccccaggccgggcgcagtggctcacacctgtaatcccaacactttgggaggccgagggcggatcacctgatgtcaggagttcgagaccagtctggctaacatggtgaaatcctgtttctactaaaaatacaaaaattagccgggcatggtggcgcacactcgtgatcccagctactcgggaggctgaggcaggagaatcacttgaatctgggaggcagaggttgcagtgagctgagatcatgccattgcactctagcttgggcaacaagagagaaactccatctcaaagaaaaccaaaaccaacaacaaaaacatagctccccacctccagcttgcctaccttccttcagggcacacaccgcagacaccctaggacag

SEQ ID NO: 122514 - DNA, 1027 bp, Homo sapiens
ttcacaacattagcatctcctggggatttgctttaaaatgaaaattcaagacttaataaatcagaaaccctgggaatgggactcagtggtcacaagccttcctggtgattctgatgcatgttcaagtttgaaatatactgggctggggtattctcaaaaaagtgcaaccaggatgataaagtaaactagagtggattaaaggaactgagaattggctcagagaagagaagaccttggatgtagacgagagttgtcttcagttacagtatttgggaaagaaggattatattttttccatgtcacttcagaaggtaggagtaagatcaatgggaaatgttaagaatgaaaattgcattcatcctacaaagaagtttcctaaatcattacgaattgttctaccttgagtgtagtgagttatctgacactggaggatttaaaccaatggtagatcattacatagtagagatatgaacatgagctaaagcatgagggcagcaaagaggggagaactttgtttcacctaaatggctcttcaaaccttttttagcattagtttctgctttgatatactctattaaaatttgggggataattgataaatcttccaggtggtttatggatggccagggaggaaatttgccattgttttaattatttaattttatttgcctctgtttttacacttggtaaaaatttggaagtgtttcagatagtgaagaaaaaaaagaattaagaaaaacattccaggccaggtacaggctcatgcctgtaatcccagcactttgggaggctgaggcaggcatatttcttgagctcaggaatttgacaccagcctggccaacatggtgaaactccagctctacaaaaatacaaaaattagccgggtgttggtggctcgcgcctgtagtctcagctacttgggaggccaaggcaagagaatggcttgtgcccgggaggcagaggttgcagtgagtcaagattgaaccactccactccagcctgggtgacagaacaagacgctctctca

SEQ ID NO: 122515 - DNA, 533 bp, Homo sapiens
aacaaaacaagattatgagtggaactgcattaaaattaaactctttggtcatcaaacaacacaaaacacaagcctcagtctggaaatgtacagtatatataatctacagggaatacagtccttgtccccaaaaggggaaaagctcactgcagtttataatgggatatcgaaaccatactggttgttatagtattagaaagaacagtattggaaagatgtgaatcaaagagtgcccttgatcactgctggtagaaaaagtaaatttctaaagtcactttggaaaacaatttggcactatctcctgaagttgaacatgtgcatactctctacaagccagcaattccactcctgggtacagacccagatttttgcacatgggcataataagacatgtacaagaatgtttatagaagtattctttataatagcagagaaactagaaacaacccaagtgttcatcagctggagaacagagaggcaaactgtggcacttttgcataatgggatatcaaggaataagaaaaaggaataaa

SEQ ID NO: 122516 - DNA, 456 bp, Homo sapiens
ttttcagtccatatctttttttgtgtgccaaagtggggaaccatatttctggtagataatcactggtttttctcatccggcaagtggacacctctgacgcagctggaatgggcctaggtgggagggactttgtctttactaccacgtggagccggcacatagtgggactcacagctcttcatggcatcgatgaatcgtgtcccgattagctgttggtggtgtgccatctgcggctctgctctggtgagttctgctgcgatcctgtggctcagcacgtggtaggtcctcagtgaggctgtgatgagcgtgggggcgtctggtgcctgggtgcacatccctggctgtcctccatggtgtctctctgtgcccagcctctggagggtcggctcggagggctgtgggcccgggactcggtgtgtccgatgaggaaaccagcttgggtggggagggggagtc

SEQ ID NO: 122517 - DNA, 502 bp, Homo sapiens
gtccgtaactcacgatggtcctcagctcaacgatggtcctcagctcaacgatggtcctcagctcaacgagggtcctcagctcaacgatggtcctcagctcaacgatggtcctcagctcaacgagggtcctcagctcaacgatggtcctcagctcaacgatggtcctcagctcaacgatggtcctcagctcaacgatggtcctcagctcaacgatggtcctcagctcaacgatggtcctcagctcaacgatggtcctcagctcacaagaacagcacaggaaagacccgcccccatgattcaattatctcccattggatccctcccacaacatgtgggaactgtgggagctacaagatgagatttgggtggggacacagagccatatcagtagtgtaaacctggagccagcaggaagaggcatttgacagagcaggagggtccatggtgctcagtcaaagtcttaggacaaatagtccccatggaacagaaggcaatgcacctg

SEQ ID NO: 122518 - DNA, 693 bp, Homo sapiens
aggacaggatacgatagtcagataaacatcagcagtgcaaagcagaactcgcacagtgatacaagggaaagaaagaaatgtgccctaggcatggagaagagccagatacctgagaagatcagacaggcttctgacaagaggtggcatttgagatgggccttgaaggctttcgggaaaaacttgaggaaagcagaggattgaagtgaagaaaggcaattcaaggtagggtggcaggagcaaaggcaacgagttggggcatcctggggcctgttgggcaactaacactggagaggtgggtggtactagagttatgtaagatgttttgcacgcaggtataaagggttataatttaggaagaccatggaacgtattcaaggcttttgaatagaggagtgttagcagagctgtctgaaatttttatttcggtgtgcttttggtttaagccaagatagctttcatcccagtgtttctcaaactttgctacacattatggaatcattgggggtgggggcaggggtggagttgagaaatcctgatgtccaagttgcacccccaccccaattcaataggagcgtttggggttaggatccaggaatcagtgcttgtctaaagatccctaggcacttcagcaggcagcaaagattggaaaccactgctttatcccttcatttcttcccatgtgcatatcacaaa

SEQ ID NO: 122519 - DNA, 153 bp, Homo sapiens
cgtacatgcactaaactggcacactaccttatgtctaccttaagtcacataagcacccaggggacaggatctggggtaggaccttggtctccccacagtggcctggcttagaggtccagaggtacaacatagaacatcatcagggttggctta

SEQ ID NO: 122520 - DNA, 537 bp, Homo sapiens
agacgtcagccactgtgcccgaccagctcccatggtcttgagtcttggcacccacaaattttttttttgtgagacagagtctagctctgctccccaggatggagtgcagtggcatgatcatagctcactgcagcctctaattcctgggctcaagcaatcttctttcctcagcctcccgaggagctgggactaggcacatgccaccatgctcaactaatttttgaaatgtttgtagaaacagggtctcactatgttgcccaggttgttctcgaactgttgggctcacatgatcctcctgtctccacctctcaaaaagtactgggatcacaggcttgagccgccactcccggctattcttggtctttttatgatttgtcagcatctccctcaggattctgctggtctcttgcagagtgaatgagtggcccctgcctctcctatgggtcctttgggatctgagctctgggccacagtctggccgcagccctgaagctcctggcccctctactctcagctcttcgggacagttctctgcct

SEQ ID NO: 122521 - DNA, 282 bp, Homo sapiens
gtaaatgtaaacataaatggaaatttgaactcagttatttgactaatgtgtgtataccatctggctaactccatttcaaacaccttatgcatttacttgtagtttttatcttctctaaatataataacttgtagaggaggagtgtggaagagtcttccatttaccaaagtgatttctgtgtcattttcttgagtttgatttcagtcttgtgactggtaaattctaagtatctgcccttttgagcaaataaacttgtcaatcagatattttctaaaggggata

SEQ ID NO: 122522 - DNA, 328 bp, Homo sapiens
cccttattaccttctttattgagggaaggtgtaatatttaagaaaccactgcctaatccaaggtcatgaagattaacatctatgttattaaaatgaagttctgaagaagctggatttatgtggctatggtaaatgtatctttaaaaactcttgaaggaaaaagcaataaaatctacactaaattattgaagaagtcaaaataacaaatgcacttatggataatgttaaaagtctcaaaaatgtactagcttcattgcagtctgaaaaatccagtttgaaagtgagatttcagagcttcagcagaaacttagtcattactaaactgcat

SEQ ID NO: 122523 - DNA, 311 bp, Homo sapiens
acgtaacagtgcatggtactgaaaatgaaggaactatagctatatgcatcagtatgagctgtcataaataaaatactgagaaatgataataaagttgtcaaagaataaatgcagtatgattccatttgtataacgttgagaaatatgcaatatcatgtattattttcggaatgcatacacatgtggtaataatgaagaaaaggcatgaattgataaacacaaaattcaagattgttaagtattttctgttgataggaaagaggacagatttggaaagaggaacaaagatgctgcaaaggtattggcaaacg

SEQ ID NO: 122524 - DNA, 147 bp, Homo sapiens
agacaaacattttaaaagatgagtttatgttacaattactttaacaactttatcttcatagtagcattattcctgatagccacagtggaaaaaaacagtatgtctatcaagtcaggaatagataaagtgtaaataattcaaaaggct

SEQ ID NO: 122525 - DNA, 360 bp, Homo sapiens
gaagcaagggaggggaatgaggaaatgtttgggatgctggattatacactgccttgatcatggtgatgatttcacgggtatttacatatgtcaaaatattaaattgtgcaccttaaatatgttcagtttattgcatatcaattagacttcaatccaactttttctttaaaggtgctatgcttctggccaagatggactgaatttatcctactaattcaggcaacttagaaagcaagacaatatatacaaaacaatggttatcagactctggatgaacaggcagcataagagagagatccctgagagggagaagcacaaaggcagtggcccagtgattgctccagcttgctgtccagtgag

SEQ ID NO: 122526 - DNA, 699 bp, Homo sapiens
ctgaaaacttagtttgaggaattcttaaataccttacatttctatttccatttttaaaatactgttatttctgttgtctcatttgagtcttaattatattgtcatgtttgtagacttttttgaaatttaatatcctttccattgtgagtatcttgaaataagaaactatgtctcattcacattggatgaatgattgagctgaatgacttacccaaggttacaaagctaataaataatatacctaaaactcaaatccagatcttcttaccacatttctgaagatttagatctacatggatttctgtaatatagtcataaagaaaatataagcacctgaaatactgtctacaaggaagtagtactgagctaatcaaggataggtaggatttggatacaatgagaagagaagtgaagagtggtttattcaaataatacaaaacaccctaagccacagcaaagatgagaacataggagacatgtttggaaaaggaggaaatagaactaacagcctgactgggatagaggattcctgtgagaggatagaaaatgtgagattagaaagggaaaatggggttaaactgtcaatgccaagctaatgagaagctcagggtctctgtgacaacttgagtcaaatcaaaatggtaggctctacagacatttagttggaaactatttaatgatttggtatctgctcttgaa

SEQ ID NO: 122527 - DNA, 1061 bp, Homo sapiens
gtaccaaagactgaacatttttctcatccctaattctctcctacctcagtcatcccatacaacactgctcccacagctcagtacctagtgctgccagagaccatagtagcatgtcagcatatcagatgcttctgcatggcagcattagatccacaacataacattcccatacagacaaatgcatgaacagtcccagggacatcacacatgctcagcgaacatcactgcatcatcccaaaatttgcaacatggcacagtttaaccttttatctcattccaactctctcagagcaacaaacacattccaaagctccacagtccactttgggcattcaacaaacacacatctcaacaggccatttaaaagttctcacacgggcaactcaacagcaacatccacaattcattcaggtcccaacttggagtcccgcacgtttacaacaaccctcttaaggaaccacactacacatccccaagaacttattccttgcccagcactttcctccagttcaagcattcacgccacttgggcccagacaggcagtatcaaggactgccctaggatcccaggctggaagcatcacttccaaagaagcgctggcacccctgggaagctaaggcccacttacacacagaagcgggacatgccacacatacaccggtgcgacccacgaagggacaccaacagcaacagaacgagcacgacatctccggacatgtggcacacacttgcacaacgctccaagcaaacacaagctcacaaccacagcaaaaacatcacgccaacaaacggcctatggggcccccccgcaaagccaaaccaccatcgagcatacgaagaaacaaagaactaaatcttcccgagaggctacctccacagccccgacactccccaaaccccacaatctcgatgacccggccaatagaaccatacggataatgaacaccccgggagtccggaagtgccacagccgacagagaaagaccgagaggacaagagtacaacaaggctccaccaacattgaaatacacacccagacgatccatgctccgcacaagag

SEQ ID NO: 122528 - DNA, 557 bp, Homo sapiens
ccgctcctggctgagataggtctttcttaaaggggagagggaagtggtggagagagaggagagaaaatgacaaaggaggaggctgagaatctaacaggtgtgaccaattctgctactgaatgagagcagaagcctgtgaacttccagttaatagaccacttaattgggggaacgcttcacacgttataaaaaagcactagaatgttttgaaagcgagaaacaacagctgtgtagggtagctagcagttagtgttgtacagaagacagatatttgtgcatttctgcattttctaagtttgctgcaatgagcatgtattactttcatagttataaaacacatgcaaaatgcccttttaaaatgaaaaaaaagtccatgagtgtaagtgatatatatgctttggaaagcctgggacggtcattgtttactctcaatagtatgtgtttgcctttgtctttttgagacattttgttttaatctgttgatgacaataacctgttgataatataacttgataacaaataaaatgacttatgattgattatcattttaaaaaaaa

SEQ ID NO: 122529 - DNA, 329 bp, Homo sapiens
gggtaagagaagagaagacaggagaaaagagaatgaataaaagaacaagagagaagagaagcagtgggtaaacagcctgttagatggtggcatagcttttacccactgaaaagatgttcacagcaaggtctatcaaaaccctaccacagtatagcagctctaccttgaaatagtatttctaatgataaaaataataacacaataaagtttagtaaacagtatgctaagagctttgcatatgttttctcctccatgatccttttgattgaaggcaaattttgtcatcctatgctcaaaattcttcagtcacctctcatcttactctgagt

SEQ ID NO: 122530 - DNA, 313 bp, Homo sapiens
ccacctcagcctcctgagtagctgggactgcaggcatgtgccaccatgcctggctaattttttatttttatttttatttttttgagactgggtctcactccgttgcctaggctttagtgcagtggcccaatcacggggtcaccacagtgtcgacgtctcaggctcaagagatcctcgcaccagagtctattaagtgctgggattacaggcgcgtgccatcatgcctggctaatttttgtattttttgtagagatagggtttcactatgttgcccaggctggtcgtcaactcctgagctcaggcaatccacttg

SEQ ID NO: 122531 - DNA, 757 bp, Homo sapiens
gaatgtcacccagttctatctttgttcaagagaatcaagcagaactgatctgtgtgtgcccaagtttctcacctcttaattaaaaagacctgtcttccgtccactttttatttctccaggagttttagatttcacacatagacgcattcagtgggaaataggatgttgagagtactagaagtaggggtcattcatatggttgggagaaggatgttgaaaggacagaatgtattttgggaaaccagcctatgttgtaaccattttcccatgaggtaaaaatgtaagactaaactaggttaagtttaaggataattttggaaagtcatgtgccatttgtgtaggattaatgaagctgggggaaaaaaacagcactgggatagtggattgttgcctttttaacacagaatattcttatgagagtacaggtaaatctagaatttggttttgagaggcaggagtttgtttccttttgttacaatgttttctcagatctttgtctcagagttctttctgtatgaggtgtggagtgataacaccatataatcaggaatattcccacaaagaatagtgaaaaggacaatattttctacttgagagtcttcaggccctgagactatgatgaattgtgtctgatggtttacacagagcacagagaaatgaaattgaataggattagtgcaggtaagacagaaatgaattgaggaaaccagtaagttttctcgataacactgactagttctaagtcatacattttaaa

SEQ ID NO: 122532 - DNA, 612 bp, Homo sapiens
gtcattactcagacttgacagttgatgaccaaggaagtaagactttcactagaagggctgcccaggttggaaagctgagagcaatcagggccacctcttacaagcaaataaaggtctgtagtaacttaattacaatctcagtctctaagccttcagggttgtgaagcagaaaggcaactctgttcagggactcgttaaacaccaggtttcctttgggcacaggctatgacatttgtgccactgtagaactgaataggaaatacaagcagtgccattcaacagcatgaccacttccaaggctcacagcaaagcagctgattattgtataagaatcatatttggccaatatgtcagtgccagaaatgagagctggaactgaattctcgattcgagaaacataatctaataaattcttcagcagagtttatttattcagagagaaaacaatcacaacaatagcatattttgtctgcttaccttgtaagtatagttctgagtttttacacttgtcatctcattttttcttacaatatcagcaataaggttgattggattactaaccccagtttgcagataaagattgcagcttagagatattaaatatcttcaaat

SEQ ID NO: 122533 - DNA, 260 bp, Homo sapiens
gagtcctccctgccatgggtggggtctgaagttggtgaggtagcatccaaggcttcccttttgactctgggtgcctgcactcccagcccactctgtttcctgaaaccaaccatgtccaggcccagtctagtgcctggaccagaagaggaagatgtggctttgccaactgacaagcacgaggaagaacagacttttgcctgctctaccttccagtcaagaggaaaagactcatgtgacatgagtcctcccgcggcactggg

SEQ ID NO: 122534 - DNA, 536 bp, Homo sapiens
cattgtaggcaccaaatatcttttatgaaatacctcattttagatagcggtatttatctcagatcaatagatctgaatgattcacaagcccctgctgtttcagctcatcttcatgcattagtattaaaatctctacttcagggttagtgaacactcctggtgctaggatgagggcagatacccctgtcaatcatggtgtcctttcatgccaagctctagagtgactgaggagccatctcaacctggactctaggcagtcccaggcaatcaatccgaatcggcagctaaattgacactgatgggctgacttcccaggccatactaggccggaaaggagcaagcttttgttttcatttttccacccttcagctcattttttttttttcagaccaagaaataagtctcaagtccggctccagcgcgaggtcttgattttcgcggggaagtcagtggggaggagagctggcgggcagtgagtcggagagagcgcgggtcagctttcctcctctcacttcctcctctggccttgctcccaa

SEQ ID NO: 122535 - DNA, 355 bp, Homo sapiens
gccatctcatctgctgtgagactgcagagcaccaaaagccagaggaatgtcttagaaataggcagttcctgcaaaggagcaatgagtacactcagcagtagagtcagaaaggtaatagaatattgttaaagcattgagaatagagctgccagtcacatttgtatgccagcaagactcaaggatgtggaaagcaagccatttttagataaacctagccttagagaccatcactaaaagattttctaaaggatatatctttttttatcctttttccaataagccttttgcactcttagatatattcttttgtttatcctttcctcttccctctcaggtgatacaaggtaaaatggga

SEQ ID NO: 122536 - DNA, 131 bp, Homo sapiens
ggacattagggactattcaatccaaattttctcccaatacagtactccttgaagggtctgttggtcccacacctatcgggctgtgtccctttgcttcacaatcactgcccttagcaagaggttcctgcatg

SEQ ID NO: 122537 - DNA, 576 bp, Homo sapiens
acaggtggttgccaccacgcctggctaatttttgtatttttagtagagacaggttttcaccatgctggctaggctggtcttgaactcctgaccttgtgatctgcccaccttgacctcccaaagtgctaggattacaggcgtgagccaccacactgggtccaggttttgtttttaaaggaggcaggtattagcacagagcatcagggccagaaggagccccagaggtcacagagcatccatcatctgtacagtcatggagtctgagacccagagagggacactggcttgcccaagatgacacagcagaggcagaaccaggtccttctgggctgtgttccctcctacctgatacgagaatgggttccaggtagagtcccaacctgggcatttgtttcacaggtccagtgctcataaagtcagcaattttcaaacctggtttactgatcccagggtgtgtccggttattgcaaaggtcattgcaacattctcaatagtctttcaaaatgaagctaatttcaatttgccatacttagaaaaatactatcttttacatttgggggctgggaggagggagga

SEQ ID NO: 122538 - DNA, 320 bp, Homo sapiens
agtgacgctccgcagacgccgcatggaatgcggggccggctccactccttccgtaatgtggttttttatagtcgggggactcattgtcccgcggccactgccagctgtctgtaagctcaggattagagagcctggcctttcgtgagagctggggctgtgccggctgagcccttcacagggaggggtggaccacggggacagggagcgactgcctggcactgagtgagccagccagcagacagcatgacggccttctccttgcctgcccccagggcctggtgcaggctctcttctgcccaccctacccagcttgggggccc

SEQ ID NO: 122539 - DNA, 268 bp, Homo sapiens
tccttccttacagtagaagttggccctactgctaacagctattgtcaagggaggaaaaggaggcttcgaacaaaacccaagctagaaaatttggagtaatcaagaatttaatcctcattagactatattctgcttgctcttgtaggtgatctccagttagaaatcagatattgaaggattaactctgaattgcgtctttccagacagtggatcacttagcaagttgtcatttcagagatggtgggaaatgccattttaaatataaaaa

SEQ ID NO: 122540 - DNA, 574 bp, Homo sapiens
cgcagtggctcacacctgtaatcccagtactttaggaggccgaggcagcggatcacctgagttcaggaatttgagaccaatctgggtaacatggtgaaacttggtcacaactaaaaatacaaaaaattagtcaggcgaggtggcgtgtgcctgtggtcccagttactcaggaggctgaggcggaaggatggcatgagcctgggaggtggaggttgcagtgagctgagatcgcaccactgctctccagcctgggtgataaagcaagaccccatctcaaaacaaaaaacaaaaccaaaaacattctatcaggtacagtcaaagaactatgtacagcactgagttcgagaagaccaccacaagtctgttgctttggaagccctatcttgctacatactgaagtgattcatggaaagacaatagtgtagaaaataattaagtccacaaatcgctactaccaccttctctgaagatgacaaagccacggactctgtctcactctgccgtctgctttttcctcttacctggtatagacacacatgtcaaccaccagagttcctacggttcatggacagac

SEQ ID NO: 122541 - DNA, 340 bp, Homo sapiens
gctgggattacaggtgtcgccaccatacccagctaatttctgtactttcagtagagatgaggttttaccatattgcccaggctggtctcaaattcgtgagctcaagcgatctacctgccttagcctcccaaaatgccaggattacaggcctgagctaccctgcccggctgtgagacaatctctgaataacgtcaggagatagatatgcaccctcagctgcatggtaaggctagattgttatgagagaagagaaagagatttcagtattacttcggtcattgcattctttttttctttttttttttgagacggagtctcgctctgttggcaggctggagtg

SEQ ID NO: 122542 - DNA, 478 bp, Homo sapiens
tgctctgcgtgatgcgcggccatttctccccgtgggtttgtggatctggatcttctcccaggagctccgggaagactctgcctgctgtgttgtacccctctcctcccacaccatccccaaggcctgaagatgcatcttccctgtgcctgctgcctctgccctggctccatcctcatcacctcaacatggctgctgggctccaggcctccagccttatccttcacctatctgtcctcccagtcagtcgagaagtattagtgagcagctagcacaggccagccttatgggagccagaacccaccttccccttcaatctcctttcccaccagaccaggcctgctcactgtgctttccgtggcaggcaggctcctgctggagctcaaaattgcttctctctcagccagaaagatccccctagatcccatggggctctatccccccttcattccacaggggatccccttctcacaacccccac

SEQ ID NO: 122543 - DNA, 543 bp, Homo sapiens
tgtctgggttttggagagtggaaagacactaagcctgagagtacaatgagggagggaggaaggaagggagggagaggtcagataaaagtctataaaataacacccatcaccactgataacaagtataaaagagtccttttttcttctcgagaaagacaaagggaattttaagtaggattaagtagtagtagctttcagaactcagcagctctcagaagcaataataactacataaatagctaagtggatggtaggaattacctcacttggaatttggccagcaaatcaaaagttagcagtaatatcacatctttttgaaagctttcctgagattctagaggggaaaattatctcagaaaactgtttctactgagtaaatttcaggaagaaatgctcctcactgcttgaagatgttctatctctggaaaactggtaagacagaagtccctccctgctgggaagcactctctcatccaagtaaatacattgccaattttgcccccaatggaagcaaataattacgttcgcagatcaccgtcgcct

SEQ ID NO: 122544 - DNA, 334 bp, Homo sapiens
cccacaagttatttatcaatcacaaaaataaaagggttagttttacatttgagaagtctggtggacacaaccttaatcagatcaccaaatttaatatcacgaataatggcacaaaccgacatcatgtgccaccttttgtgatgttctgaaaaagatacagtgtcacttctgtagttttcatgctcaggtataacctggttccaagcatgaagacacaatcaggaaattagaattgagagacattttatgaaacaatttgtccaaagacttcaaaaatatcaatgtcatgaaggattacaaaaaagagagagagactaggaagcctcatctccac

SEQ ID NO: 122545 - DNA, 335 bp, Homo sapiens
ttcagaaggtaaagatcttctgttgggcccccagggtgacgggatgccctctgagtttatagtgcagaggaattgtagcttgatcagaaggctgctgggtctgcactagggtccgcctttagttggtttgttataagaggcttgggtagctgtaactcccattttatttttggacaaactgaatatccttcaggacttctatatataaggcagacactagggcaggtttctgcagtcgagtctgctaatggcagggcttatatcaggatgtggatgagtatggctttcactgaataccagagagcatttctctgggacactgtgtgggtttctgt

SEQ ID NO: 122546 - DNA, 293 bp, Homo sapiens
actatttttatacgattacaaatggacaaaaaaaagagtcttcttatttacttgttgtacctgaaggtcaatgactgttaaggcaggggtggattagactaaaatacagaaagcataaaggcaaattggaaaagatccatggtgacactatttagttctacccagttagaaacatgtaggaagatttaccctcgtaagactgtaaaaatggaactaaaatatcttccatgcttagtgaagtgataaagagtgttttgcagcttactaagtaagccgcatgaccctaggccttg

SEQ ID NO: 122547 - DNA, 449 bp, Homo sapiens
atggttattgaggggctactatgtgccaggctctgtatgtataccattttattgagtcatttatctttcataagctccaattttctcacttccctttgaaatgtagcagcctagatttctggttcccaaacaattggtactgggtacaagcttataggtattcctttctgccttcaggtagcacccacacttctgcactaaagcaacagactaggttttgataatatcctacaggcactttgggtagggcctttaggatagtgcacttagaatgtactttgggtatttatgagatggggaaaatgggtgaaaaagtttaagaaatgagccataaatttatttttggcaatgttggatgagcaaattttgaaatagagaacaatgggtcctgcctgccatggtacccattatatattgggaaatggagatattaagggtatcaagaaacg

SEQ ID NO: 122548 - DNA, 302 bp, Homo sapiens
cttcatgacagagcccatttctttgttgaatcactaattgttaattctcaactcgtagtttttttctattcctgtctttaaataatgagaatattcatttttatgaccagatatactgaatttattaattttcttccatcatttcacatcagcattccgttacatcagtatacagtcatgtattcatgtgcatgactgtatcttggacctaaatattatgtaatgttattctaaatgtttggaactttcttcatgttgcacaagaatcttaccatatcttcctccctttattcccaactatg

SEQ ID NO: 122549 - DNA, 308 bp, Homo sapiens
ggtctcccaaagtgctgggactacaggtgtgagccaccgctcctgggtgtgaaattttaatgagaaataaaatacctgcacaatctcaaggtatctccccacataatgcctcttaattgcgaaaggaaaagcaaaacagtgactttacagtgtagaaacccagcagataccagcttgaccaagtggtaaaagttaaccttgctgacagtggcacaaagagacatcgtgtccctccttgtatgatcaccaagaagggcacagcatcacctctagtcgacgcggccgcgaatttagtagtagtaggcggc

SEQ ID NO: 122550 - DNA, 499 bp, Homo sapiens
  misc_feature (340)..(340): n is a, c, g, or t
  misc_feature (349)..(349): n is a, c, g, or t
cttttggggtctttgctatgttgctcaaactcctgggctcaagtgatcctcctgccttgacttcccaaagtgctgggattacaggcgcgagccaccacaccagaatcaaatttatgacatacagcatgtaaccaccaccagagggcagtaaacagaatctcaaaatgcaatgggccaatcaaaataaagagaactcacaagagaagattcatttagaaaaataagtgggatgggggtagagggagaggaaactgcctcctttgtttattgaaatgtagttttaaaaatacatgataggaatgcctctgtcaaaatcaatgtgaagccaggcacagtatgnttttcttgnttcttttctttttttttcctggagacagagtcttacttcactgcccaggatggagggcaatggtgcgatctcggctcactgcaacctccgtctcccaggtgcaaacgattctcaagcctcagcctcccgagcaaagaccccaaaggtacc

SEQ ID NO: 122551 - DNA, 470 bp, Homo sapiens
gtgaccgcccagggcaggaagtaggctgacgagggggagcagggtcttgcctgggattctatcgggagcttccatccctggcctggcccgcaaccaggtgggtgatcttggtcttgcccagccctgctccatccacaagtgtttggagcacccccatccgcaccagctgcgagccagcaccgcgcaggccatgcccatgctgggccgagtgcgccctctagtggccattgtcatgttcaccagcactgggctcccagcccaacccagcaggcgcctcgcctgcccacctccgctcctcccagagacagcaagacggtggctccagagagttggaggggctgctagagggcgagctcctctgctgactggaagaaagaggagggcatcccaagggctctttctcctctcatgccccatggagtgtgagggtgctcccccgaggctcaggccacctttcctccacctcacac

SEQ ID NO: 122552 - DNA, 786 bp, Homo sapiens
tgacctgctatttccaatcacgtcagtcaatgtatgtttcttaacagtagccaccatttgaactattctgtcatacttgccacgttcagttgcttagcatttttaacatcaaattcaaaatgtatccttcaaaatactttcattgaatatcactaccaaactctgaacatgactttgcttaacttttattttctattttattaatttaatcaccttgtattttgcctctcagatctcttgtttcatgtgtttacagtatattcctaactagatgtgaatttcttgaaatcactggtatttgatttctccaagtatttagttgggtattaataataaaatactgagctggattccatttctaatcctaattaatgaggcaggaagccgatcaggtgcatcatttcacagctcagtcaatcatcaaatattaagtgcctcctgggggatattgtgggaacctataatgttccaaattctatgctttgtgctttaatacatggtctcatataattctcccaaaaactcagtggagaaaacaccattattatcattcccaattgacaaatgagatagctaatggccaagagtcttattcaaagtcacagtgctgatcaaggtgggatttaaatccaggcagtgtgaccccagctaaagctcatgcctttaatcactcctgtatcccaccttatatccagactttggcactgctttgccttgaggttgcagaactgggggctaggagaaagtacaggaataataatggggaaagtcatgagagtggaactg

SEQ ID NO: 122553 - DNA, 196 bp, Homo sapiens
gcagcagtcacaggaggaagaacggggtggcaggcactacaaaggtgctagtgtaacgggagagagggccggattcaggatgtgtctggggagccacgtggacctgccggcagactgaacgtgccgcttacaggaacacagagaagtcaagaaggactctcaggcctctggcccaagccacaggaggtcccacctg

SEQ ID NO: 122554 - DNA, 278 bp, Homo sapiens
taatttactattatcaagtcagtggaagtagaatgttagagctatatagtctagttacaatttgatttcattcaaagtgactggtatgttttttcaaaatgaaggccaaactgacgaacagcactcagcccctacttcacaggcacccagatctcaagaatgtaatgaaaccaaaagtggtgtttcccttcagttttgtttgcatctctggataaaatggacttggctgaaatgtgttgaaagcttaaaaaaatgtgtaataccaccatcagttttct

SEQ ID NO: 122555 - DNA, 128 bp, Homo sapiens
caattccacattgctagccttttcattagtaatagtttaattaattaataggtttaactaaacctataattaaacattaattaatacctaatttaatatttctggtttttaaagttttcataatagaa

SEQ ID NO: 122556 - DNA, 638 bp, Homo sapiens
agttgctgccgctggagactcaaagtactttgttttgtcacttctctaaaaatttactgttctttttgaagatgttatataaagtgcaattcagagtcacctctttgatagttactccttctctaggtatctcccacgtatgtatgaaatatacatgttaacaaaacttctgtttttccctcgttaatctgcttttttgttgttgttgctgttgttacaagtgtctgtttcaactaagaacatatgagggttaagcaaaaaattacttttttccctacatatctataaatcctcccttataatcctaaatactgtagagaaaagaaattacacatgtagacacaattactactcacaatgttattatccacctaatacaatttttatggaatcacattgtagtaattatgaagtcaaacaatgtgcattagtcacaatttctccccactgatctcaaatattttggccattttctgtcattaaattctccaccatgaggtaggttggagggaaatggaattcaaactggggtagtttactaattttgtttttatgtctggcaaataagtggggaaaagtagaaatgtatgatcactaagagcatcgaaaggagatggggggctttgtcttattatcag

SEQ ID NO: 122557 - DNA, 128 bp, Homo sapiens
ggaggagaagatgcagggccaggaggagaagatgcgggagcaggaggagaagatgcggggccaggaggagaagatgtggggccaggaggagaagatgtgggggcaggaggagaagatgtgggggcagg

SEQ ID NO: 122558 - DNA, 163 bp, Homo sapiens
cctttccctcaacccctagcaagctatgcctggaatcagagacttgggctgaaccatgattgcggttaaaatgcagactaaattgtaagttgttttcatcatctacacctcgatgtaactggagtaaccagatcctcttttgagaatggtttgctgggaggca

SEQ ID NO: 122559 - DNA, 823 bp, Homo sapiens
gcatgttgaattgcaatccccaatgctggaggtggggcctggtgggaggtgtttgggtcacaggggtggatccctcatggcttgatgctatcttcccagtaatgagttctggtgagatctggctgtttaaaagtgtatggcaccctcctgctcaacctaacttgctcctgctttacatgtgaagtgcctgctcccacttcaccttccaccataattgaaagctccccaaggtttcaccagaagctgagctgatacgagcaccgtgcttcctgtaaagcctgcagaaccatgagccagttaaacctcttttcattataaattacccagtctcagatatttctttatagcaatgcaagaatggcctaataccagagcctaacctgcctgggaaagggaaatacccaactccagcccattttagccatcctgcccaacttaaaggaggaaaaaactgagacatacttttgaagttaacagtccagaggcacaggctcagtgaaagactgagacttacccataggatttagaactctccccctccccaataccttctcatcatatcactaaaggcctgtttatagcagttccttttatctagtacattacatttggccatcaagagaaacttacaagacatattaaaaggcattaaacactgtttgaagaggtatggcaagcatgagaacagactcacatatggtagagaggttggaatggtcagaccaataatttaaagcaactatgattaaggtgctaaggactctaatggctaaagtagatgacagcatgcaaggacaaatggggaatgtaagcggagagatgg

SEQ ID NO: 122560 - DNA, 375 bp, Homo sapiens
gaaattgtgctactcaccactcatctgcagccccctgaccatggctgtctccatcagtgccactgaagtggagacagccccgctgaaagcaggctcagttatcaaagggagcagagactgggcgcggtggctcacgcctgtgatcccagcactttgggaggccgaggcgggtggatcacgaggtcacgagtttgagaccaacctgtctctagtaaaagtacaaaaataatctgggcatggtggcgtgcacctgtagtccgagctacacagaaggctgaagcaggagaattgcttgaacccaggaggcggagtttgtggtgaggcgagatcacgccactgcactttaacctgggcaacaaagcgagactccttctc

SEQ ID NO: 122561 - DNA, 416 bp, Homo sapiens
gtaacaaagcgagatgccagctctacaaaaaagaaaacaagaatttgagagcaccttgcaggtaagtcagtcagtcactcttgctggctagcacagttctttcataaaatagtgtgaaattgggtctccagaatagtgttgacatgcttatttggggtcaaacacaagatgagttcaggtctctgggctatcgacagtcctctaccaacccttggtcatgagccatgtgttggggaccttgtgctggccttcctttgtcagtgttctgactgtggaactgctggtggtccacagcacctgaagactacagagtggtagcagacatcttttattctgtgtatgactgcatgccatctcctttctgccccatcactcgcacccagggtagttaccccaccccggcagaagattccatg

SEQ ID NO: 122562 - DNA, 450 bp, Homo sapiens
atgaaaacagaatccctgcttttagtctaaataatgtattagtggtaataagtgatatgaagaaaagtaaggtgaagagctggaaaatgttagtggttggggaggtagtgtgctccttcataaactgtgatcaggaaaggccttttggatgaagtgacttttgatcagagacctaagttgagcgtgagaggagtgagccttgtgactgtctgggggaagaatcttccaggcaggaaaaatgcaaaagccccaggttggtgggagtgtgccagtgtggctggagcagagtgagcaagggaggggggcaggtgggatatgaggtcagaagggtagcaggagggcaggtcttgttcagccatggtaaagggtttggcttgactcctggtgaaatggaaagtcttgggtgtgggggcagtcgacgcggccgcgaatttagtagtagtaggcggc

SEQ ID NO: 122563 - DNA, 205 bp, Homo sapiens
gtatttttgtgtgtaatttttatagtttttctgttctttcctttgccgtcaggatacttgactttggtctcttcctgatctttcattttgctgcttaattcatattagaatgggaaaccagataaccaatcgtgttaagagttatattgaaaataaaagtaagcaggctctggggagcatagtatcaaaggatttcaatataatg

SEQ ID NO: 122564 - DNA, 287 bp, Homo sapiens
aaagaaagaaccttttaaaaatgactaaaatatagtgattaaagaatgtttaatgaggagaggtgcttatatttcagttatcagtggtctgtctgtcaaaataatcatctacatatcctatagctttggggcaagttgtttgctctctctggatctcagtagccaaaaaatggcgagatctggcagttggggtctagaagttcccttctatctgtgtttacatcccacagtcccatgggcagactgtatgcaaggtgatggcaggtctgtggctgagtttgaggggc

SEQ ID NO: 122565 - DNA, 599 bp, Homo sapiens
gagggcatgaggtgtgctctacctaggatacctccaaaagtttcattagcaacattactttctaattagtagaaataagggctaaggaatctttggatcactgaaatctaactattctttaattgaaatgtggttatgtttctgacttatagtaagaactaaaatgaattctatttattctcaagtgagagcaaagagaaaaattttaaatggcataataaagagcttataaaacaaaatatgaggattttggaaaatcatttattgaaatggtactaggatatttagaagtatttagaagcttaaattaatttggtttttctttatgacattatctctattacgataatattatattattttttaataaaggccctaatggaaatctcaaataggttggtaactatagaaagctaagctaaaggaattattagaaaaagaaggaaaatagtctcttaaggaaattataggccaggcgtggtggctcatgcctgtaatctcagcactttgggaggccgaggcgggtggatcacctgaggtcaggagtttgagactagcctggccaatatggtgaaacaccatctctactaaaaatacaa

SEQ ID NO: 122566 - DNA, 750 bp, Homo sapiens
ggtaggtaatagtagtactgtggaattcagtgagagtttagggccagggataaatatttaggagtaactgatgtatgtctgctagatttggtaagtgaccttgacaagtgtggtcttagtgggaatggaaactagattgtagagaagtatcaggtaaaggatggaatgagaatatgaagttggggaatggagacagtgacaatagactcctaagaaattttcctgtgaaaagggaagcagaaaaatggttgtgaccacaagtaaggcccagattcgaatcttacttttatacttgcctggatacagttattatttgagtgcattctaaagtttaagatattttatgtaccctacgcagtcctctctacaaatattgaggtagatgatacttttccttctgtgacatgagagtccttagtttagggaagttaagtgacagtccaggtagaacctgtatttggactcactcactttgactgtagatgcagagtatttttcattataccaaaatgctccttaaacttttattatcttggtcaaatccaatctaccttagagtttttggaaggattacaagatgagagatgtgaaaattctttgcaagctctaaattgttacacaaatatagaaattcctttctttaaaatgccccattatgtcttctttgtgcatgactttttaggatatagtaggtagtggccttgaagttcattttggatcatagcctatctcattagagcccagagaatg

SEQ ID NO: 122567 - DNA, 705 bp, Homo sapiens
gtataactggggaaaacgattaaaaaacaaaacaccgtggtcgggcgtggtggctcacacctgtaatcccagcactttgggaggcacaggtgggcagatcacttgaggtcaagaattcgagaccagcctagctaacatggcccaaaccccgtctctactaaaaatacaaaaattagctaggtgcggtggcatgagaatcacttgaacccgggaggtagaggttgcagggagccgagatcgtgccactgcagtccagcctgggtgaaggagtgagactctgtctcaaaaacaaaacaaaacaaaaaacactaaaagtctgaaaattattctaagggcacatagcaaatgaagaaacatttatttaagaaaatctgaaaacttcgtgtttctgtactattcttctgataacctgctttactttctccttatgaacattttttcaaagccttttcatatatctggaacgctttttttttttcatataaataagactcgaatggctcatgactacaatttcaggaatgtgaattttgcaatatcgttatatattaggactcactaaggaatgttgatttaacttatataaataaaaatagaatagttttttacaggtacatttacagacattcaaggagagtgcaaattattaaaattgtctatttttaagatgtgctaagaataaatttttgaagcagatgctagaaa

SEQ ID NO: 122568 - DNA, 108 bp, Homo sapiens
tgatgtgtaactctttagacgttgaatcttatttggacatgggatgtgaggcacagacgggaactttatgcctttccaagcccttagtcaatcatccctgcaccattg

SEQ ID NO: 122569 - DNA, 498 bp, Homo sapiens
aatgatgtaggaggaaaagcttgagtcgaggatctggaagacagttaaaatcaggaagaaatcaactgtcaagagtcactaacaggacaaagtgataagcaagtcactaacagaggtcaagtaaaagacctctagtaaaagaatggaccactgaatttagcaacaaaatcactgctaatcttgacaatgaaatgtcttggagtggtgttgggaggaaagcctaactgcagcaaattgaagaaaaataaaataaaaactaaaaaatgtggctgggcaccatggctcacacctatactcccagcactttggaggctgaggcaggaagatcccttgaggccaggaatttgagaccagtctggacataacagccaagaccctacaaagaacttaaaaactagcagattaggcctggtgcagtggctcacacctgtaatctcagcaatttgggaggccaaggcgggaggatcacttgaggccaggaattcaagacaagccttg

SEQ ID NO: 122570 - DNA, 112 bp, Homo sapiens
gaggcttgctccagaaaggtggtctgcaaaggggttggctgggggggaggaggaagtcattctccaagtgtttgtcctcatcgttatcccaaattgcttgcctggaataagg

SEQ ID NO: 122571 - DNA, 937 bp, Homo sapiens
gaatgactgtttctgcccatggggaaataaattggcatttttctgctttcgtttgttttttagttattgatgttctagaaatttcaacaaaataaggagtgtttttgtatttcaaatgtagtgcccgtttctttatttctttctggtactttccactggtttgtgttgataatatgatctggaaggtagcgataatgcatgggaatttataaatgatcacaaaatactttgtcacaggaaatctggagaaataatgactttggcatatgtataagagaagtatctctaactgttaagtctaaactaaaagcttgttacttttcggtttggtataaccaaaaaaaatttgaaaaataaaatagaagtaatgatttgttttctcaggtgtagttgtatttgactgactctattgtaggaggacacgtttaagactgaatggttggataacggtaaagacgtcctttcaatggagagttgaatctgataggttgaagttttggatattgaatgaaaagagaaaagagagccggacaagctgaaaattcctgtggttccaactactggggaggctgaggtgggaggatcacctgagcccaggagtttgagactgcagtgagctatgatcatgccactgcgttccagtctggatgacagagtgagaccctgtgtcaaaaaataagtaaataaaaagaggaaagagctaaaatgagaattcaatctgattcagaatataaaaatattctactgtcccatcattttttgttctttaataagctttaacattgaagtataatgtatataaagaaaagcacacaaattataatgtacaactcaatgattttcataaaattaacactcccctgtaaccgttggtcaaaacagatcaagatacagaacgttgcgcctggtgctgtggctcatgcctgtgatcccagca

SEQ ID NO: 122572 - DNA, 811 bp, Homo sapiens
cagtattcaagtataagagcatatagaacaccaagcagattcagcccaaagaagactaccttaaggcatttaataatgaaactcccaaatgtcaaggataaagaacagatcctaaaagcagcaagagaaaagaaacaaaaacacataatggagctccaatatgtccggcagcagggccaagcagtcgtcgacttttcggtttggtataaccaaaaaaaatttgaaaaataaaatagaagtaatgatttgttttctcaggtgtagttgtatttgactgactctattgtaggaggacacgtttaagactgaatggttggataacggtaaagacgtcctttcaatggagagttgaatctgataggttgaagttttggatattgaatgaaaagagaaaagagagccggacaagctgaaaattcctgtggttccaactactggggaggctgaggtgggaggatcacctgagcccaggagtttgagactgcagtgagctatgatcatgccactgcgttccagtctggatgacagagtgagaccctgtgtcaaaaaataagtaaataaaaagaggaaagagctaaaatgagaattcaatctgattcagaatataaaaatattctactgtcccatcattttttgttctttaataagctttaacattgaagtataatgtatataaagaaaagcacacaaattataatgtacaactcaatgattttcataaaattaacactcccctgtaaccgttggtcaaaacagatcaagatacagaacgttgcgcctggtgctgtggctcatgcctgtgatcccagca

SEQ ID NO: 122573 - DNA, 332 bp, Homo sapiens
cctagagatgtttcccttctagacgggtccatgactcatcttctcccgggctctgttactcagctactcagagtcatggaaaacggctcccaccaggccccagacttgaaagagacaagagacagggctgtttatccagggaactgccagagtgtgacatatctgctgcgtgatgtttagagcactgcctggggcacctcatcggctccatgaggtctgcaaacagactaaacaccaagtgccaagagtccttcctaggcaaggacgcgaaggctaaagtctacaaagatgctttgcccccagaatcaccctgagttgcaggggctcctcca

SEQ ID NO: 122574 - DNA, 361 bp, Homo sapiens
tccatgctttgcccattgtgggtggccattgtgatttcatggttttttgttgtttgtctgatcctgtttattagaaagtgaggagaggatgattatgttccttcatcctctcagtgtcttagtactccctacacctgcgttatgttatgacctacctttgcgatctgccagttttggggtcagcttaagtgagaattcatattctgcttcactggaatgagaaggctctcctcacatattatcatgcttctcaagttggtatatatgagccaacttgattatgtagtgtgtgtgtgtgtgtgtgtgtgtgtgtataggaagtcacagataaaaattgagccaactgtggaaagtgacagtt

SEQ ID NO: 122575 - DNA, 181 bp, Homo sapiens
ccctctttttcctcttgctacatctacatgtctggtaaatttctacatgtttcataaccaaggctaaatgctgaatctttgtgcagtttccctcagtcacttctccagtcaaaactaactgctccaggccaggcggggtggctcacgcttgtaatcccagaactttgggagacaaagacgg

SEQ ID NO: 122576 - DNA, 316 bp, Homo sapiens
acagcgctgagcaaaagcccatccctgaagctgcagcctaaactgtcaccttcagcagatgagctccacccggcacagaagccaggcagggctgcaaggagcctgcaggccgcaacctgcggctcggcatggctgggggattgactcagctgtcctgaatccatacttggacagggcaccctgggagatgcagggctgaccacaggtcccagcccatcagtgtgggctgcatgactgccctgtccccagggaacagacgccaacccgtgcccaggctcacaacagtgggtagagcctaccccatgcccaggtcccc

SEQ ID NO: 122577 - DNA, 513 bp, Homo sapiens
tgcggtggcccatgcctgtaatcccagcacataacggaggccaaggcaggtggatcacctgaggttgggagttcgagaccatcctgaccaacatggagaaaccccgtctctactaaaaatacaaaattagctgggcatggtggcgcacgcatgtaatcccagctactcaggaggctgaggcagaagaatcgcttgaacccgggaagtggaggttgcggtgagccgagattgcgccattgcattccaggcaacaagagcgaaactctgtctcaaattctagtagagtcaggttctcagtatgttgcccaggctggtctcaaactgctggtcccagcctcccaaagtgctgggcttgtaggcaggaggtaccatggccaaaatagatatttttaataaaatattatagccttgctttaaattggagaactgatgaaaaatactttgtctctttatctgggggaagttagcatcttaattatatatgacttgatgtttcatatatatatgacttga

SEQ ID NO: 122578 - DNA, 742 bp, Homo sapiens
agaatatactaatgtattgataagggagtccaaaattgacctctaaaatatttttgacatagcctgttatgctatcagtgttggtaagtttgttcagtatatttgtaggctacacacagtcctttcaaagaagtatttaacctttgagggaaatacttttgtaattgttcaaaatcaaaatgctttatttctgtgaacttggctgtgagataaatgttctgtccacttcataattttattcagcagtgcttaaaaaagagtatttttagttatctcatagtgtttatattcagtaagtgatccctcagtaacatggtcctagtaagactgttaacatttctctttaatattgatgtatttataaaacttacatgctacactttgatgctctgccaggcggtggaagtagtgaaaagagcacatcaggctttagagttacacaacccgattttgtatcccagctttgtttcctattagctttgtgatcttgagcttgtaattaactttcagattttagtttccttatcttttgaatgaagaaaatatgttagatgttattctttttttaaaagagaaaacttgagagagaactattaggcacactttgatttatccttttagttttagctgggcttctaatacctttctgaagcctttctgagctgtattccccacctcttccccttaactcccatcatgccatgtgcttaccagcatcatcattattgtgtcctatttttat

SEQ ID NO: 122579 - DNA, 565 bp, Homo sapiens
gcaggtttcatgtcctgggaagactgtattttcaacctgcatttggttgtggatgcagatacagaggaccaaccgtatttactgaaaaaatatctgtataagtggaccttgaagttcacttgtgttgttcaagtgtcaactgtatagtgctttctttgactttcatttttatatagtatgtgatttttagtttcaatcgactccttaatcgagaatttctaaggagagggttctctctcagtctgtgtgtgtctctctttatggaactattttgtattctcttggggattcttttaggatttctgattcccatgcttccttcttggtttacttccttattttattggagcaccttctctaattaatttctaggaaatagtgcatggatagtgaagtttttgaatcccagcatatttgaaaatgtctgtgtcgtagctttgtagttcttgatagtttggctgaagataggtatctgggtaaatagatgttttccttcagaattctgaaggcattcttcaatgtcttctagtttccattattgatgatgggtgataaggctgatgcc

SEQ ID NO: 122580 - DNA, 689 bp, Homo sapiens
tgcgcccggctaattttttgtatttttagtagagacggggtttcaccttgttagccaggatggtctcgatctcctgacctcatgatccacccgcctcggcctcccaaagtgctgggattacaggcgtgagccaccgcgcccggccggaaaatcttttaaacacttagttgatgatatataataaaatttattatataatgtaggtttttgtgagatgtctttttttatgccaaagataatcaagtttcctattatttatactttgttagaaactgtctttttacatcacaaatgagcactaaacttttctgaattcttggtctgtacctgttacagtaattatacggattgcctcttaatctgctatgtggtaaattacattgatacattttctaaagttaaatctgtgcattcctggaataaaccatgcttagtcttatttaaaacctatttttctatgctgctaaatggaatttcctaatgttttacttagattttttttatgtcgatgtttacaagtgacttggcatgtcgttttcttttttatactgtctttactggttttgggattaaattatattgtctcataaaataagttgaatggctttgtctttgtctattatctggaacagcttgtataacatgggaattatcagttctttgactatagtaaaacagttgcaaatctc

SEQ ID NO: 122581 - DNA, 276 bp, Homo sapiens
gtcaggtccagcaggaaagaatgctctcctgtgtccccacttcctccagaagccacactcacccatcccacctggcttggtcctcatgtctatcccagaatccattactggggccaggggactatgacacaaccacttggcttagactgaggagctctgtgggcagccccacctgaagctctgggactaagcctgcgagagagatggattccccaagggaaatggggccattgcttgagtaaaaaggaaatagttgctgaagaggaaaaccacgtg

SEQ ID NO: 122582 - DNA, 396 bp, Homo sapiens
tgggtggccattggaagagaggtcattttcagctggaaaagccagaaaagagctcactgatggtgaagcatctgacagggaccttgaaaacaaaataggggtttacacgcagagataaaagaggggaaatgagcattccagggttaaggaacaccctggggaaaggcatggaggtgggacagtaatggacacataacagaataatggacacgagaaaggtcattttggctggggacaaacacatacacatccatgcaaagacacgcaaatcacacacacacacacacacacacacacacacacacacacacacccatgctatgaccctggactcgccctctccctgttgttctccccctcagggtggatggtaggagagaccttcagacccaggca

SEQ ID NO: 122583 - DNA, 342 bp, Homo sapiens
agagcaaaatcatgtgttccttaatctttaattagaacaatctgcaagtggttcattaattagagaattttgtctttaaaacaggaacctcaggaagtaacaagcaagtaggaaaagatgacccttttaaaagaaattattcttctttagtctatacttattgcatgaccttaaaaaccaggggacagggaaacagcaatgtgttggatcccacaggagagctggttacatgcatcccttctcaaccccacgttcagtgatatcacattagtagctggaaattgaccatggtggaagtctttacaccagggtaactggcaaacatgataaagcaagcgtttt

SEQ ID NO: 122584 - DNA, 565 bp, Homo sapiens
cccacgcgtcgcccacgcgtccgggatgtttctgattttcagcagaacattctatgtctttcaccgaaaggagagattgaatatataatcttaggtttgctataattagttctgatgacagagttaaatacctcagccaagactgtaaatcagtacgtaaacaggtttctgcaactgatcataaatctcaaactgcatattttaaacacttatttttttaggatgacagataagggagcagcaggctaaggataggaataaaatgttatctgaacttttaagtcacaacttagaactcacattaaaatcttctgattttctttataccttttgtctaaaatattatcttttagcttattaataactttaataagacaagtttgaatttaattcacaaaaaatgaagatataatttataaaatgtccaaatttttgttaagacattactttttaagaaatgtgtgtcttgctaaatataaaacatattgtatgaggttgttgtttaaacaaaatgagagttgtacattattttttaagagatgataaagtttgaggaggcaagccg

SEQ ID NO: 122585 - DNA, 350 bp, Homo sapiens
atgataaaccaggagattagcagaagttttatatattccagaggtacttaccctattcaagtggtgtacagtattgttctcaggtgtggaaaaggcttcaagaagaatttagctggttccaggtagaagaggctattgttttagatagagattagcttgtgggaagataaagctggagaggatggatggtaccacattaggaaggacctcatatgtcctgctaaggagtgtatactatgtatgaggaatagagcagctgagaactcttgagtcttggccatgagatctgtgttcagagagagctgtttcgtaaagggccagtggactagagaggagacactatatagggc

SEQ ID NO: 122586 - DNA, 300 bp, Homo sapiens
cagcgtgaagctaggtcttttctgtagtctaaactgtcaggctctaaccggagtctgtgtccactaattgggacctgaacatgggtggggatcacttctcctccctcatctcatcagtaaccaagtggcaagtggggtcgcttcagccctgcctggggccccagctcctctaagaaaaccaattcttggctgggtgcagtggctcatgcctgtaatcccagcactttgggaggcagaggcaggagggtcccttgaggccagaagttcaagaccagcctgaacaacgcagacgcgcctaat

SEQ ID NO: 122587 - DNA, 135 bp, Homo sapiens
ccaatgagagacagaaagaggaagggccagaggctttcattcttctctgaggtcgagatcagacaccctcttctggcttttctcaacagcttttcattttacagcagcaccttatctgggcccaagtatcaaaag

SEQ ID NO: 122588 - DNA, 390 bp, Homo sapiens
gacaaaggaactcaccagcagaggtggccagaagaagaaatctttcctggcaattgaaagaaatcttagtgcagattgtggtctttgcactaggatgagacagaggttggagcttgtcttcctcagacatcaaagagcagggagaaccgaactgccaactggtttgcatgtggcttgtggtttgacagctgactctttcttaacttctaacccaaggatcagtacaaagccaattccccttctcctccaggaggaagaaccttctacagcctgaggtacccagtacttgtcctgagtgtaagctaggatgacctctggatccatcatgctatatttagtctctgtttcacctaacactcaggattccatgaatgtacctttagtgagtcc

SEQ ID NO: 122589 - DNA, 365 bp, Homo sapiens
agcctccttttccccccaaaagaacaattttcaaaagccctactggcatagcacatttgacactggtatttctatgccattgctacctgcctgccacctctttagaacatctcctttctccccagtggcacctcccactcaaggcccatggcctgggcagctagaagcagtcaggagcacttcccctcccctcacgactcacactactcttagaaaaccatgggtgagaccacttctcaacttacagagtaccgcccatgtaagcatttgaatcagggcttggacatgtgaagctacaggagaaaaagtggttaaaagcagacctggggccaggtgtggtggctcacgcctgtaatcccagcact

SEQ ID NO: 122590 - DNA, 343 bp, Homo sapiens
ctgagccacccctgaattcctaaaccatagaaactgagaacactaaatgtttactgttgttttcaaccattaagttttgggataatttgtggggcagcaatagataccaagcacaccagccacagctctttggtggatacggagaattcagttgcctgatgtcctcagaccatcagagaatagctctgggatatttccctggccccacagcactctctctgattccttggcttttgactcacaggttgaaaattaccaaaccaaacatgctgcaggataaggtttagaaggcagaggaaacaaaaaattaatattaaaccattgtccctgctgttaagtccca

SEQ ID NO: 122591 - DNA, 391 bp, Homo sapiens
tttatttttaaaaattaactgcttcctcatttatctgcgttgtaaattaattcttcattcaacaagtgattattgagcatcaaccatgtgccaggcactgagtccgtaatacttatcaaggcagcatactcccattgtccaggagctagagtatacatggagagacgcacaagcaagtgactaagcaagttcatttaacaagcacaacgtgtgctgagtgttaccaaggaaataaacgtgacatgtggtggagaagagctggagacctatttcacactggataatcagggaaggcttctccaaggaagtggcatccaaactaagatctgacagtcaagaaggagctcatccatcacatagaaagagagcaaggatggccgggcgcggtggc

SEQ ID NO: 122592 - DNA, 375 bp, Homo sapiens
actatctttggtcatcagattctgagattatgaagtctctggcatttttatctcacttgtatgcaaattgtcaacttcgtaaaaagctctgtgccagtacccacctgttgctctggacttttctatatcagcagcttataatttgttgatttttttttttagttaaatttctaaggtagcaatgtggaatcctgagatgaacgtagactttggagtcaggcaacccacaatgagaatcctggctccagcatatattagctgagtctttggatgagtttcctaacctgtctcagtcgtctgtctctgtatactggagatgatcatactcagctgatagagttgtgaaaattaagcttagataagactgtgaatgtg

SEQ ID NO: 122593 - DNA, 185 bp, Homo sapiens
aggtgtgacacctttagtagggggcattctcagagaaccatcgggcaacttgccagggtctttgcgaggttacccgcatttgccagggggggagaagggagaatcattggcgaccctgctgtccctgaagaccatcagagtccgcgagcgttttctgggtgctttctggagcttctccagcgttg

SEQ ID NO: 122594 - DNA, 330 bp, Homo sapiens
tgccctcagcacgtgctctttccccacaagacgtcctaggactcccctaagaggatcaccccacgttgaaattcacagggaaggttgtgaagacatgaggccacttccttcccctgggttacaaaaaagtgatcagattttgatgccactccatgactccacaaaaatcaactttccctccttatccagcgcaagtttttcaaggtttcacctgataacgaggtaagcccccagactccctcggatcttctgctgaccatgcccataccaggggacctctcctccccggcactcctgagacagtcccctgagctacctcgctcccaccat

SEQ ID NO: 122595 - DNA, 371 bp, Homo sapiens
tcttcatcttcatactgaagagacaaatcaaaagaaaaataagctctgatgagatatcacacaaattcccatattttctctgcattttgtcaaccagagttgtcccaaatgacatttacagaggactgcacccaaggaggtgtttccaaagccaacctttttcatttgctagtcagaaagacttgttatgcccttatttcatattatacccaaaaatcaactgaaatggatcaggaaacctaaatgcaagagataacacttttcccccaaaaaattccgccaaatactcatatgggaggaagtgttcttgaccagtatcaggtcacaactttcatgaaatcctaaatctcaaatccaaacttgatttccag

SEQ ID NO: 122596 - DNA, 306 bp, Homo sapiens
cttaaaatctggaaatgagattggtagagacttaaatgattcatacaaatcctaaaagaaaagtcgggagaagtcctaagttggaaaatagtcagctcatagaaaaactcagtgaatgttttatgaaggggtgaatttatctagtcatttactccacaaacaagtactgaagctttacaatcaatgtatttagcattattcctattgctggagataataatggtaaaaattcaaagaccctgtcctcatggaacgtagattctaatgagagtagatagacaataaccatgtaaacaaataagcaaa

SEQ ID NO: 122597 - DNA, 589 bp, Homo sapiens
gcttttagatggctcctcttggaactatgcatctctcctgatacttggatgcttttcctctgactgatgaagatcctgaataccaaagagggccgctgacaggtctaggagtacacttctagcacctagcagagagaggcttcactacatcatgcttcctgacatctctccctttgaagagcagtcagactcctgctttgctcttcagacttaatttgggggtttaacaggtgaggttgctgggggaactcttttacaacatctctctgaaagaatccgggctgccagtttcatttggtttgggtgtcagtagcatgatggaaagacaaaaaaacacaacttgacatctgcagaaatgggttcaaattttacctgcaactcaccaattctgtggccttggttcagcaattaaactccctaaaattcagttttttctttgtaaaatggggttatgaacagtacctacttcaaaatgtgtttgtgaagattaaaaaagttaacataaagagtttagaagagtgtctggcatattgtgctcaataagtgtttatttatttattgctgaataaaccagtaatttaattagtat

SEQ ID NO: 122598 - DNA, 658 bp, Homo sapiens
cagactgctgtgctagcaatcagcgagactccgtgggcgtaggaccctccgagccagatgaagatcctgaataccaaagagggccgctgacaggtctaggagtacacttctagcacctagcagagagaggcttcactacatcatgcttcctgacatctctccctttgaagagcagtcagactcctgctttgctcttcagacttaatttgggggtttaacagccatgtgaagtgctcactccccctttgccttctgccatgattgtgtgtttcctgaggcctccccagaagctgagaagatgcttcctgtacagcctgcagaactgtttgaatgagagaggcagaagcacatttccaatcactgggggaacctgagaccattctttccaacccattttgccaaatggatgtcctgaggaaggtgttccaagagaggcgatgtcaggatagtgtctgattggagggtgcccaaggcacatgggagaatgtggaagaactggaaagacttgggtgttgctgatgttaaattacttaggtatctctgtagaaacttagtgggtcattccttctcttcacaatccctttcttaaatttatgataaacgtgaaaggtaatcaaaacaaaagcagggcaaaatgggaaaataagttcccacttta

SEQ ID NO: 122599 - DNA, 565 bp, Homo sapiens
tagatggctcctcttggaactatgcatctctcctgatacttggatgcttttcctctgactggtgagacctccatctctgatcccatctgcagtcatttgggtgcagttcaactcacaggattagaaaaatctgtggccggaccagtgagatctggcctggagtgctggtcagtgacttctgtgactgaccatccccttgggacggacagaccctgggtctcttcaccctcccctctcttttcctggagaagccagctctttcaggttgggctgcttcctagaatttcttggtttacttagttccaagtgaggtgggaggtggaaaagggggcagcttccaagttctcctggggagagcaaactcagggccatatcatcatttcaccacagacaaccactcacggaatttttcctgatgtctgtgtggttctcaagtttcccaacctgttcaccctgaacacttggagttggcttctgagctcagagaaaatactcactgttgccaggccaccagtttagccttggggagtgatgattaaataaataaggggacccctcccccaat

SEQ ID NO: 122600 - DNA, 380 bp, Homo sapiens
ggagggctgcggaggggggtgagatgtcagagggagggccggggtgggggcgctgggggcaacggcaacagcatggacggacacttattttgttacgtacacccctccctggttcgcgtgtgtccacggatgttgtcactttggtttcttgtgcttttgcaccgttgacgaactgcagcgatcttactggccaagccagagcgcctcctctcagattccttctcgacacagcaccctaggcggcttcttcctgtcagtcggaggtggcatgcaagatgaagctctctttgctcttcctgctttcattttgtgcttttccttgtgttttcatgttttgggtatcagtgttacattaaagttgcaaaattaaaaaaaaaaaa

SEQ ID NO: 122601 - DNA, 2530 bp, Homo sapiens
ggtccgggctgctgtgctggcagcagtaggcgagggcgcggctgcggggttcctggtgctgaggacggacgccattggagttcccgagaagcatggctgagggaagcttcagcgtgcaatcggaaagctacagtgttgaagacatggatgagggtagcgacgaagtcggggaggaagagatggttgaaggcaacgactatgaagaattcggtgcgtttggtggctatggcaccctcaccagctttgacatccatatcctcagagccttcggaagcttgggtccaggccttcgcatcttatcgaatgagccctgggaactggaaaaccctgtgctggcccagaccctggtggaggcattgcagctggatccggaaacacttgccaatgagacggccgcccgtgctgccaacgtagcccgcgccgccgcctccaaccgtgcggctcgggccgctgccgccgctgcccgtaccgccttcagtcaggtggtcgctagccaccgggtggccacgccgcaggtctcaggagaggatacccagcccacgacctacgccgccgaggctcaggggcccacccctgagccaccccttgcttctccgcagacctcccagatgttagtcaccagtaagatggctgcccccgaggctccggcaacctccgcacagtcccagacaggctccccggcccaggaggctgctactgagggccctagtagcgcctgtgctttctctcaggctccgtgtgccagggaggtggacgccaaccggcccagcacagccttcctgggccagaatgatgtcttcgatttcactcagccggcaggtgtcagtggcatggccttcccgcgccccaagagacctgccccagcccaagaggctgccacagagggccccagtgctgcctctggtgtgccccagacgggacctggcagggaggtggcagccacccggcccaagaccaccaagtcggggaaggcgctggccaagactcggtgggtggagcctcagaatgttgtggcagcagctgctgccaaggccaagatggccacgagcatccctgagccggagggtgcagctgctgccactgctcagcacagtgctgagccctgggccaggatgggaggcaagaggaccaagaagtccaagcacctggatgatgagtatgagagcagcgaggaggagagagagactcccgcggtcccacccacctggagagcatcacagccctcattgacggtgcgggctcagttggcccctcggcccccgatggccccgaggtcccagataccctcaaggcacgtactgtgcctgcccccccgcaacgtgacccttctgcaggagagggcaaataagttggtgaaatacctgatgattaaggactacaagaagatccccatcaagcgcgcagacatgctgaaggatgtcatcagagaatatgatgaacatttccctgagatcattgaacgagcaacgtacaccctggaaaagaagtttgggatccacctgaaggagatcgacaaggaagaacacctgtatattcttgtctgcacacgggactcctcagctcgcctccttggaaaaaccaaggacactcccaggctgagtctcctcttggtgattctgggcgtcatcttcatgaatggcaaccgtgccagcgaggctgtcctctgggaggcactacgcaagatgggactgcgccctggggtgaggcacccattcctcggcgatctgaggaagctcatcacagatgactttgtgaagcagaagtacctggaatacaagaagatccccaacagcaacccacctgagtatgaattcctctggggcctgcgagcccgccatgagaccagcaagatgagggtcctgagattcatcgcccagaatcagaaccgagacccccgggaatggaaggctcatttcttggaggctgtggatgatgctttcaagacaatggatgtggatatggccgaggaacatgccagggcccagatgagggcccagatgaatatcggggatgaagcgctgattggacggtggagctgggatgacatacaagtcgagctcctgacctgggatgaggacggagattttggcgatgcctgggccaggatcccctttgctttctgggccagataccatcagtacattctgaatagcaaccgtgccaacaggagggccacgtggagagctggcgtcagcagtggcaccaatggaggggccagcaccagcgtcctagatggccccagcaccagctccaccatccggaccagaaatgctgccagagctggcgccagcttcttctcctggatccagcaccgttgacgaactgcagcgatcttactggccaagccagagcgcctcctctcagattccttctcgacacagcaccctaggcggcttcttcctgtcagtcggaggtggcatgcaagatgaagctctctttgctcttcctgctttcattttgtgcttttccttgtgttttcatgttttgggtatcagtgttacattaaagttgcaaaattaaaaaaaaaaaa

SEQ ID NO: 122602 - DNA, 2560 bp, Homo sapiens
ggtccgggctgctgtgctggcagcagtaggcgagggcgcggctgcggggttcctggtgctgaggacggacgccattggagttcccgagaaggctgagctctcatctccctgggacccgcagcatggctgagggaagcttcagcgtgcaatcggaaagctacagtgttgaagacatggatgagggtagcgacgaagtcggggaggaagagatggttgaaggcaacgactatgaagaattcggtgcgtttggtggctatggcaccctcaccagctttgacatccatatcctcagagccttcggaagcttgggtccaggccttcgcatcttatcgaatgagccctgggaactggaaaaccctgtgctggcccagaccctggtggaggcattgcagctggatccggaaacacttgccaatgagacggccgcccgtgctgccaacgtagcccgcgccgccgcctccaaccgtgcggctcgggccgctgccgccgctgcccgtaccgccttcagtcaggtggtcgctagccaccgggtggccacgccgcaggtctcaggagaggatacccagcccacgacctacgccgccgaggctcaggggcccacccctgagccaccccttgcttctccgcagacctcccagatgttagtcaccagtaagatggctgcccccgaggctccggcaacctccgcacagtcccagacaggctccccggcccaggaggctgctactgagggccctagtagcgcctgtgctttctctcaggctccgtgtgccagggaggtggacgccaaccggcccagcacagccttcctgggccagaatgatgtcttcgatttcactcagccggcaggtgtcagtggcatggccttcccgcgccccaagagacctgccccagcccaagaggctgccacagagggccccagtgctgcctctggtgtgccccagacgggacctggcagggaggtggcagccacccggcccaagaccaccaagtcggggaaggcgctggccaagactcggtgggtggagcctcagaatgttgtggcagcagctgctgccaaggccaagatggccacgagcatccctgagccggagggtgcagctgctgccactgctcagcacagtgctgagccctgggccaggatgggaggcaagaggaccaagaagtccaagcacctggatgatgagtatgagagcagcgaggaggagagagagactcccgcggtcccacccacctggagagcatcacagccctcattgacggtgcgggctcagttggcccctcggcccccgatggccccgaggtcccagataccctcaaggcacgtactgtgcctgcccccccgcaacgtgacccttctgcaggagagggcaaataagttggtgaaatacctgatgattaaggactacaagaagatccccatcaagcgcgcagacatgctgaaggatgtcatcagagaatatgatgaacatttccctgagatcattgaacgagcaacgtacaccctggaaaagaagtttgggatccacctgaaggagatcgacaaggaagaacacctgtatattcttgtctgcacacgggactcctcagctcgcctccttggaaaaaccaaggacactcccaggctgagtctcctcttggtgattctgggcgtcatcttcatgaatggcaaccgtgccagcgaggctgtcctctgggaggcactacgcaagatgggactgcgccctggggtgaggcacccattcctcggcgatctgaggaagctcatcacagatgactttgtgaagcagaagtacctggaatacaagaagatccccaacagcaacccacctgagtatgaattcctctggggcctgcgagcccgccatgagaccagcaagatgagggtcctgagattcatcgcccagaatcagaaccgagacccccgggaatggaaggctcatttcttggaggctgtggatgatgctttcaagacaatggatgtggatatggccgaggaacatgccagggcccagatgagggcccagatgaatatcggggatgaagcgctgattggacggtggagctgggatgacatacaagtcgagctcctgacctgggatgaggacggagattttggcgatgcctgggccaggatcccctttgctttctgggccagataccatcagtacattctgaatagcaaccgtgccaacaggagggccacgtggagagctggcgtcagcagtggcaccaatggaggggccagcaccagcgtcctagatggccccagcaccagctccaccatccggaccagaaatgctgccagagctggcgccagcttcttctcctggatccagcaccgttgacgaactgcagcgatcttactggccaagccagagcgcctcctctcagattccttctcgacacagcaccctaggcggcttcttcctgtcagtcggaggtggcatgcaagatgaagctctctttgctcttcctgctttcattttgtgcttttccttgtgttttcatgttttgggtatcagtgttacattaaagttgcaaaattaaaaaaaaaaaa

SEQ ID NO: 122603 - DNA, 3008 bp, Homo sapiens
caaggtgctggtacgcccggattacgggatggttcctggtgctgaggacggacgccattggagttcccgagaagatcccgcctcccattggatcccgccccctccccctgcagctgcttcaccctccctctcaggctgagctctcatctccctgggacccgcagcatggctgagggaagcttcagcgtgcaatcggaaagctacagtgttgaagacatggatgagggtagcgacgaagtcggggaggaagagatggttgaaggcaacgactatgaagaattcggtgcgtttggtggctatggcaccctcaccagctttgacatccatatcctcagagccttcggaagcttgggtccaggccttcgcatcttatcgaatgagccctgggaactggaaaaccctgtgctggcccagaccctggtggaggcattgcagctggatccggaaacacttgccaatgagacggccgcccgtgctgccaacgtagcccgcgccgccgcctccaaccgtgcggctcgggccgctgccgccgctgcccgtaccgccttcagtcaggtggtcgctagccaccgggtggccacgccgcaggtctcaggagaggatacccagcccacgacctacgccgccgaggctcaggggcccacccctgagccaccccttgcttctccgcagacctcccagatgttagtcaccagtaagatggctgcccccgaggctccggcaacctccgcacagtcccagacaggctccccggcccaggaggctgctactgagggccctagtagcgcctgtgctttctctcaggctccgtgtgccagggaggtggacgccaaccggcccagcacagccttcctgggccagaatgatgtcttcgatttcactcagccggcaggtgtcagtggcatggccttcccgcgccccaagagacctgccccagcccaagaggctgccacagagggccccagtgctgcctctggtgtgccccagacgggacctggcagggaggtggcagccacccggcccaagaccaccaagtcggggaaggcgctggccaagactcggtgggtggagcctcagaatgttgtggcagcagctgctgccaaggccaagatggccacgagcatccctgagccggagggtgcagctgctgccactgctcagcacagtgctgagccctgggccaggatgggaggcaagaggaccaagaagtccccctgccccctgccacctccacacccccttgctcctgtcctttccttctcctccctttcctgctcctctcctccctctcctctcccccttcttcctctcttctcctctttcccctccttctctcctcacctcccctctcctcccctcctctcctctcagctagtccatgtttctccaacacaagtttgctgagcatgttttcactccacgtagtccctaccctcaggactggtgggagaagaggctggctcagtgcctggcacttagtaagcacgcagcacatgccagccgctgctggtactgctctcatttccaagagcctgctacgggtgaggtgcgtgccgggtgctttggcacggggagcctggtagccctgggtctctcctctctcaaatgatacagtccaagcacctggatgatgagtatgagagcagcgaggaggagagagagactcccgcggtcccacccacctggagagcatcacagccctcattgacggtgcgggctcagttggcccctcggcccccgatggccccgaggtcccagataccctcaaggcacgtactgtgcctgcccccccgcaacgtgacccttctgcaggagagggcaaataagttggtgaaatacctgatgattaaggactacaagaagatccccatcaagcgcgcagacatgctgaaggatgtcatcagagaatatgatgaacatttccctgagatcattgaacgagcaacgtacaccctggaaaagaagtttgggatccacctgaaggagatcgacaaggaagaacacctgtatattcttgtctgcacacgggactcctcagctcgcctccttggaaaaaccaaggacactcccaggctgagtctcctcttggtgattctgggcgtcatcttcatgaatggcaaccgtgccagcgaggctgtcctctgggaggcactacgcaagatgggactgcgccctggggtgaggcacccattcctcggcgatctgaggaagctcatcacagatgactttgtgaagcagaagtacctggaatacaagaagatccccaacagcaacccacctgagtatgaattcctctggggcctgcgagcccgccatgagaccagcaagatgagggtcctgagattcatcgcccagaatcagaaccgagacccccgggaatggaaggctcatttcttggaggctgtggatgatgctttcaagacaatggatgtggatatggccgaggaacatgccagggcccagatgagggcccagatgaatatcggggatgaagcgctgattggacggtggagctgggatgacatacaagtcgagctcctgacctgggatgaggacggagattttggcgatgcctgggccaggatcccctttgctttctgggccagataccatcagtacattctgaatagcaaccgtgccaacaggagggccacgtggagagctggcgtcagcagtggcaccaatggaggggccagcaccagcgtcctagatggccccagcaccagctccaccatccggaccagaaatgctgccagagctggcgccagcttcttctcctggatccagcaccgttgacgaactgcagcgatcttactggccaagccagagcgcctcctctcagattccttctcgacacagcaccctaggcggcttcttcctgtcagtcggaggtggcatgcaagatgaagctctctttgctcttcctgctttcattttgtgcttttccttgtgttttcatgttttgggtatcagtgttacattaaagttgcaaaattaaaaaaaaaaaa

SEQ ID NO: 122604 - DNA, 2564 bp, Homo sapiens
caaggtgctggtacgcccggattacgggatggttcctggtgctgaggacggacgccattggagttcccgagaagctgcttcaccctccctctcaggctgagctctcatctccctgggacccgcagcatggctgagggaagcttcagcgtgcaatcggaaagctacagtgttgaagacatggatgagggtagcgacgaagtcggggaggaagagatggttgaaggcaacgactatgaagaattcggtgcgtttggtggctatggcaccctcaccagctttgacatccatatcctcagagccttcggaagcttgggtccaggccttcgcatcttatcgaatgagccctgggaactggaaaaccctgtgctggcccagaccctggtggaggcattgcagctggatccggaaacacttgccaatgagacggccgcccgtgctgccaacgtagcccgcgccgccgcctccaaccgtgcggctcgggccgctgccgccgctgcccgtaccgccttcagtcaggtggtcgctagccaccgggtggccacgccgcaggtctcaggagaggatacccagcccacgacctacgccgccgaggctcaggggcccacccctgagccaccccttgcttctccgcagacctcccagatgttagtcaccagtaagatggctgcccccgaggctccggcaacctccgcacagtcccagacaggctccccggcccaggaggctgctactgagggccctagtagcgcctgtgctttctctcaggctccgtgtgccagggaggtggacgccaaccggcccagcacagccttcctgggccagaatgatgtcttcgatttcactcagccggcaggtgtcagtggcatggccttcccgcgccccaagagacctgccccagcccaagaggctgccacagagggccccagtgctgcctctggtgtgccccagacgggacctggcagggaggtggcagccacccggcccaagaccaccaagtcggggaaggcgctggccaagactcggtgggtggagcctcagaatgttgtggcagcagctgctgccaaggccaagatggccacgagcatccctgagccggagggtgcagctgctgccactgctcagcacagtgctgagccctgggccaggatgggaggcaagaggaccaagaagtccaagcacctggatgatgagtatgagagcagcgaggaggagagagagactcccgcggtcccacccacctggagagcatcacagccctcattgacggtgcgggctcagttggcccctcggcccccgatggccccgaggtcccagataccctcaaggcacgtactgtgcctgcccccccgcaacgtgacccttctgcaggagagggcaaataagttggtgaaatacctgatgattaaggactacaagaagatccccatcaagcgcgcagacatgctgaaggatgtcatcagagaatatgatgaacatttccctgagatcattgaacgagcaacgtacaccctggaaaagaagtttgggatccacctgaaggagatcgacaaggaagaacacctgtatattcttgtctgcacacgggactcctcagctcgcctccttggaaaaaccaaggacactcccaggctgagtctcctcttggtgattctgggcgtcatcttcatgaatggcaaccgtgccagcgaggctgtcctctgggaggcactacgcaagatgggactgcgccctggggtgaggcacccattcctcggcgatctgaggaagctcatcacagatgactttgtgaagcagaagtacctggaatacaagaagatccccaacagcaacccacctgagtatgaattcctctggggcctgcgagcccgccatgagaccagcaagatgagggtcctgagattcatcgcccagaatcagaaccgagacccccgggaatggaaggctcatttcttggaggctgtggatgatgctttcaagacaatggatgtggatatggccgaggaacatgccagggcccagatgagggcccagatgaatatcggggatgaagcgctgattggacggtggagctgggatgacatacaagtcgagctcctgacctgggatgaggacggagattttggcgatgcctgggccaggatcccctttgctttctgggccagataccatcagtacattctgaatagcaaccgtgccaacaggagggccacgtggagagctggcgtcagcagtggcaccaatggaggggccagcaccagcgtcctagatggccccagcaccagctccaccatccggaccagaaatgctgccagagctggcgccagcttcttctcctggatccagcaccgttgacgaactgcagcgatcttactggccaagccagagcgcctcctctcagattccttctcgacacagcaccctaggcggcttcttcctgtcagtcggaggtggcatgcaagatgaagctctctttgctcttcctgctttcattttgtgcttttccttgtgttttcatgttttgggtatcagtgttacattaaagttgcaaaattaaaaaaaaaaaa

SEQ ID NO: 122605 - DNA, 2543 bp, Homo sapiens
caaggtgctggtacgcccggattacgggatggttcctggtgctgaggacggacgccattggagttcccgagaaggctgagctctcatctccctgggacccgcagcatggctgagggaagcttcagcgtgcaatcggaaagctacagtgttgaagacatggatgagggtagcgacgaagtcggggaggaagagatggttgaaggcaacgactatgaagaattcggtgcgtttggtggctatggcaccctcaccagctttgacatccatatcctcagagccttcggaagcttgggtccaggccttcgcatcttatcgaatgagccctgggaactggaaaaccctgtgctggcccagaccctggtggaggcattgcagctggatccggaaacacttgccaatgagacggccgcccgtgctgccaacgtagcccgcgccgccgcctccaaccgtgcggctcgggccgctgccgccgctgcccgtaccgccttcagtcaggtggtcgctagccaccgggtggccacgccgcaggtctcaggagaggatacccagcccacgacctacgccgccgaggctcaggggcccacccctgagccaccccttgcttctccgcagacctcccagatgttagtcaccagtaagatggctgcccccgaggctccggcaacctccgcacagtcccagacaggctccccggcccaggaggctgctactgagggccctagtagcgcctgtgctttctctcaggctccgtgtgccagggaggtggacgccaaccggcccagcacagccttcctgggccagaatgatgtcttcgatttcactcagccggcaggtgtcagtggcatggccttcccgcgccccaagagacctgccccagcccaagaggctgccacagagggccccagtgctgcctctggtgtgccccagacgggacctggcagggaggtggcagccacccggcccaagaccaccaagtcggggaaggcgctggccaagactcggtgggtggagcctcagaatgttgtggcagcagctgctgccaaggccaagatggccacgagcatccctgagccggagggtgcagctgctgccactgctcagcacagtgctgagccctgggccaggatgggaggcaagaggaccaagaagtccaagcacctggatgatgagtatgagagcagcgaggaggagagagagactcccgcggtcccacccacctggagagcatcacagccctcattgacggtgcgggctcagttggcccctcggcccccgatggccccgaggtcccagataccctcaaggcacgtactgtgcctgcccccccgcaacgtgacccttctgcaggagagggcaaataagttggtgaaatacctgatgattaaggactacaagaagatccccatcaagcgcgcagacatgctgaaggatgtcatcagagaatatgatgaacatttccctgagatcattgaacgagcaacgtacaccctggaaaagaagtttgggatccacctgaaggagatcgacaaggaagaacacctgtatattcttgtctgcacacgggactcctcagctcgcctccttggaaaaaccaaggacactcccaggctgagtctcctcttggtgattctgggcgtcatcttcatgaatggcaaccgtgccagcgaggctgtcctctgggaggcactacgcaagatgggactgcgccctggggtgaggcacccattcctcggcgatctgaggaagctcatcacagatgactttgtgaagcagaagtacctggaatacaagaagatccccaacagcaacccacctgagtatgaattcctctggggcctgcgagcccgccatgagaccagcaagatgagggtcctgagattcatcgcccagaatcagaaccgagacccccgggaatggaaggctcatttcttggaggctgtggatgatgctttcaagacaatggatgtggatatggccgaggaacatgccagggcccagatgagggcccagatgaatatcggggatgaagcgctgattggacggtggagctgggatgacatacaagtcgagctcctgacctgggatgaggacggagattttggcgatgcctgggccaggatcccctttgctttctgggccagataccatcagtacattctgaatagcaaccgtgccaacaggagggccacgtggagagctggcgtcagcagtggcaccaatggaggggccagcaccagcgtcctagatggccccagcaccagctccaccatccggaccagaaatgctgccagagctggcgccagcttcttctcctggatccagcaccgttgacgaactgcagcgatcttactggccaagccagagcgcctcctctcagattccttctcgacacagcaccctaggcggcttcttcctgtcagtcggaggtggcatgcaagatgaagctctctttgctcttcctgctttcattttgtgcttttccttgtgttttcatgttttgggtatcagtgttacattaaagttgcaaaattaaaaaaaaaaaa

SEQ ID NO: 122606 - DNA, 2490 bp, Homo sapiens
tgctggtaccggtccgggaagtatgggatcgccattggagttcccgagaagcatggctgagggaagcttcagcgtgcaatcggaaagctacagtgttgaagacatggatgagggtagcgacgaagtcggggaggaagagatggttgaaggcaacgactatgaagaattcggtgcgtttggtggctatggcaccctcaccagctttgacatccatatcctcagagccttcggaagcttgggtccaggccttcgcatcttatcgaatgagccctgggaactggaaaaccctgtgctggcccagaccctggtggaggcattgcagctggatccggaaacacttgccaatgagacggccgcccgtgctgccaacgtagcccgcgccgccgcctccaaccgtgcggctcgggccgctgccgccgctgcccgtaccgccttcagtcaggtggtcgctagccaccgggtggccacgccgcaggtctcaggagaggatacccagcccacgacctacgccgccgaggctcaggggcccacccctgagccaccccttgcttctccgcagacctcccagatgttagtcaccagtaagatggctgcccccgaggctccggcaacctccgcacagtcccagacaggctccccggcccaggaggctgctactgagggccctagtagcgcctgtgctttctctcaggctccgtgtgccagggaggtggacgccaaccggcccagcacagccttcctgggccagaatgatgtcttcgatttcactcagccggcaggtgtcagtggcatggccttcccgcgccccaagagacctgccccagcccaagaggctgccacagagggccccagtgctgcctctggtgtgccccagacgggacctggcagggaggtggcagccacccggcccaagaccaccaagtcggggaaggcgctggccaagactcggtgggtggagcctcagaatgttgtggcagcagctgctgccaaggccaagatggccacgagcatccctgagccggagggtgcagctgctgccactgctcagcacagtgctgagccctgggccaggatgggaggcaagaggaccaagaagtccaagcacctggatgatgagtatgagagcagcgaggaggagagagagactcccgcggtcccacccacctggagagcatcacagccctcattgacggtgcgggctcagttggcccctcggcccccgatggccccgaggtcccagataccctcaaggcacgtactgtgcctgcccccccgcaacgtgacccttctgcaggagagggcaaataagttggtgaaatacctgatgattaaggactacaagaagatccccatcaagcgcgcagacatgctgaaggatgtcatcagagaatatgatgaacatttccctgagatcattgaacgagcaacgtacaccctggaaaagaagtttgggatccacctgaaggagatcgacaaggaagaacacctgtatattcttgtctgcacacgggactcctcagctcgcctccttggaaaaaccaaggacactcccaggctgagtctcctcttggtgattctgggcgtcatcttcatgaatggcaaccgtgccagcgaggctgtcctctgggaggcactacgcaagatgggactgcgccctggggtgaggcacccattcctcggcgatctgaggaagctcatcacagatgactttgtgaagcagaagtacctggaatacaagaagatccccaacagcaacccacctgagtatgaattcctctggggcctgcgagcccgccatgagaccagcaagatgagggtcctgagattcatcgcccagaatcagaaccgagacccccgggaatggaaggctcatttcttggaggctgtggatgatgctttcaagacaatggatgtggatatggccgaggaacatgccagggcccagatgagggcccagatgaatatcggggatgaagcgctgattggacggtggagctgggatgacatacaagtcgagctcctgacctgggatgaggacggagattttggcgatgcctgggccaggatcccctttgctttctgggccagataccatcagtacattctgaatagcaaccgtgccaacaggagggccacgtggagagctggcgtcagcagtggcaccaatggaggggccagcaccagcgtcctagatggccccagcaccagctccaccatccggaccagaaatgctgccagagctggcgccagcttcttctcctggatccagcaccgttgacgaactgcagcgatcttactggccaagccagagcgcctcctctcagattccttctcgacacagcaccctaggcggcttcttcctgtcagtcggaggtggcatgcaagatgaagctctctttgctcttcctgctttcattttgtgcttttccttgtgttttcatgttttgggtatcagtgttacattaaagttgcaaaattaaaaaaaaaaaa

SEQ ID NO: 122607 - DNA, 2432 bp, Homo sapiens
caaggtgctggtacgcccggattacgggatggttcctggtgctgaggacggacgccattggagttcccgagaagctgcttcaccctccctctcaggctgagctctcatctccctgggacccgcagcatggctgagggaagcttcagcgtgcaatcggaaagctacagtgttgaagacatggatgagggtagcgacgaagtcggggaggaagagatggttgaaggcaacgactatgaagaattcggtgcgtttggtggctatggcaccctcaccagctttgacatccatatcctcagagccttcggaagcttgggtccaggccttcgcatcttatcgaatgagccctgggaactggaaaaccctgtgctggcccagaccctggtggaggcattgcagctggatccggaaacacttgccaatgagacggccgcccgtgctgccaacgtagcccgcgccgccgcctccaaccgtgcggctcgggccgctgccgccgctgcccgtaccgccttcagtcaggtggtcgctagccaccgggtggccacgccgcaggtctcaggagaggatacccagcccacgacctacgccgccgaggctcaggggcccacccctgagccaccccttgcttctccgcagacctcccagatgttagtcaccagtaagatggctgcccccgaggctccggcaacctccgcacagtcccagacaggctccccggcccaggaggctgctactgagggccctagtagcgcctgtgctttctctcaggctccgtgtgccagggaggtggacgccaaccggcccagcacagccttcctgggccagaatgatgtcttcgatttcactcagccggcaggtgtcagtggcatggccttcccgcgccccaagagacctgccccagcccaagaggctgccacagagggccccagtgctgcctctggtgtgccccagacgggacctggcagggaggtggcagccacccggcccaagaccaccaagtcggggaaggcgctggccaagactcggtgggtggagcctcagaatgttgtggcagcagctgctgccaaggccaagatggccacgagcatccctgagccggagggtgcagctgctgccactgctcagcacagtgctgagccctgggccaggatgggaggcaagaggaccaagaagtccaagcacctggatgatgagtatgagagcagcgaggaggagagagagactcccgcggtcccacccacctggagagcatcacagccctcattgacggtgcgggctcagttggcccctcggcccccgatggccccgaggtcccagataccctcaaggcacgtactgtgcctgcccccccgcaacgtgacccttctgcaggagagggcaaataagttggtgaaatacctgatgattaaggactacaagaagatccccatcaagcgcgcagacatgctgaaggatgtcatcagagaatatgatgaacatttccctgagatcattgaacgagcaacgtacaccctggaaaagaagtttgggatccacctgaaggagatcgacaaggaagaacacctgtatattcttgtctgcacacgggactcctcagctcgcctccttggaaaaaccaaggacactcccaggctgagtctcctcttggtgattctgggcgtcatcttcatgaatggcaaccgtgccagcgaggctgtcctctgggaggcactacgcaagatgggactgcgccctggggtgaggcacccattcctcggcgatctgaggaagctcatcacagatgactttgtgaagcagaagtacctggaatacaagaagatccccaacagcaacccacctgagtatgaattcctctggggcctgcgagcccgccatgagaccagcaagatgagggtcctgagattcatcgcccagaatcagaaccgagacccccgggaatggaaggctcatttcttggaggctgtggatgatgctttcaagacaatggatgtggatatggccgaggaacatgccagggcccagatgagggcccagatgaatatcggggatgaagcgctgattggacggtggagctgggatgacatacaagtcgagctcctgacctgggatgaggacggagattttggcgatgcctgggccaggatcccctttgctttctgggccagataccatcagtacattctgaatagcaaccgtgccaacaggagggccacgcaccgttgacgaactgcagcgatcttactggccaagccagagcgcctcctctcagattccttctcgacacagcaccctaggcggcttcttcctgtcagtcggaggtggcatgcaagatgaagctctctttgctcttcctgctttcattttgtgcttttccttgtgttttcatgttttgggtatcagtgttacattaaagttgcaaaattaaaaaaaaaaaa

SEQ ID NO: 122608 - DNA, 2515 bp, Homo sapiens
caaggtgctggtacgcccggattacgggatggttcctggtgctgaggacggacgccattggagttcccgagaagctgcttcaccctccctctcaggctgagctctcatctccctgggacccgcagcatggctgagggaagcttcagcgtgcaatcggaaagctacagtgttgaagacatggatgagggtagcgacgaagtcggggaggaagagatggttgaaggcaacgactatgaagaattcggtgcgtttggtggctatggcaccctcaccagctttgacatccatatcctcagagccttcggaagcttgggtccaggccttcgcatcttatcgaatgagccctgggaactggaaaaccctgtgctggcccagaccctggtggaggcattgcagctggatccggaaacacttgccaatgagacggccgcccgtgctgccaacgtagcccgcgccgccgcctccaaccgtgcggctcgggccgctgccgccgctgcccgtaccgccttcagtcaggtggtcgctagccaccgggtggccacgccgcaggtctcaggagaggatacccagcccacgacctacgccgccgaggctcaggggcccacccctgagccaccccttgcttctccgcagacctcccagatgttagtcaccagtaagatggctgcccccgaggctccggcaacctccgcacagtcccagacaggctccccggcccaggaggctgctactgagggccctagtagcgcctgtgctttctctcaggctccgtgtgccagggaggtggacgccaaccggcccagcacagccttcctgggccagaatgatgtcttcgatttcactcagccggcaggtgtcagtggcatggccttcccgcgccccaagagacctgccccagcccaagaggctgccacagagggccccagtgctgcctctggtgtgccccagacgggacctggcagggaggtggcagccacccggcccaagaccaccaagtcggggaaggcgctggccaagactcggtgggtggagcctcagaatgttgtggcagcagctgctgccaaggccaagatggccacgagcatccctgagccggagggtgcagctgctgccactgctcagcacagtgctgagccctgggccaggatgggaggcaagaggaccaagaagtccaagcacctggatgatgagtatgagagcagcgaggaggagagagagactcccgcggtcccacccacctggagagcatcacagccctcattgacggtgcgggctcagttggcccctcggcccccgatggccccgaggtcccagataccctcaaggcacgtactgtgcctgcccccccgcaacgtgacccttctgcaggagagggcaaataagttggtgaaatacctgatgattaaggactacaagaagatccccatcaagcgcgcagacatgctgaaggatgtcatcagagaatatgatgaacatttccctgagatcattgaacgagcaacgtacaccctggaaaagaagtttgggatccacctgaaggagatcgacaaggaagaacacctgtatattcttgtctgcacacgggactcctcagctcgcctccttggaaaaaccaaggacactcccaggctgagtctcctcttggtgattctgggcgtcatcttcatgaatggcaaccgtgccagcgaggctgtcctctgggaggcactacgcaagatgggactgcgccctggggtgaggcacccattcctcggcgatctgaggaagctcatcacagatgactttgtgaagcagaagtacctggaatacaagaagatccccaacagcaacccacctgagtatgaattcctctggggcctgcgagcccgccatgagaccagcaagatgagggtcctgagattcatcgcccagaatcagaaccgagacccccgggaatggaaggctcatttcttggaggctgtggatgatgctttcaagacaatggatgtggatatggccgaggaacatgccagggcccagatgagggcccagatgaatatcggggatgaagcgctgattggacggtggagctgggatgacatacaagtcgagctcctgacctgggatgaggacggagattttggcgatgcctgggccaggatcccctttgctttctgggccagataccatcagtacattctgaatagcaaccgtgccaacaggagggccacgtggagagctggcgtcagcagtggcaccaatggaggggccagcaccagcgtcctagatggccccagcaccagctccaccatccgcaccgttgacgaactgcagcgatcttactggccaagccagagcgcctcctctcagattccttctcgacacagcaccctaggcggcttcttcctgtcagtcggaggtggcatgcaagatgaagctctctttgctcttcctgctttcattttgtgcttttccttgtgttttcatgttttgggtatcagtgttacattaaagttgcaaaattaaaaaaaaaaaa

SEQ ID NO: 122609 - DNA, 2412 bp, Homo sapiens
caaggtgctggtacgcccggattacgggatggttcctggtgctgaggacggacgccattggagttcccgagaagctgcttcaccctccctctcaggctgagctctcatctccctgggacccgcagcatggctgagggaagcttcagcgtgcaatcggaaagctacagtgttgaagacatggatgagggtagcgacgaagtcggggaggaagagatggttgaaggcaacgactatgaagaattcggtgcgtttggtggctatggcaccctcaccagctttgacatccatatcctcagagccttcggaagcttgggtccaggccttcgcatcttatcgaatgagccctgggaactggaaaaccctgtgctggcccagaccctggtggaggcattgcagctggatccggaaacacttgccaatgagacggccgcccgtgctgccaacgtagcccgcgccgccgcctccaaccgtgcggctcgggccgctgccgccgctgcccgtaccgccttcagtcaggtggtcgctagccaccgggtggccacgccgcaggtctcaggagaggatacccagcccacgacctacgccgccgaggctcaggggcccacccctgagccaccccttgcttctccgcagacctcccagatgttagtcaccagtaagatggctgcccccgaggctccggcaacctccgcacagtcccagacaggctccccggcccaggaggctgctactgagggccctagtagcgcctgtgctttctctcaggctccgtgtgccagggaggtggacgccaaccggcccagcacagccttcctgggccagaatgatgtcttcgatttcactcagccggcaggtgtcagtggcatggccttcccgcgccccaagagacctgccccagcccaagaggctgccacagagggccccagtgctgcctctggtgtgccccagacgggacctggcagggaggtggcagccacccggcccaagaccaccaagtcggggaaggcgctggccaagactcggtgggtggagcctcagaatgttgtggcagcagctgctgccaaggccaagatggccacgagcatccctgagccggagggtgcagctgctgccactgctcagcacagtgctgagccctgggccaggatgggaggcaagaggaccaagaagtccaagcacctggatgatgagtatgagagcagcgaggaggagagagagactcccgcggtcccacccacctggagagcatcacagccctcattgacggtgcgggctcagttggcccctcggcccccgatggccccgaggtcccagataccctcaaggcacgtactgtgcctgcccccccgcaacgtgacccttctgcaggagagggcaaataagttggtgaaatacctgatgattaaggactacaagaagatccccatcaagcgcgcagacatgctgaaggatgtcatcagagaatatgatgaacatttccctgagatcattgaacgagcaacgtacaccctggaaaagaagtttgggatccacctgaaggagatcgacaaggaagaacacctgtatattcttgtctgcacacgggactcctcagctcgcctccttggaaaaaccaaggacactcccaggctgagtctcctcttggtgattctgggcgtcatcttcatgaatggcaaccgtgccagcgaggctgtcctctgggaggcactacgcaagatgggactgcgccctggggtgaggcacccattcctcggcgatctgaggaagctcatcacagatgactttgtgaagcagaagtacctggaatacaagaagatccccaacagcaacccacctgagtatgaattcctctggggcctgcgagcccgccatgagaccagcaagatgagggtcctgagattcatcgcccagaatcagaaccgagacccccgggaatggaaggctcatttcttggaggctaatggatgtggatatggccgaggaacatgccagggcccagatgagggcccagatgaatatcggggatgaagcgctgattggacggtggagctgggatgacatacaagtcgagctcctgacctgggatgaggacggagattttggcgatgcctgggccaggatcccctttgctttctgggccagataccatcagtacattctgaatagcaaccgtgccaacaggagggccacgcaccgttgacgaactgcagcgatcttactggccaagccagagcgcctcctctcagattccttctcgacacagcaccctaggcggcttcttcctgtcagtcggaggtggcatgcaagatgaagctctctttgctcttcctgctttcattttgtgcttttccttgtgttttcatgttttgggtatcagtgttacattaaagttgcaaaattaaaaaaaaaaaa

SEQ ID NO: 122610 - DNA, 883 bp, Homo sapiens
caaggtgctggtacgcccggattacgggatggttcctggtgctgaggacggacgccattggagttcccgagaagctgcttcaccctccctctcaggctgagctctcatctccctgggacccgcagcatggctgagggaagcttcagcgtgcaatcggaaagctacagtgttgaagacatggatgagggtagcgacgaagtcggggaggaagagatggttgaaggcaacgactatgaagaattcggtgcgtttggtggctatggcaccctcaccagctttgacatccatatcctcagagccttcggaagcttgggtccaggccttcgcatcttatcgaatgagccctgggaactggaaaaccctgtgctggcccagaccctggtggaggcattgcagctggatccggaaacacttgccaatgagacggccgcccgtgctgccaacgtagcccgcgccgccgcctccaaccgtgcggctcgggccgctgccgccgctgcccgtaccgccttcagtcaggtggtcgctagccaccgggtggccacgccgcaggtctcaggagaggatacccagcccacgacctacgccgccgaggctcaggggcccacccctgagccaccccttgcttctccgcagacctcccagatgttagtcaccagtaagagcaccgttgacgaactgcagcgatcttactggccaagccagagcgcctcctctcagattccttctcgacacagcaccctaggcggcttcttcctgtcagtcggaggtggcatgcaagatgaagctctctttgctcttcctgctttcattttgtgcttttccttgtgttttcatgttttgggtatcagtgttacattaaagttgcaaaattaaaaaaaaaaaa

SEQ ID NO: 122611 - DNA, 515 bp, Homo sapiens
caaggtgctggtacgcccggattacgggatggttcctggtgctgaggacggacgccattggagttcccgagaagctgcttcaccctccctctcaggctgagctctcatctccctgggacccgcagcatggctgagggaagcttcagcgtgcaatcggaaagctacagtgttgaagacatggatgagggtagcgacgaagtcggggaggaagagatggttgaaggcaacgactatgaagaattcggtgcgtttggtggctatggcaccctcaccagctttgacatccatatcctgcaccgttgacgaactgcagcgatcttactggccaagccagagcgcctcctctcagattccttctcgacacagcaccctaggcggcttcttcctgtcagtcggaggtggcatgcaagatgaagctctctttgctcttcctgctttcattttgtgcttttccttgtgttttcatgttttgggtatcagtgttacattaaagttgcaaaattaaaaaaaaaaaa

SEQ ID NO: 122612 - DNA, 331 bp, Homo sapiens
actgcatccaacgccgctgactgcatccaacgccgctgactgcatccaacgccgctgactgcatccaacgccgctgactgcatccaacgccgctgactgcatccaacgcgcaccgttgacgaactgcagcgatcttactggccaagccagagcgcctcctctcagattccttctcgacacagcaccctaggcggcttcttcctgtcagtcggaggtggcatgcaagatgaagctctctttgctcttcctgctttcattttgtgcttttccttgtgttttcatgttttgggtatcagtgttacattaaagttgcaaaattaaaaaaaaaaaa

SEQ ID NO: 122613 - DNA, 2629 bp, Homo sapiens
ggtccgggctgctgtgctggcagcagtaggcgagggcgcggctgcggggttcctggtgctgaggacggacgccattggagttcccgagaagctgcttcaccctccctctcaggctgagctctcatctccctgggacccgcagcatggctgagggaagcttcagcgtgcaatcggaaagctacagtgttgaagacatggatgagggtagcgacgaagtcggggaggaagagatggttgaaggcaacgactatgaagaattcggtgcgtttggtggctatggcaccctcaccagctttgacatccatatcctcagagccttcggaagcttgggtccaggccttcgcatcttatcgaatgagccctgggaactggaaaaccctgtgctggcccagaccctggtggaggcattgcagctggatccggaaacacttgccaatgagacggccgcccgtgctgccaacgtagcccgcgccgccgcctccaaccgtgcggctcgggccgctgccgccgctgcccgtaccgccttcagtcaggtggtcgctagccaccgggtggccacgccgcaggtctcaggagaggatacccagcccacgacctacgccgccgaggctcaggggcccacccctgagccaccccttgcttctccgcagacctcccagatgttagtcaccagtaagatggctgcccccgaggctccggcaacctccgcacagtcccagacaggctccccggcccaggaggctgctactgagggccctagtagcgcctgtgctttctctcaggctccgtgtgccagggaggtggacgccaaccggcccagcacagccttcctgggccagaatgatgtcttcgatttcactcagccggcaggtgtcagtggcatggccttcccgcgccccaagagacctgccccagcccaagaggctgccacagagggccccagtgctgcctctggtgtgccccagacgggacctggcagggaggtggcagccacccggcccaagaccaccaagtcggggaaggcgctggccaagactcggtgggtggagcctcagaatgttgtggcagcagctgctgccaaggccaagatggccacgagcatccctgagccggagggtgcagctgctgccactgctcagcacagtgctgagccctgggccaggatgggaggcaagaggaccaagaagtccaagcacctggatgatgagtatgagagcagcgaggaggagagagagactcccgcggtcccacccacctggagagcatcacagccctcattgacggtgcgggctcagttggcccctcggcccccgatggccccgaggtcccagataccctcaaggcacgtactgtgcctgcccccccgcaacgtgacccttctgcaggagagggcaaataagttggtgaaatacctgatgattaaggactacaagaagatccccatcaagcgcgcagacatgctgaaggatgtcatcagagaatatgatgaacatttccctgagatcattgaacgagcaacgtacaccctggaaaagaagtttgggatccacctgaaggagatcgacaaggaagaacacctgtatattcttgtctgcacacgggactcctcagctcgcctccttggaaaaaccaaggacactcccaggctgagtctcctcttggtgattctgggcgtcatcttcatgaatggcaaccgtgccagcgaggctgtcctctgggaggcactacgcaagatgggactgcgccctggggtgaggcacccattcctcggcgatctgaggaagctcatcacagatgactttgtgaagcagaagaacccggagctcagagaggagacgcctctgagcatggctcccagctggtacctggaatacaagaagatccccaacagcaacccacctgagtatgaattcctctggggcctgcgagcccgccatgagaccagcaagatgagggtcctgagattcatcgcccagaatcagaaccgagacccccgggaatggaaggctcatttcttggaggctgtggatgatgctttcaagacaatggatgtggatatggccgaggaacatgccagggcccagatgagggcccagatgaatatcggggatgaagcgctgattggacggtggagctgggatgacatacaagtcgagctcctgacctgggatgaggacggagattttggcgatgcctgggccaggatcccctttgctttctgggccagataccatcagtacattctgaatagcaaccgtgccaacaggagggccacgtggagagctggcgtcagcagtggcaccaatggaggggccagcaccagcgtcctagatggccccagcaccagctccaccatccggaccagaaatgctgccagagctggcgccagcttcttctcctggatccagcaccgttgacgaactgcagcgatcttactggccaagccagagcgcctcctctcagattccttctcgacacagcaccctaggcggcttcttcctgtcagtcggaggtggcatgcaagatgaagctctctttgctcttcctgctttcattttgtgcttttccttgtgttttcatgttttgggtatcagtgttacattaaagttgcaaaattaaaaaaaaaaaa

SEQ ID NO: 122614 - DNA, 5311 bp, Homo sapiens
  misc_feature (2859)..(2859): n is a, c, g, or t
  misc_feature (3011)..(3011): n is a, c, g, or t
caaggtgctggtacgcccggattacgggatggttcctggtgctgaggacggacgccattggagttcccgagaagctgcttcaccctccctctcaggctgagctctcatctccctgggacccgcagcatggctgagggaagcttcagcgtgcaatcggaaagctacagtgttgaagacatggatgagggtagcgacgaagtcggggaggaagagatggttgaaggcaacgactatgaagaattcggtgcgtttggtggctatggcaccctcaccagctttgacatccatatcctcagagccttcggaagcttgggtccaggccttcgcatcttatcgaatgagccctgggaactggaaaaccctgtgctggcccagaccctggtggaggcattgcagctggatccggaaacacttgccaatgagacggccgcccgtgctgccaacgtagcccgcgccgccgcctccaaccgtgcggctcgggccgctgccgccgctgcccgtaccgccttcagtcaggtggtcgctagccaccgggtggccacgccgcaggtctcaggagaggatacccagcccacgacctacgccgccgaggctcaggggcccacccctgagccaccccttgcttctccgcagacctcccagatgttagtcaccagtaagatggctgcccccgaggctccggcaacctccgcacagtcccagacaggctccccggcccaggaggctgctactgagggccctagtagcgcctgtgctttctctcaggctccgtgtgccagggaggtggacgccaaccggcccagcacagccttcctgggccagaatgatgtcttcgatttcactcagccggcaggtgtcagtggcatggccttcccgcgccccaagagacctgccccagcccaagaggctgccacagagggccccagtgctgcctctggtgtgccccagacgggacctggcagggaggtggcagccacccggcccaagaccaccaagtcggggaaggcgctggccaagactcggtgggtggagcctcagaatgttgtggcagcagctgctgccaaggccaagatggccacgagcatccctgagccggagggtgcagctgctgccactgctcagcacagtgctgagccctgggccaggatgggaggcaagaggaccaagaagtccccctgccccctgccacctccacacccccttgctcctgtcctttccttctcctccctttcctgctcctctcctccctctcctctcccccttcttcctctcttctcctctttcccctccttctctcctcacctcccctctcctcccctcctctcctctcagctagtccatgtttctccaacacaagtttgctgagcatgttttcactccacgtagtccctaccctcaggactggtgggagaagaggctggctcagtgcctggcacttagtaagcacgcagcacatgccagccgctgctggtactgctctcatttccaagagcctgctacgggtgaggtgcgtgccgggtgctttggcacggggagcctggtagccctgggtctctcctctctcaaatgatacagtccaagcacctggatgatgagtatgagagcagcgaggaggagagagagactcccgcggtcccacccacctggagagcatcacagccctcattgacggtgcgggctcagttggcccctcggcccccgatggccccgaggtcccagataccctcaaggcacgtactgtgcctgcccccccgcaacgtgacccttctgcaggagagggcaaataagttggtgaaatacctgatgattaaggactacaagaagatccccatcaagcgcgcagacatgctgaaggatgtcatcagagaatatgatgaacatttccctgagatcattgaacgagcaacgtacaccctggaaaaggtgggtgcaggatgggagcagctctgtgggggaagagcgggcatgggggtgcggtgaccctgcagcccctcaaggcccagtctctggagccatctctcacctctccgactctgagcttccactgcactggcagtttgactcgtgcttcctgccctcggcttctctctctcatgctctctgagtgtctcgccgtctggccaggtgggtctcatcgcctctgccagcgtcagctcccacagcgaaggtcttccgtgtgctgtcttcttctgccctcgctcacgagtttggattccttgctgaggagcagttctaacccggaatcactgtctgccggcaggatgccagcatggggtttggatctcacactctgttttctcccccacgtagaagtttgggatccacctgaaggagatcgacaaggaagaacacctgtatattcttgtctgcacacgggactcctcagctcgcctccttggaaagtaagaaagggaaagcgggtcgtggccttcctcggtggtgtcccttccctgcccacaccccttcagtgaagcaggaagacggggcttgagtgcggcgcaccgctcccacacacagcgagggctgcctggtgactgctggatgaaaggaatgatagcctggggtgaggccttgctgccatcagttctccccaagctgctgccgggctttatccccaaagcttcggaggaaagtgcctcttcctcctgcctgcctggcctgggcctggcagagctggcctaggggagagctgcctcttcagtgtaggtgctgatgtggaaggggcaggaaaggtctggagccatctctgggcacacgtttgccatttgcagagcttcggctccctgcctcgccctgtcctctgcagaaccctgtcagggaagtgttagtacccatgttttatagaggaggcgattaagnctcaggcggaggtgcgaatggtctgtcagcagctagtgaactgtgcctgtcctgggaagagttcccctcaagctgggaaacctgagagaggctagttgggagagcctggtggtgtctctcaggcaaatagctgctaaacaggatttctcttnccacacctttagaaccaaggacactcccaggctgagtctcctcttggtgattctgggcgtcatcttcatgaatggcaaccgtgccagcgaggctgtcctctgggaggcactacgcaagatgggactgcgccctgggtatgattggcctctccagctcctcccctcggtgctatcctctggccaaagaggtcctgggattgcaatagcctggtggtctggcgcaagggcgtggggtgcctgggctcggtagagagcaaaggatctcaccagggcggatggggaagcggtgctggacgctgctcagccctctctctgctctgtggccccagatgacatctaagagagacagtcagagtcagggattccatcaaatccctacctggggcgtccctgaccaacagtcctctggcctctgctgcatgcccaggcctccacagcgactccccgggggctgggaagtcatagtcatgctagggagggcccctgccaccgtctctgctcatggattcctttccttgccctcagggtgaggcacccattcctcggcgatctgaggaagctcatcacagatgactttgtgaagcagaagtaagtatcacctgagctaactgcggctctcactcgagcatcctttgtgtgctggtctggctgagaaagcagttccctatcccaaatcttcaactggagggatgggtgcctctgacctgggagtgagtggcagtggggggtatgcgagtgtgtggggaccgaaggccagggcggtcttgggaaaagggagctcacgtcacctgagaacacggtgtggggtgtgaaaacggccgccatcaccttgagcacctgccctgtagactgacacaagagttccccctggtttacacctaaggaacccggagctcagagaggagacgcctctgagcatggctcccagctggtaagggcctcagcccaactctcctgattttcaggccaggggccaccctctccccgtccctggaggacttgccaacgcacaggcgcgcatgcacaccaacaaagggtcaggacttgaggaggatgcctggagcacgcttctcctggctgactgtttcttcctctccagtcgtttcctctggtgggcctctccagggctccgccggggtgtggccaagaccctcgaggtggggtgtgctcagagcagggggcctgaagaatggctcctctgtttacaacacacccaacaggaagctggggtcatcgtgatgaggggcacaaacttgtggcctccctacagacaaatgccctacatgtggaccccctgcacctccgcatggcttccggggaggaccaatggcaaaaggctttgaaggcctcacttttgcaggcagaagtcctgggagtgggtttgggaatgagtgaagggctggaggggcaggacagtcctcttccaggagctgagctgcggcatcgggttgaggaggggccccctggaacccatccgttcagcaacaggtctgcttggctagcagcaaagtttactttcctctcatgccaaggtacctggaatacaagaagatccccaacagcaacccacctgagtatgaattcctctggggcctgcgagcccgccatgagaccagcaagatgagggtcctgagattcatcgcccagaatcagaaccgagacccccgggaatggaaggctcatttcttggaggctgtggatgatgctttcaagacaatggatgtggatatggccgaggaacatgccagggcccagatgagggcccagatgaatatcggggatgaagcgctgattggacggtggagctgggatgacatacaagtcgagctcctgacctgggatgaggacggagattttggcgatgcctgggccaggatcccctttgctttctgggccagataccatcagtacattctgaatagcaaccgtgccaacaggagggccacgtggagagctggcgtcagcagtggcaccaatggaggggccagcaccagcgtcctagatggccccagcaccagctccaccatccggaccagaaatgctgccagagctggcgccagcttcttctcctggatccagcaccgttgacgaactgcagcgatcttactggccaagccagagcgcctcctctcagattccttctcgacacagcaccctaggcggcttcttcctgtcagtcggaggtggcatgcaagatgaagctctctttgctcttcctgctttcattttgtgcttttccttgtgttttcatgttttgggtatcagtgttacattaaagttgcaaaattaaaaaaaaaaaa

SEQ ID NO: 122615 - DNA, 2500 bp, Homo sapiens
caaggtgctggtacgcccggattacgggatggttcctggtgctgaggacggacgccattggagttcccgagaaggctgagctctcatctccctgggacccgcagcatggctgagggaagcttcagcgtgcaatcggaaagctacagtgttgaagacatggatgagggtagcgacgaagtcggggaggaagagatggttgaaggcaacgactatgaagaattcggtgcgtttggtggctatggcaccctcaccagctttgacatccatatcctcagagccttcggaagcttgggtccaggccttcgcatcttatcgaatgagccctgggaactggaaaaccctgtgctggcccagaccctggtggaggcattgcagctggatccggaaacacttgccaatgagacggccgcccgtgctgccaacgtagcccgcgccgccgcctccaaccgtgcggctcgggccgctgccgccgctgcccgtaccgccttcagtcaggtggtcgctagccaccgggtggccacgccgcaggtctcaggagaggatacccaccaccccttgcttctccgcagacctcccagatgttagtcaccagtaagatggctgcccccgaggctccggcaacctccgcacagtcccagacaggctccccggcccaggaggctgctactgagggccctagtagcgcctgtgctttctctcaggctccgtgtgccagggaggtggacgccaaccggcccagcacagccttcctgggccagaatgatgtcttcgatttcactcagccggcaggtgtcagtggcatggccttcccgcgccccaagagacctgccccagcccaagaggctgccacagagggccccagtgctgcctctggtgtgccccagacgggacctggcagggaggtggcagccacccggcccaagaccaccaagtcggggaaggcgctggccaagactcggtgggtggagcctcagaatgttgtggcagcagctgctgccaaggccaagatggccacgagcatccctgagccggagggtgcagctgctgccactgctcagcacagtgctgagccctgggccaggatgggaggcaagaggaccaagaagtccaagcacctggatgatgagtatgagagcagcgaggaggagagagagactcccgcggtcccacccacctggagagcatcacagccctcattgacggtgcgggctcagttggcccctcggcccccgatggccccgaggtcccagataccctcaaggcacgtactgtgcctgcccccccgcaacgtgacccttctgcaggagagggcaaataagttggtgaaatacctgatgattaaggactacaagaagatccccatcaagcgcgcagacatgctgaaggatgtcatcagagaatatgatgaacatttccctgagatcattgaacgagcaacgtacaccctggaaaagaagtttgggatccacctgaaggagatcgacaaggaagaacacctgtatattcttgtctgcacacgggactcctcagctcgcctccttggaaaaaccaaggacactcccaggctgagtctcctcttggtgattctgggcgtcatcttcatgaatggcaaccgtgccagcgaggctgtcctctgggaggcactacgcaagatgggactgcgccctggggtgaggcacccattcctcggcgatctgaggaagctcatcacagatgactttgtgaagcagaagtacctggaatacaagaagatccccaacagcaacccacctgagtatgaattcctctggggcctgcgagcccgccatgagaccagcaagatgagggtcctgagattcatcgcccagaatcagaaccgagacccccgggaatggaaggctcatttcttggaggctgtggatgatgctttcaagacaatggatgtggatatggccgaggaacatgccagggcccagatgagggcccagatgaatatcggggatgaagcgctgattggacggtggagctgggatgacatacaagtcgagctcctgacctgggatgaggacggagattttggcgatgcctgggccaggatcccctttgctttctgggccagataccatcagtacattctgaatagcaaccgtgccaacaggagggccacgtggagagctggcgtcagcagtggcaccaatggaggggccagcaccagcgtcctagatggccccagcaccagctccaccatccggaccagaaatgctgccagagctggcgccagcttcttctcctggatccagcaccgttgacgaactgcagcgatcttactggccaagccagagcgcctcctctcagattccttctcgacacagcaccctaggcggcttcttcctgtcagtcggaggtggcatgcaagatgaagctctctttgctcttcctgctttcattttgtgcttttccttgtgttttcatgttttgggtatcagtgttacattaaagttgcaaaattaaaaaaaaaaaa

SEQ ID NO: 122616 - DNA, 2421 bp, Homo sapiens
caaggtgctggtacgcccggattacgggatggttcctggtgctgaggacggacgccattggagttcccgagaagctgcttcaccctccctctcaggctgagctctcatctccctgggacccgcagcatggctgagggaagcttcagcgtgcaatcggaaagctacagtgttgaagacatggatgagggtagcgacgaagtcggggaggaagagatggttgaaggcaacgactatgaagaattcggtgcgtttggtggctatggcaccctcaccagctttgacatccatatcctcagagccttcggaagcttgggtccaggccttcgcatcttatcgaatgagccctgggaactggaaaaccctgtgctggcccagaccctggtggaggcattgcagctggatccggaaacacttgccaatgagacggccgcccgtgctgccaacgtagcccgcgccgccgcctccaaccgtgcggctcgggccgctgccgccgctgcccgtaccgccttcagtcaggtggtcgctagccaccgggtggccacgccgcaggtctcaggagaggatacccagcccacgacctacgccgccgaggctcaggggcccacccctgagccaccccttgcttctccgcagacctcccagatgttagtcaccagtaagatggctgcccccgaggctccggcaacctccgcacagtcccagacaggctccccggcccaggaggctgctactgagggccctagtagcgcctgtgctttctctcaggctccgtgtgccagggaggtggacgccaaccggcccagcacagccttcctgggccagaatgatgtcttcgatttcactcagccggcaggtgtcagtggcatggccttcccgcgccccaagagacctgccccagcccaagaggctgccacagagggccccagtgctgcctctggtgtgccccagacgggacctggcagggaggtggcagccacccggcccaagaccaccaagtcggggaaggcgctggccaagactcggtgggtggagcctcagaatgttgtggcagcagctgctgccaaggccaagatggccacgagcatccctgagccggagggtgcagctgctgccactgctcagcacagtgctgagccctgggccaggatgggaggcaagaggaccaagaagtccaagcacctggatgatgagtatgagagcagcgaggaggagagagagactcccgcggtcccacccacctggagagcatcacagccctcattgacggtgcgggctcagttggcccctcggcccccgatggccccgaggtcccagataccctcaaggcacgtactgtgcctgcccccccgcaacgtgacccttctgcaggagagggcaaataagttggtgaaatacctgatgattaaggactacaagaagatccccatcaagcgcgcagacatgctgaaggatgtcatcagagaatatgatgaacatttccctgagatcattgaacgagcaacgtacaccctggaaaagaagtttgggatccacctgaaggagatcgacaaggaagaacacctgtatattcttgtctgcacacgggactcctcagctcgcctccttggaaaaaccaaggacactcccaggctgagtctcctcttggtgattctgggcgtcatcttcatgaatggcaaccgtgccagcgaggctgtcctctgggaggcactacgcaagatgggactgcgccctggggtgaggcacccattcctcggcgatctgaggaagctcatcacagatgactttgtgaagcagaagtacctggaatacaagaagatccccaacagcaacccacctgagtatgaattcctctggggcctgcgagcccgccatgagaccagcaagatgagggtcctgagattcatcgcccagaatcagaaccgagacccccgggaatggaaggctcatttcttggaggctgtggatgatgctttcaagacaatggatgtggatatggccgaggaacatgccagggcccagataccatcagtacattctgaatagcaaccgtgccaacaggagggccacgtggagagctggcgtcagcagtggcaccaatggaggggccagcaccagcgtcctagatggccccagcaccagctccaccatccggaccagaaatgctgccagagctggcgccagcttcttctcctggatccagcaccgttgacgaactgcagcgatcttactggccaagccagagcgcctcctctcagattccttctcgacacagcaccctaggcggcttcttcctgtcagtcggaggtggcatgcaagatgaagctctctttgctcttcctgctttcattttgtgcttttccttgtgttttcatgttttgggtatcagtgttacattaaagttgcaaaattaaaaaaaaaaaa

SEQ ID NO: 122617 - DNA, 2234 bp, Homo sapiens
caaggtgctggtacgcccggattacgggatggttcctggtgctgaggacggacgccattggagttcccgagaagctgcttcaccctccctctcaggctgagctctcatctccctgggacccgcagcatggctgagggaagcttcagcgtgcaatcggaaagctacagtgttgaagacatggatgagggtagcgacgaagtcggggaggaagagatggttgaaggcaacgactatgaagaattcggtgcgtttggtggctatggcaccctcaccagctttgacatccatatcctcagagccttcggaagcttgggtccaggccttcgcatcttatcgaatgagccctgggaactggaaaaccctgtgctggcccagaccctggtggaggcattgcagctggatccggaaacacttgccaatgagacggccgcccgtgctgccaacgtagcccgcgccgccgcctccaaccgtgcggctcgggccgctgccgccgctgcccgtaccgccttcagtcaggtggtcgctagccaccgggtggccacgccgcaggtctcaggagaggatacccagcccacgacctacgccgccgaggctcaggggcccacccctgagccaccccttgcttctccgcagacctcccagatgttagtcaccagtaagatggctgcccccgaggctccggcaacctccgcacagtcccagacaggctccccggcccaggaggctgctactgagggccctagtagcgcctgtgctttctctcaggctccgtgtgccagggaggtggacgccaaccggcccagcacagccttcctgggccagaatgatgtcttcgatttcactcagccggcaggtgtcagtggcatggccttcccgcgccccaagagacctgccccagcccaagaggctgccacagagggccccagtgctgcctctggtgtgccccagacgggacctggcagggaggtggcagccacccggcccaagaccaccaagtcggggaaggcgctggccaagactcggtgggtggagcctcagaatgttgtggcagcagctgctgccaaggccaagatggccacgagcatccctgagccggagggtgcagctgctgccactgctcagcacagtgctgagccctgggccaggatgggaggcaagaggaccaagaagtccaagcacctggatgatgagtatgagagcagcgaggaggagagagagactcccgcggtcccacccacctggagagcatcacagccctcattgacggtgcgggctcagttggcccctcggcccccgatggccccgaggtcccagataccctcaaggcacgtactgtgcctgcccccccgcaacgtgacccttctgcaggagagggcaaataagttggtgaaatacctgatgattaaggactacaagaagatccccatcaagcgcgcagacatgctgaaggatgtcatcagagaatatgatgaacatttccctgagatcattgaacgagcaacgtacaccctggaaaagaagtttgggatccacctgaaggagatcgacaaggaagaacacctgtatattcttgtctgcacacgggactcctcagctcgcctccttggaaaaaccaaggacactcccaggctgagtctcctcttggtgattctgggcgtcatcttcatgaatggcaaccgtgccagcgaggctgtcctctgggaggcactacgcaagatgggactgcgccctggggtgaggcacccattcctcggcgatctgaggaagctcatcacagatgactttgtgaagcagaagtaagtatcacctgagctaactgcggctctcactcgagcatcctttgtgtgctggtctggctgagaaagcagttccctatcccaaatcttcaactggagggatgggtgcctctgacctgggagtgagtggcagtggggggtatgcgagtgtgtggggaccgaaggccagggcggtcttgggaaaagggagctcacgtcacctgagaacacggtgtggggtgtgaaaacggccgccatcaccttgagcacctgccctgtagactgacacaagaattccttctcgacacagcaccctaggcggcttcttcctgtcagtcggaggtggcatgcaagatgaagctctctttgctcttcctgctttcattttgtgcttttccttgtgttttcatgttttgggtatcagtgttacattaaagttgcaaaattaaaaaaaaaaaa

SEQ ID NO: 122618 - DNA, 329 bp, Homo sapiens
ctatgattctgctggtcatggtgctttagaaagtagttggtctatggaatccttgtcaagcaatacagagagcacccagtgtcccaatatgcttgttgcccctggtagattataaactccttgaaggaaaaggttctgtctgcgtttcatgatctctcaagttgcaggctcagggcatggcatgtcagatgacagaaagtgagccctttaatctctctgggaagcttaataaagattttatcatcacttcctatcttccaaagcattctctacactgcatcattggtattttgccagagatgcaaaattcatcatgtccctcttccatt

SEQ ID NO: 122619 - DNA, 2593 bp, Homo sapiens
ataaaatggcaaaatccaacatgcaaaaacggcaattacttttgcactaacctgataataattttaataagaataaatggtacatatttaaactatataatttgatcagctttgatattcatattaacctgtaattgctcccaccatgccaattttgaaactgccaacatgttactgaatgtagaattgggaagagttgctgatagcatcctaatatattctgtttctaccatactgatacagtggccacgattacctcaagaatgtagaaaataaaatgtagtgaaatgattaggaagaagttgtttcttcacaatcatgacaatgaacgtgtcattccacaagttacctcattgtcctttaataattatctgcctataggcaactattgatttactttccattataatacattagttttcatttgctagaattttatatgattgaaaccataatgtatttactcttttttaatccctgggtatagtcacgtatttattttgagattcatcattatacctctatgagtagtttcttttttttgtattgctgagaagtatgatgttctgtggatataccagtattcgtttattcattcattcatttgttatggatattttgagtagttttttaaagtagtttgaggtataatggaacttaaagtgcttatatttaaaatgcatattttgatattttcatacatgcttacaccctggaacgcagtttccttctgtctttttagttcattctcaacatataaaattaattttcattgtgtaaaattactggtacaatgacatattttgtctcctgttacagctgtgttcaattacaaaaaaagatggaaaagactgttatgaagccagatgaacctttctccagtcttccttcactatttttttttccttcaccatttatcatttcatagtcatttatgtttcatcggtcctcatgtgtactagtgcgttattttacttatactcccggatatcatattatttaatgcatagcctcttcagaatgcaattttaaaatgtaaaggctcttttataaccccccaaaaaatcacacaaatatattttaaaatgtaaatattttatcgcttctgttttctcagttgtctaaaacaatgtgtttcttaaggaagatcatttttattcaggatccaaatgtatatttaatagctttcagtagttgtatctcataagtctgtaacctacaggttccatttacctttgttttcttatttcttgaagttgctgagtcattttttaattagaatttgctgtattctagatgtggcttattgaatctctaacattgtttaacttgtacactagatgttgatgaaatcggtgattgagattttgtcccagcagacaggtgtgtgatggcaacagtgaaataaatacaaaaccttctcccaacccagaaatcctctccacgaaggtagagacagaaaacgcttttattaagcattaaaccagaatgtgatgcacatcacagacaatccactaagaaattgcaaggtaagaaaaaagcctcactccttcatatggcctagcagatgtagcccattacacacgttttcaagataaacaacaacaagtcctcaaatacgaatttgacagcaccatttgtcacacatagttcatcctaacaggtgatgctctattaccttactggctttacctagaggaaaagcaaacatcatatctttatgacagaggataatgaggggagctgccttggggctgctggatgatacatcgggacaggacagtgcgagcttccagcaaggcagctctagttggagccctgatttctttccaaggtgaggagagggtgatgatagtatccttgggaaggggagtgaaaagtgctgagggactgtatttatagctgagggatttcctgggtgctgtgggtctcttgtctttgccactctgcctcaacactgaaactgtccattccctacttggaggctgcacccaaaacctccctctgccttcatgctctggcctccccctgcaagttaccaccctgggtcttggtgcttgcagcacttccggtgcctggctgccccaggccctctgctccctctgctgcctgggtttaatccctcctctgccactgcccagcatcaggactctgctggttttgcagcctcttggtacctcagttttatgtttgtggaataggagtgctcacagtactctctgggatcctggcaaaaggtgtggtaggcaggtggtaagcagggccgagcactatccccagcacctagtgagttgatgccttatcatttacctgatccaggcaggtcttaaggtacaagagaaagagaaatggggcttcttagaaccccctgaccccacagcttctacttggatggaatttttggaagaagcactggctgcagagtccagagatctcagtgtgaatttctgaaggactccttcccaaggaagtgaccttgagaaagtccccaacaacccctgtcaaggacttgactaacagcttctctaatgtttgtctccctttccaatttaagaacaaatggatgaaatcaagtatgtgtccctaaccaatg

SEQ ID NO: 122620 - DNA, 637 bp, Homo sapiens
tatcttattttgaaagccaaacatggaggcactcatataaaatgcagatatatatgtgtataaatatgtgtgtgtgtgtgtatatatatattatgtatatgccaatacataatacctatgtatgttttggcagtgagggagtaagttatatttgccaaataacttggtctcaagaaacatacaggtctcagtcctcaactgtatgaggttttaaagcattcagatagattcctcacattatctttttctttccaagatttaaagctgtcacagcaaatttattattagagaataaactttttcagtcagctctgtaaaaatgtagtaacagctctgtaataattcctgcagcatatttcctaaaagtaaaactatgaatatctattaactatttagaaggaattaaaaatcataatatcacaaattcatgtcaaaacccaattctttttgtttattttgagctggaaggtggacttcacttgtgcaactctgagtgagcacatttttattaacaccgtaaaccattgttccccggatgtggtcatcatttaagtggctggtctgtattatataaatttacagcagtagtcacttgattctcatgttgtcacgatagtcttaaaataatagtttattt

SEQ ID NO: 122621 - DNA, 380 bp, Homo sapiens
tgggattatgagcgtgaaccaccgtgcccggcccatgcacatcttttttaaatagaggattttttaaaacaagggaaaaaaaggctgggcgtggtggcttgctcatggggccgcacatggtggctcgtggttgtgatgaggtcgcatcactgcactccagcctgggtgacagagcgaggttctgcctcagaaaaaataaaaataaaaataataataatagaaagagagaaaatgcatcttcacacactgatgcttttccgttgctgcgtcagcaagcgtgcccccatccccgctgacaggtgcaacatcttcagcctgcagagctcccctttgtgaacaagctctagtttttttctattataaacaactccatgaagaat

SEQ ID NO: 122622 - DNA, 231 bp, Homo sapiens
aaaagtcatcatagacatgccaaggtcacgtaggaagatccatgcaccaagtctcttccataaaactcccaaacccaatgacaacaaataaacaagactactccaagttatcttagaatctgcaaagtggattcttggaatacagagaaagccaacaagcctaccagagacctaggtcttcaattgtctgcttactgcttcctgcccagaagaagagtgtattagtttcat

SEQ ID NO: 122623 - DNA, 186 bp, Homo sapiens
tcttgttccctcagcctttttcacaaagactctggctgattgggactcgcacagctagcggcaacggcaatcatgaagaccattctgtgtacatttacttgaagttatatttttatgaattaagcagaaactaaaagcttgaagagacagctttttaggaacttttaaaaacatagatagttgtct

SEQ ID NO: 122624 - DNA, 270 bp, Homo sapiens
ttataaagaagtatctgaggctgggtaatttattttaaaaagaggtttagggccaggcgcggtggcttaggcctgcaatctcagcactttgggaggtcaaggcaggcatatcacctgagcccagaagttcaagaccagcctgggcaacatggcaaaccccacctccacaaaaaatagaaaaaacattagccaggcatggggctttggattctgtctgattgaacttttttattatgggaagtttcctactcatatgagggtaccgagctc

SEQ ID NO: 122625 - DNA, 345 bp, Homo sapiens
gcccatgcccgcagctcctgtgcagagagggacgagtggtatggctgtctgagcagagccctccctgaggactacaaggcccaggcgctggctgcattccaccatagcgtggagatacgagagaggctgggggttagccttggggagaggccccccaccctggtgcctgtcacacacgtcatgatgtgcatgaactgcggctgcgacttctccctcaccctgcggcgtcatcactgtcacgcctgtggcaagagtcgtgtgccggaacatgcttcgcaggaacaacgaacccgctgaagacactgaacgaactcgcgtccgtggggatgctctagagtcagcacg

SEQ ID NO: 122626 - DNA, 122 bp, Homo sapiens
tgcatcagaacacagaaaataaaagacttggttaatacagtttgcttcatagctgctggtatcacacgtgcagatagcatctcacttgaatttctggttaagacgagtgatccacattttga

SEQ ID NO: 122627 - DNA, 284 bp, Homo sapiens
tctttttcagcatgactttcccctatctgttaaatctgaattggctctatgacctcttttgaccaatggaatgtggcagtgtaacatctaaggatttgtcttaagaaaactgcagctaccaattggtcacctataacacttctgtttagaatctaggtcccatgcagtgagacagcccaaacaatcatacaaagtccatgttcaagagaacatgtgaacattgtcaacagctccagctgagttctagctggcaacaagcaccaactgctaaccatgtgagtaag

SEQ ID NO: 122628 - DNA, 222 bp, Homo sapiens
atactcggctctgtgacaaggagtatacaaagactcaggacaaacatggcagatattcttggaaaatacatatcactgttactatatcaatatcaggaaatattacagaactgcctagaattttaatgaaaaagtacacaaatgtttggatgtctcaagccacatcctctttagattatacccctacgcgtctagggtttcctttgcctctaaaaggtacat

SEQ ID NO: 122629 - DNA, 661 bp, Homo sapiens
taagagacagtctcagttacataggctggaatgcagtatcatgatcatagttcacagcagccttcaactcctgggttcaagtgatcctagaacttgtggcctcaagcagtcctcctgcctcagcctgccaaagtgctgggattacaagcatgagccactgctcctaattcttaagagatatttttaaacctcatagtgtatactcttcagaattactttttgaaccataagtttaaatggcaaacactttctaaatgtattttactgaaaggccagttgagaagaagaggattccatcatcttttgaattagcatgaggacaggccattaaaattcatgattaagagcacaggatttaggtctgacaaacctgggtttggatttccattttgctgttctctacctgtgtgacttggggcaaattacttaatctccctgagcctcagctttcctctttataaaatgggaataacaacagtatttacctgagagaactggtattagaatgaagcgagagtaaagatttgcaaagtactcaacacaggcctgggatatagtaagtgctattttgattatttttaagggcaaagagattagatagttaacaaaaaaaggaaaaccaaatattggtcattggagggtttctgtggaaataagatat

SEQ ID NO: 122630 - DNA, 800 bp, Homo sapiens
acgcggccgcgtcgacggcggcgcccagtggcactgtgagcgattcggaaagtagtaacagcagtagcgatgcggaggagctggagcggtgccgcgaggcggcaatgccggcttggggcttggagcaacgcccgcacgtggcagggaagccaagagccggtgctgcaaatagccagttgtcaacctcccaaccgagcctcaggcataaggtgaatgagcatgaacaagatggcaacgagcttcagaccacccctgaattccgagcccacgtagccaagaagctgggagccctgctggacagcttcattaccatctcagaagcagcaaaggaaccagcatggccacagtccagaagcagaagtcaggtgagctcaacggggaccaggtgtcgcttgggaccaaaaagaagaaaaaggcaaagaaggccagcgagacctctccattcccaccagcaaagagtgctacagctatacctgcaaactgaacccagccatgggcacagggctcagccagctccaaggacaaggtgtcccccccaccctggggacaaggcatttccaagccccacctccctctccaagttcaaggactgggctggcaaacccagactgcccatgagaccctgatggtgatgaaggcttgctcgagagttgggccaaaaaagtggctgtagggtgagaagaccaatcaaggcctgcccctctgtgctcccacggagggctggcgggggcgctgtggttccagaacatttcatgacctcaggaaaaaaggaaccttccagttatttgagactagtggcc

SEQ ID NO: 122631 - DNA, 165 bp, Homo sapiens
atggtgctgcaaccctcaggtgaatcactaggcagagagtttttcccagggctgacggccagaggaggcccatcctctacacaaaattaggcagccacgaagccataaaagccaggaggtcagagacccttgaggggctcccagtggggagaggaaccagtggca

SEQ ID NO: 122632 - DNA, 335 bp, Homo sapiens
gcgaattccagctcggttcccccatttcacctgcactgagttttcctgcccttccagatctaaccaatgtaaatcttacgtgtattgattggtgtatatatcttccctaagatgtataaaagcaagctgtaccccaactatcttggggtacagcttctgaggctgtgtcatgggtgcgtccttaacgttggcaaaattaactttctaaactgactgagacctctctcagattttgagttcacaacgtttacaaaaggtctgtgttatagtgagaaaactttgctaaacaaaatgagttatccttcattggagtattagtcattgcagagaatgaa

SEQ ID NO: 122633 - DNA, 452 bp, Homo sapiens
tgataaaggaagggaaataaatacttcagagagtcatgcccagagtaagaatactcgagggtaatagggattcttagcttgatgaaaaaatatgaatacacaggacacctcattcccaagggatttcaggaatccaaaattctgctgcaacagaaaagattcctctaaaaaactgcagaagtcaagcttttcattaattctttccaggctctctcctttcttactgtctccctaccaatgtgtgttaatgaggttttactggaacccatcatgagccacaggtagagacttaaaccgctccaccctccctgtagagctgaagccagggatgacatcacttctagaaggctctgagcctgagcggaggcagctagtgcctcccccccataccctctctgccaggctgtgggaaaatgtctctactagcccccataattagggcaaaagggatt

SEQ ID NO: 122634 - DNA, 306 bp, Homo sapiens
tgttcctaggagtccactttgaggtgagccctgaatgccttggtgcaggacttaaattgcatcttctttcctgctgaggcacaatgttcaaatgttatttttctctaaggaacccagagagagttctttagagacatcacctaattcaacacttcctatattagacctaaagggtatgatcaacctgggtttgggagattgaatcactttcacaagaagagaaggtgaagaacagcttcacttttccaggtggtcctaatgactcacctgataatgacaacagattcagagccagcctccccatcc

SEQ ID NO: 122635 - DNA, 762 bp, Homo sapiens
gctattcttggtttaaactgagtaactacagtttcaactgattttcagaaacttaaaactaaagttagacatttctctaatgatatttctgtcagtattctatatttctaccttaaggactacccctaaaactttacaaacagaaggaaacagtacaccaaatagccttattctgttctctagcttaagtggatttaggcagaagtacacttggccctcggtatccacagggttcctcatctttcgatttaactaactggattgaaatattaggggaaaaaggaatgagaaataataaaacagaaaatacaaacttaaacacagtataacaactattcacatagcatttacattgtattaggtataagtattctagaggtgatttaaagtatatgggagtatatgcatgggttatacgcaaatactgtgccattttatataagggacttgagcatcctcagattttggtatctgcatgggtcctggaaccagtccccagtggagactgaggaacaactgtaagcacttagtttgaatgagatgtcatttgtatgagcagatggtgtgagctgaatgatagcatctgccttattattccatttctttttatctgttatgaatgaagaattggttaaaatgctttagaaattaacaaatatcttccagctgtaggtaaaacgtaggcctcttcagtcaaactattgatacataaaaatttgaacttaaaaactgctttaaaaaacgaacttaaatagaaaaatg

SEQ ID NO: 122636 - DNA, 685 bp, Homo sapiens
tgttatgtagtgccagggcagtaatagctagctaatataatcaccatccatttagtattccaagccagaaacccgggcatcatagctgttgagttttgtttataagaaaaatcatgctatgattttaaaaaatacattattattataaagaatgtatgtaataaagagaattttaaaaagaaaaacaagcataagatgccaatttcctactgcacaagaaacaactatcttcaacattaggtgagcatcattgtagacatacattttcttttctataagctttttaattttataatagtattaaatatacagaaaaattacaaaaataatactgagaattcctttatacccctcatcctgtctcctctatgttaatatcttagattatcatggtacgtttatcaaaacaaagaaaccaatattgacacattactagtaatgacactgaacaacttattcaacttatcactattttcctctaagattccagaatcccatgctggataccatattgcatttagtcatcacgtatccttagcctactctggtctgtgacaatttctcagactttcctgatttttttttttaatttaaccattttgaggattactgatcaagtattttgtagactgttcttcaattgggattggctgatcttttcctcaagggtagactagggtaatgg

SEQ ID NO: 122637 - DNA, 599 bp, Homo sapiens
aggtgaaaatgacaaatattcaggtggaagtgtccagcattcaagtaggataacttggaacagaaagcccaaattatgtcatggtgaaatgaggataatgtcttattaataaaaacacgtcttactagtctttcctggagaacatgaaagatagaatttcagaaatttagagaatgaaaaaggaaagattacaaggcaataagttgattaaaatagactaaactaatcagtggcagctatcttaaagcaagatatatcttctacagcacgatctacccaaatgcaaatctgggcagagaaatacaaaatatttttaggactgacaaaatttcagctatatgtctttttaaaaatgctgcagagagaaatttagatggattggacaaatatttgcataaggattccacagccaacgtacacaattttccaactactatggttagcactgggctcaggcactacctttgccaaccagcagattttcagtattgcccctggcagacatcccattagcaatctctccccattcccaaacattcccaactattctagtcatgccaattcaaccaatgtcccttaagccttacataaacattgac

SEQ ID NO: 122638 - DNA, 463 bp, Homo sapiens
ctcatacctgatttatcaaacctgagagcccacagcatgcctaatttagcacatagttcctgtccccaaaatctaataaactcagaagtaataaattttctgggtttttgtgggtttgccctctgagctagggtagttaaaagttgcatttggcatgttttgtttaccatagcggctacggaaagtgcccttttcctttcttctgtgtcttctcatgggtttatagtaacagggaactgattctaggacatgaatcgttcagcttttggtcgttaacgctagatgtttctcatacacgagtccttctcatgcatagttatttgaagttaatatttcgcattggtgaccatgtattcttatgtctgggagcgcagacatcagactgctggactgtgtgtgaaatagcctacttgagatgtcatccctggggactacctaccccactgccaggacaaaagacttt

SEQ ID NO: 122639 - DNA, 159 bp, Homo sapiens
gcacccagcctcccataaggttttgatgaggattaaacgagatgatgtacacccagcagaaacctctactgttaccgtgtcccccttgtgttttagtccttcattttcttcctctgaccctcgaaactgtaaggacaaggagcatgcatgactcagcat

SEQ ID NO: 122640 - DNA, 365 bp, Homo sapiens
tagcctattaatagggtgggttacattgatttttgactgttgaacccactttacattcctggaatgaaactacttggcaatgatgtggaattctttttatatattgtttaattctacttgctaataattcgctgtatatttttgtgtctctgtatatatattgttctgtactttgtactgtctttaggtacagtacctaatattagcttcttaaaatgttaatattagcttctaatattagcttcttaatattagcttctattagcttctaatattagcttcttaatattagcttctaatattagcttcttaatagtagcttcttaaaatgaattgggaagtttttcctcttctagtttccagaa

SEQ ID NO: 122641 - DNA, 392 bp, Homo sapiens
agtcaaataaacagatgcgctgtaaggacacaaaaccacaccatgattattagaagcaagcagcaactgtaacaaactgaaaagtaagtatctccttgtttctaggcagactgcttattgaaccacccaggagcaccactaacacaaggctatatagaaatgaacacacacagatcaatatccacaatatgacacccatgcagaaaaaagtccattctggctaaaagacaacgctaagtggctatctgctcctaacagaacaatattgctctagacatttggcacagagatgataatcaggctaaagatattcaccaagccaagcgattgaaattcacatcttagaaatgccagaatcatccgaagtggaggctcagaaatgttcaaaaccc

SEQ ID NO: 122642 - DNA, 652 bp, Homo sapiens
acacatcctattttctgggaaaagattactaccacagtaattgagctgtgaagcggagacaaattgctctcggtggtggttcaaagtactgcaattgactggaatagcaccgcgcagttttccttcctctcgtgcaagataagagtgataggagctgtatcgattacctgcaagatagaagtagaagcgggccgggtgcggtggctcacgcctgtaatcccagcactttgggaggctgaggcgggtggatcattcgacgtcaggagttccagaccagcctgaccaacatggtgaaaccccgtctctactaaaaatacaacaaattagccgggtgtggtggcaagcgcctgtaatcccagctactcggttggttgggcaggagaatcgcttgaacccgggaggcggaggttgcagtgagccgagatcgcgccattgcactccagcctgggcgacaagagcgagactctgtctcaaaaaaaaaaaaaaaagaagtagaagggaagaaaatcgcaaggaactagactaaaagaatctcgacccttgaatggagttacacgaacggccagatgaaagaaggaaggcccggacctccactcagggccgactaggggactggcggagggtgcacgctgatggatttactcaccgggtg

SEQ ID NO: 122643 - DNA, 528 bp, Homo sapiens
gtcctccctggactgcctgtctccagaattcttttatatataagagaaataaccttctgtcttgtttaagccaaacacaattcttgatggatccacgctcaaccttatgaatggctcacggataggttcaccccaacatttgcaggtttcaagctaggagtataggtggaagtccctagcctgtggttcaccccttttccttttccccttttgctctgtcccattaggtggatatctgacctcacactttaaaacttaagtccctgtgctaacactgccccttggccactcttcaggcctaggctctatgtatttcctgttgggagaacagatcccaggaggagactgctataggctctagaagagagctcagagcatttagggaggaatctaggaccctaggaatccagggcctggcccagaagtcaaggaagatttaggcaggtgccatgttcctttggccctgtgatctcctcactttgtggagagaagtgtggccctttaagtcataagacctaggacaggggc

SEQ ID NO: 122644 - DNA, 429 bp, Homo sapiens
gctcagctactttttgtatttttagtagagacggggtttcaccatattggccaggctggtctcgaactcctgacctcatgatcctcccgcctcggctcccaaagtgctgggattacaggcatgagccaccgtgcctggcgacaacttctatttctttacctgtttttttttcatagcacacaccgcttcttgacagaaaattacctatctatttgaaaaattgtattactattgtcttcttcagcagaatgtagttctatgaagactaagtaaggctcgttttttctgtttcccacaccctcagtaacctcagtttcccagcctctggtaaccatctttctacactctatctctatgagtttaattattctaatttttagctcctgtaaataagtgagaacatgcaaagtttgtctttctgggcctggc

SEQ ID NO: 122645 - DNA, 332 bp, Homo sapiens
accaattattattttagcgagagatagtttaacaaccatctgaccttcacctgatggccgcctgacattcctggttgggtggggggccctctcttgccctgctcatgtctaatacctactctggcatccctactatgtacagatgagggctacaccgagacattaaaattagtcaaagagctgcccgagggcaaacatgccctccacaaagacaagtggtaagggaagaagcatggtgatgatgtgtagcaattgtttccttcaatgatggctgacactcccattcccggataacagcaataggtcaaggcagacatatctagaagttctgg

SEQ ID NO: 122646 - DNA, 418 bp, Homo sapiens
agagcagactttggcattagatgttggctgcagtctcttcctagtaggtacaggctttgtaggagttcctgaaaggggaacggggactatagccttatcttgaaaatcaaaacaaacaacccaaatgacaacaaactaacatttctagagcacttaatatgtgccaatcactctgcagagtatttctgagagaagtcatttattcttaagtcttgtttccttagcatgatgtatataccctgaggcctacacatggttttttaggatgccaggaatatgtgtggaaggagaagagggggagggagaaaatgaaataaagatggagtctacaattcatgcccatattcttaggtaaggactgcaacccagctgttgtcagtatgagctggtaattgaacttgagtcttaattcttaatt

SEQ ID NO: 122647 - DNA, 523 bp, Homo sapiens
atctttatgcatatcttttcatgtaactgtgaacagttaaacataaaatacattcgtagaagtagaattgctagattaagttatatacactttaatggttgttgttgttgttgttttgagacagggtctcactctgtcgcccaggctggagtgtagtgatatgatcacagctcactgcagcctcaacctcccaggctcaagcgatcctctcacctcagccttccaactacctgggaccccaggcatgcaccaccacacccagctatttttctattttttgtagagacagggtctccctatgttgcccaagctggtctcgaactcctggacttaagccatcctcccacctcggcctcccaaagtgctgggattgcaggtgtgtgccaccgtgcctggccctttaattgtttcatattaaaattttttttatttaaaaaattatttccagagctccttaggtttgaaagtgtggattaaacattaacagactttttttaaacaaactatccaacctcataatcaa

SEQ ID NO: 122648 - DNA, 1674 bp, Homo sapiens
ctactactactaaattcgcggccggtcgacgctggtgcacaggaaggatgaggaagaccaggctctgggggctgctgtggatgctctttgtctcagaactccgagctgcaactaaattaactgaggaaaagtatgaactgaaagaggggcagaccctggatgtgaaatgtgactacacgctagagaagtttgccagcagccagaaagcttggcagataataagggacggagagatgcccaagaccctggcatgcacagagaggccttcaaagaattcccatccagtccaagtggggaggatcatactagaagactaccatgatcatggtttactgcgcgtccgaatggtcaaccttcaagtggaagattctggactgtatcagtgtgtgatctaccagcctcccaaggagcctcacatgctgttcgatcgcatccgcttggtggtgaccaagggtttttcagggacccctggctccaatgagaattctacccagaatgtgtataagattcctcctaccaccactaaggccttgtgcccactctataccagccccagaactgtgacccaagctccacccaagtcaactgccgatgtctccactcctgactctgaaatcaaccttacaaatgtgacagatatcatcagggttccggtgttcaacattgtcattctcctggctggtggattcctgagtaagagcctggtcttctctgtcctgtttgctgtcacgctgaggtcatttgtaccctaggcccacgaacccacgagaatgtcctctgacttccagccacatccatctggcagttgtgccaagggaggagggaggaggtaaaaggcagggagttaataacatgaattaaatctgtaatcaccagctatttctaaagtcagcgtctcaccttcctgcccactgccctcgttcctctaataatcttgggtgggcatttgtgcctcagaaaagaagttacagccccaaacatgcttggtccttcattccaccagccacttggggttggcatgaaatacagacagctcaatgcttttcaccgtaattctcttgtgggggctgtgacatgcagaaggcacacctgatacttctcctgctcagttttgccctggaccatacaattttggcctgacctggacagagctcccactacagaagcatcctgctcgccccatgctgggacttcctctttctagcatcagacacttgggtttcatgcttatgtgtggttctttccaacactcccagaaaagggtgttgaagattgtggaacctggagaaataagacatcgtggtgagaaagtgcatccttctcagagaaaagagttaaactgagtatcttcttctggggaaatactggcaggccgagatgggatccataggagagcaacaacagaccatgtcagacatcctgtgtgcatttatcgctggatcctgaaaatagccccgtgaaggcagaaatgtatgtgactagaacgaggccacatgaataagccactgcccactggcaggagtgaaaactgaagcgctccttacctgaaggaccccaaaaccatatagaatagaataaccaggagttccgcctgtgtctaaatgcctcttttcctgtatcacacaagggtcagggatggtggagtaaaagctctccccctgggaggcttctgga

SEQ ID NO: 122649 - DNA, 1691 bp, Homo sapiens
attgtggtgccttgtagctgtcccgggagccctcagcagcagttggagctggtgcacaggaaggatgaggaagaccaggctctgggggctgctgtggatgctctttgtctcagaactccgagctgcaactaaattaactgaggaaaagtatgaactgaaagaggggcagaccctggatgtgaaatgtgactacacgctagagaagtttgccagcagccagaaagcttggcagataataagggacggagagatgcccaagaccctggcatgcacagagaggccttcaaagaattcccatccagtccaagtggggaggatcatactagaagactaccatgatcatggtttactgcgcgtccgaatggtcaaccttcaagtggaagattctggactgtatcagtgtgtgatctaccagcctcccaaggagcctcacatgctgttcgatcgcatccgcttggtggtgaccaagggtttttcagggacccctggctccaatgagaattctacccagaatgtgtataagattcctcctaccaccactaaggccttgtgcccactctataccagccccagaactgtgacccaagctccacccaagtcaactgccgatgtctccactcctgactctgaaatcaaccttacaaatgtgacagatatcatcagggttccggtgttcaacattgtcattctcctggctggtggattcctgagtaagagcctggtcttctctgtcctgtttgctgtcacgctgaggtcatttgtaccctaggcccacgaacccacgagaatgtcctctgacttccagccacatccatctggcagttgtgccaagggaggagggaggaggtaaaaggcagggagttaataacatgaattaaatctgtaatcaccagctatttctaaagtcagcgtctcaccttcctgcccactgccctcgttcctctaataatcttgggtgggcatttgtgcctcagaaaagaagttacagccccaaacatgcttggtccttcattccaccagccacttggggttggcatgaaatacagacagctcaatgcttttcaccgtaattctcttgtgggggctgtgacatgcagaaggcacacctgatacttctcctgctcagttttgccctggaccatacaattttggcctgacctggacagagctcccactacagaagcatcctgctcgccccatgctgggacttcctctttctagcatcagacacttgggtttcatgcttatgtgtggttctttccaacactcccagaaaagggtgttgaagattgtggaacctggagaaataagacatcgtggtgagaaagtgcatccttctcagagaaaagagttaaactgagtatcttcttctggggaaatactggcaggccgagatgggatccataggagagcaacaacagaccatgtcagacatcctgtgtgcatttatcgctggatcctgaaaatagccccgtgaaggcagaaatgtatgtgactagaacgaggccacatgaataagccactgcccactggcaggagtgaaaactgaagcgctccttacctgaaggaccccaaaaccatatagaatagaataaccaggagttccgcctgtgtctaaatgcctcttttcctgtatcacacaagggtcagggatggtggagtaaaagctctccccctgggaggcttctgga

SEQ ID NO: 122650 - DNA, 524 bp, Homo sapiens
ccacattttcatccatacatccatacatccattcacccacccatccacccattcatcatccatctgtccatccatccatccaatgtgtcttcttgcaggtttttcagggacccctggctccaatgagaattctacccagaatgtgtataagattcctcctaccaccactaaggccttgtgcccactctataccagccccagaactgtgacccaagctccacccaagtcaactgccgatgtctccactcctgactctgaaatcaaccttacaaatgtgacagatatcatcagggttccggtgttcaacattgtcattctcctggctggtggattcctgagtaagagcctggtcttctctgtcctgtttgctgtcacgctgaggtcatttgtaccctaggcccacgaacccacgagaatgtcctctgacttccagccacatccatctggcagttgtgccaagggaggagggaggaggtaaaaggcagggagttaataacatgaattaaatctgtaatcaccagcta

SEQ ID NO: 122651 - DNA, 888 bp, Homo sapiens
taaatactaaaacttcagtcctttgcaaaggtaagggcagccatcacagggcaatagaagattgtggattcttggtccctctctgccttgatcatacttagtgaccttggggaagtgcctcacccttttctaggcctcagtaaacccctggcagtggggcttcccctctgtgacattcagtggctccaaccttttgggtttgttgatctttattgagttcagggaaataaaggcctatatttcacatgtagcaaagttggcccaattcaggcaccagtggatggcttggtccttctggtatgaatccatcattggagttctgcccagttctttaatttaagtcttaaaaaagacaagagaaatggttgagaaagactgagcgcatactgttaaatgagaactgtatcaagtttaataaggatacgcttaaacataattatcttcattgaaccataaataacaggcagtgccattttgatagcagcttcgtattccttctctccaggaactggagaaaacttgaggctaatctagccagagaagcagcatcccgtacagattgttcttgtctaagggaatttctgatgttgcagagggaccataaaggatgccaagtgaaacgtccttgcctatctcctgtatgggctccctgacccaatcatttcccccgcttgaatttgcagggaaaagagcatgacatttggcatcagaaggctggatgtggaatcccatcctctcccaccactgcacactgggcactttcggataagtcagttcttctcccaggctggaactcaatccttgcattcatgttataaagggaaacctacgccctgaaagatggcaaggtcaactgtaagcaaacaaaaatgcaaacatgctgtgttt

SEQ ID NO: 122652 - DNA, 1319 bp, Homo sapiens
ccacattttcatccatacatccatacatccattcacccacccatccacccattcatcatccatctgtccatccatccatccaatgtgtcttcttgcaggtttttcagggacccctggctccaatgagaattctacccagaatgtgtataagattcctcctaccaccactaaggccttgtgcccactctataccagccccagaactgtgacccaagctccacccaagtcaactgccgatgtctccactcctgactctgaaatcaaccttacaaatgtgacagatatcatcagggttccggtgttcaacattgtcattctcctggctggtggattcctgagtaagagcctggtcttctctgtcctgtttgctgtcacgctgaggtcatttgtaccctaggcccacgaacccacgagaatgtcctctgacttccagccacatccatctggcagttgtgccaagggaggagggaggaggtaaaaggcagggagttaataacatgaattaaatctgtaatcaccagctatttctaaagtcagcgtctcaccttcctgcccactgccctcgttcctctaataatcttgggtgggcatttgtgcctcagaaaagaagttacagccccaaacatgcttggtccttcattccaccagccacttggggttggcatgaaatacagacagctcaatgcttttcaccgtaattctcttgtgggggctgtgacatgcagaaggcacacctgatacttctcctgctcagttttgccctggaccatacaattttggcctgacctggacagagctcccactacagaagcatcctgctcgccccatgctgggacttcctctttctagcatcagacacttgggtttcatgcttatgtgtggttctttccaacactcccagaaaagggtgttgaagattgtggaacctggagaaataagacatcgtggtgagaaagtgcatccttctcagagaaaagagttaaactgagtatcttcttctggggaaatactggcaggccgagatgggatccataggagagcaacaacagaccatgtcagacatcctgtgtgcatttatcgctggatcctgaaaatagccccgtgaaggcagaaatgtatgtgactagaacgaggccacatgaataagccactgcccactggcaggagtgaaaactgaagcgctccttacctgaaggaccccaaaaccatatagaatagaataaccaggagttccgcctgtgtctaaatgcctcttttcctgtatcacacaagggtcagggatggtggagtaaaagctctccccctgggaggcttctgga

SEQ ID NO: 122653 - DNA, 896 bp, Homo sapiens
attgtggtgccttgtagctgtcccgggagccctcagcagcagttggagctggtgcacaggaaggatgaggaagaccaggctctgggggctgctgtggatgctctttgtctcagaactccgagctgcaactaaattaactgaggaaaagtatgaactgaaagaggggcagaccctggatgtgaaatgtgactacacgctagagaagtttgccagcagccagaaagcttggcagataataagggacggagagatgcccaagaccctggcatgcacagagaggccttcaaagaattcccatccagtccaagtggggaggatcatactagaagactaccatgatcatggtttactgcgcgtccgaatggtcaaccttcaagtggaagattctggactgtatcagtgtgtgatctaccagcctcccaaggagcctcacatgctgttcgatcgcatccgcttggtggtgaccaagggtttttcagggacccctggctccaatgagaattctacccagaatgtgtataagattcctcctaccaccactaaggccttgtgcccactctataccagccccagaactgtgacccaagctccacccaagtcaactgccgatgtctccactcctgactctgaaatcaaccttacaaatgtgacagatatcatcagggttccggtgttcaacattgtcattctcctggctggtggattcctgagtaagagcctggtcttctctgtcctgtttgctgtcacgctgaggtcatttgtaccctaggcccacgaacccacgagaatgtcctctgacttccagccacatccatctggcagttgtgccaagggaggagggaggaggtaaaaggcagggagttaataacatgaattaaatctgtaatcaccagcta

SEQ ID NO: 122654 - DNA, 868 bp, Homo sapiens
attgtggtgccttgtagctgtcccgggagccctcagcagcagttggagctggtgcacaggaaggatgaggaagaccaggctctgggggctgctgtggatgctctttgtctcagaactccgagctgcaactaaattaactgaggaaaagtatgaactgaaagaggggcagaccctggatgtgaaatgtgactacacgctagagaagtttgccagcagccagaaagcttggcagataataagggacggagagatgcccaagaccctggcatgcacagagaggccttcaaagaattcccatccagtccaagtggggaggatcatactagaagactaccatgatcatggtttactgcgcgtccgaatggtcaaccttcaagtggaagattctggactgtatcagtgtgtgatctaccagcctcccaaggagcctcacatgctgttcgatcgcatccgcttggtggtgaccaagggtttttcagggacccctggctccaatgagaattctacccagaatgtgtataagattcctcctaccaccactaaggccttgtgcccactctataccagccccagaactgtgacccaagctccacccaagtcaactgccgatgtctccactcctgactctgaaatcaaccttacaaatgtgacagatatcatcagggaaaagagcatgacatttggcatcagaaggctggatgtggaatcccatcctctcccaccactgcacactgggcactttcggataagtcagttcttctcccaggctggaactcaatccttgcattcatgttataaagggaaacctacgccctgaaagatggcaaggtcaactgtaagcaaacaaaaatgcaaacatgctgtgttt

SEQ ID NO: 122655 - DNA, 147 bp, Homo sapiens
cgctgcggctgctgcgctccctgcccccgcggtgcccccttcccgccgccccgctcctctctcaggcgctcaaagtggcctggaatttgtagaacgcccccctccaagcccgttggcagttgtcctagcccgctggcccttgccccc

SEQ ID NO: 122656 - DNA, 590 bp, Homo sapiens
tatctgggcaggtgtcactgagcatgacagctcacgcccgggactcggggttccgtcagcagagcaagggtcgattcttggagggttgctggaatgtgacacgatgatctcagtttgacagtttggacatttccatggcagcttcagcacagtgccatgccactgagagatccctcctgaagccctagagccgggttctcatccccgcagcacttcagaatcacctgtgggactttacagacctgctgctgcttgagacccagtgaaggagaatcactaggggtggggcccagttgagaagcacagtggtagatcctagctggagaactgaagagaaacagagctgctgagaataagaaataggtgttactcaggattctcctaaatgtcacctcctggtatggaaggcactcaaaaggcaggtcatgaggttaaattgtttatggtttattttgcttaaaaaagtaggagtagatgtaatacattttagtgagacttctataggtaatagttaaataagacttgtgcctttgtgttttactgttatctggcagaatggcctctaaagaatgccttgtttcccagcggca

SEQ ID NO: 122657 - DNA, 313 bp, Homo sapiens
caggtcacaccaccaaaccaggatttactgattaataatggagacaggataatttttggcctcattaggaagaatgaagatgagaaatgtagactatgccttcaggtatgtctgtcctacctcaattttaagtgtacaaggaatcttttagattagggtttcttcatgcctgcctgcctgcctgccaacataataagctgtaaaaccttgtttagttttccttaaatccagaaatgattctataccaaatccatacaaatcgaatcactcttaagggagtaagtgaaaacatgtgtatctgccttggctggac

SEQ ID NO: 122658 - DNA, 1700 bp, Homo sapiens
tctagagtgactttctttgaaaatatacctgagtactctgagaaaccaggccaagcctacgtgttctccctggctgatttcagtggaggaagaactattcaaaaattcatttattatgcttttgtttacctttttattgtcaaggttaattattggtttaaggagaggttttaaatgaaatataggagattatgtctcagatgaagttgaatttctgacatgaaatgctacatttttgaaatgcaagtgtttttcaaaggttcttagctttaatcaaagcaaaaagcctcatctaaaagtttctttctgttccaaatcagttcctttagagaaacatggtaaatgcacttggaaatttgttttaatcccctgttataaaattagcctgaattctttttgtcttagcacatagagaccctacatctaggaaagtcttattctgggccctattgcactcagatgtggtgtgccttactgatcttgaaacattagttatatctgtgtgccctattttaaatttaaactcctctcctataagatttactacaaatacattttttgaagaccactgtaaaatcacatattctctaatattttaaataaatgaaaggctgctttatttctcttataaacattggtataagagaaatttggtgtgttcatgaacacgctaaatggcttggaaaatgggtgtggttcaaagcctgatgcttcaagatctctggtttgaatttggtcacaaccaggaagtattgcccctttttctgtctgggtcctccataggaacttttcataccagccataaacaatccagatggctgccacgtggtccttaccagtgagaggcgtcacacagcacacactgcatgaatggggatgaaatcattcctgaattaatatagggttatattacttggacctcagccatttgagcctcagtgtctgcatcatatgtgtttagtatatggacatctaactgaaattattaacgtggcaatttatgcgtgccttttttggaaatattctattttaatggaaagaattatgtagaaatactggatacatttttaaaaacatccataattcaccatcttgacataactagtatattcatttttgtgattagagttcaatgttttatatagatgtagctttagtgtatatattattttgtattctgctcttttcacttaaagtcatatgacctagtacattttactcatttcttggtatgcttttatatcatttctctcttagaaattggatttgtaaaaattaatttagaaaatcataaaatctgttcatattctgtatgaagaataaattaatcttcagatataagcagaaaagtgatgttaaaacaataatttaatcaataataatgttttttgatccaatgttgactgaagtgtttatattttggttgatttctaaaagtagcaaaaagctattctgttatttggagaattttctgctatgtttagaaccaaactatgttatgatttcacactttgaagcttgataggaaatattgttaaggaaataaaaaagaaaaacaagtgatccaaagcaaaggaaatgatagacttttgtgttatgaaaaattaactcactgttcttgttggtactattatgtcaagttagttatctcacatgtgacactcattaaaaggcatttctcttggttaattcttggaaca

SEQ ID NO: 122659 - DNA, 943 bp, Homo sapiens
  misc_feature (826)..(826): n is a, c, g, or t
tctagagtgactttctttgaaaatatacctgagtactctgagaaaccaggccaagcctacgtgttctccctggctgatttcagtggaggaagaactattcaaaaattcatttattatgcttttgtttacctttttattgtcaaggttaattattggtttaaggagaggttttaaatgaaatataggagattatgtctcagatgaagttgaatttctgacatgaaatgctacatttttgaaatgcaagtgtttttcaaaggttcttagctttaatcaaagcaaaaagcctcatctaaaagtttctttctgttccaaatcagttcctttagagaaacatggtaaatgcacttggaaatttgttttaatcccctgttataaaattagcctgaattctttttgtcttagcacatagagaccctacatctaggaaagtcttattctgggccctattgcactcagatgtggtgtgccttactgatcttgaaacattagttatatctgtgtgccctattttaaatttaaactcctctcctataagatttactacaaatacattttttgaagaccactgtaaaatcacatattctctaatattttaaataaatgaaaggctgctttatttctcttataaacattggtataagagaaatttggtgtgttcatgaacacgctaaatggcttggaaaatgggtgtggttcaaagcctgatgcttcaagatctctggtttgaatttggtcacaaccaggaagtattgcccctttttaaatttaaactcctctcctataagatttactacaaatacattttttgaagaccactgtaaanatcacattattctcctaagtattttaaatacaactggaaaggctgctatattttctcttaataaacattggtataagagaaattgggtgtgttcatgatcagcctagatggtggaaa

SEQ ID NO: 122660 - DNA, 432 bp, Homo sapiens
gcctcccaagtagctgggactacaggtgcccgccatcacgcccggctaatttttttgtatttttagtagagacggggtttcactgtgttagccaggatagtcttgatctcctgatctcgtgatccacctgcctcggcctcccaaagtgctgggattacaggtgtgagccactgcgcccggccaagtcagatttttttattctctctcatgcctgcatctatctgcacatacattcctttaaacaaatggttaaatctctgaatcgtgtaaaagcagaatctattgctagatgatcccataggaaaatgaaaaggtcacttccccatcctcctgagccacaggaaggtacagctgaagcagcacaaaggttctcatgggtcttcataaattcatgatggcacattccctaatagacagtgaaggaggcacggg

SEQ ID NO: 122661 - DNA, 914 bp, Homo sapiens
aatgagtttctgcttctcttctttctccacccaggactcacttggaatgacaaagttagatgtgatctggcaatctaggcaggactttataatcttgctctgaaattgctttagcactgctccacttgcgaatgcacttgtagacagtaggcatggttgcagttggagagaatcccggaagcagcactcactggggtttgctttctcatagaccacctccatgcagatcccatacaccacgtccttgctgcgctgcacagcaagtgagagctccatgtccttctcatgggcctcaatgcacaattttatatgctgtgatctctgggcagcagccatgggatgcaggacctgcagtccacacatgtcacatgaatctccatggagaggcacacagttctccccatctcagcactctctcactgcagcacaggggcacagctgcttcttggtgttccacagcagtttttctctttctctgattcttccttggtcactgagtcagtattaaggtgcttcagtgcaggaaggcacagctgaaaattttcaagagggtggtaaaggtccaaactaataagacagatacatgaactacaagggaactgaaaatctaatatagccaaagtagggttgcccaggaacaaactcaatagcatgcacccagtcctctgaacctgctcctacaattgcaaagtttgaatttcttgactcagcttcacctgtattcatttcaacaagtggtccgactaacgacaagagacttgaggaagcagcaagggatgatattgtagttagctctgtagcagctgcttcttcctgtttcaatggcttgctatgttcatatctgcagcggtctccataaatacagtaccctcactgaaaatacttgcacactacaccacacggactgtcagaga

SEQ ID NO: 122662 - DNA, 901 bp, Homo sapiens
tcggtccccagcagttatacagactcacttggaatgacaaagttagatgtgatctggcaatctaggcaggactttataatcttgctctgaaattgctttagcactgctccacttgcgaatgcacttgtagacagtaggcatggttgcagttggagagaatcccggaagcagcactcactggggtttgctttctcatagaccacctccatgcagatcccatacaccacgtccttgctgcgctgcacagcaagtgagagctccatgtccttctcatgggcctcaatgcacaattttatatgctgtgatctctgggcagcagccatgggatgcaggacctgcagtccacacatgtcacatgaatctccatggagaggcacacagttctccccatctcagcactctctcactgcagcacaggggcacagctgcttcttggtgttccacagcagtttttctctttctctgattcttccttggtcactgagtcagtattaaggtgcttcagtgcaggaaggcacagctgaaaattttcaagagggtggtaaaggtccaaactaataagacagatacatgaactacaagggaactgaaaatctaatatagccaaagtagggttgcccaggaacaaactcaatagcatgcacccagtcctctgaacctgctcctacaattgcaaagtttgaatttcttgactcagcttcacctgtattcatttcaacaagtggtccgactaacgacaagagacttgaggaagcagcaagggatgatattgtagttagctctgtagcagctgcttcttcctgtttcaatggcttgctatgttcatatctgcagcggtctccataaatacagtaccctcactgaaaatacttgcacactacaccacacggactgtcagaga

SEQ ID NO: 122663 - DNA, 231 bp, Homo sapiens
ataggtgtgagaaattttatcatttagctacatgcttgttgacgtacaaggtgtggtcattacaccccagtgttcccctgtgtggctgcagccaggtaaaggggctgctgcgctcctctcgcccagcccagagggtcagccccagaggaagcactggtgacctttgttgccatagattgctttccagttcggatttttttaaaaaacagcaggacttgacgggggcatgag

SEQ ID NO: 122664 - DNA, 125 bp, Homo sapiens
ttcccatcagcaatatcggaagggtccactttctcctcacctcactaacacgttattatctatctcttttaagttacagctgtcccagtgtgcaggaactggtatcccattatagtttcactttg

SEQ ID NO: 122665 - DNA, 585 bp, Homo sapiens
cagttttctcagctgtaacgtgggtatatagcagtatctgtttcataggcttgttctgaggagttaatgagttaacatatataaagcctctagaacactgcctggctcatggtaaaactaggtcagtgtgagctattatgcattaaatcctggctctggcacttccttttttagtgaccttaagaaggttcttttacctgtttcctcaaatggtaaaatgcagaggttgaatttgactacctagaccaagtcaggaccagttcttaaattctattattgtacaagtataaaagcagaggacaaaagccatactacatgaacaaaacaatatcatttgctaaatgattgtctgaggtcattctttagtttctcttggaactcacacatggacctcaaggttagaaatcaatgtctaggccgggcgcggtggcccacgcctgtaatcccagcactttaggaggctgaggcaggtggatcacaaggtcaggagctcgagaccagcctggccaaggtggtgaaaccccgtctctactaaaaatataaaaattagctgggtgtgatggtgggcacctgtaatcctaaata

SEQ ID NO: 122666 - DNA, 405 bp, Homo sapiens
ggtatggcttatcacacacctaggccatatggtatagcccattgctcctaggctagaaacctgtacagcatgttactgtactgaatactgtagataattggaacataacggtaagtatttgtgtatgtaaacatgcacaaggtactgtagaaatatagtagtataatcttgtggaaccaccaccatatattctgtccatcattttccaaaatggttttaccaggtgtgtgactatatattagtcaaaatctttctgttcattttctcctctgatctgtttttttttctttttttttgtacttactgtcttccattctataagtaattctttgtcattttaatcccacccctactctaattttcactccagttatcagcaaaattggccattgtttaaatctgcca

SEQ ID NO: 122667 - DNA, 295 bp, Homo sapiens
tggcagatgtatcttcagaaaatggcaggacgatcattctggcttcacgcattcctcccatcaaagggaggagtctattatctttctcttcaacccggaggaaactttctggctgccttgttgaagataactgcagaaatgacacaatgtgacttccagggctaggtcatcaaaagtgataggtttccaccaggctctctttctcagaacttgcccttggaacccagccaccatgttgtgaggaagcccagagcacatgcaggggttctggctgaaagccagtctcaaccaccag

SEQ ID NO: 122668 - DNA, 325 bp, Homo sapiens
ctaagacttgtacctgtgtgttttggtagacacaggtgctggcttgacactgtgctgtgcctttcgcctttgattggcagctgcttacacacccacatcacatcgctgtaccacatgcggggcctgatgtttttctccaacaagtaccaccatacaagtctatattcccggctgtggcaaagcacattttacaccttgatcagtgtttgacaccaatgtgaagggctcgcggtggtgctgctctcaactgcacactgttgaaaaacgcaagcggatctgtcttcaaaatttggggggactgcttcagtttctgtcgacgcggccg

SEQ ID NO: 122669 - DNA, 142 bp, Homo sapiens
ccctgattcacaaggggaggggggatgggtgcagaagtcttccccagtgaggggatggagtccacctgaattttctttgtaatgattatggagattaacctgcaaaataacaattcacagtgggtgttggcatggggcttca

SEQ ID NO: 122670 - DNA, 278 bp, Homo sapiens
acagtggtctctgctgtgggtgggcttcagagaaagcctctgggtttctagggagaatgggctcccagaggtcaagctttccaacaccatcttccaaagggaagggctgccctgtctgaagagtcccgcccacgtgcaggatgagacgtggaaaatattgttgctttaacttaaaaaacaagaccagtggggttggctgggagcaccggccagcaggccctgctgagcataaaccccctccactggagaaggcgtggcccctgcccacctggaccctt

SEQ ID NO: 122671 - DNA, 316 bp, Homo sapiens
tgatactctttattattttatttctcctgagaaatgccttcaattgaatataatgtaaacgaaagtcccctcccttttagggaagtgttctcgaatacggacatttaatttcataaaaatgcactagctgtaaaacccagccttttaaaaatagtgggaaaataataaatataacagatgatgccagaaaggaaaggcatttatcttgtgatctctaatgactgaactgaaaactgatcagagaagttgttcagatcctttgcctctgctcactccaaataaggggtttaatggtagcagaacagagggctggaat

SEQ ID NO: 122672 - DNA, 300 bp, Homo sapiens
cccaagcatcacagacagaagtttccaatgaggaatttctcaattctcttcattgtttcaattttcccctctggccctcacacactatcccaagacttcgggccatccgctaagaatcctggaaatgtattcacttatcagattcttaggaaatagtccaaagtctgagccttctactatgctgtgagctccttctctactaaaaatacaaaaaattagttgggcaaggtggcgcacgcctgtaatcccagctactcaggaggctgaggcaggagaatcacttgaacccgggaggcagag

SEQ ID NO: 122673 - DNA, 234 bp, Homo sapiens
cttgtttgctgtggaagtacttagaacacggagtcctgatgttctataaatcacagataggctaagggaggagctactctttaagaagctatcctgtagctctgacaagggctagggttgtggtaatggtactggctcatccctggctacttctaggcttattttgacatggcaattttaaccacacactacactggccacatcagaggaaaacattctggccagcattctcta

SEQ ID NO: 122674 - DNA, 386 bp, Homo sapiens
aacccccttttattgacatacctacctattcattatcagtatgaattcactaacttctatttttttcccagtggtttatcattcatcactattcttattctggggctcaaaatatgccagatgtggccacaatgatgtccctgaactggttcttgtgtcctcttttttttcctgagacagtctccccttgttgccagtgcagtggcatgatctcagctcactgcaacctctgcctcccgggttcaagtgatgcttgtgcctcagccttctgagtagctgggattacaggtgtgcaccaacaagccaggctaatttttgtatttttagtagaggcagggtttcaccatattgaccaggctggtctcgaactcctggcctcaagtgat

SEQ ID NO: 122675 - DNA, 276 bp, Homo sapiens
atcatggctcactgcagcctcaaaattctgggttcaagggatcctcccacctcagcctcccgagtaactgggactacaggtgtgcaccaccatccaacccaagctcttaaccactgcctgatacttcaagtctccccctcacccagaatgacagctctctgaaactcactgcaaagataaaatgagctggtgagaacagtcaacccagcagcacttactgggcaccaggctcactggtgcccaaacatggtcatgacgactgttctcatcactgcc

SEQ ID NO: 122676 - DNA, 670 bp, Homo sapiens
taatgtccatttccagacagtcttgtacaggaatctccatgtttaaggacagttgattttggcaaattggattttttaaaaattagactacagaatttttgtttgcaatcttcttatttaaggaatacccagataatttggtttggagagaagattattaaattttcctccacataataggtctctcttatcaggtctgtaagggacaaatagtgaatactcatttgcaactatgtaattgtcctgtagagcaagtgcagccataagtggtaagaaatgaatgagtatggctgtgttccaattacaattattatggatggatatacttgtatttcctatgtcagatggaatcttgctctgttgcccagccttgaaccgcatctacgcacctcttgcttacatattccgacccatccttacagcgccagctccccatcagccttaactccatcatctccaccccctggagccactatcatacgtccgtcaccggctcacacatcctaatcccgctcctccctctctcacctctttcttcacctgcctcctctactatatctctacttctgctccttctcctccctcccacttattcactgcttccattctttctcctttctcctattccctcctctactcctcccctctttacatcgctacccctttctcc

SEQ ID NO: 122677 - DNA, 433 bp, Homo sapiens
taatgtccatttccagacagtcttgtacaggaatctccatgtttaaggacagttgattttggcaaattggattttttaaaaattagactacagaatttttgtttgcaatcttcttatttaaggaatacccagataatttggtttggagagaagattattaaattttcctccacataataggtctctcttatcaggtctgtaagggacaaatagtgaatactcatttgcaactatgtaattgtcctgtagagcaagtgcagccataagtggtaagaaatgaatgagtatggctgtgttccaattacaattattatggatggatatacttgtatttcctatgtcagatggaatcttgctctgttgcccaggctggagtgcagtgacgccatcttgattcactgcaacctccgcctcccaggttcaagcagttctg

SEQ ID NO: 122678 - DNA, 841 bp, Homo sapiens
atcctggcacctgtgcgccgagccactgcaccgaggaggaccctactccgggtgaacaccgggcttgaagccacggacacccagccccagtgcagcgggttctcgccggcgggacctgcagccgcccactcgggccaccgccaccgcctcctgcagttgcggagcgctcagcccctccgagacgcccgctgcgccctggcccctggggatcctcgccctgcacaggcgcggcaacgggcaggggttgttacggagttgggtgcaggattcgcctttcctgcttgtctcttctccgcccaggatttattgtctgtggagccttctgggggcggggagggagctgcgcctccgccaccgccgccgccgccgccgctgctgctgcggtcgctagcgcggcgcgctgggcaggctgaggctggggagtggacgcgctcctgcctcccccgccggcgcttcgggcttcccctcagccgcttcccgcgggaacctctccagccgtccacctgaagggcactggcatcatggtctaacgtggcaccttcctggattcccctctatctcctgttcttcctaccttctactccttccctcctcttctcctccgaagaccctggcgcccactccactgcggacccctgaacacttaaggaataacccttggcagctgcacgactacgctctccgaaacctcatgggcagtttctcccgccggcgatgatggagaaccttaataacggggaaagggatcccccggaataccagaaaaagttccttgttacagagggtccgtgccagcacttccggaagaaggctgaagagcattgccctggggatgaacccc

SEQ ID NO: 122679 - DNA, 635 bp, Homo sapiens
gatacacgtctgtggtcccagctactcaggagcctgaggcaggaggatcacttgagcccgggaggctccaattgcagtggtgaatcttggctgtcttgcaaggatctgagattgtgccactgcactccagcctaggtaacagagtaagactctgtctcaaatgagtgaatgaatgaatgatccaggaagaaaaaggaacattttatttgccagctctggaacttgtaacattgaattaggtagctattcaccattttaaatttacatttttattattctaaatatctttaacaaggacttttaacataggggtctttttaaataagtgttttgctaggcacagtggctcacagttgaggagccacttggtaggctgaaggagggtggatcgcttgagcccgggagttccagaccagtctaggcaacatggtgaaaccccatcgctacaaaaaatgcaaaaattagcctggcatggtgacgcatgcctgtaatctcagcttcttggggatgctggggcaggatgcttgagcccaggaggtcgaggctgcagtgagccaagattgcaccactgcagtccagcttgggtgacagagtgagaccctgtctcaacaacaacaaaaataagtaaaataata

SEQ ID NO: 122680 - DNA, 417 bp, Homo sapiens
  misc_feature (117)..(117): n is a, c, g, or t
  misc_feature (158)..(158): n is a, c, g, or t
atgggggtgcaggagctttctttatgcaaaggtggaggctcaggcaagagggtggagaggaagaccggacttcactagactgactacagatgcagtccatctgttgggtgcagccanatgtgcaaccttggctatgccacacagaaagagggtctccnctctcaaccatccatgggagcagagtagccaacaggaaggtggggtagggacaggaagagaaaggactgagagctggtccacgctgctatgtttaggcagggctcagaagtaatactaatgatgaggtgttttgaggcatggaccacagggacattcagtgtaggatgaacctgcctgaaggaagccaactctgcaacaaagatggacacagactagcctgcccttcccactggcagtggcgacagatcccacatgcag

SEQ ID NO: 122681 - DNA, 179 bp, Homo sapiens
ttgttttactcaacagaaggccaacaagacaaagagctggctgagaggccgctcagcggtgcagctgcatgaatacaggtgttttctgtctttgaacccttccagcgtggcgtaccttgggcacactgaatctgctattgggtacaacttcaaaaccaaagccagggacagtgtgcatg

SEQ ID NO: 122682 - DNA, 139 bp, Homo sapiens
tcagtggtttcagacatccaccggggatcttggaacatatctcccaagaataagagggaactactgtagtctgttttcctacagtggtgccattcctgatattttcatatttttaaaaatttgctgatatttttattta

SEQ ID NO: 122683 - DNA, 652 bp, Homo sapiens
tgtggtggctcacgcctataatcccagcactttgggaggccgaggcgggtggatcacctgaggtcaggagttcaagaccagcctgaccaatatggtgaaaccccgcctgtaataaaaatacaaaaattagccaggcgtggtggccgggcgcctgtagtcccagctactcaggaggctgagacaggagaattgcttgagcctgggaggcggaagttgcagagagctgagattgcgccactgcactccagcctgggcaacagagtgaggctttgcttcgaaacaaaacaaaaaaatctgtaaaatgaggcaattacttcatgttacttctaagtctttttccagctgacattatttgattctcatctgaatactgtctgagagagtacagtgatgcagatacacacaaatcagatatgcatctgaactggccaaaggctttcccagtggcttcacatgccatgaaaagtcctagtgggtttccccaatctgtgtgagagctggatcagctcctggagataccagaatggttagggttgcctaagaccaccagaaacagtttagcttttaacactgtgcctcccctttctggctaatctttctagaatggaacaaactgatttttacaaaagtaatcaacttaagatcaacccac

SEQ ID NO: 122684 - DNA, 375 bp, Homo sapiens
tgtctaggtcattgccatcctaaccaggtagagagttgaaggcagaactcgttttatttggccagtattatgtttaataaaatgaacatttatgccttcaggcagtaaacacacagtctagttcacagcagttcctgttcttcattttatcttgttcttggcaccttaaattttgtttaacccctgtatccaaactcctgcagccatttgaatttgccatccctgatttagaacttcagcagaactgcttccctttattctcttcttccccctatcaatcaacgtttctgatgagtgagtgtgtagctaattcgaataagctagggtgggagatgaattctaggttgttgtgcaaagcccatctattcaatcatt

SEQ ID NO: 122685 - DNA, 1185 bp, Homo sapiens
gaattcaaaagatgcctatggttggttacacagcttttgatttgcataggtattcgaacccaggttttgctgacttcaatgctttaccttaaaagatgcttttttagaatggtagatgttaatagatggtctgtgtaattagtttcctgggcctcctgcaacaacatagaaaaaaatgggtaacgtaacatttattctctcacaattccagaggccagaagtccaaaatcaaggtgtcagcagggcgatgctctctgaaggctctagaggagaatccttccttacctcttccaaacttgtggcagttctcagcagtccttggtgttcttggcttgtagatgcatcactccaatatctgcctccatcaccccccagctgtctttcctcatatgtttttgcatcatcttacctctgcgtctgtgttcaagttttcttctgcttatgaggacatcggttatatttgtttaggagcctaccctattccagtgtgatctcatcttagttacatctaccatgaccttatttccaaataaggttacattttcagacatggtagttaagactttaacgtatatttttggggttgagaggacacaattcagttggtaacagctatgacaaaattgggtaaattgatgaacatcttaaaaaaaacacagtggaagaggcaggcactgtagagtgacaaaatacatctttatagaaattccatgttaaaattattttgtgttataataatcaaatttaaatacctaatacatatattaccattaaacaggatagtcagcactacctagttttttagctgaatttgtaatgtccatatgtttatgtttctttagtaatacttgaactaaaggaatttgcaaagaaaacccaataatattagtattacatcaaaaagttactgtgtatttttcttccatcaagaaataatgctgacttttaaaggtggaggagtttttagacttcagtaaacataggtaccctgaaaatgtgcactgttgtatcttttcacttttgtatgtcagtgctttgaaaaaatggacaatgttatcattttgttttgtctgcttattaaaattttctccctagtgtgatgtgactatcattttgccatttcagtgtcatattagaaatggttgttttatttaccaaataaattaaccaattcgttcagtattt

SEQ ID NO: 122686 - DNA, 1238 bp, Homo sapiens
gaattcaaaagatgcctatggttggttacacagcttttgatttgcataggtattcgaacccaggttttgctgacttcaatgctttaccttaaaagatgcttttttagaatggtagatgttaatagatggtctgtgtaattagtttcctgggcctcctgcaacaacatagaaaaaaatgggtaacgtaacatttattctctcacaattccagaggccagaagtccaaaatcaaggtgtcagcagggcgatgctctctgaaggctctagaggagaatccttccttacctcttccaaacttgtggcagttctcagcagtccttggtgttcttggcttgtagatgcatcactccaatatctgcctccatcaccccccagctgtctttcctcatatgtttttgcatcatcttacctctgcgtctgtgttcaagttttcttctgcttatgaggacatcggttatatttgtttaggagcctaccctattccagtgtgatctcatcttagttacatctaccatgaccttatttccaaataaggttacattttcagacatggtagttaagactttaacgtatatttttggggttgagaggacacaattcagttggtaacagctatgacaaaattgggtaaattgatgaacatcttaaaaaaaacacagtggaagaggcaggcactgtagagtgacaaaatacatctttatagaaattccatgttaaaattattttgtgttataataatcaaatttaaatacctaatacatatattaccattaaacaggtagtgctgactatcctgtttaatggtaatatatgtattaggtatttaaatttgatagtcagcactacctagttttttagctgaatttgtaatgtccatatgtttatgtttctttagtaatacttgaactaaaggaatttgcaaagaaaacccaataatattagtattacatcaaaaagttactgtgtatttttcttccatcaagaaataatgctgacttttaaaggtggaggagtttttagacttcagtaaacataggtaccctgaaaatgtgcactgttgtatcttttcacttttgtatgtcagtgctttgaaaaaatggacaatgttatcattttgttttgtctgcttattaaaattttctccctagtgtgatgtgactatcattttgccatttcagtgtcatattagaaatggttgttttatttaccaaataaattaaccaattcgttcagtattt

SEQ ID NO: 122687 - DNA, 385 bp, Homo sapiens
  misc_feature (358)..(358): n is a, c, g, or t
tggggctctttggtccccttcaccccccacaacactcagggttaggacctcccccatgcttgtcagcacacactgaattcctccagtgtctgggacagggtgtagggacaggaaggacacccttccagctcccgtcaccagagctcgggaggcagcggggcaggccttcgctctaggtcagagaggagccctttcttcagggccacgtggccagttacagcttcctgagttcaggaagggaaacgtcagaaggaagcagaaagggacatgggaacttgatggtcagggctttaactgccgtggtgagggatttccattttatcttgcagtcagccgagatcgcgccatggcactccancctggcaacagagcaagactccatctc

SEQ ID NO: 122688 - DNA, 206 bp, Homo sapiens
aaagtgctgggattagaggcgtgagccaccgtgcctggccaaaaaatgtttcctaaataaagttttatcagaagttccaacagtgactgtatggcctgcaaacctaaaatattcgctatccgatcctttaaggaaatgtttgccagcccctgctgtaatgaggaaaggatacagacaggagtcaggcagacctgattgtgtcaggg

SEQ ID NO: 122689 - DNA, 1545 bp, Homo sapiens
atgaaaattattagcatagcatataagataatttataaagaatctagaatctaaaatgtacaggaggatgtggataggttatatgcagatactataccactttgtataagagtctgaagcattcgaggattttgatattcaggggggttctggaacaaatctggatactgagggatggctctacagcctttcagaattaaattttctatgattttaatggttctttcaaagaccatgacagtaatcactgacgcctgttgccttacaaatctgcttgtacaagtaacatttccatgattatatgtacaagtaaaaaatacccactatacaaataacaaatccaagatcagtgaaattgagtacgatgacaattaaaatggtttgcataaatgtcctataacacatggaacacatgattcatcctcttgctaatgttcccagtttggcatcttctaagatcatattatttgagcacaatttttgatgcagaatcatctctctgttcccctactcgcttgtgagagggaacatttcctccttatgtgtcttagaatatttttacctaacatgcttaaacaaaacaaatttcattcttaacatcaggctctgaaagttccttttagttagcatttgctatattgacagctggtttgacaagtacatattttagcataagaaaaaaacagcaggccgggtgcagtggcccttgcttgtaatcccagcactttgggaggccaaggaggcagattgcttgagctcaggagatcaaggccagcctgggcagcatagcaagaccccgtctctaccaaaaaaaaaaagaaaaaaaattacaaaaactagccagatgtggtggcgtgcacctgtagtcccagctcttgggaggctaaggtgggaggatgacttgagcctaggaggcagaggttgcagtgtggttgagattgcactactgctctccagcctgggtgacaaagcgagaccctgtttcaaaaaaattaaaaacagcagatgagtttcttttttaaaactggattcaggatcagtgtaatgttactgatcttcaatagtaaccacaaacttaaaaaatctttacatattgccgtatgtattagatattctgatatttaatagctgagacagtcataccttatagtattattatcccaattttactagtgaggaaacaagcagttaataactgttagagctcagattcacattctgaaagttatagaaattaagaacatagagcctatgttcttaatttcaccaaaatatctcctcccaaattatacataccctttcaaacctaccttcctctcttagtaattaatgataccgtctttcaatttacatgaatcagtatcactattagtaaatgtattttatgccattatataacagactaatttatttattctgtactctactgtgatattttcctctatcttctgcaagattttcatttttaaaaattactgtcttggctgggtgcagtggctcatgcctgtaatcctggcctaggcaacaagagtgaaactccatctc

SEQ ID NO: 122690 - DNA, 541 bp, Homo sapiens
aaagtgtaagcatcgcctgagaatttgttcagaatgcaaattatcaggccctgtataagatctattgaatcagacactctggggagtggagtccagtagtctgcatttaacgagccctgcaggtgaattggatgcatgttaaagtctgagagccactgaattagaacaagggaactgataggaacttacagtataccttgtgagaaatgctaagtttatcagccaaagtattggttacagtaatggagaagcaggcatagacagattcagataagtgtttcagtggccagataagtcagtgtgataggaacatcaaggaataagtcatcatcgcttctgagagagaggtgggggtggtgcttgatagacatataacagtgacctgtggctttgagaatggatcagacagaatgagatgctgggaggagcaagcgaagcatagtccagtaaccagaaccacaaggacgtcagtgtctcctgccctgactccacatcattgctggccatgaaaagtgaaatgttacctaagaaaggtattccc

SEQ ID NO: 122691 - DNA, 662 bp, Homo sapiens
tgcctgctgccatccatgtaagatgtgatttgctgctccttgccttctgccataattgtgaagcctccccagctatgtggaactaaaatgaaacagttggtgatgtttcagagaacccaactcaaactgacttgaacaagagaaatcagtgtttactgcagagaacacagaagccagcaagcagcagggaagggaggcgaaccaatgcagcagcccaccgggaccgaggaggacacacgcagagcaagtcacaggaagcgcagctgaaaacaaatggacgcttatcccaaatgcacaggacacttaccaagaactgatggtccgtcaaagtaaagctcaacagctttggctggcaggacagtcaaacttttggacgacagaaagtaacagtgggaaatgggacaacatctgccagcaacgcgagaggccaagaccatggctgctacaggaggggtcagcgtcacagtacacgcatggcggcggttgcacatgcatgcctggggaatgtgagtgttcagacatgccaggagtccagcctcaccaggaaacaggcacacggggacagaggcgcaaacactgaaaactctcgctgaatccactcggctgagcggtggtcacgagagcacggccctgcgctccccacaaaactgcacctgggcccc

SEQ ID NO: 122692 - DNA, 124 bp, Homo sapiens
ctgcctgcctcggcctcccaaagtgctgggattacatgcgtgagccactgcgcccggcctctatgcgttactttggagaagtcacgttcctctttacacacccatgtgtccaaatgtgaagtcc

SEQ ID NO: 122693 - DNA, 330 bp, Homo sapiens
tatcaaggcaacatcccttaaacaagttaacagagatgctctttttcagtgagtcttctggaagaatcgatgccagtctgcccttatgacaaacatatttcttaatgagatctgatttacgaagttttgacaattatgcttttcccctctcttactgccactttaagaaaaatcatgctggtaagctacactacaaaacttctggcctgcagagggctctataataccatattttcctagacaacacttgtaaaaaggaaaaaaaaaaaaaaagatacttgctggaagggggaaggggaagcccagaggctttataatgcttccagcagg

SEQ ID NO: 122694 - DNA, 543 bp, Homo sapiens
gtgccatgtttggtatcagtaggtcagccacgcaagctgcagtttctgggtctagcaggaggggtggtggggtttccaatgcaccagttctgtggtgtgatttgaaaaatgatattatttagattttgctgcataactgatcatcccataactaagtggtaagtcgcaaagactctcttcttgactgaactttagataagctcttctgagttctgtttttgaccatgccccagtgtaggcttataaaaactgcagactctcagcataaatgatttttgtctattttccatactccactcccacactaaaatttttgagcaaaaattaatatagtttctagcagctcaaagctacattcctagaatgaccctagccccttaaactgctcaccttggaaagctcaagactgatccagtccaaaccagtaataaacaggcccctgaaccctcccctcttagagcagttgtagtttaggaagcttgcagttgtaattcctttctcttcccctttgcgatgtagatcttctaccacccaaaattaaca

SEQ ID NO: 122695 - DNA, 482 bp, Homo sapiens
agaaaggtatcttatttcagttttgtgtacttggcacccagtaggtcttcacaaaatactgaattaatgaaatccaacagaaaacccagttagaacccagctcctgggttatagaaaatcaaatatgtgacaattcaaaatgtatcttccaaagcagtgtgttctgtgatgatgaaatgtcctatatctgtgttgtccaatacggtagccactagtccatgtggcttttgagcatatgaaatgtggtttgtgcaacagaggacctgaaattttcattttatttaattttaaataaacgtaaatagctacatgtcttagtggctaccattttggaccacacagccccaaggcctcacatctttatcctttaagaaccagatacaactttgttagccaggaaagcaggcattcatctttttcttaacatgatcatagaggctgagaatgtggggaggttgtggatgatacaatacccatgtctg

SEQ ID NO: 122696 - DNA, 529 bp, Homo sapiens
agttaatagagatataataaatacaagttttctggaactcttttcttttttttcctatgccatttaataccaactaggtttattacttaaatattatttgaaaagccccagctatgtataaatacaccctaggtgtgcatttataaataagtcaacagaaataaacaaaatgtacatatgtatacatataaattccatatggcatgtggggctatattagtttgaaccatatatgattgccattgtaggtcaaaacagactatatttatagcaaaactgtttagactgtagccatgtggagccaagtttcagaaacctgttgagtttcatatcccgggaagccactttctagtgtatatgggagcaagattgcctaaaatgtgttaacacatgctgctcatggtctagaggatgattctaggtgatacacaggtcaacattttttgtttcagtagccagctatttcacaggtattattgcttacaattggaaaaaatttttttgagttaacattaaagatgttagttga

SEQ ID NO: 122697 - DNA, 861 bp, Homo sapiens
cgcgccaggcagatgagggaagctggagtgaggttcagagcccggagggaggaggaggacgcctttgtccgctgtgtctccgtcctagggaacctggctgaccagctctactacccctgtgagcacgtggcctgggcggctgatgcccgggtcctccacgtggactcttctcggtggtggacgctgagtacaaccctgtgggccctctctctgctcctgggggttgccaggtccctgtggatgctgctgaaactgagacagaggctgcggagccccacggcgcccttcaccagcccgctgccccggggcaagcggagggccatggaggcgcagatgcagtcggaggcgctgtcacttctcagcaacctggccgacctggccaacgccgtgcactggctgccccggggcgtgctgtgggccggccgcttcccgccgtggctagtgggcctcatgggcaccatctcctcaatcctcagcatgtaccaggcggcccgggccggcggccaggccgaggccactaccccctgacactgccggaagagcacagggacacagccagagcccacggagggcccttcccgcaaagcagaagccgccagggcaggggccggggctctcatggagctgcctgtggtgaaacccatgggcagggtgggtggagggactgatgcgaggtcccccaggcctcagcctggagctcctgagccgtgacagttttcaggggccgtgcagggcttcagcagcacctcctgcctgccagctggcgtcttgtatccaaatcaagatgaggaagagggggcctgtcgtgccttgagaaagctggaacgggaatcaattaaacattgtggtgctggcacctgg

SEQ ID NO: 122698 - DNA, 1375 bp, Homo sapiens
tccaggctgtacggccggatttatgggatgctggtgcgaatactgcctccttagagctccaggaacccagttcttagctgtgatggatccttgcaatgaaagaattaagaagggcgggtgcggtggttcacgcctgtaattccagcactttggaaggtcgacgtgggaagattgcttaagcccagggctcaaggccagcctgggtaacatgaacaattcttaacgtccaaagataacgtctttccttaacgtcgaaagatgccttgttgtgatattacagcagtcattcctgctcactacgggcaggcagacagtgcagaaaaggtgaagcacaaaaactaaaaaggaaaatctctccttgaaccactgcgaacagatccgagtgctggggtactgctgccagctggttggtggagttctggttgaacagtgtcccgccaggtccgaagtggggacacgtctgttggtggtgtccacccaactcagccactgcaggaccatcttgcgactctttgatgacctggccatgtttgtctacactaagcaatatggcctgggggcacaggaggaggacgcctttgtccgctgtgtctccgtcctagggaacctggctgaccagctctactacccctgtgagcacgtggcctgggcggctgatgcccgggtcctccacgtggactcttctcggtggtggacgctgagtacaaccctgtgggccctctctctgctcctgggggttgccaggtccctgtggatgctgctgaaactgagacagaggctgcggagccccacggcgcccttcaccagcccgctgccccggggcaagcggagggccatggaggcgcagatgcagtcggaggcgctgtcacttctcagcaacctggccgacctggccaacgccgtgcactggctgccccggggcgtgctgtgggccggccgcttcccgccgtggctagtgggcctcatgggcaccatctcctcaatcctcagcatgtaccaggcggcccgggccggcggccaggccgaggccactaccccctgacactgccggaagagcacagggacacagccagagcccacggagggcccttcccgcaaagcagaagccgccagggcaggggccggggctctcatggagctgcctgtggtgaaacccatgggcagggtgggtggagggactgatgcgaggtcccccaggcctcagcctggagctcctgagccgtgacagttttcaggggccgtgcagggcttcagcagcacctcctgcctgccagctggcgtcttgtatccaaatcaagatgaggaagagggggcctgtcgtgccttgagaaagctggaacgggaatcaattaaacattgtggtgctggcacctgg

SEQ ID NO: 122699 - DNA, 1097 bp, Homo sapiens
tccaggctgtacggccggatttatgggatgctggtgcgaatactgcctccttagagctccaggaacccagttcttagctgtgatggatccttgcaatgaaagaattaagaagggcgggtgcggtggttcacgcctgtaattccagcactttggaaggtcgacgtgggaagattgcttaagcccagggctcaaggccagcctgggtaacatgaacaattcttaacgtccaaagataacgtctttccttaacgtcgaaagatgccttgttgtgatattacagcagtcattcctgctcactacgggcaggcagacagtgcagaaaaggtgaagcacaaaaactaaaaaggaaaatctctccttgaaccactgcgaacagatccgagtgctggggtactgctgccagctggttggtggagttctggttgaacagtgtcccgccaggtccgaagtggggacacgtctgttggtggtgtccacccaactcagccactgcaggaccatcttgcgactctttgatgacctggccatgtttgtctacactaagcaatatggcctgggggcacaggaggaggacgcctttgtccgctgtgtctccgtcctagggaacctggctgaccagctctactacccctgtgagcacgtggcctgggcggctgatgcccgggtcctccacgtggactcttctcggtggtggacgctgagtacaaccctgtgggccctctctctgctcctgggggttgccaggtccctgtggatgctgctgaaactgagacagaggctgcggagccccacggcgcccttcaccagcccgctgccccggggcaagcggagggccatggaggcgcagatgcagtcggaggcgctgtcacttctcagcaacctggccgacctggccaacgccgtgcactggctgccccggggcgtgctgtgggccggccgcttcccgccgtggctagtgggcctcatgggcaccatctcctcactcctgcctgccagctggcgtcttgtatccaaatcaagatgaggaagagggggcctgtcgtgccttgagaaagctggaacgggaatcaattaaacattgtggtgctggcacctgg

SEQ ID NO: 122700 - DNA, 580 bp, Homo sapiens
tccaggctgtacggccggatttatgggatgctggtgcgaatactgcctccttagagctccaggaacccagttcttagctgtgatggatccttgcaatgaaagaattaagaagggcgggtgcggtggttcacgcctgtaattccagcactttggaaggtcgacgtgggaagattgcttaagcccagggctcaaggccagcctgggtaacatgaacaattcttaacgtccaaagataacgtctttccttaacgtcgaaagatgccttgttgtgatattacagcagtcattcctgctcactacgggcaggcagacagtgcagaaaaggtgaagcacaaaaactaaaaaggaaaatctctccttgaaccactgcgaacaggttggtggttttgcttggaatatttttggagcgtgtgggtagttggttaaacttagaaatatatttttttgtgcgtgggtagttggccaaaccgccgtggggcagaatgcagcaaactccgaggatgatccagggtctgcaggcctggagagcacacacgtgtcggccccacctctgcaaactctgtccctcccctacagcgga

SEQ ID NO: 122701 - DNA, 1077 bp, Homo sapiens
  misc_feature (3)..(3): n is a, c, g, or t
  misc_feature (7)..(9): n is a, c, g, or t
ggnacgnnnggagttgccatggcgtcgctgagcggcctggcgtcggcgctggagtcgtacaggggccgggaccgcctgatccgagtgctggggtactgctgccagctggttggtggagttctggttgaacagtgtcccgccaggtccgaagtggggacacgtctgttggtggtgtccacccaactcagccactgcaggaccatcttgcgactctttgatgacctggccatgtttgtctacactaagcaatatggcctgggggcacaggaggaggacgcctttgtccgctgtgtctccgtcctagggaacctggctgaccagctctactacccctgtgagcacgtggcctgggcggctgatgcccgggtcctccacgtggactcttctcggtggtggacgctgagtacaaccctgtgggccctctctctgctcctgggggttgccaggtccctgtggatgctgctgaaactgagacagaggctgcggagccccacggcgcccttcaccagcccgctgccccggggcaagcggagggccatggaggcgcagatgcagtcggaggcgctgtcacttctcagcaacctggccgacctggccaacgccgtgcactggctgccccggggcgtgctgtgggccggccgcttcccgccgtggctagtgggcctcatgggcaccatctcctcaatcctcagcatgtaccaggcggcccgggccggcggccaggccgaggccactaccccctgacactgccggaagagcacagggacacagccagagcccacggagggcccttcccgcaaagcagaagccgccagggcaggggccggggctctcatggagctgcctgtggtgaaacccatgggcagggtgggtggagggactgatgcgaggtcccccaggcctcagcctggagctcctgagccgtgacagttttcaggggccgtgcagggcttcagcagcacctcctgcctgccagctggcgtcttgtatccaaatcaagatgaggaagagggggcctgtcgtgccttgagaaagctggaacgggaatcaattaaacattgtggtgctggcacctgg

SEQ ID NO: 122702 - DNA, 846 bp, Homo sapiens
gactgcttctggtttcccacagatccgagtgctggggtactgctgccagctggttggtggagttctggttgaacagtgtcccgccaggtccgaagtggggacacgtctgttggtggtgtccacccaactcagccactgcaggaccatcttgcgactctttgatgacctggccatgtttgtctacactaagcaatatggcctgggggcacaggaggaggacgcctttgtccgctgtgtctccgtcctagggaacctggctgaccagctctactacccctgtgagcacgtggcctgggcggctgatgcccgggtcctccacgtggactcttctcggtggtggacgctgagtacaaccctgtgggccctctctctgctcctgggggttgccaggtccctgtggatgctgctgaaactgagacagaggctgcggagccccacggcgcccttcaccagatcctcagcatgtaccaggcggcccgggccggcggccaggccgaggccactaccccctgacactgccggaagagcacagggacacagccagagcccacggagggcccttcccgcaaagcagaagccgccagggcaggggccggggctctcatggagctgcctgtggtgaaacccatgggcagggtgggtggagggactgatgcgaggtcccccaggcctcagcctggagctcctgagccgtgacagttttcaggggccgtgcagggcttcagcagcacctcctgcctgccagctggcgtcttgtatccaaatcaagatgaggaagagggggcctgtcgtgccttgagaaagctggaacgggaatcaattaaacattgtggtgctggcacctgg

SEQ ID NO: 122703 - DNA, 877 bp, Homo sapiens
attgatctcagctcaaaataatcctacaccaagaacaattcttaacgtccaaagataacgtctttccttaacgtcgaaagatgccttgttgtgatattacagcagtcattcctgctcactacgggcaggcagacagtgcagaaaaggtgaagcacaaaaactaaaaaggaaaatctctccttgaaccactgcgaacaggctgagtacaaccctgtgggccctctctctgctcctgggggttgccaggtccctgtggatgctgctgaaactgagacagaggctgcggagccccacggcgcccttcaccagcccgctgccccggggcaagcggagggccatggaggcgcagatgcagtcggaggcgctgtcacttctcagcaacctggccgacctggccaacgccgtgcactggctgccccggggcgtgctgtgggccggccgcttcccgccgtggctagtgggcctcatgggcaccatctcctcaatcctcagcatgtaccaggcggcccgggccggcggccaggccgaggccactaccccctgacactgccggaagagcacagggacacagccagagcccacggagggcccttcccgcaaagcagaagccgccagggcaggggccggggctctcatggagctgcctgtggtgaaacccatgggcagggtgggtggagggactgatgcgaggtcccccaggcctcagcctggagctcctgagccgtgacagttttcaggggccgtgcagggcttcagcagcacctcctgcctgccagctggcgtcttgtatccaaatcaagatgaggaagagggggcctgtcgtgccttgagaaagctggaacgggaatcaattaaacattgtggtgctggcacctgg

SEQ ID NO: 122704 - DNA, 597 bp, Homo sapiens
gcacgagctaacacagagtatatgatcctcagtttcatcatagagcatattcagataccgtggaggcacttttgatggacaaaggctatcagcaatgctatccagtcccattagggaagttaagagtctccccagagtctgttgtcctttctctgagctctgcagaagctgagacctcagaagtttagtaaggcagcccgggcacagtggctcacgcctgtaatcccaacactttgggaggctgaggcaggtggatcacctgaggtcaggagttcgaaaccagcctagcctatgtggtgaaaccccgtctctactaaaagtacaaaaatcagctgggtgtgatggcatgtgcctgcaatcccagctactacggaggatgaggtggaagaattgcctgaacccaggaggtggtggttgcagtgagctgagattgcaccatggcactccagtctgggcgacagaatgagactttgtttcaaaaaaaaaaaaaaaaaaaagtttagtaaggcagacgtaaaaatcaggaactaaatttcggttattgctgagtctgggagataccatggtaccaccaggagggatgctacccttatgaac

SEQ ID NO: 122705 - DNA, 575 bp, Homo sapiens
atgttcacgtagtgccatctagtacaatggaaatggcatgggatttggactgaaccagaattgtcttaaatcctggctttgttagttttaggtatgtcatcttgagcagttcacttcactttttgagccacaatttctcttccttacataaagatatttataaataccccacaggttgttataataaaggttgaaggtgcttggcacataagcaaaaattatgaataaatatgtattaaaatatataataactacaaaataaaataaaaatattgtttttctcaccacatgtcaggatctttacacatataatctaattttatccttacaggattgctagcctggtgtgcaacaatagttgtcatatattgagtgactgtcaattgccaagtccttcacttttctcatgaacatcacatggacacctcatgagccagtcaccaagcactgtgctaatcactagggaaacaggaataaaatatgatcctagtcttctaggatggggtttttcaaactttaattgcaaatgaaacaccgagggatatgttgaaatgaagattctaacccactaggtc

SEQ ID NO: 122706 - DNA, 1049 bp, Homo sapiens
atgttcacgtagtgccatctagtacaatggaaatggcatgggatttggactgaaccagaattgtcttaaatcctggctttgttagttttaggtatgtcatcttgagcagttcacttcactttttgagccacaatttctcttccttacataaagatatttataaataccccacaggttgttataataaaggttgaaggtgcttggcacataagcaaaaattatgaataaatatgtattaaaatatataataactacaaaataaaataaaaatattgtttttctcaaaaaaaaaaaaaaaaaaaaaaaaacaaaaacattgttgtggggcgggcctggcgcccatagagaaaaaggattttctaagaccactttgtgcgttgggggcgcgcgcgggggcgccccaaaagtgggttatcggtggaaccgtgtggacaaagaggggtgctcccaagaagagagaactccgcggccacgggcaatggcggccgtggggtcttcctcacaagataaaaaaaaacggcgccggggggacaccgcaggggggttcttgcaccaacaccccagagagggggggcttgccgggaggagccccactagacgggggagctcttacacaagcggaggaggtccccaagggggagagccgggaatataaaaaattagcctgccgcgggcgctggaggagggaaaagaggaaagcacaggcacgccagagaaaggacacgaaagacgacacgatagcacaagaagacacgaaacaacaagcggacgaaagagagaagaaaaagaagaaacaaccaacaagaaaagcggatagaaaaaagaagaaaaaagcaacagacgaaagacaagaagagaaacagaaaagaagaagacgaaacaagaaagacaaaaacaaaacaaaaggacataggaaaaaaggagagaaaagaacaaaaaacggaaaaaaagaaaaaagaaggagaagaaaagacaaaaggaacacaaaaaaaaagaaagaaggaaaacgcaaacacaaacggcaacaagagagagcaagagaagacaat

SEQ ID NO: 122707 - DNA, 429 bp, Homo sapiens
atacacagatatattatatattttaaagaattgactcatgagattgtggggtctggctgcagggaataggtgaatattgccgtcttgaatccaaaggcagtttggaggcagaatttcttcttcttcaggggacctcagtaattcttcttaaggcctctgactgttggatgaggttccccaacatcatggagggtgacctgctttactcaaagtctactgactgaaacgttaatcacatctaaaaaatacattcacagcaacatctagactgctgttttaccaaaaaccaagtaccatagcctagccaagtggatataaattaacgatcacaaacagctaaacattccaaacaagcagacagagagagaaaaaaataaagaaatgtgaaggggaggagaattttcaatcaattctggaaaagacaaaaaa

SEQ ID NO: 122708 - DNA, 765 bp, Homo sapiens
agagatggaatctggccaggttgaccaggttattcttgaactcctggcctcaagcaatcctcctgctttcacctcccagtgtgcttggattacacatatatgattttatttgaaaacaaaatttcactgctaatttttaatgtttaaatcacggagggactagaagagtcataactagaggtaaagagaattggaagaaaagtttttacaatcacattagaagaaataaacacttgaaccagaaaagtggcagtggaaatggaaagtgtatgaatttgatattgttagagtagaatcaacaaaatttgatacttgattatgtatattggagaaggtaaagtcaaatgcaatcataagatttggaactggatcattgggacaatggtattgattttagtaaaaacagaaatgcaagtttggagaagaggagagcaagaggattgacttaactgctggacatgtttcttgcatttgaaaggctattggcacatataggtggagaggtccagcagacatcaagaaattgcagggatggaacttgggtgggaagtctgtgctagaaatatagaattggtggttattcatgtacaggtaatggctgtagccagagaataggtttgattgacaaaggaggagtataaagagaagagacaagaagagtaaaacttaaccaccaaagtttagaaaaaaggaatttggaagagttgcttttgcacttgttattctccctacatatttgtttgcaaattcctagaaagtagtaac

SEQ ID NO: 122709 - DNA, 471 bp, Homo sapiens
atgtctactcctatgggcaagacacagaaagtgggtcaaccaaagtcaatcctaccattatataaggtgaattgctcaaatagaattctcactgacctatcctggaaagttctcagttaagggtcaaaggctgccggtgcccctctctggaagcttctgtcttgtttgaaagcttaaactggccaccagcccaaacctgatttcctatagcagtttttaaacctagcctgcaaaagaatcatctggaatgctcattacaaaatgcaaacagggccgggtgcggtggctcatacatgtaatcccagcactttgggaggccaaggcaggtggatcacatgaagtcaggagttcaagaccagcctggccaacatggtgaaatcccatctctactaaaaatacaaaaattagccaggtgtggtggcgggcacctgtaatcccagctactcaggaggctgaggcaggaggatcact

SEQ ID NO: 122710 - DNA, 468 bp, Homo sapiens
atgtctactcctatgggcaagacacagaaagtgggtcaaccaaagtcaatcctaccattatataaggtgaattgctcaaatagaattctcactgacctatcctggaaagttctcagttaagggtcaaaggctgccggtgcccctctctggaagcttctgtcttgtttgaaagcttaaactggccaccagcccaaacctgatttcctatagcagtttttaaacctagcctgcaaaagaatcatctggaatgctcattacaaaatgcaaacagggccgggtgcggtggctcatacatgtaatcccagcactttgggaggccaaggcaggtggatcacatgaagtcaggagttcaagaccagcctggccaacatggtgaaatcccatctctactaaaaatcagctgggcatggtggcgcatgcctgtaaatcctagctatttgggaggctgagttgggaggatcacttgaa

SEQ ID NO: 122711 - DNA, 326 bp, Homo sapiens
ggctccgacacaggcacaaagagcacagggctgatgccacccggcacccaaacgcagaccagacctgggcccgctgctcccctgctgtgtggccctggggaaatcgttctcctctgagcctatttcctcagtgcatcacagggaaagcaccgcagatgacacctgctctagggttaggtaaagtctctccaaagtcagcagcacagagcagtgtcctcttagagcccccagcccccacggtgggacagaggaaaagcgtgaggacaggctgggcctgctaagaccatctctggtgcagaagctgagccctgcttgtgtccagggct

SEQ ID NO: 122712 - DNA, 569 bp, Homo sapiens
aataacttacgtaacaactacccaggacacaccagtgtttagcaacactatagttgataatttttggattagacattgtttctcaagtggatgactataacctcctcagtccatttttgtactttcatcattaacttttttaaaaagcaaaggtgattgtgttattggactggttaaaatctacctttctttgtctacaaattggagttcagactcgttatcttggcatataaagctctttataatcttgccctgaccttcagctctatgttctgctacttgatctgatacaaaaatacgctgcagcccaccaattgaatttgtatcttcagttccccaggtgtaatgaacatgtcttacacattttacatctccagaatacatcacagtatctactgtcacatacctgataataaaaatgtactgaatatctaaaattgttaagtgcttcttactagaaatcactcataatggctgtttttctaaattaatgggttttacttcaattactgaaatatatgcttttcaatcacttacctttcaagagactcagaaatcaaaatttcaag

SEQ ID NO: 122713 - DNA, 1651 bp, Homo sapiens
tggattgtcacccttctattttccccccctcataattcattttttctctttattgatttcctgttttatctcctaagttttgcttttatcttccttccatgctttctagagattgcttatggctttgcttttgttaccctccttgatcctggggatatccagtaatgtaacaaattactgggagttacttttcatcttttgtccacccaatttaagcagataattatttgagaacattgactgtaaaaatgtatttcaaatttcgtttaggcttttttttatggtagatacatgacttcaaacattttttaaggtattgattcaaatttctctatgtctgctaaatcagatgtattggttgtattattcagttcttctctgtccttgcacatactgtgtttattgaatgcgtccgtcgaagttacggatgcattcatgcagctgacagttatatttgttttattggagtcatgatattaaaatcagcgtttgtcaacctcaggggatatttagcaattgtcgggagacatttttgatgtcatgactagggcagttattgacatttagtgagtagaggccagggatcctgctaaataacctgcattggacagcgccccacaacaaagaattatcctgcccgaaatggtagtcgtgccaaggctgagtaaccttgtgttaaaagtaacctgtggcagactaggtttccagaatttcctggttctgctcacgtatcatgtttgaaaaaattttggctattaaagatatgtattagatggtcttatcctgattattacctggatacaacttgatcttttctaatattttcagaaagtgatgggataaccctagaagaggactcagaatgatatttatattttaagtgagtcttaaaacctcctcttatttctacaagttatatggctaaatttcagattgaacagggattcagcattctgccatctcctcatggaaagagaggctccctcatctgaagcgtctctgaaatctacccttgcaagcttcagacaaatcagttgatctccctgagccacacggcctcattctgtgagggagggaaagattagccaaagagttaattttcattccaaatcacttagctgttagactgatctgtttgtagcagttgtttgtctcatttttgctctgtgcattttttgagacatttgttgagaatattctatttggtgctctactgtatttttctttttaatatctacttgatatcttgttctttaaattttcttcacatatggtttgcctgatacaactgatttttataactgaaatttaaggaatctaacagctaaaactcagtaagtgcatatatttccttataacatagacccgttgctactctcagcaccctctcctcaattttttttcctgtagcatgtgatgcctgattaaactcattttcatttgcttttatttctaatatgggaacaatgagagtgaactctaaatataggttgtagtaataaaacatcattagcctaattattagaaaatgctaattaagtaccagcacatagaaacatgaaattgcttagtcattgtacctttgtcagcaattttgacagtcattaatgtttgtcataattttaaataaagtgtctgggtttcagaatac

SEQ ID NO: 122714 - DNA, 595 bp, Homo sapiens
atgtctcaagtagactgtgtgcattgaagcatttacttctgattctgggattgtgcaattgatttatatctgatttacaaattaaaggtgcatgattaaactagatgttcattaattttgaaaaattgtgactcacgctaatgatttttaacatattaacagttattatagatttatagtaagtatattgcttttatcttcaaatcatagccatttagctatattccttgcagtacaagtgcggaaaatcagttgcatttgaaactctcttaagtggttggactatgttgagaaatgtatagtagaatatttctgattaacaataattttgggaaacctcataaatctgtatatttgttacatatcagtgtggatgctttgtagatatacatgtaatatctgttgaatttttaattttcatatagggcaagcagtatccatggcatttttgcaatcctatattgatgtggcagttaaactgaaaggtagtgtactgtgctatgcatgcttattattctgattctaagctgtagctatttgtaaaactatgtcatgcaaaaaatatagaaaaccacataaaatttcagttactatg

SEQ ID NO: 122715 - DNA, 4561 bp, Homo sapiens
  misc_feature (913)..(913): n is a, c, g, or t
gccgagtcggtggcggctgcaggctgggagggagaagtgctacgcctttgcaggttggcgaagtggttccaggctacccggctagtctggcacggccccgtcttctgcctcctcctccgtcgcgtggcggcgggaactgttggccgcgcggcctcgggaacggcccaggtccccgcccgcaggtcccgggcagataacatagatcatcagtagaaaacttcttgaagttgttcaagaaaaatttgaaagtagcaaaatagaaaataaagaattaacagcagatacagaggacagcatggaagtgttgtcttaggaaacagaacacagcagtgaaaaaacagacaaaatccgctcagatacaactgcagctgataatgttttccggcttcaatgtctttagagttgggatctcttttgtcataatgtgcattttttacatgccaacagtaaactctttaccagaactgagtcctcagaaatattttagtacattgcaaccaggaaaagcctctttagcttatttttgtcaagctgattccccaagaacatctgtatttcttgaagaactgaatgaggctgttagacctctgcaggactatggaatttcagttgccaaggttaattgtgtcaaagaagaaatatcaagatactgtggaaaagaaaaggatttgatgaaagcatatttattcaagggcaacatattgctcagagaattccctactgacaccttgtttgatgtgaatgccattgtcgcccatgttctctttgctcttctttttagtgaagtgaaatatattaccaacctggaagaccttcagaacatagaaaatgctctgaaaggaaaagcaaatattatattctcatatgtaagagccattggaataccagagcacagagcagtcatggaagccgnttttgtgtatgggactacataccaatttgtcttaaccacagaaattgcccttttggaaagtattggctctgaggatgtggaatatgcacatctctacttttttcattgtaaactagtcttggacttgacccagcaatgtagaagaacactaatggaacagccattgactacactgaacattcacctgtttattaagacaatgaaagcacctctgttgactgaagttgctgaagatcctcaacaagtttcaactgtccatctccaactgggcttaccactggtttttattgttagccaacaggctacttatgaagctgatagaagaactgcagaatgggttgcttggcgtcttctgggaaaagcaggagttctactcttgttaagggactctttggaagtgaacattcctcaagatgctaatgtggtcttcaaaagagcagaagagggagttccagtggaatttttggtattacatgatgttgatttaataatatctcatgtggaaaataatatgcacattgaggaaatacaagaagatgaagacaatgacatggaaggtccagatatagatgttcaggatgatgaagtggcagaaactgttttcagagataggaagagaaaattacctttggaacttacagtggaactaacagaagaaacatttaatgcaacagtgatggcttctgacagcatagtactcttctatgctggttggcaagcagtatccatggcatttttgcaatcctatattgatgtggcagttaaactgaaaggcacatctactatgcttcttactagaataaactgtgcagattggtctgatgtatgtactaagcaaaatgttactgaatttcctatcataaagatgtacaagaaaggcgagaacccagtatcttatgctggaatgttaggaaccgaagatctcctaaaatttatccagctcaacaggatttcatatccagtgaatataacatcgatccaagaagcagaagaatatttaagtggggaattatataaagacctcatcttgtattctagtgtgtcagtattgggactatttagtccaaccatgaaaacagcaaaagaagattttagtgaagcaggaaactacctaaaaggatatgttatcactggaatttattctgaagaagatgttttgctactgtcaaccaaatatgctgcaagtcttccagccctgctgcttgccagacacacagaaggcaaaatagagagcatcccactagctagcacacatgcacaagacatagttcaaataataacagatgcactactggaaatgtttccggaaatcactgtggaaaatcttcccagttatttcagacttcagaaaccattattgattttgttcagtgatggcactgtaaatcctcagtataaaaaagcaatattgacactggtaaagcagaaatacttggattcatttactccatgctggttaaatctaaagaatactccagtggggagaggaatcttgagggcatattttgatcctctgcctccccttcctcttcttgttttggtgaatctgcattcaggtggccaagtatttgcatttccttcagaccaggctataattgaagaaaaccttgtattgtggctgaagaaattagaagcaggactagaaaatcatatcacaattttacctgctcaagaatggaaacctcctcttccagcttatgattttctaagtatgatagatgccgcaacatctcaacgtggcactaggaaagttcccaagtgtatgaaagaaacagatgtgcaggagaatgataaggaacaacatgaagataaatcggcagtcagaaaagaaccgattgaaactctgagaataaagcattggaatagaagtaattggtttaaagaagcagaaaaatcatttagacgtgataaagagttaggatgctcaaaagtgaactaattttatagggctgtggtttccaaaatttttttggcatgatagacttaatttatttccttaaagaataatattaaatcatttcaagtttgcagactagtgccatccaatagaattataatataagtcacatattttatttaaaattttctagtaactacattaaacaaagtaaaagtgagcagggcaaaataattttgatattacttttcacccagtagtatacccaaaatagcgaaatatagaaattattaatgagatattttacatccttttttgtaccaagtcttctaaatgcagtacatattttatacttactgcatttcttacttccgagtagccatatttcaagtgttccttgccacatgtggcctgtgactactgtattggacagttcagtactagacaaaaactagcataattaacttagttctagccatgatttctatttggattaaaattaaactctaatcacagttaactccacagtgcattcatgcagctgacagttatatttgttttattggagtcatgatattaaaatcagcgtttgtcaacctcaggggatatttagcaattgtcgggagacatttttgatgtcatgactagggcagttattgacatttagtgagtagaggccagggatcctgctaaataacctgcattggacagcgccccacaacaaagaattatcctgcccgaaatggtagtcgtgccaaggctgagtaaccttgtgttaaaagtaacctgtggcagactaggtttccagaatttcctggttctgctcacgtatcatgtttgaaaaaattttggctattaaagatatgtattagatggtcttatcctgattattacctggatacaacttgatcttttctaatattttcagaaagtgatgggataaccctagaagaggactcagaatgatatttatattttaagtgagtcttaaaacctcctcttatttctacaagttatatggctaaatttcagattgaacagggattcagcattctgccatctcctcatggaaagagaggctccctcatctgaagcgtctctgaaatctacccttgcaagcttcagacaaatcagttgatctccctgagccacacggcctcattctgtgagggagggaaagattagccaaagagttaattttcattccaaatcacttagctgttagactgatctgtttgtagcagttgtttgtctcatttttgctctgtgcattttttgagacatttgttgagaatattctatttggtgctctactgtatttttctttttaatatctacttgatatcttgttctttaaattttcttcacatatggtttgcctgatacaactgatttttataactgaaatttaaggaatctaacagctaaaactcagtaagtgcatatatttccttataacatagacccgttgctactctcagcaccctctcctcaattttttttcctgtagcatgtgatgcctgattaaactcattttcatttgcttttatttctaatatgggaacaatgagagtgaactctaaatataggttgtagtaataaaacatcattagcctaattattagaaaatgctaattaagtaccagcacatagaaacatgaaattgcttagtcattgtacctttgtcagcaattttgacagtcattaatgtttgtcataattttaaataaagtgtctgggtttcagaatac

SEQ ID NO: 122716 - DNA, 4507 bp, Homo sapiens
  misc_feature (859)..(859): n is a, c, g, or t
gccgagtcggtggcggctgcaggctgggagggagaagtgctacgcctttgcaggttggcgaagtggttccaggctacccggctagtctggcacggccccgtcttctgcctcctcctccgtcgcgtggcggcgggaactgttggccgcgcggcctcgggaacggcccaggtccccgcccgcaggtcccgggcagataacatagatcatcagtagaaaacttcttgaagttgttcaagaaaaatttgaaagtagcaaaatagaaaataaagaattaacagcagatacagaggacagcatggaagtgttgtcttaggaaacagaacacagcagtgaaaaaacagacaaaatccgctcagatacaactgcagctgataatgttttccggcttcaatgtctttagagttgggatctcttttgtcataatgtgcattttttacatgccaacagtaaactctttaccagaactgagtcctcagaaatattttagtacattgcaaccaggtcttgaagaactgaatgaggctgttagacctctgcaggactatggaatttcagttgccaaggttaattgtgtcaaagaagaaatatcaagatactgtggaaaagaaaaggatttgatgaaagcatatttattcaagggcaacatattgctcagagaattccctactgacaccttgtttgatgtgaatgccattgtcgcccatgttctctttgctcttctttttagtgaagtgaaatatattaccaacctggaagaccttcagaacatagaaaatgctctgaaaggaaaagcaaatattatattctcatatgtaagagccattggaataccagagcacagagcagtcatggaagccgnttttgtgtatgggactacataccaatttgtcttaaccacagaaattgcccttttggaaagtattggctctgaggatgtggaatatgcacatctctacttttttcattgtaaactagtcttggacttgacccagcaatgtagaagaacactaatggaacagccattgactacactgaacattcacctgtttattaagacaatgaaagcacctctgttgactgaagttgctgaagatcctcaacaagtttcaactgtccatctccaactgggcttaccactggtttttattgttagccaacaggctacttatgaagctgatagaagaactgcagaatgggttgcttggcgtcttctgggaaaagcaggagttctactcttgttaagggactctttggaagtgaacattcctcaagatgctaatgtggtcttcaaaagagcagaagagggagttccagtggaatttttggtattacatgatgttgatttaataatatctcatgtggaaaataatatgcacattgaggaaatacaagaagatgaagacaatgacatggaaggtccagatatagatgttcaggatgatgaagtggcagaaactgttttcagagataggaagagaaaattacctttggaacttacagtggaactaacagaagaaacatttaatgcaacagtgatggcttctgacagcatagtactcttctatgctggttggcaagcagtatccatggcatttttgcaatcctatattgatgtggcagttaaactgaaaggcacatctactatgcttcttactagaataaactgtgcagattggtctgatgtatgtactaagcaaaatgttactgaatttcctatcataaagatgtacaagaaaggcgagaacccagtatcttatgctggaatgttaggaaccgaagatctcctaaaatttatccagctcaacaggatttcatatccagtgaatataacatcgatccaagaagcagaagaatatttaagtggggaattatataaagacctcatcttgtattctagtgtgtcagtattgggactatttagtccaaccatgaaaacagcaaaagaagattttagtgaagcaggaaactacctaaaaggatatgttatcactggaatttattctgaagaagatgttttgctactgtcaaccaaatatgctgcaagtcttccagccctgctgcttgccagacacacagaaggcaaaatagagagcatcccactagctagcacacatgcacaagacatagttcaaataataacagatgcactactggaaatgtttccggaaatcactgtggaaaatcttcccagttatttcagacttcagaaaccattattgattttgttcagtgatggcactgtaaatcctcagtataaaaaagcaatattgacactggtaaagcagaaatacttggattcatttactccatgctggttaaatctaaagaatactccagtggggagaggaatcttgagggcatattttgatcctctgcctccccttcctcttcttgttttggtgaatctgcattcaggtggccaagtatttgcatttccttcagaccaggctataattgaagaaaaccttgtattgtggctgaagaaattagaagcaggactagaaaatcatatcacaattttacctgctcaagaatggaaacctcctcttccagcttatgattttctaagtatgatagatgccgcaacatctcaacgtggcactaggaaagttcccaagtgtatgaaagaaacagatgtgcaggagaatgataaggaacaacatgaagataaatcggcagtcagaaaagaaccgattgaaactctgagaataaagcattggaatagaagtaattggtttaaagaagcagaaaaatcatttagacgtgataaagagttaggatgctcaaaagtgaactaattttatagggctgtggtttccaaaatttttttggcatgatagacttaatttatttccttaaagaataatattaaatcatttcaagtttgcagactagtgccatccaatagaattataatataagtcacatattttatttaaaattttctagtaactacattaaacaaagtaaaagtgagcagggcaaaataattttgatattacttttcacccagtagtatacccaaaatagcgaaatatagaaattattaatgagatattttacatccttttttgtaccaagtcttctaaatgcagtacatattttatacttactgcatttcttacttccgagtagccatatttcaagtgttccttgccacatgtggcctgtgactactgtattggacagttcagtactagacaaaaactagcataattaacttagttctagccatgatttctatttggattaaaattaaactctaatcacagttaactccacagtgcattcatgcagctgacagttatatttgttttattggagtcatgatattaaaatcagcgtttgtcaacctcaggggatatttagcaattgtcgggagacatttttgatgtcatgactagggcagttattgacatttagtgagtagaggccagggatcctgctaaataacctgcattggacagcgccccacaacaaagaattatcctgcccgaaatggtagtcgtgccaaggctgagtaaccttgtgttaaaagtaacctgtggcagactaggtttccagaatttcctggttctgctcacgtatcatgtttgaaaaaattttggctattaaagatatgtattagatggtcttatcctgattattacctggatacaacttgatcttttctaatattttcagaaagtgatgggataaccctagaagaggactcagaatgatatttatattttaagtgagtcttaaaacctcctcttatttctacaagttatatggctaaatttcagattgaacagggattcagcattctgccatctcctcatggaaagagaggctccctcatctgaagcgtctctgaaatctacccttgcaagcttcagacaaatcagttgatctccctgagccacacggcctcattctgtgagggagggaaagattagccaaagagttaattttcattccaaatcacttagctgttagactgatctgtttgtagcagttgtttgtctcatttttgctctgtgcattttttgagacatttgttgagaatattctatttggtgctctactgtatttttctttttaatatctacttgatatcttgttctttaaattttcttcacatatggtttgcctgatacaactgatttttataactgaaatttaaggaatctaacagctaaaactcagtaagtgcatatatttccttataacatagacccgttgctactctcagcaccctctcctcaattttttttcctgtagcatgtgatgcctgattaaactcattttcatttgcttttatttctaatatgggaacaatgagagtgaactctaaatataggttgtagtaataaaacatcattagcctaattattagaaaatgctaattaagtaccagcacatagaaacatgaaattgcttagtcattgtacctttgtcagcaattttgacagtcattaatgtttgtcataattttaaataaagtgtctgggtttcagaatac

SEQ ID NO: 122717 - DNA, 312 bp, Homo sapiens
attattggtattgcttggaatggagtggagaccgatgagaggagaattaaagaataattcctcagattctaccttggatggagccagcaactaggatagcaagcagaagatgagaagctagggggtatgtgtgcatgcacgcaggtgtgtgtatgtgcatgtgtgtagctagggtgtgaagctggggtgtgtatgtgtgtgtagctagggtgtgtgtgtgcacgcatgcatgtgtagctaggggaggtgtgtatgaagctagagtgtgtgtgtgcgcatgtgcgcgtgtagctagggtgtgtgtgtgaagcg

SEQ ID NO: 122718 - DNA, 159 bp, Homo sapiens
agtggccgtgcttcacctaattctagagatgatctgatgtctttttcattgatatgaaaatatgcagacatttgtgagggggcggaaagggtgcagattctttacactgtaaagaaagtatctatttgtgctgaaaggctcttttaactgtaatcccat

SEQ ID NO: 122719 - DNA, 544 bp, Homo sapiens
taagtcacaactgtcagtacacggaaagtcaattacctaaagcccattagttatcacagcaggtcacaggtaggtggccaaattttgattgatgcactaaatttattttcattttaatacaggatatgtagagcaaaaccattacccagagtcttgctgagcaagtagagaatgtgtaagtgaaagcaaagatgtgcggtattaacaccacaccaaagtgcacagatttactgaaatctggggaaaattttctcccctgaattcaaaatacagcacgtttgaagaagtatacaattctatataaatgcaatatattcctgaaggacaaccaaatgataagaagctaacaatgaataatttaagaatgccaccaagcttctagcaatgagaagtaacttccaaaagtgggaggctgagaagcaactcctaggtagatttaatcctatgtgacagctacctaattatgtacctaccaactgtgaatgacacgtagccagttctcaatacatatttgtggagttaatggatcttgttgaatgcctac

SEQ ID NO: 122720 - DNA, 420 bp, Homo sapiens
ctgccttggcctctcaaagtgctgggattacaggcgtgacatacctggccgacatatcttcaacattccaaaaagttcagtggaaaatatcaattttcttgcttatagtctggccgttcaggcaaagtaaaataccacatttctttgcttctgcttagaattgtatcagctgaggtcacaatgattatctctttctgatcagaagttccttcctgattgccttggtggacttgcaaaggttacatatgagtcagtgatgatgatggcaatgaaggtgacaatgaaggcagcgatgatgacgacagagacattgagtactatgagaaagttattgaagactttgacaaggatcagggtgactacgaggacgtgatagagatcatctcagacgaatcagttgaggaagaggacctcgggtac

SEQ ID NO: 122721 - DNA, 357 bp, Homo sapiens
tgtgacgcaggagagatatatctactgaaaaagggagattgaaccttgtgcttagattaagaacctgagtgttctaaccagaagagaaccagagttttgagtccctagcgatcaattgtatatcagcttaattcatccaacaaacaattactggtatagatactactggtatagacactaaaattagggactggagatgttataagtataatggtccccatcagagtctaggggcaagagaggagagtatgtgaaaaataattactaaataaaagaatgttaacacagtgtgaccttttcatttacgtgtatatcttaggccttctacccaccctccagctggagagaagaatgctg

SEQ ID NO: 122722 - DNA, 3125 bp, Homo sapiens
gttaaaaattgttttaaactacatcttgaaaatattgaagaatttgttttaggtagagtggtcagttgaaccttacagtaaagtatagaaatatatttaatgtggaatgtcaatgccaggatttctcattaacaatattttatctcaactttggttcctgtgatacatttctgaatgggcaattccagaaatcttagtagcccatgttaagcttctattttttacttgttttcggggagaaataagaattagacatcttcagatttaagttaaataatcccattctttataatcctctgtaaaaagatccctgagattattccttcttctagttttatgcgacagctttactttaaaattcaagttatacatcttgggagtacaatggcccgacatttcttcataggtagaaacaaatacttgactcagtgatactcatgaccattagaatagtcatacctggaatgtgtcaaattataagagacagacacttggttagtggctgcctcatatagcacttttgaagaggcctaagtcaaaacttgcaatataacattctattgactttcttaaaaatattttttctgtacctaacttgagcataagggttatttgagcaagtaacattaactcagtggaaggcattgtcctgtgaaatattcttaggcagatctgcccacatctttattgaacttgaaatctaatatttctagtatttgaacaaagcagaaggttaagtcagggaagagcagtgctgtccatgatgtaatggaagctaccaggggaggcagtgtctggatgatgctgtgctacctacccctgcacaagccatgctggctcagtctgagctgtgggccacatcagctagtggctcttctcatgcatcagttaggtgggtctgggtgagagttatagtgagggaatggtcactaaagtatcctgacaagttcctaggaaaaaaggaataaagtttttttccttaaaaaaaaaaaaattgctcttggctgtgaaaagaggtactaaatgcgattcagttcaccgctaaggaaagtgatgacatagcagttacagagggtgataaatctctccagctaattcaggtcattttgtgaatactatgtatcaagccctgaaaatatggtaaataaaacgtgacagggaaacctttttttgattgaatattgttacatagttaaatgtgctatatatccttaatattttatattgatcctgcaaaatctgttggttttaggggagttttgttttttgtttctaacaattttcagacctgttggtataggaatgtagaagtctttcagatgatttgaaagcagctgcatttgctcttggaggctttgggagagcaggaatgaaaacattcagaggaagacatctgtagggaattcttctgttacttaccaaagaataagtgtctttctggtgttttatttcctatcataaaaatacaacagtgcatttacaaggttaaagattcctcgaagttctaggaaattcttgaaaatataagtggtgcttagaaaattcaagcatttaggaatgtgacctttaattcaggtatgtaaaagacttttttcccaaacttttaaaagtaggaaatacaataaatacagaaaagtcatatggttgaataaataattataaattgagcactgatggaatccctctacaggtcaagaaatagcgcagtgtcctggatgcccattatattgttttctcctttctgggtaacaggccctaacttctgtaatttaaaagctcctacttttgccacaaggtggtgcttctgccattagacgcagttaggaggatgcaactgcaaatctaaaattacgaagttagtgtagttgcaataaacttagaacatatgcattaatactaaacctatgcagtaataccataattagccttctaatcatgtaatttgctttacttaggtatttcatttggttcagcctgttatggaatttaccagcttgataaatttgcctataaagttttataaagaaaaggaatattttgttttcataaagaggaaaatccattcttagaaaaaaactgagtaaaaaagtatctcaatgggctgggattacaggcctgagccaccacgcccagcctattttgtgtttttttaaagctaactaccattaagatcattatagaagtttggtataatgaagatttgggtttttcagtccaatgagtttccatattcttgaatgaaaaagatccacatttcatcatttgcctgtttcattttcttttagtacttttgaacttagtttggtcagaaaatactagaattttagtttgatctaaagaaccagcttatataacttgctgttgccatgtacatttgtatgtctttgctgtgtcaaataactggatctgattttagctctttttaagtggtgaaagcaatgcatttttattcttcaaattcagacattgaatgtgtattaaaatgtgtgtgcttacctttaatcctctccccaccgacaattaggaacacgtttctccaattactgttggcaagactaccaagaaaaattgttgaattagaatcccagcaccgggcacggtggctcacgcctgtgatcctagcactttgggaggccaaagcaggcggatcacctgaggtcaggagttcgagaccagcagggccaacatggcgaaaccccgactctactaaaaatacaaaaattagccaggcatggtggtgggcgcctgtaatcccaactactcaggaggctgaggcaggagaattgcttgaacctgggagttggaggtcacggtgagctgatatcacgccattgcactccagcctgggcaacagagcaagactctgtctcaatcaatctatccatcaatcgataagaaccccagattgtatagctacatgttttagcccccttttcaaagtatatgttctccttggtacttattttgacattctgacttttctacatatgctttatcaacctcttaattaaaccatcattgtctattttgagagataactgcgctgcttcccgttgtgtgttttaaatgttattgttcagtttgagtcaaataaaaggatatttaatctgtggtgccttgacatt

SEQ ID NO: 122723 - DNA, 2382 bp, Homo sapiens
gttaaaaattgttttaaactacatcttgaaaatattgaagaatttgttttaggtagagtggtcagttgaaccttacagtaaagtatagaaatatatttaatgtggaatgtcaatgccaggatttctcattaacaatattttatctcaactttggttcctgtgatacatttctgaatgggcaattccagaaatcttagtagcccatgttaagcttctattttttacttgttttcggggagaaataagaattagacatcttcagatttaagttaaataatcccattctttataatcctctgtaaaaagatccctgagattattccttcttctagttttatgcgacagctttactttaaaattcaagttatacatcttgggagtacaatggcccgacatttcttcataggtagaaacaaatacttgactcagtgatactcatgaccattagaatagtcatacctggaatgtgtcaaattataagagacagacacttggttagtggctgcctcatatagcacttttgaagaggcctaagtcaaaacttgcaatataacattctattgactttcttaaaaatattttttctgtacctaacttgagcataagggttatttgagcaagtaacattaactcagtggaaggcattgtcctgtgaaatattcttaggcagatctgcccacatctttattgaacttgaaatctaatatttctagtatttgaacaaagcagaaggttaagtcagggaagagcagtgctgtccatgatgtaatggaagctaccaggggaggcagtgtctggatgatgctgtgctacctacccctgcacaagccatgctggctcagtctgagctgtgggccacatcagctagtggctcttctcatgcatcagttaggtgggtctgggtgagagttatagtgagggaatggtcactaaagtatcctgacaagttcctaggaaaaaaggaataaagtttttttccttaaaaaaaaaaaaattgctcttggctgtgaaaagaggtactaaatgcgattcagttcaccgctaaggaaagtgatgacatagcagttacagagggtgataaatctctccagctaattcaggtcattttgtgaatactatgtatcaagccctgaaaatatggtaaataaaacgtgacagggaaacctttttttgattgaatattgttacatagttaaatgtgctatatatccttaatattttatattgatcctgcaaaatctgttggttttaggggagttttgttttttgtttctaacaattttcagacctgttggtataggaatgtagaagtctttcagatgatttgaaagcagctgcatttgctcttggaggctttgggagagcaggaatgaaaacattcagaggaagacatctgtagggaattcttctgttacttaccaaagaataagtgtctttctggtgttttatttcctatcataaaaatacaacagtgcatttacaaggttaaagattcctcgaagttctaggaaattcttgaaaatataagtggtgcttagaaaattcaagcatttaggaatgtgacctttaattcaggtatgtaaaagacttttttcccaaacttttaaaagtaggaaatacaataaatacagaaaagtcatatggttgaataaataattataaattgagcactgatggaatccctctacaggtcaagaaatagcgcagtgtcctggatgcccattatattgttttctcctttctgggtaacaggccctaacttctgtaatttaaaagctcctacttttgccacaaggtggtgcttctgccattagacgcagttaggaggatgcaactgcaaatctaaaattacgaagttagtgtagttgcaataaacttagaacatatgcattaatactaaacctatgcagtaataccataattagccttctaatcatgtaatttgctttacttaggtatttcatttggttcagcctgttatggaatttaccagcttgataaatttgcctataaagttttataaagaaaaggaatattttgttttcataaagaggaaaatccattcttagaaaaaaactgagtaaaaaagtatctcaatgggctgggtgcagtggctcatgcctttaatcccagcactttgggaggccgaggagggggttcacctgaggtcaggagtttgagagcacgcctggccggcatggtgaaacctcgtctctactaaaaatacaaaagattagctgggcatggtggtgtgtgcctgtggtcttagctactcaggaggctgaggcaggagaatcgcttgaacccaggaggcagaggttgcagtgagccgagattgtgccattgcactgcagcctgggcaacaagagtgagactcaatct

SEQ ID NO: 122724 - DNA, 177 bp, Homo sapiens
gtcataggcaatgaatgctatgattttacaaatgttgtataagtttaaaatctcagtttttctttattatgataagttgttcattcacctgatattcagtcaatttctaccatgtgtcaagaaatgtgtgagcagtagggatggagtaggacataatcctatccttaatgcttgtgc

SEQ ID NO: 122725 - DNA, 532 bp, Homo sapiens
ctttccaccatgattgtgaggcctccccagccatgtggaactgtaagtccaataaacttctttattttgtaaattgtcccgtctcaggtatatctttatcagcagtgtgaaaacagactaatacactcagtttctcaaggctgacttcaggacctggtatatgcacattttggtatttcacgagagtggtagaaccaatgctgggagtatatcctaggagaaccgtactttttttgtgggcaagactgaaaactgtcagttcaaaggagaattataaacatccagcagaattcaaaattcaacacaaccatttgaacaggacaggatatatttcctttataagttatctgccacattaccaatttacaaatacaattattcaatgattacaaattgttcccttattaggaaaaaaattatcttctctctgtatcagtaggccattgttgatccgtagactgctatggggatcaatcaaatcttatttttctaaaatgttaactgtgttggggtgggtgcagagcggggggat

SEQ ID NO: 122726 - DNA, 225 bp, Homo sapiens
ataagctccatgaaagcaaggatttttgttggttttgttttctgtagatttcaagcacctagtagaacagtgcctggcatttagtaggaacccgagtatttgaatgaactattttattaattgtagtctatacttggaaaaggtttaatttttttaaagttttaatttcagtttttctttggaatattatgcgccttgaagtcgtctttttgctgtatttctgtt

SEQ ID NO: 122727 - DNA, 283 bp, Homo sapiens
gggggcccgtctcatgatggggaaagacaggcgcccctgtgtgtgttcaccacagcagatccacagctaacaagcagctgctggtgaaataaagttgccttgaactaagagggcttcatctggtgtttggtttggcttgaaaacactctgtcgaaatgttctagaggtggagctggttttaaaatcaatattatttcatctgtcatcaaacagagcctctaaaccctcaaatgggtgggttcaaaagccacagtgaacccgagtgtgcccctccatcactgag

SEQ ID NO: 122728 - DNA, 430 bp, Homo sapiens
taaaccacaaggcttagaaaacgaccaaattgtgaaaacctaagattctcattataatcgtaacttgactatattacacatttttcatataacaaaacagccctggaaagtttatccagatattgagagagattatacatgtacaatttggatgagttaacattacaatgaaagcctttgcttttgcatttcctggcttttgtgtgccattattattattatttacgactcgaatgttgacagccaattcagcattgcataagccatagagtaaacaggtttctgccttggggctttctgaatgaattagacaggcaaaatatttcatattaaatatcttacttctgaggatagctcactctcagaggtgcaagttgctttgtctttaagacacttgtccttttctttatcctttttaatcttttgcctt

SEQ ID NO: 122729 - DNA, 1129 bp, Homo sapiens
cagttcaggagtgtcatgggagaaactgcattctagcagttgggtggttgggcccccaagtttaaatcccaacagatgggcctgggggtgaggcctctccagcccatcagagtcacagaggtgtcagagtgacctcaccctcaacccagtatggtgggaaggtttggtcatggaaagaaaccgggtctgtttttgtctgcatgtccccaggtttatgttggacgaaagaagttgaggttggctggcccagctgcattgaaaagcttgaaaactggccttttcatttctgtgtggccgtgtcgttcaggtccttccctcccgtcggagctgtccttctgcattagggctggggctgggcaaggggatgagatcatatgtttttgtgttacagaggtaggtttacacagcctcgtcgctatggcagttttaataaagcaggttactgtccccaaggggaggcttagcacatagcactgcccatgcacagatgctgctgtcattccggggcactgttgtcctttactcgtggattgacacagcgctcctccgccagctgatttgggaagggtgagtgctggccaagagcacctcacagctcgcttcctctggaatgaggaggaaggagatctaagcatttcgagaccctggatctgagcccattaaaaacaagaaatggttctggaggctgttcactgtttgccaaggcagcactgggggctgcggagtgcaggtgatttcatcaggtgacggcctgccctgcgttcccttccaggagaagggtctgaccagttaggtgggtggccagcttttgtcctttctgcagggtctggagaccgagagaggctgagctctcactaccagctgcttcgtcctttctccttcgtgtttgggactagggagcaaaggatcgattccacttggggtgccctggactcgtgcatttaagaaatatttatgagcacccactgcgtgccaggcactgttctaggctgagctgtggagccatcaaaagtcacagggaacagcaaacgggatcagtagataaaaacataaaagtatatcatgtgttagatgatgagtgcagggttgaaaatgtcaggcaaggaagggagtagaaaatattgggggc

SEQ ID NO: 122730 - DNA, 214 bp, Homo sapiens
ctgggattacaggcatgtactgccacgcccggctaattttgtatttttagtagagacagggtttctccatattggtcaggctggtcttgaactcctgacctcaggtgatccacctgcttcgccctccaaaattgctgggattacaggcatgagccaccatgcctggccagttcttgttctttttctaagggataattcccttatttagcagaat

SEQ ID NO: 122731 - DNA, 752 bp, Homo sapiens
tgctgagtgttctcggttaatccagtccaaattattaagccttcataatcctccaagacacgtaatcagataagactgcaactgatttgaagaaatccttaattgcagaaatcatcaagccttgctcttctgctgggcgagatgaaagcgttcatcttctccggagaacacacgaagtcctcaccttgcaagcagagaccaggccctccccagacactgagcttggtggcacttggattttggacttccagcctccaaaattgtgagaaaaagtgctgaatatcacagaacacaaagaaaagagaaagagaaactgacagagcctataaatgttgcacgaaggttcagatacatacagttctgctggctttttaaggagcagtgtttcctatatcctaaggcagatggacatgttgggatggagggacatggatggagctggaagccattatcctcggaaaattaacacaggaacagaaaaccaaacactgcatgtttgtgggagctgaacaatgagaacacatggacccagggaggggaacaacacacactggagcctgttggcggtagtgggggtatgagggaaggaagagcatcagaaaaaaataactaatgtatactgggcttaatacctaggtgattggttgataggtgcagcaaaccaccatggcacacatttacctatgtaacaagcctgttgcacatgtatcccggaatgtaaaataaaataaaataaaataaatagtacccca

SEQ ID NO: 122732 - DNA, 100 bp, Homo sapiens
gtcaggtctgtggcttaatggagagttgctcatataaagggaggtttagcaagactccgcctcacaaaaaaaaaggcggggggaatagtaagtaaattgt

SEQ ID NO: 122733 - DNA, 147 bp, Homo sapiens
ctagtcctctgtgtacacttaaatgaaggtggtctaactttgacacttaaaaaaatttgctctacattttctgagtaattgttcctgcacactcaattcttatttacatgtgaatgactttaagatctacatctctaggcctgatct

SEQ ID NO: 122734 - DNA, 760 bp, Homo sapiens
actggcaagcaaaggcagagccacagaggggctgctggtccccaaatgtctctccagctgctctggagctgctggggctacagagctggtgaaggctgagatcatgagataaaccccagggctccctgggagatcctggtttgtactgctgtgtggtcttaattattaagaaacaaggcactttatgaagaggaaaagagctgaacaaaaggtgttctcttcaggaggtccatgtagaaggcaggcagaacactgggctaaagacacagacccaggaagccctcaagttgccacagaccttaaatattacaatccccctgcttgtcaatcattaatacaaatctgagcaggtcttccctgcaggacacaggcggctttctggaaaaagcatggaaaagtgagtctcctaaatgttctcaagtgactgattcaggacacatcttaaaaggatcaaagaaggatggagaaaaacttcagaaggaaataacagtttgaatgaaaacactcatttagcagaaagtccagaagtgctcgaccaagaaattgcaagatggaagcagacagtacaggaaaggaaggagagaaagaaaagctggaaacctttgaatgcacaaataaaacaggtcatgaaagataccatgagccaattaaaatctatggctgaaaacctgctggacaccatgcagttgggagatttctctagggaccacagtgacgaggactcgaaagtacagctaaagaggaaagcagaaaatgaaga

SEQ ID NO: 122735 - DNA, 429 bp, Homo sapiens
ttgatctaacctctccatgcctcctttcccagtatcatctacacatcatccaaaaaggatgaggctggactctttcctacagtaatcaaggtcttccataatctggcatgtgccatctccatgatcatcttctttgattcctgatcgtattctttgctccagtgaagctcttcaagctctctgttgtttctcgtgcctcctgcttctgtgcctctgcatatgtgattccctctgtctagactgctctctttattagtgaatactgcctttctttaagacacacttaaaggttttcttccttctaccctgaatttccaccttgagttactcccatgtactgtgctctcagctctcaaagagatcttaaagggcaagatttatgattttgtttccctttaaataacattaatgtcccatgattaaaaaaaa

SEQ ID NO: 122736 - DNA, 450 bp, Homo sapiens
ccgatttcccttagggccgggccgaacaagggaaattggccagtgccttccttgatgggtaggttaattttcttctggagtgaatgaatgttctaaaccgatggtgatggaatacacaactctgtgaataaatatacctacccccttattggtacacacgtgtgtacgagttaagggttgtgagaatgaaattccgaggtatttaaagtgtttagtatagtacctgtgtcatcgtaaacactcagattactgtgtctttaccactctcatccttattaatgtttctcaaatcatttcgaatgctaactttgctaatgtagattggaattgtagaaagagcacttcagtgctcctggtaatcaggagacatgcattccagtctgcatccaccagtaactaacaacacttctatgattgttttactccaaaggtacattttctcatccacaa

SEQ ID NO: 122737 - DNA, 381 bp, Homo sapiens
tagcaataaaatagctctcttatacttagtgcttaattcagtgaggaatactgtcacatccttgacttttagtagatttccctacagcaactttttcttctcatattgtagggagaagaggtcaggaattgctaaaggggcattttagcagtctggagtcctccaggtgatgaaatattggggacattaatgtaacatttgagtatagaatggactagaagcaaagagaccaatcaagtttacgatgtggaggtaatagttgtacataggctaatctaagagagaatactggagcaataagtcaaatcccaactttgtcagctacccaagtgcacttgattcctactgaaactccaggattcaatttattttcctccccta

SEQ ID NO: 122738 - DNA, 387 bp, Homo sapiens
ccttcaaagttttgctgatatttaatatgtcactacactaatacatgtacataatttacaaactgtgcagtcatatgctcaaacattttttacaggtgagcaataaaaagttcagagatctctggtctagagaaatcaaatatatagacactcttacataacataatatggtaagaacaatagagggctctgtaaagagggttccccaggggtaaaaagctaaaatttctgatttgctgactaagcctaaagagataaacaggaattgggcaactggaaacccctgggggaggattctgctcattagagaagatctaatgagcaaagacaaagaagtggggaaaaacagagcatttaagaactgtaagtgggttcaatgttgctgga

SEQ ID NO: 122739 - DNA, 430 bp, Homo sapiens
gcggccctcctcccatgtcacaagttggtcagttacaagctatatgggtcacattctcctccctgagaccctctaagggttggttccctctgaggtcaagctcgatgtcacctcctcagaaaggccacccagggaactttcttcatctgacttccctgtctttgtgcagcacttctcactgaagttatgctgcaggattactggccgctgtgctaacagctggtccccgcgctgtggtgtaaacttcccacaaatgggaactttgtttgggtgccactgtatctccactaacggcatgcagcgggcatgctagatacttactagttgaagaaaatgaatggaaactatagaaagattcagtcagttagtggcaggaaaaaaaagaagacacacagagaagagtgaccaagggagggaccacatgctatca

SEQ ID NO: 122740 - DNA, 303 bp, Homo sapiens
gtggggtggggtagaggccaggacaaatccctctgcagtccaccaggtggcggtgttgcactgcagacccaaaggtccttcctccaaactccagggcgggcgcgcggggggacaggggctcgacaagtcccaagcagcttaggcccagctcctattgccctgccctgttctgtctcttcagtcaagctcacggtgactagcagccccaggtgccaaccctggggcaggggttgccacctgggctaatagggcctttcctccactggtgggctgtggagcccaccccactgcttcatcctgttg

SEQ ID NO: 122741 - DNA, 529 bp, Homo sapiens
atcggtttcaggaaggagttcatatggaaactgaggttctggaaatgtaatctacttttaagaatcaaccacacctgtgcctcctccagaaaatctttgtagtgcatgactcttaccaggcgtatatgtagaggaaaaggtcaaagaaaaacatttccaaagatactgtgaaaaataaaattgtattttatcatagaattataaaaggtataactggggaagtttaaacatgggtagaaaaatggaaagaagaatgagacccatgagacggtaattcacatgaatcattgatgtgaaaatatgtggatgatattgaggggcagatggacagacaggttggcaggtgctcctggagtctcatggagagggggtcacttgctcccaagcagccagttccaaagtgtcttgacggcttcctttctggaagtactcggggctggttagtaattatttcccagcttatgggatttcttagactctccctggctggccttttaaaaatgaatgaccctcctatcctttcaagatg

SEQ ID NO: 122742 - DNA, 520 bp, Homo sapiens
agcttaggtttcctatatggcttttgtgggacaacacctttagaattcttagaaggccttttgtttgaaacaatctatgaggtaccaccttaaatgtctttgacatctgaactaggagtaggcaaaggccatcgaactaagacttgtttttatattttcaaagggttaaaaaaaaaagttcaacagagactgtatatggccctcagcctaaaatatttatctggtcctttgcagaaaatgtttgctgactcttggtctaaataaagttttaatcttcatgccaatttaccctggtctgctttggatttgatctttgcccagaaggcttttttatttttttatttttttgagacaggttcttgctctgtctcaaaggctggagtgcggtggtgtgatcatagctcactgcagccttgaactccttagcttgtgaccctcccacctcagcctcctgagtagccaggactataggcaggcacatgcctggctaatttttaaatttttggtagagacagagtct

SEQ ID NO: 122743 - DNA, 115 bp, Homo sapiens
taagctaggtgggtggctgagtcctaaatgagttgagatggggaagaggaataccgcatggtagaaacctccaaaatcaaaagcaccaagacgggaaatgttacagtgttgggct

SEQ ID NO: 122744 - DNA, 232 bp, Homo sapiens
ctgtgagatgttaataattattaagccaaagcaaacagacaaaggatgtgtggccaaataagtctgacaaaccttgcatcaaacaagttttcagtcttttttcttatagtacttctcagggcttttattatattcttggtctgcattgtggatcttccagagcagcacagtccaacatgtggccacaaataccaggcacgtgtatacttttccaatttatgctaaccatgtt

SEQ ID NO: 122745 - DNA, 743 bp, Homo sapiens
ggtggagggaggtaaaatccccagacctgaggactcgaaggggcagtcaaggagaggatagctcttctccagagcttaaaggcaaatattttctttttccctggtttctcaccttattgctttgtgtactgagtgaacttatttgtttttgagatccagtaacccatgcaagaaatttcataacacttctcatttagtactttaatactagttgaagaatctagggttacacacacacacacacacacacaccaggcttagttccattacctatagctgtaaaaatgagatttttttctcagttttgtgaaaatgaaaggctgctggactggaactcacagtattgtatatcaaaaagtatcagattgtgataaaatagaaacccagaattaaacttggccttatgatttttagaaagtcaacagattttgaaggagcccacccagtgtattcatttcatttttactaatcctttctttcatgctaagatagagatgaaaaagaatgacagacttcctgttctcatttcattacagcaaaataaataagttttagtgttccatagctctgtaggatgactatagttaaaaataacatataatttcaaatagccaggaggacattgactgttcccaacacaaagaaatgataaatgtttgcaatgatggatatgctaattacactgatctgatcactatacattgtacatacataaacatgactatgtacctcatggatatgta

SEQ ID NO: 122746 - DNA, 232 bp, Homo sapiens
ccatgagtctcaactctaccgagggatagtacttaagtttccaaaggaccatatataggtttaggaaacatcgaatattaccattgttttgattggttctagttactttatagtttattttaaaatttcaaataatcgaaacggggtcctccacctttccaatataaacaggtagtatgggttttaaataaaccaaagttgagaaatacagacctaaaactttatatctaca

SEQ ID NO: 122747 - DNA, 161 bp, Homo sapiens
agtattttacttttgcatataaaattttccataataaaaatctaaaaataacaacaaaaaaataaacttgaagtggttcccactggccaaggatgaacaatgtgagcatcaagaagaaaaatgggggccaggcgcggtggctcacacctgtaatcccagca

SEQ ID NO: 122748 - DNA, 307 bp, Homo sapiens
aatgaggtcagggttcatgagaatgaagcactttctttgttaatggaaagttcgcctgaaaattatgaggcaacactgaaatcatatgatgcgctgaaggagctccgaggaccttcttgcactgtagctctgggtatgacaggcacttgccctgtcttgaattgcataagtttcctgtcatgtggttatcacgtccctatggtgactcaaggttttggtgttttctgtctgaaaatgaagaacctggagggaagccagtggggatgaggagggtaagcaaagagcttagatgcccaggaccagatcc

SEQ ID NO: 122749 - DNA, 318 bp, Homo sapiens
gggttggtgtctttgctccgttaagacgattgcaagatcccagcaagggatcttgaatatttgcaggttctgggttctgtgttgagtgcttaaatggatatcttatttaataataacaggaacccttggaagtgagcacaggtttgattctcactttgcagataaagaaactgaggcccagaaaggtgcccaaggaagcagagttatttaggacctgacagaggtaggattccaacctgggcagtctatcaccagagtccttgtttaatcactaaattttgtacctcttaggactattcaaacccagcaaagaccaga

SEQ ID NO: 122750 - DNA, 719 bp, Homo sapiens
gggaggcacctctgcaagctgatgtggccacaggatctggcatggctgcagaggcaaggccctagtgcccttgcagtgtcccaaggatccagagctatattgcctgaaccagtaaaagaagggaatgtctgctgaaattcagcagggagagaatgcatgttctggaataccacatttaattccaaaatatggtggcttctaatgattctgtgtgtggctgaaacagaagaatcgttttagtttatcctgcccgatattttttattaaccaactaattgttaaaacccactgccaaaggattttaaaacttaaaactatcagaatttgaatgtggagttaatgttttgaaaaagaataatgttttctggcattaatgtttgcagtgtctgccaagagtggacatacttggaatgtgattacattaaccattgtgaatatgctaaagttgtatagtgttcatcattatgcagttaatttttaatggttccccaccatgtcaattttgttttaaatatttggtttatatactttgggtattttggtaattcacattcttgctaacaaaaatgcattgtaaacaagtgtaaacacccacaacaactttcacagtaatccagcaaaatatgcacttgatctcactgtttcctaatacagacaaaatgggattattcttcttctgtttgtcatatattataattacggctgatctttcagattca

SEQ ID NO: 122751 - DNA, 317 bp, Homo sapiens
ctaaggaatgtaacctacttatgacctgggagaagcaactgtcagaattgttgtagaggaaacctcgtcatggggcagatgattcatcgaaatgacttctctggcaccctctaacagcatcactccttaagccaatcatatttttctcagaatgaaggtgcaaaaattaaatcatgcatgcaaagcagttcgtaggtgctccatagtatgtggttagccttataatgcttacttaggatccgatgtaggaagtggtgcagaaggcagaattgtatgccatttagtttttcggttaatgttcaataatatggcagcag

SEQ ID NO: 122752 - DNA, 522 bp, Homo sapiens
ctcctactaccccccgctgtcattatcaagtgagttcaactaagatttgcttaatgaaaacctaaatcattatggctctcttaatcagagtacctactatgtggctattctaaataggtgttctcattgaacttggttttctcagtgattcataaagatggttaatagcaatgaaattttacagattgggaaactgaaaaccggagaagtgaaggaatttgtccatggccacacagccgtaagggagtagagacctgattcaaatcttgggctagaaggattctcagaatcttcttttctctttgcacctgattggctgtgcctctcgctttattcagtcaaagctcaattcaggacgacgtgaaagaacattaattccaaggtgaaatgtgcaagaggttaagtgaatttgaccaagtttcccattataatttattttgggggaaaatggattaaaaacataatctctcggttctaacttcacgttcacttgaaaatgaaaagtgagtgttttacagatcc

SEQ ID NO: 122753 - DNA, 413 bp, Homo sapiens
aaaggagatatcaatgagatgactataatcgtagaagatagccccctaaacaaactgaatgctttgaatgggctcctagagggaggcaatggccttagctgcatttcttctgaactaacagatgcttcttatggccccaacctcttggaaggtttaagtaaaatgcggcaggagaacttcctatgtgacttagtcattggtaccaaaaccaaatcctttgatgttcataagtcagtcatggcttcatgcagtgagtatttttacaacatcctaaaaaaagacccgtcaattcagagggtggatctcaatgatatctcaccactaggcctggccactgtcattgcatatgcctacactggaaagctcactctctccttgtatacaataggaagcattatttctgctgctgttta

SEQ ID NO: 122754 - DNA, 613 bp, Homo sapiens
gattaagttcctgaaaaatgataatatggaaacaaccaccatttttcttacttaaaactatggccaatccatttcattttaataaaatatgccaatatggaatatgatgacttaaattttttctttttgaaataaaaaaagtaattcagttataatatccagcttgcaaatggcattagcttgtaattattgtatctactctagtatgggagttcttctgaagtctttgttaaacccagtgatggctgataaaggcactttctaatcatcgctcttgacttagctgcataatgaagatgccactcgtgtcagggcaactaatggctttgattttactctgatggtgagagcctttcacttcgtctccactgggaatcactctgatgttgtttaattccagtcatgatttttacagtattaatttcttcattctttgtttaaagaaacccacattcattatgctgagatgtgggtatataattactttgtttttcagtagctgcagatcagtattttttttaatagtgccacatatttttaaaagattatttcagtttgagtatcatgattatccacagtaactatctaaatctcaaatgtgttgaggagtact

SEQ ID NO: 122755 - DNA, 276 bp, Homo sapiens
tggaggcaaataaaacttattatatatggtgaaactaaacatattaggcaaatctttcatgtataaattgcctgcaagaaatgaatgtcttctgccagaaaggagaagtgagaacacggcagaaagagaaagcatgaacagatcattcaaaacaccggtcactttatcctggatttggttccgggtcctgtttcttttcattaaggaagtttatcctccctccaccttaagactgattaaatgacatgattttcattgtacataaaataggaaata

SEQ ID NO: 122756 - DNA, 335 bp, Homo sapiens
aaaggccaacaaagcctgtcaaatcaacaaacttgtgttgagataaaataacttctgctgacgtttttgtgacacatagagccagagtcaagtaaaagttctgtctacaccttctacccagccccattttccatacagtcccccaaacgtctgcctctttctccatcaatcatatccctggtggttaataactgcttctttaaaaggcacttggttgcctggggagtatgcatattacatgagctatttagcgtcctaatcaagtttaagttccctgctttgtattttcttgcagtgggaaacatttcccttttttctaaaaaagtgtggattta

SEQ ID NO: 122757 - DNA, 255 bp, Homo sapiens
gtgagccaccgcgcccggccaggtatgcacgtacttttaatggaaacagcttgaccaaaaatctgtcacagaattttgagacccactaagaatgtttaatgagaaaaaaaattatccaatgattaaataaaataaatagttagtagggtttttcataaacatatttttaagtttgtaatttgaatgcttttaacatttaacttttttttacaatgaatgtgaatattttttgttaaaatatttgttcacacctcc

SEQ ID NO: 122758 - DNA, 501 bp, Homo sapiens
atgcaaacagtgttaagttgttgtcaccttaaaataattgcttataagatagtagatgcaagctttgtggtaacttaaactttaaaaaaatacaatggatacacaaaaagtaaaaagcaagaaattaatcatatcaccagagaaaatcatcttcacgaaaagaaaagaggaagaaaggaaagaaggaagagaagaccacaaaacaaccaggaaacaaaaaacaaaatggcgggagtaagttcttacttatcaagaatacattgaatgtaaatgaactaaactctccaatcaaaagacacaaagtggatgaatgaacaaacaaacaaaaaagatccaatgatctgttgcctataagaacacacaatacctataaagacacatacagactgaaaataaaaggatgggaaaagatattccatgccaatggaaactaaaaaagagcaggagttgctacacttagaccaggcaaaatagattccaaggatgaaaactataagaaga

SEQ ID NO: 122759 - DNA, 317 bp, Homo sapiens
tcagggtgaggttcagcgggagatacaaatatgggagacatcatggaatttaaatcatggagtggatgagatcatgtaagagtatagagaggtaagaggctcaagaagctaaccttgaggtgctctaacatttagagcttgggagagaaggagccagcaaagtgagactgataaacagttggcaggaggctatcagcgcgttaggaggctatcagcgcgttaggaggctatcagcgcgttaggaggctatcagcgcgttaggaggctatcagcgcgttaggaggctatcagcgcgttaggaggctatcagagcgtaa

SEQ ID NO: 122760 - DNA, 493 bp, Homo sapiens
agcgctttgagctcttctcatgtgtacttctgcatcgccaaatgatatggctacaatgcattttttaaagtaatgattttcggccaggcatggtggctcacgcctgtaatcccagcactttgggaggccgaggtgggtggatcacctgaggtcaggagttcaggaccagcctggccaacatggcgaaaccccaatctctactaaaaatacaaaaattagccgggcgtggtggcacacgcctgtattcccagctactcaggaggctgagacaggagaatcgcttgaacccaggaggcagagtttgcagtgagctgagattgcaccactgtactccggtctgggcaacagagtaagactctgtttcacgaaaacaaaaacaaaaacaaaaacaaaaaaacaaacaacacatagttggtgctcaataaacagtcacttccagcatgaccaccactttagcctatggttagttacttcagcatccccaactcccaac

SEQ ID NO: 122761 - DNA, 472 bp, Homo sapiens
caggcctgcctggtcatcttactgtttcacatccaactgaagtgagttgaaggacagttcatggcagttcactgtttaaacagtcaaacagtcttttcttaatggtggttttaaactacaaaaccaagcaagtgccagcacaaggaaccaagggaagctcgtggtcatcaagaggccccgtattgtcctgctggaggctgaggatggaaaaatgagggtctatgctttcatgacactttgtgaaggctgctatgttcactcccctggtagttgtgcatgcatctggtagacttcttctaggaggaattataaccaaaataacaatgtatttgtttttaatagctctttaagttttactttggcatgataaggtttgagtgtttacaatgtttttaaactaaatgcagatccaaagtcttgaatgaattgtttccttttaagcctactactcaataaattatatataggttta

SEQ ID NO: 122762 - DNA, 554 bp, Homo sapiens
ttttagcacagggggagtttcaccatgttggccaggctggtctccaactcttgacctcaagtgatccaccagcctcctcctcccaaagtgctgggattacaggtgtgagccatcgtgactgtaagtcttttgtttttctatatatgatagtttatatgcaaatagggacaatctgacttcctgttgtctaatatggatgctctttatttttttctcttccttaattgctctggctagtacttccactactgtggtgaataaaagtggtaatagtgggctttcttgtcttgttttggatcttggagaaaaagctttcaacttatcccctttcagtatgatgttggctatgattttgtgctatgtggcctttactgtgttgagatatactccttctatacctaacttgttgagagtttttatcatgaagggatgttgaattttatcaagtactttttgtgcatctattgagaggagcatatggtttttgtccttcattctgttgatgtgatatattgtgtttattgacttgtgtatgttgtatccctgtgaaagtt

SEQ ID NO: 122763 - DNA, 289 bp, Homo sapiens
tctactactactactaaattcgcggccgtgtcgactgccagcctacaggagtccagccttgtgggcaataatccaatcaatcatgcctacataacgaaacctcaataaaaactagacaccagtactcagaagagcttctttggttggctccacatagtgtaacacagtgatgtgccaggagggtaacaggcctgactccatggggaaaagataatgaaagcttccaatgggaccctcgaagacttggctgcatgtgtcactccctttggctcgttctgatttgtaatct

SEQ ID NO: 122764 - DNA, 335 bp, Homo sapiens
ctccactccagcctggcgacagagtgagactccgtctcagacaacaatgacaacaacagcagcagcagcagtaattatggctcacagttctgggggctaggaagctcaagatcaagctgctagcagatttggtgtctgttgaggacccattcctcatagagggcatcttctgggttctcacatggtaaaaaagacaaacaagctctctcaaacttttctgttttgttttgttttgttttttcagtaagggcactaatcccatttatgaggatagagccctcattacctaatcaattcccagatgccctccccacccctaacatacggcactgggg

SEQ ID NO: 122765 - DNA, 249 bp, Homo sapiens
tggcaccaatccaagctcacgattacttaggtttctacttaattgtctgtcttcccaccaggagacaggccatatctgttatgcttactattgtatctccagtgctcaatgcttggaaagtagttgggactcataaaaataggatgttaaacaaatcaaagccaaaggcttcctttttaccttaataaagatgcagcagggacatttatttaaccaatagttaagcactactatgtgcagtggcattag

SEQ ID NO: 122766 - DNA, 673 bp, Homo sapiens
aggcctaggttttgctcagcagaggtatggaaggaagagtgtaggaagagaagaaagaaaaggattgagtcttatgtctataataccaaaatcttaacaaagtgcaaatcaagaaatgagacaacaggatgtagaagtttaagcatattatttcagtgtgcaaagcatctccatgttattcagcattggagctcaactaccgactgtgtcaatcaaataagagtatcaggttcctgtgctaaaaatattccagctcaaatcatcttggcagacaataccagaaaaaacaaacatttttctgtctattaaagtgaccaaatgttaggagactaaatataagcagaaaagacaagtaatagctgcataaccttgagcaagatactgactgagcctcagccttttcttcattaaaatgatatttttaatgcaggtctatagtctttactctgcaattccaaaacaggacaaaaaacaaaacactgtgaaacccaaagtgtttttgtaagtttggcaccaggattatatgccaaagaaaacctactgtgaacaaatatgaagcctctattgtctcagcacttgtatccgtaagtcacacatgcctctgctatttgctgatattttctgacttggggattaattccatggaaaatgtcgaaaagggctaaagatatac

SEQ ID NO: 122767 - DNA, 334 bp, Homo sapiens
tggtagaatatttggcttgaatagggtgataaagtattcagaacaatgatattttctaggttttctgtgtttctggacaacgatctataccatggatgttatatttcatattacattggcaattccaacatagagccagccacagagataagatagttataaaataactaaagtatagctataagtaaacaaactagtaaatgcataatagtgggagaggacagaaaatactgtaaaatgcaaataacaggaggtcaatgaaaagtgggtaagtttggatctgaaccatgagacaatcctaccatttaaattgttgaaagaagggaatgagtgc

SEQ ID NO: 122768 - DNA, 362 bp, Homo sapiens
tctacagaggctgtctctcaagttttcagcagaatactgacaatcacattcatgtgaggaatctttctgagactggagaaggaactgcttgaaaggagtgaaaggaacaatactcagagttgcacataagcctggaaatactgccttcctctctaaccagattagagggtcacataattggtggggtattggttagagtactcagaatagtgttgcctcaatagtggagaacaattaactatagactaaatgctgctctggctgtggagaataaattttaaaagtaacagctaaaaggatcaaacatctatctagaaagtttaagaatatttataagaatacaaaaatattaagcactaaat

SEQ ID NO: 122769 - DNA, 729 bp, Homo sapiens
agcgtggggctggaggggactggcgggaagcggcggttggctgcagggcgctccgccgggcgtggggtgtagccgtgtcggtgagcgagctctgctcgaggcggagaggagaaactcgggaagcaattgtggctactctaaggctactggtttcgagtcaggccgtgcgaccttaggcaagtcgcacattctctccgtgcagctgcctagcagtgtggattcagtatcaccgtgtgtgttaagctctttctaagaatcgtaagggaccaccagctggtggcatccgatgggcaggggtggcgtccaggtggcagagcagctaggaacgcaagggctgaacctggggccagacaccctggtctcccgggcatggtccacgaacctccagtatctggcttactgtgggcccaaggagggtgggccatgtcttggcaagggcgtgccccgcaggctggtgctgcagtttggggtgctcttctggaccattctccttttgctctgggtgtctgtcttcctctatgggtccttctacttattcctatatgccgacagtcaggcacctcagccctgtgcatttctactacaggaccgactgtgattcctccaccacctcactctgctccttccctgttgccaatgtctcgctgactaagggtggacgtgatcggggtgctgatgtatgggacaagcgtatcgtggtaccttagagcttgagctggcagagtccca

SEQ ID NO: 122770 - DNA, 424 bp, Homo sapiens
ggatgatgataatagtaacgtcttcattaagattattgtgaagtttacgtaagaatagtgcttaaaaaaacttagcacagtgcttcatatatagtaaatgaatgaatataactaatattagtacaaaataaaatattttaagtaattctctccatatacttgttatcagtatgtagcattaattgaattttaaaatatcagtgtttatgaacgaatcagactggcttactgtagaagtataagcctacttttcttaatcttaaaggaaatttgtgatgttaattgcttatgacatcagaggtagtgggcaatctaacaagtaaatgacctgatcatgtcattacaagaactaattctttgaatgtctaaaacatatagttacttgtgccagaaaaatcatcaggtaagattggtaaatagtttt

SEQ ID NO: 122771 - DNA, 482 bp, Homo sapiens
gaggttgcagtgagctatgatcgcaccactgcactgcagcctgagcgacagaatgagacttgtctcaagcaaaaacaaaaacaagaacaaaaacccaacaaccaaaatgctgcctctagttttctgcctatttgtgtaatgcatatgcatatttctgatatgtttatgtttgcagaatgaatagactaaccaaagctaaagcacaaatgcaaaaattggcattgatgagaactgattctacttacgtgacattctggaaaagagaaaatatacgaacagaaaacagatcagtagttaccacggactagagaaagctgagggaattgactacaaacgggcacaaaggaacttttctgggtgatggaaacattctacatcttgatagtggtgttggttacctgacctcctaaactcataactgtacacttaaaatgggtgaaatttaccatatgtacctcaataagcccaacttaggaaaacaa

SEQ ID NO: 122772 - DNA, 382 bp, Homo sapiens
ttttttttttgagatggagactcactctgtctcccaggctggagtgcagtggcatgatctcagctcactgcaacatctgcctcacatctgggaaatttcataaggggtaagagcacttcaagaccacctggaatcttcaccatgaataagctctacaatatcggtcaagccactcagcttttctgagtctcttttcctcatatgcagaattggagttaagatgactataaccgagtatctaatgtcatggtgcaaatacagtctgtgctctaagttctgcccttggtaagttagatatacttacccagttgtgttaattgactgtgcattcacgggaaggagtagatacaatgttggcagaacttacggtgggcgtaataca

SEQ ID NO: 122773 - DNA, 378 bp, Homo sapiens
gcagtgtagctctaggcctccaactccattctgatggacaggtgtcccatggcaacgttgttaaatattttgaataatatctcagatgtaagaaaatgccacttcttttaacctctctcttgattcagaacagatgcttgttataggtctagcactgtgctaagtagtataggaaaaacagaggaaatgagaaatggcttggctcttaatgatatagttgaagatgttaaattagcatacatttcaaagtcaagctaattaagttctaagtgggtctgacaaatacagttctgggtaggctggaattagcaagaaagagaagcatgaactggctgaggtttacgatgactaaggtttagttgggaggggagaaagcag

SEQ ID NO: 122774 - DNA, 175 bp, Homo sapiens
catttacggaaaacatagtgtggttttgggtggtattttggcatttttaatttcatgaactaaaatgtcttatttaaaaaattaagttttgagtaggaagcattcctggtattccttttgctactccataaagcacttaatctccaatagcaccacttgaatcattgctgtaacc

SEQ ID NO: 122775 - DNA, 817 bp, Homo sapiens
ggctgtggttatgatgaggctgatggagtgggaagcagtatgagcaaacttaagtgcacaagggtcagcctggtatttgggggtcatggagaggtatggacagaagagcattatatttagcacttactatctcctgcaggacatggcaaagtaaagttttttgtttgtttgtttttatggaatgtgtagacagtgaaaagggtaggcaagggaggagaaagaagcaggaaggtaagggagagttaaacatgctttccacatcagcctcacccttctgttccccacagctagccactgctagtctaggagaacagttcacaaactcacattctttagctggaagaccttcacagcttacctagcgacaagattttgagagagtttgagagatagagcagagagctggaaggtaagaaagtagatgagagaggttatcagatcagcaagggcaaggagttcctaatttgatttgtgtccattctttactttccatgcccctttctctttttctaccactatttgacaatgaatcatatggaaattgtggtttctatttttattactatttatagttatttgcaggttttattgttatttgatttatcctttatttgtcattttgtttcttgcaatttcattcatatcttctctcttttgttataatgccagaaacttgaaaggaggaactatgctttttcgtatttctcaaagtgtaaacagttttctttttcttagtaaatccttaataaaggtaacttcaatacatttggaaaccaggcaggcgtattagtcttctcaggctgctataacaatatac

SEQ ID NO: 122776 - DNA, 392 bp, Homo sapiens
ttcttcctgcctgctgcacaaacaacatcgattcacggaattgagtatagaaagagtttaattgacatgaggccagccgtgccacacgagagactgagttattgctcaaatcagtctcatcaaaggcttgtaggttaggggtttctcaaagtcaatttggaggaaggagtaggggtggctaggcagtggatgtttgctgctgctgatggttgggttggagatgaaatcatagggagttgaagctgtcctcttatgctgagttgattatgggtgcggacacaggaggacatggctccaggtggagccatgggtgtcagacatgcaaaaaaacatgaaaagctatctcaaaaggccaatcttaggttctatcatagtgatgttatccgcaggaa

SEQ ID NO: 122777 - DNA, 431 bp, Homo sapiens
cctcggtgggtactgtgcaattagtgggtttgcatcacagctgaggaatcctaagtttaggaatcctgaatgttttgtaagggatgacaaatgaatctgcctgaactttgctcggaagagaaccactatctttattatattgggccataaacaaagctgcccctaccatctgtttccatgggagacactaactctatattcccagcctgtttactatcaaaacattattgaaaagagttcagaacaaaagcatagttagtatctttgctctcaatatgtacagaaatgtgagagacctatagaggtctagttctaatgtacctaatgtacactgtggactgtgatagcttatgggtaaaatgatgaaaggaccgaaaagcctattgatgagcttgcataatgtatatatttctgactcagataaaaaaaaa

SEQ ID NO: 122778 - DNA, 3242 bp, Homo sapiens
tactgttccaatgtattgaagtgttgggatagttttttcaaatgttttcagatgttcttgttttagaatcattgtcacctttaagaggaaaaaggtcatcactagataatctaaacaaattgttgcttctcagtgttagcaaggaaaataatctagtttcaaattacattgcagtataatgaaaaagatccatatactgtggaatgatattcttttaaaattatttgctatggcttggtaaaaatgtactttttccagtagcacatatcacaagaacctcactgtagttgaaagccatctttctttagtatttgtttatccttttaggagagtcaagcaaaggttttcaccacctgtttgagcagaataattctcatcagttcacagatataggataactcaatttatatgcactttatgcgttatgcaaaatatttagaaattgtagattctagatctccagaaagactttgaagactttgatgtcacaaaaagatgacttgttatatgctgagcttgacaaaggtaggaatgggagagaaaaatagtagcttatgaggaaatatgaggctttaaatatataaagttggatattttaaaataacttttccctgtgggagcttctcactctgggtgcagacaggacagtgttggccattggtgaaatagataggatgggtttgaggccagagcagtctgggagtagggggaaagagaaggaggtgtgctagtgtctatcacaggctttctcaattaggtttgcaggagaaaaagccctaagtccctgtgtcatctagaatggtactaattatgtacagtccctaggagaatggagaaaatcataactcaaatcatcgactcaattctgttctcttcagatgagctcagagagcacataggagtgtttgtaatgaggggtatgtaatgattgagatagaggaatgagttacataaacatctcgggacaaatgcagcatagaaaacatctttgtagttaccctgcggggaaatttcctctgagttcttttaacattaactacccgtattattttatacttaacattcatatcataccttcccaaatatattgggaagttcagtgttaagtacgtttctcaagtacttaacaacttaatatagggaggaaaggtgtaaacagtgaaaaaagagcaaaactattttatggtaattttatggtagtatcagcttgtatttggttctctgtttctaaaataatgtaatttttaatattttaaataataggataacctggtttccaagcctttttttcccccgacatccagaatacacactggatccaagcctttcttaaacatcagtacatgtggaagactggcatgccatataccaaatgccattcagctgtaacagtatacacagattttctcttataaagaataagaacatcataaccaatgaccactcatataaagtcttatttgtgtgtgtgtgtgtgtgtgtgtgcacgtgtgtgtgttagagtctcattatattgctcaggctggagggcatggtgtgatcttggctcactgcagccttgacctcctgggctcaagtgatccttccgagtcgttgggactacagtaggtgaacaccaccatgcctggctaatttttgtattttttttttaatcaagatgggatcttgctatgttgcccaggctggtctcaaactcctggcatcaagcgttcctccttccttggcctccttaagtgctgggattataggtgtgagccaccatgcttgaccataaagccttactatttcttttggagacacagtcttgctctgtccaagctggaatgcagtgatgtgatcatggctcactgcagccttgaactcccaggcttaagagatcctcccatctcagcctcctgagtagctgggattataggtgcagaccatcaagccttgctattattttttagacttttcttaatttcatccaacaaagtagttgctgtaggagctgagtgttagaaggaaagatgctgaagaaatgaaatcaagcagggtgtatactgtcatgaataggcatacagtagtttttatacttttgttctttggagtaccaatgttaggttttacaaaagtaatttgatgaggggaaggagggttgtgtatttattttactttctgatgtttgcttaaataatactgtgtacgtattcagcttgctgtaattctgtaattacgctattgcgtttggctaactcctttttggaaatgtctttttttttgtacaaggcatgtgttagtttttactaattgctctgaatgtgtatatttagatttctgaattgaaaaaaaatagcgtacaataagtagatttaaagtaattagaacactttattgatttttctgatgttttctgtatctaaaatttatcaccaccaggttgtgctaaaacagcaggaagtttttatattgtgagtgacagtacccattatttctcttaattttactaacatttactataagaatattctctcgctcttttctccactcacagccattctccctccttctcttcataacatcaagctgtcacagacaaatctgaaaatgttacaagcacagactatgttgtatgttttgaaattttagaacagtaatgttctttttaaaattgaacttctgcagagtaagaaaatgaatacatttattactttaaatttgtaaaattttccaaagtaaaaccatacaaagctagtgtcagtctctctcattgttcacaaataaaggacttttgttaattgattaaatcacttactatattcgatatgaaatatataaaacatacaaccattatctaatacatttcagaatgtttcactggttacaggagccagtaaataaagttgactctaaacaggaattttaaataaactaaacattttttcatcaccaagcatcatttatatattggtttctgatttacatatgtgatgtctaagaaaatctctgactttattcttttttgcctgtattaatttaaaatttatcccatttcgtctcccccttcccacaaatcaggtatacaatgggggaagagggaaaggagtacatagttttgacacagtgaccttttattatataggttaccaactgctagccttcatatttttagaaagggcagttttgattagacccatctatgaggttctgtttttttttttactggaaatttcatgcgttaaatgttgggtaggattaagtga

SEQ ID NO: 122779 - DNA, 3167 bp, Homo sapiens
tactgttccaatgtattgaagtgttgggatagttttttcaaatgttttcagatgttcttgttttagaatcattgtcacctttaagaggaaaaaggtcatcactagataatctaaacaaattgttgcttctcagtgttagcaaggaaaataatctagtttcaaattacattgcagtataatgaaaaagatccatatactgtggaatgatattcttttaaaattatttgctatggcttggtaaaaatgtactttttccagtagcacatatcacaagaacctcactgtagttgaaagccatctttctttagtatttgtttatccttttaggagagtcaagcaaaggttttcaccacctgtttgagcagaataattctcatcagttcacagatataggataactcaatttatatgcactttatgcgttatgcaaaatatttagaaattgtagattctagatctccagaaagactttgaagactttgatgtcacaaaaagatgacttgttatatgctgagcttgacaaaggtaggaatgggagagaaaaatagtagcttatgaggaaatatgaggctttaaatatataaagttggatattttaaaataacttttccctgtgggagcttctcactctgggtgcagacaggacagtgttggccattggtgaaatagataggatgggtttgaggccagagcagtctgggagtagggggaaagagaaggaggtgtgctagtgtctatcacaggctttctcaattaggtttgcaggagaaaaagccctaagtccctgtgtcatctagaatggtactaattatgtacagtccctaggagaatggagaaaatcataactcaaatcatcgactcaattctgttctcttcagatgagctcagagagcacataggagtgtttgtaatgaggggtatgtaatgattgagatagaggaatgagttacataaacatctcgggacaaatgcagcatagaaaacatctttgtagttaccctgcggggaaatttcctctgagttcttttaacattaactacccgtattattttatacttaacattcatatcataccttcccaaatatattgggaagttcagtgttaagtacgtttctcaagtacttaacaacttaatatagggaggaaaggtgtaaacagtgaaaaaagagcaaaactattttatggtaattttatggtagtatcagcttgtatttggttctctgtttctaaaataatgtaatttttaatattttaaataataggataacctggtttccaagcctttttttcccccgacatccagaatacacactggatccaagcctttcttaaacatcagtacatgtggaagactggcatgccatataccaaatgccattcagctgtaacagtatacacagattttctcttataaagaataagaacatcataaccaatgaccactcatataaagtcttatttgtgtgtgtgtgtgtgtgtgtgtgcacgtgtgtgtgttagagtctcattatattgctcaggctggagggcatggtgtgatcttggctcactgcagccttgacctcctgggctcaagtgatccttccgagtcgttgggactacagtaggtgaacaccaccatgcctggctaatttttgtattttttttttaatcaagatgggatcttgctatgttgcccaggctggtctcaaactcctggcatcaagcgttcctccttccttggcctccttaagtgctgggattataggtgtgagccaccatgcttgaccataaagccttactatttcttttggagacacagtcttgctctgtccaagctggaatgcagtgatgtgatcatggctcactgcagccttgaactcccaggcttaagagatcctcccatctcagcctcctgagtagctgggattataggtgcagaccatcaagccttgctattattttttagacttttcttaatttcatccaacaaagtagttgctgtaggagctgagtgttagaaggaaagatgctgaagaaatgaaatcaagcagggtgtatactgtcatgaataggcatacagtagtttttatacttttgttctttggagtaccaatgttaggttttacaaaagtaatttgatgaggggaaggagggttgtgtatttattttactttctgatgtttgcttaaataatactgtgtacgtattcagcttgctgtaattctgtaattacgctattgcgtttggctaactcctttttggaaatgtctttttttttgtacaaggcatgtgttagtttttactaattgctctgaatgtgtatatttagatttctgaattgaaaaaaaatagcgtacaataagtagatttaaagtaattagaacactttattgatttttctgatgttttctgtatctaaaatttatcaccaccaggttgtgctaaaacagcaggaagtttttatattgtgagtgacagtacccattatttctcttcataacatcaagctgtcacagacaaatctgaaaatgttacaagcacagactatgttgtatgttttgaaattttagaacagtaatgttctttttaaaattgaacttctgcagagtaagaaaatgaatacatttattactttaaatttgtaaaattttccaaagtaaaaccatacaaagctagtgtcagtctctctcattgttcacaaataaaggacttttgttaattgattaaatcacttactatattcgatatgaaatatataaaacatacaaccattatctaatacatttcagaatgtttcactggttacaggagccagtaaataaagttgactctaaacaggaattttaaataaactaaacattttttcatcaccaagcatcatttatatattggtttctgatttacatatgtgatgtctaagaaaatctctgactttattcttttttgcctgtattaatttaaaatttatcccatttcgtctcccccttcccacaaatcaggtatacaatgggggaagagggaaaggagtacatagttttgacacagtgaccttttattatataggttaccaactgctagccttcatatttttagaaagggcagttttgattagacccatctatgaggttctgtttttttttttactggaaatttcatgcgttaaatgttgggtaggattaagtga

SEQ ID NO: 122780 - DNA, 3188 bp, Homo sapiens
tactgttccaatgtattgaagtgttgggatagttttttcaaatgttttcagatgttcttgttttagaatcattgtcacctttaagaggaaaaaggtcatcactagataatctaaacaaattgttgcttctcagtgttagcaaggaaaataatctagtttcaaattacattgcagtataatgaaaaagatccatatactgtggaatgatattcttttaaaattatttgctatggcttggtaaaaatgtactttttccagtagcacatatcacaagaacctcactgtagttgaaagccatctttctttagtatttgtttatccttttaggagagtcaagcaaaggttttcaccacctgtttgagcagaataattctcatcagttcacagatataggataactcaatttatatgcactttatgcgttatgcaaaatatttagaaattgtagattctagatctccagaaagactttgaagactttgatgtcacaaaaagatgacttgttatatgctgagcttgacaaaggtaggaatgggagagaaaaatagtagcttatgaggaaatatgaggctttaaatatataaagttggatattttaaaataacttttccctgtgggagcttctcactctgggtgcagacaggacagtgttggccattggtgaaatagataggatgggtttgaggccagagcagtctgggagtagggggaaagagaaggaggtgtgctagtgtctatcacaggctttctcaattaggtttgcaggagaaaaagccctaagtccctgtgtcatctagaatggtactaattatgtacagtccctaggagaatggagaaaatcataactcaaatcatcgactcaattctgttctcttcagatgagctcagagagcacataggagtgtttgtaatgaggggtatgtaatgattgagatagaggaatgagttacataaacatctcgggacaaatgcagcatagaaaacatctttgtagttaccctgcggggaaatttcctctgagttcttttaacattaactacccgtattattttatacttaacattcatatcataccttcccaaatatattgggaagttcagtgttaagtacgtttctcaagtacttaacaacttaatatagggaggaaaggtgtaaacagtgaaaaaagagcaaaactattttatggtaattttatggtagtatcagcttgtatttggttctctgtttctaaaataatgtaatttttaatattttaaataataggataacctggtttccaagcctttttttcccccgacatccagaatacacactggatccaagcctttcttaaacatcagtacatgtggaagactggcatgccatataccaaatgccattcagctgtaacagtatacacagattttctcttataaagaataagaacatcataaccaatgaccactcatataaagtcttatttgtgtgtgtgtgtgtgtgtgtgtgcacgtgtgtgtgttagagtctcattatattgctcaggctggagggcatggtgtgatcttggctcactgcagccttgacctcctgggctcaagtgatccttccgagtcgttgggactacagtaggtgaacaccaccatgcctggctaatttttgtattttttttttaatcaagatgggatcttgctatgttgcccaggctggtctcaaactcctggcatcaagcgttcctccttccttggcctccttaagtgctgggattataggtgtgagccaccatgcttgaccataaagccttactatttcttttggagacacagtcttgctctgtccaagctggaatgcagtgatgtgatcatggctcactgcagccttgaactcccaggcttaagagatcctcccatctcagcctcctgagtagctgggattataggtgcagaccatcaagccttgctattattttttagacttttcttaatttcatccaacaaagtagttgctgtaggagctgagtgttagaaggaaagatgctgaagaaatgaaatcaagcagggtgtatactgtcatgaataggcatacagtagtttttatacttttgttctttggagtaccaatgttaggttttactttgcttaaataatactgtgtacgtattcagcttgctgtaattctgtaattacgctattgcgtttggctaactcctttttggaaatgtctttttttttgtacaaggcatgtgttagtttttactaattgctctgaatgtgtatatttagatttctgaattgaaaaaaaatagcgtacaataagtagatttaaagtaattagaacactttattgatttttctgatgttttctgtatctaaaatttatcaccaccaggttgtgctaaaacagcaggaagtttttatattgtgagtgacagtacccattatttctcttaattttactaacatttactataagaatattctctcgctcttttctccactcacagccattctccctccttctcttcataacatcaagctgtcacagacaaatctgaaaatgttacaagcacagactatgttgtatgttttgaaattttagaacagtaatgttctttttaaaattgaacttctgcagagtaagaaaatgaatacatttattactttaaatttgtaaaattttccaaagtaaaaccatacaaagctagtgtcagtctctctcattgttcacaaataaaggacttttgttaattgattaaatcacttactatattcgatatgaaatatataaaacatacaaccattatctaatacatttcagaatgtttcactggttacaggagccagtaaataaagttgactctaaacaggaattttaaataaactaaacattttttcatcaccaagcatcatttatatattggtttctgatttacatatgtgatgtctaagaaaatctctgactttattcttttttgcctgtattaatttaaaatttatcccatttcgtctcccccttcccacaaatcaggtatacaatgggggaagagggaaaggagtacatagttttgacacagtgaccttttattatataggttaccaactgctagccttcatatttttagaaagggcagttttgattagacccatctatgaggttctgtttttttttttactggaaatttcatgcgttaaatgttgggtaggattaagtga

SEQ ID NO: 122781 - DNA, 422 bp, Homo sapiens
ctacaaattgatatattttaatttaatagaaaatgagataagggatggacgtggacagtttacagaagaagaaatgtaaatggccagcaaggctaacaaaaggtgatcaaactcattagtaaccaaggaggcatttccattaatcagcctagcaaaaactaaaatgactgataacatccagttctgatgatggtgtggggaaatggatgctttcttaccaatctttttggaaagatctcaggcatttaaaatgttcatttttcatggccagtggtctcagtttgggaattttactataataaaaacatctgtgcattggaatgtatgtaagatttattgtgatgttgtatgtgtagtaggagagaaaacattgaaaccaggataaacataatgaataaattaataaactgtggttcatccat

SEQ ID NO: 122782 - DNA, 721 bp, Homo sapiens
ctacaaattgatatattttaatttaatagaaaatgagataagggatggacgtggacagtttacagaagaagaaatgtaaatggccagcaaggctaacaaaaggtgatcaaactcattagtaaccaaggaggcatttccattaatcagcctagcaaaaactaaaatgactgataacatccagttctgatgatggtgtggggaaatggatgctttcttaccaatctttttggaaagatctcaggcatttaaaatgttcatttttcatggccagtggtctcagtttgggaattttactataataaaaacatctgtgcattggaatgtatgtaagatttattgtgatgttgtatgtgtagtaggagagaaaacattgaaaccaggataaacataatgaataaattaataaactgtggttcatccatagtatggaatattacaaaagaaattctctaaatctatcttgattggcataaaagattatgtgaacaaaatcgcatttcagaattatttgctttaggaactaacagagaaagccactggcttcttacccataatgatattccatacctcttctgtttatctcaggctctcattttcaagaccctaaagacttccccatttctgtttccttctgtatttgggttctctttacctctttgccacttatcagtccctttcctgtctaccatactgtggtcagatatttggtaaaaaacaaaac

SEQ ID NO: 122783 - DNA, 238 bp, Homo sapiens
tcaatcaatcacccaacttcagccagtttccgcatctcaaaatggtgctggaagtgacccgcaaaccgtagatgctcaatagatgctctctaactcactgcattgattgattgattgagacagggtcttactggtctcactgagctgagacagggtctcactggtccagcccacgctggagtgcagtggcacaatctcggtttactgcagtctcaacctcctaggctcaagtgatcct

SEQ ID NO: 122784 - DNA, 375 bp, Homo sapiens
gtttttgtttttacctaagacttaagtgtccattgttagtgaatatgatagtttccaaaaaagattgtacagaggagttaacagcaaaacagagctttaaaaaaaattgtttatcgttgttttccattgtaatgtactgttagttgctaaagcagttcttagtgctatatctgtggatatgcaaaaatgatacggtactattcccattcttcactttggtccttttcatacaccagacactgtgcactaagaaaatttgccccacccactcatttttaccaaatttgtaatatgtatttgagtaacaatgactgataaaaactcctgtttggtggggtactggaatgtgaaaagattagaaaactgcaaactgat

SEQ ID NO: 122785 - DNA, 553 bp, Homo sapiens
gtgctgtgccgcattaggttagtgggtcagtctttgtgctgacagtaactgcaagagagctccaggaaaaaggaaggatggcatgatgtctttgattttatgattatcctccccaacacacacacacacacacacacacacacgtacatgcacacacacacacacatgtatgtccacacacagcctgtgaatgtgagggtgtctttgcagttcatgcagttacagacccctttcagatttcacaggcaacagaatgtatgttatcttcataacccagggctttagcacaaggcctgggatttattaagcaccactctcagctgtttctgccgaatcttccataaattttaatttgtgtgggtaggtgcttatattattgtgttttatgcttaatctattttacattatgattcttatggcatagaactcacgttgcctcttcagtcacggcagcaacagtggtgaatttccatatagtatcaatgacttccttattccattttctgttcctctctcagaaactccttgccagaatacctaaatcgcacaggta

SEQ ID NO: 122786 - DNA, 460 bp, Homo sapiens
agatctaaccacttagctattcagtctaggggtggatggggccccaatttattggcaggtgataaagaatgcatgcagtccagtagaagccctaggcgaaaggcctctaggaccctctagactgaggcatgccagagtccagccttggtacagtcaacctaccaccctctagactgaggcatcccagagccttggcacagtcaacctaccaccctctagcccgctgaacccctggccacttttcccactctccctgaaccagagaactcctggaggatgggcttgggctctgcttcatcaagcgctgctgacagaatgaatctggggctccctgtcatgggatgaccttggcagtcattctgcaaggtgaacaggaagaaggagtaattgcacctgaattggtgaataaaggatgaataaaaatgcttcaagaggacaatggttttgtaagatgaggcaa

SEQ ID NO: 122787 - DNA, 456 bp, Homo sapiens
caagaggacaatggttttgtaagatgaggcaaaaggtgctgtgccgcattaggttagtgggtcagtctttgtgctgacagtaactgcaagagagctccaggaaaaaggaaggatggcatgatgtctttgattttatgattatcctccccaacacacacacacacacacacacacacaaacacacacacacgctacttggaaaagcccccactggtcctctaggcacataagggatgggcactcagcatctttcttgacatcagtgtcaaggaagcccatcttgacttgggccaactggagaagtaaggggaggctgttggttgagagacctggggcaggggagaggggactgtgagcctaaagtgctgggagattatatcggagaaaggagttcccttctaagcctgggctcccagtggttcatggactggaaatctgcctgcctctctcacccag

SEQ ID NO: 122788 - DNA, 479 bp, Homo sapiens
gctacaaagggtatagagtatggagttagaacattacacgtcaacaagaatatgggttttgaacccagacctcagtttgaatctgagttccagcactgccccgttgcttggccgtgagttacttcacctcctttagcctctgtctcccctccactacaataacacctgcctggtggggagtgaggatattgtgcgaatcagaagtaataacaggtcgttggcacctaagagactctcagtaaccagcagtcatcaccaccgtcgtcgtctttttttttggccattacagttgggattagactaaccctccctaagcagctattgagcctcacactccctggacaaagacatgaaaaactctggatgatttggaagggagatctagaaatggtgaaaggactggcaagtgcctctgtgctgatattgtacctgggctcagtggtctggctaaaggagaggtgctggggccaggtgacagg

SEQ ID NO: 122789 - DNA, 510 bp, Homo sapiens
aataaatacacctattaaggacacagatgattggtttgtctgaaagtccagatggaaaacagactcaacttttcttttttggtgtatatgtgtttgtgtgtgcgtgtgtgtgtgtgtgcgcgcgcgtgcgtgtgtatgtgtgtgtggtgggggagagaatgcacaaacactcgaggtggtttgtatatttgactggtgaatttcatagttgtttttctggggttacttagaatttgagagtccgtgagaagcattaggaagaacattactgagaaaaaaggaggggtgggaagcccctagacttctccccgagggtatccccgctgcagtcttctttagatgtttggattccccagtcctcttgttttgaggcgtgatataaattcagcctctcatacatttaaaaatatcggttgaacacctgctatattctaggcaccgaggagacggcagtgagcagacgagaatgcctgctctcctggagccacagaaaatacaaggggcaaagaa

SEQ ID NO: 122790 - DNA, 723 bp, Homo sapiens
ggaactgtttagattcttgttcatttacctgttcgatctaaaacatcaagttttagaatgaaatgcacccatatcaaaattcaagttggctgtagcttgagcaacatcttcattctggccatttgcagtgagaattgatcaaatcatgggtttctgaagcagtaagttccccaaaggtcatcgaattcagtgcccttattacaaatgaggagagtgagactgaagaagattatacagttactgacttagtcacatttatattccaacttcgggctttctggacttgtctgcttagcatgtccacaaaatagcaggctggaagataatagaacaacaaaaggcagtcctaaagatggaacgtttctcagcgggttcaggtgaacagttaaatggaggaagaaattgaaacaaactgaaaaaaaaaaaaaccatagaaagaaaaaaagacactttctaagaatctcttttgtaatcctgcaaaccctgccctttcagagcataacaatggcaaactgaggcttaccttttccctaatttgccaaaatttggagtcccagctttccagcagaagaaagcatatatcacagaccatttcatcgtagaagatttatagtacaccatcccagaacagaagaagtaaaatccctctgcgctgctctagaaaatgtccttctctattcagttaagctggcttcctgtagagatgtaaataaaagaggaaaa

SEQ ID NO: 122791 - DNA, 113 bp, Homo sapiens
atgtatctacttttatttaacttcttaaatttggtttccttgctcatttttagtgtgagatataataaaatgagtttcaaacatacttactctaattgtgagagattgatcag

SEQ ID NO: 122792 - DNA, 421 bp, Homo sapiens
ctttttatagtgcatctcgcttgggactatggcattctaactgggatggatactggaacctaaagtacatagttccttctggatttagcatttgcttcactctccgatttccagatgtttacttaaaaagtgtgtatagcggctgggcgcggtggctcacgcctgtaatcccagcactttgggaggcagaggtgggaggataatgaggtcaggagatcgaggccatcctggctaacacggtgaaaccccgtctctactaaaaatacaaaaaattagccgggcatggtggcgggcgcctgtagtcccagctactcgggaggctgaggcaggagaatggcgtgaacccgggaggtggagcttgcagtgagccgagatcgctccagggcactcgagcctgggcgacagagcgagactctgtctc

SEQ ID NO: 122793 - DNA, 197 bp, Homo sapiens
cctcccaaagtgctgggattacagacgtgagccattgcgcctggcccacaaatcactgttccttttaaagacactaacacctttctccaagttgtatgtatatgtgtatgaaaatacacatgtgcgattttgttttacaactttcaaagtgcttttgaatgcaattatcttgcataatctgtttagactgtttccac

SEQ ID NO: 122794 - DNA, 372 bp, Homo sapiens
gaggtcaggagtttgagaccatcctggctaacacggtgaaatccagtctctactaaaaatacaaaaattagccgagtgtggtggtggacacctgtagtcccagctgctcgggaggctgaggcaggagaatcgcttgaacccgggaggtggaggtggcagtgggccgagatcgtgccactgcactccagcctggtgacagagcgagactccgtctcaaaaaaaaaagaaaaagaaaaagaaaaagctaagatgcagcaggtggagccgcctgccgttgggtttcagcttttcttatggaaagaatgttacggcctgggtgcctccattctctgatttctttttctttcttgactttttaaaattgaaacaaaa

SEQ ID NO: 122795 - DNA, 476 bp, Homo sapiens
tggtattacatcttttaaattgatgaaagaaaataaattataacagaattcaatgaaaagcaaaacatccttcaaaaatgaaggaaataaaagatttttttcagataaatgaaaactgaggttcagcaagcaccaataaacagcaaatgatcctagatggaagtataatacataaggtattgaagaatgtcaaaagtcataaaaaggtgaataaacctaaatgaatgctaactgtttaaaatagtatttttgcaaggttttaaattttataaagtttgtaatgacagttacataaaaggtaaaagggaggtaaactgagttaagatactgtagatatgtgcattaccctgaaaatgtaaaacattaatacaggatagattttaaggatgcaagatacatttgtaatctctaggataaccactaaaaatacttaacagctgtattactaattagctaataaagggataagaatcaag

SEQ ID NO: 122796 - DNA, 608 bp, Homo sapiens
tctgcctctactactacaaatactacaatagtagcgcaggattctgctggattttctgcagctttagtttccacacaaatggtccctgtatgagttctggtaactgactgttagcatcatcttgattactttaacatttaaaaaaagagagagagagaaacaacttacaaggaaatataccatagaccattataccatatacagtaaaagttcccttaactaatatattgcattatctgatctttgcatacctgaatcattacagtcagttgagctatttttagtataccgacctactcaattaagtatcttgctacttggtcacagtcactttagataaatgcccttctgtaatttcagaaaagcaacatgtcaccacttaatcaaatccctaattttaataaaataaaaaaactgagtaacattataaaactgacccctaagcaatcctgcttcccagctgaattagtagagaaagaatgcagaatgggtgtctgttacataactaagatttcacctaatttattaaaatcagccaggtgctgtggctcacgcctgtaatcccagctacttaggaggccgaggcggacggatcacaaagtcaagag

SEQ ID NO: 122797 - DNA, 447 bp, Homo sapiens
gattagctccacaggatgggtctccaaattgacaccaaatccaggagttagagatggctgtgctacagagcgtgatccaagcaccatctggagcccccagaaaaaaatccctaggaatagcgactaagggactagcattgtaagagagttcagattagctctcctgaaaagaggcttactacaagagactggcagacagcctctgcagcaaaacttcacttaggaaaggacagaaaatgaatgaagaaagacagggggaggctgagcaggtcagagtatgaatccacaagtatgtgaaaaagagaatccacctatttcgaaaaaggtacaacttcctttcagagcctttttttttttttttgagacagaatctctcgctctatcacccaggctggagtgcaatggcacaatgatctcggctcattgcaacctccgcctcccgagttc

SEQ ID NO: 122798 - DNA, 758 bp, Homo sapiens
ggttttatttgggaaaagcagatcttgtgggaacacacaggaaggtatctcagtcttagggataacatgaaggcttctcaaaggaattaaaacatcatctgacacctgaagaagcagttattaatagggttatggataaccaggggagcaatcactacaaaaacgtgaagcagaaacagaaacctaagaattagagaatgctggggattcttgggatctacatgaaattccagaatgttgttatatacaatgtaggctggggactggcatgagccaactcatgtattaaaacctttcaaattacagtgtcaagaatgtatgtggtcataaaagttaagggcctatcacagaaatccagacaaataagttgatgacataaatgacaactcaatactttttttctgtggtgatttctgcacctcttgaaatgaacttggtcactccctcacctgctaactttagcacttgtgtgtgtgtgtttataaaattatatgtattatacataatatatataattacactgaatttagctgattttttcatagactatgagcttctaaaaaatcatccccatattcgtcattacattcttgggatcaaatatactgcatgaaaaaagatgctcagaaaagtctatgttaagttaatgtatgaatatatgaatgagtgaaggaaagtgttttgaaaccatcatagggaatataataagataaaattacactagaataaaatgaaactgataagaataaatttgatgg

SEQ ID NO: 122799 - DNA, 833 bp, Homo sapiens
attggtaaggctaggctatgttctgttatcacaaaattctaggacttgtttaaagaacttaaaggtcagtttcttagtttctctttgtgattgaggatgagcaagccattgatacaccaagagctgctgagtgttggaggttgcctggtgaaactggcaggccctgttgttgacatttccccagagctaaaatgtcctcatactcaaaccaactgtgctgcccaagttagtgaaattatccatcagcactaacaccaccctttgggttcatgctcatccctgcactccatgtgacctttgagcccagatacccttctagaaggtgaatgaaagccccacatgtcccgcaagacttagtctgcataaaagatttaaaaggatttttttttctctacagtccatttatatgatactgttagaagtgaagaattttgaaactacatacactggcctctgaaaatggttcttgtggctcagaaatagtatattgttctgttgcttgtttttgctgaactgtagagaaaacaccagagtaaaattccatgtaaattgctaaggcatcgaatcagaactgtccttgggcgttgtaacagtgcagaaaatctcatttagtttttttctttttttttttcagttaactacttgtttgtttcttttcagaataggcacttttttttgagtagaaaacctcttctttctccacagatacatctctttttgttcacgccttgaagacttcagaaaaatagaagctcacttccttccataaaggtgaagaacatcttgatgaataaacagtcaactaccaagttcacatatttgcctatgaagtg

SEQ ID NO: 122800 - DNA, 582 bp, Homo sapiens
  misc_feature (10)..(10): n is a, c, g, or t
cttgggtggngttctagaggtcccagtgtgcatgtatacctagtagtctgactccagagtctgtgtgtttagtttggctatgctatgctgctctctcagggaaagaatggcttcacaaatgtcaatcagaggtaaggcattgaatcacttcttcttagacagtatgtacagaaagagccacaaatggtcaaaactaagcctgctgccaggtgggaggaggaaagagtggttaacaaaggaaagaaaagggataataggagcttacaggacaactaatgtcatggaagggaagaaaaaagttcattgaaagtgtaatcagttgggttgcagggccatagaaaatgagcctatggtaagaagtttagtgaaccgcaacactgcaatataatggaaggatggaaaacaaaaccagatctcaggagatcaaaactgttgttacaaaggaagaaggtaaagaagtaatttaatagagaagaaagtgcaggttcaagtaatttttttccaggatggaggaggacctattcacaggaaatcctacagagaaggagagcctctcagaaagcaggtgtcgaagctgtgtgc

SEQ ID NO: 122801 - DNA, 184 bp, Homo sapiens
tttaatatgtaacataggacggtgattcctcagagtcaggaaacaaatgagatgaaccctatgagtgccccagctcattaccttaaaggactttccaggccatggcacggaaagagggaaaatacccttccttctatcccctcccagaacagccaaacagaaacaactagagttcacaaaatag

SEQ ID NO: 122802 - DNA, 106 bp, Homo sapiens
cccgggctccagccgccccgctgtccgccctgagtgcgccgcggctgcccgagcgccccgcagacgggcgggtggccgtggacgcccagccagcagcccgcagcat

SEQ ID NO: 122803 - DNA, 345 bp, Homo sapiens
tcaaaatttgcctctttttgctgtctcactattttaaggagtgcccactatatcactaatatctctggcaagaaagcattccatgtgtatgtatgtaagtgtgtatcttcattttttgctgtcaccacacagacatcaggctttttcacaaaatctgaccccctcccttgaccattttttataactacctggcatgtatcactacagagcttttgttctggtccttctacttggactttggcagatatttgaactcttctgagccagtgctttcctcttcagggatttgtttttaagattttcttccttgccaaccacagagactgaattttatatcccacagat

SEQ ID NO: 122804 - DNA, 470 bp, Homo sapiens
catgaatttattcctgggctctctattctgttccattggcctatgtgtctgtttctatgccagtaccatgctgttttgattactgtacctttgtagtatatttcaaaatcaggtagtgcattctcaattattacagaaaaagcctgtgggtgttaaccttatgactccttgcatatactgaaaaatgtgtgtatttgtttttatttggttgctgacttggaagagtacagaattttaagttttaagcaatctgataattttcttctgtgaagtgtgaaactttatttgctttaataagtacctgatgaactctttatatcttaaaattcaaatctttcctcatctctagaaatttctcccttctcttccttcttacactttgccttctttccctcctccttctcttcctttcctccttagtctccttatttcaatcttgccatgtctattagagagatgtttgttcttct

SEQ ID NO: 122805 - DNA, 382 bp, Homo sapiens
cggtcacattaacctatgaggcagtaccatcatctccatcttacagatgaggaaaccaaagtacagggaagctagcagatttgctcagggatgcaccatccagactggaagcatctgtttcattttagagtctgtgttctttccaatggcattctgcctttaaaaaaaaaattgatagcaggcatggtggctcacaccagtaatcccagcactatgggaggccgaggcgggcagataacgaggtcagaagatcgagaccatcctggccaacatggtgaaaacctctctctactaaaaatacaaaaattagctgggtgcacctgtaatcccagctacccgggaggctgaggcaggagaattgcttgaacttgggaggcagaga

SEQ ID NO: 122806 - DNA, 395 bp, Homo sapiens
gccagatacttgggtagagttaatacatagaatataaggctataccactctgactctttatttagaaatttcactgcttattttccaggcattatggtgacccaaactttgttttttcattcttcaagccagtaagaatgcaggtttctatcatatttagatgctttttatgtctgcaactgaggactgccctcagacagaaagtcacaaaacaggacacttactccgtgttatccattttttaaaagagtaaaccacacccctagtttctgcctgctttcgattgttctccaatgccttcaggccgttgatttttatattttgctcagagttgaaacttgctatctgtgttagaatttatccaataggagcttgctatcaactgagttgtatcc

SEQ ID NO: 122807 - DNA, 396 bp, Homo sapiens
tctcaatcggggaaagacatgatatcccatccagattacaaataatgactatctaaaaatctcgaaggaaacagttcctctgtttataacacttctgacaccaaatgtatggacttttgcaccaagcaattctccagttctctgcgacacccagctttgtgtcccacagtgcaattcaattctgaaactaactacctagaattagcacagaccccacaggttaataacaagagagaaaaggtgaatgctgaaaaaaatatccaaagaactaatggctgaaaacttcctaggttcagcaaatgacataaacccaggcagactgaagaatctgcacaaagcccacacaagataaatccaaaggaagccatgacgaggcacatcataatcaactgctaa

SEQ ID NO: 122808 - DNA, 541 bp, Homo sapiens
aggtaatgtttgtaattctttgttgttgtttaaactaatgcattcctcagtgagtgctcagctcacgggattgaaagagggagtcttgcacaattgatgtgccagaggacaaaacctgatacaagaagagcaggtggaaatttaagatgcagtctccagaagcaagaaaattacagagaaagtgctcagtaatagctgagcatgaactttatccaaatccttaacaaacactcaaattacacatgaaagaggggacagccagggatttaggcttaaaaaaattatatttgcctctataagctgtaagaaccacaacaacaaaaagtgttcagaagaacagaatggaagacagacttgcagtgaagtattatttatgatggctagttttcagccaaaaagtattagacaagcatagaacaggaatatatgacccatattcaggaaaacaatgcagtcagtggaaattacgtctgaacaggaccagatgctacatttcacagaaaaaaaaaaagactccaaagtaattattataaacatgctc

SEQ ID NO: 122809 - DNA, 170 bp, Homo sapiens
actcttagttatttttaactatacaataaattattgttaatttactatagttgccccattgtgctaccaaacactagatcttactccttctatgtaactgtattttttacccactaaccatcccctttctactcccctttccactaccctttccagcctctgctaaccac

SEQ ID NO: 122810 - DNA, 138 bp, Homo sapiens
gagctggaaggtgtggcacatagggagcgaagggaggggaggagtcttttttgatattcaaggattgctctccccggcttggtccaggcgaggctccagctccattcagatttcctggcctgattactggcttccttc

SEQ ID NO: 122811 - DNA, 662 bp, Homo sapiens
cactgccccctcaccacccatggacgacaaatgcagtcctaggctcctgaagggagtgctgaggcccagagaaggcaaggatggtcctggggtcacacagccagtgagggggacagcgggacccagacacccgactcctcacacgaccttcctcggaggctcaaagccagcagcagcccctgtttaaggaaacaaagctgcccctctcttgagcttcaaggggcctgggataggacgagggaaggaagtcaagcccctgaagagctgcatgcagaaatccgtgtgacaagaggtggaattatttcccctagaaaaaaagaaaaagccctcccttggcagagcccaggggtactgggctgtaggctgatgtaacagagagaggagaggccaagaggaaaggaatcccccttccctctcagcaaacctactgccaggagcacaacagggaggacgcagctggagcagggggtgggggagatgagccaagcaggatgttggagcctgggatagagccctcctccatctggctggaaagcagaagcctttgaactgcaacccagggggtagcactcccttggggcccaaatctgggcctggcatggatgtggggtgcccagagcagagtatgtatctacaagggctgtgtcagctggaaaaacccg

SEQ ID NO: 122812 - DNA, 397 bp, Homo sapiens
gatgatatgaataaaatgatggtgcatgagatgggaagtgaggtggaagaatagatttcctgaagataggcttacaaatacatggaatgagcaagcgagccagagtgaggggaaggtaaatcatggctgccatgaggaaaactaacacaaaaatacattaccagttcagatacaaaataaatacctatatatggcatcacaggagcgcccgtaggagggaataacggcctttaggagaagagcaaggtagagttaggatcaccttccgattttgtgctactataaggctcttgacaatctttctgctctgtaggttattatttataaaaatcacagaaccagctgatacattcataagctaattactgaggcagctgggtacacatggtgcaatatg

SEQ ID NO: 122813 - DNA, 340 bp, Homo sapiens
atactatattcccttaaggctcggtttaaaataaggcataaagcaacagggtacagtaagtatatgtttcgaagagaattcattagcagatctataccattaaaatattagcaagaaggttccattgaattacttaatgtattcctatagtacagccaaaagagatgcacatacgtcagtggctgtcatccaaatggaaatatgaacacatctgcgtgtgtctctctctttatacttcttggattcctcccaagctggaggaatatggttgcagatgaagagagtgcttctttccgcacccccgacccccgcccgaggctcttcactcgtggattccctc

SEQ ID NO: 122814 - DNA, 837 bp, Homo sapiens
ctgcctgtaggcttcatgtccttcccctacaacacgccatgcttgccaggctggaagaggggctccagaaacttggaaacctgggcctgtagctggcatatggaaaagaggcctggaaaagcaccactcctgtccatgaagcccccagatggaaccaggtcctgttcagaaaccccatctgtgcctttggagagactgccccgagcacacaggcccagcaaccgccatctatggcccccaggacctaatcccttctacatagggttcagtgcatgaacagcaagaggaccttgtgcatgaataatttgtttccatactacagagtgggtaataagcagattagtaaaaacaattctgcttcacttcaataacagcctcctccaactcattttttctcaacaaacttatttttccagcagaagaatcccagacttcttagagaacccagtgactttttgcaccttaaatctgtgaaatcctcatgttttcttctgccgtatccatagttcaaacaaagatgaggcaaagctagacgcattcctgaaggaacccaagaaattcctctctttctctctctggaatgaaatgaattctctagaccaccagttctaaccttcaaaaaccaaacctgtttgtgagctgtccttcaaatactactgtagaccccagtgtttattcattaaattttttaaatatttgttttatttggaatcaaagtatttgtaattttagtatttgtattaatatcagggagaaatgtttaaatctgtctatgccatatgtgcctctggcttattgcccaattaattgtagcctcaggctaaactttggtttctg

SEQ ID NO: 122815 - DNA, 631 bp, Homo sapiens
aatcacacggggcccaaatataatcacggggcccgggcccggcgtgggggttgtaggccggcgccacagcctgaggacaccgcgacctctgccccgcggagcgcgccgaatgccgggaaactttgcggaatgtgtccaggtgttgaagctcttgatggcgaaaggaacagcaagaggaccttgtgcatgaataatttgtttccatactacagaaagaatcccagacttcttagagaacccagtgactttttgcaccttaaatctgtgaaatcctcatgttttcttctgccgtatccatagttcaaacaaagatgaggcaaagctagacgcattcctgaaggaacccaagaaattcctctctttctctctctggaatgaaatgaattctctagaccaccagttctaaccttcaaaaaccaaacctgtttgtgagctgtccttcaaatactactgtagaccccagtgtttattcattaaattttttaaatatttgttttatttggaatcaaagtatttgtaattttagtatttgtattaatatcagggagaaatgtttaaatctgtctatgccatatgtgcctctggcttattgcccaattaattgtagcctcaggctaaactttggtttctg

SEQ ID NO: 122816 - DNA, 741 bp, Homo sapiens
ctgcctgtaggcttcatgtccttcccctacaacacgccatgcttgccaggctggaagaggggctccagaaacttggaaacctgggcctgtagctggcatatggaaaagaggcctggaaaagcaccactcctgtccatgaagcccccagatggaaccaggtcctgttcagaaaccccatctgtgcctttggagagactgccccgagcacacaggcccagcaaccgccatctatggcccccaggacctaatcccttctacatagggttcagtgcatgaacagcaagaggaccttgtgcatgaataatttgtttccatactacagaaagaatcccagacttcttagagaacccagtgactttttgcaccttaaatctgtgaaatcctcatgttttcttctgccgtatccatagttcaaacaaagatgaggcaaagctagacgcattcctgaaggaacccaagaaattcctctctttctctctctggaatgaaatgaattctctagaccaccagttctaaccttcaaaaaccaaacctgtttgtgagctgtccttcaaatactactgtagaccccagtgtttattcattaaattttttaaatatttgttttatttggaatcaaagtatttgtaattttagtatttgtattaatatcagggagaaatgtttaaatctgtctatgccatatgtgcctctggcttattgcccaattaattgtagcctcaggctaaactttggtttctg

SEQ ID NO: 122817 - DNA, 941 bp, Homo sapiens
ctgcctgtaggcttcatgtccttcccctacaacacgccatgcttgccaggctggaagaggggctccagaaacttggaaacctgggcctgtagctggcatatggaaaagaggcctggaaaagcaccactcctgtccatgaagcccccagatggaaccaggtcctgttcagaaaccccatctgtgcctttggagagactgccccgagcacacaggcccagcaaccgccatctatggcccccaggacctaatcccttctacatagggttcagtgcatgtgagtatacaccgggcttgattcctgcctagtccctgccagataccccatgcccacctggtgaagagaatgaggccacacaaacacacccaggccatcgtggtgatggagtgcctggggtcctacttgcccacccttccttgctggttcagagccagctgtctgaccacattcctaccctgagatgagactttggggacattgtccaccagggtcactgaccccttttaaaattccagaaacagagggccagctggtcccctagaagtttggcacatgggataagccaaggcttgccttcaggaacaggttttccaccacgtcgctgcccaaggcccagggcatccccaagttcatgtggcacctgcctgccatgtccacaacccatgccgacccctcctagagccactggaatgcttgttcctgggcatgtgataaacccagacagcttcagccttgcaggacaactatgcacatctggcagcagtagccggagggccatggaaagaagttggaggtgaaaccagatgctgtgaaaatattaggcaaaactgcatactataaaagtgctttaaaatgcagcaggaggagaggtgaagacacaaatgaataagtgcttagagacacatggctgtcagaacagttaagaatccacgctgcttccccc

SEQ ID NO: 122818 - DNA, 378 bp, Homo sapiens
caacatcagcaaactacatcctagccacctgctttataaataaagttttgtggaccacagttacccccattcattatttttctttggctacttcctactacagcagcatagttcaggaggacaaagaccttatagctggcaaaataaaatatttattttgtggccacctaagaaaaagtttgccagacctgctctagagcatcctttactgtcttcacttctcataatcctttgttcaaactgcccccctccccacttttatgttagacagcaatcttttattgaacagtactgctccttgtgaagcagggctagttcagaggcagtgcacccacagccagcccaaactgcctctttttgctcctaatatgttattag

SEQ ID NO: 122819 - DNA, 402 bp, Homo sapiens
ttgtctttatcatgttgttatcttaataagttcccctatattaggctaagtgaaataagccagtcacagaaggacaaatactgcacgattccatttacatgagggatctaaaacagtcaaactcacgcaaacagagagtagaatggtggttgcaaggcagaggagagagggggaaatggggagttcccatcagtgggcataaagcctaagttacgtaagatgagtaagttctagagatctgctgtatgacattctctctacaattaatgatactacattgtacacttaagtgattaagagggtagatcccgtgttgtcttcttactacaataaaataaagtttaaaaaatattcaggccaggcgtggtggctcgcgcctgtaatcccagcactttgggaggc

SEQ ID NO: 122820 - DNA, 638 bp, Homo sapiens
atgggggaaagaattagagaccccacccttcaccaagcaggtcgcagggcagagagagcatgggcttggaagaggggcagacctctggatgatttggggtgccctgtactcctgtggaactcacgtctttgaacttcagtttagttgagtccacacaaatgtccctggctggtgaatggtcttctgtcacacagggacctgaggacagaggcctccatcccgtggctgttccgtaccctggggcctggaggcctcaagagagacagcgtggagaagcctcgcctgcttcttaaagcccctgccttgaatttacacacatcacttctcattttccaatggcaaaacttaggcccgcagccattctgggaacaaagtgggtgggacatgccgttcctgatgggtagcagcaccaggaccagctccactgcatggaataatgaacccacagctttggtgaataggcagccacctctgccacatatcatagcttgttgggtggttgtgaagcttgaatattataacacatgtgaagcattaaccttggagtgccctgcagtgcaggataaatgctgttatttagttaagttaaaaaaacacacaccaacagggaaacgagaagaaagaaccctccagggctg

SEQ ID NO: 122821 - DNA, 166 bp, Homo sapiens
ccatgagaatcgctagagagggataataaaatttacagctccatatttataaacttctgtgtctagggttgggcaagaactctaaagatgatcattctctctgctctggatgacatcagatcaattgtgatggaacccacagttgtatccaggcatggtcatccct

SEQ ID NO: 122822 - DNA, 415 bp, Homo sapiens
tgggttcaagtgatcttcccatcttggtctcccaaagtgctcccacagtggtgtgagccactgtgcctggcttagtcaaactttaatatgctcaggaatcaccgagagctgttaaaatgcaggctgtgattcagaagatccagtgtgggacctgagattatgctggtctggcgagacacaggctatactgatgctgtgcagaccacactttgagtatcaaggatctggtccatccctcagcctccgtgcagtccatccctgaagacaggcttatttttaaatgtggaaattcccagctcttgaagggggaagggatgagaagcagaaggtttgctctgccagatcgttgggtggagaaaactcctttcagaccagggtagctgtggttcgggctgggctcttatttgcgaaaact

SEQ ID NO: 122823 - DNA, 269 bp, Homo sapiens
tgggttcaagtgatcttcccatcttggtctcccaaagtgctcccacagtggtgtgagccactgtgcctggcttagtcaaactttaatatgctcaggaatcaccgagagctgttaaaatgcaggctgtgattcagaagatcacttgaacccagaagttcaagacaagcctgggcaacatagggagaccccatctctgtaaaaaatttaaaacctagccaggtgtggtggcacacacccataagtcttggctacttggggagctgaggcaa

SEQ ID NO: 122824 - DNA, 275 bp, Homo sapiens
ttgaagatgagtatttttacccaatttacactggaaaaacagaggcttagagaacacaagcatttgctgaagttcatgttaatcagtggtagaacaggtcttggaccagctctgtccactgacagagtccaaactcctaagtgccaagctgtactgcttctcccaaagcaaacagcctaaggagtatgtccgccccagggccctccattgcttagctgagtatgggactcagctgcagttaggagcctcaccctccacaggctgtcagagcctcc

SEQ ID NO: 122825 - DNA, 200 bp, Homo sapiens
cacccccagcctgagcctatatacaacccctctgatgaccctcctaagaagagactgccttcaggatctaggtgggattttgcaccctgcatcctgccttccacctcccaccttctttctcatcatttgctcctccctacaaaagaaaatccttttctgcataaactctgagatgcttgcagattttttttttttttttt

SEQ ID NO: 122826 - DNA, 509 bp, Homo sapiens
ggccagcagcttacaatgtgaccgaagtgaagtttgtattaacttccagctgagtccaaagagaaggctcttctcactgcctaactcttagcttgcatcctacctgtttctacagatttcagagctccctatagcaactctgcaattgggcacatccctattattccaactttgtgaatataaaattgaaaccatgaaagattgtgggactgactccaaatcccacagtctataaatagcagagccaagacacaaacgcaggagtctgaccctccagggccctagatccttatttttcagactattgtgtataagtcactccatcaagactatcagcaacagttgttggaaaggtcatgggattccagggaaatacgtgattcctcccaaatgaggttctcaaaagataagactagacttgataccataatccatggatctgccaacattttatgagatggaattctctacaatggaggatacagatgggagcctctgatgctgtcttc

SEQ ID NO: 122827 - DNA, 599 bp, Homo sapiens
ggaagtctcgggccatttaacaaaacaaaacaaaaacgagttggtagcaactgggtgtggatcctcatgctatttctggtggaaggaccttggagcattactctgagagtgttttggaacataatgattgtgggtggaacttcacccaggcctccctcagtgagtccaaggctgccaagaatacttaggagtgggaggccaatgaagggattgagagaaaggtcaatttcaagaattttttttctttttaactactaagtaagcttcctttaacatctggggtcttctgggaaaactgctcatgagctataaatagtgattcaaggaaccaggcatggatcttctctgaggtgtctctctctctctctctccctctctctctccccttctctctctctcatagtaaaattgacggccacttatctaattaactaatttttttttgttgttgttttttgagatggagtttcactcttgttgcccaggctggagtgcaaatggcgtgatctcagctcaccgcaacctccgcctcctgggttcaagtgattcttctgcctcagcctcccgagtagctgagattacaggcatgcgccaccatg

SEQ ID NO: 122828 - DNA, 497 bp, Homo sapiens
gaagactgcatattggatacagtgtactctgtagtcatttatattaagtcttgagtccttaagagcagagcctcatcctgcagccctgtggtcatcgagggaattccagaatgctgaaggataagaactatgcctttcaatcccctatctttacccctcttgttttccaaatgggaatggctttgtatatatgaaggtgctgatgaaagtgttcgtgtctcagagaaaatgcttgacgttgagctgattactttgctgattgctgatgcaggaaaacatcagtaaaaaagaaacttaaaagtgggttatgtaaaggcagtgttaattatcatcctttaaaggagctaattgccatttttacgtgattactgtgcagccaacaagggccctgtatgttgcatatcttgtttcatttctgcagtaattttgatataagtgcttaactgattcaggtactgggcccctagattcatatcagtgatatttttttcagttcc

SEQ ID NO: 122829 - DNA, 948 bp, Homo sapiens
ggtgtagcttgtataacctgacatcatgagcatgcacggctgccatctggagcgctggcaggaatgtgacacagaggccagcctcaaagctggccaggatatttcctggggccctttgttttatgggtagttgatttttaaaattagcaaactcccaggcaaatttagacaatggtcatttaatatgtctatcaatgactgggtgaaatgatggttcattaaactgctggttttatttatgtgcaagtaatttttcttctgtctgactcattatttaattaactcatattccaaaaataaaatcaattttcctagggacaacttaggcaatttgttaggtactggacaggggatgggtggaatgaaaaccacatcacactgtagagatcaattaaggagcataattagtcctattttaaaagcattgttcctcttggggaggcccacatccacacaggaatcacagacttcatttaaatgcatcttatccaatatttgagtgcaaatcattaagtacttgagagaggaatactcaatgaaatattctaagatcctgatgatcatcaaacattacagttaatatgaaacgtaaatgatttttttaccaggcattcgtgtgtctttttcagatttcactttgctggacagaaaactaaaattctcgatagcttagttcagcattggaagtgcggtaaccccagccctgaaagagaaggattctgagttatggcttccactgcagagtagcaaattaatctcctccaagaatagctagggagagtctggctacctgattaacagagggaattttaaaatttgagtctaggtcaaaaattgtttttttaatgaaaagaattttaaattctgaaacagattttctaaatctggtacaagaaaactgtcaggagaaatcagcttgtcagcttttaagaagcccttagttgatta

SEQ ID NO: 122830 - DNA, 176 bp, Homo sapiens
agtgtacacactctgcagaaacagacatagatgaagaccatcctcagagaactatgcctggttcctcctcttcctcaattccctaacccctgtaataatgggaccacattcttcagctgaaagtaacttcctgaggagaaagatctattagccaaaaccaccaagatacaccatgc

SEQ ID NO: 122831 - DNA, 198 bp, Homo sapiens
gatttgaccaaccacagatcaaaaatattttttaaaaatgaaaataacaatagtaaaaaaaaatacaaataaaaaacagtataacaactatgtatatagcatttacattgtattaggtattatgagtaatctagagatgatttaaagcagggatgtccaattttttggcttccctgggccacatgggaaggagaattg

SEQ ID NO: 122832 - DNA, 278 bp, Homo sapiens
agagttgacgggagaaaccaactttaaattcatgcaggatcaggaatgctgtgccacatcaatgtgtaaaatacaatcttcatgtgggagaacgaatggtcatctctgaaatatgctttgcacattaggatttttcagatcttccctattcttggtttacccaaagcaaagcgagttcttgctggggtgaagggtggaagagaaaagcagcggaatgggcgggctgtcgaacaaaaggcggcgagggaggtaccgtgcagagcctgctgggccttctg

SEQ ID NO: 122833 - DNA, 176 bp, Homo sapiens
taactcagactgggggcttagacacaacagttcacctaatgtgagcatcttctctacgggggaggcaaccagagtacctgcagaaaacccatgcagacacagggagaacatgcaaacaacagacagtggtctcagccaggaatcgatattagttttcctgcctcaatgtttttttt

SEQ ID NO: 122834 - DNA, 452 bp, Homo sapiens
atacagcagagaggaaacaatagactttttgtgtagctgcctgaaacttctgctaggtgaaggcaagccaataaatgaagaagaagggataatggattgcctaacctgtgaacttggtcaccatgttctttgaaaacaaagtgaaatgcaatgtgttgtctttggactgtctcacagtgcttaccctacatcagacaacccttgtctagtatttcacggattttgatttgctatttattttgcatttgccttcatgttgctatgttttaagccatgaaatgaattatttattctgtttatacaagcaaaaaaaagttaatagctcaaataaaatgggaatatatttgtaatggcatcatagtatatgatgtggtatttttattcttgcttaagaggctgaagattgaatttgtatactaattcagatctggagagagaagaaagtagatggg

SEQ ID NO: 122835 - DNA, 667 bp, Homo sapiens
gtggttttggagagggtcccgatggtaagatcctgattggaaggtgtgttggttaaacaatttctgaactaaccgccagatggcatcactggccaggactgtttactacctgctagaaggggtagggcaaagtgaaacgaagccactctagggcgaatggggtaaggggaaagcaacgaataaattgccctttataaagatgatcacagattggatatttattactcagtgtgtctgtatgcagtactagggtggactaatgtctcacttcaaaaaaaatatgagtgtagtatacttcgcctaaaattgttactcagtgttactaaagtgtaatcattttccacatctccaaatatattccaagtctctgaaatactagtgcattgggaggtagaacattttcgagcttcatgtctgtaaatggtttctctttactgtcattcagtaaaatcagaataaatgattgatgtaatacttaaaaaaaaattggtgttaaactttgtagaaagagtgagacaggatgattaggggaaagggtatcctgatgggaatcatcaggcctccttggtgccagccctgaccctgttagtatcttgctgtcacttcacctccctgcatctcattttttaaaaccatggaatgaggagattggaccagatgatcattt

SEQ ID NO: 122836 - DNA, 202 bp, Homo sapiens
gttccatctggtcaagttatggaatcttcttaacagttaattgcttgctctcagaacattaacaactaagttacgttcttggctgttagaatcctagcagatattttaaacttacatttttgatataattatttcaacccgtcacttcattttagtttatttcctctacctattcgtacgccttcacttcatattagtgttt

SEQ ID NO: 122837 - DNA, 293 bp, Homo sapiens
ccacaggcttgtggtccagcttctctgttctgcttctccctactcacttccattgccagggctgattttcttcttgcaagtttcctctctgccccatagcttcctcctgttcaagactctggtgcctgatggcttctcttcatggtactgctcaataccttctcgctatgtgtctcttagccatgtcactttagtttgtcttacttggcattatgattttaagacatgccaagaggaaagacgttattaagttgttaatcactctccaaaatagaacaaatagaattcactgg

SEQ ID NO: 122838 - DNA, 299 bp, Homo sapiens
tgcgtatggaatacaaatgaactttttaatgtcatcttttttcctatattcattgaatggacaaataatagggtgaaatttagaaaggaaaaatgcaaaatataatttttccaactagctttattgtactcatttccaccaaaaaatatttaaacattttctggcatggtgccatggaagacctttcatggtgaggggagatttattttgatataattacaaatttatagaaaagttgtattcataaagagctcccatatactcattgccaaattcagtagttgtacattttgcattat

SEQ ID NO: 122839 - DNA, 326 bp, Homo sapiens
tggcccagggagacatatgtaggacttctatcctacagaactatgagataataaatttgtgtttaaagccacaagtttgtggtcagttattacagtagcaataatagagtatatatacacagaaacttgggcaaacacattcatagaccttcctgagtctcatcctcataaatacataaaggctccttgtgctcaaaagagcccaatatacaacatgaggactctgagagctgtaggtatgaaattatttggcattcgtgaaaagatcaatgcccatctcatgacctcaatccgctccaaaatctcacctctacaaacatggattc

SEQ ID NO: 122840 - DNA, 466 bp, Homo sapiens
catgtggagacaacatgaagtaataaatctgaggcccttcatgaatgtcaggcccaagctaaatgccatcgcagccaacagctgctgccatcctccctgatatatacactatgccctattggccaacaacatagggcaacatatttaattcaagtgtctacttcaacagagatgatgccaactagctaggatcatcacagtcaccgtagcagaaatttcaaggaggaaagagtcaccaaccccccagtgctgccttggatcgggaaccacgtgacagcccatacctgtgtggcccagccacagttcatatcctcagatattctcaagattcccatctgccttgccacgtgtaacctgctatgaaaacccctgctacagagtttttgtgccttgggaccaagagagcctaatgccacaaccttcctacaactggacaggctgcccctgttcaaaattcacacaagcc

SEQ ID NO: 122841 - DNA, 129 bp, Homo sapiens
tcagagtctcaggctgccccagcaccgcagctccaagtcccgtcagcctacagtggggcgggataagggttcccaacctgattttatgtatgggaaaactgaggcacgggtcagtaaaaagccgcctcc

SEQ ID NO: 122842 - DNA, 392 bp, Homo sapiens
gatattctgcttgactatctagtccctcaaaaggcattacctttcccctgtattatctcaagcaccctattataactttttgagttagtagcatgttcaccaaggctaatcctctttagcatgttagccagctatgatggccacattttcacataacaagatgatttcaccaagttaaaaacttctttgggatctattcgtaaaagtatatataagagtttacatttctaacaatatagaaaaatgtagagcctccattataaaacatctagaaatgttggaaaaaaatatacaaaacatacttttaaaagcactgactttataagatagtacaagaaatgttcaggagctaaaattgaaacaggtcacaaaccagagcagtacagagacag

SEQ ID NO: 122843 - DNA, 437 bp, Homo sapiens
ccttccacgaggtcctcttcctcaacacgtgggatcacaatttggattacaattcaagatgagatttgggtgaggacacagagccggaccatatcagagagaaagctattactgaagacctttctaactcacttctgtaaagatcaattcaataaaagcagcaaacacacatactttgctttccttgtgattaatgccttgacttttttgtggaaagtaacaccccaagaaagccagctactcatgttggcaataaaggtaaaagtatctatggaataaggaccatttttaggacaatactttccctactacttagttctagtcccttttttgtagaattctgaggactttctacatacacaatcatgtcatcagcaaataaagattattgtacttgttctttgccaacccatatgtcttgccttactgccctggtt

SEQ ID NO: 122844 - DNA, 390 bp, Homo sapiens
atactgtgggacaaggttgtttgtcctgttcgaagagaaagatataggttctaaatgcgaactgtgacaggatacagagcctgtgcgtgggaatcagatctgtggcaggattggggagacagctgctgaagttcagagagaggctgggcaagcctccagtgatatgaagaggaaaaggtcttttcaatatttggccacatcttgatggtgaccctccagatcagaaacacattgcctcatggatcaggaaaacatgccagggcatttttttagagataaaacatgagagctttcagcacagtgtggacttatacatgtagatgtttatgtccctgtgcacatagggctcactgtgcttgcagtgggtgaaatgggaaatatttcaatgga

SEQ ID NO: 122845 - DNA, 150 bp, Homo sapiens
tgctgggattacaggcatgagccaccgcgcccagcccctttcatgtcttttcagccacaatattagatccattaatctgttttaaggacacaccgattttcctacatatatgccaactttcatggctctttccttaccacatggaaaact

SEQ ID NO: 122846 - DNA, 338 bp, Homo sapiens
cagaacacatttcctatacttaaaatctgtgagcaactttctttttgaccttttgtaatctacttcatctcttgaaatctgttttgtttaaattttaaagacaggatctctctctatcaccagggatggagtgcagtggcaccatcatagttcgttacagcctccgtctcctgggctgaagcgatcctctcgccttggcttcccaaagtggtgggattacaggcatgagccactgcacctggccagaagtctgttttttttttttttaaacatataaaataagggatgatattacttttctaaataacacatgggtcaatgaagaaatctcaaaagaa

SEQ ID NO: 122847 - DNA, 235 bp, Homo sapiens
cccacagagatgagaggcaagaagacccagggagaaggccactgagatgaggggagagggctacagagatgaagagaaatgaagagaagagagacagccgtcaagactgtccagagaagtgggctgaggcccacaaaccccacaaggacaaggacaggaaaagcccagggataagaaagaaaggcccatggagacaagggagcagcctacagagacaagcaaaaggacctcggag

SEQ ID NO: 122848 - DNA, 801 bp, Homo sapiens
ctcctatccgctccgggcgctgccgccggaagggccagcgacggagggtctcagatggcggggcttgaggcccacccgggctctcgggtcggcgagtcccgttggggagcccttgtgcctgctaggatatttagcagatgccaggcggccagaaacgtcctcacttttctccctcggccctctggggaaccgccgtgagcgtttcccacggacacaaacttaacaggcccagaacgtccagggaggacgcgttgtgagcctcaaagagcccacttacgtgaccgacagcaccaggccgacgggcactcgctgaactgctggcccggagcagcacagctcttaagtgggcagtggcatcttttatacaaataaaggaaggtggccccacgtccctaaaacaacagcttgctgaagagagatcgcaaagcatcccccactccagctcgggtctgactccaaagcccttctgctttagaaagtgtgactatttctgctgtagaaaaccggtatctaggccaggcgcggtggctcacgcctgtaatcccagcacttgggaggccgagatctattgaaaacagctgggcaccgtggctcacacctggaatcccagctgaggcaggaggctcccttgagcccaggagttgaaggttgcagtaagctatgattgtgtcactgcactccagcctgggaaacagtgcaagaccttgcatattagaaaaaagtttctgggaagtataccaaaagtcttaactaagatttgctaaatgaatattaattaaataacctaacggcaagtacatg

SEQ ID NO: 122849 - DNA, 903 bp, Homo sapiens
gtccataatgtgtgcccaaatagaatatggccagtgtccttacaagaagaaatttggacacagagggaagaccccatgaagatacagggagaagatgggcatttgcaagccaaggagagaggccacagaaggaaacaaccctgccaacaccttgatcttggacttccagcctccagacctatgagaaaatgaatctctgttgcttaagccacccacgttatggcagtcctgggacactaatatactaagtctccccttgccaccaatgacagatgataccacccagctttgttcaccctattccttctgccaggtatgcccttctgtcctatctctatctggtgaaatccccctcatcgctcaaagactagccaagatgccacctcttcctggaagacctccttactgccttccctctttagaagctcttccccagtcccaggttcccaaagcaaatgtaggcctctgtgagatcctgcaagactgagagcccttacgggtgtgcactgggtcaaactcattgttgcatccctgtgctcagcacaaggctggataatcaatgtctgtgattgattcatgaaggaatggagggttagagcaacacctctcaaactttgatgggcctggggatcttgttagaatgcagatgccagttcagcaggcctgagattctgcctctccccctagctccaaggtcacgctgatgtaggtagtccccagaccacactttgagcagcaaagggttcacacactcaggacattccacactgggacacagtagtcatacgattagttcacatgtctggttccccacactgcctggaacagggccctgcacacacccagtgccagctgagttgattacagcaaggggcagttgtccacctgatttgtcttcagctg

SEQ ID NO: 122850 - DNA, 101 bp, Homo sapiens
cagagtcatctccccgctctcttctccctgtttactagacccagccattgcagcgttcttatagctttctgaaggcaccaagttctttgctgtccctgctt

SEQ ID NO: 122851 - DNA, 637 bp, Homo sapiens
ccgcccatatactactgatggtacacttcacagagtgctgattggtccattttacagagtgctgattggtccattttacagagtgctgattggtgcatttacaatcttttagctagacacagagcactgaatggtgcgttttacagagtgctgtttggtgcatttacaatcctttagctagacacagagcgctgattggtgtgtttttacagagtggtgattggtgcatttacagttctttagctagacagaaaagttctccaagtccccacttgacccaggaagtccagctggcttcacctatcaatatatcttctataaagacattaaaatcatagtatatgttagctgacagtctacaaatacagagttttatttcaaatattattgtttataaagtatatttttcctaaaatgcattaagcttcttctggattatttcattcacaaattaggaaagcaaaagcaaaatcaaaatcaaaagatgtcataatgttttagaatacagaatataaacacatatttctaccacgtcatcatgataaaattgaaatactaagtataccacacaaatttattatacaatgatattttgtattctattccacaataatattttgaactgcataggtgggag

SEQ ID NO: 122852 - DNA, 302 bp, Homo sapiens
tggggccgatggcgcttgggagtcttacatgccaaggaagttcacctacccttcctgccttcccggctctggaagagtcaaagcggtcccctgaagcaatcctggcatggtcagttccgctgggggagaaagtgtcttcccgggacgtttctgggagaacctgtcctccttagttcccctttctctgcccatgtcccttccttatctcacccagggaggttctgcctctccctgccttgcagaggtctctgcaggtggctgccgctcctctgcagatgtgcatcccctagaaaggcgactgt

SEQ ID NO: 122853 - DNA, 762 bp, Homo sapiens
tgctttattacaacttagaaggtaattgatgacttggctctgtggtatgctcaaagtgctggactgagctagttcaagaatgtcattagcagtgaatgggaaatatgtgtctacttttcttcagtagctaaacagaagtaattatatatttacattctacctatttcatagggatgttgttagaattactgtgattagatttttttttttaatttccaaatgtatttaagcttctttacagataggtgccatatcaaagcaaggtgttaatgtcatttttctcaatttgtgtttttgtcactagaaatatatatatattgctttttctcttttcctggtatatttttctgataaatgttttgaaatttgttatcttaagtttttcatagctggaatgctagaaaagcatttatgtcctatttttagtgcaagtgatgagtctggctgggtgggtaagttaatggcaaggtaattgaactgtgctgagtgctcgccgatgtatccttctggcctctccattttcagggtagagttactgtttacagtgacatgtttcacagtctgtgtgaccagccagtgtgaatcagttcgtctattgcctggctttcttgagctcaatttttgtctcatttcccctttccattttatatatcacatttcaagatggatgatctacttgtctaaccactccagggaagattggtgccatctaataaagtcaaaatgaggtcctgcatgttacctggcataaattagagaatt

SEQ ID NO: 122854 - DNA, 721 bp, Homo sapiens
gtgagttattttatgattacaaatccttattttttatgttattttattactatttattaacttatttatcttatttattagccttcaatcgttactttttgagtcttttttaaaatcttaaggtcatagaagtgtcctctgtattactttttaaaaactgtactgttttatgttacacattggcttctatatgaaataatttttgtgtatgttgtgaggttggatgttaatattcatttttatctgtaccgatgtatgaaagacagcacaatttattgaaaatgaatcttttcctcattgtactgaagcactatttttttcacaaatcagctaaatatattgtgtggttctctttacgagctctctattctgtttcattgaaatatctatacttgcaccttttccataatgtcataattaatatacatttataaaaactttatatctaatagtgtaagtcttcacattatattttttcttcaaagttatctatacactgcatttttatttgcattttatagtcagtttttcagttgccaccaaatataatgcagacaaattatgctattactaatcacagtattgtgattttcagtgtattacaaatatagatttatttacaatactgaatctttcttctaataccaggaatgacataggaacacagtacacctttatttctgttgaatatctttaatttctctcagtaaaatttcacaat

SEQ ID NO: 122855 - DNA, 415 bp, Homo sapiens
aaattttgttagtgatggtgtcttgctatgttgcgactttggaatgcagtggctatgcacaggtgtgattgtggctcactgaagccccaaactcctgggctcaattgatcctcccacttcagccttccgagtagctggtcctacagttgtattccactatacccagttagttttttattttttgtagagacaggatctccctatgttgcccaagctggtcttgaactcttgctctcaagtgaccctgccaccttggcctcccaaagtgttgggattacaggcgtgagccactgcacctggcctgtaccaattatattttgaagtgatttgttaatgccgtcttgagagcagggatcgtatctcctagattgctttctgatacatgataggtgcacagtatgtatttgtgggtagt

SEQ ID NO: 122856 - DNA, 277 bp, Homo sapiens
agtaaggaaaccagatgagtgtgatggtggtgaatctgggaagagagaagaacatgctttaagtgaggagtgatggtctctgttatatgctgctgtgaagtaaagtcaggccagagaatcgatctctggctttgacagtatgaaggtcattaatgaccttaatctggagagttggggaggcagaaccctcattgtatggggaagtgatagcctgagctgaagaagtggagagggcaagtatggacagctttttaaagggtttcactttgaaagggga

SEQ ID NO: 122857 - DNA, 375 bp, Homo sapiens
attaataataataaagattgagaggaaaacgtcacattttctgaatggttaattattatattagtgatagcagcctgagtcttaaaaattctcccttaaggacaagcatgtggctcacacttataatcctaacactttaggaggtcaaggcaggagaatcacttggctcagaagttctgagaccagcctaggcaacatagggaaacactgtctctacaaaaaaatttagctgggcatggtggcattctgtggtcacagctacttgggaggcttaggtgggaggattgcttgggccaggaggtcgaggctgcagtgacagcctaggtgacagcaaccctggtgtcacctggtgaaaaaaaggtgaccctgtctcaa

SEQ ID NO: 122858 - DNA, 352 bp, Homo sapiens
acgagggctttcgcctgttttgtttggtatctgagggctcgccaccctcccctgggtctctagtgctgagctgagcactggaaatcgagtcccaccatcagatggagctggctgacttcaaccagtttccagcaggaaattaagaaacatcttcaagcttgtcatcccagcactttgggaggccgaggcgggcggatcatgaggtcaagagatggagaccatcctggccaacatggtaaaaccctgtctctacaaaaatacaaaaattagccaggagtggtggcgcacgcctgtagtcccagctacttgggaggctgaggcaggagaatcgcttggacctgggaagtggagg

SEQ ID NO: 122859 - DNA, 482 bp, Homo sapiens
aaatgctgaccagtcctggttaactgtttgctgccccagggtacaaagtttctctaaagttaaagctgacccataccccggattgataaagggtgagatagataagaaactctactttagggatttgagaatcactggataagaggagattctaggacagagatgattctggtttgattaattgagaataatggaaatttctgactcctaaactgatacattcagatccactgaatagatcagttttaacctataagtaaagaaatgcccctgcctgtttatatcatggcagactcccagagacgggtcaacatcttaatatttgtcttttccaagtactgaacaatgccacaaatttcacttctaaagtataattccccattcttactgctttgattcatagtaaatgaaaattgtcctaaaggtaccagtattttactgctgaatatgactaagcttgtcagatcattatgtgagaaatg

SEQ ID NO: 122860 - DNA, 473 bp, Homo sapiens
cgagtcctgttaatgtgtaatgcatgcccagtgtgtacaagcgttgcttttatgctaaaaactgaaccgtccccggattgttcagggttgaaatagcctttgagactttagggatttgagaatcactggataagaggagattctaggacagagatgattctggtttgattaattgagaataatggaaatttctgactcctaaactgatacattcagatccactgaatagatcagttttaacctataagtaaagaaatgcccctgcctgtttatatcatggcagactcccagagacgggtcaacatcttaatatttgtcttttccaagtactgaacaatgccacaaatttcacttctaaagtataattccccattcttactgctttgattcatagtaaatgaaaattgtcctaaaggtaccagtattttactgctgaatatgactaagcttgtcagatcattatgtgagaaatg

SEQ ID NO: 122861 - DNA, 347 bp, Homo sapiens
gaacctctatttctaccacccacatttaatctgcctatttctgtgctgtacagacacaaaactgttctgtacatacccttttttatttggctacttccactcaacattgtttatgagatccatctgggttgctgcattagcagtagttaattcttttctatcactgtacgatatttctattgacagaacatacagcaatttattttttctttctattgttgacggacattgagttatttccaattcaggctattgcaaaaatcacagctatgaacacggacttgtcttctgcacttgctttctggtgcatgtctgcatgcatttttggcaggcgtgcaatgtccagg

SEQ ID NO: 122862 - DNA, 407 bp, Homo sapiens
aatcactgttcttatggttccaggagcttctatttcttgagatagacacgttagacccttagcgagcactagctatgaaacagggccacagccctggagagaagtaacaggaagcaagccatgccttggagcctggatccaggacttggatctcactggcagatcctggctggtctctgcgtgtgagagcagacaccagatgccagggtcaggacagcatcattctctccaagctaagatctgagatggttttctgtgtgtgtgtggatgggtgtgtatagtatgtgtgtagtctgtgtgtatatgtgtgtgtgcatgtgtgtgtatggtgtgtgcgtgtgcgcatgtgtctgcatgtgtatgaggtgcatgcgtgtgtggtgtgtgtggtgtgcgtgggggtgtgt

SEQ ID NO: 122863 - DNA, 318 bp, Homo sapiens
aaatttggaattatataggaagtgctttccttaacttatagtaaaatagaccaacaagttggctaatagagaagccactaattttacaaagaaagttacccaaaacactgtgttctaagttaccaatatatttctcttgagttcctgtaaatctttgattcatcccttcatttaaaaatatttgtctcccaaagtgctgggattacaggtgtgagccaccgcgcccggccccttaaacactatcttaaaaattacatatatatatcaaaaatacagagtgcaaaaatggaagatgcctttttgtctgctcccaaaaag

SEQ ID NO: 122864 - DNA, 208 bp, Homo sapiens
gttgtagcagcaaaatgaaatcaaattcagaatacatctggagataagcaatagaacttactaatgtattgatatatggagtatgaggaaagagaagaatcgagatttacatctagacttttaacctgaagaaccggatggatggtgattctattttctgaatggaaagggttatggtggaaaagactagatttggtggatggaaatg

SEQ ID NO: 122865 - DNA, 610 bp, Homo sapiens
aatcagaataatgcattttatttaaaggaagtagaaaataagtaggagcataatatttattgagcatctactatatgccaaacacagtgtttagcaccatttatgtattaaatcatttaattttcataaaatgtctaagatgtgttatccatctcattacacatgaggaacctgaggtgtgaaagttatgacttccctaagctcacacaactagtaaggtaaaataggtaagaccatattaggaggattcttctaaactgggtttaggcaaactttttttgtaaaggaccagataggagagccatttggctttgtaggtcgtagggtctttgtcacaactgctaaactccatgtttgtagtatataaatgaaagaagtggttgtattccaatgaaactttatttacaaaaacaggtggcaggccagatttagctcagagggtcgtagtttgccaacccctattctaatctcttcttccctttgcccaaatcaaatctgtttccttagtgatatttataaaagaaatttagaattcttttctaaaaatgtgctacttttttttcctttttacatactaaatgtaggaaaattagaaactgtacatacacaa

SEQ ID NO: 122866 - DNA, 616 bp, Homo sapiens
accatcacatttgccaaattccatgggttacatggggcctaataaatgttgaagagattatatacattgtgaatattaggaggcaggaatcactgggtgtcaacttggaagttgggtaccacagtctgacctctggtccccaatgatttatgtccttcccaatgcaaaatactcttacctcctttcaaatcctccagaagtttcaccttaatatagcatcagctcaaagcccagtatcttatcatctaaatcaggtcaggtgcaagtgtgaatgagggctccttgggatgagttccttaggtacagcaactcaagtagtttctcttaagacctgtgaactgtagttatttgctccccatatgtgtaacataccgtagcacagcagatataggataattgctagataccgtcctcttcaaaaagtagggaagtggaagacatacaggagactggcaattctgaaattcagtcagacagaggttggcaactctgattagtattcaaggcttcagaataattcttagttcttggctatgttctctgggctcttagttctaccttacgagttatactttttcttttttttaagagacagctgttcaccatatttcccagg

SEQ ID NO: 122867 - DNA, 452 bp, Homo sapiens
ttgtgcattgtattcattgtgttgtgaaacatttcaaacatacacaaaagtagaaagaaatatattatgaacccctatgttcccttgacccaggttcaacaactatctacgttttgcaaatttaagtggatttctaactctactcaacccttcccatgccggggaaggaggaagagatagaccatctgtttattaattaatcctaaagtttctagaaaacttgcacttctaattctgttttatgaaacctcctgccttctgggctgatgatgggcaggcccaggctgcagggcccagggggctctcggcaggagaggctgctaaccgagaggaggaagccggaagccctggagctcaaccattcattcccacagcagaattctctgctggggaggcgctccgccattcctcagtctgggctggaactgaggctttcaagggctaaaggtacc

SEQ ID NO: 122868 - DNA, 391 bp, Homo sapiens
agttggtttcaggttgtaattagcagatctccggaaccatactgccttaaccaacccaattttcctgctgtcctgctattaccctagggttactggaatcgtgttttgaggtgctgcctcagattgtgcagtgcagtgaggtggagattttaaaatgttcatcctattcattctgtcatctgacgtctaggcaggctatagacttcaacatccctgcagccaacccccctccaactgacaccgccccaaacataagtaccagttcaacacagtcctcagtctcacccaggactttctgtgttttgttgcttagattttattgcttatattgttgttttttctttctttctttttctcttctataattttccagagttgatttgggaaccag

SEQ ID NO: 122869 - DNA, 568 bp, Homo sapiens
gcgaagagttggtgatagaacagaaatgtctggaaagactggatggcagagagaactccagatagctgtggtggccaggagtgatcctcatggctgacctgcaacccaacctgccccaggaagcctgttgtgaccctccagaccctaccccacactgctgggacagaccaggggtcagccaaggggctccagacctctgaccccatcaaggccctccccagggcttccaggggatggggtccagccaaggccttgtcgacagcccagtgccccacacaacagcccagccacctgcccctgcagtgagttacaggaagcccactgctccctggatcacacccgtcctgagcagaaggggagacagaggcctactgggagtgcaggacttcagcccaggcctccaactgctgggcaactgggccccactcccccaccactcaggaaatggctggttctatagagatcccgtcactgaacgcactgcacctgacagtagagcttttcaaacactattgtgtcagatctgaaggtctacgcatgctcggaccacaggcaacaaccgtctgct

SEQ ID NO: 122870 - DNA, 399 bp, Homo sapiens
cttacaggaagtggctctgttaagccacaggaaggggcagtgtgaagccacaggaaggcacagtgtgaagtcacatgaaaggggctgtgtgaagtcacaggaagggaagtggaaagtcacatgaaggggctatgtgaagtcacagggaagggcagtgtggagccacaggcagtgtgaggccacaggaaggagctgtgtgaagtcacaggaagggaagtggaaagtcacatgaaggggatatgtgaagtcacagggaagggcagtgtggagccacaggcagtgtgaggccacaggaaggagctgtgtgaagtcacaggaagggaagtggaaagtcacatgaaggggctatgtgaagtcacagggaagggcagtgtggagccacaggcagtgtgaggccac

SEQ ID NO: 122871 - DNA, 345 bp, Homo sapiens
atagttccctggcgctgggtgtgaactgacacagtgatgatgttaaagacagtggaatcacccaggtgcagtggctcacgcctgcaatcccacaactttgggaggttgaggccagaggattacttgagtccaggagtttgagaccagcctgggctacatagactttttctctacaaaaaaaataaataaaattaactgggcttggtggcatgtgcctgtagtcagttacttgggaggctgaagtgggagaagaggattgttgagctcaggaggtcaatcaaggctgtagtaagccgagattgtgctactgcactccagcctaggcaacagggtgagaccatgtct

SEQ ID NO: 122872 - DNA, 357 bp, Homo sapiens
tcacttccaggctcccagtgcaagcctcagctcttcttgctttcttggaaatctctgctgtagcagccacttctattccggcgacactcagatctacttttcctgctgaaatctttctccccaggatgggaggtgggaggctgcatctttacctacatagtgcatgattaactcccgttcaacatgccaaacctggtgcccaggagaaagctctatacttgcctatgtcccaggctgcagtcaaagactccccacctttccttatagccccttgttggctttttcctttactattttattaaatccatcatttctactcccaatgctgctaagagcttcatattctcatttgccacc

SEQ ID NO: 122873 - DNA, 409 bp, Homo sapiens
cctcagggcagaattaattgctttcttacctgtctgaagtttggcactgtttccatctaatagctcaatgcctgtctgtctccctgttctttcacttgttcacccaacatgcattgtagtgccagcatacagttagtgacccccaaagacctcaagggtctccaggaggtctgacaggaccctttgcctgtgtcagtctttgttaaatgtggggatttggaattgagccatttcagggtcaagtctggagttaggggagctaaagggggttgattctgtgcgtaccccttgtcccaatcagcccctgagtcccaggtggtttctaaccttctcttgttttggctgatgggagctggggcagtgggagggtctggctgcccatctgcctgagcttcccagtgtctaggat

SEQ ID NO: 122874 - DNA, 203 bp, Homo sapiens
catttaggcatcaggtaaggaaaggatgtatttccagggggagggagtggagggtaaaggacaggagtgtcaccgagccctgaaatcatgcctgtcactttctggtgactttgccaacaagcaaggtgatccctgattgctcaaacttaacttcttcaattttgtgccatggtgattagcatggggtgcactagaatccagga

SEQ ID NO: 122875 - DNA, 248 bp, Homo sapiens
ccctttccaatggcacaaggaggaaccaggtgctcgcctctcccatgtgtcgggaacaggctcggcacaggtgtgctaacttgaattaccaatcaacatgagtcaccaggggacttgggccctcagtggcttccgtgtggccaggctacgcatgcccagtcagcatttgcccagtcggatttgcacaggcagggccatcacaccccatcagccaggacctcacaaccggatgccagaggccagctcag

SEQ ID NO: 122876 - DNA, 2104 bp, Homo sapiens
tttgtattttttgctaataaaatcaagtatcaaattacttttggtgagggatgggcaactgtattgtactgctgataatttgcagtcaggaaaaattttgttttccttctcataacaacactgttaagccatgattcagtttactttcacatttttcttgagccaagcatagaatgctattaaattaaattttattggttttaaattataattttagcctgtttcaatctttgtgaaagctaattctatcactcaacataattaagttattctcctcttgggctcgtgccacccaaaatgatgagctagctttcgacaactgagtcttggtaatttacaaaactgttcagaaagacgaaccaaaatttgaatggcttgctgtgttctgtataaatttataatcgaaagtctgatcatggctacaggtttttttttttttaacttgttctgtttttcaacaaacaatatacttatttgcaattaaatgaaaataaagcattgaattctgaagttttagagaatgaccttagagatttttagtggttgtcagccttagcctcctattaaaatcatctgggaactattaaaagcatttaatgttgtgaccctacctagacctattaaattccattctctggggtgaagccaggccatcagttattttaaaagttctccaagtgcttctaatgtgcagcacaggttgggagaatctgatctagcttagcacttaaaggttatagtgctaccactacataacacttctatattgagtttactgtagtatattaatggagctatcttaagtggaaaatgtctgatcaatcattaaatagcaatctaagtgaaatctataactaaaatttctatctggaaagacaaaaagaaaaaccaacttctctttgagggtatgctatacccagagacttggctagtgctaaggagggcatggtagacttcccgaggtcacacaaagaacaagcagctcatgcttggttctacccaatagtctgagtcccctcagtcactctgttttagcctctaaaccactaggacgtgatttgagaaatttcatgaagcctcaaggtgttctttcaggttatttgtacaatggggaagaaaatatctatagttcaacctctttcccatactcatgacagatcacctggcctgtgcttcagtattttacagattgttcatctgtggctgaaaagctcttatcaaaatgctcttacttttattgagctgataaagttgccatcctaacttctatccattggttctggctctgcctcctggaggaacacagactatgttgattgtcttttccctgtgttagcaatgcagatggattgtaattttcctaaatctgctcttcaagaaaagatttcaagttttgaaaaccatatcatcatcctgtcctcggtgacacctgtttctctcctttgtcaacatcacctttcacaatgtgtcacctggatagcagatcgaacaacctggctataatagtggttctgatagcctcctttgatctcgtcattgtattctagaaatgaagcccaagattttatgtatttttaccgcggtcataccacgttgatttaaaagatcaatgattttcaagccaggctggacattaaaatcacttgggagagctttgaaaaaatatagcgatatcctgttttacccttgatcaattaaatcagaatctctggggataaggcccaggtacagtgatttttaaaagtacttcaatgaccctaatatgcatctaagtgagttctatccttaaatgtggtttctctcaatttgtaggtaaatacaatattttgttgttgtttgaatgtaaatatcaggcttttgatctgttctagtttaattttctgataatagtagtcccagaattttcaaatgcaattctttaagattgcaatgaagttagaactcttacgttactgtttatgtccacaaaatgtttagaaaagtttgaaaaggattttgaaaaagattaacagtgttaatatttcttatattgttgggtttatgcataatataatttggttaatatgtatcataaataaaagtattttaagatcaaaatgtgaac

SEQ ID NO: 122877 - DNA, 380 bp, Homo sapiens
cactcacggaagcatggttaacgtccctaaaacccgccggactttctgtaagaagtgtggcaagcaccaaccccataaagtgacacagtacaagaagggcaaggattctctgtacgcccagggaaagcggcgttatgacaggaagcagagtggctatggtgggcaaactaagccgattttccggaaaaaggctaaaactacaaagaagattgtgctaaggcttgagtgcgttgagcccaactgcagatctaagagaatgctggctattaaaagatgcaagcattttgaactgggaggagataagaagagaaagggccaagtgatccagttctaagtgtcatcttttattatgaagacaataaaatcttgagtttatgttc

SEQ ID NO: 122878 - DNA, 558 bp, Homo sapiens
cactcacggaagcatggttaacgtccctaaaacccgccggactttctgtaagaagtgtggcaagcaccaaccccataaagtgacacagtacaagaagggcaaggattctctgtacgcccagggaaagcggcgttatgacaggaagcagagtggctatggtgggcaaactaagccgattttccggaaaaaggctaaaactacaaagaagattgtgctaaggcttgagtgcgttgagcccaactgcagatctaagagaatgctggctattaaaagatgcaagcattttgaactgggaggagataagaagagaaagggccaagtgatccagttctaagtgtcatcttttattatgaagacaataaaatcttgagtttatgttcaaaaaaaaaaaaaaaaaaaaaaaaaaaaaaaaaaaaaaaaaaaaaaaaaaaaaaaaacaaaaaaaaaaaaagggggggggcgcgcgcgccaaaagactccccccggggggggcccacatgccgccgcgcccaccgttttgttgacaacaggggggcccactagggggggcgtattacg

SEQ ID NO: 122879 - DNA, 367 bp, Homo sapiens
cagtggcaccatcatgctctcaaatgcctgggctcaaataatcctcccacctcagcctcctgagcagctgggaccacaaatgggcaccaccacgcccagtttatttttttattatttgtagagatgaggtcttgccatgttgcccaggctggtctcaaactcctgggctcaaaggatcctcctgcctcagcctcccaaagtgctgggattacaggtgcaagccatagcacccggcctcatgatttggattttattctgaaatatgctaccatatttatgactttgttttgtccctttgagaaaatgatatagtgtaattggaaacttaaaacaattgttttcacaaaaataccaagaatgcaggtta

SEQ ID NO: 122880 - DNA, 452 bp, Homo sapiens
ggattgcacttcctttcagatcatgttccccacccccagccccacgggcgatgatgcagcagctgctgtgtcacgacatttttcacggatggacacagaccctggaggaatgcgaccaggctgagcctcactggctgcccagaggagcaagtaacctgttgcggcccctctgtcctctcaggactactgtctctttcatagtcagcaaggggctgggggcctaggggtccacccctctggcagctgggaaatgccagcccagttccctggggaaagcactgaccacacagctgggcccccatgggacatcttagctcctgtccctcctgatctaagtgtgggcaggcacagcttttcatttatatcccaggcgccgagtactcatgggcatccagagcagtagggcaagactggtgagctgagtagattggacaaaaacatcatccagatct

SEQ ID NO: 122881 - DNA, 686 bp, Homo sapiens
atttggggagcccagacttgccaatgggtaagtgagtctagtcaagatgtaggatttcagaaaactcactcagaagagcaggatgaagataaaggaggcatcattcagcagcaataaccaactcatttccttctctagaaagcaatgaaacaagaatctggtcatgggattttaccagtgcaaaggattaatccacccaattgatggccaagaaaccaaccagtgagagcaggaagcaagaacacctcgagacaggaggcatggctgggaggcctcaggaaacgtataatcatggcagaaggcaaaggggaagctgtatcttgtaataagttaaatatttgctgaaggaagagagctgtaatagaaaatggaagtgccagtggtgagactttatttttttttctgaggaatggttgaaatacatgaagatacatagagaagaaaacaattcttaataagtgctaagtgtcatcaaatactatgtttaaatgaactcctactgaagagagattagatttttttcatctattttgttaagaaaacaattgaagatcaacaagtagaagtaaggagtagactcttcagatacatggatttctaatagtagagttgctccagctggactcactcaaataaaatgagttccaaattcccagggatgtgcaaacattgaataaacaatgaac

SEQ ID NO: 122882 - DNA, 285 bp, Homo sapiens
ttccccatttcacctgcttcccatttccctgcctcccacccccacttcctgttagggggtttgcttcccaaacttgagagccccatcaacacacagctccctggagaggcttcattctcagggtgctgccagccatcacccttcttagagtcataggagacatgtgaagagctcttagaccttctcactaaatgaacttcctcataactgaattcctttctccaatcagttgaggacaattgagtgcacaatgcctcctagagctatcattgtgtctttccaact

SEQ ID NO: 122883 - DNA, 342 bp, Homo sapiens
tacaaacaatagtggggcacagagctacttagcatgtgctgtttatttcgaggtcaccagaggaagctattgtataccatgagcaccatggtatccaagggcaatggttgtgggctgaggtagctgtggagcctggtgaaaatctgagtagtccagagctatgattaccaatgcctgccccattaaaaaatgaagcataaccaggtgacatgtggatctgtatttcacatctaaatatagcaatcagaaaatcattttacatatcataacacaacttcttaaccttcaaaagaaaaagcaatctcatttggttgtgctgaaaatcataattccgtggaaata

SEQ ID NO: 122884 - DNA, 496 bp, Homo sapiens
tattgggttccctgattaaacctccgactgttttgctttttcatctattttctgtctctctgcctttttgtttcactatctgacctacttcattttctagcctgcttactgaaacaaacaaaaaaattattatacttaatcttatggagtcaccattgtatatgtggtccatataccaaagcatcattatatagtatgtaactgtattattctggatctaaatctctaatcagatttatgacttggcaagtagtattttctaccacgtgagctgtcttttcactttcttgatggtgtcccatgaagcacatgtttttaattttgataaagtccagattatctattttttcttttgttgcttttgttcatagtgtcataccttaagaatcctttgccaaacctaaggtcataacgatttactcttatgttttcttctcagagttttatacttttagcttttatatttaggactttgattcatttttttaagtttgtg

SEQ ID NO: 122885 - DNA, 368 bp, Homo sapiens
tattgggttccctgattaaacctccgactgttttgctttttcatctattttctgtctctctgcctttttgtttcactatctgacctacttcattttctagcctgcttactgaaacaaacaaaaaaattattatactttaaattgcaagagttctttcttgttctcttcctattcatttttactgcactctgttctcccctgctttaatggatacaaaatcttctctgagaatgttagttacagttgggttttttggttgttttcttcagcaacctatattctttctgtttcttctgatttctgtcatttgcttgattgttttgggctctgtactttatgtgagaactttttctcaaaagtgcaattat

SEQ ID NO: 122886 - DNA, 451 bp, Homo sapiens
  misc_feature (26)..(26): n is a, c, g, or t
  misc_feature (54)..(54): n is a, c, g, or t
ctctaagctttagtccctgcctgaanaaggtgctggggaagagcccaccaaacnggtggataactcacccagtcttgcacttttattcaaggcagggactaaagcttagaggagtaaagggacagggacttgctcaaggtcacatagcttggaacagcagaatccagagaaggactggggcttgctggccctcatccatgggactgtccagccactgtgttactgaaaacgtccccataatggtttcaataaagtcctaaccaggaacttggcacagggcaaattctagcctgctgccaatcagcaggaaaacagctcttatgccagtgggcaggaagctgccaaggtgtcacttctgctcagagaaagtggtttgtgtatttgctgaactaatatgttcaccctgaaggtacagagatcaactctatctctttctggagggtccctccag

SEQ ID NO: 122887 - DNA, 224 bp, Homo sapiens
cttcccttgggaggcctgtcaggttggcaaatcacacacgcacagagctaaggtggaagttgttctctgtgagtgtgtcagaggagaggaaacctggagggaagtgtgctcggttttttgggaaccgtcaccctggggtaacatggttagaaaacacctgactgagcaggtggagatcccaagcctgagtgagatccagggtgccccacgtaagagagagatgc

SEQ ID NO: 122888 - DNA, 313 bp, Homo sapiens
ttgcagacacccttctttcccgtcagggagtagtagataaatgttatgtctctcgtttaaccctatgtcttctgccaaaagcataaggaccatctgctcaggaaaaatctctagcaggaatgattctgtttcaaagtattcttaaaaaagcttttacgactgggcatggtggctcacacctgtaatcccagcactttgggaggccgaggcaggcggatcatgaggtcaggagatagagaccatcttggctaacatggtgaaaccgtgtctctactaaaaatacaaaaaattagccgggcgtggtcgtgggcac

SEQ ID NO: 122889 - DNA, 164 bp, Homo sapiens
tggaagcaaggaatggctggagctgaagtcagtgagacacagccagctttgaaagctagattaaggatcacagggttaaggcccagatggggcctcatctggaaggtaggggattccctgaagggtttttactggttgtgttggggtgtttgctccagcatgta

SEQ ID NO: 122890 - DNA, 900 bp, Homo sapiens
tagaaaacattttaaagtaaacgacaatgaaaatactgcacatcaaagcttataggatgccactaaaacgctactcaaaaggaaatatatagccataatggctcatatttttaaaagcaaatttgaaatttaacgatttaaacagccaatttaggaagttaaaaagaacaacaaaataaactcaaagataattaaagaaaggaaacagtagagacaaaggaagaaattaatgaaacagaagacaaagatttaataatgagaagagcaacaaaaccaaactttagtactttaaagagttctggcaaaacttgttaagataacagaataaaaaacataagtaaagactatgaataataaaggggagatattaatacagatgttgcagagatcaaaaaagataataagaacattatgatcaattttatgcccaaaacaagaaaaaactaaggtgaagtgaataagtaaacagaacttgccaaaactgacttgggaagaaatagaaaacctgaattgccatataaccattaaaaataaataaaatggcaggctcactttggcagctcatacactaaaactggagccatacagaaaagattagcatggctcctgtgcaagtatgacatgcaaattcatgagaattccatattttaaaaataaatacataatatgaataaaacaccaatagtatttggttttgcaaatgagttctaccagacactcaaagaaaagagatcactgtgcagtcctatataaactctctcagaggagagaaaaagagagaaactctcctatttattttatgagagcagattcaaaaataagtatcaaaaaggaaattacaagctaatcagaaacatgaacatacttacaaaaatttcagagcattagaaaacataatca

SEQ ID NO: 122891 - DNA, 206 bp, Homo sapiens
ctgtctatcttctttgctgagatatgttaagggttttggcctgtttttaatcaggttgttttcttactgttgaattttaagagttcattgtggtttttgatttacatttccctaattagtgatgttgaacatattttcatgttttttgacctacagttttgtgtgtgtgtgtgtgtgtttttttttgagacagagtctcactctgt

SEQ ID NO: 122892 - DNA, 439 bp, Homo sapiens
aactgagaaagggtttatttgtttttgtttttcatttgtagtaggaaaggtgctagcaaaaaggtctagccaagaagatggataatcaggctgagccattgtttgacttttgccaagtattgctgtgaaaggacaagaaagtgaagggagcttgagaatgtaaacacacatgttggatgagccatggaatctcagccagttaggagaaaggagcttgaggggttgtggtcctagctgcttgggaggctgaggcgggaggtcgcttgggcccggggggcggaggttgcagggagccaggatcatgccgctgcactccaggcctggctacggatgagagacgtctgtctcaaataaaacaagaaaaaagaaagaaacggtgccgtgttgtgagaggccgagatttattacacaagggtccgccgaggtaagaattttaacc

SEQ ID NO: 122893 - DNA, 172 bp, Homo sapiens
aatgagagagatgggagaagggcgtggacaggcaaacgagggggacgatcagggaatttgtgaatgttgggactgtgagtgtgaatgtgtgtttgtgatcgtatctttgagtacgtgtgtgtatatgaatcagtgtgtgcacatgtgtatctgtgagttgtgggcatgtgta

SEQ ID NO: 122894 - DNA, 790 bp, Homo sapiens
gggggtatgaattgaaataaactgtttattttatgttgtgtattatgctcactacctgggttatagattcatttatacaccaaacctcagcatgatgcaatatatctatgcaacagacctacacatgcacccctaattctaaagtaaaagttgaaaaaagcaaaatatgtatatatatttacaataaaagaaaaatataaatttaaaataaaaataaaactgtaagaatgaaggaatagtaaattattttttactttataaggggaaaggattataggcttattttattattttgagacaaggtcttgctctgtcacccaggctggagtacagtgatgcagtcatgggtcatggcaacctccacctcctggacccaaaccctactccaccccctgagtagctgagactacaggtgcacaccatcacacccagttaatttttgcactttttgtagagagggggtttggccatgttgcccaggctggtcttgaactcctggactcaagcgatctgtctgcctcagcctcccaaactgctgggattacaggcatgagccaccatgcctggcctctagtaatttaaaaaatatttccctttacatacagcttttaagaagcacaatgttattttatttgtatattatatatacactcttcactattcattttaaatacaaagcagatcttgagatatgtagaaacctaagccatctttaaagttgaggatgttcttatttataaaggttttcctttacattctgatttcactatttttgtaattataactaaac

SEQ ID NO: 122895 - DNA, 1548 bp, Homo sapiens
  misc_feature (230)..(230): n is a, c, g, or t
ctgatgcatgacctctttgacagttgcctttgttcatgattcctagtttcctggtttattttattggggtacagggtgaggtctggaagacctggaaaggaaactcacttttttggtttgacagtattaatgcaatcatctagttcataccttgtaagcccacttattatttcctctgcgtgtgttttttctggtttagcggattagctgcactgtctcttcaaaggctntccaatcaaggaggggttattaaaaccagggcgatttatgactgagaattaattagagaagcattttcatgcacaacatccaattttttgattagcaatggagcagggccgcaattaacactcgaggaagcttaaatttccagctttttgattctcaggaaatgagattatcaaaccagggtcagacacttgacagcaaagtgggagtgggggagtgtgaaattatatgtaaaaaaaaaaaaaaaaaaaaaaaattccagagtctagaaattcggtcatttttctctttatgtaatggtaagaattaagaatcctcacatctgcaaccaaaaatacaagcctggtgtgtaacactaaagggtaaaacagggatagatataagctgttatgctattcttcaggcaacactgtggataagtgacattcagatgtttactgtaaagaaaaatttgaatacatttgtattgaagggcttttagaaaagagcattactacacagaactgagagttgaaaatatgaaggtgtggaagattaagagaacgcgtttactttaaaagataatttaaaagttatctttccaggctgacacggtggcccactcctctagtcataacactctgggaggctgtggtgggacgatccctcgagcccaggagttcatagaccagcctgggtaatatagggagaccccatctctatctaaaattttttttaaaagaaaataaatatctttacagttatttttcttagtcctatgttctttattttggtgttttccattggatacctgcatgccaagtgttgtgctacagtattactgaagagtataatggaagtaatgtcctgctgaaaattttctttgagatattaatcattaataatttatatattgctatttaatacttacataggtctttagccttttaaaggatttctgtttgacagcttttataattgaaagttattccattttttttttaattttgcatgcttgaaaaagatgaaaacagtgatttaaattatgaagtatggggccaggtgcagtggctcatgctggtaatcccagcactttgagaggctaaggcaagtgggtcacttgagcccaagagttcaagaccagcctggccaacatggtgtgaaaccccgtctgtactaaaaatacaaaaattagccaggcgtggtggtgcatgcctgtaatcccaggtacttgggaggctgaggcacaggaattgcgtgaacccaggaggcagaggttgcagtgagccaagatcacatcaccgcactgcagcctgggtgacagagtaagactctgtctcc

SEQ ID NO: 122896 - DNA, 216 bp, Homo sapiens
gaagaattactttatttccctgaatactctaacgtgcatttagccagagcagccaagagctgtgttcctggccccaaagcctactgccccgctgcagacacactcccagtgatgcttcagcctaagctgtggagcattctgagaaatcgccccatgaaactcatttttggatctcccatgaggatctgacggcatggctcatctcataaatctcag

SEQ ID NO: 122897 - DNA, 737 bp, Homo sapiens
gtttcagggccagctcaaccacactagaatagaaaaccacgtagacttccaagtttttttattccagtccttagctatcagatggcatctctgggccttggggtaactcactgcagtgaagcaaaggatacaagcctggctaactttgccacctgctgcttttagagcccaagggccttaagaaaacaaaggcagtagctaggcagtggttacagcaggtcttgagcaagacccagtgttgtactggctttaggtctgacccagcactgtcctagtgttggtggccacagggttgtttgtgtccctctatcccaagccccaggtggctcagcacagagagagagactcccattgtttgggagaaagtaagggaagagaaaaagtctctgcctggtaatccagataattcttctgggtcttatccaagaccaccaaggtggtacctctatgggtgtgtaaaaaccacagcattactgggcttgggtgcccccagtgcagagctaatgcaggtggcattagatctagggcttagatcacaacaccgaggccctttcaaatacctggaaagccttcccaagaaggacaagtacaaacaagcccaaactatgaagactgcaataaattctgaactcttcatgcacagacacaagtgaacatcaactagcatcaagatcatccaggaaaatgtgacttcaccaaatgaacgaaataaagcaccagcgactaatcctggagaa

SEQ ID NO: 122898 - DNA, 219 bp, Homo sapiens
caggttgacccccaggcttcaggtgcacactaggcccaaagtgtacacccgtgcccaggtgggcatcaggcccaaggtgtacaccagaccccaagtggacatcaggttccaggttgacaccagtctctaggtagatccttaagtcccaattggtcatcaggcccaaggtggatggataccttgaccccagggggtcaccaggtcccaggcaggcctcag

SEQ ID NO: 122899 - DNA, 601 bp, Homo sapiens
ttttatttactatatagttttgaatattgtttaatttctgatttttcctcatttcttttagttcaaaaagaattgttttaggagatactcatttaaattgaattaaatatgtaaatacatttggacaataaatatttttacatcacgtagttttcttgtacaggaacattatttgagataatcaaaatattaatattcccttatgttttctgttatttgcaaaagttgttaattttgaatgcaactttttcaaatacttcaaaactatagcaaaaaagatatgcagaggtcagtgctgctaagctggtatttgcttctttacatcctcaaagaagtaaataagtaatcccagcactttgggaggccgaggcaggtagatcatctgagctcaggagttcgagaccagcctggccaataaggtgaaaccccatctctactaaaaatacaaaaattagctgggcgtggtggctcacgccagtagtcctggctactcaggtggctgaggcatgacaactgcttgaacctgggaggcagaggttgcaatgagccaaaatcacgccactgcaccccagcctgggcaacagagtgacactcggtctcg

SEQ ID NO: 122900 - DNA, 502 bp, Homo sapiens
gattgcattagtggttttcaaggaacgaatctgtgaagccctgtccagtagcttgtggtaggctgtagagaacattgggtttccctgatgactccagtatacttgggtagttctcagacagtaaatactttgtatagcatgtcgagaccttttggagtgcttatgatagctacaagatggaattcactcctagtcagttcttcattcagatgatgattaacattctcttaagtacaggtgtgaaaacacattgagacaaaaatgtctttaaaaacagcctatttctgtacattaatagaaattctgccccagaagaaagctcttaaataagttcttgctagagaaacagctgagaattgcaaaagaaacaacaacaaaaaactgagtaaccaagataaatttcacaaaaccatgaactttattcataggagatttcctaggaccttgctcttctgtaagcacagttctacccgcctccccattggaaattgaaagcagaaaa

SEQ ID NO: 122901 - DNA, 421 bp, Homo sapiens
tgcattatcacagtaaagaaagacaaggcagaacgtccctattagagaacaaaaatgtctcaatgggttttaaaagtccagctctatttaaaaacaaacaattgaacaagagtataccaagcaaagtcaagtaaaaagaaagcaaagctggcaatagtaaaatcaaaccaagaactcaaggccattaagcattaaactggacagagagggatattacatgtgataaatatgtaatccctgaaaaataaaaaaattacacatattgatgcatcaagcaaaacggcagataaatacactaagcatttctcttggaaatatgaaaagtttaaaaattataaaaggggcccggtgtggtggctcacacctgtaatcccagcactttgggaggccaaggcaggcagatcatttgaggtcaggagtt

SEQ ID NO: 122902 - DNA, 169 bp, Homo sapiens
gcacaccactcccaaaacaaaggcttgagatttcaatcaaacaatgattcaagaaccagagccaaaagaagcatttcacctcctctcctctgaaggttcttgcaccaatccctgtcctctttcacctgctttttcttcatcctacttgaagcagaaggcagactggcag

SEQ ID NO: 122903 - DNA, 803 bp, Homo sapiens
agcggggggccgagcggcgtgcagaggctacaagtgccgtagctggtgattgggggactttctccgggaaccgtgccgggagagcgcgcggtgctggagccgcaccgggtggccgaagcagaagagacatggtctggctatgttgcctaggctgatcatgaactcctgggctcaagctattctccaaacctggcctcccaaagtcctgggattccagcagagaagattcaagaagattccagaagtggtcaagacattgatgttaaacataatgtttcagtgaaggatgtttgattccaagacctctggaaaagattctttatctacagtttctaagatggcagatttgcagaacttaaaagaatactgtaagattgggattgatgccacctgaaagtgaagagccaaactgaaaacgtcataagtgtcttaagaagttcgactttaaactaaattcaaggccatttatggacagaataccatggtgggtggtgtcatcactatatgtgatacagcaagagcttctacaatataattagtgattattgcattcaatttaatcaaagaatagtttaccataacaccaacaggccatcattttatagttatcaggtggaccagagaccagaatctaattgcgcagattctcttaataaaatgttagtctatatgtttgtttattggctggttggtctaaagtggttggtttattcattttagacattctaatttttgactcctcgatgtatatattgtgcattttacgccaatgcactttcaaatgaaactgttgaatttcctct

SEQ ID NO: 122904 - DNA, 326 bp, Homo sapiens
atgaggatgaggatgctggggctgccggccgagctgcaccaaggggaacggggcctcctcagcccccacagggagaacctaaagtggcgggaaacacgaggacacgggcacagccctggtcggccacctgccccactgcacccagctgtcccccggcctggcttcctgggcctctgttctccctccatatagtgctttcccgctgaccctcgcccagcctgataggcagtgccgggaacaccactctctcctgctgcctgacccctgctgtgctgggagcagggattcgggacccggagtccatgtcgagaagtcgcccacacgtg

SEQ ID NO: 122905 - DNA, 309 bp, Homo sapiens
ggggtctcgctatactgcccaggccagtctcgaactcctggcctcaagcagtcttcctgtctcagcctcctgaatagctgggattacatgtgctcatcactgcacaaggctcttcttagccactttgcaatatggagtacattgttgttaactatagttgccttacactactgttgaacagaatttacaccttttacctaactgtatgtttatgccattaaactacctctcttcatcctccaccctttcccccagcctctgttaactatcattctactctttacctttatgagatcaacttttctctgc

SEQ ID NO: 122906 - DNA, 385 bp, Homo sapiens
attacttcgataaaaatggaaatatcaggccaggcacggcggctcacacttgtaatcccagcattttgggaggccaaggtgagcggatcacctgaggtcaggcattcgagaccagcctgaccaacgtggagaaaccctgtctctactaaaaatacaaaattagctgggcatggtggcgcacgcctgtaatcccagctactcgggatgctgaggcaggagaatcacttgaacctgggaggcagaggttgtggtgagctgagattgtgccattgcactccagcctgggcaacaagagggaaactctgtctcaaaaaaaatgtatcaaatataaatctagtcaatgatatgaacaaataattgaaagaagccaaatgaccactaagca

SEQ ID NO: 122907 - DNA, 251 bp, Homo sapiens
gggtggatggataaatggatgattcacctaagcactttaaatgcaatgggcccaaagcaaaattcatcaactttatcctaaagttgatccttcttcagtgctccttatcacaagttaatggattcttcttacccaaagagagccaagctgaaattttcaaagccatcttgaactcctccctcttctatcctgctctgaatattctccaaatcttgtccaaacaggtctagaatgtctctcatctctcttac

SEQ ID NO: 122908 - DNA, 409 bp, Homo sapiens
taagttttgaattcccaaatgcttaattactaatagcctatggttgaatggaagccttattgataacacaatcaatgtgcattttgtatgttatatttttatacactgtattcttacaataaagtaagacagagaaaaaatgttattaagaaaattaaaaaggaaaggaaatatgtttactattcattaagtggaagtggattggccaggcactatggctcacgcctgtaatcccagcactttgggaggctgaggcaggcagatcacaaggttaggagatcgagaccatcctggctaacacagtgaaaccccatctctacaaaaaatacaaaaaattagcaggatgtggtggcatgtgcctgtagtcccagctactcaggaggctgaggcaggagaattgcttgaaccc

SEQ ID NO: 122909 - DNA, 339 bp, Homo sapiens
atccttaataactatttgttgaatgccttgatgataaactctgcagtactttgcaaacaagatgccctgagaagtcagaagaatagatatgtctttataataaagtttaaaagttgcctcattgtaagcaggcttaataacggtaatattaataataacaaaacatttgttcaatcctttgataattttcacacactatgataaatgtactttgtgttcttcatctaatttaacccttacagcaaccctttgtgggcactgctttatttcaattttgtagatggggaaaatgaaccttaggggttactcatgaagtgggtggcaaagccatagttttaa

SEQ ID NO: 122910 - DNA, 1522 bp, Homo sapiens
  misc_feature (435)..(435): n is a, c, g, or t
  misc_feature (472)..(472): n is a, c, g, or t
  misc_feature (958)..(958): n is a, c, g, or t
  misc_feature (1193)..(1193): n is a, c, g, or t
ggaacatagctttacattgtttgactattgcccatcctttgagagtctgctgtagatgtagcagacaagaaattaaagccgccgcgcctggctcttttttattttttttcactttggaaaacagggtcctcattcgtgttcacccaggtgtgggtagttgcaggtgggtgcttgttcttcagacctcaatgtttaaccttccaaccttctcacaggctctcagatgtgtgactctcttcccaacgcttctagggcctactgtgaagttacgctgtgggacccaccgggccagccccattcaacgcagtgccacagcgattaaagctttttgggcaaacttgttgggggataaacacgattgcaagtgtgttgcggcccaattgtttgcggccccagggccggttgggtctcctctcctgtgtaacagctctcaangggccgaaatctccccacggctgtgcactcatcaaangcctgtggcccaaaaatgtgtgcgccggggagcattcttatctacactgtgggtagaaggcgccacctaaatacccccaatgcctgtggtgttgtactaggatatacttcctctgtgggttgaaacaacggaactctatgttggttggctgctcggcgcaccaagttttttttgtagcagataacacatctaaccaaaggttttgggcgggcagtggggactatatataacgctgtaggataagtgggcgacccaatgtgtgtatgttgggcggccctcacctctcctggtggtcacttgtttaaaaaggaggggcgccacccagggatgaggggaatttgttgcacctctcctacacgtgttggcaagtacgaaggtgtcccccccaaagggggatcttcgcccgcctggttggttcctctcagtggggtttctcttaccccccgccgttggtgtgtgggtgtgcccacactctttgccggccancaacccagctcctgttgggtgcgtcatccacctctcgcaaaggggccgcaggtggagggccatactacccaaattattcaactttgtcttgttggggcgaccacagacaacatgctgggggctctgtctggtgggtggggggggtcatcacacacaccaagctttctttgagtagaaaggaagcggacccccaccctgtctgcataggaattgaaaaaaaagaggcgcctagttngtcagagaaaaaaggaagacgcgcttgctatatgaacagaaagaagtatgttcgacagcccttatgtcgtggtggggggtaccaatctctacgcttttcgcttgatagtgggcggcgacccatgataaacacgcgaaggcgggggcgcgctcaacccaactcgtttgatggtctgattgataagacgccccagagtgaagatgagcgcgtcgtgtttgcgtaaacagtccagtaagcgggcgcgggggtagttacacaccaatagtagggggagggtgcttaatatatgttggaccaccccactgttacgacctctccgttggatgcaa

SEQ ID NO: 122911 - DNA, 267 bp, Homo sapiens
ataaaattaaaagctgtagtcagtgctatgaaagaaaacacagagaacactgacagtagacactctgtgtcctggggtttggaggagtcctccttgaggaactggagtttgagccaacatctgaagggtgagcgttaagttaactcagtgaaggagagaggagagaggcagggagcatggcctttgggaactataagaagccagtgtcactgaagacagagtccagggcagagggtcgacgcggccgcgaatttagtagtagtaggc

SEQ ID NO: 122912 - DNA, 634 bp, Homo sapiens
gcaggcctccatattttgggcctttctttgcttccccctgtgatcccaatgaacttgggtaccaagtcttcttgttcccattacccttttcttggaatagattttctcagataatctccatctttctcccaatctcctcttccttcttcctttttcttaaacaggatgagcctgtttactgctgggggcagggtatgtatccccatgagtcaggggcttgattggtaggggaggtgagtgttcatgctgcgtccctagacatcttgaatgtcccccaatttgagcaagtaacacatcacttagttctgcaacagaaccagccacacattggtgtgtgtttggcttgcctctgatttgatgttgctcttttctcacgaggcttggacaaaactcctgctttactcaaatcttgtttgagttaatatctcagcctccaggtgaaatgaggaatgaaatacagattttagtatctaatataaaaccataacttgtttttactctgagctccatcttgggactatattctatccagaggccctgaggaacttctctccctcctttgttttgatttattaaagttcttgaattatatcccatgttattgatctcagcaaatgtgggtttcaaaattgag

SEQ ID NO: 122913 - DNA, 534 bp, Homo sapiens
cctggttaaactctcctaccatgtgaaactgttttccagcacacaaaagaaataggatcaagtttactgatgctttgtcatgtggtatacactcagaatatctgtgttaactagaataagaaattaagacaaaattcagcaaatgtcactttcagcacatgtgagctctcagaataaagctgcagataacacgcagtttagtattaaaaagagctttaagttcatccaactctttattagcatacatgtggttagaaaataaatagcgtgcaaatatctccaacatatataattcaaccaaataaattcaatctgagaaaatacagactcagaattttagaaatcaaagatctcgtacacattaatatgttagattaattttttctcatgtatggaaaacacatacttattccaaatgtaacatagttattcaaaacatttttaagctgcttacttaattataacactggttttgtaattctggagagccattctcccttccctagagaccttcctttgttcctagtgttcagg

SEQ ID NO: 122914 - DNA, 117 bp, Homo sapiens
tgctgggattacgtagccagtgtctttcttaagtgcctgtcaaataatgctcctggtttataagtgcccctggctctaccttctgggtgctcagacaccaacacagagagaacagaa

SEQ ID NO: 122915 - DNA, 466 bp, Homo sapiens
atatcagccctacataatacaaagaaaatgacaggacaaatagcaccagtctcaagagtccggaataatgcagcaatgtcaccgttcctgagtctcagtgtagagaggcagtctccgagctgcagaagacctggccagccgagggccgcacatcaccttctggtgaccctgaccttcagcgggactgaggactgctctgcattgcctcataatggccaccggccccggcatgagagggcaggagacgaactgcaaattagcgatctggcaattatcagtggtgtggacctgctgaaacttcactagatggatcgtcacacaaatggaagcactggaaagcacgaggccgtaccagagcatcaattaatcatcaacttagtacttcctgtcatctgggcacatgtttattttacgcaatcccattttaaaatagcaaccctgctgctgtcgtacacaataccacggc

SEQ ID NO: 122916 - DNA, 429 bp, Homo sapiens
gccacaacctggaatgcccttctccacttctccagggacaaatcctttcaagatagagcttaaacccgactgcctctgcagcatggtccctgattcctctaagctcattaatccttcccttctttgtacacacctgagcctcagtttttgccttttttttagaaaagttgctgtattttactatcacgaattttttttgtgtgtgtgtgtggtggggggatttgcctcctttggtgaaccccagagccctgtggccaaggactgcgtcttagtcatcaccctgttccctccttgtttcagccaggctgttcctcactagggcctcacagccacatttccccactgcctgagcgctttctcagtgagtctgtgcccagctacggttgcctgattggcacttggacttggctgtggcagagaaaatagact

SEQ ID NO: 122917 - DNA, 223 bp, Homo sapiens
ctgaggcctcacaccacagggccaccgggtgtgcatcctggtacccatcacattctgagaggatggcttagaaagatacctccagactgggaacactggagaggggagccgtccaggggggatcaggccttacctgtggggcttaacgtgttacagaagaaacttcccaggtaaggaaggaaactgcttctctgaggtgcagctttcctggacgggcctctgg

SEQ ID NO: 122918 - DNA, 350 bp, Homo sapiens
ccctcagctttcttgtctcactctcacttaagtccagcttaaatccagccatttttaaactttaagttagtatctgttagtgtctaaattagcagctatatacgtcgagaggaaaatgcagaatcatgctgactagttttacttaaattcatggtcacaaatatcaagtatcaagtgagtccttaatactacctggcattcatattgtattttcctagattgtttattcttctattttcttagatgacttatttaatgttttctctcatcagaccttccaacatctcatcctcaatctctcagctgatgattttggttcctacctcactgagaaaattgaagccatcaga

SEQ ID NO: 122919 - DNA, 144 bp, Homo sapiens
tggaattatacactataaaatcttttgatgtggcttcatttgctcaacattgtctgagatacatccatattgttgcttacaacgtcagttttcttttcattgtcgtatagtcttctgttatatgagcgtaccacaatttatcct

SEQ ID NO: 122920 - DNA, 603 bp, Homo sapiens
tctgtgtacttgtgttctatgcgaatgctttaccaccctgacaaatggctactttcccagggaatgtaaccatttacactggtaaaaatgttagtctgcccatgaagcaggcgggaaggagagctcagtcaccaggtacccagggactgggggcagagtccccatacaaaaatgtgtccttttgtggtgaaactacttcccacctggagccaaagtctgggccagtcttagccatttctgaatgaagaacaggacattagggaagtgcaatccagaatctgagaagaagtaaaaaattctcaaactagaaagctgctgagtcaggtctatacagatgcagggtcttaaaaattgtaaggaaagaaaagaaaaaagcttttagttaaacaatggcttataatgacttctgcaaataggtgactctcggggaggtggtggaatctggtgcatcagaatctgtcacaagaaattccagcaaagcaacgggggtagaacacaggatgatttagctttctgtaatgtaagcagaaatattactttatcaaataattcacttttacaacctttctctccatccctacccccctctcaaagcagtttaga

SEQ ID NO: 122921 - DNA, 170 bp, Homo sapiens
  misc_feature (124)..(124): n is a, c, g, or t
  misc_feature (148)..(148): n is a, c, g, or t
  misc_feature (156)..(156): n is a, c, g, or t
cagccctgttaccaactaaatgagaaaagactctgaagatggacatgacgcaggagattgccgtgctgtccatctgtccatctgtagctataggggcccctcatccacccaccgcccacctggntgagtggatgggggtaggcagacnagagtcanggtggatagaggac

SEQ ID NO: 122922 - DNA, 536 bp, Homo sapiens
ctaaccacatgtgctctcaatccatcagaccctttcacatggaaccccttagagctgtaagccattaaaagggtcaggagctctgtcttcggggagctcagctcttaagatgcgagtctgctgacgctcccagctggataaaaaacctcttccttctttaatccagtgtctgaggagttttctctgcggctcgtcctgctacaattccactttcttctgcctgctttattttatcctttatactttttgtatcctcagtccaatcaagttgacactcaatattaaccatcacaaccacattctgggccattcaaataaaaaatagattaagaaatgtaaaaatactgaaattatttgtaatgtttttctgatcaccatggaattaagctagaaatgatcaaaaagacgaccaggcacattggctcattcttgtaatcgcagcactttgggaggctgagacgggtggatcatctgaggtcaggagtttgaaatcagcctggccaacatggtgaaaccctgtccctactaaaaaaaaa

SEQ ID NO: 122923 - DNA, 375 bp, Homo sapiens
acaatccctttggtcccaaagctgaaaacagctgagaaaagcacacatctagaaagggaacaagaaacagaggccaccaaagaatcttttgaatatcctgtttgctacgtttcagaaaatgtaacattggtatattataaaatagtcattttcatagaaaagatggttcttgcagcatcagtcacatctccctttaggaatcatgttggcaaggatcaggggtgtgtgtgtgtgtgtgtgtgtgtgtgtgtgtgtgtgtgtgtgtgttttaaagaagtctaattcgaaaacaaaaacgtgatattgtctctccaaaggtaaagaatgagacctttctaagataaaaaaaatttttccaaagaaaaaaagaataaa

SEQ ID NO: 122924 - DNA, 674 bp, Homo sapiens
ccagccagagccaaacccactgtgaaatgaagatcctcccagtcaggatggggcctgtgccgagactgccccccagtggcccctgtcacaactgcagcgaccccactgcccaagtggcctgtggcagaggcctcaaagtgtcttcaaggacccaggctaaggcctgctgaggcagggaggcaaagaagggatttctaacatcagaacccttccattaaacaagaagctgccccttagttacactaaatggcttgtttcctcagtgcaattaaaacaagatttaatctactcacagggctatttttagtattgtttttccagcttatttttaagagatgggtctcgctgtgttacccaggctggagtgcagtggctatttacaggagcaatcccactactgatcagcgcgggagttttgacatgctccatttccgacctgccctggttcacccctccttaggcaacctggtggtcccccgctcccaggaggtcaccatatttgtgctggacttagctgggacacctagtgggtatagtacactacagccgagaactcccgggctcaagcgatcatcccatctcagcctccagagtagttgggcctacaggcatgtgtcactgtgcctggctatctttcttttttttaaagggagatatactcacaggatgtctgg

SEQ ID NO: 122925 - DNA, 359 bp, Homo sapiens
atctatgctgtgaaaaactcgcatcacttatgggctaataaccagctagcatcataataacaaattcacacaaacactattaaccttaaatgtaaacgggctaaatgccccaattaaaagacacagacatatacaccatggaatactatgcagccataaaaaatgatgagttcatgtcctttgtagggacatggatgaaagtggaaatcatcattctcagtaaactatcgcaagaacaaacaatcaaacaccgcatattctcactcataggtgggaattgaacaatgagatcacatggaaacagtggcatttctaaataaagtctgatcacaagcttctaagtgtactaatacttacta

SEQ ID NO: 122926 - DNA, 132 bp, Homo sapiens
ggagtgattttttaaaagtgacaagcctatgagcatttatagaacaactaatatgttctttttcatatgttaaaagaacaaacacggtaattctagcaaaaaatgattatgatggcatgtcaatccagagtg

SEQ ID NO: 122927 - DNA, 354 bp, Homo sapiens
cttttggggtctttgctttttgatgaactcaggagctgatagcctttagcaagtcaacccacttctgggaagcccacccttgacaaagctggagcaattaggtttgagcctggtaaggaaaacaaaggaggaagcaaaaaacgagaagccagtgtagttggtgtcgtaggtgagctgttcacagagagaggataatgcaagtcacaaaaacatcagcctggagaggccaagaaaagtgtctcgggagaggtcttgaactgtttcggttttttggttttgtttttgtttttatggcagagtctagctctgttgcccaggccagattgcagtggcacgatctcagcaaactccgcc

SEQ ID NO: 122928 - DNA, 532 bp, Homo sapiens
cactctggtcagacaacagctagagtatctggttgttctaagtatcacatactacaaggagaaaatgacaaactaggatgtgccagtaaaatattacacagaaaagtcagctcccgaagcaattccctgctacaagtctcactctctcgaaaacttaaagaaattgaaggttagaaaacaaagtgtgcattgcatgtattttaggtatttggaggattgtgatataaaatataggggttaggcttaaaattcatttcaaattttagcattaaaagagatcctatggagcatgtagtcttaatttccaatcaagaaactgagagatagaacaattatgtcccagctgcctatggcaggtgtgaaaccacaattgaggcttcttgattcttatgtcagtgtttatatcacgataccaaaataactgattctgggttgattaagaaagcactgcacaaatattgagtaccagcaatgtgccaaacactgagtttatagggaataaaaagatagatggggcaggtcagttcctaca

SEQ ID NO: 122929 - DNA, 643 bp, Homo sapiens
ggcattggtggtccagtccagttaaagtggaaagagctcattaacactccagcatctagttaagacatcagaaagtacttactttaaaagaaagcgccacacttttagagaacgacctattctagacccacccaacagagtctaaaataaaaagactgaagcaaaattaacagagcatcaggaacttctgggagaatattgggaaccctattaaacatgtaattagaggctcagaaggagaaaagagcaagaaagcagcagaaaaagtacttagaaattaatggccaaatatttcctatatttgataataaacactgacttatagatgcaagtgctctgtgaatccacaacaggataaatgcaaagaaaaccacacccaggcaaatcagactcaaacagctaaaattcaaaattaaacgaaatatcttgaaagtggataaagcacagtacatacagggaaactaaggatgatagcttctattgaaactaaggagaaatatgagaaagtatcctttatagagaaatatgagaaagtatcctttataaacataaaaatgaaaactgaaaaatgcattaccataagacctgaattataacaaaggctaaatgttacttttcaggctgaaaggatctaataccagat

SEQ ID NO: 122930 - DNA, 333 bp, Homo sapiens
gctcggtcccatgtttacatgagggcaagtcaaagccgacagaggagaaggccccaggagagggtacaaggtaagaaggcagaccaggccgggtgcggtggctcatgcctgtcatcgcagctctctggaaggccgaggtggatggttcagtctgtttattggctgagagagggatggcttgtattgtatttcccctggagaactctgttctagagttgataaaggagaaaacctgaagaattgtagacataagggccaaagtcaaagccgacagaggagaaggccccaggagagggtacaaggtaagaaggcagaccaggccgggtgcggtgg

SEQ ID NO: 122931 - DNA, 136 bp, Homo sapiens
tggatcacagagcgatgcctgttcattcctgcttgcaagggagcagatctctcgacacccgatgggcctctattccgttccggcagctgtccgtgtcaggagcgctgggcttgctcctccccacgggagccatcac

SEQ ID NO: 122932 - DNA, 453 bp, Homo sapiens
cccgcttctctccaccccttggagacctggtcctctgcgcccgctgttggaattggacacctttagatttggacttaaaactcaccattacaactttaaaatcaatgactagatgggtgtggtgtctcatgcgtgtaatcccagcacttcaggaggctgaggcgggcaaatcactcgaggtcaagagttcaagaccagactggccaacatggtgaaaccccgtctctactaaagatacaaaaattagccagacgtggcagtgggcgcctgtagtcccaagtactcgggaggctgaggcgggagaattgcttgaagcagggaggcagaggttgcagtgagctgagatcccgccactgcactccagcctggctgacagagcaagactctgtctcaaaaaaaaaaaaaaggtaatcagctggggtctgagggaactggggacattttagcaccaaa

SEQ ID NO: 122933 - DNA, 584 bp, Homo sapiens
ctaaggatccggtgctatcgatacacccagcactctaagtgtagtaggtgtaattagagctaggtgcaggtgctgggcggacataggaaggccgggtaggccagctgttgtcaggagagtttgtaaggaatagtgaggcctcagatgagatctaagggtaagtaggagttagccagataaagaaggggctgcgtaaagagtgtgtcagggctaagagtgccacagctgaaagagcatacttctgcagtgaatgggtgtggcatcgataaacagcggtgtttatcgatgccactaacaagaacattgttagtggcttcatagtctgtggttagatttatattagctatatgtgaaaatattccatcaactaaaacccctgtaataatatccaagctctaagcgtgattgtcacagccagggagcttcttctgttccattgaccactgggtgcaaggggaaaataaattaagcacaaaagaaacaccgtcttccaaaaactagccccttcttactacagaaccatgctgaacttggcttaccttaaatcccattcttgctcccaggaactctgaaatagcagcagt

SEQ ID NO: 122934 - DNA, 696 bp, Homo sapiens
cactgcactccagcctgggcgacagagcgagactccatctcaaaagaaaaaaaaaaaatgtgtgaggcagaagacatgtgccgggcaagtcagggagcttagatgctgatactggcccagagcagtcagtcctgaatcgtaccacagagccaagcccagtggcttcctccacctcccctaggggtgctaactcattgcacaaactcttgccctttggacctcaataagacccgtgcttaaacaataaaaatgtcttggcaaggtctagatcagccaagctgttttgaaagatagtctcacttcactaaagaggcagagaatacaattgctgtcctgactttactgttaactatacgcccttgatcagggcacttaacctcttttggccccagtttccagttgttaaacaagaacattgttagtggcttcatagtctgtggttagatttatattagctatatgtgaaaatattccatcaactaaaacccctgtaataatatccaagctctaagcgtgattgtcacagccagggagcttcttctgttccattgaccactgggtgcaaggggaaaataaattaagcacaaaagaaacaccgtcttccaaaaactagccccttcttactacagaaccatgctgaacttggcttaccttaaatcccattcttgctcccaggaactctgaaatagcagcagt

SEQ ID NO: 122935 - DNA, 327 bp, Homo sapiens
gcaagtgagggtcagaggcctggcttggaggagccgcttattgtgagcctggctggggcaggcagcagcgagtgctgggaggggaaaggttccctttgaagcacatggcgctaagagcttcccagtgaccatggaaacaggcgcagtgggttcccagcctgagaaccagggagagcagccgtgattcaaacacaaaacacacacaaaggtctgaaaagcggagacaagaggggccagagtgaggggcaggcagtccctggctggcaggaactgagcggctccctggtaggaaaatccggccaatgaagccgagcaggttcacggggt

SEQ ID NO: 122936 - DNA, 439 bp, Homo sapiens
gacttctcgttaataatctagctaaatgatagaacttaaaagatctttgactagctgagtgttgtggcatgtgtagtcccagctacttgggaggctgaggtgggaagatcagtagagcccagcagttcaaggctgcagtgagctatgaccatgccactgcactccagtctgggtgacagagcgaaaccttgtcccttaaaaaaaaaaaaaatctaagactgattactaaaccattgggaacaggaagttctgggttcaatgaatttctatatattttttcatactggacacatgaaagacattaaacaaaacacactatttactagtttagccgtctcagtgtcaacttttcaacattttgatgaaaattttgatcatactaataaaagaaaccatatggtattgaatattttcagcatctaagaaggtaaatctcaga

SEQ ID NO: 122937 - DNA, 344 bp, Homo sapiens
ggttaacacagtggtcaccagcctaatgtggctatttaaatttgagttaattaagtaaaacttaaaattcagttctcggtttgcatttaccgcatcccaactgctcaatagcaacatgtggcttgtagctcctacattgctggtatagaaacagaacattgccattattgcagaatgttctgttggacagcactagcctaaagctgctgtctcagctaagtgacttctctgtaacctctgactctctgtaacttctaacttgtaacttctgtgtaacctttgaccttacaaggtaggcttggagtgcagaggggtgcaatgaagttgtctgtgatacttatgct

SEQ ID NO: 122938 - DNA, 300 bp, Homo sapiens
gaaagtacacttggaagacggccgagggggtgacttgaaagacaagtgcacggtttgaccttttgacttggggtttaatatgttggcacacttccggggtcttgcatcccttcttccctgattcttcccctggggtgggctggtcgcctgcatagtggcccgcaggggcttggaaggggagcatgcgcagtgtgtttcttggagtcatacgcatgctcacttgaggcattcttcccttaccagctcaacctccgtaagaggttataggccagttaaactctgctcttaatgcacattctt

SEQ ID NO: 122939 - DNA, 92 bp, Homo sapiens
cccgcacagtcggctgcgagctctgggagcaggaggcgcggtgcgcagcccagcccgggacggagccaagcgccgtgcgagcttcgggaggg

SEQ ID NO: 122940 - DNA, 269 bp, Homo sapiens
ctaacattaaataatgctgttgatttttacgtttataggtaacatcctataatcttgctgaacttaactattttcttaaataaatttttgttgatttttgccaaattcaaggtatataatcacattattataaaaagcaacaaaaatgcatcagagtcttagtgacaagtattaattttagaggaatgggaagatattgaaagagcctcatcctggccactgcgccattgtattaactaccatttattgtatatcatgtgcagacacct

SEQ ID NO: 122941 - DNA, 267 bp, Homo sapiens
tttccctctatagttcaggggattccacattgtatttatttgcacatgttagataatcacgtggttctgtcccaggggacctccaacgacctccaatgaggtaggttaagggaacaggatttttcaaaatcaggagaataatcagaaacataacagctgcttctattaagaggtagagatgagctaaagttaatagaaactgcacgtgccagcggccaaaatccagtttagctagctggaaaacccgacccacgctgcttgcagacg

SEQ ID NO: 122942 - DNA, 167 bp, Homo sapiens
cagcatcagcatcacctgtgaactgttagaaatgcagaatctcaggcccaccccaaccccactgaatttcttagaagctgcatccaatggaagcatctatatgaaccacacttttgagtagcaaggatctagagttcttgtgcagatctctctctctctctctctct

SEQ ID NO: 122943 - DNA, 361 bp, Homo sapiens
tgctgggattacaggcatgagccaccacgcccggcccaggactcttgtcttcttgaacacgtggctttcacagttcctcttttcattgccattctgtcccacaggaaaagggaaggacacagagaagcacacatactgaggttttaaccagccaggtcctgatggcacgtgttatgtccacccatgcctcccagggagactgggcagccatggcccagctgcagccctaactgaagaagaagggagccgtgatttgggtgggctgggcccagtgcctgcactcaccttccatttaatggaagggtctgtagtgtttcaccatcatctctaccctgtgacctccctctgtttcttgtgtcat

SEQ ID NO: 122944 - DNA, 156 bp, Homo sapiens
ctaactgcacacctttgcacttgctattttctctgcctagaatattcttcggcagtgaagtcaaatggctcagtctcttgcttcattcaccctgttcagttatcacctctttccctagtctctttctcttacctggttttagttttctgtatggcg

SEQ ID NO: 122945 - DNA, 497 bp, Homo sapiens
cgaggacacaggtgtactgcacagtgcacattaaccagtgacggatggaaaagagcgggaaagggggactgtctggaggtcgcagccgcctgcatctcattgatctcggcagctgtgtgaaagctcttagcaaaaatcgagaaggaggctcagggctgtgtctctcgctgtctgctctgggcaatgtcatcctggctctcgtcaatggcagcaaacacattccatacaagtaagtgactcttctactcaaagaatgtggtggggtaagcatggtgtgggacgctttgttcagtgccatctgtggagaggtgtgccacagagggacagcctggaccccattataagttcagtgccagagaccagccttagctaacagttgtgtaatgcatgatctcccaaattcaaaacttttggaaatacttaaatctattccagttctaactttaggctgctcaaattagaggaaataggaaattatctcagttgaggtctccact

SEQ ID NO: 122946 - DNA, 436 bp, Homo sapiens
aaattcatccatcaaataaggttgcctttcttagaggcagctttgaaataaaatctaaaaggaaatattagacaaatgttaaattatattaaagaaaacagggcttgccagttatatttccccttttgttgtagggcacacatctaatccttaccctgttactgagttacagtttgattgtgaccacaaaagtaatcacagtcaacaggaatggctggcacaagaacagctggcatcaggtgcaactttctctctcctccatcctagttaagtgccattacttatgcccttacccttggattgtaccagcactgtctagccaagatagttttcctgtggctgatgaatcacatggtaagagggatgagggtggaagttgagggaagataagcagaacagtgaagatcctagccctggggagaataactgtctggca

SEQ ID NO: 122947 - DNA, 377 bp, Homo sapiens
ggagcattattttgacaaagaataaaaagtggaagaggaattttatttggaatatatatttgtagtatttttgaactctgggtagttcttggaaatgaaggtttgagggttagaaattaatctcgtccttgtaatagtgcaagtttttggaggttgggctctgaagcaataaagggcaagcctatgagatttcgccgatcacgaagcatccagtcataacaagttttattccttgaaagtatactcttcccctaaaagcagcttaatcaatacttcccttatgggacttttaatgctgccataaatgagtgagagaaaactcacagtactctctcaactatcttcaaataaaaatttgaagaagtctaaatttctct

SEQ ID NO: 122948 - DNA, 484 bp, Homo sapiens
ccaaatacagaaggaaactagtcctttttagacattcaaaaactcagaaattggggaagtacttaaggatgtactccagcagagagagaagggtagaagggtggggagagggagaaagcacaagccaataaagagaaggaggtgatataatgggatatttttaaaaactggagtcaatccaaaagtataattagacactggacagcaagcctagaaagcaatcagtagaaattagaactccaagtatgtggctctgagaaatttttttcacaaaacttagctgggtgtggtggcacatgcctgcggtcccaactactcaggaagctgaggtgggaggatcacctgaacttggggacatcgaggctgcagtgagctgtgattgagccactgaactccaaactgggtgacagagtgagcacctgtctccgaaacacaaaacaaacaacaagagggaactaggcagatattataacgggttcaaaag

SEQ ID NO: 122949 - DNA, 394 bp, Homo sapiens
tttgggagtttcgcagtttctagttcttcctgaggcactgtgtgggattccatctcatccccacgcagtgtgacatttgggaaccagacaagcggtctgttgcgttagaaggtgcccaggggaagatccatggacaacccttcacctggagatttaaaatctacaataaagaaagcatcttgagacccctgagatgcgtacctggttttatggccagagcagcgtccgcatcttcatctctctccattggctctcccgcgatgagtgcctcctcatctcatgggggccctcccctctgcccccagccgcatggcctcttttcgattcttctctgtaacctgctatggtttctgcagaggcgccccacctgcctgccatggagggcccttcctgc

SEQ ID NO: 122950 - DNA, 889 bp, Homo sapiens
ctcgaactcctgacctcaggtgatccgcccacctcggccttccaaagtgctgggattacaggcatgagctactgtgcccagcctctatgatttcaattttcatgtttaagtacctatgtagaacctaactgtccataagtaaacacaacaaaaaaaagatttggcttttggtcaaagatcattggaggttacacagggtaaagtgcagtatgatttttatcacaattagaaagattaaaaagagatgacagtgagtttgtgagaacaggtttgtgtttcataaaatgaattgtgtgagttagctatgatgaactgcaagcagcttgcatttccaaagacaaatagagacacaggaatctaattaaaatgctaaagtaatgggaaggagacatccatacgtttttgtccccctaaggttccagatttatagtttgagcatcatctcggcttacattttctctgtggaaaacatcagccattacattacttggctctgggttgaaatcctaacttcatcaactgaagatcttatgacctaggcaagtttattaacctcctctatgacgtgataaaaatagtatctcttgtgcggattagaagacatgttcctctatgctaagatgattattatgtgcggaacacatagttaagtgcttgataaattgaactatggcaaatccagtctcaaccgtggcaaaactaagttaataaaaatgaaacataacctttattattttagtgcttgtgttttattttaaaactagcagtataatttccacgaggattttgctaaaattaacaagtacatttcgaaagtaatttctgtccctcttgtatcacacaaacattacaaccaaaaagtaaaaaacattctcccatgacccaatca

SEQ ID NO: 122951 - DNA, 223 bp, Homo sapiens
caacacttccttaggaagaagttttgtactttgaatacatggaagctgtcctttcacagcagacaatggcttcattatacaagaaatgtggacttaggttctccctatttcttcaacctgcttcagcagagccattgtctgctgtaaatcttcaaaaacaataactatgtcttgattttaagttttttattgcaagaagagggagtggtccttcaatgtattt

SEQ ID NO: 122952 - DNA, 417 bp, Homo sapiens
aatttcctaccagcagtaatacaaatgttatcaacacatgtgtaacctccctttactacagtgagagttgtttgggtgtccatgcacgggagaaaagaatcccaagaacatacatccctcttcccaatttacattttcagtatcctgaatttaagcttgttcaatgaatctgacagggagtgctactgaagtctcaactccaaataaatagtttaaaataaaaagttgtataaatattagtctgtgccaatggtgcggtttgagagggagtgctataaacacaaagtaaattaaatgggatctacttttgtggggtaaaagcctacttagactggttattatagagaaaattttgttgtgtggtgcgacagcacgtacccatgtggctaacctacaactgctagaagaaacaaatcc

SEQ ID NO: 122953 - DNA, 834 bp, Homo sapiens
gagaagatgagaggaagacatttgtgcctacaaaatgggatctcctcttagggctgagaaccagagtttagggaacctttgacctcttggaaaaagaactgccattgaggagtaatgcattctgttttgggagggaaaatcattttgttacttctttgaagggaggaggtataagaaatgaaatagaataatagagcagaaggtcaatgagccacagccctacaggtagccagccactcttcttaggtggcggatgatgtttttgttttgattacagtaagaataaagtatcagctcttagatttaacttggggctcctaccttcaaaagcatgaagggccgtctcagaagagatgctgctggaaacaggatttggaaactttctttgggtttcctgtcagaatgtgtgggggtggacatgcctatgtgtagtttttctttccttgtgatgtaatttatttctgtgatactttgacataataagcattaaattaggccccagactttctgtctttattatgctttcctataacattgttgttttgaaatcatatagttcgatattcttttgtagcgtgatatttcagtgaatcctgtctagttttcttggtgttttaaattatggcctacttcagatacgattagctgttaggtattgaggatcatacgtgttaagtatttgttgaatgaattgaatgattacaaagatgagtctagttattaaatcttctgtccttttgagaggtaccctatattaggatactgcagtccatttccagtttgtaagatagtaattcttaaccttttctaggccactgacacctttgagaatat

SEQ ID NO: 122954 - DNA, 399 bp, Homo sapiens
aagtgaggtgtgctactttgtaactcacatctttattaacttagtatcatgtgtattttccatattgatgcctttttgtgtactgattgtttttaaatggcacttcgcggaaagaaaatctgcacaatcacattcctattctccaggtcccagctcttatcacaaagtcctctgtagatatcctgttaggcaggaacaacaattattagacttccatgcggagataaggcctttgaagaaaaataaaatgggacaaggggttagagagtgcctgaatgggggtagctgatttagagaggaagtttctccaggggaacactggagcaggggcgtgcaggaagctgaggcaggaaccctgtgaaggtttggggaagaatattctagatggagaaagtggca

SEQ ID NO: 122955 - DNA, 273 bp, Homo sapiens
ccaaatttagagtcctataaagagaaacacaggcacagaaaactctgtgggctgcgccacagtctaaatccgatgatcatgatcagtgtgacatcatcattgggtagaatataaacacttggtctgctggcaatcaatcaagtaggccatccaaatcaaggaaacagcagagtcccacaatcatttgttccttttgcagacataggatggcccatgcccaaacactaagcatccacttccttcattttaagagtattattcaaatggtcacac

SEQ ID NO: 122956 - DNA, 676 bp, Homo sapiens
cgcagtggctcacacctataatcccagcactttgggaggctgaggcaggtggatcacgaggtaaggagctcaagaccatcctggccaacatagtgaaaccccatctttactaaaaatacaaaaattagctgatgtggtgacaggcacctgtaatcccagctatgtgggaggctgaggcaagagaatcgcttgaacccaggagtcggagtttgcagtgagctgagatcgcgccagtgcactccagcctgggcaacacagggagactgtgaaagaagaaagaaagaaaagaaacaaaggaaagaaagagacagagagagagaaagaaagaaagagagagagagacagaaagagagagataaagacagaaagagagagaaaaagagaaagagagagagaagaggaagaggaggaagaggaagaagaggaagaggaagaagaagaggaagaggaagaagaagaagaagaaaagaaatagaaaagaatttcaagttaatgaaatataattcatgagtttttgctaactaagcattttgtcaggccctgtgtaggccgtgcacatcaacacagtgcccagcaatcagtgtcctgctctactgcagccctccaggctagagcaaattcctgtagttctgctagcatggcatcctttttactgacaccaaaaaacaaggcagaa

SEQ ID NO: 122957 - DNA, 208 bp, Homo sapiens
acaaagtctgagttttatgtaaaacaagtttatgtttggaaaaagttcaaggtgcccaacagatgtgcagccttaacagtaaccctcttaaaattcttgaccctaaggagacaaccctcaaaggggaggagctgggcaaagatcagggcgtggcctggggtggaggaggggaagacacaatctggaaagtcaataaagagaggaagag

SEQ ID NO: 122958 - DNA, 322 bp, Homo sapiens
ttaatacaggctaaggctcagagttctcactcagccagcctgcattatttcagcagcatctgcagtggtgcgcttagatctgaagtacagccagaagacctgtatttcaatctctgtttcatcattaacaagatatatggtcttggggatagttctctcctctgtaaatgaaggagatgctctaccactgtgtatggttatcgtactagattgtgtgtatccagttctgtgcctctagacagcattgattatatgctctatgaactccactctgtttgcttctggaggacacaggaggtacgggcagcagatgggtgaggtt

SEQ ID NO: 122959 - DNA, 598 bp, Homo sapiens
cataatttggaaagtgcctagcacaatgcctggctcaaagtgagttctcaatggctgatcactaccactattgtaatttatgtcattaatcttcctggttcttcccagcgtgggatcagaagggggagagaatacttgggcacatggaaatagaaggatgtatgagaaccaggctggtcatgtagcttgatgccttttcttcctgtcctgggcaaggaatggctacaagaggttactatcaagagttccaaagtaaggagagatggactcctgccatctgtaaagaactggatattttgaatgtttaataaaactctttttaagataaacttttatattgactgcaaaaaataaaaaggaagctgcataaggcttgatagggcataatttttttcactattctatgggtaaagccataataaaataaacaacttgattatattgacaaaaagtgtttataaagatatatttaatgccatgaaaaaatttcagtagataacattaagaaaaaaacataagagagagcagctttaacattatatatagtttgtgcttaattgtatatgcacatacattataaactactaagcaaaaaaaa

SEQ ID NO: 122960 - DNA, 357 bp, Homo sapiens
ggcaagagtgagcatggagtataaggttacaggaagggccttttaattgaatgggagctcttcaagctgttcatttctcaggtgtgttctagctgaggcaagaagccagaaaagtatagtgaaaagaactggagaaagggagtgattccgaggggactggatggaagggctagaggccaatgcagaatgggatgtaggcccacctgttagaatggctgttctcaaacagtcaacttctagcaagggttggcgaggatgtggagaagcggaatccctgtacactgtagatgggaaggtcctccatggtttccacatcctctctccacctcccacctcgcctcccttggcctgctccat

SEQ ID NO: 122961 - DNA, 580 bp, Homo sapiens
gtcccccatagaactgaggctgggtggagggccccgggcagtctaacgggttggccttcaggcagattttcaaataaggtcttgcctccccaagcgtccctgtcacatgccttgcccctcttttctgggttgagggtaaggagatcggaggagaattgaaattatcctcttaactttgagaaacgtccgaccctattcatgtaggttacttactttacccatgtttctaatctgccataaatttttcttctggtaccaaaggtccgttggaaggaaagcatcaaacacccaaatgtgactttgtgtctttggtacatggtgttgtccaactctttcatttatatgcatttgaagaagagaaggataggaagtaattttttttttttttgtctttgacacaaatattggtgctaagcaacttaagagagtctggccttacagaatttctgaaacaaatgtagtttgagagggaaagatgctttcttttaggataaggcactgccagctatccttagagatgagtgattttggaggtgaaagtatatagaaagatctagggagaaggcagtgcaccctggaa

SEQ ID NO: 122962 - DNA, 310 bp, Homo sapiens
ctgcctcagcctccagagttgctgggattacaggcatgcagcaccatgcctggataattttgtattttttagtagagacggggttttgccatgttggtcaggctggtctcaaactcctgacctcaggtgatctggccatctcggcctcccaaagtgctggaattacagacgtgagcgaccatgcctggcagaggtgtcttagtagactctgcctcctctagactttgctataacagtcctgtgtcctttctagtctatcctaagacctgtccaggttcattaagtcattataagacaaactatacgctgg

SEQ ID NO: 122963 - DNA, 365 bp, Homo sapiens
tttacatgaaccatcgagtgcaaggttctcctcctgcctgaacactggagccaatgaggatcttttgaaacatcctgatgcttgggcccaactcagacaaacagaatgcagatggcctggcggagatctaggcaaattggtactttttaaaatctccccaggagattctgattcacagggagggttcagagcacacttttggtcccatctctgatgcccttcagctgtgtggctgtgggaacagtgccaaagctcaccctcccagccttgctttctgcatctgtaaaatggggatgacgatcctagcctctcacctcccaaggttgtcacatgcaataaattaaataaaagatgtaaaatcttat

SEQ ID NO: 122964 - DNA, 668 bp, Homo sapiens
ttggttctggtgagagagagaagacagtgtttggttttgaggagttgtctttgagacgttttgagatgaagagtggggatagcaagtaggcagctgaattgaaggatctgaagcttaagaggagaggactaggctagagacctgtttgtgaattatctgtacataggaggtaattaagggtgtgtagtgcatggctgacactgatgaggaagaaggcagagcaccggaagagaggaccttgacctgagccttgaccaaggccattgctaaatgcaggtaggcctgtagcgcacaaagaagcatgaaaaccaggcaaggttgtgcaggagaaatcaagggcagagcttcaaggagagagggcgtgatcaaccatgttgattgctctgaggtgtcaggaaggaggaccatagataagtgatttatgggtcaggcacggtgattcatgcctgtaatcccagctctttgggaggccaagactggcgagtcatttgagcccaggagttcaagaacagcctgggcaacatggcaaaacaccatctctgcaaaaaatataatcagcctggcgttgtggtttgcctgtagtcccagctacctgaaaggccaaggtgggaggatcacctgcacctggggaggtagaggctacagtgagccctgttggtgccactgca

SEQ ID NO: 122965 - DNA, 625 bp, Homo sapiens
gactacaggcgcccaccacgacgcccggctatttttttgtatttttagtagagacggggtttcaccgtgttagccaggatggtctcgatctcctgacctcgtaatccacccacctcggcctcccaaagtgttgggattacaggtgtgagccaccgcgcggcccatttatgtacatcttctcagtcacttatgcatcagtggaaactaagttttaggttctgttcaaagagtgactttcaggagctgagagcttatggagcagaggccatgactgccggggagtttcggccgctgggctttgcagccaggtggggctgtctgtgttcaggcacgggagtttctactttagccaaaggagacggagctcccaaatctccctccctttcctggctctcagtgtgaatgggtggcctaggtaccctcgcaggttgcggagccgtgaccatctgtgcctcctgcgtgaggtgggcttattagcctctgggagcagagggtgcatgacaggccccagctctgcccagccttgagggctggaggagggcgggggcagcttctcctcagtccagctcctgggatccctgcatggtccctctcagcccaggtccagaggccaggccaggagcct

SEQ ID NO: 122966 - DNA, 231 bp, Homo sapiens
cttcaattgcatggacttaaggttaggcctatccttatgtcattcccaccctcttgcatgctgatgtgttttctcaaagggaggaggccatagcctgcagcctggtggttactgacgaccagtgccaaggaggcaggacccctgagcagaggaagtgggtcacacctggggatggagcctggcatttagatgatgatggggaaaagattcacagacacctagttctgcata

SEQ ID NO: 122967 - DNA, 449 bp, Homo sapiens
tagggacgttaggaagaacattaggtatgtctccctaattgcattttattatactcttctgtaagagcttatgatatcttctaaataagtgtggatttctctttctgtagacaatggaagaaacgtagaaataaatagtcaacacacagctatctctatagaagtgctagatattatgtttgacacacaaagtgatattcagtatctggaggagctggaagaagtgtgttgtcttcagagatgacaatgtccatggtgtctttaaagaaagaaaggtcagaatctaaaaagtgtggccgggcgtggtggctcacgtctgtaatcccagcacgttgggaggccaaggctggtgatcatgaggtcaagagattgatatcatactggccaacatggtgaaaccccgtctctactaaaaatacgaaaattagctgggcgtggtggtgcacacc

SEQ ID NO: 122968 - DNA, 293 bp, Homo sapiens
cccaagaacggaggccagggtcctttctgtggctgggaagttaccccgtggctgggacttttcatagcagaggaacttcacagcagatttttgtgaatgtttggcatctcaaacacatacctgggcagacttcaagttagttactgaccccacaactttctcggcttcctggggaaagggaagtctttcttgcctgcccctccccgccgacatgcatacccattcacacaacttctgctggggcagcaaccctccaaccccataaccccttgagtgatccccagattagataa

SEQ ID NO: 122969 - DNA, 822 bp, Homo sapiens
catcatcaaaataagaaaagggacacctgagctctctttcgtacactttcccatggattatttgccttcatatgcgctttccttgcaaaagagagaataatttttgtatgatcttcaaggagggaaattcttctctatcaccttaaagaatgataatgttaagggagggattgtgtcatattcatctctgtctctcttacaacatctgggcaatgccttgataatcactcaataaatgtctgctaaattgtctgccacatattgcagacactttcattaccaataatttcaataatacacagggagtatatgggtaggtgtaattaagcagatccttccaacaaacagaagagaaagcactgtgtactactcactataccacagtgaaaattgtagagaatttggaccaatgaatttgctggctaaaaacatgaggaacatgtgtttaagtcttcctgatctgtagattaaagacagaaataccttaatttattagatgggataagagaacacaactaaagtgcctagcacattacttagaaactcaagaaaatgttaggactctctcctacagccaaaccacttgtagagtatgtccaccaccttggaaagtcagctgtcacatttcagccttacattactttagcctgtaagtcacttgtcattatacttcagcaaggacactctattagtctggaatcatttgcacagcctctgcaatttcaaagcccataaccagttatttttgtcctaggacataggctgcaaagatttataagtaactggactaacttttcttttccataattttaagtatgagaa

SEQ ID NO: 122970 - DNA, 272 bp, Homo sapiens
actctccctgtcactctgcattccaaccactctggcctcactcagctccgtgtcaatgccaagttccttccaaccatagctccttcacagctcaaggctcaacatgtggttggttcatagagcagtaacataagcatcaccgggtagcttcttagaaatgcagaatcaggctgggcatggtggttcacacctgtaatcccagcactttgggaggccaaggcaggcagatcacttgaggtcaggagtttgagaccagcctggccaacatggca

SEQ ID NO: 122971 - DNA, 155 bp, Homo sapiens
ttattccttatgacttggcctgcactaagttttaatggttgcattcttatacatgtgactccccaagggaagggcatgttatgctctgctgtttgttttttagagactttatatttttagaacctttttaggttcacagcaaaaaagaaagaccc

SEQ ID NO: 122972 - DNA, 636 bp, Homo sapiens
gagcctagaagcaaatggtatttccatcaagaatcgtctcatataaagtagagcgttttggaaaatgaagttattaatagataaaaacatgtttatgcagttggtttctaagtatgacaaacctatttcttggtaaattgcaagtccattccacctgtgtttgtaggctcatttgcctaaaagtcttgggattttttctgatgatctattaaattttctttctgattatcttttctaatgctgtaatagcatttctaacactgtaatgaaagagaacaaaagtacacgcttgctcatcatttactaattctaaaaatatatattgaatacatctatgtagcaggtactgtggtaggtgtggaagatagttgagacaggtaacaagcccaacattacggagcttagcatcaccacctagaagagtttttaaaaaacatagataagtgaataatgattataaagacaaagagattcttgccatataattacatataagcaaatttaggatgtgatgaaagattttgatattggtcttctgatttggctgtaggatgaagtgtttataagtcatcccaaggaagaaacaattcagatgagaactattcaatggatttgcaataacaatccaaagatgga

SEQ ID NO: 122973 - DNA, 827 bp, Homo sapiens
agagaatgggcttgcctgatgaacgggagagaaaagaaaactctaggtaggagtccttatttattttctatcactgctgtaaaaaaagatagctgatttagtgacttacaacagcacaaatgtatgatcgtcttactcttttgtcagaggtctggtacaggtctcactgggctaacagcaaggtgtctgaggactgcattccatcctgtttgaatgtgttttctctctcattcaggttgttggtaaaattcagttccctctggttctgggctaaggtcctcatttgattaacggttgtcagctgagaccctttcccagtttctagaggccacctgcattccttggcttggaccctttgtctatcttcagagtcagcagcaaaggggtgagtccctctcacacttgggatgtgtcctgccgctgcttctattgctgcatctccctgaccgacacctctttgtatctcttccattctttctttttctattgaagtgaaattcacataacataaaattaaccactgtaaagtgaacaattcagggacatttactacatccacgatgttgtgcaaatcacattttcatcacttctaagtaaaacccctgacccattaagcaataaaaccaccattccctcctctcccaagcccgtagcagccaccaatctactttctgattctatggatttacctgttctacagatttcatatcaatgggattacacaatgtgtggtcttctatgtctggtttctttcacttagcgtattgtttgagaggttcatccgggccatggtgcgtatcagtacttcagacctttttgtggctgaa

SEQ ID NO: 122974 - DNA, 211 bp, Homo sapiens
tgctcactgtggtaggcagaataatggcccctcaaaaaggtccacatcctaatttcgaaaacctgtgaatatgttaccgtacacggcaaaagaactttgcagatgtaattaaaactggcaaaataatggtatcaacaaccaaaataagaatactggggctaagcacagtggctcatgcctgtaacaccagcggtttgggagaccaaggtag

SEQ ID NO: 122975 - DNA, 719 bp, Homo sapiens
gtgttcctccagaacaactttatgttggtttggctgaatcctagcaatttcagtaatcttggactggcttttaagttattttctcaccttgaagcacatacagtcaaggaatgtacatttgtaacttatactatgtgtggtgcaagcctagaatttccatttctcaatatgactttcttttccataaatggccctaagctgatagcaagttttcattctgcctctctggacatcttgcagcatttttctaaaccctctttcatagatgggatagcttttcaaggctctggacgatatgcaggtggcatatccagaatctccctttgccctggccaaggccacatcactaatcttgtgtgagctttgaagccccttcccctcagcccatagacctatacacagtcctaaaatcttaatgggcagtcctactgacagctgccttgtcaccagctcctgtgatcattctagctttgatttttctctttctttctggcacctggtgttcccctttctctttcaacaagtttttgctgtgctttcctagcacttccatatgtacgtagcaggaggaggctgaatgccatctgctctgtctgccatgttgctgtaaatcacagtgagttttttgtaagtgtaacagcttccattctgcagtgtgttttgagtctgactcttagatccatcacttcctcacagtgttatcttgggcaagcatccta

SEQ ID NO: 122976 - DNA, 374 bp, Homo sapiens
ctgcctcagcctcccaagtagctgggattacaggcatgcgccaccacacccagctaatttcgtatttttagtagagatgggatttcaccatgttggccaggctggtcttgaactcctgacctcaggtgatccacccgcctcagccccccaaagtgctgggattacaggcgtgagccactgcgcccagccttatcattattctttagcgtaaaggcactgtcttaaaagatctactcatttagtgaagatacattaactagttggaataacaaattaagctttaaaatacactagtcttacgtaaatttatcagataatttggctgccacctctgagagcagagttttaagaaaatggatgcatttaggactatg

SEQ ID NO: 122977 - DNA, 244 bp, Homo sapiens
tgcccgggctggtctcaaattcctgggctcaaatgagcctcccaaagtgcgaggacctagatcatgttttgaagctgacttctttccctgaatataatgccttggaggttcatgcaatttgttgtggatagtatagatacttggttccttttaatagctgagtagatccctttatatgaaggtactgcaatttatttatccagtgtcccattgaaggacatttggtttgttctactttggaggt

SEQ ID NO: 122978 - DNA, 746 bp, Homo sapiens
aatcggataggtagtcataccattaacagatacttccttgaaggtagaatattatttcctttctttacagttttgtgttacacaagtccaagtggtgccagcaaacttcttaccgtgaaatgttgtaaaacacctggcatactgaaatttctgaaacaaaaacacaagctccacattgataacttgataaataaccactaaagtttagatgcagggactgagatgatacaggcaaaatcttggtgttggtttctcttttaattcgtatcttcgatcacctaacctttctcaatccaagagcagttcagtcttttctccccaagtctaggatgccaaagagcatcataggaaaagataattagggattgaccagcatttcaattagttctcttcttcatctttgcatttctcaaaagtgttctcctggaccagagagaaagagctggtccattttttttcattctttctattcaaatttttccacccagacaatactttattaacacagatactgtagatccttccttggtcagtgaattattacaagaggagctatccttccaccaaagtgagtgaaaacaagttccagtatcttttcttccatccagttttgttctcagaatccaagtcagtcctgggtcttttctcactttagaacctggcctcagatgtgtttattcttgctatttaaaaatacctttaaatttcacatgctggcctgcagaacttgcatcctttgttctata

SEQ ID NO: 122979 - DNA, 826 bp, Homo sapiens
tgcctcgccctgcttcggctcgcgcacggtgggcgcacccactgacctgtgcccactgtctggcactccctactgagatgaacctggtacctcagatggaaatgcagaaatcacccgtcttctgcgtcgctcacgctgggagctgtagaccggagctgttcctattcggccatcttggctcctcccacgtttcataaatttctaagatcagcaatgtgggagacaggagcttcaccttcaggctggattccatgatggagaaaatacatggagcagaccagcagttatttgcagctatcatgtgagagatatttcgtgattagggttgacttcagagtcagaactattgccacaaagcaaaatggaactattcatgccaattcttcaggattgaagggatcagaaatctgtgccaaggactcttagcatagatccacttgacatggagatccactctactgaaatggcagtggtatcatcagaggcacagtaacatccagacgcaatccttactgcctgtggttcctagatacctagatgacagtttgaagacttcactacgggggccagctggtcattccaaagatgtggctgtggcattccacccaggaagagtggcgggccactgggaccctgattgagaagattacctacgcgagcatgtgactggtgggcagaactaccagaccatctaggtaatcccttgtgacttttgagcgttggcaacctactgttactgtcagaagcgtcctggagcccgaagcactttggccccaagtcctacattcgtttacccactcacccagatatgaatccccaagcagaa

SEQ ID NO: 122980 - DNA, 795 bp, Homo sapiens
accccggggcgctggccgcggtgctgaaacggcgccctccgcggacggaggagggggcggggctctcgggagccgtgagccgggaagagggagacgggcagggcggcgccagcaggccctggtgggcttgggaggaggcaggagactggagacagcctcggctagagcggacacaggcacctggcaagctttccttgaccaaatcaaggttgtccttgtcctattaagcctcttccccttgccttgaagggacctcacctggtgccctgacctcagcctcctccccaaaccccgctggggagtgacctgcttctaggcctccatccacaaagctacggacttgcagcccacgggaccccagcccagggcctgctgccctcaccatggtgaaattgctgccggcccaggaggcagccaagatctaccataccaactatgtgcggaactcgcgagccgtgggcgtgatgtggggtaccctcaccatctgcttctccgtactggtcatggccctcttcatccagccctactggatcggcgacagcgtcaacacaccgcaggcaggctacttcggccttttctcctactgcgtgggtaacgtgctgtcctccgagctcatctgcaagggcggccccctagacttctcctccatcccctctagagccttcaagactgccatgttctttgtggccttgggcatgttcctcatcattggctccatcatctgcttcagcctgttcttcatctgcaacacggccacagtctataagatctgtgcatggatgcagctggctgcgg

SEQ ID NO: 122981 - DNA, 505 bp, Homo sapiens
tcagtgatttctatttccagggtatcctgatctgctgtgtctttagataggttgccggcaagaattataataaaccaccaaaatctgccttaagttgattagaaaatacaggcaaccagagtaattaattctgccagcatagccttcgaaatacaaattttggaattgaagggaattggtgcaatttggcaaaaaaggtttgtggttagacagatgaggttcaaatgctaactttggaactgatgggctctttgagcaggtgatttagtcacttgagcctcaattttcacattcttaaaatggagataatgatatgacttcacagggttgagagttaaatgagatactgtgtttaaggcctagcactgtaattagcacatcataaggattcagtaaatgatgcctaaaagtaataaagttcaaatgcagtttggatggtgatatattaaaagaaccagatccctgtttctcaaaatttaaggtgtttatcaatcggggactttta

SEQ ID NO: 122982 - DNA, 130 bp, Homo sapiens
tgtggtgggaagggggttttctgtcaagggattaggttcccctggggcctgtcctgcctcctccatacccaccacttactgcccctgtgagctggctctacgctttggctttgaaccctgtacacagagt

SEQ ID NO: 122983 - DNA, 214 bp, Homo sapiens
ttggagactttcaatggcaactgtaacaaactctgcttagtaccacagttggagaaaggtttacaataatgcccagtacaaaatgttattcagacttactactcatgcataaaataaaactggttctcttcttaaacttcgttacatattagataaaacactatcaagttttggcctcatttgttcataatatgtaatttaattcagttgctca

SEQ ID NO: 122984 - DNA, 293 bp, Homo sapiens
tgaattttctgtgtctagcataaagtttggcacataataagtattcaatacatatgaattgagtgaatagatcaatgacttgtcaaaaatgcccatattaaatatcaatgtagctaaaattcagctgtgaggaggaggtagatagatgataaattaagttctgaaagaacaccgagattctgcttttccatgtgaataaaatatgggggtctgaaatccactccgcaacgtcacagtaccagttccttctggaacttcttagtataatcacgtcctgcttttaagactgggct

SEQ ID NO: 122985 - DNA, 149 bp, Homo sapiens
tcttatttctaacaattctgtttctcctcatttactattaggtgttttactaaccactgtcctgtttaagatactgtttttcaattttccatgtatttttgacacatttctgtaaatttcttctacaattgttttagagatgacaagta

SEQ ID NO: 122986 - DNA, 201 bp, Homo sapiens
ttttttattaagaagtgaaatggattttaaaaagatcaactaagtctatttaaaaataattctccttcaactataattacttcacggtaattctccagagttcaggaaaattagagagaactagtacccactgcagaatgatacaaagggcaggccaagcagctggcttttaagtcaaagaaaatgctcaatatggctgtg

SEQ ID NO: 122987 - DNA, 473 bp, Homo sapiens
atgaaaacaaacaaaaaaattaatgtattataactcactgaataaagtatcaaaccaagagtccatattgataaaaattaatttgattttatatagtttcaaggcacctcaccatgaaatgtttattatttgattagagaacattctgttacagtaaaaaagcctgacagacaccatcttaagtcacatactacattctgacgattcttatcgattcatttgacttgtctgcaagttgtctactaagcagtatgtatctgctaccacctatctgcctgcctgcctatctatctatctatctatctatctatctatacatacatactatttatctatctatttatctgtctagactactctctctatatgtggtgctccccttttctctttcaggtgcataatatagtattaatcatagtatttgattcatgattcttattattatcgatccatgacctactttggcttggcta

SEQ ID NO: 122988 - DNA, 230 bp, Homo sapiens
cacccacctgtcagccaaacgacatcccttgcagcctttacaggcaagtacttgtctcttggggtttgtccaaataatgtcactgtggtcacagaaatcacagagtagtgacactcatgctgcaggcccaggctgggggtgcatacctgtgttcttcttgccgtgctttggggtagctccccccgcctttcctatctgcactggaacagtgtagacccagacattagaat

SEQ ID NO: 122989 - DNA, 1021 bp, Homo sapiens
gcaattcagccatatcttcaggctccacttctaattctagttctcttgctattgctaccacatctgcagttgaactcagcttcttccaaactcctgtcaatgttttgacctcctcccatgaatcagaaatgttcttaatggcatctagaatggtgaaactctgttactttgctcagatccaccaaaggaatcactgtctatgggagctatgtgtaggagattggtcactgtggtgggaaaaattgtagaaagatgcaaaccttcttggaaggccgggagattttacaaaagcttcagaaaaggatttggctgaaggcagccagattctctcaccctgtgcctgaacgcttaggttagataacaaggagatgtaaagaaactgatctagataacttagtttacttagtagaacctggcctttaatcatctgagtgcaggactgctggggctgtgtgtgtgtgtggggtggggaaggggggaagcaccatgttaattacccaaaagtgtgttgactcaaggcctttgtcattaaatctgtataaataaatgcctgcagcaccagcttgtcagggccacagctgctacaactctttacaacaccctccttggggtacatgagcagccgagtctcctagcccactctcactggatacctgtgtctgagtgcatccgttcatccatcgcttggtcggggtctgtgggtcagacccagcaactatggccttatgaaatgtatttcttaaataagacttgacagtcaaaattactctttgattcatgggctgcagaataaatgttgcatttgcaggcatgaaaacattattctcatcacacacctccatcacagctcttgggtaaccaggtgcattctcaatgaaaagtaatattttgaaaggaatcttttttattaagcagcaagtctcaacagtggaattaaattattcaataaaccatgttgtaaacagatatgctgtcatccagcctttgttgttccatgtatagagcagaggcagaatagatt

SEQ ID NO: 122990 - DNA, 452 bp, Homo sapiens
tggcagtacggatgtggtctcttttatgatagctatggggatagtagacatgcataacatgacaatttggtaccgtttccttttaaaaacatatcgtataggtctgtgaaattccctcacgaatgagatgctcatgtgacagcctcgtcaagagcagcccctgctgccactacccccacttctgtgctcttcagcattttttacacttcctgcttaaggttgtggatttgccagagagggagaatgaggaggaggagagagcaggaaaaatgataagtgacaacccttagggcagcagtagcttttaaagaaaagattgtaattctgttgaaaattgctggagaagagtgtgcagtccaaataggcatatgcaaattatatgcaaatcacacccagccctcctatttcataacctggatgtagcccttgggaaaatgctaatggagactagt

SEQ ID NO: 122991 - DNA, 371 bp, Homo sapiens
tatctgctagctagatttggcctgaggggctccagtttgcaacctctataagtgaatctcaacattctttcataataggtaaaggttgtctcaactacagctatccagcctaaatatgtttttgttttttttttttccttaagaatttcacagtagtgagatgctgcttttggtatgaggaaaagcaaatttagaagcttcattgcccaggtaaaatgttgctgggtcataatatgatggtgactctgatttcctgtggatctgtgaagttcagtattatacttattttctccagtaccccaggaatttctttatagctgtatggggtaaatattgtcctaagatttgataaagcaaaaaaatcttttttt

SEQ ID NO: 122992 - DNA, 690 bp, Homo sapiens
ctatcctctctgttttctctaaacttggatttgggtctaaaggcttgaatatatttaggtttaatatttttttgacaggaatacttcataagccatgcagtatgcttcattgcatacaacatccaaaggcacataaagtaggcttgtcttattaataatcctaaatttgatctcttagataaggtggtgacaagctatctttccattgtaagcatttccttctgcaattagcaagtcatttgtggtgtgatattttggcattagtagttggtaggaatttacctgcagtaatctgataaacacagttgggagcagtcgtttaggtatggctttggaagttaggaagaagaagaagtggagacaattctggaggaaatactaacccatctactttagggaacttggaatgcttctatgtgttggcatcagagcctagggagactaggagagaggaggcagaaagtagatgtcagaaagctttgccttctttgaaagtttgcttaggaccattttagccatagtaagctatggtaaatagaaaagttctgaagtagtttgatgttggaggattgcaagtgcttcaactggaacatctgtccagttaggctactaatccagtcctttttcattccagtgttctattaatcagcattggctcactgaaatagcagttttcacaaatgaaaagtc

SEQ ID NO: 122993 - DNA, 343 bp, Homo sapiens
atgatttccttgtaagtctgtagttacatgtttatattatttggcaactttttcattcctattgttatattgctgtagtatttagtcgatctagtctatctgatatttgcaagtcttctttgaccttgtttatatagtctccaacaaatttgaatacttacagattgatctttattagcagcgcattctataaaaggtgtggatttcaggattcaaggaaatgttaaaggcaaagtttaactttaatgttgtgcagttgtggggaatgatttttgtattagttacttaaaatttaatttcttttccagttttgggaatatagataactcacactaatttggtt

SEQ ID NO: 122994 - DNA, 415 bp, Homo sapiens
cttgctgagtcctagcagtgcagctgaggcattggagctcaacttggatgaagattccattatcaagccagtgcacagctccatcctgggccaggagttctgttttgaggtaacaacttcatcaggaacaaaatgctttgcctgtcggtctgcggccgaaagagacaaatggattgagaatctgcagcgggcagtaaagcccaacaaggacaacagccgccgggtagacaatgtgctaaagctgtggatcatagaggcccgggagctgccccccaagaagcggtactactgtgagctctgcctggatgacatgctgtatgcacgcaccacctccaagccccgctctgcctctggggacaccgtcttctggggcgagcacttcgagtttaacaacctgccggctgtccgtgccctg

SEQ ID NO: 122995 - DNA, 2092 bp, Homo sapiens
ctgaattgggtattactaatagtagtgataaattccagggatcatctcaaataaacttccaggtctatagttctaaagattaatttaataactttaatagtggaggtaaatagaaatgattgacattttgtcacatggcattatattttgatttctcataattcataccacgcactattcttccccttttcatttcctcacttcccattcttccccttcatcttttatctatctaagaaattctgtctccaggctgccagagccataaaagtatcaccaacaaacaataatggcaataacagcaaaagcagttggaattacttctgctcatttacaggcatatgccacaaccacaaccaagacccaaaatatatgcttatttttgcaggtgcacttctattattctaagactttatgataaacattttaaaacataatttaggaattacccatcaaactccttttcttcagtgaagcagagggaacatattgctctttaaaggaatgaattcttccggagcatgctggtatttgtgatggttttgtttatttcaaagactaattcccacttcaaatagaattttcaggtaaagaactaatttctcttctaacatccttggaaactgggaactggaaattgattgacataagcttgcataatgagattgaacctaaatgcacatgcttctgagaatatgtgatgggtttgacattacttttaggaaccaagctcttgacccaaaaagccacttgcttgttaataacactcttatgaaatacacagaagttcattatcccttgggacttcaaatcaccctgcaaatacctagtcagtcattctgtgttgaagtcatttatttctccttagtttgaatagctagaatcagatctaaatgttctctctaaagaattgtttttaattgaagaaaataaacattcttttaaaatgttctggtgcattcttttaaatacaccagattctaatttactttgcatgaacaaagcgcaaatatcagaaatactaaaatctattttgaaagtttgcacatagtaagctagtccagaatctgaccagaaatacctattttttacctttattatttgataatgctggcagcatattaaaacagtccaatatctgatgagtggttcaaaactagcaaagtatacaattatctaatctgaaaaaccactttttattgattgatttgcgtggtttttcattctttgaaagtagagatcttgactaagacattcaatctgcgtagcagtcataaaatttagtatcccctttgtgacatgctgtgtgtggaagggttggggaggagctattgataatttcttaggacatcgagcacaaaccaggaccatcctgagcaaagtatatggtcagtatatacttaaagacagtttatagaagtgatgataaataatccaaagatggttctattgtcataaacttgagcaatttcccccccaacactcacttaattggttctctccaataaatattctttctttaaaagtttcaacaaagttttaaaggtctaacttttacttttgacttattcgttttgcctggaagcactaaggcttacagtctgtggtgactggcagtaagaatcaacatggttttcctttttctttttctccagtgaaaactatttccactttaagtcttctgcacacggcaattaatgagaggaaataatactccctgaccaaatcacaaacattctgtataatcatataagttacttttccaagctgcacaaatgatatgtttcacatgctgagaattgttaacaagtacagtactcaatacgcaatgttagaacttactttgtttaaagcaaatagactgagataaaatatctatcccctaaccccaagatgcttacaatcttcctagagttcaaggcttgcttataaaaacaacaacaacatcaacaacaaagcaataagaggcaatgaatggcaatacagataataaacaccagaaagaagttcgctgtaagttggtgtagttatggaaatgatgatctgtagttcgtctgagagagttgcaagattctaaacagagagctttttc

SEQ ID NO: 122996 - DNA, 2001 bp, Homo sapiens
ctgaattgggtattactaatagtagtgataaattccagggatcatctcaaataaacttccaggtctatagttctaaagattaatttaataactttaatagtggaggtaaatagaaatgattgacattttgtcacatggcattatattttgatttctcataattcataccacgcactattcttccccttttcatttcctcacttcccattcttccccttcatcttttatctatctaagaaattctgtctccaggctgccagagccataaaagtatcaccaacaaacaataatggcaataacagcaaaagcagttggaattacttctgctcatttacaggcatatgccacaaccacaaccaagacccaaaatatatgcttatttttgcaggtgcacttctattattctaagactttatgataaacattttaaaacataatttaggaattacccatcaaactccttttcttcagtgaagcagagggaacatattgctctttaaaggaatgaattcttccggagcatgctggtatttgtgatggttttgtttatttcaaagactaattcccacttcaaatagaattttcaggtaaagaactaatttctcttctaacatccttggaaactgggaactggaaattgattgacataagcttgcataatgagattgaacctaaatgcacatgcttctgagaatatgtgatgggtttgacattacttttaggaaccaagctcttgacccaaaaagccacttgcttgttaataacactcttatgaaatacacagaagttcattatcccttgggacttcaaatcaccctgcaaatacctagtcagtcattctgtgttgaagtcatttatttctccttagtttgaatagctagaatcagatctaaatgttctctctaaagaattgtttttaattgaagaaaataaacattcttttaaaatgttctggtgcattcttttaaatacaccagattctaatttactttgcatgaacaaagcgcaaatatcagaaatactaaaatctattttgaaagtttgcacatagtaagctagtccagaatctgaccagaaatacctattttttacctttattatttgataatgctggcagcatattaaaacagtccaatatctgatgagtggttcaaaactagcaaagtatacaattatctaatctgaaaaaccactttttattgattgatttgcgtggtttttcattctttgaaagtagagatcttgactaagacattcaatctgcgtagcagtcataaaatttagtatcccctttgtgacatgctgtgtgtggaagggttggggaggagctattgataatttcttaggacatcgagcacaaaccaggaccatcctgagcaaagtatatggtcagtatatacttaaagacagtttatagaagtgatgataaataatccaaagatggttctattgtcataaacttgagcaatttcccccccaacactcacttaattggttctctccaataaatattctttctttaaaagtttcaacaaagttttaaaggtctaacttttacttttgacttattcgttttgcctggaagcactaaggcttacagtctgtggtgactggcagtaagaatcaacatggttttcctttttctttttctccagtgaaaactatttccactttaagtcttctgcacacggcaattaatgagaggaaataatactccctgaccaaatcacaaacattctgtataatcatataagttacttttccaagctgcacaaatgatatgtttcacatgctgagaattgttaacaagtacagtactcaatacgcaatgttagaacttactttgtttaaagcaaatagactgagataaaatatctatcccctaaccccaagatgcttattatctgtattgccattcattgcctcttattgctttgttgttgatgttgttgttgtttttataagcaagccttgaactctaggaagattgtaaggtcgacg

SEQ ID NO: 122997 - DNA, 335 bp, Homo sapiens
aaaatgtattctaaacctgcaaaataaagccctagatagaatttgtttacatgtactgattaattagaaggcttgctttgtaaggaagcactatgcaaattattttttctcagttattagtctaagaaagagacaaaaataacttttattacaaagaaatctctgcttgcatccatattttacatctttataaaaatgttttaaaagagaggtatggccaggagcagtggctcatgcatgtaatcccaacactttgggaggctgaggcataaggttcacttaaggccaggagtttgagaccagattcagcaacatagcaagatcctatctctacc

SEQ ID NO: 122998 - DNA, 436 bp, Homo sapiens
caccatcgagaaagtctgtcagccccgggatcttccaggaaggggtcccgtagcctgagcagagaatgcagcagagaaggcacctgagccggccagggctgtgtcaaaaagcagcagagacctggcgcttcaacagcagaagtgtgtcctcccacagtcctgggggctgacgtcagagccatgtccgcagggcgggctccttctggcaccatgctccctggctctttggcggtcatctttcccccactcttcccatcatcatccctctacttgtctctgtccacatttcctcttcttgtattgggctagggcctaatataagaccctagcgaccctcattttaatttagttacctttacaaagatgctacctccaaataagatcacactgaggacctggggctaggacttcagcagatgaattttgtgggagggac

SEQ ID NO: 122999 - DNA, 505 bp, Homo sapiens
atcatgatgaggacagcaccaaaagtttggtgttaaaccattcataagaaatccacccccatgaaccaatcacctcccaccaggatccaccttcaacataggagattacagttcaacatgagatttagagggtgcaacatccaaactatatcagcagcactgaacaagccagacaaggttgctgccctcacggagtttacattctaatcccaaggggagggcacaaaaaaattacaaagtatgtggacataaataaacaaggcaatatgatgtgaaagaaactggaagaaggggtgaccattttcaagagtgtggttaggaagggcctctttaaggaagtaagatgttagctgagacacaaaggaagagaagcagtagatcatagggggaattgaagaaaataacgtttgagaagatatagcttgtgacaagatttttgaagtagaaatggtttgacatgttcaagcaacagagcagaacagttgcttggagcatggtgagacag

SEQ ID NO: 123000 - DNA, 676 bp, Homo sapiens
gatgttggtaaatatcacatggagcccctgggaggctaaaacaagatactgttcatgaatattcattatgaactgtgaagagctgttcacatttaaggaatttcaagcctcatgtttggatttgtgcatgcttctaattgcattcataagtgctgtcttcttgatttgtcagaagacagtaaaatgaatttaactctatgtggaattcacttttttatcttgaaaatgaatactgggatattgtagataatttttatcttgttttgatatagtatggaaagacccaccacaatttttagtaatgtattgctgcttatttaggctggggacattgtttttagttttgtttttgttaaccaaattagaggctttatattccctttatctttaaaaaattgtcatcctctctcacaagacctgttttagcccctctaggaggctggtttaaggtgcctatggtaagaggagctatatttacataggtctagttatggaaggtgccatcagttatcataccctgttctctttggggcttattctcttctctattttgatgtgacagcataaatgtgcactgtggaactgtccgataatagaagccactggagtacatattttttcttttattgtttctggtccttagcatctatatagtgaagggattgctttgtgaatt

SEQ ID NO: 123001 - DNA, 167 bp, Homo sapiens
tggttgcattttacttgtctagctatcgtctctttcctgttgactatctggaaatctctgatggggtctttaacagaaaaagtctactccttcagaccttagtttcatgccatataccacatatgacaggtctgggaaggtctggaatgtgtggataaaggcgatgg

SEQ ID NO: 123002 - DNA, 418 bp, Homo sapiens
agattgtaggatttttttgtgctagcaaaacactttgtgaacatgagttttagctagataatgctgatgtcttaagagcaagcatttggacatgtattgtcatatcttggttttgtagctggacgactatatttttattaggtgaaaaacaatgacttcatttcttgggtaatcattactgcagttgcagctagttaccttttaataaacaatcagtgcctttcttttgtggtcctgtgtttacttctaattttggtgctttctttcccagttcatggttaagtttgtggaaagagttgccacactctccttaaatctgaattatccataagctcctgttcatgctacccactgaaactgctccagcaatggtcaatgaggatttgtactgtgaagcctaaatgacacattttggccc

SEQ ID NO: 123003 - DNA, 173 bp, Homo sapiens
atctcttttgctctctccttcaagagagacctcatcccattcagttgcatccatttatttattcatcttctgcctcctgggctcgagagatcctccagcgtgagtctcccaagtagctgggactacaggctcacaccaccatgcttggctaattgttgtaggttttggagaga

SEQ ID NO: 123004 - DNA, 387 bp, Homo sapiens
ttttcctgctgttgcaaataaatgacttactttacacaagtctttgtaagtaagaatcactggagggagaaaggggtgtagaacaggctcttccagcagggacaccagatgatggatcacattcacatcagccgtcagttaacagaaaagaacaaggaatgtagaattccattatgtctcctgctcatgtattttgaggaagcatttcattccattgaatagagtacagttctcaccattgtgacgcaaaaataacacctccttttatgctaaaggtccatttaagaaataccagttaaaaattgaacatttctaacggagagaagcttcagtgtgctttttcttactagtattattgctgtgattacattaaatgcaaaaatattt

SEQ ID NO: 123005 - DNA, 743 bp, Homo sapiens
gttaatctatggccacagaatgtagtttttaaaaatcatacagttttctctggtttgaagaatgattaatgcatcatcacctggccttacatggcattcttaaaatgtatggacatggatcaactgatctttaatcggattttcttctctgagatcacaacattgaaaagcttagatttatacattagagatatagtaagggtgggggaaaagactggaagtgttgattattaattgatctattgtataaatttgggcaagttacacaagtttatataagacaaatcttggaattatataaagatattccttgatttaatattttttattatttatatccatgaaactataattttcactaaaaatgtagcacgagacagtatcaacttactgataaatatgaagtctttgaacttttcttatatctaaaagtcacagcttgagtaggcttttggagtctgaatgaaattatcaggaagatactgataatctagttttcttaaatttatctccatataaagttcatatatatttatctaaattttacgtaagatgaatgagctgtgatattcaatatttaaaagactatttactcttggcatttgcatgggaagtactctatcctatggaaaattttgctttaaaggtgtgaccatattggcaaccttaaggtttttatttcattttatcaatgttttaaaaactaaacccttcaaataaatcaaggtggcttcatcttatac

SEQ ID NO: 123006 - DNA, 348 bp, Homo sapiens
cctgctaagaagtgctgatttctgatcacatcattaattaatcaacaactgcaatctggtaattagcaattatggaaaagcaatcccatcctcagaaagcccaggagatcgcaattccggtataattttaaggtttacattattcgactcaaccaaacagactttctctgctaagcattggtaaccacagaggaaaggcaaatatcattggagatgcaaaaaaaaaaaaaaaatttcagttaaaaaggcaccctgattttgggggaccaggtcttacctttctaaatctatttggattaggacagtatttcccaaacttgcaggtgaaatggaactggggatccttta

SEQ ID NO: 123007 - DNA, 678 bp, Homo sapiens
gctcactgcagcctctgcctcccgggttccagctattcgcctgcctcagcctcccgagtaactgggattacaggcgcccgcccccaccacgcccagctatataccagtgttcttgccacaacccttcgagtctctacaattttaggtgaatagtcagataacactggggcctagaaatggtaagaaagaggttggttggtgtattatcttctgggctcagccttttcagtttacaagtatccctctcccagttttcctttttaattatagggagagttgttttactaatactggctttgtactgaaagaagaaagcaaaattaaccagatgacactattgggggaatgcagaaggtaaagttatagtttagaactttaagaaaggattttgtttctttttctttttttttgagacggagtcttgctctgtcacccaggctggaatgcggtggccctacctcagctcactgaacctctgcctcccgggttcacgccattctcctgcctcagagtagctgggactacaggcgcctgccaccatgcccggctaattttttgtatttttaatagagacagggtttcaccgtgttagccaggatggtctcgatctcctgacctcgtaatccgcccgcctcggcttcccaaagtgctgggattacaggcgtgagccaccgcgcc

SEQ ID NO: 123008 - DNA, 633 bp, Homo sapiens
accaccacacccaactaatttgtatctttagtagagatggggtttcaccatgctgggcagtctggtctcgaactgctgacctcaggtgatctgcccgcctcagcctcccagagtgctgtgattacatgtgagccgccatgcccagcctatcttcattcttgttcctcacacctgccaggtatgtgctcatctcaagggttttgctttggcccttccctcctcctggagtgttctttccccctgtctgaatggatacctccttcatgtcctggaggtctttattgacgagtcactctgaatgagtcttccctaggtgctcacgtatggaaggtctccataccccaccaagtaatccagacgcccgtggcttcctgtgctgctctccttggcttatctttctctagtgcattatatagtttccttatttactacttttttgtctctgttactggaactgtcccactaattacttcatactctctttcatgttttttactttctctttaaaccaacccttctccagtgtactgtataatttccttatttatgatgttttgtgtcttccactagattgtaagcttcacaagcagagattttcgacttactacatttattttgtatcctcagcactta

SEQ ID NO: 123009 - DNA, 348 bp, Homo sapiens
ttcatccttgtgctagctcaggtttggtacctaacatggtgtgaaataagaccttaattgcactttcacagctgtgtttagcacgtaagctgatcatgaacaaattctcttgtcagagataaaagcttgaaattccaagactatgtaaaatcacagacaattagagtgttctgtgtaccgtacaaaataatggtaaaaaaaattcaaacggtcatagcacagtatagtttaaactgctgttttactaattcttctggagtgagaaacattttctgtagtagttaagcacccaaagaagccattttaccttgcctgttaaaaaatgtgtgcaaggtctgtggttcaaga

SEQ ID NO: 123010 - DNA, 397 bp, Homo sapiens
aaggtctactgtcctaagggggaagatggaacacagaaaacacaccaccagagcctacacaggtgaggtgagacagatcttagtggggaagatcagggaggacttcctggaggaggagccatttctagaccagcttgaatgtggactcacattccagcttattcccagctcttctccattcttggttgggggtcccaatactttctcaaagaaagataagctggggggactttgcttctggtggctcacagctgtttagccaggctggttcatcaaaaccaccattttcatcagggctggtaagagggtagagatagtggaggttctggtacccactgagggtacccacatttttgcccatacagggagggtatgcctctctgtttcttaaccctga

SEQ ID NO: 123011 - DNA, 381 bp, Homo sapiens
taacaatttagggagtgctgttacaactcataacttcacggaagcgaggaggaggtgcgaggaaaagccggctggcgtgttaatttgggattttctctctttgaagcagaagaatacaaacacaactcattttggacatgtggctgaggttgaagtattttcagaatactcaaggaaagacgtttaggacgtaggtggtgatataccccagccactcaggttgatttaggaagcaagaaattgtaggaatggatgagatgacctgagagagagtgctgctcaataaaaatataacgtgagccacaaatacaagccacacacgtggttttaactttcctagcagtgaccaggcgtggtggctaacatctctaatccaagtat

SEQ ID NO: 123012 - DNA, 163 bp, Homo sapiens
atttgttctttcctatgtaacagaggacagatgggaattcatgagaatcaaattagaaagcctaaagtgcactcacagttcctaccatatggtaagtacccaataaatggccactattaccatattcctgctcaaacaatgtccaaactcctaaccctagcat

SEQ ID NO: 123013 - DNA, 276 bp, Homo sapiens
aaaaaacactatgataaagttagaaaatctaggacttgctagagatgaaaattaactggtttttaaattaaccggcagagggctgtatctaaaattaaacttatattactttcactagaggaaataccatgtgagagcttttctaaatgaaccctttacttataggaagttaatatttcataatgccaggagaaatacagcagtaatacattttcagcaagtaggcacttttcgccttaagaaaaataaaaataacttgtcagttacacaatccta

SEQ ID NO: 123014 - DNA, 744 bp, Homo sapiens
aaacaccaaagctggagaagccatcagcaattgtggaagattttcttttgctttaatcgttctgtacttggcagacactttgaaatgcgtatgggaacgtaagttgcagtccagatcaatccagcataagttgcagagatgaaatgtctgaatcactatagaatttacaaggtgaactaaggtgaaatgactgatttactatagaacttagaactaagaccacaccatccaacactactgtatccaatggaacatttgacacctccctatggaaaagaaacatttctaaggacattatggctcagggagacaagcaatatgttgttggtactgtgaaagtacttttgaaaggacaaaaataatcttgtgagtgagggtgagagtttatttatttattttccatgtctctaggttgagaatctgtcatctagagaatttggaaattaagatttggttagctagttttcaaaatcactcactcagtttcctcctaagaaccactgtgtgcagataactcatttagcagagcttcttcagaatttagacagtgctaaggaaaggaagattggcattaggaatcagttctatttaataccttgctgccttccatctgaaattcctttcactcacattatccagggactcacatctgcttaatttagctttgcaagatgttgcatttatatttccttgtatatctttccattgacttagttaatacatgaatttcgaggtactctctac

SEQ ID NO: 123015 - DNA, 606 bp, Homo sapiens
atggaattaatgcttaattaattttcctagattgttttctgaatgtagttttttctaagaagaatgatattaaagttacagaagtaatctgtataagaaatctgagtctgtgttaaatagaaattttttattgttttgaactgatttccttcaagtaaatgtaatgaaatgtaaacctaatccagattgtttaaagaaacttgtatgaagacatcttttcttccttaatgaccaaatgtgatctaatagttcctgtacgttacttttcaactctaaatttcattaataatcatattaacggccgggcatggtggttcgcgcctgtaatcccagcactttgggaggccaaggcaggcggatcatgaggtcaggagatccagaccatcctggctaacatggtgaaaccccgtctccactaaaaatacaaaaaaaaaaaaatcagccaggcgtggtggcaggcgcctgtaggcccagctactcgggaggctgaggcaagaggatggcgtgaacccaggaggcagagcttgcagtgagccgagatcgcgccactgcattccagcctgggtgacagagggagactccatctcaaaaaaaaaaaaaaaaaaa

SEQ ID NO: 123016 - DNA, 351 bp, Homo sapiens
gaattctctctgctcagaactcttcgatcatagggcatatttgagatcactcataacaaagaatagatagcaagccagacacagcaaaaacaaagtcggcctaaattcactttagcgagtgaaggtggctcgcgagaggggctcagatgataggcactgcagttagggcagcaacagagctcacaggaggccagctctggccatgaggccatctgctaaggagacttccagcataagaggccggagggcgttgaaggcctgggctgtggctggcactggggcaggtgcaagagacacttaggagtttcaatccgatgcacacagtgcctgctccatctcctgctctcttct

SEQ ID NO: 123017 - DNA, 306 bp, Homo sapiens
cagctttactcttaatttacatatttttcccttgctctaatgcacatgctagaatctctagtataatggtgaaatacagccatagatgttccaatattaaaccagtatttcttatttcaattagctaatattttgctaaagcttttctggttctacaattttgcatctatgtatgtatcaatttttacatctgtgttttctaatttttctgattttggtattatggtaatcataattaaataagtgaaatattgtggaatcaggaggaccagaaagagaccttggggtgtatacaggaggatatct

SEQ ID NO: 123018 - DNA, 430 bp, Homo sapiens
aaaagtggattgggggtaatacattgtgatagtctttgcaacttacagggaatgggacaggccattagggtgtatttcccaggtttccaactgagaacctaaacccagagaagtgagacaaaccatctaatgtctgtatcctactattgacaggctgtgtgatgttggatttctcatttactctctctgaggtccagggtccttatttgtaaaatgatgacattcgtctagagcagtggttctcaaagtatggtctgggggtcttcaagagcctttgaagagtatcctaggtcaaagctattgttataatactaagacataatttatcttttgcactctcattttctcatgagtgtccagaggaatttttgagcagctatctggtgtgatattataacaggctgaataaagaagtagataagagaatcta

SEQ ID NO: 123019 - DNA, 261 bp, Homo sapiens
acactaccattagcattaacactgcactgcctctactactactgctattttattagcagcattagcattttagatgtttaggtaaatgggagggaactgtagtagcttaatttgaataaataattcagcccactttgttacaaatgaaagtataggaaaaatgtatttttcttgacttacatacctgaaattaataaattctgttaatatggtgtacatttctgagtttctcatttttagaaaggcagtaaggggttcttg

SEQ ID NO: 123020 - DNA, 401 bp, Homo sapiens
ggggaaagaaagtgcccccagcctagaggaggcctcattctggcttgggtccccactctggggatattctctaggtcttaactgaacatgtgaaatgaagaaccgcagctgcctactctgatacccctttcaactccatgattctgtacaaaattagttccctagttctcccaaagtgctgagtgatcaaggggaagggaagccctgctcaatgctgtgagagaacaggtaggaaaaattaggtgtcttttaaaaatatttatctctggctgggtgtggtggctcatgcctgtaatcccagcactttgggaggctgaggcaggcagatcacgaggtcaggagatcgagaccatcctgcctaacatggtgaaaccccgtctctactaaaaatacaaaaaaaa

SEQ ID NO: 123021 - DNA, 320 bp, Homo sapiens
atccctaaaaaataagccatttagtttttgaactttctgttttctttctgaggcagggtcttgctctgttgcctcggctgtagttttgaactttgacgtgagggaattctcctgcatggctgctcctacactgcatggctctgagcacctgctctgtgtctatttttgtcctccattctctccctgagacccacccacactgacatggctcattttcattgctgcatggtctcccgtcgtctgaggggagcatgggaaatgtcttcatcttcccgtggatgagtggttggccaggttggggcccttaggactgtgttttg

SEQ ID NO: 123022 - DNA, 165 bp, Homo sapiens
gtcaattgactcctcaggcttcctgacaatgtcacctttgaggaaggcgccctgattgatccactttctgtggggatccatgcctgcaggagaggcggagttaccctgggacacaaggtccttgtgtgtggagctggtaagaaacagaagccaccctgttgcggg

SEQ ID NO: 123023 - DNA, 455 bp, Homo sapiens
attagcagagaagacagagggctttcagagctggctgtggacatggcatggccatggctgagtaggaacagatggcctgtgtagaagaggtgagaagaagaccatcctgaaaaggtgggtaaaccgttgacacaaacgttccatatttgggtagtttggactttatcctgcagatccttcagtagggcagcaggggagctactgaagatattttgtatggagggtgtatgtgttattacgtaaactatttcagatacaataccaggtttccttttgtaatgcgattgtacattcaggtggacatgagagatttcaagatttctgcctcacctcatgttgttgcttttttgaccctttagcttgctttctctactctgttaacctccctttgctgtaattaaagttaaaattattaggggaggtttggtattattttacttatgtttttgagatag

SEQ ID NO: 123024 - DNA, 579 bp, Homo sapiens
cttaggtgatctgcctgccttggcctcccgaagcgttgggattacatgcatgagccaccgtgcccggccttatttttctacacagccaaatgcacacagaccatcttactgagctgtcttcacttacatttttgctcagtggtcttctttttgtaatggcctttagtctttttaaggctcagctctgttaatactttcttgagggagctttgttacccatttccttaatgagaattattttttctgtcttctgcttccatagacttaccatatctttcttgtcttatgcttatttgttgactgcttcttcccgtagagtatgtgttctgtgagagaatactttttcttacttaacctgtttaagtgcttgggattgaggggaaataaggatttaagaaaccatgaaagaaggtctctgtccttagcagtttactgtttataaatttcttccactgtgtttattaccaagtcactttatcattaaagcatttgattatctattccctttgaagtcaggaagagaccgaaagcgaatctgagattcctcacatgggggcgtcgagctgatttgaggccatt

SEQ ID NO: 123025 - DNA, 258 bp, Homo sapiens
cagggcatgtgtcgttgatatatttttaatcctggtaaaaggaggaggttcaaggcagaaaactcatcaaagcttaatgacaacaatagcagctaacatttgtgaggctctaaggtaaaacccaaggctaagactcttcatgcaaactaggtcaagcagcaagctacaggttagaaacaggcaaggcagcaaaacagtcacatgggtgaactctgggactctgcagtcacactctgactctcctgcttgcactgggtg

SEQ ID NO: 123026 - DNA, 402 bp, Homo sapiens
agtttccccttccaccctactgggctccgaagccagcattgcttcagacaccaaaggtgcccatgtggggctcaagcctggtgtccaataaatatgtgtgtcattgacctaatgcacgtccagccaatggaaacctcacacttctgacttcggttttaaggttctaatcctgaagtcttaacagtttacacatattgacctgaggatattggatacttttaattggagagggttgaattcctctaaaggacttcatggacgaagaagacagctagaacccctggtttcctgctcctcagtggagattccaggcaggaggcaggcagcaaacacttgcattcctgcgaagcgccaggcatggtgctgggcgcgggaaagacaccagtgaagacgcagaacgcg

SEQ ID NO: 123027 - DNA, 414 bp, Homo sapiens
ctattgcagagaccacgtcttcgccagcagctaagagcagtgcatggcagtgaagggacacaggtgacagacgaacccgcagcaaggacgtctcaagtgtggcggctttggaaaataaggcacaaacttgaaggcggggcgggggctgggtcggcaaggtccctgacagcaacacaaacgtccatcccctccccgacagacacggaaccagcactggtggctgcaaaccacgccctctccactgggcctgcgtccctcctccaggaaccagagctgcaaccgtgactccacttttgggtccatgccacaaccctgttctcctggaccccacggctgacagcggtggcaagctgggtagcagggtggtcagagacacagctctgtgcctgcccatcactcaccctggccgagtgt

SEQ ID NO: 123028 - DNA, 637 bp, Homo sapiens
taatttattttggtgatgaggggtcctgatctcttgacatacagactgaaaaaatgggggttgtatgtgtgtcctacatataaatctgtcagcaaatattgccaccactgaattctattttctcagattgccctcaattttgccactctgaaataatgtgctgaataatctcagcaaccagaaatcatcatccaggaatgtttcttatgagacagctgatttattcggattcactagatcccttttagtagatttaatccccctttgggaaatgtaatagcaagaaaaacatcttttaaaagtgctggagtgaggccacttctcctagaagaagccagatggtcagatatatatttctcaaaacccatcttaaccttgagtatatgaagggatactacatttcattcctgataaattttggtttccatgttggcattgagctccaggctttctatgtgttgatagcggagatttggaccctccatccacagtctctttctaagtgaaggggaagattggtttttgctgttccttgttattccaaaagctctggtctggggcccatgttcaccctggctctcagtctggtcagatgcaatgttcttcaaaggtggggacctacttgttatcagagtag

SEQ ID NO: 123029 - DNA, 362 bp, Homo sapiens
aggaaggcagtgaaaggcatgagctggagtgtatcaggaatacaacagggaaaggtgaagactgtgattaactgcaggtgcctttccctgtttagagtgggcaggggcccctcatcatggttgattgttggcatttggaaatccatgctaacttttcagatactccaatttttcaaaacaagccagaaagccaggtacttatgtgaaaacactcatatttaaaaatattggctcagtattttttaaaatcactcaaatgggcaaaataaaacataactgaattgtgttttttttttttttagattgggtctcactctgtcacctaggctagagtgcagtggcatgatcatagcttactgtaa

SEQ ID NO: 123030 - DNA, 662 bp, Homo sapiens
tgactctaagcatccccatgtcgcatggctcattagctttgtgtgtgaaatgactcaatttttagttgactatgatctcacagacactggtatggatgtggggaaaaaaaacaacaattttttctaagtccatacaaatctcattatttgaggttaaattcatgtagtttttgtttatcctttattcatttctttatttattactatttgctcaggaaaggtcatttcctcccctcctctcaggctcccttcaagttatcaagaaaaataaaccaggtctattcaacctcagggtaaggatggattggatcctggccagaattgtcttcccaactgggagtcgtcccaatctcccacccacagagataaaaccaaagacagtattgctggccttttccaaggagaacagaagataagctgactggctggcaagatccacgtaccgactagagtgaccatgtgactcactctctgttagccataagagttacttagttgttatagagccctgtggaccttacatgccagtgtgtacagaaatcacaaaggatgcttgttaaaatgtagattcctgagattgtgtttcaatacatctggaatggggctaagaatgctacatttaaataatatatagtagacttactttgtgttcatttatatgc

SEQ ID NO: 123031 - DNA, 218 bp, Homo sapiens
tgcctttttctcgtacgtgtttttctctacctctaaaatgattgcttgttcatgtgttcaatgcaccgtagaggatacggcaagtgccaataccataatcttgccctcagggaggactggggaaggagggcaagaacacatttagaaaggtataataggctgggcacggtggctcacgcctgtaatcccagcattttgggaggctgaggcaggcagat

SEQ ID NO: 123032 - DNA, 397 bp, Homo sapiens
atataacaacgaagccaaaaggactaagcttgtacctaacatttaccaagcactggctacattcaggttgtttatatacaatctctccccgagacatcctgtaagctggttatgattattggccaattgaatagatacggaaacctaagttttggaaatttcaaggagcttgactaagatgatgacaagcttttagataggatactgaagcccaggcccacctatcagagtccaagctctcagacactatgctttgttgcttctcatagtatttcatgcttaacagcacagactcacataaataaacttccacaatatagtatagatacatggaggctaaggccatgaactgaaatttagtgtttccccaggttgaagtaagtcaattgtgttgtag

SEQ ID NO: 123033 - DNA, 902 bp, Homo sapiens
cagtggtacgggaagatgctaagacaaaatgggaagctcctactccatgtaagtaaccactcagtgttaacatcaatcaaaaagacatcccataaaagtgataaagtatcctggtagttcgaagagaataatataaagatagaatttggaaggagcaaagatgatgacaaatcttcctaactgctttttctctgagcagatttagaaactttcagaatatttataatcctgaagtttcagcagatccaaattcaaagtaatgaccaagcagggctattaactactccaagactagatctccagatgctggtgaagaatcacagatcatgcagaatttgaaaggtttgtttttgtcatagatagtatatgttctaatgattaataccggaaatctgacaaaggtcaaattctgataatgagaatgttaggtaataatatgcatcacacatgtaattaacttcattttactggattttatagactataatgaaggtcagaagactatcacactcaagtaggctattcaaaagtttgtttgctactaaaataaaacatcactgcttaatcttgtaaaatgtccagaatttaattgcaggccaattaagaatgtacgtaaatggcagaaatttcactttgaaaaaaacaagccaactataaaggacaaaataaagtgaattaaaaagtttccaattttggttgggcatggctgctcatgcttgtaatctcagcactttgggaggccaagatcagaggactttttgagcccaggagttcaagaccagcctgggcaacatagcaagaccccatctcaattttttaaaaaagtacccaatttttatgtgttgagatctctttagttatgaggctaacatcacctgcaagtgtcttttaaaagtaaacaa

SEQ ID NO: 123034 - DNA, 497 bp, Homo sapiens
tccacgatgttggaagtggggcctggtgggcagtgactggatcttgggggcggatttcccccttgctgttctcgtgatggtgagttcccatgagatctggttgtttataaaagtgtgtagcacctcccccttctctttctctctccctcctgttctagacacgtaggatgtgcctgcttccccttcaccgtctgccatgattgtaagttttctggagcctccccagccatgctttctgtaaagcctgcagaaccgtgagccaattaaacctcttttctttataaagtagccagtctccggtagttcgttatggcaatgggagaacagaccgatacagccctcaatcttgtataaccagttatattttctggcaatgctatggaatggagttattcaactcttacttgccaaaggagcagaatttctgaggcctttttgatggctgatggagatgactggatagaatattaaaagcgagactttcgggaagacaggtt

SEQ ID NO: 123035 - DNA, 1943 bp, Homo sapiens
cgcgcgcgccgcgcgccctcgccctgtgcgccctgcgcgccctgcgcacccgcggcccgagcccagccagagccgggcggagcgggagcgcgccgagcctcgtcccgcggccgggccggggccgggccgtagcggcggcgcctggatgcggacccggccgcggggagacgggcgcccgccccgaaacgactttcagtccccgacgcgccccgcccaacccctacgatgaagagggcgtccgctggagggagccggctgctggcatgggtgctgtggctgcaggcctggcaggtggcagccccatgcccaggtgcctgcgtatgctacaatgagcccaaggtgacgacaagctgcccccagcagggcctgcaggctgtgcccgtgggcatccctgctgccagccagcgcatcttcctgcacggcaaccgcatctcgcatgtgccagctgccagcttccgtgcctgccgcaacctcaccatcctgtggctgcactcgaatgtgctggcccgaattgatgcggctgccttcactggcctggccctcctggagcagctggacctcagcgataatgcacagctccggtctgtggaccctgccacattccacggcctgggccgcctacacacgctgcacctggaccgctgcggcctgcaggagctgggcccggggctgttccgcggcctggctgccctgcagtacctctacctgcaggacaacgcgctgcaggcactgcctgatgacaccttccgcgacctgggcaacctcacacacctcttcctgcacggcaaccgcatctccagcgtgcccgagcgcgccttccgtgggctgcacagcctcgaccgtctcctactgcaccagaaccgcgtggcccatgtgcacccgcatgccttccgtgaccttggccgcctcatgacactctatctgtttgccaacaatctatcagcgctgcccactgaggccctggcccccctgcgtgccctgcagtacctgaggctcaacgacaacccctgggtgtgtgactgccgggcacgcccactctgggcctggctgcagaagttccgcggctcctcctccgaggtgccctgcagcctcccgcaacgcctggctggccgtgacctcaaacgcctagctgccaatgacctgcagggctgcgctgtggccaccggcccttaccatcccatctggaccggcagggccaccgatgaggagccgctggggcttcccaagtgctgccagccagatgccgctgacaaggcctcagtactggagcctggaagaccagcttcggcaggcaatgcgctgaagggacgcgtgccgcccggtgacagcccgccgggcaacggctctggcccacggcacatcaatgactcaccctttgggactctgcctggctctgctgagcccccgctcactgcagtgcggcccgagggctccgagccaccagggttccccacctcgggccctcgccggaggccaggctgttcacgcaagaaccgcacccgcagccactgccgtctgggccaggcaggcagcgggggtggcgggactggtgactcagaaggctcaggtgccctacccagcctcacctgcagcctcacccccctgggcctggcgctggtgctgtggacagtgcttgggccctgctgacccccagcggacacaagagcgtgctcagcagccaggtgtgtgtacatacggggtctctctccacgccgccaagccagccgggcggccgacccgtggggcaggccaggccaggtcctccctgatggacgcctgccgcccgccacccccatctccaccccatcatgtttacagggttcggcggcagcgtttgttccagaacgccgcctcccacccagatcgcggtatatagagatatgcattttattttacttgtgtaaaaatatcggacgacgtggaataaagagctcttttcttaa

SEQ ID NO: 123036 - DNA, 1964 bp, Homo sapiens
ggagcaggctgcctgggtggttgtgggacgcgactcctcctaagccctggacacacttgccctccacccccgccctcgggcatccaggcgcccgtttttgagatagacgtgcccagagggaccccagccccattgcagtgtttcctaggccctgtgggtggaacccccactgggaccccccggggactcctgcaatgcgggctctgtgttcactggagtcctgaggaggtacctgcagtcaccagtgtccattccaggaggccttcaaggagccggctgctggcatgggtgctgtggctgcaggcctggcaggtggcagccccatgcccaggtgcctgcgtatgctacaatgagcccaaggtgacgacaagctgcccccagcagggcctgcaggctgtgcccgtgggcatccctgctgccagccagcgcatcttcctgcacggcaaccgcatctcgcatgtgccagctgccagcttccgtgcctgccgcaacctcaccatcctgtggctgcactcgaatgtgctggcccgaattgatgcggctgccttcactggcctggccctcctggagcagctggacctcagcgataatgcacagctccggtctgtggaccctgccacattccacggcctgggccgcctacacacgctgcacctggaccgctgcggcctgcaggagctgggcccggggctgttccgcggcctggctgccctgcagtacctctacctgcaggacaacgcgctgcaggcactgcctgatgacaccttccgcgacctgggcaacctcacacacctcttcctgcacggcaaccgcatctccagcgtgcccgagcgcgccttccgtgggctgcacagcctcgaccgtctcctactgcaccagaaccgcgtggcccatgtgcacccgcatgccttccgtgaccttggccgcctcatgacactctatctgtttgccaacaatctatcagcgctgcccactgaggccctggcccccctgcgtgccctgcagtacctgaggctcaacgacaacccctgggtgtgtgactgccgggcacgcccactctgggcctggctgcagaagttccgcggctcctcctccgaggtgccctgcagcctcccgcaacgcctggctggccgtgacctcaaacgcctagctgccaatgacctgcagggctgcgctgtggccaccggcccttaccatcccatctggaccggcagggccaccgatgaggagccgctggggcttcccaagtgctgccagccagatgccgctgacaaggcctcagtactggagcctggaagaccagcttcggcaggcaatgcgctgaagggacgcgtgccgcccggtgacagcccgccgggcaacggctctggcccacggcacatcaatgactcaccctttgggactctgcctggctctgctgagcccccgctcactgcagtgcggcccgagggctccgagccaccagggttccccacctcgggccctcgccggaggccaggctgttcacgcaagaaccgcacccgcagccactgccgtctgggccaggcaggcagcgggggtggcgggactggtgactcagaaggctcaggtgccctacccagcctcacctgcagcctcacccccctgggcctggcgctggtgctgtggacagtgcttgggccctgctgacccccagcggacacaagagcgtgctcagcagccaggtgtgtgtacatacggggtctctctccacgccgccaagccagccgggcggccgacccgtggggcaggccaggccaggtcctccctgatggacgcctgccgcccgccacccccatctccaccccatcatgtttacagggttcggcggcagcgtttgttccagaacgccgcctcccacccagatcgcggtatatagagatatgcattttattttacttgtgtaaaaatatcggacgacgtggaataaagagctcttttcttaa

SEQ ID NO: 123037 - DNA, 109 bp, Homo sapiens
gtacaactcaatgaattgtcccagggtgaacacatccatatacccaaaataaaggcagaacccttctagcactctaaaaatcccctcacagatcttaatcactaacacc

SEQ ID NO: 123038 - DNA, 220 bp, Homo sapiens
catttagtgctttttatcactattttgccactctaattgctctacacaattagagaactagacttaatagtaaattgaattatcacaaaatgtagacaatggctcagttcagataacatttaaggtcagatgccgtgataggtaccgtacttgacagtgaaaagccattaaaagattctaagtaggattgggagtagggtgaagtgaagtttataattag

SEQ ID NO: 123039 - DNA, 158 bp, Homo sapiens
tattttgtaagttattaataacaccatcaacctaaatatgcaacaagtgagtgactagttaataaaattatcttaaaaaccaactcagtgtgaagagtattaaaatttttagcttggaccatggtaaactgctcatgataccattaaaaaaagaatta

SEQ ID NO: 123040 - DNA, 559 bp, Homo sapiens
gttctgagggtcccggatatgcggtctcatattacattaagaattagagcatctagaaattgatgggaaaaagactaataattcatttgaaaaacagtcaaggatatggatagacagttcacaggaaaggaaccatagtggctcaaacatgcgaaaagatgctcaagctcacactattaagaacctaaatattcaacttacactgagataccattttcctactattagatgggcaaaaatccaaaagtgtgatcacacactctactggagaggctatagagaaccaggtgttctcttgctcttaacagagtgcaaactgctatgaccctttgtgcaggacatcttgtttgtgcttattacaacacagacacagctattccaattctgagaatttatcctgccaataaacttccatatgtagaaaatgacatatctaaagggttatcacagcaatatttgtgtttttttgttttttgggttttttttttgctgttgttgttgtttttttttttgggagacggcatatcagggacccgagctcgaatccgaaaccggggcc

SEQ ID NO: 123041 - DNA, 1006 bp, Homo sapiens
cacaatactcatgccatctttcaccttgccaaagaccacatgctgtcatccatcctctgtcttggcagtacagaagaaaaactgggaaccatttgtggtgggtccagcatttgccgtggacaagacgccaggagctgtatgcttaggatgaagttctcatcatcaaattccttgctgtagagggacttgccaccagtgccattatggtgtgtgaagtcaccaccctgacacacaccccggaataattctgtaaaagcagggacctttatcaccaaatactttctctccagtgttcagagcacaaaaattttcttccatctttagaactttgtctgcaaatagcttgaaggagatgcagcccaaggactcactatcaattgcaatgttgaagaacacagtggggttggccatggctggtggcagggagttctgggcagcagcgatgtctgcaaatggaagtcttttcagaataacacgagtttatctttataacaaacctatacatgtatccctgaacctaaaataaaagttttttttttaaaaggataacttattatttcagaaatttctaagaattcccaggaattccaacttctcatttgtatatcctgatgaatatccactgggtatttggaaatgccaatttctgacatatgattgcttagctagagactgcatttccagcctcctttgcaggtaactatagccaggttctaagttttggccaatgagatgttagcagaagtgaaatgtgtgccttctggattttatttttatgagaaatttgcctgtcttctattctttttccctcttctctctggctcggaaatgatgaaaagtacaggactcactgggaccaaaattcagaaattacatgttaaggaagagagggctgctcctctagcctgttctccttatgaccttgtggaacggaattgcctacctgccctggactatcctaagattgtcgtatggagagaaatacattctattttatttaaaaaac

SEQ ID NO: 123042 - DNA, 981 bp, Homo sapiens
tgatctctcctgcaataactaggaatcgagattccacagtagacgtcccttgccgtgctcgctctctctctcgcgcgctctctctctctctctctctctctctctctctctctctctctctcctctctttctctctctccctctctctgttaagatcctgttcgggagtttccccagccgttgtagtatctagtatgttagagttgggaggggaccatagttatgtagcccagccccctcattcccagaggcacccagagggccagcctccagcctgaccccagagcagaaccggaacaccaggttggggccctggtgctgccacctcctctgctggtcgggctgggaccctttgccccttaggagaggtgttggtcacagatgtttacctcagtttatgtcactgtcgaagaaacaaaaaataatagcaaaaaataacactgtagacatgaagacttagaagacaaaaaaaaaaaaatcacacaaaaaatctcccttgttgcgattcttctgtgaaggtacagtgtgtatgtgtgtatgtgtgtatgtgtgtgcgtgtctctgtcccagaccctgtgtcccccacactgccccctgtccttcggtgcttcccagagacccctctgagctggcctgtggggcacgggaagccccctggatgggaggcggggccacaggtcggctagagggtctccaccaggcccactgaacagaaccccacggctgccagaatgttccctgagcccacactgtggccagtgggacagtcctggtggctgacatcagcgtccatgcttggctcagggcctggggcggggtcctgggtagagtcctagccccagagccccagcccctcatgtcttgccgcccttcctccatgtgtttgtaaatactctggcatcctttggccctgagaaggtttttaaatgtgttatttacttctctaaacatgacgattgctataaaaataaacaaaagttt

SEQ ID NO: 123043 - DNA, 829 bp, Homo sapiens
agagagagaaagagaggagagagagagaacaaaatatagagagagagagagttgggaggggaccatagttatgtagcccagccccctcattcccagaggcacccagagggccagcctccagcctgaccccagagcagaaccggaacaccaggttggggccctggtgctgccacctcctctgctggtcgggctgggaccctttgccccttaggagaggtgttggtcacagatgtttacctcagtttatgtcactgtcgaagaaacaaaaaataatagcaaaaaataacactgtagacatgaagacttagaagacaaaaaaaaaaaaatcacacaaaaaatctcccttgttgcgattcttctgtgaaggtacagtgtgtatgtgtgtatgtgtgtatgtgtgtgcgtgtctctgtcccagaccctgtgtcccccacactgccccctgtccttcggtgcttcccagagacccctctgagctggcctgtggggcacgggaagccccctggatgggaggcggggccacaggtcggctagagggtctccaccaggcccactgaacagaaccccacggctgccagaatgttccctgagcccacactgtggccagtgggacagtcctggtggctgacatcagcgtccatgcttggctcagggcctggggcggggtcctgggtagagtcctagccccagagccccagcccctcatgtcttgccgcccttcctccatgtgtttgtaaatactctggcatcctttggccctgagaaggtttttaaatgtgttatttacttctctaaacatgacgattgctataaaaataaacaaaagttt

SEQ ID NO: 123044 - DNA, 514 bp, Homo sapiens
ccctagttttgcacctagaagtttagccattaattgtgttcatagatttaggggtccatgtgcatgtttgatactttaggtatattgtgtgatgctgacatttggcatatgaatgattctgtcacccgggtagtgaacatagtacccagtagttagtctttcaaccccagtagtccctagtagctattattgccgtctttatgtctataagaatccacagtttagctcccacttgtaacatgtggtatttggttttctgttcttgcattaatttgcttaggataatggcctccagctgcatccatgtcgctgcaaaggatacgattttattctcttttatggctgtgtgattttttcccccccagctattctgggagctactctctttagggtaccttcgcatatgtagtacgtttttctcctgttaatctgtgtattgtcagttgattcacaggccaccgaccaattggacctaaattggtagagaagttttttctcccaacagtttatataa

SEQ ID NO: 123045 - DNA, 330 bp, Homo sapiens
gccccaaaccagcatatccaatccaattgttgaaaaagcttaattttcctgttaaaaagacaaaagcctaaaaatctcacagcttttggttcactggccgatcgtcctgagggttaaaaacaaactgcgtgctttgggatggccccaagcaggcagagccttccctggagatggagttcctgggcactaactgtgttccaggggatctgagcaaggctgggactgggttttggcttagtagcaattggaggaactgcgtcattgacttcatccctgcggtcatgggaggtcacaggaaaatacagcaagtaaagtgctcccactggctgg

SEQ ID NO: 123046 - DNA, 289 bp, Homo sapiens
gttttgctagagtcatggagacaaaacctgtctgacgtaggcccaagagagaactgcaaatggttatcagctgcttccccgtggagctctgctgccaaggccatgagctggagaggaaaaaaggtcagcagagcggcttggctttaagaaggagaaataacttgattttcacatgggaatgatggtcctggccaagcagaaaatgaagctgatggcaggtcttatcgctcaggattttaggaacagggtaagtgggatcccaccacaaagtctggccagttccttccgg

SEQ ID NO: 123047 - DNA, 193 bp, Homo sapiens
cattttactaatatgctatttaatggaaaaccctagagacctaactagaccatagcctcattgtgtcttagtctagttctgtgcctgagtcatacatttctgcccttctccttgcacaaatttgctctttgttctaccagcctgagctgccctgcttcaaacagtatttatgcacttcccacagaggtacctc

SEQ ID NO: 123048 - DNA, 432 bp, Homo sapiens
acgggtccgaaattcccgggtcgacttactactactatattcgcggccgcgtcgacccagattccttctatctggttgctctggcttcctaagcacgtgccttccatgtcatagcccaagatggctgcctgagctcatgccatcatgtctgcgttccagacatcaggagggagaaaggaccaagaagatcatacctcgtttctttaagaacacttgtttgaagttgtcataccactcctacttacatcacattaactaatgtggtttttcttttcagtggccttgtgatcaattaaaatatgggagttctttgactagagaagaatggctattgggggctattaatgatttgtgtcacagtgtggcccacaaggggactgtgtaatgcttctaccacaaaccgttggtattaaaaaatatcaggtgaagtga

SEQ ID NO: 123049 - DNA, 410 bp, Homo sapiens
cctaaaggtctacggaaaacccataaagcccctcctgggacttgggagtttgtttggtttaatttttcataaacacaaaataagctagtaaatttataattttacctaaaagttaagtaaacctaggacactttacgtcatatttgttcattttgaaaacatattactttcatacacataaaacgtctgtggctcaaaaactgttgctatggactggattatttcctcccaaaattcctatgttgaagccttaactccttagtgtgatggtatttgaaaatggggcctttggcaggtgactaggtttacatgagatcatgtggtgggatgttcgtgatgggattagcgcccttacaagaagaaatacaagaggccaggtgtggtggctcatgcctgtaatcccagcagag

SEQ ID NO: 123050 - DNA, 376 bp, Homo sapiens
tcaaaaaaaagtttagctgggcatggtggcacatgcctgtaagcctagctactcagggaggctgaggcaggaggatggtttcagcacaggagtttgcaccactacactctagcctgggtaacagagtgagaccctgtctaaaagaaaaaaagaaaaaggtaattaattgggccatttggacacttaaaaaaaaataaaggggtaattaaggtaaaatgaggtcatttggatgggccctaatccaacatgatcggtatccttgtaacaagaggcaatttggacatagacacagagaaaagaacatgtacagagagagggaggggccaggtgtagaggctcacgcctgtaatcccatcactttgggaggccgaggcgg

SEQ ID NO: 123051 - DNA, 131 bp, Homo sapiens
ctgggactacaggtgcatgccactgtgcctggcttaaattttataattatttctatactcagctaaaaatgatctctaagactaaccttgcctcattaacaatcttttcctctttaaatttctatagcact

SEQ ID NO: 123052 - DNA, 511 bp, Homo sapiens
aattatctaagaaattgtgagtggaattggactgaacgtggatgagtcagggctcttgaaaaagaaagtggccgtccctctttgagtcagttctgcaagagtggacagaaacttttccagactcccaggcctctctgctccctcagagcttgaaaagattaaagtcattcctcctcaaggtcttcagtgaaaccctggaaatctttccttcaattttaagagattacagttcttcccattgtctagcctctgtcactacttgctgtagcatgaggtggcttccctgggggaaagtgtaccagtcccgctcattggtcgtctaagacctcccagcattcctcaagacatttctgcctcatgatgtcagaagaagggctgtcaaatagattttaaaaccccaggctcggccaggcacagtggctcacgcttgtaatcccagcactttgcgggaatcacgagagcagaagatcgagaccatcctggctaacacgatgaaaccccatctctaata

SEQ ID NO: 123053 - DNA, 494 bp, Homo sapiens
cgtttgtgaaaccagcagtccttggtttagggcccaactaatggtttcatgactcctgtgttagcttcctagattgcagtaagaagtatcagaagctcagtggccctaaaactacagaaatgtgttttcttacagtgctggaggctggaaatctgaaatcggggtattagcagcgccatgcattcttcaaaggacccagggaagaattcttgctttcctctttcagcttctagtagtcgttagggatctggcggccctcagcttcgagatgtgtcactccaatctctggcttgggtatcacatagccttccctgtgtttttctctgtctccaaacttccttcttcttataaaggtattggtccccagactgggctcggtggctcatgcatataatcccagtactttgggaggctgaggcaggtggatcactttgaactcaggagttcgataccagcctgggcaacatggaaaaactccatccctacaaaaaaaa

SEQ ID NO: 123054 - DNA, 304 bp, Homo sapiens
tgttgcagataagcccagcttagcccagctgaccccagaccctctcccctcactccccccatgtcgcaggatcgagaccctgaggcagacagcccgttcaccaagccccccgccccgcccccatcaccccgtaaacttctcccagcctccgccctgccctcacccagcccgctgttccccaagcctcgctccaagcccacgccacccctgcagcagggcagccccagaggccagcacctatccccgaggctggggtcgaggctcggccccgcccctgcctctgcaacttgagcctggctgcgac

SEQ ID NO: 123055 - DNA, 326 bp, Homo sapiens
gtcagaacagcacctgcagatgtcaaaactaactgggaaaaagactaatcaaaagtaacatgaggccaggtgcggtggctcacacctgtaatcccagcactttgggaggccaaggtgggtggattacttaaggtcaggagttagagacaagcctggccaacgtggtagaaccccgtttctactaaaaatacaaaaattagctgggcgtggtggcgcacgcctgtaatcccagctactcgggaggctgaggcacgagaatcacttgaaccggggaggcagaggttgcaatgagctgagattgcaccactgcactccagcctgggtga

SEQ ID NO: 123056 - DNA, 735 bp, Homo sapiens
atagcttctttctttattcttagtgtgtggctttgtgcacaatatggctgctgcagctccaaccatcacatctgagtttcttgcaggtctatagggaaaacatggaagggaaaaagtcatctgttaaccgggccagtcttctttcaaagaatgtttcccggaaactctactcacaaacttggccagggaaccatccctaattgcaaaagacgttgagagatatactgttatgtctggtactttactgcctctaaaaaactggagtttacttagtaatgaagaaaggcatactggatattggatacgtagctatcagtctttatcataggagccaaataatatgacttatctccttaggttttgtgaggattaaatgagatgatagaagtgaagcacttagctcagtgcccaagcatacagaaagcgttcatctaagaggggaggataatccctgtcttcaataaatttgcccatttattggggaaatggatatacacatgaaataataatatgatagtatcatataagacaaatgtaaaattcagtcacctcacagcccttcttccccactgccatctcaggactgtgtaacaaaagtcctagcatctgacttttgttgaatacttctcattggtcagattctttgatattgctttatacatgcatgatctcatatgaccctcaaggcaacccatatgggataggtgctatgaggcaggtactgaaaactaaggt

SEQ ID NO: 123057 - DNA, 482 bp, Homo sapiens
atgcatgaaaacacacctacccttactcttcaaccacccacacacacacacactgggaaattgtatcatacacacaccggaaattgtacccaaaggacgctattactaactatgaagcaagtggcacccatggcttgtccagagaagacacccacagggtcagacttcacacaacaagcctatgaatgggatagcccacatttaggagtggtcttctaatccagaatcttctctttatttagttcaagataacataaacttcctttttgtaaatttgtccatcatccactcccttgctcttatactctagtgagggggaggtcagatgataaatgacaaggaagatcatttccagccgtgatgagtgagatgcggaaaacagggcagccatggagcagcgagagaacaaccaggtgtggtcaggggattccctagtgaggtcgtttccaaaaccctcatgggtagacctgaggctgtgagga

SEQ ID NO: 123058 - DNA, 355 bp, Homo sapiens
tggaaagatgggggattggggagggtgaccgagggatctcggctctgccaccagagggcagaagtgtgccagacacccagaactgcgggattagccctggtgcccaccccagacacacaaccacatactgtgggagcccctggagccaactggtccccctgcttcaacaagagcaaggggcatgtccagagccaggctgtgtgttcatgatgggactccttcgcccaccagcatttctcaatacagaagcagctgcgtttcgtacttcattatcgaacactcttatgcatcaaagaatagcagcaccctgggaacttggccctaaatgccagttgcacccacacaggttgtgata

SEQ ID NO: 123059 - DNA, 377 bp, Homo sapiens
acgaagtcaggagtttgagaccagcctggccaatatggtgaaacactgtctctactaaaaaaaatacaaaaattagctgggcgtggtggtgcaagcctgtagtcccagctactcaggaggctgaggcaggagaactgcttgaacctgggaggcggaggttgcagtgagccgagatcatgccactgcactccagcctgggtgacagagtaagactttgattaagaaaaagaaagaaaaaaagaaaggtgggaggggggcatggccttataggctgtttttctctgtaatatcttacttagtttctccctactagactggaatttcttccagtataagcatggtggtaccttcatttcttaaaagatgtttcatagctc

SEQ ID NO: 123060 - DNA, 203 bp, Homo sapiens
gataaatgtgaaaagattctgaattttgctaacaaagtcaggttttggagatctaatttctagtcagtaaaattcatcctttctaggatacaatgctaagagttttgataaatgcatagaactgtgttacactgttgtgtaattaccacaatcatggcttagaacatttccatcgttcacccagattccctcctgtcccttca

SEQ ID NO: 123061 - DNA, 325 bp, Homo sapiens
aagtcagggctgtggggaacccagggcccacttcatttccctggctgctccagcctcagcttgcagggaaaccccacacaggccaggagcccaggccaaaggaggggaaccctttaaaagacagaacggaacacaggaacacacagactccctttctaatcagggctgattgcaaccttaagtggaatagcaggcgagagtgcaaccccatttaatttacagctggagccagggcttggaagcagctgctaaactccttgcaaaactactggctggcccctggggagctgagggtggaatcaggaaacctggagaatccacgatg

SEQ ID NO: 123062 - DNA, 116 bp, Homo sapiens
acacacacacacacacacacacatatatgcataatcacaatgcatgcacacagctggcacacatgcatgtgcacattcccacgtgcggccatgtatttttatgcatgtatgtgcac

SEQ ID NO: 123063 - DNA, 334 bp, Homo sapiens
tacacaccaggccacagacaatggggctcggggggccaacctctccagtccccaaacacagtccccaacagacaacttctcctgtccccacatgcggctcccaacaaacaatttctcctgccctcacacgcggttcccaacgacaacttctgctccacaacatgacacccacggtgggagaagctgggggcacttcactacatcatcctgcacactgcagcatggcctgctccaggcagaaggcaggcctggagaagagcctgggaccaccgcggactgaccaacagcggacaccaggtactttctcaaatgggagaggggcctcatggtggac

SEQ ID NO: 123064 - DNA, 317 bp, Homo sapiens
aagaaggggtttaatttgctgagaaagaaaaaaggaaatggtagcgggaaagaggaaaagggcacccctgcaagagagtggtggttgtaaagaaacacaacagaaaagggtaaagcaattggctttcacgactgaagacaaaaatctttgaccctaccagggagtactattagatgaaggggcatagaagttggggaaagagtgtgctgggtcacgtgtattctgggaggtgatgggaattttctattaaagatctgtatcaggtcattgctaaaagaaagaaacagtatatatggctttaagatccagcccatatt

SEQ ID NO: 123065 - DNA, 400 bp, Homo sapiens
gcctggctcctgccggctgccctgggagaggccacaaaatgccctccacggagacaaggcctgagaaccttcgggacgcccgctgccgctcactgtgttgaagaactgcccgttccgcaccccgggccctagacacacggctctgcagaggacgaggaagtgccgtcaggtgagacttcaccgtgaaatatcttctgagacacaacaatctccctgaattaaaactgcagactctaatttgtaaaaactgtgtgtttcaaaagctccaagtgtttacattctccgattcatcattccttcttctaatttattttaggaaataatgcaaagtactcacaaaaatttatatagaaagatgttcattgcagaattcattataataaaaacctttaaatgctca

SEQ ID NO: 123066 - DNA, 1504 bp, Homo sapiens
  misc_feature (1475)..(1475): n is a, c, g, or t
  misc_feature (1486)..(1486): n is a, c, g, or t
tgcagaaccataagccaaataaacctctttactttgtaaattacccagcctcaggtattcctttatagcaatgcaaaatggatgaatagtcttgatgccaaagccctacaaagatgctataagaaatctatggactaatagttctttcttttttttttttttttttttttttttgagacaaaaagagtctcactctatcactgaggctggagtgcagtggtgcaatcttggctcactgcagcctgggcctcctgggttcaaatgaatctcgtgccaaagcctcccaagtagctgggattacaggcatgtgccaccatgcccagctaatttttaaatttttagtggagacggggctttgccatgttggccaggctggtctcaaactcctggccttaagtgatccacccaccttggcctcccaaagtgctggctttacaggcgtgagccactgcgcctggcctatagactaacatttcttagaaacattgatgtaaaaatcatcaacaaaataccagcaaaccagatttaacagcatattaaaaggattatacaccatgaccaataagcacatgaaaagatactcaatgttgctaattaaggaaatgcaagtcaaaactccaagatgctacctcacacccattaggatggctgctatcaagaacagcagaaaataattgttgggaaggacatggaaaaattggaaccactgtacactgttgttagtcgtgtcaaatggcatagcctatgtgaaaaactggtggttcttccaaaaattaaaaataaaattaccatatgtatcaggattttccagagagacaaaaccaataggatatagatggatggatgggtgaatgagaggggatttattaggggaattggcttactcaattatggaaactaagaaggctgtgataggccatctgcaactagagaaccagggatgccagtagcatggctcaatctaagtctcaaagcctcagaaccagggaaaccaatggcataactctcagaccgaggctgaaggcctgaaaacctgagaggctactggtgtaagtcctggggtccaaaggctggagaacttggagtactgatatcaaagggcaggagaaggatgtcccagccccaggagaaaaaatgaatttacctttactctgcctttttgttctatctgggcacccagccctttagatgttgccctcccacattgaggatggatcttactccctcaatcaacctactcacacaccagtcttctctggaaacactctcacagatacagtcagaaatcatgctttacccgctttttaagtatcctttaatccggtcaagttgacacctaaaaatcatcacaccatatcatcctgtaattctacttgtggaggtttagtagttcccccttatcctaggtttcactttctgagatatcagttacccaaggtcaactgtggcctgtaaaaaaataggtgggagaatcncctgagcctgngaggtcaaggctatagtg

SEQ ID NO: 123067 - DNA, 1010 bp, Homo sapiens
tgcagaaccataagccaaataaacctctttactttgtaaattacccagcctcaggtattcctttatagcaatgcaaaatggatgaatagtcttgatgccaaagccctacaaagatgctataagaaatctatggactaatagttctttcttttttttttttttttttttttttttgagacaaaaagagtctcactctatcactgaggctggagtgcagtggtgcaatcttggctcactgcagcctgggcctcctgggttcaaatgaatctcgtgccaaagcctcccaagtagctgggattacaggcatgtgccaccatgcccagctaatttttaaatttttagtggagacggggctttgccatgttggccaggctggtctcaaactcctggccttaagtgatccacccaccttggcctcccaaagtgctggctttacaggcgtgagccactgcgcctggcctatagactaacatttcttagaaacattgatgtaaaaatcatcaacaaaataccagcaaaccagatttaacagcatattaaaaggattatacaccatgaccaataagcacatgaaaagatactcaatgttgctaattaaggaaatgcaagtcaaaactccaagatgctacctcacacccattaggatggctgctatcaagaacagcagaaaataattgttgggaaggacatggaaaaattggaaccactgtacactgttgttagtcgtgtcaaatggcatagcctatgtgaaaaactggtggttcttccaaaaattaaaaataaaattaccatatgtatcaggattttccagagagacaaaaccaataggatatagatggatggatgggtgaatgagaggggatttattaggggaattggcttactcaattatggaaactaagaaggctgtgataggcccttctggggggggggaagccccggattcccccttacatggggttaattttaaaaattaaaagcgcccaggaacctgaggaaaatccatgggg

SEQ ID NO: 123068 - DNA, 1150 bp, Homo sapiens
gactcttgtttttctgaggctcacaaagactagactcacagcttagttctatagtgtctatttagctgtacttaaagcctacatcaagtactttattgtcaaataaaaagctatctatgaggagcttagtaacttaagtagctctccagagtttggtaaatattttgtgtctacttttgatctctattgtctaggaaaggttctgtcaagttgtaaagtgctagaaagtgttattttaaacctttaaaaggtagtaagagtactacaaccctgggatccttggttgcaacaaagaagcacaaagccaactactatagttttccaaaaacaccatttcctcagtccctgccccaaggaaataaaaaagcatccaggaagtcccatctttaaaaaatacttagctatcagcctggggcttctaaaattcaggccctgaaaaaacgataggaaagacttcaaagtccatccctattaattaggtttagagggaaatgactcttcctaaaaaaaagccatccccgattgttgctttgctcaccatacttcttcttctattttctttttttttttgagacggagtcttgctctgtcacccaggctggagtgcagtggcgcgatctcggctcactgcaagccccgcctcccaggttcactccattctcctgcctcagcctcccgagtagctgggactagaggcgccagccactatgcccggctaattttttgtatttttagtagagacggggtttcaccgtgttagccaggatgctcaccatatctcatacatttggactgttttcccctctcatctccatccgtccatccaatatttgtccatactttgaattcttattcaaaagccaaccccttccatggtgactttcctaagttcctccatcttagctctccccgcaaccttagtgttcaaatcactttgtcatagtctgtattgccttttaattatctgagtatgtctgttggctccaagtaactgggtcaacattttttcctttctttactgtccacttagagttactcaataagggtttattaactcactgaggtgagtaaggctcttgactcataatacccccattctctacttgtcttagaataaaccaggacagggattctagagcaaactctgaaa

SEQ ID NO: 123069 - DNA, 879 bp, Homo sapiens
gactcttgtttttctgaggctcacaaagactagactcacagcttagttctatagtgtctatttagctgtacttaaagcctacatcaagtactttattgtcaaataaaaagctatctatgaggagcttagtaacttaagtagctctccagagtttggtaaatattttgtgtctacttttgatctctattgtctaggaaaggttctgtcaagttgtaaagtgctagaaagtgttattttaaacctttaaaaggtagtaagagtactacaaccctgggatccttggttgcaacaaagaagcacaaagccaactactatagttttccaaaaacaccatttcctcagtccctgccccaaggaaataaaaaagcatccaggaagtcccatctttaaaaaatacttagctatcagcctggggcttctaaaattcaggccctgaaaaaacgataggaaagacttcaaagtccatccctattaattaggtttagagggaaatgactcttcctaaaaaaaagccatccccgattgttgctttgctcaccatacttcttcttctattttctttttttttttgagacggagtcttgctctgtcacccaggctggagtgcagtggcgcgatctcggctcactgcaagccccgcctcccaggttcactccattctcctgcctcagcctcccgagtagctgggactagaggcgccagccactatgcccggctaattttttgtatttttagtagagacggggtttagtagagatgttggccaggctggtcttgaattcctgatctcaagtgatccacctgccttggcccctcaaattgctgggattacaggcatgagctaccatgcctggtcctgagcagtgcttttacgtccag

SEQ ID NO: 123070 - DNA, 931 bp, Homo sapiens
gactcttgtttttctgaggctcacaaagactagactcacagcttagttctatagtgtctatttagctgtacttaaagcctacatcaagtactttattgtcaaataaaaagctatctatgaggagcttagtaacttaagtagctctccagagtttggtaaatattttgtgtctacttttgatctctattgtctaggaaaggttctgtcaagttgtaaagtgctagaaagtgttattttaaacctttaaaaggtagtaagagtactacaaccctgggatccttggttgcaacaaagaagcacaaagccaactactatagttttccaaaaacaccatttcctcagtccctgccccaaggaaataaaaaagcatccaggaagtcccatctttaaaaaatacttagctatcagcctggggcttctaaaattcaggccctgaaaaaacgataggaaagacttcaaagtccatccctattaattaggtttagagggaaatgactcttcctaaaaaaaagccatccccgattgttgctttgctcaccatacttcttcttctattttctttttttttttgagacggagtcttgctctgtcacccaggctggagtgcagtggcgcgatctcggctcactgcaagccccgcctcccaggttcactccattctcctgcctcagcctcccgagtagctgggactagaggcgccagccactatgcccggctaattttttgtatttttagtagagacggggttttccactaactaatctttcacaattttctacccaagggcctcctttctgagtgaactactgctcaaatatacagtctaaaattggtactgaggtacattccaagtctaatatttttactcgctgataattttgaagtaaatttttcctttcttttccttttcctttccttttccttttttttt

SEQ ID NO: 123071 - DNA, 507 bp, Homo sapiens
gtttctgcaccacacacaaacacacaccacacacacgcgcacacacacacataccacacacaggcaccttgattactaaatgcccttggcacagaccagccaaggcataggcacaggcattcaggaagaagaaatcccttgactcagattgcagccaggcttcctttgtgacttgatcccttaaactcctatcactcaagcttcctagctatacacgaagcaaaagcatccctgctccccttcatggagcccagtgccaggcacacacacacatatacacacacacacacacacaaaccacaaccacacacaccacgtatatacacacacccaactgtctggcaagaacttgacacctcgcccctccatgcagaaaatacacaagacagaagtatttctacatggcagacaaagacggagtcttctttggtgaatggggcttgcctaagcataccagcagttgaccagatgaatcagaggaatactcaggtcctagtctgtactttc

SEQ ID NO: 123072 - DNA, 848 bp, Homo sapiens
tgaaagagggtgccatgttgcccaggctgctcttgaacttctgagctcaagcaatctgcctgtctcggcctcccaaagtactgggattacaggcatgagccactgctcccagccaacagataatgtatttttataagatgtgtatgtcaagactcaaactgaaattattaaatgtttattagtcagcatcagttgggatcaaaatttccataatggtaaagtgaatttttatctagaatgagtctggtaacgttttttctagaatttaactggagcatttacttggaagcaacagtgttctattgattttaaactttattatgtttatattttgttcttttttccaaagcatttttcttctttacctattttttgactttttaatggatattaatatatgtaaacccttaaactgcagtactggggaacattgtaatttattcttataggatgaattaatgtgatttctttttgtgataacattaatgttcccaaatagcccacatacttttctgtaatacctgaaatacgaatgagaaataagatataaaactcatgattcttttatgtattttatcaacttttacagagaggtgaagattccagtttaaggaagaaagattttcaaatactttagattaatttgtgaaaaaaactcattttaattttaaagtagtaattctgtttaaattatacttaattagtactttatttttatggtggttaaaagttcacctctgttgtaattctctatgccaaagaattgtacactgctattgccttcttcggttaactctaaaagaagttcagtctgttaactaaatccaacagtgattcaggggtagaac

SEQ ID NO: 123073 - DNA, 733 bp, Homo sapiens
tgacaatgttttggccaagcaaagataaaaagtgcaggttggcatctgggaaggagcacatgtgccctcctggccgggatctctttcctcctttttcctccttcctcctgactgaacacaacaactgcccagacacggaagacacatgttaactacatcagttatccctccacctttccccagctacagatgggaagtagatacttatcttgtttaagccacataaaaagaaaaaaaataaaaaccaagcatcaactgtgtgtcaggcactgtcctgggcagttgagatgtatcaatgaacaaaacagatgcaaaatcctgccctcatgaagcccaactgctaacagcaggagacaataaacaagatattatagtaagtagattgcgaagctatcagaagaaaaagtaggtaagaatcatgcagtggccaagtgtgggagatggcgtaggggttgcaatttttaagtagtcagaatacaagttgtcaaaaaacttgacatttcaacacagattggaagcaagagagtcatccaggtggacatcaggagtaagaacattctagccacaggaagggtcaaggaaggcccgaagtggaaacatatctggcatattacagcaacagcaaggcgataagcaacatcataacagatgagcaaggaaacggtaggggaaaaggtcagaaaggccgagaggggccagctcaggtaaggcctgtagacaactgcactccgag

SEQ ID NO: 123074 - DNA, 382 bp, Homo sapiens
atacatctcacaatcacatatatggaatgagtgatatgcaaatataaaattgcattatttttatattattctcattttatataaatcctaccacgaggcatagtctgtctcattcattcattcatttatccatcccttcatttattccctcatttcctcaggaaatagcttcctttgtggcaggtgctattccagactctggagatactacagtaaacaaaacagaataaactcaaaaactctaaaatgcaacaataaaaaacaaggaaatttcaaaaaggatcaaagttttgaacagacctttcaactgaaatatatatgtagttaatacacacacaaaaaacaagtaaataacaagtgggatatttggtagtgacaaggg

SEQ ID NO: 123075 - DNA, 167 bp, Homo sapiens
ctggtggaatctgaaatctgaacaaagttaatgggttgtatcaatgctcattttctagttgtggcattgtactatggttttgtaagatgttattgttgggagaaactggtgaagggaattgcatgtgaatctacatgatctcaaaacagggttttactacattgctt

SEQ ID NO: 123076 - DNA, 124 bp, Homo sapiens
caagggccttgctatgttgcccctgcctcttaaaacaaaaagagggaccttgccatgttgaggctggactcaaactcgtgcgctatagggaaactttcacctcagcctctcaagtagctgggac

SEQ ID NO: 123077 - DNA, 788 bp, Homo sapiens
attttatggtttgctcacaagtcagttttatatgccagctaacttcggaatgatccacccctggctaaacatctctaaaaaccctgatggtctccaattaatctatgattgccttattactacagcactgccatttgaaaatgctgggtctcagattttcaaattcccttaatggacagctaaaggggccaataccaaagacttgcaatgacctccaattctacagccttgggctgttccaggaacacaattacactccacttccctgcaggttccacccttctcgaagcttctattcctacatctgtaaaatgaacacatttctactaactagtaacacatgccacagtggcactgcactcattaagtgctgtgttgtatactgcaatttaatttggtgctgtttatatcttatttcctcaagtcaacaggactctttctaaaaaagtcagaaactgttttactcatgtcccttcacaacacttagtggtcatttccacaaaatgctagctcaacagatacttgattgattgattaattgatgaacctctccatttctcagggagcctctaaacagttatcaacaagagtatgtttaattccagtctctgtctatatggtcttaggtgaggtgtttggcagtttgtcatctataaaataaagggatagcaccgaatagctcctaagttccttccagtgcaatttctgaatctcattagacaaaacaaaacccaaagacagcactacctctattcacgttagcactgtactttttttggaggaaagga

SEQ ID NO: 123078 - DNA, 309 bp, Homo sapiens
cttttgggtctttgctcttttgtggtctttgctcttttggggtctttgctcttttggggtctttgctcttttggggcctttgctcttttggggtctttgctcttttggggtctttgctcttttggggtctctgctggaaaactggagcagagggtgggtagtgggaatcagagccagcttcttcgtgggaggaggcattggcacagtgaggtttgggccgtgagctttgcagacagaggcctgaattttagtcctgtgctctgctgcctcctagctctgtgaccttgaccaagtgaattcgtaaactct

SEQ ID NO: 123079 - DNA, 217 bp, Homo sapiens
tacacagtatcagggacttcttcaccctgagccttggtttgcctacctgtaaaatgggggtaatacaatatttaactgtgaggactaaatagaccagggtcagtgtgtgtgaaatggcagttatggcaatgactaatgccccagaagatgtccctcacgtctggaggccgggtctcctcccaggaatggttacccggaacccatgactggctgtgac

SEQ ID NO: 123080 - DNA, 327 bp, Homo sapiens
gaaggatgcttcagatagattccccacatgggccatagggcagcctctgctgcctgtttcccccacctgcagtatccagattgggatgccctctcctgctccctttcctgagcccaggccccccgggcctgctgggccccagggaatctcctcaagccctcggttttctctagcgccctggctgggcctccaggagatgccctgggcagtggagcagccctgacattgtctctgcagggaaaagtttgcctgctaactcaataggagttggagctccaggcaaatccaacctgagggcagcaattttcaaaatcatattcttactgg

SEQ ID NO: 123081 - DNA, 553 bp, Homo sapiens
agaagggaaggtgggggactggggagaaggtccttgtgacacaagcatgggaaatctctattctgaaaaaaaaaaaaaaattcacatatgtcataggtttttgccccctgatctataagaagaaggttctcgaacacaaatcacctgtagtgcttctgaaagcaaagagttcagggcccaagaatgtgtgtttctaagaagttctcaggtgctgatggccggtccccacaccgcatcacgctgcctcgtatccgcttctgagaccctcaccactgcacacttctcttattgtattgattaataatttaggaatgtagaatgtcttaggcctactgtcatactttccacatgggacattcaaaatgtaaataactctgttcataactaaaatatattcctagaggcattctcatagctagattcagtcttctaaactttctcaactgtaaaatgggaatgaagcttacagggttattcctgtaattatctaacttaggtttatagaaacatgagggataaagcaaatcattgtaaaataaatcctgttatctcc

SEQ ID NO: 123082 - DNA, 362 bp, Homo sapiens
ctccagtaactgctaagatgacacctatactggctgctgtccgagcagccctagtgactgtcttgggggcaatcagttgcttaatggttaatacagaagtacctgagtaatactttgcaaaaggactttccccgacctgtgctgggagtgtctccctgtaaactttgccaacctcctggttgttttatcagtgagagcatcatttaagtgaaaatataaattaaggagacagggctcataggacgcacattaaaacacctgatcattttgagcacctgctgtgtgcaaggcactgttctaggccaacagtatagatatacattgcctcccatcttttaaggctgataatgaagagaagaaca

SEQ ID NO: 123083 - DNA, 405 bp, Homo sapiens
ttcaagcgattctcctgcctcagcctcctgagtggctgggactacaggagtgtaccaccacggcccggctaattttttgtattttttagtagagacagggtttcaccatgttggccaggatggtctcgatctcctgacctcgtgatctgcccacctcggcctcccaaagtgctgggattacaggagtgagctaccgcacccagcctactctctgatttatgagggcagccaatagtggtaaccattatcatcccatgagctgggctccctggaccagttacttaaccttttttttttttgagacagccttgccctgtcacccaggctggagtgcagtggtgcgatctcactcactacagcctccgcctcccaggttcaagtggttcttgtgcctcagtctcccga

SEQ ID NO: 123084 - DNA, 742 bp, Homo sapiens
tcactttttaaatgtttttgttttggtttttgttttgtccccagagcacaagaaaggaaatctctgggacacctgaggagacatttcagaggagaaagagaatcaatttccaagtaatttggaatggaagcaagtctggccgcattctttatctgggagctcctctaaaatcctcccaccaccaccagggtttgatggttaggagacttagcaacagaaagagtaaaaagagaaaataagcagcgaagcctgtgcttccatctccccagggcatgccgaaatagtcactcctagttcttcttcaggtgtctcctgatgcctatggttttgatattgctattttgtcatcattgtttaatttcggatcctggtttgcaaacttgcatctttctaaagaccagtaatgatttctacgtttcaacgagctattaagtgtgtatgtggggggcaagtggaattgctgctgaatgcataaattgatttgcacctacaatttgcatttattctctgggtatatttgccactaatgttgtgactgaactgccataatgaagattaattatataaacattttttgctgactttgtgagcagctgagttggttgttttgcttgattttccaagcttggtgcttaagagtatgataggaaacatttcttggatttgctcagcaccttcatagatgacgtgccccagaccagtcttatctaataaacatttgtggtgagcttttcactggcta

SEQ ID NO: 123085 - DNA, 432 bp, Homo sapiens
gaacacatgaacacatagagggaaacaacagacactggggcctctgggagggtggatggtgggaggaagcagaagatcaggaaaaacaattaatgggtactaggcttaatagctgggtggtgaaataatctgcacaacaaatccctgtgacactagtttacctacataacaaacctacgcatgtgccattgacctgaaaataaaagttaaaaaaattattaaaaatatgtcagtaaaagtctttaaccaacacaagatggttcatcccaagagtcatcttaatttaaaaatcttcacatcttaagaagctacacgggaggctgcggcaggagaatggcttgaacccagcaggcaggggttgcagtgaagcgagatggcaacattgtactccagcccgggcgacagtgtgagtctctgtctcaaaaaaaaaaa

SEQ ID NO: 123086 - DNA, 385 bp, Homo sapiens
gaggatcaaaaaaatcatgtgcctaaataatattgctggtacatattacttatctactacattttactctccaaaactcttagctccatttccatttctggctagaagagggacatgtacctctgtgctgagtttagaaaaaagaacactgcatcacagctgatataacaagcagtaaagaacgtctatatccaaactggtaaggagaattcagcacagttgttagaaaaaaggcaatgctctcttaaccaagagcaactgtaacaaaatgtaacttttaaaaggatacaataaaaaccagttatctagaaataaatctagtaagtgcaggagctgtatggagaaacttaaaagtgcactaaataatattatgctcaagagcaca

SEQ ID NO: 123087 - DNA, 355 bp, Homo sapiens
agtaaaaggaaaacatttacattgatgcaaaaataaagtcaacaaggcttctgtgtgcatgaggccaaaaaattacatttaaaaagtctttgtattccaaacatctaaatatttgagaaagtctgcaaaacaaatgctatttggatcaacttctagggggactgatggtatcatccatgtttctctgatgtgttagcataatagagaatgcagcttccaacaatcaagccagtaactgggcacaaacacagccagctccgtctttgccatcactggaaacatgtgctgggcaagtaacataactgactctttgatggccttctggagtcaaattgtaatactctgattgttcgta

SEQ ID NO: 123088 - DNA, 412 bp, Homo sapiens
gggttcccatagcaacgagtcctccaggggaagtgggcgggtcctcttacccttgggtttctgaacaggactcttccttttcggaagaatttttgaatcaccctttttcatttcttggcctcagcaggtaagggtgagcttatgcagttccaagatgttctttctgagatacttacagattattaacgccgttgtatgggatgataattactagcagccatgttctttcttgatttctcattctttcccaatccttgcactgataacttgtttaacaaacttccaaaatgaagtggaaacaatgttttcttttccttttttagcatgttttcttggaggtgcacatgcctaagaattgtatgcactatttctctaaagccctaagttatatcttatatttaaaaatttaaaa

SEQ ID NO: 123089 - DNA, 501 bp, Homo sapiens
ctgatacaaaagaagtgaactcaaaagaagtaaaaataaaagctagcaaactttgcaactggttaagctggttgtaaacgtacctaatcactttctactgtgaatgatatatttgtattgtgatattttttagctggttattagatacacaaaaaaggtatttcatttttaaaaattgagttagtaaccactcaccttacttacaaattatttgtatattattttgtttagtatcctttctaaatgaatgttttaattgccacgttataaacacatggaaaagtgattcagatgaatgtatatcttagctttgggtgtctagaactagagccaatgtctgattttacagtgatgacatttatttgggaaggcaagtccagggcagcaatgagggatacatgtggaaactgaggcaaaggaagatgtaaaatcatgtgtcatgatgttgatatgactttgccagttgtcgcttcacaatgaggtgagacagacagcatggtg

SEQ ID NO: 123090 - DNA, 394 bp, Homo sapiens
agcactagcagtagctttcggcttgggggagtttcttgactatatcaattgcctgtcatggtggtttccgacccgggcaggtggcatggttctggggctagcagctgtggccaccgtttccctacgccactggtgtctgctgaattcgaggaggggcattagattctttagttcttcagggtggctttgggtcgtgttcttaaaagatcagtctggaatctgatccttcagtcttcccaaagagtctgtaaaccacttaatatcctgccgcaaatccctttctgcttaaactaactagattgaattccgttctctgcaagccagcctgggcgatagaccacagaaccctctgcgctgttcctctccctgtggattcttttttcccaaaccaagt

SEQ ID NO: 123091 - DNA, 243 bp, Homo sapiens
agaacatccatccaaggcactgaaaagcccacaatgtcaccggacacctccacaagatctgtcaccatgctttctacttttgctggcctgacaaaatccgaagaaaggaccattgccacccaaacaggtcctcatagggcgacatcacagggtacccttacctgggacacatcaatcacaacctcacaggcagggacccactcagctatgactcatggattttcacaattagatttgtccact

SEQ ID NO: 123092 - DNA, 340 bp, Homo sapiens
gacaagatcctgcatgtatttttaaggtagagccagtatttgcagatagtttagacattgtggtagatatgaaaatgtgctgcctatatcccccttctaggaaggacttgctaattagctgcagggagtgtgaagaacagaaatccaccagtatcagcacttcatctgcaacagctatagaaaaagcttcacctgaggttaccctcgtcttagatctcagggcagccctcagtggagatgtaaggccttgctacttcagcctcatttattacactgtcaggcaaaaccttcctcagagctccctctattacaacttaatttcttcttctgcccaatcctg

SEQ ID NO: 123093 - DNA, 606 bp, Homo sapiens
tgtgtaagaggaatgaaggacatagtcagaaagggacgggcctggagccagcacagagaggacccatgcaaaagagaggccacactgaaaaggggactgcagatgcacctgctgatttttagtttgggggaaatgtgtaacaaacaccatgcatgccaggccttgagccttggtgttgaactcactcttaccaacttcactctacaggtgagagattcccacagcatacagctgatagtcagtgagaaggggaatcaggagagtcagggcccctactccaggatattaaaacaaactaaatggctgagcgcagtggctcacacctgtaatcccagcactttgagaggctgaagtggctggatagcttgagcctaccaggagtttgacagcagcctgggtaacacaggtagatcctgtctctaccaaaaatttaaaaattagccaggtgtggtggcgcacatctattgtccctgtatctctgtctggtacaacctggctactcctcaaaatccattccattctccttcgtggagcttaatccattccagaacgtgcgtgcgcctaagcgatccttatggcgggcatcatcaaccgggaccgagccga

SEQ ID NO: 123094 - DNA, 538 bp, Homo sapiens
gataaactgctttgaagagtatctgttctaacagtatctacacatagtaagcaacggatagatgttagctgctgtcatttgtcatcatcgttgtcgtcgtcgtcgtcatcatcatcatcatcatcatcgtgctcctgccaacctctccggcagtccatgttttcaagtctttgcaaagtcacctacctggagtctccctttctttatttagtgcataattctgtttttctactcagctcttgagtcacctccaagatgccttccctaataaggccctccctgttacactcagggatatgcctctctattcgttcctaatctcagacatactaggatggcaacattaacttttctgggcttttgtcctcccatctgtcaaatgggcaaaatacagcctgtttcgtagattatgctgagactcaaatacaaagagatgagatggtagatgccaaagctttgtaaactctaagactctgtaaaaatattagatttcacttttatttctaaaatatatataccctcttcttgcttttccagg

SEQ ID NO: 123095 - DNA, 377 bp, Homo sapiens
cgcactctagtctgggcgacagagcaagactccgtctcaaaaaacaacaacaaaaaaccaacacatggccaaagtgcagtgacttacatctgtataatcccaatgttttgggaggctgaggcaggaggatcgcttgagtccaggaatttgagaccagcctgggcaacatagacctcatcaccaaaaaaaaaatattttttaattagctgggtttggcagcatgtacctgtagtcctagctactcaggaggctgaggtgggaggatcacttaggcccaggagtttgatagttcgaggttatagtgagctatgatcctgccactgcactccagcctgggccacagagtgagaccctgtctcttagaaacaaaacaaaac

SEQ ID NO: 123096 - DNA, 365 bp, Homo sapiens
cgcactctagtctgggcgacagagcaagactccgtctcaaaaaacaacaacaaaaaaccaacacatggccaaagtgcagtgacttacatctgtataatcccaatgttttgggaggctgaggcaggaggatcgcttgagtccaggaatttgagaccagcctgggcaacatagacctcatcaccaaaaaaaaaatattttttaattagctggaatgcaggtggcacgatttcagctcactgcaacctccgcctcccaggttcaagcaattctctgcctcagcctcccgagtagctgggattacaggtgccctccaccatgcctggctaatttttgtatttctagtagagatggggtttcaccgtgtt

SEQ ID NO: 123097 - DNA, 710 bp, Homo sapiens
gaacgatgtggattttgcctggggcagtcagaggagagccagggctgctgaacggccccaatccagggagaaaccaatctcctttctggctcccccatctgctgagagctacttccactcaataaaaccttgcactcattctccacgtccacgtgtgacctgattcttctggaatgccaaggcaagaaccctaggatacagaaagccctctgtccttgtgataaggaatgtgtctaattgagctagttaccacaagttgcctataaatggcaaaactaaaagaccacacgaccactggggcttcaggaactgtaaacatccacccctacacactgccagtatgagaaaaatttgctgatatgttttctgctgacctgatgacaatgttcctatggtcacactaaccactgctgggtaattttcatcatgactctcgttttcatctgctgaaaccagcctccccaagaaagacaactattttcaaactgaggaaataaagtgttactaaaccacagtgttctctcatggctgttcctggagttcttcaaaacacttgatattataaaatagaattattacagatcactgtatgttatggatttagtcaaaatgataatttaaaatatggtttaaaataaaaaactttattttccaaagaagatagttttttaaacaagaatatccaataaagacagtatgaggtcagctga

SEQ ID NO: 123098 - DNA, 361 bp, Homo sapiens
taatacagggaagttaagatactctagaaaaactcctgtgatgaacttgtaagatttacagaagagaaacgagagacaatagtatttctataactaagtgagaagaggatgattaaccactggcctcagtaattatactgcctctattcttcaggactattagaaaccactccagatcatttctcctttttccattctctactcccagataaaccccaaagtagtagctggatggagcataaacagggttgagacagtatattactgattaatagcacagactttagagctacaacacttatgtctgaatcctagctgtacaacttattcgcgtgtgactatgggtgagttactctgcctc

SEQ ID NO: 123099 - DNA, 459 bp, Homo sapiens
  misc_feature (45)..(45): n is a, c, g, or t
  misc_feature (64)..(65): n is a, c, g, or t
agtgtcagtgtatacatctggggtgattgtgacccaacataggcnactgaaacaatatctatanngggcggatggaaggagaggtgaagttatataagagaattaaaccatccactagaatctgaggttaaaagaatgtggatttgcaataatattaactagcctaatacaacagaaacacagaaattccgatgtggatatgaagaaattttcctttgagcttcaaaatatcttcccacactgtcaagttatggtatcttaaaactatttaaataattacattctatatgactggagttgggaatatcaaacatggttcacttctggatagaatataaattttaaaatcagaaataaggaaagatgggtgtaagtgctgatcctgttaatgactcattatttgaacttgaatcaattgacttacgtctctggggcttctggtacattctgagaatcctt

SEQ ID NO: 123100 - DNA, 341 bp, Homo sapiens
acagtaatttaaaaaaaaaaaaaaaaggtggggggagaaggctcgctatttgataactggcttcttggcgattctgacaaagaaataaactaaggttaaagaacttgtgtaagacggaaatagagtagaagggtatgagaacaagagatggaaaaatacgacgattaaagaattaaatattgaaatagtcaactatgggaatgttctcaattaaaaaaaaaggaagcaggcaaagaaacaaacaaaaaacacattgtgctggccaacactgtgaaagctaaagtaactctggaaatgtatttggatcagttactgtaaatttataattttcctttaggaag

SEQ ID NO: 123101 - DNA, 283 bp, Homo sapiens
ctccgcctcccaggatcaagcaattcccctgcctcagcctacctagtagctgggactacaggtgcacaccaccacgaccagctaatttttgtatttttttagtagagacagggtttctccatgttggccaggctgatcttgagctccagacctcaagtgatgcacccacctgggcctctcaaagtactgggattacaggtgtgaaccaccacgcccggccctttgctaatgtccttttactatcccgcgatccaacattatatttattcatcctgtttccata

SEQ ID NO: 123102 - DNA, 318 bp, Homo sapiens
gtctgaggcaggagaattggttgaatcctggaggtggaggttgcagtgagccgagatcaagccactgcacgccagcctgggcagcagagcaagactccgtctcaaaaattaataataataataataataaatcttaaccaaatgccatttattgacaaatgctgggattacaagtgtgagccaccatggctggccacctttttgtgatatttgaactccagcaatattttttttttctcagaagacaggcataaaaagataacataattacagaaaatcaggttttatatcattgactattgttgcagtacttttcct

SEQ ID NO: 123103 - DNA, 666 bp, Homo sapiens
agcgtgtatgtatgggatgagtgtacataagagtagtaggaaatgagctgtaatgggaagactaaaaactgggaaatattctcaaagttgaaagaggaataatggtaaaaagtacagtcatgcattgcttaataatagaattgtgttctttgggcaattttgtccttgtgtgaacaacatacaatgtacttacacaaacctagatggtatagcttactgcacacataggctgtatgatataggctattgctcccaggctacaaatctgtatagcatgttgctatactgaataccataggcaattgtaacactatggaaagtatttctgtatctaaacacatctaagtatagaaaatgtatagtaaaaatatggtataaaagataaaaaatggtacacctgcatagggcactaaccataagtggagcttgcaggacaggaagttgctctggatgagtctccgagtgaatggtgagtgaatgtgaaggcctaggatgccactgtacactctgtagactttataaacactgtacacttaggctgcactaatttataatttttttctttcttcaataataaattaaccctagcttacaactatttcctttataaaacttgaattttttaactttttgactcctttgtataacactttgattaaaatacca

SEQ ID NO: 123104 - DNA, 325 bp, Homo sapiens
aaatcaatctggactgtgtggaagaatgccataacatgaagctattagcaatctgggttaatgttctacaaaaaaaaatatgctgtctatatacacagaaagtaatgaagaaaaaagcgctgaagtacaatgcatactccttaggttctaaaactctatcagtctaatagaaagcaccaagatacagatgccaaagttagaaaaaatacaaagcagctcagaatcaatatcatatatcttattcaaggtaaattttatgttagattgtttgtctggcatttaggaggctagaaatcccatctctacttttttttttttttttttt

SEQ ID NO: 123105 - DNA, 396 bp, Homo sapiens
ctaaaacaaaacacacaaagccaacaaaaataacaaaaatttaaggttggtggaaaaaaataggtcagtttaacatccacttttatccgtaaggtatgctagacagttaacttctagtcttttgtgtaactggtaccacagaacattactgtggttatcacagtcttggaagaaaacttagagagttatggatggtgaaactagctcagagcaatagacaccctctatattttagtgaaaagaaaattcaaagaattagatatgcgagtctgatttgggccacacctgtggacagcactgttgaactgaccaggttccttcacttttcatacttccttctcctccccttgacaaaattctgagtagacatttgaataaaataacaaaaaagaaagg

SEQ ID NO: 123106 - DNA, 377 bp, Homo sapiens
gttagtgtgggttcattagtaaataggagatcagaaagaagtggaaataaatatagacaactttttcaaggacttttgctataaaatgagggcagaaaaattgagtgatagctgccagggttatggattttattgaatgattgtaggatatttatatattggcaggaattatttagtaaaaagggtatgttactagtatgaagagagagcagaatctttgattagggaaaagagtctcctgtgcgtaagtagaacagttagcctaggaacagtttctagaaattaagacagcagtaaatatgcaagtaaatccatcttgtctccttttggatttcctccatttgaaaattttcttgtaaactttcaaagtagtttga

SEQ ID NO: 123107 - DNA, 392 bp, Homo sapiens
agaggcattcacgtctccacttttcaaccaacccatgtgacaagtatttcttaagtacctcctatgcaggccaggcacgggggctgatgcctgtaatcccagcactttgagaggccaaggtggacagattgtctgagctcaggagctcaagaccagcttgggcaacatggcaaaactctgtctctacaaaaaaaaaagttagccggtcatggtggcaggcacctgtagtctcagctacctggggcagtgtggcggggaggtggtgtgagatgggaggattgcttgagcccaggaggtcgaagttgcagtgagctgagatcacaccactgtactccaatctgggcaacagagcgagaccccatctctgaaaaacaataaaaacttggtgactt

SEQ ID NO: 123108 - DNA, 703 bp, Homo sapiens
gaaggtgaaatctgtgtattcctggggccccgactttggatgttcttgcagataccttagcataactaacagagatcataatgaaaacactggcattgtgtgcattttaaaccatcattgtcacttgtcaagccctacagtcatgcctgaagaaggcaggcagcctcagcaactgtacgtgacggggcatgcttgccttctgcatgtagcaagaaccttgcagacagctgaaatctgaggcattcacacagacaggctaaaagctcaggaagactgcatgagggttattttaaaaagtgctaaggaaacagtgctcccatttaaatagatgaagattcccttcctgttttactataaatatttccttttctctttcagtccagaactagtgcttttaacctttggaagatgtaaaaaaaaaaaaaaaaaatgccttctttaaaggaaacatttctatgggtttatcagtattactgcctaatgtgagaagcattttcacacctattattcatgaactgaggtggcaagaggagggagcagttcctgccaggtgcggttaacaaatatgtcacacgcatcatctattacataggtgatatctcacgtaatcctcagaataccccttttgaagtcgcttctattagtatcctcctttgacagacgaggaaatgaagcacagagaaggtaagaaacttgcccagga

SEQ ID NO: 123109 - DNA, 456 bp, Homo sapiens
tgacaaaactcaccaccctggccaagccatccgcatctcaggagataaccatcttttacccttctcgcggtgctgcagtgagctaatggtcctctgcaggagctgggggaagggatcgaccccgacctgctagctgcttttgcagctttagcagagacctgtagggtgtgaatgcaaagcctggagactcttggttttaatgaaagcaattacagtctgtcggatatgggcctccagacagctgtagcacagtcacctgtagggttgactgaaaatgcagactcacaggccttctcccctggctgccagaatcagcgtctctgggagtggggcccaggaatcagcatgttagacacattccctgggtttctgtggtgctctctgaagtttgagagccaccacctaaaagtctgaaaaagcttcaccaacccctaagtcagagggtgccagatcagg

SEQ ID NO: 123110 - DNA, 143 bp, Homo sapiens
ctcatttatactacttctaggaattttccctaaggcagctatcacaaaaaggcataaaaatatatctgcaaggatgttcatagaaaaattgaacaaaactcaggccgagcacggtggctcacgcctgtaatcccagcactttg

SEQ ID NO: 123111 - DNA, 329 bp, Homo sapiens
tagaactaggattccacacatttcagatgataactgtaaaaaattgagcccaataaattaaatgtatatcattaacattttagcgtgtaaagcagatttaagtttaggcataaaatcataaagtagttacaaataactttaggattatggcatatttctaaatctgacaagaaacaggatactatttttggtcatctcctttacacccaatttgtttccagaaacaaactcttctttttcaataacagttagctgttgtaggattataagatcatctttaaagtatgttaactatgctttaaacagtaaagagctcatctctttagggc

SEQ ID NO: 123112 - DNA, 545 bp, Homo sapiens
  misc_feature (159)..(159): n is a, c, g, or t
tgacgttactgaaccagatgtgtacgtatttatttattagaaagctatatcatcgcggttaataatccttgtcaagttatatcccacatctctagtcatagtttgtatgccatgcactgattgtcttttcacccgttgtgtggtcatcctccatatgtngatataaaaggttattagctattgaaatgctggatcgttttcgatattatgtcattactagaagcctggtagcggtggaacggctgtcactatatacacagggagtgaacagtgtgcaaatgttgaatccctctgttagcctccccagaagagagagagagagagagagagagaattgctaaaaatggcatattataaaatcaacaatttgcacatcagtaagaacttttgcttccaggaagatggataattttccctatttcttctactaatttcaactacctactgtggacattatacatagaacaaacctaggacgactcccaaggtgcagagggaaaaacaggctgacctcagcacccaagaaacagcttggtggtgagttt

SEQ ID NO: 123113 - DNA, 574 bp, Homo sapiens
tattatgaaatgacataggtagaatctgagtaaagagcttaaatactatacttaggtcagaatgatgtgggttcaaatcccatcagtttcatcatctaagcccctcatcccccactgacttttcacttcaaaactgcttttggactcaagctcagactgcttacgtgaagttcaaaggctctctacagtttgatctcagtcttttttttttttttttcctggctttagcaagaattttttattccagtcgtaactactcaggggatgtctttgttttagggaagctgttccattctctgtctttggtatgtgcttgggtaggcctttgtgcctctgtctgtgttttaatctgtattctagcatgtgtcagaattcccttcctttttaaggctgaacagtgttccattgtacgtatctacattttatttatctattcatctgtcgctggacacttgggtgacttcctcctcttgggtatagtgaataatgctgctataaacatgggtgtgcagatatctgtttgagtccctggcaaattgtacttaaaaaaatatattttgaagaagatagctta

SEQ ID NO: 123114 - DNA, 548 bp, Homo sapiens
tcattttccccccatctatagaaggctgatgtagaattgctccaaatcactacttaagaatacataactaaggtttattaagtactaacgaggtctcaggaactgttctaagaactttacacatagtaattaaaagaaggcccacagaagtaatgaaaaacatctaccaaatgggtatgtgcatacaggctctcgggaggggacctaggtatcagctcaatggacaggacatttatggagaatgaaacaaatattctcatgtcctaagaaataagaatgcatttcacagaagaaagcagaaacacccactcgcctcgaccttgacttaaacaggcaacagcaattcattcctcctcccgctcggaccccttttcttaaagaattgggcaggactggctaataagggaaccaggcttttcttgcagcccagcctcgcatagggcacaatgcccccaccgcccacccacacataaccagagtaacataagagagatggtgttgttaactcttcccagtatcaaagaaaggccagggtcatggatgcccgg

SEQ ID NO: 123115 - DNA, 528 bp, Homo sapiens
tcagggagacagtatatacagggcagtagtgttactacccaggaaacagcaattaccaggatataagcatatagcgcgcgactatcctctttcccgcagtccctggcaaccaccaatctgtgttccatctccatgggttgacctatcctaagcattccatacaaatggaatcatacgcacaatatgtgatcttgcgggtcttgtttacttcacttagcataatatttttagaggttcatcatattgtagcatggattagtacatttccttccttttatggctgaatactattccattgtatgtatataacacacttgtttatgcattcatccatttagggacatttgggttgtttccaccttttgactattgtaaataataattccattaaaatgtgtatataaacattgatttgagtacctgttttcaattctttggttacatccctaggagtggaactgctagatcacagaataagtctacactgaactttttaaggaactcccaaattgttttccacagcagctg

SEQ ID NO: 123116 - DNA, 391 bp, Homo sapiens
cctcagagacagggttctgagcagaggctcccagagcgctttgttctggtagttatcctgacaattcttgcctgttctcactctcactccttggaataatacaaacagacatcaaagctagcttctgctcagatggctgtagaaaagagagcacctcggaccagagataaggtgacccatgtctctgtggggccagccaggtgggctgtagatggcagtgctgtctcaggctgttcctcagggcccaggtgtgtctgggcggcacaggtggaggaaggacaagagcgctgtgcctgggcgctgcccccctgtctgccatcctgcttcttgtgggggaatacaggtcaagcctattcctggtggagaaatggcctgagggtctcagcggggc

SEQ ID NO: 123117 - DNA, 508 bp, Homo sapiens
ggttcagaattttttcatcctactggatgtttcttttattagtttcttgtcaaggacaaaaggaagattagtttaaacttcttgagtcagttatacctctgatttgtgtgtgtgaatgtttttcagtcccagttagggaagtcaagagttttgtgtaggaagctcttacaggaccatgttgttctcccctgcaactgtgcctttccactatctttggctattaagagtgtgtttacctccatggggaaatgcacatcattgttacgaacagctatggcaaaatggtagtgtcagagatcctcagacaacaaaccgagctgttagtgccggggcagttttaatattcatgaaaagttgatcagcagtgatgttaccataggctgagaaaatatacaggattatctttacacgtaatcagtttcttaagcttcaaatgaccctcttagccacaaaaccggaggcacaaattcagctccagtggttagaatatcaagacctatatcataag

SEQ ID NO: 123118 - DNA, 474 bp, Homo sapiens
tttctcctcacctgttcccaaacaccttttatctctttgtctcccttttcttacagtctctctcttttatactatctctctccccaggctcactttctgtgtctctctctgatctctgtctctttttctttctcttcctctccctggctctccacatgtgtcgttttcttggtggttggcaacttcatctgttcttctgatatcaccattttgttcaccctgcgagtcgatgatgctcgattgcgggttttctgtctctgcggaggcactttcatttgcatctctgatgggttcattatagaacttcaaatgtctagtgggtatccaaacaggaagctgattttctcctggtgaaacacaagcaaaacctctcccccatattatcaccttacctatttcccatgttttgtttttgttgtctttccaccaaatcagttttcctcatgtgggctgttctttttaccagtaaaatgt

SEQ ID NO: 123119 - DNA, 739 bp, Homo sapiens
gtgacttttttaagggactggggtctcactctgtcacccaggctggagtgcaatggcatgatcatagctcgctgcagcctcaaactcctgggcacaagtgatctcacttcagcctcctgagtagctaggactataggtgtgtgccaccatgcccatctaatttttaaattttgtgtagagatagagggcctcactgtgttgcccaggctggtctcaaactcctgggctcaagcgatactcctaccttggcttcccaaagcattgggattacagatataagacaccacactcagcctctgactttggaaatattcataagtttttttttaattgaggaattcagcgttaataagtgaggcaataatcatagaattttacagttcagtttaagagtaaaatgtatctattaaaatggtctctttgtttgatttatacaaaggtgacatatagtagcaggccttggatgtatcagtggtaacaaatttggaatccgttgtaaatataggatctcactggtaaatatactgtgttcatttggataggctaattgtttaaccaacaactcccaaatcactgaggcttataaaaagaaatttatttctcactcacctaatagtttgttgccaaaattggtgaatggccttccaagggatgatgattcaatgatccaggctcctttaatcttgaggttcctagatcctttagtccaggctcctttgatcttgagatttctagatcc

SEQ ID NO: 123120 - DNA, 375 bp, Homo sapiens
caggcatgaacaaccacatacggctctatttaaatgctttctgaaagtagattcaaataaacacaatttccaaatccacagggacaaagcagtaagggaaactcagctatgatcatttctcatgcctgtccattcaccttccatagtagcactacctgggaagaatgagtgtgcatcaggcaaggtgagatgaatatctacccgacattaacttcccacgattccactcctatataagaggcaggtatattctctttttcttccacacatgctttctgtggcatactaaccagcaactatactctttacccattgttttccaaatttaatagtaccttggaaaaaatgtccaagttttataacactaagaagttt

SEQ ID NO: 123121 - DNA, 338 bp, Homo sapiens
ggctgggaagtaaagggcatgtcacatctggccataggcttcttggtgcaccgttccagggaagaaggtagaagaacaaaagagggagagagggagacaaacgcattcctgtatctggagcccactcctgcagtaatggtgtggatccactcgtgagggcagagctctcatggcctgatcacctcttcaaggccccacctctctacactgttgcattggggattaggtttccaacacgtgaactttgggggacacattcaaaccatagcagagggagaggtgagttctgagaaagtgacatttttgttggggtgggagaacgaagaaccaggaggatt

SEQ ID NO: 123122 - DNA, 139 bp, Homo sapiens
ccttaaaaaggagcagctctgaaccattagcagctcaagcaggttgtgaacaatcacacaaaaagaaacacctggtgctctcatcgattttaattttagggtctgaaactgttgagagcatccaggagaggctgagaca

SEQ ID NO: 123123 - DNA, 1072 bp, Homo sapiens
caataagtttcatgaccctgcaacaatgttaaattcttatctactgttttgcttaaagttgtagtattcagacctgttgcagggattctttcacttcctgtaacagtttgcacttcagggttctttaacaagcagaatactgatttaagagcctaactggaggaaattcttgtttcttttttctttttcttttttttttttttttggagacagagtctcattctgtcacccagggtggagtgtagtggtgccatcacagctcactgcagccttgacttcatgggctcaagcaatcctcctgccttagcctcccgaatgctggggatataggtttatgtcaccatgtccagctaattcatgtgctttttgtagagatgggttctcactatgttcccaggctggtctcgaactccttggccaaagcagtcctccttttatgtttctcccctcaactcctccgaggtccaataagggaaatttcaagattttgtaaaattaattatttacttttggcctcagttactttttctgtgaaccacagatgttctccacataatttctaaagttcatcccagttctctgattttatgattctgaataattctggaaatccttggatgcaaatattagcttgtatacagacctgtgaagatagaggccttgcttctgccaggtatcttctataggtatcttatttaccagatactttgtcagatttattagagacctgaaatacaatgctttttcttcattcagacttaatagattcaaatattatggttaattctgccatagaccatttattcaaatattttaaaatctcattttttgtatgattatgtaaaacttaaaaataattagtataatttgaatttattaacacaattatgtaagacacctattgtgagtttttgtaccacatatttgtagcctaataataaatatttattgagttctttatgtttttcaaaggacttttatatccatttattttacttaatcttcagaactgcctagtaagtatattttgtagatgtaaaaattgaggcttagagtagtaaagatacttatc

SEQ ID NO: 123124 - DNA, 471 bp, Homo sapiens
gaaggccttcacgggcagtaacacgcgtggagctgtcacctcctgtgacaatgatgccttcttctggatgccgcctgaaggacctgcctgaggctgttgtacagttacttttttaaataagtaagatgagtactctaaaaatcacgatgaaatgtctagtatagtaaataacctaaagcagtaacatggtcattgatgagaatatcaggtattctgtactgtacataattgtatgtgctggactcttccacgactggcagtgcagtaggtttgtcaatgccacatcaccgcagacacgggagtcatgcgctgagccacggcgctgtgacagctgctgtgataggaagtgttcagctccactagaatcttgtaggaccacattgtatatgtgacctgttgtggatggaaacgccatgctgtgcataactggaaaccggcaggaacctgtcacatggtacaaacaacatgggt

SEQ ID NO: 123125 - DNA, 406 bp, Homo sapiens
catgcacacacacacacacacatttcacgtgtatctcttatctgtactccaatgcctaggtcaaagtcctgatccccccaatcaggggagagctcaagtctctgaattcccagaacattctagcaatattataccacttatatcttatctgaaaagtttttttttgtatatggctttatgttttttttttttatcctgttagattgaaactacagaaggcagggctgtatcttgtacatcattgtatctccccggtgactgcaaaagtactctgtaaatgaatgttgattagggggaaaaatgtcagaaagtcatctgaagctgtcattccttactgggaggagcccattttgacaaatgagggtcaccaatttcattccttataaccaatgtacaggttactttt

SEQ ID NO: 123126 - DNA, 424 bp, Homo sapiens
ctacagcaggtaactaataaaacagactctcccagaaaatgttaaaaggataagatcattgatacaaattctacaagttatcatctcaacttatgtctatgagtacacctaagtttgaaactgaaccaaagttgtcctgctttgtgatacaaaatctgatttgttccttcttcttaaactatatttattagaagaaatcagtctattaataaaactagaattgttttaagcaattaaataggcatgtattttgagggaggagaaaaagacatttatcagattcccatggacacagcagaaagacaatccatctagtataatcaccactatgaaaaatagcacaattttaactagcatgccttacaggtaaaggtatcatatagacacattgctactcacactattctagcctctgtatcaccta

SEQ ID NO: 123127 - DNA, 433 bp, Homo sapiens
aaaaaaggaaatagacattataaatactgggaaaaaaagaaccagaaagacctttataggtgatatgcttgaatacctagaaaactcaagatatgctaccaaaaaaaatctttcagacacctaaaagaatttagtaaggtggctaaatataagatagcatacaaagattagcagcttttctttatgtcttcgtaaattagaaatcaaagttagggggaaaatgtcatttatctttgtaccacacatttaaatatacagtaataaatatcacaagaaaggaacagaatctatgtgaagaaaattgtgaaatttttattaaaggatagggatataaagcactagggtggatagtacaggagataccatgtttgccaaataagggaaattttatggatccaaattaccctgtctttaaccttgaaatcgatgttaa

SEQ ID NO: 123128 - DNA, 875 bp, Homo sapiens
catcttaagcaagtgacgtgatctctcgcctaggattgttgagagaattaaatgagttaatacatgtaaaacacttagaatggttccgcaaacattgttagagcttgataaattattattaataagttgagagaagggagaatgcatttcagatagaacattgagtgataatgaaggggagatactctaggtttgtttgaagtgatgaagccaaattggttagagggatagcttgttggaaattagtggatgaatatgtcggggcacagttatgaataggtaagccaagaagtgtgacatcttttccatatgtactgagggaacttggaaagactcttgggttacttgtcaactcttatgtgttacagataatttctaagtctgtatctccagcatttctaccttccttgatttcaaaataactgaaacttctattcaagctaattttgatagtaaagctcataatcttctaaactgggccattatgcttctttatttgctcatttatttttgtaaatgtttttggctttctctttttctctgtattctagttgtttacataatcctcactccttttctccaaagtttagtgggtttctgctagtgtttcctctctgtcctcaaaaccccagtctagatcctaaatcatcaagccataaggtggaaaggaccagagagagggagaaagggaagaaggaagggaaccatcctctagtccagccatcttgttttacagatgaggaaattgaggttcagaggaagtagaggcatatgctcaagatccacagctaccgaatgagcagggctgcccctttcaggactagatgaaggctgttttatactctcatctcagtgtgattctcagctatctgggt

SEQ ID NO: 123129 - DNA, 308 bp, Homo sapiens
cagatattaaatctcacagaaaggtgttccttattaatctttacaaaattgtcatttccccggtgaagccaatttacattaaaaataatgttcagaaaatgctgctgcctgctttctctcctcttttacccaccccttgttctcccagcaatcttcgccctgtatgtttatgtggacaatttctattgtaacattctccattccattaactctgcctcttcctctgaggggggaaaataaaaccctaaatggctctaatagttatgtattttattttgtctcagaggtttccaaacttctgcttttag

SEQ ID NO: 123130 - DNA, 294 bp, Homo sapiens
tatgccctccttatgctattcctctcaccagaaatgaatgaattcgaatgaatgaagttgctcgcctcctcactcaaagttagctttaaattctctcatcgtcgcaaaggttttcttgataaaagaaaggtacagtataggctgttgatggatctaaattaacaatgctctgttattatttataataataataataatacatctatcttaaactagctaaaaattagctgcaggtatatatagcttgtcttaccttatttatttatttttaaactactacttggtttgtttgtt

SEQ ID NO: 123131 - DNA, 473 bp, Homo sapiens
cattacctgtaattccattacccactgttaaaatgttggtatatttccttctagctgttcccaatttgtatctgtttatatagtggagatcataatgcattatttataattttatatcctgttttttcacttaacattgacatttgtgcattatgttgataaaatcatttaaatggttgcatagctcagcgcaatggctcacgcctgtaatcccaacacaggaaggctgaggcgagtgaactgcttgagctcaggagtgtgagatcagcctgggcaacatggcgaaaccccatctctacaaaaaacacaaaaattagctgggcatggtggtgcacgcctgtagttccagctactggggagtcggaagtgggaggattacttgagcctgggaggcagaggtcgcagtgagccaagatgatgccactgcactctaacctgggtgacagagtaagaccctgtctttaaaaaaaaaa

SEQ ID NO: 123132 - DNA, 318 bp, Homo sapiens
ggggttcacctaaatctcagaaatcaccactaaagaacttattcatgtagccaaacaccacctgttccccaaaatgctattgaaataaaataaataagtaaataaaaggtagattatgaaacagtgtatacacggttgatcccaactgtaatttgaaaaacatgtgtatgcctataaaaaagaacagtagactatacatcagaatattaactggttatttctagtgttgggatcaaggagaattttagttttcctttttatctgtatttttttactagtttctgtcttacgcttaattatgataaaagatttttttta

SEQ ID NO: 123133 - DNA, 603 bp, Homo sapiens
gttccccttctggtgactcaggtggtttgttttttgtttgcttaactgtcctgttgtcttctcctcctccccttggtgaaacttcgctattctcagagcgtatgccatttccatggaggtcccaggtgtttggctgtgagtgggcagtagtggtgctatagaatgaacaagaatgggctcactgggaggatagggcagctgaccatggcctcactctgaatactgattagaacccagtgcctctagggtaggggttctttacctgggagtgggaaggaagctggggggtggagaggattgggaagcctcccagggaagggaggcaatcaagtggtccaggaaccaaactagaaaattgtgtgtctgaatgtgcattttcctggggaaaggatctgttttttgctagattatcaaagagattgaaacctcccaaaataagaatcatcatttcgtctggttcagctgcttctcagcaccctgtgtccatttttatggtctactgctatgctggagaggtcaaggaaatagtcttggggacaggaagctgcccaaaaaggatctctgggcctttttttgtaagacctaattctattactagaaaaa

SEQ ID NO: 123134 - DNA, 434 bp, Homo sapiens
cagaagaaaatgcgtgtataagtggacccacatagttcagacccgtggtgttcaagggtcacctgcacaccaaagaaatgaaaataggacctgaagctggttgattagtgtacattgttttggcctttatgaaaccacattgaatgataattcatgagatcagggtatccaaatcatcttcttctacattgttcctccttaaaaataagccccgttataaacctttggtggactcggtgctgtctgaatccagaagtatgtgccaacagggagcgtcctgccatgtgcatgcattttcattagtattgcctgtaccatttagcttttgctcaagtcctggagatgtctttttccagtcatgcatttttttttcaacttataaaagtaagatccaaccgttattcttaaaaagaaaaaatattgggaagtctaaa

SEQ ID NO: 123135 - DNA, 367 bp, Homo sapiens
atgcttttttagtgagggaagataatgttttagagaagtagtgctagaaaatataagtcaagtctctggctatctccagctaaccatatctgtgcaaagcaaatcatttttccctaatcagttcaaatcaatttctgtaggatgaaagaggagtctgagaagactttttgagaagtaacaaaagagttaaaaatttaccagcctggctaacatagtgaaaccccgtctctactaaaaatacaaaaaaagccaggtgtagtggcgtgcacctgtagtcccagctactcaggaggctgaggcaggagaaacacttgaacccgggaggcagaggtggcagtgagccgagatcacactactgcactctagc

SEQ ID NO: 123136 - DNA, 195 bp, Homo sapiens
gaaaagaggatgcagtttgagtctgagagaacctggatctttctgttaattagcattgcctttgggcataacgtaactaggaaaaaatttttaaagaacaatcctgccaactaaatagtgaagcaattagatgaaagtcaatattaacaagcttctgcaattccagggagccaacggcagggattcagaagcctc

SEQ ID NO: 123137 - DNA, 824 bp, Homo sapiens
ggtaaaaggaaatggttcaattaaaaaggaaagggtcatttaagtaagttactaatttttgtgaacacctatatgtcttagatatgacctgatgggcagagaaggcatactagctttaaattaggattaaatcccggttttacaattaccatgtattgcatttcccaaaataaactactctgaatcttggtttccttatccataatgtagggatgataaaacttgcagtataagctaatgttttaggatgcatttggagactgcattataaggttacagagaagataacaacagaaacatttgagagcttactttgcgcctgacactgtgctaagagatttcaagtattaatatagttataatatagaggttagacagcaagcatcatgtctagcatataatatgcaatcaattaaaatttccatttgtcttcctctcaattttaatttctcatttaatttacattcagacaaatagtcatctagcttcatggttctcaaacctggctgatcattatatatagctttgagctttcaaaaaatactgatgccaagactctaccctgaaccaattaaattacagcctaaagtgcagctgagtttgagaatcatggcttaccttttcttgaactccttaagttagggaatacatactcccttcccagttttgtcaaattgattcaaatttgccaccttataaacatccagctattgcaaagagcctggtatatcgtagagtttcagtatatctatttcatagtttcccccctgtggtcttgcagaatggaattaacctgaattcaacaaaagaggtctttaaaattc

SEQ ID NO: 123138 - DNA, 235 bp, Homo sapiens
cattatcctttgctatggactgagctgtgtccctcccaaatccaaatgttgaggccctaacccaccgtgtgattatatctggagatagcatctttagggggtaaagtcaaataaagtcataagaatggaaccctgatccaacaggactatggccttataatagaaagcaagagaaagatctctctctctctctctctctctctctctctctctctctctctctctctctgccata

SEQ ID NO: 123139 - DNA, 682 bp, Homo sapiens
  misc_feature (499)..(499): n is a, c, g, or t
  misc_feature (512)..(512): n is a, c, g, or t
  misc_feature (520)..(521): n is a, c, g, or t
  misc_feature (525)..(525): n is a, c, g, or t
  misc_feature (539)..(539): n is a, c, g, or t
  misc_feature (543)..(544): n is a, c, g, or t
  misc_feature (547)..(547): n is a, c, g, or t
  misc_feature (551)..(552): n is a, c, g, or t
  misc_feature (554)..(554): n is a, c, g, or t
  misc_feature (556)..(556): n is a, c, g, or t
  misc_feature (560)..(560): n is a, c, g, or t
  misc_feature (563)..(564): n is a, c, g, or t
  misc_feature (569)..(569): n is a, c, g, or t
  misc_feature (581)..(581): n is a, c, g, or t
  misc_feature (593)..(593): n is a, c, g, or t
  misc_feature (598)..(598): n is a, c, g, or t
  misc_feature (603)..(603): n is a, c, g, or t
  misc_feature (606)..(606): n is a, c, g, or t
  misc_feature (614)..(614): n is a, c, g, or t
  misc_feature (623)..(623): n is a, c, g, or t
  misc_feature (630)..(630): n is a, c, g, or t
  misc_feature (632)..(633): n is a, c, g, or t
  misc_feature (637)..(638): n is a, c, g, or t
  misc_feature (642)..(642): n is a, c, g, or t
  misc_feature (644)..(644): n is a, c, g, or t
  misc_feature (657)..(657): n is a, c, g, or t
  misc_feature (659)..(659): n is a, c, g, or t
  misc_feature (661)..(661): n is a, c, g, or t
  misc_feature (668)..(669): n is a, c, g, or t
  misc_feature (673)..(673): n is a, c, g, or t
  misc_feature (676)..(677): n is a, c, g, or t
gcggccgcctactactactactactactacgaaattcgcggccgctcgaccagggattgaggtcttggatactcaaagaatctttcatttctaccagggcaccagatcccttccatggagcaggccatctcgggttcactgggccagggctggtctctgttccccagcccacctggctcacacacagcctcgtgggtagggtcagcagaccagattgcttgttatgtaagacgagaggtctggttgatgatctagcactttcaccaagaaatggacgtggagaggatcagagtgatcaagagtgtatgaagtgcattccaatggtgggcaaaacaggctcctgctcttgtggaggtcacaatctagtggaggagggatgttactagaaatgcacaaagtgggctgaacacagtggctcacacctgtaatcctagcactttgggaggctgaggtgggcagatcacttgaggttagaagttagagtccagcctggccaacntggtgaaaccccntctctacnnaaantacaaaaattagcngggnntgntggnncncncctntanncccanctactcaggagnctgaggcagganaatcncttgnacntgggaggnggaggttgnagtgagncnngatnncacnantgcactccagccngngngacaganngagnctnnatctc

SEQ ID NO: 123140 - DNA, 2042 bp, Homo sapiens
  misc_feature (178)..(178): n is a, c, g, or t
  misc_feature (1177)..(1177): n is a, c, g, or t
  misc_feature (1859)..(1859): n is a, c, g, or t
  misc_feature (1872)..(1872): n is a, c, g, or t
  misc_feature (1880)..(1881): n is a, c, g, or t
  misc_feature (1885)..(1885): n is a, c, g, or t
  misc_feature (1899)..(1899): n is a, c, g, or t
  misc_feature (1903)..(1904): n is a, c, g, or t
  misc_feature (1907)..(1907): n is a, c, g, or t
  misc_feature (1911)..(1912): n is a, c, g, or t
  misc_feature (1914)..(1914): n is a, c, g, or t
  misc_feature (1916)..(1916): n is a, c, g, or t
  misc_feature (1920)..(1920): n is a, c, g, or t
  misc_feature (1923)..(1924): n is a, c, g, or t
  misc_feature (1929)..(1929): n is a, c, g, or t
  misc_feature (1941)..(1941): n is a, c, g, or t
  misc_feature (1953)..(1953): n is a, c, g, or t
  misc_feature (1958)..(1958): n is a, c, g, or t
  misc_feature (1963)..(1963): n is a, c, g, or t
  misc_feature (1966)..(1966): n is a, c, g, or t
  misc_feature (1974)..(1974): n is a, c, g, or t
  misc_feature (1983)..(1983): n is a, c, g, or t
  misc_feature (1990)..(1990): n is a, c, g, or t
  misc_feature (1992)..(1993): n is a, c, g, or t
  misc_feature (1997)..(1998): n is a, c, g, or t
  misc_feature (2002)..(2002): n is a, c, g, or t
  misc_feature (2004)..(2004): n is a, c, g, or t
  misc_feature (2017)..(2017): n is a, c, g, or t
  misc_feature (2019)..(2019): n is a, c, g, or t
  misc_feature (2021)..(2021): n is a, c, g, or t
  misc_feature (2028)..(2029): n is a, c, g, or t
  misc_feature (2033)..(2033): n is a, c, g, or t
  misc_feature (2036)..(2037): n is a, c, g, or t
ttttcagtgggccccagataatgcctgtaggagaggccagtactccaaaggtggccagggccttcaggctgccagtctcagcttccactggaattccagtgatgtctcatattggggaccctacaatgccttaccctggcctctcgacagtaccttctgatgaaacattgttggcctngaccatgccttccactgaggcccaggctatgccccctccgtggctcagatgttgcccccacaagatgcccatgatcgtgggatgccccgagctgagtcccagtcattgctggttttaggatctcaggactctcgtaagtcagccagactcccaagcaggcccattcctaccggagcatcccagacctgctccacagacagcagagcagaactccaggcctcaggaaaggactggtagacggggctcctcagaggcaaggccttactgctgcaactacgagaactgcggaaaagcttataccaaacgctcctaccttgttagccaccagtgcaagcacatgggtgagaggccctatttgtgcaacgggaaaggtgtttatggtctttcttccgttctaatgagcgtagatgacatacgtgggtacacaccagacattgaccatataaatgtgatcagtgcagccaagagttcatgaggtctgaccatctcaagcaacaccagaagactcattggccaggaccctcagacccacgggccaacaatggacagcaggacggtcctgttcctggtccttaggtgaatgaaggaagaggattctaggcagagaacactggacctggcaactgctcagaggagaggcagtcttcaagttctatattcattcagcaaatgttttttgagcctacaatactgagagcaccaaggctgtggggacccatggcgaggagcatggagataactaaagaatgtgtcagggaagaaagacttctcaaggaggtgcctcagtcagatccaaaggactcatggcggctagctgcacctcccatttcttggacatataccattggacatgtctctatcttctgaaaactatggcatggacagtaaggattcagaggtgtatgaaggcaccctgcctctgcagagcagaaagatcatagacaaaatttctgaatgtgcccagtgctgccaaggagataagctggtcctctacaggcncaagcttatctgggcctctagagaagcccacagccttggctgtgtctgccctgctctcccacccctaccctgaccctgtcctactttgctgcctcggtctgtgttactagtggccccagtatacctgggatggacatccaggtgccctccatccaagctcccaagtgaggggagtggacatgattaaaagaacaggagcagaaggggctcatttttgacccattcactagccccagggattgaggtcttggatactcaaagaatctttcatttctaccagggcaccagatcccttccatggagcaggccatctcgggttcactgggccagggctggtctctgttccccagcccacctggctcacacacagcctcgtgggtagggtcagcagaccagattgcttgttatgtaagacgagaggtctggttgatgatctagcactttcaccaagaaatggacgtggagaggatcagagtgatcaagagtgtatgaagtgcattccaatggtgggcaaaacaggctcctgctcttgtggaggtcacaatctagtggaggagggatgttactagaaatgcacaaagtgggctgaacacagtggctcacacctgtaatcctagcactttgggaggctgaggtgggcagatcacttgaggttagaagttagagtccagcctggccaacntggtgaaaccccntctctacnnaaantacaaaaattagcngggnntgntggnncncncctntanncccanctactcaggagnctgaggcagganaatcncttgnacntgggaggnggaggttgnagtgagncnngatnncacnantgcactccagccngngngacaganngagnctnnatctc

SEQ ID NO: 123141 - DNA, 441 bp, Homo sapiens
ccagggtttgttatgttatgtatacataaggtgcattagcatgaagttaatagctatgctgtaaaaccaccatgggtgatgttcctgaaagaaacaggatgcagctgggcgcggtgactcaacacctataatcacagcagtttgggaggctgaggctggcggatcacctgaggacaggagttctaggccagcctggccaacatgtgaaaccctgtctttaataaaaatacaaaacttagccaggcatggtgaggcatgcctgtagtcccagctacttgggaggctgaggtgggagaatcactggaacccaggaggcaaagcttgcagtgatgagatcgcaccactgcactccagcctgggtgacagaacaagacgctgtctaaaaaaagaaacagaaagcactggggtcatgtgacagcctctactgttctggatattgtc

SEQ ID NO: 123142 - DNA, 797 bp, Homo sapiens
gtctttggagagtctaattgcctctgactacatttcaaatcagtacacatttatatttgataagggaatgcatgccttttgttgcaacaaataggtgcactgaaatgaagacactcaagatcacggggtgtgtcaggagctgtcaggaccaccaccaggttccttgtttctctagatggactcaacaggactcaccatctagacctactcgtgaccgatttattccagtgaagggatacaaagcaaaaccagctgagggagaggttgcataggacaggttagcagggcaccaggctccctcttcctcagtcctctcccaggggcatcacaccggatgtgcctggctcatccagcatcacattgtgacaacacctgttccatgttatcgaccagggaagctcaccagagtctgctggtgcaaggtttggtttggtttggtttggttttgggtcagagttttgctctttcgtccaggctggagtgaagtggcatgatctcggctcgctgcaacctctgccccctgggtgcaagtgattctcctgcctcagcctcccaagtagctgggtttacaggcacccgccaccaggcccagctaatttttgtatggtagtgcaaggttttgatcagggttcatgcacacactgcctcgcacaatctgaatcttctggactcccggaggaaaccaagggttccgtgtaaaccacattgtttatactgattattccagcgaagggatacaaagcaaaatcagaagagggagaggttgcataggacaggttagcagggaaccaggctca

SEQ ID NO: 123143 - DNA, 362 bp, Homo sapiens
ttgggtcccaaacctaggtgatgtaactctactgcttaggccctgcctacagaggacattgtgacatatccctgcatccatcacacaggtaatgcagctctcttctgcttggcccctactcacagaaaggattgtgatgtatcacagggctcagcacctagctaacatgacttttctcctcttctaggtttttgcccacaggggatattgtgacatgtcactgggcctaatactagggtgacagtactcttgtgtcatggcactgccctcagcaggtgtggtgatatattactgggcccagaacaaatgtgatatgagtctcctgcctggaccctgcctacaaggtgcattgtaacatatct

SEQ ID NO: 123144 - DNA, 534 bp, Homo sapiens
tgcttctggaagagggagggccagtgagcctccagaaggttgtttgtgtttctccacacccagagctagacgtgcgacacacacacacacacacacacacacactttaagcaaacattggactaaggcatagctggacggcacctctacttaggaaacagcgaggagatgtcaattctctttgttatctggggtcaggatggacatttctgggagcactatccttcttcctgtcaaactgtagaacttgaaactccagctgggcaccctggctcatgcctgtgatcccagcactttgggaggccaaggtgggaggatggcttgaggccaggagtttgagaccagcctgggcaacacagcaagactccatttcttcaaaaaataaaattagacgggcatggtggtgcacagctgtagtcccagctactggggaggctgaggcaggaggatcgcttgagcccaaaagttcgaggttgccgtgagcaatgtttgagccactgcactccagcctgggcaacagagagagatcctgttt

SEQ ID NO: 123145 - DNA, 335 bp, Homo sapiens
tcataactatcagaatgatcatgcaattttaagtatgtacaaggcatatctatttggtgagctcatccttcctcattaatggcaacttctccgcttagggtcccaagaatgtactctgggtgacaatagtctttacctactctaacttctttccttaggcagaatctccaattagaagtgaaacagtgatcatattcaggattaaacacaaactttctggtggctcatgcctgtaatcccagcaatttgggaggccaaggcgggtggatcacaaggtcaggagatcaagatcatcctggttaccacggggtagagaaaccccatctctactaaaa

SEQ ID NO: 123146 - DNA, 371 bp, Homo sapiens
tgaaggattacacatttaatttgagtaaatggtttgatagactgatgcacatgaatgcttctaggaggtgttctgtttcaacatccagtaattaaaaaaaaaacccacacgcacacagttgatactagaaaaccgcacacttttaagaatttcatcctatgtaaatttgtcctaaacctttttctttaaagtgattagtagaaaatttttttctttcttcagtgtgggtaaatcagtggatgaactattttgttcaaagtttagctccattgtgattcgccttatcctgcgactaacattgtaaaagatcccagtgcagttccgagctgagtgtggccctcgtgcccgaatttcttggccttcgagggcca

SEQ ID NO: 123147 - DNA, 1774 bp, Homo sapiens
tgaaggattacacatttaatttgagtaaatggtttgatagactgatgcacatgaatgcttctaggaggtgttctgtttcaacatccagtaattaaaaaaaaaacccacacgcacacagttgatactagaaaaccgcacacttttaagaatttcatcctatgtaaatttgtcctaaacctttttctttaaagtgattagtagaaaatttttttctttcttcagtgtgggtaaatcagtggatgaactattttgttcaaagtttagctccattgtgattcgccttatcctgcgactaacattgtaaaagatcccagtgcagttccgagctgagtgtggatatgtttaccccagtgatatcattagtgtaagatgatggagtaaaatgacatttagttattttgataatgcaacctgtgtcgattctgctggcatcctcaatcagtccaagtaaaagaaatacaggaagggagagggcttttatttttaaattaagatggcagcattaatttcactaagtgttcttttagaagtaaatgttggaaaatcagcaggaacatgggtgtaatgctttctggtcctccttccaagtaatgccatgagctttgacggtgctgtaattaaatagaaagcaaaactgtggtaagaaaggagtgtggtttgaagtggaaaaattgacagtgctgttaagattccgtgaatggtacagattcatctcttctccgagtgccttcaaaaaaaaaaaaacaaaaaacaaaaaaaaccctcgcttctgattacaactaattaaaaagaagatgggtccgcttgtattcccccaggacaagtttaggcaagtggcttcctgggaattgtgtccattcttttctctattcttggggccaaatgtaaatggccttttggtgttttcctgtgccctaatggagcaatggaggatgtgtgcccagccctgagccttaattaatggcatctacgttcttacttccttttttccctctgaatctggaaactggagccaggctcgctcttgaactacatgctaccccgaggaccttagatctttctaggagagatgagttctagctcagtacgaaattgatggcctcacacttagctcagggctaccagcagctgagcgccccttcccctccaatttaagagattactgaagtcttccttcagtgttcctctctcagcccatcaggatgtccaaagggtgggaaggtgcagacgttgctgttcctctcagctaccccctctccaatgtccctcaagtccacttgttggaggagctttcaatgccgcagggaccgctgcagaagagtggagtaatctgctcgcccgccgccaggtgaaggggaccccttggtccgactgagaccacatagcgatttactgaggggcttttaaactgtcttgactttgagttgtggttttttgaaaacaaccaaggtcttgctaaaaagctgcgggagagctgggaaaggccggcctgagcgcgggggagggggctgcaagatgagggggcgctttcaccagtcccctccccctccgcggccaagtgtcgatgggcagagctgggcttctgcctcctctccctccaagatttcagataaagcggctgccttgctgcagcgaatccgcacaattaaaagctttaattagtggctcctccattttcttagttctgatgggctttatctaatgagatctggtctctggcttagatctgctccgaatgacgtgtccgcaatgaatgagagctgcgtcgcaaaca

SEQ ID NO: 123148 - DNA, 1560 bp, Homo sapiens
  misc_feature (1559)..(1559): n is a, c, g, or t
tgaaggattacacatttaatttgagtaaatggtttgatagactgatgcacatgaatgcttctaggaggtgttctgtttcaacatccagtaattaaaaaaaaaacccacacgcacacagttgatactagaaaaccgcacacttttaagaatttcatcctatgtaaatttgtcctaaacctttttctttaaagtgattagtagaaaatttttttctttcttcagtgtgggtaaatcagtggatgaactattttgttcaaagtttagctccattgtgattcgccttatcctgcgactaacattgtaaaagatcccagtgcagttccgagctgagtgtggatatgtttaccccagtgatatcattagtgtaagatgatggagtaaaatgacatttagttattttgataatgcaacctgtgtcgattctgctggcatcctcaatcagtccaagtaaaagaaatacaggaagggagagggcttttatttttaaattaagatggcagcattaatttcactaagtgttcttttagaagtaaatgttggaaaatcagcaggaacatgggtgtaatgctttctggtcctccttccaagtaatgccatgagctttgacggtgctgtaattaaatagaaagcaaaactgtggtaagaaaggagtgtggtttgaagtggaaaaattgacagtgctgttaagattccgtgaatggtacagattcatctcttctccgagtgccttcaaaaaaaaaaaaacaaaaaacaaaaaaaaccctcgcttctgattacaactaattaaaaagaagatgggtccgcttgtattcccccaggacaagtttaggcaagtggcttcctgggaattgtgtccattcttttctctattcttggggccaaatgtaaatggccttttggtgttttcctgtgccctaatggagcaatggaggatgtgtgcccagccctgagccttaattaatggcatctacgttcttacttccttttttccctctgaatctggaaactggagccaggctcgctcttgaactacatgctaccccgaggaccttagatctttctaggagagatgagttctagctcagtacgaaattgatggcctcacacttagctcagggctaccagcagctgagcgccccttcccctccaatttaagagattactgaagtcttccttcagtgttcctctctcagcccatcaggatgtccaaagggtgggaaggtgcagacgttgctgttcctctcagctaccccctctccaatgtccctcaagtccacttgttggaggagctttcaatgccgcagggaccgctgcagaagagtggagtaatctgctcgcccgccgccaggtgaaggggaccccttggtccgactgagaccacatagcgatttactgaggggcttttaaactgtcttgactttgagttgtggttttttgaaaacaaccaaggtcttgctaaaaagctgcgggagagctgggaaaggccggcctgagcgcgggggagggggctgcaagatgagggggcggctggtggctcggcggggggtcctctagaacgnc

SEQ ID NO: 123149 - DNA, 189 bp, Homo sapiens
ggaataaaaatgtattaagacttgagctgtatgtgttttgaatctcatttttataaagcaggcctttgtgagtagggacagtgggcagtgttatgacaggtaagttacatggcaatgaattttgtctgcatgtttgccaaaactttctaacagagatataaaaaagaagagagtgggctgggtgcggta

SEQ ID NO: 123150 - DNA, 556 bp, Homo sapiens
ttccccattttgaggctgtttgagatcacctgattttttttttaattgtgttacaaaaaactaactttaagttttaactgttttcaacagggaaaataacacactcctcggggaaaggtgaagggttgagaagacaggccctgggtaaaaatttttacaacacctggagttgataggcctacctaggagagaacacaggcactgccacaccagcacaggggacagctgctgtctggggtcagcagaccagttcacacgccacacaaggttgctatagatccaaatcataaaaatcttccagctcatcatgaaacaagtcccactcatcttcagagtctgccagttcatcatccccacctgcagccaaaagcataagcaacatctcgcccacctcaagaggtgacaacctcttcatcattgtcaaaagggttgctgctatctctttcctcagtgagttctcagaagtggttccttcattggacccagtttctgcttgatgttcccactttctgtctctgtggcttctctgtaaggccatcagggtacgcatgcttgt

SEQ ID NO: 123151 - DNA, 403 bp, Homo sapiens
catgccagggcccccaggcagccagcaccagcccaaaggccacagggctggggaaagctgatgtcctgttaggatggctcccagggacctctgactcaaggaagggtgaccttttgtttcctactctgctgagaaatcacttgattcttcctcaaatgaatcaccttcctgaaccccagattcttctccaggaatatgggggccatcttgttatggggactatcttgttttccagtttcctgcctaccctaaatactttgaggctgaattgcagattttcagtcattttaccttctcaggtaaaagccatgaaagaaacaagcctactccaccagccaaagcacttgcccatttgctggcttcatgaaccgcaggtgggaggtgtttgtgttaaaaaacagca

SEQ ID NO: 123152 - DNA, 419 bp, Homo sapiens
agtgttcctaactgcccagcgcccatgcagaagggccagggggtagagcacccatgtgatgaatgccaaccaacagtgtacttgccatgccttcaccttgcaagcagggttcttttgtaattagctctcgaatgacagcaactctgcccctgaaatgggtgctctgcagtgattaagggctagtgttagctgtaccagggagatactgctgtgaggaggtgcctctgtttggtgtctgtgaaacattagatgctatttaaagtgatagcggttcttagctggctacttggcctctgccatctgttagtgtgattaggctggtctgattcacaggtgcagcctggggcggctgagattaagcagctgtggtctgtgtggacagaggaatgccacggccggggtaattggcaaggcaggaa

SEQ ID NO: 123153 - DNA, 542 bp, Homo sapiens
agcaaccgccgcccccggacctgcggagtctgggcttcggccggagggtgcggcctccccaggagcgggccctgctggtggtattcaccagatcccagcgcaagaacctgttcgcagagatgcgcgagcagctgggctcggccgaggctgcgggcccgggcgcgggcgccgaggggtcgtggccgccgccgtcgggcgccccggatgccaggccttggctgccctcgcccggccgccggcggcggcgcacggccttcgccagtcgccatggcaagcggcacggcaagaagtccaggctacgctgcagcaagaagcccctgcacgtgaacttcaaggagctgggctgggacgactggattatcgcgcccctggagtacgaggcctatcactgcgagggtgtatgcgacttcccgctgcgctcgcacctggagcccaccaaccacgccatcatccagacgctgatgaactccatggaccccggctccaccccgcccagctgctgcgtgcccaccaaattgactcccatcagcattctatacatc

SEQ ID NO: 123154 - DNA, 162 bp, Homo sapiens
aacagtgacaaaaacagaggagggggcagacagagagaagagacaggagacagagaaagaaaggagatggaggaaagagaaagagttcaggcacacatttgtatgtgtgcgtgtgagtgctcatgagtgtttagagaaacgtcagggagatgaagagagaca

SEQ ID NO: 123155 - DNA, 551 bp, Homo sapiens
ctctagagtgatcccccttttcacaggacaaaaagagggagtaggttttcaaatccctggcatgaaggagaaaacacacttgttgatgaggagccaacagaagattcacaaaaaagaagctggaggaagaggagttgcgtagaaggagaagcacaaccaagtgttccttcttagggttttggaagctggatggaaagaacgtacttaccaaaggttacgagaggaatgctgaccctcttctgtgaggtccctgtgtttgatgtgtttccagctctgatttaggcttatgctgtccttgctgggcctttgtgaagtatccagcaaggctggaacaaagcactttattgtagtgcatgaaaaatatctttgctgaaagagacaatgccaaggctagggggactaaaattagaccttccggtgtgtttgacttggcaagttgtatggcctcctccacctgcctccctcccagccgtgggccttctgagagcacaggtagcatgtgctgaaggagaggaagtgccgcttcctctggcaacctgtggggatgacaa

SEQ ID NO: 123156 - DNA, 387 bp, Homo sapiens
ataacatcagggaaaatatagaggagaggtcacattacatttcatgggtcaaatgcagcctgccgcatgtttttttatggtccacaaacgaaggatggtttttatatttttaggtggctgagggaaaaaaaaacaagaattatatgaaattcagatttcattatatataaagttttattgggactcagctatactcatgtatttatgtgttgtctgttggtactttcatactatgagggcagagttgactggttgcagcagagactgtaatggcccacaagcctaaaatatttactgtgagaccctttacagaaaatgtttgctgatttctgataaagagttgatgaagagtaaaacaaaaatgtcatgtaagtgaatgcagatctt

SEQ ID NO: 123157 - DNA, 215 bp, Homo sapiens
agggggtaggagccttgtagggtggaccagtgcattgagggtgacagcagcggtggttgtattggcatcagcgctagtggtagcagcagcagcaaatctggggtcagggaagtgggagtgggagagctgtggcagcctgcctggcctggcctggcatcagtaggaacctgtgggtgctgtaccgtgggcctcagtggcagcggtggaggagcagc

SEQ ID NO: 123158 - DNA, 350 bp, Homo sapiens
gacttcatgtcacagttggaaacacatctccaattgccaaatgaaatacaattaggaaaacaaagtgcaatagaagaacttacttctacttaagacaaattttcatgagtgcttctgttttatgtaccaaggtattcctttattttccagaggttaccaaatgaagagagtaaaaagagctttcatatgatttgacgatggtaatttaagttctattttaatttctattcctcaaatctatacccctccactcccaaagtcaaatgccacctatttggattctacctctgtgtactcaaagagaagctggagacaatgaaagttcaagcatgtagactggcatctggaat

SEQ ID NO: 123159 - DNA, 556 bp, Homo sapiens
tcacatactataagtgttctaactttgttcttctttttccaaaattgtgtttttgaatcagcaagtcaaattctacaaaacaaagagccttctggaatttcaattgaaatcatgttaaatatatagatcaatttggggagaactgatatcttaacaatattgagtcttccaatctatgagcattgtatatctccccatttcactaggccttatttaatttttccagcaacattttgtagtttccagtgtagaagttttacacatttttcctcaaatttatccccagtatttcataagttttgatgctatcataaattgtattgttttcagtttcaagttctaattgcttattgccagtacatagaaatgcaaatgatttttatattggcttatatactgcattctcactaaactcacgtattagttcagttgatttttttttcagattccctacgattatccacatagacaatcatgtggtctgtgaatgaaggtagttgtatccttcttttctaatctgtgtgctttttattactttctcctgccttactgcact

SEQ ID NO: 123160 - DNA, 272 bp, Homo sapiens
ctgtatgtgcatgccacgacgcctggcttaattttttatttttttagagatggtttctgcatgttgcccaggctggccacagactcaagcaatcctcctgccctagcctcccaaagtgctgggattacaagcgtgagccactgcattcagccaaagacttcttcttaagacctttatatatttgcaaacattctcttaatgccatagtcattataatgaaagccatgagtcccacagagtctttctgagttctactccatgagaaccactgg

SEQ ID NO: 123161 - DNA, 297 bp, Homo sapiens
tcgtctctaaggttccccccccacgatcaccgcatccaggcccaggcctctgtccctcctctgtggtagaaaggtggaatagaatgtggggtgtgctgaggtgtgagatgtggtgatggtgctggtggtgctggtgatatgatgatggcagtgatggtagtgataatagtgatgataatgtgatggtagtgatggtggtggcagtaatagtgatggtgatggtggcagagagggtggtgacagtgatgtcagtggtaatggtggtggtgatggtaatggtgatggtggtggtggtga

SEQ ID NO: 123162 - DNA, 402 bp, Homo sapiens
tggctatatgctcaactgtatttgtgatgtgtacacacaaaaagaaattctaaaatcttcaaactccaaatgttaaaggcatcatgtatattattctgactctgttaatactagcaatattatcattcctaacttagaactcccaaaaaaagtcaagtaggcaagaaatgtgtcctgtcaatcttaagagagattcaagaaacatgttgtaattataaaacaggctgcttaggaaattattaccctgcatacacaaatagcagcataaattctatgactgttaacagaagtattcagtatatatttataatatcacaggcagatttctcttaagtaaagactatcacaattatcatttcagtaattttccccaaagctattatatgcattataatcaaaaaa

SEQ ID NO: 123163 - DNA, 1034 bp, Homo sapiens
tagaaagctgtctcaggggaacacatggctaagtagattggcattgtttataaacataacataataaaatccctttttaaatatgtttgtggaatagtaggagatacttcccacttgggaaacaaatactttaaccacaaggattccttgcaggtccctaccctttctccattggtcttctaaaagtgtgcttagaggcacttgatttgaaggtgagttaaaataccaaggacctcctgtactattctttcaacagcaaagcagaattatctggaatcattagcagaggatgattggttgtgcctggtaatgggtagtaaagaaccaaagtaatatcaagataattaaaacaaaaccatatctgaactgtctaggaaaatggttgggttcaagctttattaagttcctagtgtggacctggacataggttcttcagtttcacttgtgtctttgtaaaaggtgtattccagctcctcttatgatgccttgattagttgaatgacattgaaacacttccagtttggtgggcaataggaatgtatgtcacataagctgagtcctttgcagaatgtctgtgatactgaccatggcaaatgtgtgttattgaatttttggtcagggatttttagtgcaatatagaagagtttagtttgagttttagatcccaagtattcctttcttcccaacccatattatacttggtcaaataaagtcagggtaatcaggcagcctgaaaggaagcagggcatctacctgcctctctggtcagatggagtaattaggaacaaaaaaggccactctgttgttagccacacctatttatcaagaacaaaggagcatagcattttaaattcatttgagctgaaaccctggctggctcagactcttacttgtcttatcacgcaagatcagctttgtatatcattttaaagaggtcgtgtggcgtgttttcctgacttctgtcatctcaagttaaatatgtcatcagaaaatatatatcatccagaaaatggtggctctctcttcctgtgaga

SEQ ID NO: 123164 - DNA, 340 bp, Homo sapiens
tgttgctctgacgggagtccttttcagtggatgtctcatccttcttagtgcctcaaactagatctagttcagaaaggttatcagaagttaggacaagtttattttagtgcaaaccagtggaaatccatgcatcgtttcttcaccatgtgcattttctatgaacctttggaagaccacctgtgttgaacattgcccaagtcctgggagagaagtgggtgcggtccgcttcctgtcctcaatttgcccgcagcggcggagtgcacagagcagggaaaggcagccccagagggatcccgccctccagcatgcagcagactgctggcccagtcctggctccaag

SEQ ID NO: 123165 - DNA, 479 bp, Homo sapiens
ccctgcacccagtgtacccagcctttaaaacctgcgccccccttggcacaatgtctaagtcttgtgccttcggaggggctgttgggcccactccaggggtgcccccttgcttgccagtcgccctggcttctgcatatctctcgtagcccagatgctgtgctttacttcttgcagtttatattccaaaagtcaaatgtatttttgtgttttccgaatggaaatgtttgagtgtagtttgagtatggtttttcaaactcccatcgtcccaccttgacaatcactgctgtggttgtttctctgctgcccacctacgctccttgtgcctctgcctaagctgctttgacatcatctgcttttgctatctgtcattttcctacatccttcatttttagcatgttacacagcctacatatatttatttatagtaaagggtactgagaaagaaattaaaagtagatggggaaagaaaggtaggacta

SEQ ID NO: 123166 - DNA, 557 bp, Homo sapiens
atttttgtatttttagtagagacagggctttgctatgttgcccaggctggtcttgaactcccaggctcaagtgatctgtccacctcggcctcccacagtgctgggattacaggtgtgagccaccgcaccggccaggtttcttttcaagcttaactgttcactgggcagaccttgtgtgacatgtgcttggacactgtaatacttgggaggtttgtttaagcatttacatttgctcattgaatgattttaggagctggtatttagtaaacactcaccttgtcatatagatcattttaaaaatgctttatttaatttatttattgggtttacatactgtaaagttcagttttttttaagtacaattcagtggttattagtatttttttttagaactgtgcaaccatcatcacaatctaattttgcatttccatcaccccaaaaagaaacctcctgcccattagcagtctcttcccattcataccccaagccctggcaactgtccaccttcttcctgtctctgtggattggccttttttggatgttttatgtcaggagaa

SEQ ID NO: 123167 - DNA, 457 bp, Homo sapiens
aaggctatagtaaccaaaacagcatggtactggtataaaaattatacttggaaaaatagaactgaatagagaacccagaaatattacttacctataaacaactgatctttgacaaagttgaaaaaaatatactctgggggaaaggacaccttattcagtataattttttttttcagagacagggtcttactctttcacccaaagctggagtgcactggtgagagctcaatgtagcctcaaattcctgggctcaaacagttctccagcctcagactcccaagtagttgaaactacaggcatgcaccaccatcctggctgataccctatccaataaataatgctggcataattggagagccatatgcagaagaatgaaactggacttctatctcttaccatatataaaaatgagctcaagatggattaaagacctcaaactacaaaaatcctaaaacct

SEQ ID NO: 123168 - DNA, 337 bp, Homo sapiens
tgatcctcatgaagtgtttcaaagaaatagagcacctttctgtaaaaatagatccacgtaaagttttcaaaatattcctgagtctggcaagggtgggcctacctgaagtttctcctgacacactgttaattagctgctttgtaggtaggcatgtattcttcagtttgccagaaccccttgcatgccttcatttagtctacctgtaggcattgttgggtgagaaagggttttgaagtgggaaagcttgcaaagactgcttttaacggaaagtttcatgggcaggattgagaccaagagggaagaaacttcaagttaatggactaccttgaaattttag

SEQ ID NO: 123169 - DNA, 160 bp, Homo sapiens
catgactttaccagagatcattgcttacttttgtagatatatattaaaagcaaatatattccattcccagatgttcttttctgtatcaaaattattttttaattttatgtcatttttttcaacttttatgttagattcaggggctacacgtgtgggtttg

SEQ ID NO: 123170 - DNA, 797 bp, Homo sapiens
atggggcggtgcggcagcgcgaagcctgcagtcctaaacgctgggtagctccgggcttccgagggggtgtgtctcccgcctctttaacctggcaggggcggttcaagtggccggggaaatcagcgaattgcagggtcaagggctggtgctttgaaagagaggcggaggggagagagggattttcccgtccccgctgcgctctgtcctccattactccttttctcggcccgcggcccgaacccgctgtgcggtagaggcagccgggtccctttaaggcccagctgcgcctgtgccttgggctctcctgacacggcccatccggaccctgaggagccagcgggccgcaagcaagttgctgggcggcggtggagatagcggcggtgctgggaggggtaggtgagggtcgcgaggctgcctgagcttctgagtgagcctggtgattttgggaacgcgggacgggcgacctgcggcgccaggagcggggccgaggtacggcggcacggctgcagcctggatgggaagttcaagtttactgcgaagtccacccagcgttccggaggtgagggcgccgcgccaggccgggcgggaggcattctgaaggcaaatcctgtttagacccaggcaaaggttcctggtgacccaggctctcatgagcagattgtcccttatcattctcctgaggatgtctggagcttcagtgctgtgtgctcttggcctccacactgggggtgccaccaactcccactgtccagggcttctggtggactctccgaggcaccgatgtagaaacttaccca

SEQ ID NO: 123171 - DNA, 366 bp, Homo sapiens
ccaaatgtgagtttaatggaggcagatgtacaagggttctcacaagcccagggaactcaacttctagaaggaaacggggccacaccaaacaagatgatggggcaatcaagagatactcccataacagcaagaaacaaagagcattcacgcctcctatgccaacgccctccaccaccaacgccaaaaatttccgtatttcataacaccagctgagataactgactcaaatctgtgcacttccacatttgcatactgggttctgacatttgcctaccactgaacagtcaccaagtaagacgcaaggtggagacgtacccacaaagcaatatttaatgtctttggatcgccactagctaaaacctcctg

SEQ ID NO: 123172 - DNA, 516 bp, Homo sapiens
ttgtgctacagtattactgaagagtataatggaagtaatgtcctgctgaaaattttctttgagatattaatcattaataatttatatattgctatttaatacttacataggtctttagccttttaaaggatttctgtttgacagcttttataattgaaagttattccattttttttttaattttgcatgcttgaaaaagatgaaaacagtgatttaaattatgaagtatggggccaggtgcagtggctcatgctggtaatcccagcactttgagaggctaaggcaagtgggtcacttgagcccaagagttcaagaccagcctggccaacatggtgtgaaaccccgtctgtactaaaaatacaaaaattagccaggcgtggtggtgcatgcctgtaatcccaggtacttgggaggctgaggcacaggaattgcgtgaacccaggaggcagaggttgcagtgagccaagatcacatcaccgcactgcagcctgggtgacagagtaagactctgtctcc

SEQ ID NO: 123173 - DNA, 904 bp, Homo sapiens
cgctgcagagggacggcgtgtaccgctggttctcggagctgccgtcgccgcagcgcgtggagttcctgtgcggcctgctggacctgtgcatcccgctcgagcttcgcttcctcggctcgtgcctggaggacctggcccgcaaggactaccactcgctgcgcgactcggagatcaaggccaacaacccggccgacctgggcagcctcaccaacctgacggacgaggtggtgcgcagcaagctgctggtgtcgctggcgctgctgggctcggagcagcgcgaggcggcgggcgtgctctaccgcacgctcacgcacatcgactccatcatccacaactacgggctgcagcttaacgagggccgcacgggcgatgagttcctgctgctgttcaccatggcctccaaccacccggccttcagcttccaccagaagcaggtgctgcgccaggagctcacgcagatccagagcagcctgaacggcggcgggggccacggcggcaagggcgcgcccgggccgggcggcgcgctgcccacttgcccagcctgccacaaggtcactccaagaactgaggcccctgtcagccagtgtcagtaatagtttggagaatgccctgcacacatcagcacattccacggaggagtcgctgcccaagaggcccttaggataacacagcacagtgagctgtcgagcaagactgcacctgagcggcgcttctcacacacaaaaaaatgacagaaactgtcgcctggtccctttcagcgcctggtgggtctgattcttcaatacacatcagtaaaccaaatccttcctctgaacgtgacggcacttactttccaacgctatgtacagcactatcctggaaggacgaccttggacaaactcatcccttgcctacccatgggtcc

SEQ ID NO: 123174 - DNA, 256 bp, Homo sapiens
cagagtgattaaggaacttgcccaaggttacacagctaccataaggcagagcacggagtcaagtcctaggcagggctgctccaggtccccactcttgaccccatggcccactcctggcagaggctcaggcctaaggagccttgggaggacgaatcccaggagggttccctagaccttctttttttaaaattttatttattcactttttttaatttcttccaaaaaaatgggatacatgtgcagaatgtgcaggttt

SEQ ID NO: 123175 - DNA, 304 bp, Homo sapiens
cagttgctgcttaccccgaacaagagtcttagtaaattgaccagctgagtcatttgaacttgattcttggtaggaagacttttgcgtggcttatctactgttttttcttctctttttcttttcttactgtatctgtaatttctttttttttttaattccatgatttactggaaatctcaaaggatgtttgaatgaactctaattatccgttgtctttgttgtcgctgactccactgtcaaaaacccaagccaggcatccgcttggtttggtgaccttaaccacaatttgaaggctgctgactga

SEQ ID NO: 123176 - DNA, 418 bp, Homo sapiens
aagctgtgtgtcctcatgcctcactgtataccagaaagatacactcgcttcctatcagatgaaatgttgaccataaccaggagatttttgaggtacttcatcaaatcatacaaaagggaaataatatttcttggcaggctaatagggaataatcactgagggaagcaaagtactgattttaaaagaaaacatccttattcagccaaggttgaacggcccagggcgatatttcaaattaactacacacgtttcctaaaattagttgtcataagcagttgctattgttggacacctttgccgacaaagatcagctaaatgtatttcagcctgaaagccaggaggccaccactgccattttccacaccatgagaaatgttcttggagcaaacactccatgtgtatcaccagctgattcttt

SEQ ID NO: 123177 - DNA, 360 bp, Homo sapiens
taaagtcctgggctttgcatcctgttcttggctttggggctttcagatttaggttgaaagagggctataaagagggcatgctatattgggtcaacagtgatcccaaagacagggaaatactctgagtacacgtattgtctcttctagacttttatagaaccgtatgagatagggaaatgtacttttatgtgggatgacaaaatgctcacactgggactttcaagctaacattgcttcttacctctcacactaataatagataaatggatcattttcctcctccttttgtccatggcctccttgaccactctgagccatttcctacaggaagttttgcatgtgttctatgttaactgatgc

SEQ ID NO: 123178 - DNA, 784 bp, Homo sapiens
cttttatttgctttttcctacttactttcagtttactttgctgttctttatctagcttctcccccgacattttattatgaaaatttttgtataaaacaagtaaaagaattgtaggttgaacacccatataatacctccacctagatttataataactataaaaggcctaccccaggctttgctatatttatcccctgtccatctgccaattcctctgtccttccatcaattcgatttattttcttgtggtgcatttcaaaggaagttacagagatcagtacccttaacacctaagtacctccacaggcatatcattaattagagttccatatttgttagtactttatcattagtgctcatgaagtattttaataaaacaaaatgcccttatggcaccatatgatctttggccatacatgttaatgtttgaacataattttctatatgtgtttttatgtgtggtcattatatatttatgttgatgtgactgcattccttttattttttcaaatgaaattgattaaggtataatgtacataccatggaatttatctttcttaggtgtatagttgtatagttttgacaaatatatagctgtgtaactactactacaatcaaagcattggacattttcatcccctgcaaaaaactccgtgtttccttttataattcagtctttctcctcatcccaggcttgacctcttttccttctagtttggttctttctagaatatcatgtggctggcttctttcacttaccttaatgcattttaggttcatctat

SEQ ID NO: 123179 - DNA, 256 bp, Homo sapiens
ttttgttctttttgctatgctttgttcaggctatttgggatttttgttgttgttgttccatatgaattttacttcttttctatttttgtgaagaatgtcattggaattttgataggaattgcattacatgtgtatatctcttatggtatggccattttaataatatgaattctttcagttcatgaacatgggatatcttttcatttatgtgtgtcctcttcaatttctttcatcaaagtttatagttttggtatag

SEQ ID NO: 123180 - DNA, 297 bp, Homo sapiens
cagtagaatggaagcttcaatatgctaagaaaaaataaccatcaacctaagctctatactcacataaaatagtgttttagagagtaatataatttaccatattaacagaataaaaattttaaaatcatacagtcatctctacaaatgcacaaaaagcatttgacataattcaacatccatccataattaaaactctaggtgtactagaaatgcagagaacttcctcaacctgataaaggacacctatgaaaaagccacagctgacatccttcctactagtgaaaaactgaatgtctt

SEQ ID NO: 123181 - DNA, 422 bp, Homo sapiens
agccgtgggggaagccaacagcaggagtggaaccaaggagggaggcagaaggcggccaagacagggaggacccatacgatggccgtctggggggtgaatttacagaacttggacaccagtgggaggcaggctttggcacactcgtggcttcaaatccagctctgccacttcccggtgaacctccctgggcctcggtttccttgcaatggggatgatgctcattgtcatcttcctagcattgccatgaggattaagggagttagagtcggacagcaattcgcacctgacccgaacccagtgagcattcagcaggcattcgccacaatccgcgtacactgtcgcatcccattgcaagagcgattgcccacgatccatgctcactgtagtgtcccattgcatagcgaatgagcgcacagaacaaa

SEQ ID NO: 123182 - DNA, 320 bp, Homo sapiens
ggggtgtggtggcacgcacctgtaatcccagctactcgggggggtctgaggcaggagaatcgcttgaacctgggaggtggaggttgcagtgagccaagatagtgccactgcactccagcctgggcgacaagagcaagatttcatctcaagaaaataaaaaccaaaacaaacaaacaaacaaaaaaaacaaaaaacactgtcagaaaaggaaagatcatccagatgtaatctgaatacacggaggcagcaggactggggtagaagagggccgagccaccgggaggacagaaacctgacttagaaggaagcaaacatgaaaa

SEQ ID NO: 123183 - DNA, 402 bp, Homo sapiens
agcatgtgattcatcagttcccccaaatatgtctcttcccatagtgtgcgtgtgatgtgaattaaatgaataaagcataaaaatgtcatctttttcataagatgagagagctctccatgcattgctcaattagaatgggagaaatggagaatggttgacagtgtcaatcaaaacacaccagcgacgtgttcttaggagggttgacttctagagggcagatgaacacagcaattaagtgcatgggatctggaacctgaccaacttggttcaaatatcagttccactacctgctagctagctgaacctggctaagtgactccatctctcagtgcctctgcatcattctctataaaacaagcataatcatgaagatgaatggaggaagtcaggctatgtaaagag

SEQ ID NO: 123184 - DNA, 437 bp, Homo sapiens
gggttgggggtgaaggcttgggaacgtgtgggagagcctggttagggcccagactgtaggcctaggagacctcatgcagggcaagcagggagattctgcccaaagggataccactttttgaccttggcctgaaataatccagagtacactgagatccttgaaaagactcaagacaggtaagatgagggggcaactgaagatgccactgtggaacaggaagcaactggattccagtgtttccaaaacatagctttcatgggttggatcaacagtgcataccagttccaagcaaagtcctatataggcctacaaaaggcttggcatttgcccctgccagtaacctctaagtctagattaggaacagctctggggttctcactcagtaaaggattaccagagatcccctcagtaacctgtaagggagaagcaagccagga

SEQ ID NO: 123185 - DNA, 421 bp, Homo sapiens
cagaaagaaggacaggatggaaagagaagtttctccactgaacacctgctgtactctgggccaagtgtctttgctgatcactaccaactagggagttcaagactgctaactttagttttttagatgataaaactagggctaagagatgacaagtaacttgtcctaggttctccaggtaagtaagtaagtaggtgagttaggctttaaattcactcttgtgtgactccaaaggctgtggatgctctttctactgtggctccaataaaagataaactaaactccaacttcagactcttgatgtcaagccaccgcttgcctcccagcgcaaaaatcataccttccagatgtcaccatagtcatcattttgaaccttgtgtgcaggctgatgagaacattcagagccctcctgtccacctcaaag

SEQ ID NO: 123186 - DNA, 296 bp, Homo sapiens
cggaatctcatagaacagccctgacaaaacattaatatccctgctaatgatgcctggctgtcaaagctggggcagaagcctcagtccaggtggcggaaaacacttggaagggctttgagaacttgcttacagaaaaggcaccagctcaacaggtaaagttgtttcctgtcatcaaagccaaagggaaaatgcaaagtttcaagtctaccttccctggcagcttcttcagacgaggtctccctggctccctggtttttctcctggcatggccctgcctcacgacgcctaccattgtt

SEQ ID NO: 123187 - DNA, 309 bp, Homo sapiens
agatttgggttaaagaaaaggaaatcccttttgcagtttagaggtcttaatgattggggccgggcacggtgggtcacgcctgtaatcccagcactttgggaaatcgaggcaggcagatcacaaggtcaggagatcgagaccatcctcgctaacacggtgaaaccctgtctctactaaaagtacaaaaaatagccaggtgtggtggcgcatgcctgtactcccagttactcgagaggctgaggcaggagaatggggtgaacctgggaggcggagcttgcagtgagtggagatcgcgttactgcactcccc

SEQ ID NO: 123188 - DNA, 270 bp, Homo sapiens
agaggagcatacagtatgtagtctgttgtgttttatccctttcaatttgcctacttttttgaaattgattcatgttgagtaattccttattactaagcagtatttccaaatgtagatttgccacagtttgtttatctgttcaccagttgatggacatttgtgtatccaagttttggctattgtggataatactgttacaaatataagttgtcccacattctcctcgacatttaatattatcagtctattgaatttagtcattctacttag

SEQ ID NO: 123189 - DNA, 364 bp, Homo sapiens
gttttccacggtgattgtgctgctactcatctccactgcaaagtgagaattctcagtgttccacttccatgccaagacctagcattgctagcactccctgtttgacccattctggtgggtgtacactggtatctcattgtggtttcaattagcattttctagattattagtgaggtttgataccttttcctgtgtgcattaatcagttggaaattctcttttgtgaagtgccaattcaagttttgtgcgcatttttctatctggttgtctttttttctttttagtcattcatgtgagtgttactgtgtatttgggatatgaacttttggctctatttctgatggagctttttctctcactcagg

SEQ ID NO: 123190 - DNA, 475 bp, Homo sapiens
ggagcaaccccttggctaactaaagaatcgttccaaagtagatcccatagaagcagtttaatttactaaggttaattttctgaattgagccatatcaaatgccaacctggtaaccgccatttgtgtgtttcttcagtgagttgtgctccacttgggatgtgagcccagatagctttagtcttagcagtgaaaagacccttccagatccatttagatatggatgacagctaagattcccaaaatggaagtgattaatgtgaactaagtgtagggtgctgttattttggaggaccacctgtagctactctctagaaaagactattatgagcccatgtattatgattccatgttctatggaattacatgcttggcactcctttaaaaattaagattaccagaccaaattagctagaggaacagatgtttccttttccaggaaataaaaagacagtaggttattttcagatattagtac

SEQ ID NO: 123191 - DNA, 900 bp, Homo sapiens
aattggaggcttctgagggtttcctaggggttttgctgggttctttctagcttaatttaaaaaaaaccctacttgagggggctcttcagcaactgcttgctcgagcccactcccactctgtgaccgtcttcaataaatctgtgcccactccgtggtgttgtgttcaactatttgtccaatacgccaagaacctggacatcacatttaggactttttttttttaatttgagatggagttttgctcttgtcactcaggctggagtgcagtggcgtgatctcggctcactgcaacttccgcctcccgggttcaagcgattcttccacctcagcctcccgagtagctgggattacaggcgcccaacaccatgcccagctaatttttgtatttttagtagagatggagtttcaccatgttggccaggctggtctccaactcctgacctcagatgatccacccacctcagcctcccaaagtgctgggattacgggcgtgggccaccgcacctggcagcatttaggaccttctctctggtaacataagtaggggaagagacaacacacacccaaaatggcaagaatccgctggcacggacaggctggacccaggacatgggtgtggaggcaaagaaccatgaagtacacaacagcacaggcagatgaagcatattccatcggccccggtccctccccagaagagctactatctatggagaaaatcattcaggtggcaagacctctggtgcacaggttatccatccaggatgcaggttttctttcagaaaactgggaattggctgaactttggaagcagaaggacttatttgatagggcctcctcaatctggaatagagacttggtttaagaggccattcaatccaataagggtgctgcggaataccg

SEQ ID NO: 123192 - DNA, 401 bp, Homo sapiens
tccataccccaagactcaaacatttatctctagctcagtactctccctcacacttcagacttgtatatccagctgctgctctgcactccatgtctgatgggcactttgggcttaacataaccactgctgaccttccccagaaggtatttctccacagttctgtccctctcactcattagcaactctacctatttactctgaccaaaccccctgagctctacctggagtcttctctttctcactcaccctgcatatgaacttctgctagatccagtgtgctctcccttcagaagatacccagaatccagacacttcgcaggtcatggctcccaacatggtcagagtcactatcacctttcacctgcgtcaatctcctaactggtctccctgcttctgttctt

SEQ ID NO: 123193 - DNA, 461 bp, Homo sapiens
gcacgcgccaccactcctgggtaatttttgtatttttggtagagatgggattttaccatgttggccaggctggtctcgaactcctgacctcaggtgatccacctgccttggcctcccaaagtgctgggattacaggtgtgagccaccacccctggccctttctacctgttttattaaaagagctggaatgtgctgggcaggcagtgcactgagtgcttttatctggactctctcatttactccttacagccactcactgacatagatacttagtattttgttgccatttcatagatgggaagatcgaggccaaaagaaatgacctaatttgcctcagaagttaatggggttgccactactcacccacaggtatctctgattccaaagctgagctcttcacttctcggatacagacctcccttttctgggctttgagctggagtagggtatgtgtctcaggg

SEQ ID NO: 123194 - DNA, 463 bp, Homo sapiens
tgcaacctccgcctcctgggttcaagcgattctcctgccttggcctcccaagtgggattgcaggtgtgtgccaccatgcccggctaattctgtatttttaatagagatggggtttcacccccaggctggtcttaaactcctaacctcaagtgatccacttgcttcggcctcccaaagtgctaggattacaggtgtgagccaccgtgcccggccagcaatctggttttaaaggaggctttgacccctcatttggtaaaaggttccttctttgactaattcccaaaggacatctcgatctgtcttcaaaagaaggggtattccgttgtcagtattcctagctagctctgggagaagagagaacttgattgttttcagggccctggtcagagtctggttttatgcccaagggatgaactgccttttgtccttctacctcctgaagttcagagccctgtgaaaatga

SEQ ID NO: 123195 - DNA, 700 bp, Homo sapiens
gagggaaggggcggttcccagcggtgaaatggggtcacattgagactgggaatctggagggtgtttttgttagttttttatttttattttcttgtgagacagggtctcttgctcgggctggggatcctcccacctcagcctcccaagtagctgggactacatgctcctgccaccgcacccggctaatttttttatttattaaagtatatatatatttataatgtatatatttgagacatagtctctctctgtcgtccaggctggagtgcagtggcgtgatctcggctcactgcctcagcctcccaagtagctgggattacaggcgcgtgccaccacacccggctaatttttgtttttagtagagacagggtttcatcgtgttgaccaggctggtctccaacgcctggcctcaagtgatccgcccgcctcggcctcccaaagtgctgggattacagccgtgagccactgtgcctggccataatttttttgtttattttttgtggagacagggtttcactgtgttgcccaggctggtcttgaactcgtggactcaagcgatgctcccacttcggcctcccaaagtgttgggattataggcgagagccaccccgcttggccgggtttttgttttttttaattatttttcttgtagtttttttcatctttattgagcttgaatacaataagctttaaagcgtac

SEQ ID NO: 123196 - DNA, 142 bp, Homo sapiens
tgtataaggtaagagatgaagatccagtttcattcttctacatgtggcttgccaattatcccaggaccatttgttgaatagggtgttcttttcccattttatgtttttgtttgctttgttgaaaatcagttggctgtaagtg

SEQ ID NO: 123197 - DNA, 162 bp, Homo sapiens
tatgactgagcaggagatcagaattctggatgtactgagcttcagatgtgagcaagcatgaatcattacctcattttcgagacctgtcaactgaggctttgaaaagataagatcaaatggcaggtaactggcagagcccagtcctccttcttgacactgtgc

SEQ ID NO: 123198 - DNA, 202 bp, Homo sapiens
ggcgagcccttgggccgcatctccttcgagctgtttgcaaacaagtttccaaagacagcagaaaactttcacgctctgagcactggagagaaaggagttggttataagggttcctgctttcacaggaacattccagggtttatgtatcagggtggtgacttcacacgccgtaatggcactggtggcaagtccatctatgggg

SEQ ID NO: 123199 - DNA, 462 bp, Homo sapiens
tacagaaaatcaatggcacagccctggtctcagctctgccgtcactcaacttgtatcttgagcaagttcctccccatctcaggcctcagtttcctcatcgcatagagagttggtcttccctcaccgggcttcctacttgccctccagagttgcctgaagctcacatgagcgaagggacatgaacatgctctgccatctcccaataggacataagtccacgctggagcgctgagcatcagactcaagaaaagcttgcgtggatattgcagacccaccaacaagggctccaggttctggagttgtggaggcaaaactgcctagtgagaaccctacatattccctctggtccttgcagctgccacccccattcccaggggtggagtgtccctccatagacttggatcctgggccctctgctccttcaccactgtccatctgaagcaagcctggttgctccggcac

SEQ ID NO: 123200 - DNA, 398 bp, Homo sapiens
tttccaaacctgggacaaaacatcaatctactacagattcttcaagaatgtcagtgaaccccaaacaagacaaacccaaagaaatccacatcaagtcatatcgcactcaaacctcaaactaaatatactcatgctcaatctgaaaactaaaggcaaagaaaacaatcctgaaagcagtaagacagaaagaacatcttacctacaggggacaaacaattccagtgacagcaaatttctcatcggaattatggaggccaaagagggagcaaaaacatttgtcaggtgttgaaagaaaataactgtgaatccagaatcctatatcgagtgaatacatccttcagaaataaagaagaaatgaggccatgctctgataaagaaaaactaggagaatctgttaa

SEQ ID NO: 123201 - DNA, 753 bp, Homo sapiens
ggcgcctgtagtcccagctacttgggaggctgaggccagagaatggcgtgaatccaggaggcagagcttgcagtgagccaagattgtgccactgcactccagcctgggcaacacggcaagactctgtctcaaaataataataataataataataataataataataatgtatttgtaccctagaatatagaaaatgaaatgaattttaaaaccccacaatatacctggcaatccggaagaagattccagaaagtttgcattttctgttgagggactaaacaacagtactttcaaagtaattaatgaacttcttttgtcttttttatttttttaagaaaactggtaccaattggttaccagaaaatggcatgatcttcaagaaaaaaaagttttcctggtgaacatttcctctctccccaacatccttgaggtaaagggattgagaactagatcttttaactcagagaaccatacttgcatggaaggtgttaataacagagggtgtcacggaatcgctgtttggggtttgctattgttgtactctgctactaccagacattaaggtaatgataatagacctaggagaactaagcaattcctgcctcccgtctgctccctgtcagcctcctgaagcccccacaggttaaatatgcctcctgaaattagaacatctgggaataaattctttttaggatgaaaatgctcaaacatacaaaaaagtgcagccatgagtatagtgagcaaccgtgtacc

SEQ ID NO: 123202 - DNA, 331 bp, Homo sapiens
ccaggtggatatctcagaaaccttctgctccagcctccctgacaagcgcgggaagccaagacccacaatcacacagcacagagacacgaagccacacaaccaccagaggaaggagaaagcaggagtctgggggcagagggaggtcagtctgccctgctctcctgggatggagccagagaaaggacaactaatgcgcccaggatgatcaagagcacctcttggccctcctgacctggggctgggcctgccctggcccccctctgtgtaccaagagcccttaactactcaaggttgctaaaccgagcaggaaagctgtttagaggcctctagc

SEQ ID NO: 123203 - DNA, 591 bp, Homo sapiens
tggtttcagattctacattgcaactaacttttgaaactaccacttgtcaagttttagtgtttattaaagaatagccgcaattttttgaaaagctattaaaatcctctcttttctaattatatatctgtgtgaagctggatttcctcaattcaaccaaaagaacatttcgaacaaattgaattcaggagcaaatatgaaaatcagctgtctagcttctcagggttcaaaacaaaacaaaacaaaaaaacaggaatcatatcaaccacactcatggaccacagtggaatgaaaatagaaatcaataccaagtagacctctcaaaactatgcaattacagggaaattaagcaactggctccttaatgactttggggtaaacaatgaaattaaggtaaaagtaaaaagaatcattgaaataaatgaaaacggagacatggcatatcaaaatctatggaatgcagcaaaaacagtattaagaggaaagtttatagtgttaaacatatacctcaaaaagttagacagatctcaaactaatgatctaacatcacatctagaggaactggaaaaatgagaacaactaacccaaagctag

SEQ ID NO: 123204 - DNA, 515 bp, Homo sapiens
cagtatggttgtttccctccctagactagatttctaatcttgatgcagtgagcaaagggcgaggtttatattgttcttacctgagccaaaggacccataaaaaatagagtgataggctgggctgggcgtggtggctcatgcctgtaatcccagcactttgggaggccgaggtggtcagatcacctaaggttgggagttcgcgaccagcctgaccaacatgcagaaaccctgtctctacttaaaatacaaaattagccgggtgtgatggcacaggcctgtaatcccagctacttgggaggctgaggcaggagaatagcttgaacctgggagatggaggttgtggtgagccgagacaatgccattgcactccagcctgggcaacaagagcgaaattccttcttaaaaaaaaaaaatagagtgatagagtgagaatttggcttttagtctacagaagttttcactaccagtttctgtgtgtgtgagtgtgtgtgagtgtgtgtgtgtaaaataccaaa

SEQ ID NO: 123205 - DNA, 209 bp, Homo sapiens
  misc_feature (188)..(188): n is a, c, g, or t
tataaccactaaatatattaattggtaattctaagtacagacgcggtaaagaattcaaaggaaaagaataaagtactgtgagagatgataccatgggataaaagtccttgagatgtcctgtctatttcaaccaacaggcaatttatagctgcagttttccatgcccagaacaccgtcgaaggggtacncgagctcgacattcgtcaatc

SEQ ID NO: 123206 - DNA, 466 bp, Homo sapiens
taaacaacaaaaccatgatgatgaaactataggaaaatttgtacataatattggaataggaaggcaacactatgaaagagaacactgaacataaaatgtttacaatagcaaagtcatggaatcaagccaagtgcccatcaatggataactgaataaagaaaatgtactatatgtgcactgtggaatactacacagccatgaaaagaatgaaatcatgtcttgtgcagtaaaatggatgaaatggatgaagctggaggccattatcctaaaagaaataactcagaaacagaaaatcatataccacatgttctcacaagcgagagctaaaccatgggtacacatggacagaaagatgacaataatagacactggggactcctcatgtggggaggatgagaggagagtgaacgttgaaaaattacctattggatatgatattcactttttgggtggtgggtacactaga

SEQ ID NO: 123207 - DNA, 192 bp, Homo sapiens
ctcactccatgtgttgttaatcggcgttatctccatgtgttggagatatgttatttccatgtgtttccacatggaaagtcatctccatgtgttgttaattggcgttatgccaaaaaggtgttcagtggtcaatatgtttcagaaacataggtttctccttttttatttttctaaagaagcagggcctttctt

SEQ ID NO: 123208 - DNA, 290 bp, Homo sapiens
gagggaactataacttgggtaaacagatacttggaaaaaagggagcactaatttgtgcttttactaaaagtgatattaaaaaaaattaaactcatgaagcacagcttaagagaagcaagagatatacattattaagttattaacacaagttcatgagttttattttttatactttttttgtttgagacaaggtctcattctgtcaccctggctagagtgcagtggtgcgatctcagctcactgcaacctctgcctcctgggttcaagccattctcttgcctcagcctcct

SEQ ID NO: 123209 - DNA, 222 bp, Homo sapiens
agctggtgtttctttttcccttcgaggcttgggggttagcagctttacaaataaagtgtatcacaaactagtctgcatttgcacaaaacagtagttagccttcctgtcttaaatcctggtgctgacttctcttcctaataaatgacctttgtggcattttttttctccagaattgggcactttgatctgcattaaaaacttgttcagggtcagacaaggcag

SEQ ID NO: 123210 - DNA, 483 bp, Homo sapiens
gcagaggcataagcacaagtgaattcaatggtgccagcacttttcaaaactatgcttgtgttccagatgctgacatcctgttggcaaaagcaagtaacatgacccagggatgaaaaagtatgtcaccctctgtaggagggcatggatgtggcaaaggatggggatagagggaggagtacagatttgaggccattaacacagtctgccaacaagagattaagtcagtttcatcctcttttgaatcattcctcatagaaaccaagttccaaggcggggatgtttgaatggtccagcttaggtcttgtacccactccttgtccaagaattggtcacttgattaagagtcccaacaaaccaatagctgtgggtaagcagtggtttttccaaaggaaaaccaggatgtcttaccagaagaaagaggcatggattctgggcaagtaaatcatatatgtctattccacttatgtccctgactttgtctcc

SEQ ID NO: 123211 - DNA, 675 bp, Homo sapiens
aggagaaaaaggcatgcaaattaatttaacatgcacagcatgggagaatagcaggagagtggttacccagtaatccagtgaggtacagatacttatatgcccttcttcataagggaaagggagattggaaatgtagaagcaaattatttttaaagttaatgaatggacccaatgctcaggcagtggttaataaatagtattcttggagaactgactggagaacaaacaacggtttgggacgaagtttgggctctaggtgtggtgtttaattttcagacttttcctctgtgatatgagttttaagtttctctggttaatgaaatttcagggaagggatcaaaggcaattgtgttcctcttaggggtccagtttctaggtagatcagggagcttccgagcacttcacgtgtgctatggagagacgaaagattgagagagaccttgaggctgctgctttagttccattattttggggtgtcattttctgagccccaccactatgtcaataaagtttaatgttcaaattaaataatataatgtttatttattgcatgtatcaccctgtaaaaaaggataaatcttttttttcagtcagatatttttctaagttacaactctggcccactgctagttttacgatgaggcgagcgcattttgaaaaaaaaaaaaagaaaaa

SEQ ID NO: 123212 - DNA, 434 bp, Homo sapiens
tgccatgtcgtctcctccctgctcttgggcaactggacccagatgctcatcctcacctgccgtctgacctcctccagtgtagtggagtgcagggctgcccaagccctccagtgtacatggtacatacccaaccacctgctgaaacccaggatgcctgtggaacaagcgctgtcctgatacttaagattgacctctactctgccatctgatgggagtgggaagacgggagacacgggaagaattcaatggattaaattcaacaaggcttaaaggttcattacacaggccaggacgcggtgagtgacgcctttaatcccagcactttgggaggccaacgtgggcggatcatgaggtcaggagtttgagaccagcctggccaaaacagtgaaaccccatctttactaaaaatacaaaaaaaaaattagccagacatg

SEQ ID NO: 123213 - DNA, 792 bp, Homo sapiens
aaatgtctttaaatattgggactctgttaaacagacagtggtggatacaaggttttcaaatttctaattttcaattgaaagctagaatgttattattggtaataaatattgttagttgttttcttcgaagtgacagggtttgcttatttttgagaaaatttctgccaaatgcccatgtctgaataaacatagtttgttttattcagataaaatgggattccatgaaaacagttgctagttcagtttacaaatcacaatggctttccctcaagacaactactgtgcattcattcccacttgatatacagaatattaagacgttacacaaggatcaaaacttaataaaattaaagttgatgatttttactgctttaaagatattcttaggtgaatacagcttaaaaaagaactcttaagtaggtagcagaggctactagcaatagttaggtgccattgcctttactatgataacaggccaccagttttacccacaattgcttctgcaccatctatactaaatttcaccacagtagaaaaaacaaaggcaaataataacttgatactagtataaaaatacttttgacttaatagaccacttgaaagtgtcttgggaattcccagagtttgaaaaaccactggtatgttcgtacaaatgcacatgtgtggaaatgcaaaggccccagaatagccaagataaccagaatgaaaaacaaaggtggaggccttaaaatatgagacttcaaaacttactaaacatctacagtaattaaggtagtacaatgtgggtaaaaa

SEQ ID NO: 123214 - DNA, 838 bp, Homo sapiens
attgtgaagccggtcctggcttccttgtctaaaagctctttgggactgaaatggctgtttatgaatccttgtcaacctcgttcgcagtcaacgaccagggaataaattattcgtggaatgacacagttcataattattataagataaggaaatggaggtcctggaggttacatgactagcccaacaagtatgacaactccgatatcggcttgcggttcactcattcagtttgctgattcagagatctgtgcattcactcacctgttccttctccagcaaggcctccccaccctaccacctcctcctttcttagtttggctgtctgtgactcactcaacacacatccccagacctttctggaactccaggttgggcagattggcctccacagcaacctgtggatctctgaacactggggcaagggcctggtctcaagcagcttcgtattctgagatcagtttttactgattattggaccagccaggatactaactagtatttattcagcacctactatgttgagtataaatagcatagtaaaagtaggaaacacacaataatacctcaacagaaaaatgagtaaaccagcgaggtgtcacgcctgtagtcccaggttcttgggaagctgaggccggctaagttcaaggaggatcgcttgagcaggagttccaggctgcagcgcgctatgatcgcgcctgcgaacagccactgcactccagcctgggcaacagagcgcgactgtgtctctaaaaaacaacgcaaaacaaaaaacactgcagaacttaagcattttgctgcactgcccagtgaaatccattccatttgacaaatactgccc

SEQ ID NO: 123215 - DNA, 266 bp, Homo sapiens
tcattatcattatcaactctctatgaaatgactgctgagtaaggaatactctgctaagcaggcagagggaagattctaacaatgtggagaatacaaatttattgttttgcaaaagattgttaacactatttgtccatcctttctaagtgtagattatatatgagtcaaaggtgaggtcttcatagtctgtatactcatagcttcagtatcattgatgtcctatggtttttacggttaaggctgggttattaatttcgtctattata

SEQ ID NO: 123216 - DNA, 504 bp, Homo sapiens
agtcgattctcagattacctttattcgcatcatcagacctatggacgcaatcatttaattgcctttcttttcccctcctcctttgtattttgtagatttcattaatggatcttgtgaatgggttgattgctgtgaaaataatgccccctttccccttttctgggctactttgagggaaaacaatcttaagaaaaataggattaagctattctgttccagtcctcagagaaataatcactttcttaaactttgtgagtttgtcctgttcgggtgaagttacagtatccattacttgtgtttgctcacaacagagctaccttcctgttgtgtaaatgcgtttttgctttagtgcattgtgtgtgcaagcatgaagtagaaacactttttttttctgggtacagtacatgggtatcggtgctctgtatttttttaaactgtgtacacattattaaaatatacattttataaaatataaataaaaacgtggatttgtttttcatgcca

SEQ ID NO: 123217 - DNA, 312 bp, Homo sapiens
ggaggcgatggggaccagactgtgtggggtcttgtgggccaaggtgaggtcttggcttttaccctgagagtgattgaggtatttggagggatggtgagcagaggatgacatgtacagacatattttacagggctcacactagctatcatatgatggatacaaaagccaagacctattagcaggctactgcaactggtggtgttgactcagacccagcagcagcagtgaagctgggcagaatatggtagatttgaaatctgtttcactctctgagatggtggggtttgctacggtattgtatatagggtgtga

SEQ ID NO: 123218 - DNA, 332 bp, Homo sapiens
aacccagatattaatccttgcatttatagccaactcatttttgacaaaggtaccaaaaacatacaatagggaaaggacagtctcttcaataaatagtgctgggaaaactggataaccatatgcagaagaatagaaccagacccctatctcttaccacatacaaaaaataaaatcaaaatggattaaagacttaaatgtaaggcctcaaactatgaaactgctacaagtaaacattgacaaaatttttcatggcattggactgggctaagatttcttgagtcacaccccacaggcacaggcaaccaaaacaaaactggacaaatgagatcata

SEQ ID NO: 123219 - DNA, 1191 bp, Homo sapiens
agcgggggggttgccctgcccggttcgcggaacggacgtttacctgtcgcagctacgaacccaccaacgacaccaagcacttgccgggcagaccaggcgtcgtggaggcgccccagcccccccaacccccccgcaacgacgcgtcccaggggagcaagggatacaatgatgatcaaggcagatgcagccgttaccttcaggttgtggagtccggatacagactggaggcaggcagctgtaagatgtgtgagaaatgctgcgctggatcagcccatggtattaggagagcaggcttcggtagattgcaaatgacctgctttctttcggatcccgggctgctttcggacacctgtcgaatagtaaatcccaagtaaggtacctgcggtcgtcggcagatctgaattttcttcttggacacctaatacccacagtcctccagagaccgagaggttgatgtcactcccaatatcggaggaagtatacacccccgtgtgagatggtccttaataatattccacggcggagggggtgatatgactacatacatggcagaaagtggaaacctcccagggatattgttcccacgatcctggagggaagaagatgatgttactttcaatatgacagaaggtggatgaagtggtggactgcccctccacacctgtggacacgcccccactgatattccttctaattgcagcgtgggagaggaggatatgacacgcgatatcgcagggagtagaaacacccctgtgatactgttcttaatattcagggaggaagaggatgatattactcccaatacagacgggtgtacaccctctgtacaccgagggtgtacacctgtctgtgaaagagttcgtaatctccagagggggagatgatattactcacaatatggtaaagaggctgtgagtccacggaggatcctcagagccagcgggggaagaggggctggctctcagtccccgcctcgcgggggtgactccccccagtgcgatgggggtcctaagagccagtgggggaagaggggctggctctgagaccccgcctcgcggggggtgcctccccgccctgtgatgggggtccgaagagccagaaggcttagaggggctggctctcagtccccgcctcgcggggggtgcctcctccccctgcgatgggggtcgtaagagccactgggggaatagg

SEQ ID NO: 123220 - DNA, 285 bp, Homo sapiens
ctctgtgtacaaagcaaggaaatgtaagtatgtatacacagacatttgtatttatttgcatgtccatttacctcccgtgtgtatgtgtgtgtaaaaacatctatatttatcattcttatacctcttatttcaatctaagaccaaagggttcacttagtcttcctccttttttattaataactcctctttctacctgtaaggtataacactattgttaataaagatatatttatttagctcctcaatcctagaatattcagtgttgtagttttagaattactagcc

SEQ ID NO: 123221 - DNA, 293 bp, Homo sapiens
gctcctgtcaatttaaatgaaaatagacagttggttcagcatatgttgatttcttaaaatcagaaatagattttcccagcaatacgcctcagggaaaataaaatgtgtgggctggtttatccacgcattaaaagcaagcttccagctgatgtttgattacattcatgaagaaaaaaatattgtaatgagaacatccaattactctttccacaggagtaaaaatttctggtctgagaatttgtttcaaatcagtggttagaacataaacaaacaaataaaaaaggggaaataag

SEQ ID NO: 123222 - DNA, 637 bp, Homo sapiens
gcttcaagcgtgctatggaaataagaggcgggaagatgggaaagacagcatgtaaataatcaaatatttattggcccctgattcataattaatttttagaaataccatatccaatctagataagaataaaatactctttatcattctgatattttgtgcatatgtttttacagattataatctcttatacacactttcccaaattttctcactggtcacttaggtaacatacctatattctattgcctgtctcccttgtttttccacacagtggagctgtaactgcactaagatggagcaaacagatttccaaagattaagattcagtaaattatagtgagaattgacaagaagtttctgtttatccattgaccagagaagggaaataattcatcaagtttagtttgaaggtctcaggatgttgaaatcagacttttacatcttaatccagtgagaatgaaaaatgaactacttatagtgtctgcccatgacaagtcatttctttgcttagggatgcaaatcgtatcacacagtggtctgaaatattcctttcaaagagataagctgtttgtttttcaaaatggagcttccaggtgtgctaattctgaacacgaagctttgttatttggagaagaat

SEQ ID NO: 123223 - DNA, 175 bp, Homo sapiens
ccccacaatcacataagccaattccttgaaataagtatctttatttacataatgtatgcatgtgtgtgtatggtatgtgaatgtgtgtatggtcttataggttctgtaggtatctgcccagttctctgagagaagacctactacacaccagtgctgatgataagcacggattgtc

SEQ ID NO: 123224 - DNA, 231 bp, Homo sapiens
taccaatgtacacacaacagcagtcccagaaaggaagaagaaagaaaaggggtaagaaaaaaagtttgaactaaatagttataaacttcataaattagataaaagaattttaatctacacattcaagtatcttaacaaactcagagtggaatagacagaaagtcctccaaagctacatatatcataaacaaattattgaaagccaaactagccatgagaatggctacaatt

SEQ ID NO: 123225 - DNA, 291 bp, Homo sapiens
aaggaagggtatactgtaggatttggaattctagcaaaatagagatggattaagggctcagcaaaatgaaaggaataactgtaaatcagagaaaaaaggctaggtacagtggctcactcctgtaattccagcattttgggaggccaaggcaggaggatcacttaaggctaggagttcaagacaagcctggcaatatatcgagaccctatctctacaaaaacaaaaatgaaaaacattagctggtgtggtggcgcatgcttgtagtcccagctgctcaggaggctgaggtgg

SEQ ID NO: 123226 - DNA, 295 bp, Homo sapiens
aaagataaatcctacacagaccctgcccacaaagcgtccagtctagaagatgcttagtgaaaatgtgcagaaatgagagtggaagggaagggatatgtagagaattgtaggactagatcaggaggcaaaacacataatggggacaagaattcaggctctgaaaaggaaaggggtggaaggcaatactgaaagccacaggcaatgggaaccactgacgcttttttttttttaaatcaaaccagagaaatgattattgctttgcctccggagatgagttggcctgccgcatgcagta

SEQ ID NO: 123227 - DNA, 356 bp, Homo sapiens
gaagcaatttaattatttcaatggaagttactaaagaacattgaagtttgttagaaaaaagaggatgtcactgtaatataccataattgacaagtaataactatttgagtactgactggaggagaccaagcttaaatggttattcctgggaagaatgatttgtctcagggtgcgtagatacaaatgttaccaacccaccatgacaaagtttaggcaaatacaaagagcaacactaactttgatattgtatagaacaaaagggcagaagaagaataagatggtccacagatattgcaggtgacatgtactatatgcaacaggtgtttgtttaggttatgttatcaccctttgctctg

SEQ ID NO: 123228 - DNA, 395 bp, Homo sapiens
acggtgttctggcagataccatcccttgataactttgaaagaactacagttaggaattcattaggatcaacaggagtcctaaatattagcaataaattaccacataacaagaaacacatgaacatgggttaacaaaatgaaccactgacaagccaacttttctgtgtcaaatttattgtcctattgattttattttaaagagatggggtatcgcacggtcgtccaggctggagtgcagcgtcgtgatcatagctcactctagcctcaaactcctgggtcaagtgatcctctcaccctcctgagaaactgaaactgcaggcacataccaccaaacccacttaatatttttttagagacagggtcttgctgtgttgcccagactggtctcaaaatca

SEQ ID NO: 123229 - DNA, 160 bp, Homo sapiens
tactatattacatcctttccatagaatctggaacctgattctcaatacatagactgccaatgcttggcgactgactggtggaggacaggggattattgataactttctctgattcaactttgtctggagacagaaatattagacaggcagactctcaccg

SEQ ID NO: 123230 - DNA, 296 bp, Homo sapiens
aagatcatcattcattcattctttttagtggatcattttccttactttcctgggacaattcctttttgcatttataatatagcattagaaaaagggatatgggccgggaacggtggctcatgcctgtaaccccagcactttgggagccaaggcagatggatcacctgaggtcaggagttcgagaccagcctggccaacacagcaagaccctgtctcttaaaaaaaacaaaaaagcacacacccttttttacccctcaatagggctgtacacacacacacacacacacccacacaca

SEQ ID NO: 123231 - DNA, 105 bp, Homo sapiens
attgctgtaataatccccaaatcaaagccaccatttgcactgcctatgttcttgggctcccccatgccagacgctgagattgccttcatggacaaggaaggtgcc

SEQ ID NO: 123232 - DNA, 166 bp, Homo sapiens
caggttagggctatcatttttctttactcccatccccaagtcctccagcacaaaggagaatttggggagtacttgaatagcccagaacaacagtcggggcctaatcatttttcttttctcccatccccaagtcctccagacaaaggagaatttgcctttctcccca

SEQ ID NO: 123233 - DNA, 266 bp, Homo sapiens
caaggagttcaaggctacagtaagctgtgatcatgcctggatgacagaataagaccctatttaatttttttttaaagcatttcgttttcatatttcaagaaaggccttgaatttgcctgttccttcagtagtagattaagcttacctttgatgtgtgcacacaaaagttacactccatttactttttagtctactctaagctggttttactctcactttgtaccaatgctactctattttcaaggtcacctcttaacctctgtttt

SEQ ID NO: 123234 - DNA, 658 bp, Homo sapiens
tctggaagagattagtctcactggtaggcagaagaaatttcataatgtaccatcttcaaagaacatggtacctcgtcacatttctcatgtgacatgtatcctggaaacagaagtacttagggccacattgctggagcatctgcctttgtctttgttttgtgtttaacataaatgtgtctttctaatactatgatatttctttagcttttttgaaaacacagctaaacttggtggtacgatgctgcctgcgctgttgactgtggtctagacttctcctttttcagaagacctatttgacttttggcaacgtgcctcttagagtttgtgatttgtttgagacatcttttcctgtcttctctaaaatcaggcacatatgtgtctggggtagtcatgtactttgtaacagtcacttttagccagatcttggggatgtctattcttatggttagtagtgacacatgaaccctctcttccacttaaaattattttatgtaagatgactgcttctccttctatccctgctccttcctctcctcctcctctactctgcctccctcaaacttatagaaaagttgcaagtacagtaaaaaagtgtgaagaagcttttatctccctaagtcaattaagagtgaattgtttacactgatgcgctaacatc

SEQ ID NO: 123235 - DNA, 315 bp, Homo sapiens
tctgggattacagacatgagccagctctcactcttggtgagagctgtggtcaagctcctccagcctcttccccacttttgggaggctttctgggcagtggccaaggctttgaaagatgcagatcttggggccaaggacccacatccagcaggcctagctggctccttagcatggccccccgaccctctcctgcttttgctggaccccagtaagcaggaccaggtaaccctgatgcaaggaacaggccatggctgtgcaaggccatgcagaggctgggtagcctgagcatcctccctggaacaggatgggcaggca

SEQ ID NO: 123236 - DNA, 360 bp, Homo sapiens
tctctccctgagacccacccacactgacatggctcattttcattgctgcgtgatctcccgtctccattctctccctgagacccacccacactgacgtggctccttttcattactgcgtgatctcccgtctccattctctccctgagacccacccacactgacatggctcattttcattgctgcgtgatctcccgtctccattctctccctgagacccacccacactgacatggttcattttcattgctgcgtgatctcccatcgtctgaggggagcatgggaaatgtcttccatcttcctgtggatgagtgtttggccaggttggggccctgaggactgtgttttgttgggaacgttctt

SEQ ID NO: 123237 - DNA, 376 bp, Homo sapiens
tcctggagtaggtaatgtttgaactgagactgaaaaggactagcgagtatggatcaggccaagaagggaataaaggagaaaaggaacttgagcaatatggactgaaagtataattttttttgaactcgggagtctactacccggggccttctctccccgggaggctctggtgccagctgcctgcccctctgtttactgttctgggaggtggccaggccataaaaagtgtgcacagccttcctgacatcgccctttgctcccatgataacagtgcacaaggtggatcctggcctggcacaggcccctgaagtgcagcaggcacttctctctctcctcctaccagtggcctgggagacagcgggcattcattagtaat

SEQ ID NO: 123238 - DNA, 636 bp, Homo sapiens
cccaaaccctccagactcagctcaatccccctcatcttctcattgtctctgtagctcttaccatagttgccaactgattcattatttgttagcagaataggatagtgtttaagtgtcagattctcaagccaatcttcctaggttcaaatatcagttctgtcacctactggttgtgggatcttgagcaagctccttaaccttgctttgcctcagtttcctcaactgcaaactagagatcagagttccatcttctgggattattgagtggaacatgtgagataacgcatgtaaaatatttgggaaagtgtccagtacatagtaagttctatacaggtatttgctattattatttatcagctgtgagcatcactcattatgctgtaaggtgcacaaaggctggaattgtttctgtatttcccactcctcatatctgctttcaaatagtttttggaggaagaaagttgtgaaatcccaaagtttcctctgccatcactaaatctcttcatctcattcacagctctgccacattctctacggtcaccaccattggagttgctgtcaccacagctaccacagcccctttactgacacatccaaataccttaagttcaaaaggctgtggcatcagattcagaa

SEQ ID NO: 123239 - DNA, 751 bp, Homo sapiens
aggcatatgtgagaagaagcaatcagaagattggcaggatttaggaatctatttgaaatattcattacctattttgaattggtcttaaaaatttaaagaaatataaagctggataattaaagataaataataaaggaagaatacaaggtttctatgctgtgaagcaactgagattattatgattttggggcagtgaatttgtttctagaagttttgttggaactaaggcagaaaggaagaagaacaaatgaccttggaatgaaaaactttaagttactccacctaaccactatgaatgatagtcttgtctcaccaaccccagcccatcatctgttggacttggagctcacactttaaaaaagaagatcattctaactgcccctcatgactactgaagaggctatgcctgaaaaagcaaaatgtcctacattagagatcaccaagcaagacttttttcaagaagcaaaaactctcattgcccaacattatgagaaaataaatgagaataaagttcaaggtacttctataaatgtttttagaaagaaacaccaaaaaccgaaatctggcaaatacatacctttggagattgacaaaaaggtaacacgtgatgtggtgcaagaacatcgggccgcactcagaaggatttgctttcccaaggagctttccaaaagcgagcatcttcaggaacccccacaacgaatctccttcaaggaaccacacatttttagtagaagagaaagatgcaggccca

SEQ ID NO: 123240 - DNA, 260 bp, Homo sapiens
actgccatagctactgctgctactggaaccaccatagtagccaccgtggtttcatggtttggcatagtattggcctccaccaccataggggccagagcttctgcctccaaagtttccttccttcgtgggtccaaaatttgaagactgattgttgtaattgccaaaatcattgtagcttccaccacctccaaaattgcttccaccattaccaaatccattatagccatccccactgccaccaaagccaccatgaccactga

SEQ ID NO: 123241 - DNA, 277 bp, Homo sapiens
ttctagaggatcccgtgtgtcgacgtaaggagatgggtagaatagaggcaggaagccactcgcgtcggatgccgttcagccgtgattcgagggtgactgtgcacacgggtgccaggatgggctcactcccggcgcgggagctgcatctgtgcgaagtcctacccgggtgggatctggaggcccttagaccaccgcagcgagccctcgctaggattaaggctcacgggccagagcagagggtactcagctaggtttgtgagatcactaactttacaca

SEQ ID NO: 123242 - DNA, 459 bp, Homo sapiens
tgcaggaaggcctctcccagcctcagtttcctcatctgtcactccaacccaccaaggctgctgtgaggattcagagttaggaataaactgctgggcacagctggcactcagagctcccagccccatccacagacttctcatgtcaatttcccaaggtaaacttggggaaatcaaggcccagaaccggctgcagaggagctgaggacagagccaggatggaggccccttcctggtggctgatctttgtcctctcacctgggccacttcacccactctgcctccagtcacaaggcccagcaatgacctccacaacaaccaacatcacagcagctccaggagctcaagggcaccatgtctgtctgtccgttcacctagcactctgcctctgatggcagcccaagacaggctgccatgggttaaggccaggggctcagctgcaagaggtgcagatccccttta

SEQ ID NO: 123243 - DNA, 585 bp, Homo sapiens
aagtaaaggcactcagttgtacagagtgaggaggtttccctaggcaagattggtggcagcctcaggatgtatggggccggaggctgttatattctcactgggcgagagaaatggatagggaatgataatgatgaatgagttttctttcaaagtactcactaagggaggctctccattttctttttcctcactaaagtgcctcaaaatgcttaaagaattccactttggaattacttccgaactagtttatattttctatcccatgactctacaattgcacctcatttttaaccaaaaaatcatttcctgcttcatcaaccaccttattcatcagacgtggccctggatgattttcggttgtttccaaaaatgaaattcaacctcaaagcttaaagatttacgctatcgcagctcctgaagaaatgtgccatcaactctaaagatgaagaggagttccagatatattttggtattgaaaaaaatttacgtctcattattttgccatctcatacattttcatatcttcttctcttatattgctttgaagatgaaactcagatctgtataaagtatttcaagcatatt

SEQ ID NO: 123244 - DNA, 190 bp, Homo sapiens
ccctggcagacactatctttcagtcaaagccaaacagagatcttccccacctcattcactctaaagaaaatcaagacaacatctgaaaaatctgggcccaggcactccatgtatgctctcaaagaaagcccgacttccaagataccgctttatgcacaaaaagaaaggatgcctcctgtcattaacagtg

SEQ ID NO: 123245 - DNA, 2017 bp, Homo sapiens
  misc_feature (1)..(2): n is a, c, g, or t
nngttctgctcctagacattagagagataatacggctgatagacaacaagaaggtattccaagctgcacaatgaggcccaggagacccttggtcttcatgtctttggtgtgtgcactcttgaacacatgccaggcacacagggtgcatgacgacaagcctaatattgtcctaatcatggttgatgacctgggtattggagatctgggctgctacggcaatgacaccatgaggacgcctcacatcgaccgccttgccagggaaggcgtgcgactgactcagcacatctctgccgcctccctctgcagcccaagccggtccgcgttcttgacgggaagataccccatccgatcaggtatggtttctagtggtaatagacgtgtcatccaaaatcttgcagtccccgcaggcctccctcttaatgagacaacacttgcagccttgctaaagaagcaaggatacagcacggggcttataggcaaatggcaccaaggcttgaactgcgactcccgaagtgaccagtgccaccatccatataattatgggtttgactactactatggcatgccgttcactctcgttgacagctgctggccggacccctctcgtaacacggaattagcctttgagagtcagctctggctctgtgtgcagctagttgccattgccatcctcaccctaacctttgggaagctgagcggctgggtctctgttccctggctcctgatcttctccatgattctgtttattttcctcttgggctatgcttggttctccagccacacgtcccctttatactgggactgcctcctcatgcgggggcacgagatcacggagcagcccatgaaggctgaacgagctggatccattatggtgaaggaagcgatttcctttttagaaaggcacagtaaggaaactttccttctctttttctcctttcttcacgtgcacacacctctccccaccacggacgatttcactggcaccagcaagcatggcttgtatggggataatgtggaagagatggactccatggtgggcaagattcttgatgctatcgatgattttggcctaaggaacaacacccttgtctactttacatcagatcacggagggcatttggaagctaggcgagggcatgcccaacttggtggatggaatggaatatacaaaggtggaaaaggcatggggggctgggaaggtggaatccgcgtcccaggaattgtccgatggcctggaaaggtaccagctggacggttgattaaggaacctacaagtttaatggatattttaccaactgtcgcatcagtgtcaggaggaagtctccctcaggacagggtcattgacggccgagacctcatgcccttgctgcagggcaacgtcaggcactcggagcatgaatttcttttccactactgtggctcctacctgcacgccgtgcggtggatccccaaggacgacagtgggtcagtttggaaggctcactatgtgaccccggtattccagccaccagcttctggtggctgctatgtcacctcattatgcagatgtttcggagaacaggttacctaccacaacccccctctgctcttcgatctctccagggacccctcagagtccacacccctgacacctgccacagagcccctccatgattttgtgattaaaaaggtggccaacgccctgaaggaacaccaggaaaccatcgtgcctgtgacctaccaactctcagaactgaatcagggcaggacgtggctgaagccttgctgtggggtgttcccattttgtctgtgtgacaaggaagaggaagtctctcagcctcggggtcctaacgagaagagataattacaatcaggctaccagaggaagcctttggtcctaacgagaagagataattacaatcaggctaccaaaggaagcactaactttggtgctttcaagttggcaaggagtgcatttaatagtcaataaattcatctaccattccagattattaaaggcccactggttgttccactt

SEQ ID NO: 123246 - DNA, 2169 bp, Homo sapiens
tagtggagacaggctctcaccatgttgaccaggctggtctcgaactcccgacctcaagtgatccgccggcctcggcctcccaaagtgctgggattacaggcgtgaaccaccactcctggcccttctgttacttttccactgctgttgagatagaagtcactgttgggatccaacctttttgtttgtataaactgacaacaagaaggtattccaagctgcacaatgaggcccaggagacccttggtcttcatgtctttggtgtgtgcactcttgaacacatgccaggcacacagggtgcatgacgacaagcctaatattgtcctaatcatggttgatgacctgggtattggagatctgggctgctacggcaatgacaccatgaggacgcctcacatcgaccgccttgccagggaaggcgtgcgactgactcagcacatctctgccgcctccctctgcagcccaagccggtccgcgttcttgacgggaagataccccatccgatcaggtatggtttctagtggtaatagacgtgtcatccaaaatcttgcagtccccgcaggcctccctcttaatgagacaacacttgcagccttgctaaagaagcaaggatacagcacggggcttataggcaaatggcaccaaggcttgaactgcgactcccgaagtgaccagtgccaccatccatataattatgggtttgactactactatggcatgccgttcactctcgttgacagctgctggccggacccctctcgtaacacggaattagcctttgagagtcagctctggctctgtgtgcagctagttgccattgccatcctcaccctaacctttgggaagctgagcggctgggtctctgttccctggctcctgatcttctccatgattctgtttattttcctcttgggctatgcttggttctccagccacacgtcccctttatactgggactgcctcctcatgcgggggcacgagatcacggagcagcccatgaaggctgaacgagctggatccattatggtgaaggaagcgatttcctttttagaaaggcacagtaaggaaactttccttctctttttctcctttcttcacgtgcacacacctctccccaccacggacgatttcactggcaccagcaagcatggcttgtatggggataatgtggaagagatggactccatggtgggcaagattcttgatgctatcgatgattttggcctaaggaacaacacccttgtctactttacatcagatcacggagggcatttggaagctaggcgagggcatgcccaacttggtggatggaatggaatatacaaaggtggaaaaggcatggggggctgggaaggtggaatccgcgtcccaggaattgtccgatggcctggaaaggtaccagctggacggttgattaaggaacctacaagtttaatggatattttaccaactgtcgcatcagtgtcaggaggaagtctccctcaggacagggtcattgacggccgagacctcatgcccttgctgcagggcaacgtcaggcactcggagcatgaatttcttttccactactgtggctcctacctgcacgccgtgcggtggatccccaaggacgacagtgggtcagtttggaaggctcactatgtgaccccggtattccagccaccagcttctggtggctgctatgtcacctcattatgcagatgtttcggagaacaggttacctaccacaacccccctctgctcttcgatctctccagggacccctcagagtccacacccctgacacctgccacagagcccctccatgattttgtgattaaaaaggtggccaacgccctgaaggaacaccaggaaaccatcgtgcctgtgacctaccaactctcagaactgaatcagggcaggacgtggctgaagccttgctgtggggtgttcccattttgtctgtgtgacaaggaagaggaagtctctcagcctcggggtcctaacgagaagagataattacaatcaggctaccagaggaagcctttggtcctaacgagaagagataattacaatcaggctaccaaaggaagcactaactttggtgctttcaagttggcaaggagtgcatttaatagtcaataaattcatctaccattccagattattaaaggcccactggttgttccactt

SEQ ID NO: 123247 - DNA, 2067 bp, Homo sapiens
tccttgacgcagttgcccgaacccggagctaagttacccgcagggccattggaagccctccctggctttaggtttctcctccagtggaaccgacaacaagaaggtattccaagctgcacaatgaggcccaggagacccttggtcttcatgtctttggtgtgtgcactcttgaacacatgccaggcacacagggtgcatgacgacaagcctaatattgtcctaatcatggttgatgacctgggtattggagatctgggctgctacggcaatgacaccatgaggacgcctcacatcgaccgccttgccagggaaggcgtgcgactgactcagcacatctctgccgcctccctctgcagcccaagccggtccgcgttcttgacgggaagataccccatccgatcaggtatggtttctagtggtaatagacgtgtcatccaaaatcttgcagtccccgcaggcctccctcttaatgagacaacacttgcagccttgctaaagaagcaaggatacagcacggggcttataggcaaatggcaccaaggcttgaactgcgactcccgaagtgaccagtgccaccatccatataattatgggtttgactactactatggcatgccgttcactctcgttgacagctgctggccggacccctctcgtaacacggaattagcctttgagagtcagctctggctctgtgtgcagctagttgccattgccatcctcaccctaacctttgggaagctgagcggctgggtctctgttccctggctcctgatcttctccatgattctgtttattttcctcttgggctatgcttggttctccagccacacgtcccctttatactgggactgcctcctcatgcgggggcacgagatcacggagcagcccatgaaggctgaacgagctggatccattatggtgaaggaagcgatttcctttttagaaaggcacagtaaggaaactttccttctctttttctcctttcttcacgtgcacacacctctccccaccacggacgatttcactggcaccagcaagcatggcttgtatggggataatgtggaagagatggactccatggtgggcaagattcttgatgctatcgatgattttggcctaaggaacaacacccttgtctactttacatcagatcacggagggcatttggaagctaggcgagggcatgcccaacttggtggatggaatggaatatacaaaggtggaaaaggcatggggggctgggaaggtggaatccgcgtcccaggaattgtccgatggcctggaaaggtaccagctggacggttgattaaggaacctacaagtttaatggatattttaccaactgtcgcatcagtgtcaggaggaagtctccctcaggacagggtcattgacggccgagacctcatgcccttgctgcagggcaacgtcaggcactcggagcatgaatttcttttccactactgtggctcctacctgcacgccgtgcggtggatccccaaggacgacagtgggtcagtttggaaggctcactatgtgaccccggtattccagccaccagcttctggtggctgctatgtcacctcattatgcagatgtttcggagaacaggttacctaccacaacccccctctgctcttcgatctctccagggacccctcagagtccacacccctgacacctgccacagagcccctccatgattttgtgattaaaaaggtggccaacgccctgaaggaacaccaggaaaccatcgtgcctgtgacctaccaactctcagaactgaatcagggcaggacgtggctgaagccttgctgtggggtgttcccattttgtctgtgtgacaaggaagaggaagtctctcagcctcggggtcctaacgagaagagataattacaatcaggctaccagaggaagcctttggtcctaacgagaagagataattacaatcaggctaccaaaggaagcactaactttggtgctttcaagttggcaaggagtgcatttaatagtcaataaattcatctaccattccagattattaaaggcccactggttgttccactt

SEQ ID NO: 123248 - DNA, 193 bp, Homo sapiens
ggagagttaaaatatagctagtctgtggctgctgagctgaaaggctgcactcacccaagtccttctaaactgtagggttctgattcacagggtctgatggtaaaacagaaagttaatgaggtatggcagtttcctctgttctgtcactgatctaggtcagccttccttttttttttttttgagatggagtctc

SEQ ID NO: 123249 - DNA, 1026 bp, Homo sapiens
tgtcagtatgtagatatacaattgatttttgtatagtgactttatagtctgataacgtctgtttcacttattacttctagtggtttgtttatatagaactctaagaaatttgcaattatgtttcctgtgactatcgttttacttccttctttctaatccttatgtcttgtcttgctttttattggtttattatactgtccaggacttccatagtgttgaacagaagtcacaagaatgggcataattgcattgtttccaagcttaggcagaaagctttcagtagtccaccatatggtatgatgtctgtaggatctgcagagaaaacctttatcaaaatgaggacattccttttaaactttatttcttgggagtttttatcataacgatgtttaatgctgtcaagtgcctctttctgtatctgttgagatgattacacaactttcttcattctgccaatgaattacattggtttcattttcaacttttaaactcactttacatccctgagataaaccccacttggttgtggtgcgttgtcctttgggatattgctagagttgatttctaggtgctttttttttttttttttaagatttctatattggtgttgatgggagatattggacttttgtatccttttcttgtaatggctttatttgattttggtgtcaaggtgatattgggtgtcataaaattacatgggaattgctgtctccttccctgtttttggaaatagctgtgtaagataggtatgattcttctttacatgtttgataggatttaccagtgaagtcatctgaacctagagggttttctttggtttggtttttgtttttgtgggagaattaagattttttaagagatattttcagatttttctgttgtcggttttggtaatttgtgtcttttaggaaaatttcatttcatccaagttgttggatttattggcataaaattgttcagaatattcctttaatatccttttaatgtctgtagaatctaatctgtattgcagtctcttcatat

SEQ ID NO: 123250 - DNA, 254 bp, Homo sapiens
ccataactcagcttacaattatcaattcatggccaatcaacatcttttcttttaagagacaaaatgtctgtctggagtgcagagtggcttaatcagctcatggcagcctcaacctcccaggctcaagtgatcttcccacctcagcctcccgagtagctgagattacagacacgtgccaccatgcctggctaatttttttagtttttgtacatacaggggtcttcactatgttgcctaggctggtctttaactcc

SEQ ID NO: 123251 - DNA, 387 bp, Homo sapiens
caccatctttgtaatgctgtccttctgatagtgagtttgcttcatggtttaggagctttgagatttgaatactggcctgctgggttttggacgtgcattgggcctgtggtcccatttgtgttatttttctgggaaatttcttccctttggagtgagaaagcttacccaatgcctgtaccatcatcgtaccttaaaagaactccattttaagttcagggactccttggcagaagagaccgtagccttgtatcaggtaagactttgaacttcttacatttgagttaatgctggaatgagttaaggcttttgtaaacatttgaaaaggcatgactgtattttactctgtgagaatgacatgagattcgggggagggggtcaaggtcagaa

SEQ ID NO: 123252 - DNA, 298 bp, Homo sapiens
taggacacagtcagaattggagcaaaaatgcactctcaagtcaaagagaataaactaacaaaagcccttctgccgttggcacagacagaggctgaggactgactatgcagcagtctaaaccacaatctacaaaagttgcttttggcccagcatggtggctcacacctgtaatcccagcactttgagaggccgaggtgggtggatcaccaggtcaggagttccagaccagcctggccaacatggtgaaacctcatttctagcctgggtgacaagagcaaaactcttgtctcaaaaaata

SEQ ID NO: 123253 - DNA, 593 bp, Homo sapiens
agagacttttctaattactaaattggtttgttataaaaagataatagcaaatttcttcttttcataattggacatttcttccctgtaggctaatgcaggcacagcccgtgcatgcacaataagttatgcttttgaaagccataactagctaataacagctacagtgtcatcagagagtaatggtgtgctgattagcataattaatgacaaatggtggtgcggaattggtggattggtttagcggatgatgaatgcggcgaggcctgggctgaggcctgccaactaggcctcgctggctgtcagcccttctgttctcccgatgcagccctcattagtcacgatgggaggtgccagtttgtattccgtttggagcacagaaaacttaataatccaagcaaatgtggctatccccttttcctctgtatttactcacaaaaccctctcactcattcccattgtggctgaaccattaagacacagctatttccagattcctctgcgaggcttgaaggcgaaacaaaagggagcataatagagagaggcacggatcccagagctttcatctgaccatcaatgaattactctcactagga

SEQ ID NO: 123254 - DNA, 433 bp, Homo sapiens
acagagcggcagtctctgtggtagcatctcaggcatgaggaaggttcccagttctctcctgggtcctgctcaggttcctgccacctgaaattctctcctcacaacttctgtcttgtgacttaagcttataagaatttgtcttctcgaaaaatgcaaatgttctcaggatgggatagcactttaaaaattatgactacggagatcttatcatccaaacaccaaatcagaatattttacaaagcacatttcttatcttttttcactggatgaattttattttctagattttttcctatatcaaagcaagtcataaatgttatttaaaaatttaaacaaacataaaaggaaatctactcctagctacacatcatttccctggcatctacttcacgagaagtataaccatggttaacaatgtgtggttgtccttcta

SEQ ID NO: 123255 - DNA, 583 bp, Homo sapiens
tctccatgggtgtttcagcttcaattgaccaatcacataacagttatatgtttggggggaaaaagaaaagtttctaaaaaatgtagcccattacatatatgggtatgaaagcagaaaagtggaggaggcagggatatcattgacaaacacctttgccagtttctttgtattcgtgattttttgtgctattaaatgcagtattaaaacaagaaaagcccacctgggctagtgaaaggagaggaaataagggggcttgtaaaaggggagccgtcgctccaaaagtagagaagacaagaaatgctgtaagataagcaaccaacgcagacaggcctcagctaagagtatagtgtgtgtgtgttaaaaaaaaaaaaaaaaaaaagaaaaaaaaaagctgtatgatatacttgagcaaatcaatgaacctctttgcgattgttttatcatctgtaaaatgcagataattcctaccttaaagggttattgttaaagataaaatgatataaaaatgtgtcaaagtataaagtaaaaggcttggaactttgtagggactcagtaaacgtttgttggatccaaacctgaaact

SEQ ID NO: 123256 - DNA, 841 bp, Homo sapiens
tttgtattgtgaaagaaggtaaattctcaggaccccaaactcactatgccaaagagaaagtcaagcttggaaactgagtcatgcaatactgccttcccttttgttcccaaatggagagctgtattttcataaccccatgttctagcctcatgcataagccaggtgcccaccaagacagaacgttacgtatcttcccagatggctccctcacaagttgctcacaaagtgagcccctaattctttcaggatacatctccccctataaactagccctaaaagcaagttctgttaaatctcacactgacaatgtcgattaccagcttattttcacatggataggacaaggacaagatcgtaaatcatccttccacctaccctgagataaatgcagcatggccctattcccctactccctcttttcatgtttactttatgttatgtaaaatgcagatttactgagctcaagatgaatgcagcataaactctttactccctcttttcacgtttatcttatgtaaaatgtggattcactgggcttaggatgaatgcatcacagactctactccttttcaagtttactttatcttgcgtaaaatgtagatctactgagctcaagatgaatgcatcatggactcctctactcttttcacatgtttatcctatgtaaaatgtggatttactgagctcaagatgaatgcatcatggactctttactccctcttttcatgtttatcttatgtaaaatgtagatttactgggcttgagatgaatgcaacatggactcctctactccctcttttcatacgtttatcttatgtaaaatgtagactttccgtatgct

SEQ ID NO: 123257 - DNA, 835 bp, Homo sapiens
ggatcacagtatgcaagatcaatatacataatcaaaaaactttccacaaagaaaagcccaagcacagatgacttcactggtgaattttatgacccagttgaagaataattaataacaattccttataaactgtttcaaaacttagaaaacgagagaacactttccaaatcattctacgaagccaataattccccgatacccaaaacaaagacatcacaagaaaaaacagacagacaaaaatgaagaaaactacagaccaatatcttttgtcagtatagatgtaaaaatcttcaaaacaaatagaatcaaacaatacagcaacatatgaaaaagaatgtacaacatggccaattgggacttttcccaagaaggtaaggttggctgaagatatgaaaatcaatcaatgttacataccatattaatagaataaaagattgaagctttaaatcgggtcagtgatgcagaaaaagcatctgaaaaaaatccaataccttatatgataaaaattctcagaaagctagaaatagaaaggaagttctttgaactgataaagatcatctacgaagagtcctgcactaatatagtacctaatggtgaaagactgaaactgtctgacccctaagatcagcaggaaaggatttttcctcttactacacctgttcaacattgtactggaaataatagccaccaaattagatcctcccttcctgccccaaaatgaaagaaataaatggcatcactgttgaaaaagacgtaaaattacttctattctcagataatacgattgttctatggaaataattattaaatcttatggaagccacaaaaacctatt

SEQ ID NO: 123258 - DNA, 652 bp, Homo sapiens
  misc_feature (591)..(591): n is a, c, g, or t
  misc_feature (597)..(597): n is a, c, g, or t
  misc_feature (633)..(633): n is a, c, g, or t
gttgtccaggctggtcttgaactcctgggctcaataagtcagcccgcttcagccttccaaagtgttgggattgcaagtgtgagccaccatgccgggcctgacaagccagtttttaaaataggtaaaagaatgggtactttaaaaaagaatatcaaagtggtcaataaatatacaacagcgcttaatatgttagatacagttattaggggaaatattaaactaaattggaaaaccactacataccctccaaaatgtaaaaaattaaagactgacagtattggcaaaggtagagcagcataaatgctcttagatttgctggtagaagtgtaaattggtataaccactttcaaaaaatggcacaacctaccaaagctaaacataaccggtaaaccagcaactctaatcctaagtatgtccccagcggaaattagtgtttgtgctagacttgtgcaagaatgtcaactagaagatatctttttctccccttcttttggagacaaggtctcactctgtcaccagggttgaagtacagtgggacgatcttgactcactgtagtcccagctacttgggaggctgaggcaagagaatcncttgancctgggaggcggaggttgtagtgaactgagattgcnccaatgcactccagcctgt

SEQ ID NO: 123259 - DNA, 1230 bp, Homo sapiens
ggccttgaaggcatttcagagacctttgtggcagcccctcccatcacagactcagaggcctaggaggacagaatgactctgagtattaaagtagatttaatctaaatcataaagtacaagctagagcaatccctccagtgctgcagaaactgcctgcatgtggctcccacattgtttcttggagctttggtggtggtaggggtggcaggggcaggtgttatgtttcttggtttctcaccttcaggtctccttacccatgtttcctttgtcagagtcattggccttgatggaggggagactgggttactctgagttgagaagcaagcttgactgccctgtggtttatatcagcctagcttagtttgttttctgaagtcttcacaaataaccaaatatccagcccagtgcagttctcaatgagtagtctccagttcccatcccccaccacacacacacaccaaacactgtgcccacctgggagacccattttcatttatcttcttctttgagtgcctggaaggctgaacatttgatcttttcaaacatttttctctcatctggcctgttagcgctcttgagcctttgaaaatgccatttcctctacatactattcttcctcagagcagccctctgtttttttttccaaccagtcttttctcttgcaaagttcagatcaaaattcttctttatgtaaagagaagtggcgtgccataggggttacaaacagggcttcaaggttagcactgggatcaaattccgactttgcaacttaactttcttgagtaagttgctacacctctattagcctcagtttcttatctgtaaaatgggacggctaagtacctatttcattgggctgttgaataatgatggtctcatctatgcaagggcttagtaccagctgggtgaaactcagtgaatggcaggcaaccctattatgactaggcttctgccaatgatcagacttgaaccctgtgctcatccccccatcactttgtggaactagatgtcctacgttgcacatggcttgattcatggtttggagttgttttctggttgtttcctgtgtgcaggtttaatctcaacctgtgatcccttgaaagctgcaattttatccctccccgtcctcctccctctcaccccaaggccaagtttaatactgtgcattctgaaatcttgcaatgttgatgatgtaaaataaatcttctctcctgtgtttctgaagaatac

SEQ ID NO: 123260 - DNA, 1211 bp, Homo sapiens
ggccttgaaggcatttcagagacctttgtggcagcccctcccatcacagactcagaggcctaggaggacagaatgactctgagtattaaagtagatttaatctaaatcataaagtacaagctagagcaatccctccagtgctgcagaaactgcctgcatgtggctcccacattgtttcttggagctttggtggtggtaggggtggcaggggcaggtgttatgtttcttggtttctcaccttcaggtctccttacccatgtttcctttgtcagagtcattggccttgatggaggggagactgggttactctgagttgagaagcaagcttgactgccctgtggtttatatcagcctagcttagtttgttttctgaagtcttcacaaataaccaaatatccagcccagtgcagttctcaatgagtagtctccagttcccatcccccaccacacacacacaccaaacactgtgcccacctgggagacccattttcatttatcttcttctttgagtgcctggaaggctgaacatttgatcttttcaaacatttttctctcatctggcctgttagcgctcttgagcctttgaaaatgccatttcctctacatactattcttcctcagagcagccctctgtttttttttccaaccagtcttttctcttgcaaagttcagatcaaaattcttctttatgtaaagagaagtggcgtgccataggggttacaaacagggcttcaaggttagcactgggatcaaattccgactttgcaacttaactttcttgagtaagttgctacacctctattagcctcagtttcttatctgtaaaatgggacggctaagtacctatttcattgggctgttgaataatgatggtctcatctatgcaagggcttagtaccagctgggtgaaactcagtgaatggcaggcaaccctattatgactaggcttctgccaatgatcagacttgaaccctgtgctcatccccccatcactttgtggaactagatgtcctacgttgcacatggcttgattcatggtttggagttgttttctggttgtttcctgtgtgcaggtttaatctcaacctgtgatcccttgaaagctgcaattttatccctccccgtcctcctcttttaaccagggcagttataccggctctgaattgcccgtgatatttaaaactttcccgggtcctgcatcgggggccgcc

SEQ ID NO: 123261 - DNA, 202 bp, Homo sapiens
tttgtttaagtggggcaggagagggggacagaggggagaaaaggcaatatccaactcttaagggcacttaatttgtgattcctctttaacaccctactggtttagaccaggagtcagcagatgagtggtaaagagaacctgctgtagtggtaaacagataccttttcagaagaggtattcatcaaaacttttcaagaagtct

SEQ ID NO: 123262 - DNA, 597 bp, Homo sapiens
agacgatggtgtgcaaagcatgctgagggaaccctctggggcaaggagggtgacaacaggcatgtctggctgtgggcaggcctctctctgcagctcccctgtgtcctgtgttcaccctgcacgggaggggttggcagcccccttctgcagctgaggaaatggggcagggaaaggctgcacatcttttctgaggtgccaaagccaggtcagtggctcaggtggggtttaccccagatctggtcctggcatgatgctccagcacccctgatttgcaatcccaacttaagaaagaaaatagaaatgattaaggcaagtgtgggcatgccctgtgcgctccgagctgagggcccaagaaactgctgttcactgaatacgtagctgcctggctgcctggctccctccttcttagccccagcctttccctgtctgccccacagcctcctcagagaaccaggaaagggccttgctgtcttcctgctgagccttggggtctcctccaagaaggtgaagtagcctggccagagtgggatttacctcccctcagtctaagctccagccagcagctctcccggcaggttctggcgctccttggagcac

SEQ ID NO: 123263 - DNA, 479 bp, Homo sapiens
cctgcctgagcctcccaaagtgctgggattacagattgaaccaccgtgcccggccaacagatgcatcattcttaggattaaacagcctgaggagtttccagcctctgttggtggtattggggtcgtttcctcgctcttctccattcactgcctttagaagctgctttcaaagaagacggctttcaggacaaggcatcacacttcttctccagcacgtacagtcctgaaacctccaggaggaagctgccccaaggtttcctgtgtcccaagcttgctgggaactcctcatccttccattcaccctattctcaatatccctgcccctccaatcccttagcatacttgacttagccttggccaccctggctagggacattgatcaggaaggagtacagcgtatagaatcatagaggaattgaaaggaactttggaatataaaccagactatcctcaaccacacccccaccctcagcaaatgc

SEQ ID NO: 123264 - DNA, 396 bp, Homo sapiens
ctacaggggtttgagtaggggagtgacaggaggcttctgtctcaaggactgttctgtgttgagaacagactgcagggaggtaaggaaagaagaatggagaacgcttgggaggctaaccttgtgacacaagggagagaatgatgtcttcgtcttggggggacatggtggggctggtgagaagtggtcagtttctacatatgttctggaagtacagtcaaaaggggtccctgctggcttggctaggggcatgagggaaagacaggcatcagaaataatgctgaggctggatgcagtggctcacacctataatcccagcattcagggagggtgaggcgggaggatcgcttgagtccaggagttgaggccagcctgtgtaacatagcaagaccccatctc

SEQ ID NO: 123265 - DNA, 442 bp, Homo sapiens
ccaaggccagggtcaagcatggggtggctcatgcctgtaatcccagaactttgggaggctaaggcgggcagatcacttgaggtcaagagttcaagaccatcctggcctcaagcaaggtcgtgctggtaattttgcaaaatgaattgtgattgactttcagcctcccaacgtattagattataggcattagccatggtgcccagccttgtaacttttaaaaaaattttttaatctacaactctgtagattaaaatttcacatggtgttctaattaaatatttttcttgcagccaagatattgttactacagataacacaacctgatatggtaactttaaattttgggggctttgaatcattcagtttatgcattaactagtccctttgtttatctttcatttctcaaccccttgtactttggtgataccagacatcagaataa

SEQ ID NO: 123266 - DNA, 484 bp, Homo sapiens
gtggaacagcgaaggggagagagagggaggttgaggagggagaactcaaattcattacgggctcataaagtcccatatgagaaaagcgccccgtttcgcagccgcgtctggggaacgctggcggggtatgcgttaggaaggtctcgtcccagccccgagtgacaggcaatgggctttaaaagctaggacatgggatggcgtggagggggtgagggtgagtcccagaggcaggcttcaatcagtgagcaactttggggcacttcgaggacttctaagtcctggccattacaacaaccttgcccttgccggctttcaggggaatggggcctaatgaaggggagttacctccattaaaacgtcaaagaaatcaacggtccccaagtctcctttcacatgcatctcaattgggtcatcctccctttcatcccaaaaggagagagtgcatctgaccattcggagcacgggttacgtgccctaggctccg

SEQ ID NO: 123267 - DNA, 624 bp, Homo sapiens
accagagagccagtccaacccagtccatcacctggaggctggagaaccacgaggctgttgcctgttcgtccccctcttctgagaggtccaggtcacctgctctgggagaagccagttgccatgttgtaaggacactcaagcagcccatggaatgactcacatgctgaagaactgagccctccctccttccaacagccagggaggaactagggcttcttgccaataaccatgtgaagaagcttggaaatggattctcccccaaatgagtcttcagattactttagactaacatcttgactgcaacctctagaaagaccctgagccaggatcaccaagctcacagaagctaagagttaataaatgtttgaattaagctgctaagttttggagtcacttgttatgcagcaataggtatctagtatagcctgtatttatatattttgattttctgtatattataatgttttgacatctttttttttttttttttgagacggagtcttgctctgtcacccaggctagagtgcagtggtgcaatctcagctcactgcaacctccatctcccgggttcaagcgattctcctgcctcagcctcccaagtagctgggattacaggcacctgcc

SEQ ID NO: 123268 - DNA, 289 bp, Homo sapiens
accagagagccagtccaacccagtccatcacctggaggctggagaaccacgaggctgttgcctgttcgtccccctcttctgagaggtccagaccatgaacaattggtatacttccttcttatgaaatccctctctatagccctgagctcaaggcttcactgtggaattctaccaaacatttaacaaagaactaacaccaatctttctcaaacctttcaaaaattgaagagggaacacttactagtcattctatggagctggcattaccctgataccaaagccactacaa

SEQ ID NO: 123269 - DNA, 708 bp, Homo sapiens
gttttctgggcctttgctccacaaccacctctgtctggaaggtcaggtacctgggaatatttggctcttcaaaagccagctgaagtactgctttctacgacaaatcttccctttaacaaaagtggtcactggtacagagtcagtgcctgtttttcaacctgcatgcgcactatcactgtctactagtagtttccatttcgcccctctgcagtcattggaggcccacctaactaagctccacattcttctctactctagcatttgcaaaaggcagtgaattcacattttaaaggcaaaacacaagcaaaccacttggtgggacacaagacagttcatcttatcttattttgagcagagacactatagttgaaaaactcttctttgctctaaatcttccttcctctaaatctgctgctcttccacagcctaacttaaaatattatagatgttggatcaaatttgctttcctgttcttagtttttaaaatcaaaataatggttttctcctccttcaagaaagtaaaacaaactccaaaacaaattcagaacaaaaaagccctgattgtggcattcaactcttacctatgagtctcaaggggagaaaaaaaagaatttcttacaagtgggagggttgacttatgagtaatacatatcacaaagatcaacaagcaggagcacatactagcaagaaactgtaagacacaccttt

SEQ ID NO: 123270 - DNA, 333 bp, Homo sapiens
attaaaatattctcttgaggaaaaaaggcaaccacagtagacatctacttgcaaacatggatgaggttcagaaagtatttaattttgcttttaaataaaaataatatttaccccctattcacaccaatagtaagaactgaattcttactacgtgaacaaagttatcattacacagagaaaaaaaaattctctttttcataccagccccccttcccactggaacatcttagtgggaaaatgactggcattactgtttgttcttacacacttgggccaggcaacatgagcagctgacctacctgaatcccaaataccaaatacagagcttcaggg

SEQ ID NO: 123271 - DNA, 340 bp, Homo sapiens
ccagaagagcacctggtgtgttctaggacctcatgggagcccaacaactaaggtggaaagcggatagataggtgggagtttgggggatacatcaagcccatctgaacttggtccttccgtggctcctcacaaagctgtgggtgggcccagtctcgggactggggatgcctctcctggcaggcactcctcccaaggacccatttcagccaaccttgtggtgttccctcaacccagaacccctgcagcataaacactcagggcacttgtgaatgtcttcattcacgtattgcacacactcccagggtgactccatcaggcgagctaccatgttgctcttgcc

SEQ ID NO: 123272 - DNA, 152 bp, Homo sapiens
caggagagcagctcttggccaccagttgggaaggaaacagtcaggctatattaggaaacttacaagcaagtggcaagaggcacagacacccaggggaggctgggagtgacagggccctgggaaggggaaaaaccgactcctgaggccacccc

SEQ ID NO: 123273 - DNA, 554 bp, Homo sapiens
tgccaataagtttcttcgaattatgtggagcacaaagtttgaagagcactaaatattatttaggaaagtctacctgtgcatctaactgcataaatccttcagtggtgagaaagttgcttcagacttctattaactcatgtttgggaagtccttacacacttacctgataacagcctttcagatatactttccatccttttgtggtgtttctagtagcttcacatagtcattttcctggacatgttgaaataacctatcttaatattgtgactcatttacatacaaaataagtattattttatgtacgtagaaaacattgcttgaggccaggcgcagtggctcatgcctgtaatcccagcactttgggaggctgaggcgggtggatcacgaggtcaggagatcaagaccatcctggctaacacagtgaaaccctgtctctactaaaaatacaaaaaaaatcagctgggtgtggtggcgggcgcctgtagtcccagccacctgggaggctgaggcaggagaatggcgtgaacccgggaggtggagcttgcagtgag

SEQ ID NO: 123274 - DNA, 213 bp, Homo sapiens
agctgaggcgggagaatcgcttgaacccgggaggtggaggttgcagtgagctgagatggcgccactgccctccagcctgggcaacagagcgagactctatttcaaaaaaaaaagaaagaaagaaagaaaagaaactactttatgtaaagaagtactttagtaatcactgtgaaattctgtgaataatcagcagtgaaaatatgcacaaaggat

SEQ ID NO: 123275 - DNA, 223 bp, Homo sapiens
tgggggctacacaaacattgagaccatagcagtggcattttaatggatgtcagcctcttgagagtttgaatagtgtcagtgttaggttgagtttctaaccctgcaaaggccagggctacctcttggagcctaaggaccctacagaggtttttctacttcctaaagacctttgacagcaagtgatgttttgcttgcttctgctagatcctgtggcattctaact

SEQ ID NO: 123276 - DNA, 531 bp, Homo sapiens
gtctttcggctccccgcttcccccgatgatgatcaggtgcgacctagagagttgtggagaggaatggggtattggttggggagggggtgcgggttagttcaggaggaggttacatggcggaattcccacgaatgctggcgaaggatgaaaaagatgaagaaatcttgtttttctgaacgagaggattctctgcatgacttccccactgttggggtgatgagctttcaggctgagattttattaacaattcatatggagattgagggcagtggaggagcagattctcacataaacttgatctgtccatgaatgcagttctctgtttgccctgaccctgcatggcttaagacactgcctgtgaggccagtgtgccagacacaaagaaagaaatgaaaagcaagcacattccaggagtctgcacaaaggagcccggccgtttctagtcgtctccccagagaggatcttatctctgcacagccaaaaacctctaaaatgtttatttgtgtacttaaagttttaaaatccatgtgg

SEQ ID NO: 123277 - DNA, 613 bp, Homo sapiens
gggaaattacttggactctcccgggtggttcaaaaggccctgcagtaactagaaatgcccttgggtactggatagagacatcacgtggtgctgaaacagaaaaaccaccggtgcagtagatggaggtagagctgaactaatcttatgacatatcctaaacatttcactcattttcttttatataatcacaatccaagtttgtctctcataaaactgaggtgtggaaataatccttacctagctttctggctgtttggatttggataaagaaaagtttactcgtttattactcaaaaccccacctgtttctaaaaaggatttgaggtcgtttacaataaaaaaggtaaacagagaccaaccaaatgtatcacaaggtaagggagctcactgtttgccttctgcactagctccctagggtctaaggatcaaaagttgcaaagctggccgggcgcgggggctcacaactgtaatcccagcactttgggaggccgaggcgggcagatcacgaggtcaggagatcgagaccatcatggcgaacacggtgaaaacccgtctctactaaaaatacaaaaaattagccgcacgtggtggcgagcgcctgtagtcccagcta

SEQ ID NO: 123278 - DNA, 788 bp, Homo sapiens
tggtgcgatctcggctcactgcaaccttcgctttccggtttcaaccgattctcctgcctcagcctcccaagtagctgggattacaggcacctgccaccacgcccggccaatttttgtatttttagtagagacggggtttcgccatgttggccaggctggtctcgaactcctgacctcgtgatctgcccgccttggcttcccaaagtgctgagattacaggcgtgagccaccactcccaaccaagacctgatttttcaaaagagctcccattctttattcataggcaatataacagtatttttaactctacagtaactattgagaatgacccactcactgacagcagacagttaaaattgggggctactgtgtgcaggcctcctatattcaagggattttaatcctaacatccacctgtgagggtaggtattattttagttacatgtgattaaactgaggctggggaggcttaaatggcttccccaggatcttatagctagtatgtaattgagctgtaatttgaattgatactcaccttactccaaaatctctgctttttctattggcccatactatttccaaaggaaggtcagacgtcatatgatcataatgtggggaatattagcatttctgttttgtaatctttagattagctctcagtttacttttggggttttattttttagatataattcacatacacaaaattctcccttttaaagcacacaattcagtggtttttagtatattcacattgttgtgtccctatcactaattccagaacattt

SEQ ID NO: 123279 - DNA, 174 bp, Homo sapiens
ttcaaatccacattctgttaagattctgctcaagctgaactttcagcttcagtttcttcatctgtaaaaagaggcagttggactagatgatctctagttcagaaaatatgattttaagagatggaacatgacaagtctgagaaaagtcaagaacaaacctagtaagggtcagaa

SEQ ID NO: 123280 - DNA, 226 bp, Homo sapiens
cctttagattttccttctggcatggacaaaagcgtcattaattatgaatatgaattcctttgcaaaatgacaagattgaacatttcctcatgccagtaacccagctgtctcattctgatgtgcaacaaagactttttagagattgtttttaatggccgtggtatcagacactaaaaaataagaagcttaaaaggaatgcaaagtagcttacagttcattcgtctag

SEQ ID NO: 123281 - DNA, 656 bp, Homo sapiens
gagaattgcttgaacccgggaggcggagggtcgcattgagccaagatcgtgccactgcactccagcctaggtgacagagtgagactcctgtctcaaaataaataaataataaattttaaaagaaggtagccaggtgtggtggtgcattcctgtagtcctggctacctggaagggtgaggcaggaggatcgctttaaccatgagttcaaggcagcagtgagctatgattatgccactgtactccagcctggacaacagagcaagaccctgtctctaaaaataataatttttaaaatttaaaaaaagaaaggaatgttatggcctcaagagctctttgtccatcctttactgtagacagccagatttgaggaaggggcccaggcagcctcagctcccattcagtgccactcagcccctgctcctggtcagctgtgaaaggctctacacagccccaagggaggttctcagcttcccatgatcagactgcctcagcaattccccagagtccttctaagccacctagtatgtcagattcagccccatctaccaagcaaggaaatgaagggcagggggtgagtgggctatcataccgtgagcctccggcctgcaagaccactttgtagtccctaccagctgtgtggccagccctgttggtaa

SEQ ID NO: 123282 - DNA, 208 bp, Homo sapiens
tattactttccatttctttctcaaattctcgctaactctcatacacatcaagtttagtaggcaagataattttctctcctaatccaaatctttaaacacttcacaaatacctttatagacaggaataggagtttgctaaaattttaattttggttaaattcaacaaagtcacctgtgtgcccaacactatgctatatgttctgaataa

SEQ ID NO: 123283 - DNA, 1255 bp, Homo sapiens
aaataaacctttcagttgagcagtaacaagagagcaatctattaataaattgcttattataaattataagtgaatgctggctaaaaaaatcatgtagactaagttttcagtttgaatcttttattgctgtgataaaaatagatatgtttcaaagcatgtaagtgctttcacaaatagaatcagatttcaaattcaggagtatgtttctttttttcatcattataaattaagctccatcctctcatttccctcagtcttcttccatctaaaagcaaagtttacagtttacttcggatttcaggatcaggaataagtgtcttcagccttctaacaggccatgccttatgcctaggctgtcatacacattctaacatttaatttcatttaattcactatgttaatatttatttgctatacaagacaaggattctaaacttacgatttttaagtacgtcaagggatagcctgacgttaaaatctttttaaaaaattggtttgtggtgtacaattttatgcatgttcacttctttttttttttttatttgagacagagtctcagtctgtcacccaggctctagtgcagtggaaccatctcggctcactgcaacttctgcctcccaggccaagcgattcttgtgccacagctcctgagaaatctgcataagagaacagtacaatttgcagttaggatcatctttctagatttctgtatctttcaaaatttctgtgctttctgagatttgtacccaaggttcactgaaatatgattcagaaggaatatcaagcaccaaaaaaggactcatttatttactttcaccttaatattttaggcattgaacacattcttaaaaacactggtctgtaagaaactggtgttttgaaaaattaaagtgtgtcgtagtctagtatatttattttggccacatagatcaaagttagtttcagtcttttcaagctctaaaattttggttctgtggttatttaaacaaaagctatgtaaggactttaaagtgattaagtaaaaagtctttaggtatgtcagaatcctctttacttagggcaaaatgtttcagggtgaacctgtggtagccttcatggcccatagcctaattgcctgcccttagggacactagaacaaattgaaattaatcatgtccactatgattatatttagtttcaaggaattcatagatggtaaacctgttgatttataaaataatgatgattatatagaaatagaatattgaacaatgac

SEQ ID NO: 123284 - DNA, 357 bp, Homo sapiens
caccttgcatgggccaagagagatggtggtagtttaagactaggattgtagcagtgaaatgtaaagtggttgcattcggacatattttggatagagatttgacaggaggtaggtggattggacatgggatgtaaagtaaaaagaggaagcaaggatgacttccaggagtttagcttgagcagctggatggctgatatcatgtgtaggcatagggaaaggttgtatgaggaagaacacaggtcgctgcatttagaaaggaggcggggtcagaggaataaaaagggataggcctgaagaacagaggtcgctgcatttagaaaggaggcggggtcagaggaatagaaagggataggcctg

SEQ ID NO: 123285 - DNA, 607 bp, Homo sapiens
agaaagtaaccatcagagttcttatattctgccacaagaattataatatgttagtaattagcatgcggaaatatcttaataaaaattcttcaggataagtctgccatttgggaactgacagtaaaataaaggcaaaaatgtaatgaatttatctcatttgttttgtgaatcttgtaggagtgttctgtctccttaaagatcattacctgttcttcagctggtacagctatattttctaaaggtcagaatcagtgtaatattagttcattttccccttcaattaaacaaattatttgtgatatatgaggaaatttgttatcagatttaacttgtcagaaatgctaccataacaatattagactaactactgtaaggaaaaaaagaataaacacaaaacttcaaatctcagagacttacctgctcacatcaccttctaaaggtctctttcctgcagcgatacaggttccttggtctctttcctgcagtgatacaggttccttttctctaatgcctctgctgtcccctactacgggtccaatccagcccacagcttgtttcgtatggccccagaactaagaatgcttttcgcttttttaaagcgtaaaaa

SEQ ID NO: 123286 - DNA, 835 bp, Homo sapiens
tgacacacaacaagaacactctttgaaaaaataatgtgggggagtcttaaaacactaggtctactacaatttatatatattttaaaatcccagcaaacccttgaaaagggagagaacctcatatgcagagttgccaagttacaacagtcaaatacacaatatgcaattttaaaaaatcacacgagttgatgggtgcagcaaaccaacatggcacatgtatacctatgtaacaaacctgcacattgtgcacatgtaccctagaacttaaagtattaaaaaaaatcacaaagatacagccaaataggaaaatatggcccaatcaaaagaggatgaatagcagatttgagcaggcagaagaatcagtgaatatgaagatattaactgaaatcctcaagtccgaagatcaaaaagggaaaaaaaaaaactaaagtgaagaaacaaaaagggatgggagggaaaccatcatgaagaacatcttatgtatacgagagtcacagaaggagaaaagaaaaagaaagaagcaacaattatttgatgaaataattgtggaaaacttcccaaattgaaggagagagacttaaatctacaaatacaggaatgaactcaaactgggataaactcaaatacgtatagatcaaaacacattacacacaaactgtcgaaggccaaagacaaagagaatattgaaagcagcaagagagaagcaagtcaacacatacaaaaaaacttcaataagatcatcacctaatttctcatcaaaaactttagaggccagaaggcagtgtgacaatatatttcaaagtgatgaatgaaaaaaaaagttagctgaggattc

SEQ ID NO: 123287 - DNA, 345 bp, Homo sapiens
ccagtcttaaacctctgggcttaagttaccttcctgctttggcctcccaaagtgctgggattataggtgcaagccaccaagcctggccaggaagcttttcttaacaaatttgacttacgtactagatagtgggctattcaggttatcagtttcttcttgaatgagctttggtagcttgtgtctttcaggaaatgtgtcaaatttatctagattgttgaatgtattgtcataagggcatttgtaatattctctcattatccttttaatgtctgtagtatctgtagtgatgtctcctgtctcaagatgtagatttagcttcacctttgtattttaagacatttactt

SEQ ID NO: 123288 - DNA, 354 bp, Homo sapiens
ccgccttgacctcccaaagagttgagattacaggcatgaggcaccacaccggactccattaggtttttaaagctttttgtagaaagtgatgctgaaagaaagaagtgggtattccatgtcctggtacctctggctgccagagggaaggaatgagagctatttcttgccatcttcctgtgctgtctttggtagttctctcccagggacatgtctttccctcagtgtttgatgcgatgggatgcctgtggccactgtgacgcggggatcagctgctagagtaggtcctgctgcacatcaggactcacactacttgtggctcatggtccccaaggaacctgcttccttagggaagat

SEQ ID NO: 123289 - DNA, 371 bp, Homo sapiens
gtaccccacaggctatcgggaaattagcccgaggcttacgctttcattatcactgtctcccagggtgtgcttgtaaaagagatattccgccaagccagattcgggcgctcccatcttgcgcaagtaggtcacgtggtcacccaattctttgatggctttcacctgctcattcaggtaatgtgtctcaatgaagtcacattgcctgaatcaggcaggaggattgcttgagcccaggagttggaggctacaataagctatgatccagctgctgcactctagcttgggtgacagagaccctgtcttcttaagacaaatccagaatttgggacatcttataatttagttgccctggattcttcaaaaggtcaagg

SEQ ID NO: 123290 - DNA, 411 bp, Homo sapiens
ttatggttatgtagagacactgatcctctcaatcctgagagtactttctgtcaccagaggaccaagagcagtttttcttctgctacataaaatgacagtggtatttttcttccttaatgttaagtgatatcaaaaaaggcaaagacatcactaacaagtatagttatccctagacaacaccttacaaatacattcccacttgaaagaaagctaaaatcaataaagctcaccaggcatggtggctcatgcccgtaatcccagcactgtgggagcctgaggagggcagatcaccagaggtcaggcgttcaagaccagcctggccaatatggtgaaaccccgtctctactaaaaatacaaaaattagccgggcacacacctgtaagtctctgctactcaggaggctgaggcagg

SEQ ID NO: 123291 - DNA, 420 bp, Homo sapiens
ctgtttattactgaactaagtttatacgttagcaagggtttcagtaaaataagatttgtgttaaataatcttcagaagtggtattctgtggtgataaaaattgctttagggttgcatttatatcgctgcggtcataccaagggtcaggatataggtttttagttggcaaaaccatcaaggactccatttagaagggtatttttaataaaatttattgagtattttaattacagccctctgctttcatgtatttttgctagcaaaatagtctttgaccataggtttaatgcactctcactacaaggagagaagggttttgagggtggagagacttgaacctgtagtgtggcaggcattctacaaaatatattttcagaaataccctatgtggtaggctttgttatcttttctttacaagtg

SEQ ID NO: 123292 - DNA, 260 bp, Homo sapiens
tccaaagtgcttcccaataattaataagtgtcagttgacacagtcacatactattagtactggatgagatttgggtgttcatctagaaaaccagctgtcttacaaacagagaaactgaggctcaaagggttaactgatgatgaagcataacacataaagagtggcagagcaggcactcaaactttatgaagtcctcatcaaggtccacccggctatctctgaccaggccccaccctcctctccaggcatctcttttaatg

SEQ ID NO: 123293 - DNA, 672 bp, Homo sapiens
aaatacagactctcccgcagaactgaccccagcaagaagcctttgggagcagtagagatggagtttcactatgttgcccaggctagccttgaactcctgacctcagatgatctgcccgcgcaggcctcccgaagtgctgggattacaggcatgagccaccgcacctggcctgccaactcttgttaagatctcgaaggaaacattttcttcccctgaaggaaacccagctatgcagacaccagctgataatcttgcattcctgaaagatgttgcacccctatggcaagtggcggctgctgaggctctgacgtgactcccaggcatgaacgctctcagctgtgtttacctcagctcctcgggagggagcctgggagactgacgcctgagttttacatcagtgtcaaaacccaagcacaacctagggagggacctcctgcctagtgtgtgtgggtcaggagatagaaaagctctcactgagtaaactggacaaggtcaatatacctcgctgattgagaagacttcactctctctgcaaagagacgtgtgtgttttagaggaagtgggagccccagccgattctgcaagacttccgagagtcagatatccagacagaagatgcggacacctgggtgaccagacagcgaagaggaaagaacaaaacgagcatgtgcc

SEQ ID NO: 123294 - DNA, 331 bp, Homo sapiens
attcagctcggatcccatttacctgcacaaagctttgttttaacacacctgctttaacagtttcaagtcagcaatttagtgatcccattgagaaaaagccatgcatgggctataggatgttttctgctttctcttcctatcatgtttgcaattgggcaccagccgtcaaagatagatgtctcataacgggaccactgagtcaagaggaagtgttttcattgttcagaggatagcaggcacacaatgtcatgtcacaccatgttcattgtggattttctgctatgacgtagccaagtcagaggagtgtgcacagtcatctcttctgtgttct

SEQ ID NO: 123295 - DNA, 238 bp, Homo sapiens
attcttaggttgacatctaaaattttcattacaagttttaatcactgcaaaggttatattttcatttatatatcaatctatgtctatttagaactgacacctaaaaacactattatattgctaattttaaagctattaaacctactatattggtgaggcaaagtggctcacgcccataatcccagcactttgggaggtggaaggaggtggatcacttgggccaaggagttcaagacca

SEQ ID NO: 123296 - DNA, 197 bp, Homo sapiens
gaaggagggaacgtaagaaatgaccaggtcagaaccaagggtggtccagaagctaacccttagcttagggacagtttcacagagaacacgtccatgatgcaagactctgctgagggcctggagcagtgaagactggggcaaggtcaccctctgggaagtgaagtcaccagagaccttgcggagcagctttgagagtt

SEQ ID NO: 123297 - DNA, 270 bp, Homo sapiens
agtgtccactggttgggacaaagaagaggcagcgagtatcagtagctggttcaggaagattggttgtgaaaggaaggtgggatgagaggggaaaatgtggtcaagagagaggtttttgtcaggatgggggactttagcgcatgtaaagcatggaggattgctttaaattgcagtttacagaaatgcagcagacttttctgtctcaggggagtggcacagtttcttttgcaccttcttaagcttgcatggctctggaaagtgagctttctc

SEQ ID NO: 123298 - DNA, 200 bp, Homo sapiens
caggcgtgagccactgagcccggctcttctcagatttatgtatgattggtttgctgctctgtgttgtagcagagaccctgtgctctgaagtaatttctgatccagtgaaatattacaggagcgagggactgtgcaccttcagtgtatttggtaataaagcacctattctctttttagaaatcactataatccacatgcca

SEQ ID NO: 123299 - DNA, 162 bp, Homo sapiens
gctgctgcagaggtggctggggaacgtggagaacctgctgtgcaacaggaacttctggatcctgcagttgcccccgggcagcaagggggaggcccccaaggtacaggagctgggtgtaggaggagaggccctgcctggactctgtagggtggccatatgcat

SEQ ID NO: 123300 - DNA, 421 bp, Homo sapiens
aattatactcattacagaaaccctgaatggcagcctgtacttagcatcaatttcttaagcttgctttgagaaaaagtgatttttttctgacatcattttagaattgcctggctatcttaatacagatgctctgaggccaggtgtttggctcatgcctgtaatctcaacatttggggaggccaaggcaggaggatcgcttgagccttaggagttcaagcccagcctgggcaacacagtgagtcctcatctgtacaaaaaatcaaaaattagctgagcatggtggcacacacctgtactcccagctacttgggaggctgaggtgggaatgtcacttgagcctggggggtcgaggcttcagtgagtcatgattgtgccgttacactccagcctgggtgacagcaagaccctgtctcaaaaaaaa

SEQ ID NO: 123301 - DNA, 202 bp, Homo sapiens
ggatcactcagttcagctacgaggagaagatggaaccacccctctctggagccaggttgcttgtctacttgagtcatattgattcaagcaggagaacagactttgaaggcagctaggatgtatgtgtgtctatacaatgtctgagcccaaaccatccctttgtttttattcaataactcattctatcttagaagttcttttt

SEQ ID NO: 123302 - DNA, 290 bp, Homo sapiens
gtacctacatttacctctgcatggaaaggagtttcacccaggtgccaacatgatgaacattaactgctattagcaatccacccatccgggtagacaggctgtcagccagagtctacagaaacgtaggcagtcactcttccctttgcttccccctcctgttcatttgatgcctaataaagaatgacttttcacttgtgctcattgtccagtttttaccaagatatgaaatacatctatagcgctgaagaccagtgaaagatattcagtttggggcaatgcaaggaaagaag

SEQ ID NO: 123303 - DNA, 389 bp, Homo sapiens
tcactctctcacattaacactcattctcagggctttcccatctccttgccttccccagagtatgtcaggatctagatgtattctaacactattcgctcatacatgcaccacagtgttcaccctggcttctccacccgtcagctccctgcagtgcacacaccctggctccggaagctgtgcatcttgcctgaaactgcctcctccctctggccccttggaggcccctgactggtggttgtcctgtgtctctcctatttcctccttgcacaactctgcttcctcccctcatcccttaactgccagcctccctccaggtttcctcttcctgtaccttccctggagatatcactaactctgatgtcaccatccactcctgtgatcgcctctcc

SEQ ID NO: 123304 - DNA, 426 bp, Homo sapiens
ttaattaaagttattctctattatgggactttaaaatctggcctgtctgcttttttcactgcagagttgcacagaataaaaaagactatatgcaagtctcagctctaaagtaactctgcgctctctgggccccctcccttatagctacagtttgctgacccagtggtcagcttgaacttagaacaagtgaatgtatcccaggttcaataaaatatgcttcctatttggtttttgctacaaacaacgtcctttttctgcctcatttcatagaactttctaatctaaaataattggccttctactcattaacttttttcccttaaaacttcagtctgtctctgttttgcctgtgaatctaaatgactgtatataggccaaatgtgatcgggtgctcaggggttgatctccagtttgcttggggatgca

SEQ ID NO: 123305 - DNA, 137 bp, Homo sapiens
cccaggatagatttgagataaatcagttccatactgaggtgtgacattaggcaaatcaagggaaggaggaggaaaggaatcaggtcagagctcagcttactttattcaaccgtggcgtatggggccaggcgcagtgg

SEQ ID NO: 123306 - DNA, 300 bp, Homo sapiens
ggctttgtctatttctcctgcagtcctctcagtttttgcctcacgtattttgacactccgttgtgaggggcatacacattaaggactgttatgtcttcttgaaaaatcgacctcttcatcattatgtaaatgcccctctttattccggataattttccttactctgaaatctgctttgcagaaattaacatagctactccagctttcttttgattagtattagtagggtatatctttctccttccctttacttttaatctatatatgtctttatatttaaagtgaacttgtagacaacat

SEQ ID NO: 123307 - DNA, 149 bp, Homo sapiens
tataggccaatgaaatattattttaaggtaataaataactttttagcgctttttgccttaccaaattcctaaggacagctcttctgtgtattatataccattcagcatctccaacatgagcagcacccattaaaagtctgttctctaca

SEQ ID NO: 123308 - DNA, 98 bp, Homo sapiens
caacacaaagaacctaagagtgaagcagcacacagcatttgcaaaggatcaataagatacagccccagcgaggcgctgtggctctcacctgtaatccc

SEQ ID NO: 123309 - DNA, 264 bp, Homo sapiens
ttaacttctttcagctccactcaaaaaaaagaaagtcctaatgcaagtaattgaaagtgaagatattgcaaaacaaataatgacagctgaattgatgatatgatgacaggctcatccctccattgtaaactatgctgcgtaagatatgcctgcttcctgtttgccttatgccatgattgtaagtttcctgaggcctccccagccatgcttctatacagcctgtggaaccatgggtcgattaaacctcttttcattacaaattac

SEQ ID NO: 123310 - DNA, 294 bp, Homo sapiens
cttaaatttcagatttggattcacagatctgggttggggtccaaattctgcaattcttttatttttttaacaggatctggctatgttgcccaggctggagtgcagtggccattcacaggcctcccaggtagctgggcctagaggcctgtgcccagccagattctgcatttctaacaagcatcaggtgataccaaccctgcttgttcactgatcacacttaaagtaacaagggtctagactaggggtcagcaaataatggcccatggtgaccaaatcataatttttaccttctta

SEQ ID NO: 123311 - DNA, 573 bp, Homo sapiens
ctatcttttatctattgtatccatcttttcctgtatttctcttaacatagcaatcataattattttgaagtccttgtcttataattcttacatctggatcatttatgggactgcttatttttcctcttgattattagtcatattttttgccatttatgtctaataatttatttttattacatgctggacagtgtgtataaaaaaacaatagaggctccagatgattttctcttccatcaggtagttttccccctttcttttgtgaagtatattaaggaactgatcacctcaagccaatcagagatcaagctgcatttgaactaggttgtagttttagtaaaacttggtgtagctttcatttgtcccagtttctcaggtatgtccctccctgacttttaaatggaaagctgttaaatttctttctcttcagccctgaaagactgtgagagatgcagttctgccacttcgtaggctgttttctttgtgccccagtggagatcttctacatgggtccagcccaattttcggctgtcacctaaaatcatcaatgtctcccaggaagaaaatgactgg

SEQ ID NO: 123312 - DNA, 546 bp, Homo sapiens
ctggctggagggaggtggctggattttggcctacccagccccctccgagtgactatcctcctctggctggagctgggctgctttgcattgcaaatacccttgtcgaggaggctgctgccctctctgaaagaggctccgttgagtttggttttgtgttgttcgtccccatcctggcaggtccagctgcccagcttgttgctgaatgcaactgagttcccaggctgtcccttgccaattgggcccagctggggtcacatcatcctggcctgtctccgaagagccttggacttctacagatgggagtgtgactcttgactctgttactttctgggcctcctcttctggaaagtgagcctaatacaggtggagaagctgcagcagcgagaacttagggcaggctggatgctgtggcttactcctgtaatcccagcactttgggaggcctacgtggaagacttgcttgaggccaggagttcaagaccagcgtggacgacttagattcctgtctctatttttttttcttttttggggggacgcgatttaact

SEQ ID NO: 123313 - DNA, 363 bp, Homo sapiens
agaagaggcaaatcgatttgctgagatgtgtgaggaaaagatgaagaataatagcaaggaacatgtatcaagggcttgcagtgtaccagataccatgatccctgcattaataacttacctcttcaaacaccgctaagaaacgggtacgattatcattacttttttttttttttgagacggagtttcactcttgtcacccaagttggagtgtaatggcgcgatcttggctcactgcaacctctgcctcccgacttcaagcagttctcctgcctcagcctcccaagtagctgggattacgggcatgagctaccatgcctggctaattttgaatttttagtagacatggggtttcactatgttggt

SEQ ID NO: 123314 - DNA, 282 bp, Homo sapiens
actctgtctcaaaaaaaggaaaggagccagtcctaaggcatctttgaattctcatgccttggcacctgctaggtgctcagtaaaggctcagctcttcagtgaggccacacttgcccccaggccagaacccaaatcctcccaagacccacaacccttcccagcaggttcagcaagaagctaccaaccaaacccacttctccctccttttccgagtcaaaccccggttttcgcccctggctgaaaacaggaaactgaagaatgtggagtttcttgaaattcttg

SEQ ID NO: 123315 - DNA, 121 bp, Homo sapiens
atctagaggatcccgtgtgtacgacgtaagtactattattatgtccattttgtaatagaagaagcacagataaggtaaataactttaatgagaccacaaaacctaagttttttaattgata

SEQ ID NO: 123316 - DNA, 469 bp, Homo sapiens
ccatcttaaccatttctaagtgtatagttcagtagtggttagaatattcacattgttttgaaacatcttcagaactttttcatctttcaatactgaaactctacacattaaacaactcctctttttctctttccttattcattcctaacgaccagtctccttctgttcctatgaatttgactgctttggatacctcttatcaatgaaatcatacagtattttgtctctttgggactggctttttcacttaacatactgggctcaaggctcacccacatagtagcatgtgacagggttttcttcctctcacacaacatgtgtttttaaaagactgaataatattccattgtgtgtgtgtaccgcattttgtttattcattcttctgtcaatggaaactgggctgcttctacctcttggctatagtaaaaagtactgcagtgaacatgggtgtatagatacctttctttaa

SEQ ID NO: 123317 - DNA, 220 bp, Homo sapiens
ctgaagctaaggaatgagaaggatgggccagggggacttgagaggtagggtattcttagacccctggtaccgatgagttaagggaaccacagatgcttcctgtctaaccttcagtggtaactcttagctcatcgtctttttccctgggctggatctcttaggttagggccagtgaagaccctttaaatctgagtcaggagtaacatcgagagaaatgaac

SEQ ID NO: 123318 - DNA, 603 bp, Homo sapiens
actctctctctctctctctctcactcctctctctctcacacacatatgcgcgcgcacacacccacacgtcttatggaaatattaaatcaggaagaatttctgaagttctcataataaaaataactgtaatattaataaagtactccttatcagttatttctcgtcacattgtggccccaagggtttgcttgacttttcaaaatgtatttgcttcaggataaattgaagaagtaccactctctccctgtattaatacctttcagggcttttgatctgtaacctcttgtcacctctggtttatctggcttagcatatgaattttgaagaatgagggagcataaacaattatgactgccttttaaaaaatgcacgttaaacctgcggcctcaaacttgtcagttctgaactttaacagtagaaaagtgaaaactcagcgttgaaagtagagagtgtaagagattttgccagttggaccactttgctgcaaatacctattagacccaaacctttcttttgcctagtgatcagctatactaatagcaagatccacttaattccatgtgagtcaacagcttgcatggcatgcccactgtgtgcaaatag

SEQ ID NO: 123319 - DNA, 361 bp, Homo sapiens
gctctagagatcccagcgggaacatcacttgatctttactcttgtcacctctggtttatctggcttagcatatgaattttgaagaatgagggagcataaacaattatgactgccttttaaaaaatgcacgttaaacctgcggcctcaaacttgtcagttctgaactttaacagtagaaaagtgaaaactcagcgttgaaagtagagagtgtaagagattttgccagttggaccactttgctgcaaatacctattagacccaaacctttcttttgcctagtgatcagctatactaatagcaagatccacttaattccatgtgagtcaacagcttgcatggcatgcccactgtgtgcaaatag

SEQ ID NO: 123320 - DNA, 171 bp, Homo sapiens
ggtttgcttgcattggagtgccaggtggtgaccctgaagaggacggagggttgggacaagctaattgtggagacatgatggaaccctcccagttgaaggaagcttagaggaggaaaacttctcttccaggcatcttgagttctactccacattttgatttctcttgggatg

SEQ ID NO: 123321 - DNA, 285 bp, Homo sapiens
gagccttagagcatggacggtgccatggggcctcgggggctgctgttgtgcatgtacctggtatctctcctcatcctgcaggccatgcctgccctgggctcggctacaggcaggtccaagagcagcgagaagcgacaggctgtggacaccgctgtcgatggcgtgttcatccggagtttgaaagtcaactgcaaagtcacctctcgcttcgcccactatgttgtcaccagccaagtggtcaacactgccaatgaagccagggaagtggccttcgacctggaaatc

SEQ ID NO: 123322 - DNA, 443 bp, Homo sapiens
tctgcatgtaaatgccatggaatgcatccctgtccctgcacttggatccaaaatgggccctctgcggatgtggactggtaggactattgcacttggcattctgagatcttggttggattgttcttcataagaaacaccattgctattgtaattaaatagaacaaaaattaagtcatggatataaagaaggccctcaggttggacaaaatcattcctttgcctacattcctgagacccaccgaggggaccgccttgtgcccagtccagctgggaggaccagagcagcagggatggggtttgcgtgcatgctcagccccaccatcagctctgaccttttcctgaggcagctccaagggaaatttatcaggatgctgtggcttggaagggttacttatttgtggagggataactctaagaggtttaagtaaacttcctctctttta

SEQ ID NO: 123323 - DNA, 740 bp, Homo sapiens
tcagtgaaatttccatgtaggaaattttcagtcatacatgaagcatattttgtgattatggtaatcctagccttgtcagagttgcaagaggtgatgatactgtttttggaacattgtgcaggtcatttttcagtagatatttgcatatccgttatgtgcctggcatttacttcagtctttaggtccctgtgatttgccaaagaccactgttactttgattcttcacaccttcctcctttttacttatcttgaaagtaacaaatgtgagatgtgaaagtagttgataaccagaagggcgaaacctggggaatgtaggtttttatttttttgtttgttttattttgtattttgttaaggtggagggggaaggtaagtggatataaaaatcaactcagtttacaaagctcaagtaaatttatagtaatttggatacgtaataaaagaggtactttctctgtgggaatgatttttacagatcacctttgtaatttcttagaaatcatttttttcctgagtgttaccagtaatacttactattatagaaacctgaattaaagacatctacaaagaaaacatttcccataattatatgacccagaaacaaatactgttaacattgtggggattgtcttttgtggtttattttaaatgtacacatatatgattttttaagagaagtgggattatattatatccactgtgttatagattgtcatttttattcagcagtatgtataata

SEQ ID NO: 123324 - DNA, 505 bp, Homo sapiens
ggtttcactctgttggccaggctggtctcgagctcctgtcctcgtgatccacgcacgtcagcctcccaaagtgctgggattaccggtgtgagccactgtgcccagcctctcagtgatttttgatgcaaattcatttactgtgttcacgaagtggccaattttgggacctttagcatcacttgcccttttagtgtcttacatatgtatgattaccatcagcactagaaattccaggtacttcaagcttaaaagtaagagctctagagtgtattgtcttgtattatatattgttctgggtctaagccatgctagtaaatattagagttcctatgattattttcttctttattttatttttgagacggagtctcgctctgtcgccaggctggagtacagtggtgcgatctcagctcactgcaacctccgcctctcaggttcaggcgattctcctgcctcagcctccttattagctggcattacaggtgtgcaccaccatgcctggcta

SEQ ID NO: 123325 - DNA, 214 bp, Homo sapiens
attggggtggagtctggggagatagacaataaacataatcgataaaatatcttagtatcttagtatgtcagttggtgatccctgccatggaggaaaacagagaaggggaagagaaaggggtgatagtttttttgtttttttgagatagggtctcactttgtcacccaggctggattgcagtgatgtgattatacctcactacagcttcaaactc

SEQ ID NO: 123326 - DNA, 425 bp, Homo sapiens
tgccattgattggtggccatgtgtttgtgcccgatagactgtgaaatggtgtgttgctacacggctgtgttgcacctgcgccccaccgaggtgattgattggtttggtcatgtggaatgttcccatctggtctgcagtaatgtgtttttttttttttttcccatctgtgaatagcaagtgctggctgaatagttacagcaaacagtttcagaagctaaataatccttttcctctaagaacaaattgggatatgaaggagtttgtttttgcttaccttgccttttgtaaaggtagtcattctccatcaggttcctactccttctgtctaggatgttatgtgcttttctctttttacctatttttacctcctcttcataatagattacgctttctgtatttctaatttgtgcaagtttaaagcaaaa

SEQ ID NO: 123327 - DNA, 588 bp, Homo sapiens
ggacggggggcagtggacgggtgggagtgacaacgcgattgcttagagggtgaagacctgactatcctgccttcactaagcctcaaaacattcccggaagataagcatcattgtcccatcttgtagctgggacacactcaaaggatttaaaggctttgtaacggtgcagtgataggattcgaacccacgtctgtgtgaatctaagcccatgctcgttccactgcatcacactctctaccactagtgcctggcatcattgaattgctcacttcagatcctttgagaaatgaagatctccatttttccccacaaaagaaatagcttgggcctatgggatgatatttacatgaagctgttgtcgtcaacatcaaacaggattcctcatttattgtttcaatccgttttatcccactcaggcacacactctccataaaatgaatgccttgcattcatatggtatttttacttctttcatttaacatccctgataacataaacatctcccaaatcccccaaatccctctgtttcttgcattacagcagggttgggggtgtgagctgcagatgctatgcagacaccatccacat

SEQ ID NO: 123328 - DNA, 597 bp, Homo sapiens
aatttacctagttaacattcatgcatccttcccaccttacctttaatgccccttccccagggaagccttccctgatggccccatgctggtcttggtctgcctttacacacacccctgaagcacctctccccgactgcactttttcatagttgtactcttacattcaattgtatgattagcaccagagggcagacttctggatctccagcaaagtgcctggcatatagtaggtgctcaacacctgagtgaatggcttctgtgagagcaggaaggtgagtgaatggaaattttttccttaaggcttacaggggcagctccgacctagagacatccgttgcaacctttcattctcacacccttcccaaggccgtcacggtccatatctgcaccccagtctgtgcttatcacacaataccaggccctgaatacagctctttagaccagccgtactgtgaagctgacagccctttctgcacctgcagatgtaaccatacctgggcttctccagggatggtctaagcctaggctgagctcgccaggtgcagtgactcacaactgtaatccctgcactttgggaggccgaggtgggtggatcac

SEQ ID NO: 123329 - DNA, 426 bp, Homo sapiens
attcacgattctgcccagctcaaggtaaagatagcaacaaaatactccaaccagaataaaagaagtctccacttgactgcagctcttcgcaacacttcacaagggtcaagctgtgttagtttccttcagtgttaaacagaatgcatcttaagagaatagttcaattattgattgaatagtaggttcaagttgactataatcccaactaatacactctaagaccagggatgggccgacagaagggtaaagttttccactcaagtctcgaggcaaacactcagatagaagtagtaatatggatgccttctattatttggtcaatacaatactgttccagcccagttgtgcaaaactggtgaaataaaaggcaaaaatattgacaacagtttgggtaactggattccaaaatgggcatccatctaagag

SEQ ID NO: 123330 - DNA, 457 bp, Homo sapiens
tggccacaggaagtattatgccacagtggctaagggctctggttttggagttagacacacttttctacttagttgcttgggtgagttattcagactctctagagatcaatttgctcatttgcaaagtgtaaaatgggttataggaattaaatgaaatagcacacttagcatagtgtctggtacggaaggattcaacaaacactattaaaaacatgtcagaaacagtattttgggcttgcttgcaaaatggaattttggagtgaagttcgtgggtgaggcactaacagtgaggtcctgcgtgaggatggtggctggtcgagaggatgttaggaaggcagggatttaaaaggacttggggaaaaacaaccaagacctagtgagaggctggacaagtagaggagaaagaataaatcgaggatgacccaaagattttgacattgagataatagtggtccta

SEQ ID NO: 123331 - DNA, 412 bp, Homo sapiens
ggtctgacagtctcttcctcaaggacagtgcctttgtccaaccttatctccagcctgcagggcctggcacaggttctggcttaaatgctatactaacagtaattacattttcataaaatttattttatgaaaactaggtactctccaaggtcctttgtaccccatgagtctgagattactaaactaacagtttaaaagattctgggaaccaggtgaccggggttctggtcccaccagtatcctgtattgtggctttgggaaagtctgtttcccatctctagacctcagtttccacactttgaagaggaagtttgtgtggtctctaagatccatttctgcgctctgtaatctccataagccaaggggttcgaacctcccaggcttcacactgtgcagctggccagcaccattc

SEQ ID NO: 123332 - DNA, 428 bp, Homo sapiens
ccacttccacatccaatctgtaatcaagtcttgctcgttctgtctcctaaatatctcttggatctgttcacagtcttcagttcctaatgtcactattttagtctaggctatctccctctctccccaacattataatcaaccacctgctaaccagtcttcttgttaccagaatcaataaggacacaatattccatttgatgtgataggaatgaggtatcatcttaattctatcacaagtaaattttctctcattaccaacacaatatttatagaagttgttatattataaacttgtaaacaccacttggtgccactccaagcttttcccataatatagagaataatctttctaaaatgcaagtcctctcataatttcctattgcattaggataacacccagactccttaacatacctcataagaccctt

SEQ ID NO: 123333 - DNA, 518 bp, Homo sapiens
gatgctttagatactaagggctctaagcaaagaagtagacatatgcaaaaatacatgtgtaatgtaagcagagatgcagaaagaatcaaaaacaaatgctaaagatctaaaacactacaacagcaatgaagaatgactttgatagactctgtacgctggacacagctgaggaaaagaatctctgaacttgaggatatggataaattcctggaaatatacaaccctcctggattaattgaggaagaaatagaaactttgaacagaccaataacaatagcaagattgaaacactgatttaaaaattgccaataacaaaaaaaaagtccaggaccagatagattcatagctgaattctatcagacaatcaaagaagagttggtaccaatctttggaaactattccaaaagacagacaaagagggaatcctccctaaatcattctatgaagccaatatcacctgatatggtttggctacgtccccacccaaatctcatcttgaattcccatgtgttgcggga

SEQ ID NO: 123334 - DNA, 756 bp, Homo sapiens
agtcagtgtgtctagaggggtgcacagggagtggcacggcaaagggaattgcccctcaggagcagagggttatgtcagaggggaggcgcgaaccaggtcacatagcacattctaggatgtaatgagtgtggattctatgttgccatgggaagccagcatccttgcacgaggtggttaagtgctgagagaagataaatcagattaaggggctagagagagactggaagcctggggaagctatttgaaacaaacgggcagaggagctctctctgaggaagtgactttagggctgagtcttgaaatatctgaagtagcgaccatgcagatttctgggataagccagttccaggcagaaaaaatagcactgaagtgggaataagcatcacatatcctggaaagagcaagaaggtcagcgtggccagggcacaataccagaggaagcagggggaggaggccagccctgtggaggccgtgggacggtacttggcttttattctaaatacactgggaagattttcgaggactcttgcttgtttttcgagggaactggctgaaaacccagtagattttggtggctgttcttgactaagaagagtgtggaacaaagtcacagagccacggccccagacaagacctggatgaagcgctacagcctggtagtgccaagactgggagggaaacagaagagcactatgagacagaatccagaagcaaggagaggaaggaaaggccttggaccccctaaggagaaggagg

SEQ ID NO: 123335 - DNA, 435 bp, Homo sapiens
tgctgtaacttatggggagaattatgcttccctgtcccaatagcctctggtttggacatgacgtactccggctaatgaaatatgacagaaagtgacaagaattgttgtcaagggccactgtgtggttcctcacacttgtttctcttgctcaagatacactgttccaaatcaggagattaaaaaaaaaatttttttttttttagacagagcctcactctgtccccaaggctggagtgcagtggcacgatttgggttcactgcaaccggtgcctcccaggttcaagcgattctcctgcctcagcctcctaagtagctgggattacaggcagccaccaccacgcgtggctaatattggtatttttagtagagatgggtttcaccatgttggccaggctggtcttgaactcctgacctcaggtgatctgcctgcctcag

SEQ ID NO: 123336 - DNA, 113 bp, Homo sapiens
aaaagaatatcaattgagactgatcccaagatcatctagatgttagagaaagcagacaaggatgttaaataaatcgctataactagcctcaaggaattaagataaaatatgct

SEQ ID NO: 123337 - DNA, 465 bp, Homo sapiens
tagcatcctgagagaaatgacatccttaaaaagctggaggacacaggggatggtctctatcgtatctccatttaattcaccagtttgaccactgcaaaaaccacataaatcctgggggatgacactgaactactggaaactcaaacaagaaacaggtccactgtaacctccgtgcaagctggttttccttaacaaagtagactagcatggcctcaggtacacggacaatgatttagtcaaagtgctccttcccaaccctatcactaaagaggatcagaaacagttcactttgcgctggaacaatgtataaatttacaattatgccccagggctatcataagtcctgcctgctgttataagagtctgaataaatgtggaacacctgcaaagcaccacactagcctactctatcaggggcatcgtgctatcagactgaatgagcaacgaggagtagccaggacagtg

SEQ ID NO: 123338 - DNA, 327 bp, Homo sapiens
attctccacattaaatatttctctttgctcacttaaagttgtgagttctgtttacctaaagttattagttctctactagcttgaattttgtcagtacttgcctgacatatggttttcttttttttaattttcagtctttctatatcatttagtggtgatgtataccttttttttttttttttttttttaagatggagtctcgctctgtcgcccaggctggagtgcagtggcatgatctcggctcactgcaacctctgcctcccgggttcaagtgattcttctgcctcagcctcctgagtagctgggactacaggtgcacaccaccac

SEQ ID NO: 123339 - DNA, 335 bp, Homo sapiens
ggattaggaccaaataacatcagacaacagtaaactccattctttaccatgacttatgatattatgttaagggtttccatgtactttacagaaaagactaggaagaataactttgtgtgagtcttttaatcaagacaaattttttaaagcaaggattgtgcgaggctgttttattcaatatggtagtcatatgtggctattttaattgaataaaacaaaaaattcagtcccttagctgtgctagccacatttcatgtgcttagtagccaaatgtaactgattgcttctatacagcagcttctcaaacatttccatcactacagcaagttctattt

SEQ ID NO: 123340 - DNA, 186 bp, Homo sapiens
tgctgggattacaggtgtgagcctccgtgcccagccttcagctttttttcttaatgtctttgtgtaatatgaaggcattctctttaattgttaaaaagcttgcctaccactgcttcaaaatattactgtcagttggcatagcttctgattatattgatgtcatctcccttcttttaaacatgttac

SEQ ID NO: 123341 - DNA, 387 bp, Homo sapiens
gtgcgtgggtaaatattttacagctaaaatcctccaccccgtgcctgaagaaagaaccaagataccgcacatgggacaatgatgatattggtctaatgatttggtatactgccactggggctgccttgtgctcccgggcaggatgatagatggctgctcgggacatcaggctggagcctgatctagagtccagaggcccatgtcattcctcatgcagatggctgaggcaccgactcaactttaccacataaacggttccagcaaacacttcctgtgcaccagggaggcataaggaaggaggtcccttgtgatcaagggaaaccgggacctctgcatgtgccaggatgttggcggttgctgatgggagagcaggattcctcaggcaga

SEQ ID NO: 123342 - DNA, 455 bp, Homo sapiens
ctggacagtcactggggtggaccaggaaatgggcacttagggtctggcatggagcagtgtgtcctgctgtgctgtacatgacagtgggtggctgttagcaagcaccacccatgagaccgtagcacccacaaactgcaatgttttagaatagcctggattacactgtggatgtttaaagcaaaggataaacaatgctccatctagtttagtttcactgcatctcctacttgaaaactgaatagactcggtggccatccagcccctcttgtcccgatatttcactccatggtgagtcacaagccctggtcagaccctaatggacacagccccaccttgaacagttcctctttcaggctgaaatcatctgctgggtatgaagactcagatgggataggaaagttaaaacttagaaataggcgtgctctgttcttttccaatgcttgtcattatgctca

SEQ ID NO: 123343 - DNA, 236 bp, Homo sapiens
ttaatcactgtgagattcaaattaatcacatgcaaagcattagttagaggctcttggacattttctgtttttagagctttgttggatgctcacatggcaatgtctgtgcagtcagttcctacccagcctctgggctcttcttgcagcttatcttgcagaaagaagcctcatcagaattccagaatctcagctatgattagcttactccacctcagctcagaaacatgcatgattcc

SEQ ID NO: 123344 - DNA, 470 bp, Homo sapiens
tttatttataaacagcatcaaaggggagaattaagcaggaaatataagaaaaacaagtaaagggaaaacaagtccagttggagctatgataacattatctgcaaggccaggcaggggccccaaagaaatggattccaagaatagggatgagaaaaacaagttcttatccgtctccccctggaattctctcccaatgccattattctttgttctgcgcttgtaactatttttgtaactatttctgcaagtttgcaaggattttataagttcctgttttcccatctgtgcaggatggcaaaggtcacaagacatgcctgaattgcaaaacctgtcacagttaactgcctttgttctgcttctgtaagcttgctttccccaccctgcaagttttgtgccactggctagccactccccttcagttgcctgaataaaagttaagcctggcctttgttcatttatcagcctctgaa

SEQ ID NO: 123345 - DNA, 360 bp, Homo sapiens
taaaataaagtatgcaattcagtagtttctgtcatattcacagagttgtgcaaccatcaccacattgtatcttaatacaatctggtttttgaaaagctcattttgtagtaggtgcttcttttaaaaagcatttacaaagcagttcttccacactgaagagtatccactaagagtaggagtctgaactctgcattttctttttgttcttggatgcttatatcactgcacttgatcttagcccaaaggccaagaagtaataaatgtttacattgctttattatcttaaatcatagtttctttgcaaaaatattttaagtcacttatctattttgtgagcatttgtttagtagataagggaat

SEQ ID NO: 123346 - DNA, 384 bp, Homo sapiens
catattcaggatgttttgttctatatttttaattttctattgaaataattttagacttaccaaaagttgcaaaaatttagtacacaggcttggtgtggtggctcatgcctgtaatctcaccattttgggagactgaggcaggcacattacttaagcccaggagttcaagaccagcctgggcaacatgatgaaactctgtctctacaaaaattagccaagcatggtggtgtgtccctgtagtcccaggtactagtgaggctgaggtgggaggttcgctcgtcagggaagtggacattgcagtgagccacgattgtttcagcgcatcctagcctgggcgacagagccacaccctaagtacatacatacatacctacacacacacac

SEQ ID NO: 123347 - DNA, 756 bp, Homo sapiens
gtccttgtctgttagggcctctttcttccatggggcgtggcaagggaatagcgacttagtgttctaaataataacatggtcatttccggagtacttgccatgtgccaggcatcattctaaacatgtatgttaactaatttaatcctcacaacagccctgtgaggtggcgatttcggtcagcatcatctcattacctccacatgcagggagggaaaatgaagtgtggagaatcgcagcaacctgcctaagggtcacatagctaacaagtggcagagcccaggaacctgcgcgaggcaccacccactctgcactgcctcccgtcacacagcaagatgggtctatctcccagaggcaccttgacttctgcactcataaaataggccacacagtagagattcagtacgcattgttgaatagctttcatctctagggcagttttctgtcttcaagacaaacagtggcctgagagctctgagaatttaggtatccagggatccaattgctttcttatttactgagagataggcatgtctctggtgagatcctgccaaacataaactcctccttattaataaatttaggaattgtctggaaccaccacgatggagactatcaacaatatgtacatcagttctctgagttgaaaggtgtgtgcacagcactgcccctgatgtctgtgactttcggtcagagacttaacctctctgatctttagatcttcactggtttaaaaagaaagagctgggtcagtattac

SEQ ID NO: 123348 - DNA, 157 bp, Homo sapiens
atgaatgctaaaagtgacctggaacattccctcaagggaagcggccagagcgtgaaggttgcagtgaaagaagggtgcaaggaatctccagcaggtggagctaaaggataggcgaattgtgccttagcaaagcttccagtgaaggacaggcaagaga

SEQ ID NO: 123349 - DNA, 165 bp, Homo sapiens
acatcttcagctggcccaggctttgtttccctaaaccgacctctgctctcagcccctctgcttgtctgggccctacccttcttcccttgcctgtgctggactgacccaggccccagcttctccctgctccccacctctggccaacatggagctctccaacctctc

SEQ ID NO: 123350 - DNA, 388 bp, Homo sapiens
tggaattccagctcggtttccgggtcttgcactgttgcccaggctggagtggagtgccacaatcatggctcactgcagctttgccttgacctccaggctcgatcctcccacctcagccttccgagtagctggaatcacaggcacatgtcactgtgcccagctatgttttagttttttgtagagatggggtcttgctatgttgctcaggctggtcttgaacttctcactccctccctgggctaaaatgatcctcccaccttggcttcccaaagtgctctgattcctggccaaaagacataaaatttaaaactgttatttcagactgtcggcagtgggcatctctggcagatgattttcttttttttttttttgagatggagtcttgcac

SEQ ID NO: 123351 - DNA, 681 bp, Homo sapiens
cgcggtggctcacgcctgtaatcccaacactttgggaggctgaggcgggtggatcacgaggtcaggagatcaagaacatcctggctaacacagtgaaaccctgtctctactaaaaatacaaaaaagtcgctgggcatggtggtgggtgccgggaatcccagctgctcgggaggctgaggcaggagaatggcatgaacctgggaggcggaggttgcagtgagccgagatcgtgccactgcactccagcctgagcgacagagcaagactccgtctcaaaaaaaaaaaattaaaaaaaaaaataacccatctgctgatttccgcttggtttttgagagccttactctgcttgtgcatatcctaagatttggtaatgcctaaagaggaaaatgcatacagaatctggggctaattctctgtagttccctctacccctttaggtcccagtcctattgacaggccagaatcttaactcttcttccattctgtctttccttgtctttctttccttttggttctttcattcttttttgaactctcttcaatacagttttcgcacttaccattccactaaaatgtcttttgtcaggctgggcacggtggctcacgcctgtaatcccagcactttgagaagccaaggtgggtggatcatgaggtcaggagatcaagaccatcctggctaac

SEQ ID NO: 123352 - DNA, 475 bp, Homo sapiens
aatgttcttaatggcatctagaatggtgaatcctttccagaaggttttcaatttactttgcccagatccattggaggaatcactatctatagtggttcctatagcagcaatagtctcacaaaatgtatttctttttttaaattttcatttctttacaaaatgaatttcttaataacactataagactatagcagcaatagccttacaaatgtatttcttaataagatctgaaagtcaaaattactctctgatccatgagctgcacaatagatgttgtgatagccggcatgaaaacaacattcatctccttgtacatgtccatcagagctcttcggtgtattgccaatgagcagcaaaatctttaaaagaatctttttgttctgagcagtaggtcttaacagtaggcttaagatagtcagtaaaccatgctgtaaaccgatgtaccgtcatacaggctttgttgttccattaagac

SEQ ID NO: 123353 - DNA, 505 bp, Homo sapiens
aaggttgggggagggaggaggaattgttggttccaaggctcttgcatcagagaataccactggcatcgagtgcccactactcccacttttgcaacactgctgagatttggtctccagaaaaccttgctttgtctcatgtcaagtagcccttctctccaagctacttgatattgtcaggttagagtcttagttttttctgtgaaatgggcataagttaagcatgtaattggttaccctgatgtagagaagtattaatagaagagtgtggtagtttagatctctctgggctcaaatcccagctgtgtaaccttgaacaagtcatgtaatctctctgtatctcagttttctcatgtattaaatggcagtgagtacctgcttcttagggttcttactgaggtaaaataagttactaagtataaagagcttaagaagccacctggcacattgcaagcacttactcatgttaactgccattgatagtagcagtaatattagtgtgtgcatc

SEQ ID NO: 123354 - DNA, 493 bp, Homo sapiens
aggatccccggtttgggagtacggaatatagtatgtctcggcgtcatcgccccgcctgatgccagctgaggcttcactgagacagacagtgttttggaaaagaccagttttggctgggggtgggttttcatagagttaagagcccagactttgaagccaaacagcctggttctgatcccagcccagctagtcatctgctgtgtgaactggggcaagtgacttaacctctctgagcatcagtgtccccatcagtcaagtgggctgatggatgccttcctggctgtggttactgtgcccccaggatggcgtcccctcatctctgctctgggaactttctggcttccacctgtcctcagaatggccctgtgatggggtcagtagtcacagtatgtgcattcagatacctgtgccgctagggggtctccgttgaatttcctgcctctctgagcctcctctctctgattccttacttcccctctctgattccctgcct

SEQ ID NO: 123355 - DNA, 275 bp, Homo sapiens
aaagaaggctatgtgggcccggaccagggatgggaggcagtggaggccccgtcctgcccttttcggtcttcctaacactctctcccaggtctccacttaggtcatggagccatgcacagatggtagaagggggaaactggggcttggaaagacccagaaaaagaatgtgacctgcccaaggccaccaacaactcgagggggcattgaccgacaagcccaagggctgtagaccaaggcagaatgaaacttggagtcccagaaatttaggagtgaag

SEQ ID NO: 123356 - DNA, 398 bp, Homo sapiens
agacattgggccatacccacgtgggcatgtcacccatggcgagcacccgtggtccccaggtcagctgcccttccccggtgtggaaccccacccacagttatggcttctcccagagaaagtgagctggagaggaaagctctgaactatgtccctgggaagaaacactgttcttaaaaagattttttttattattattacgttgtttggtttacatcattgctgtttttccagtcaacctaggcttgcctgatttgaagaatttcaagaagtctaagagtggatcataggctaccttcattttaagttgtgatcaaatcatccttccaacagtgttaccagcctgacaactacctgcagtgcatgggagtgtcccttaccctacattctcagcaatatta

SEQ ID NO: 123357 - DNA, 330 bp, Homo sapiens
caaagtaagattaacttcccactagttactctgtcccaaggcttcacaggaaaggggataaaggaggaaaaccaccttccccctttggccagtcagaaggaaggaagatatcaaaatataggctaacctacctcagctttcttagggatacaagttcaataaaacaatttttcttctactacagtcatgatgaccacaaccagtcacagagattaagaatctttgtttcttaggctgggtgtggtggctcatgcctgtaattccagcactttgggaggccgaggcaggcggatcacttgaggtccggagtttgagatcagcctggccaac

SEQ ID NO: 123358 - DNA, 717 bp, Homo sapiens
tacagtggctcacacctataatcccagagctttggaggccaaggcaggaggattgcttgaggtcagatgtttgagactagcctgggcaacatagggagacctcgtctctacaaaatccaaaaaaattagcctggagcgatggcacacctgtagtcccagctacttgggaggctgaggcaggaggatcacttgaactcaggagtttgagattacagtgagctatgattacatcactgcactccagcttgagcaacagagtgagacactatctcccaaaaaagtaaaaataaaaagtgctggagtccatatcgaagcccacagccaattgtgacatgtgaatcttttatttttataatctgcctctcttgtctaagtgccaaatgatgctcacattgtgtgtaactacttccacctttgtctggcttctttttccttaagtatgcagaatcaggttgcatagagttctgagaaaataaaataaatccgctgtgtgctgtggctcatgtctataacctcagcactttgggaggctgacacaaggattgcttgagaccaggagtttgaggtcagcctcggccacataacgagatcctgtctctataataaataaataaataaataaataaataataataataaataaacatagcggactggtggccagtgtgtccagtatcagggggagctgagattgtgagctggggtggatggggggcg

SEQ ID NO: 123359 - DNA, 190 bp, Homo sapiens
tataatccatgaggccagtcgtattattctcattttaaagatcaagaaaataaggctcagatacattgtatgagttgcccaagattttacacatagtaagtggcaatcctgcaatttgaacccaggtctgtatgatgatgccacagccagggtttgaactagagttcagtaggaagaaactaatgttttt

SEQ ID NO: 123360 - DNA, 613 bp, Homo sapiens
tactgagcctaggtactacagaaatgagatgggtggaacatacttaactatctaacctgggcaaacatctcatctatgaatcgtatccattgggttactgattccacaaatctggctcattttaatgatgagtctcagataattttgtagtttgaaacacagattactccagaatcacagtcctttatggcccaagtgctatatctgatggaatagttatctctgaatggaggttggtgtttatagaacattctgtatatggtaaaaggaatttaaggagatttaaaagaaagaatgttctgtataaactgtaagtggaaatgtttgtatttcccttggtaagcaaattgggctgtgtatattctttgtttgtgatctaatccagcaaggccaattaccagaatagagctttagggcatagcatgactaatcagcttaattaggcctgcttttctaaacaccaggcttccaggggtggccactatggactcctgcaaaagagtctttaatacatttccagactacccaagggtacattttacctttgttttttttttttcaagatagtttgataagactccaaaatgtgatgatgtaactatttcccagtgaa

SEQ ID NO: 123361 - DNA, 492 bp, Homo sapiens
gatctcagcttactgcaacctctgcctcccaggtccaagcgattctcctgtcttagcctccccagtagctgggatcacaggcatgtgccaccatgcccggccaattttatgttcttagcagaaacagggtttctccacgttggtcaggctggtctcgaactccccacctcaggtgatctgcccgccttggtctcccaaagtgctgggattacaggtgtgagccactgcacccagccgctccctcccttttatccatgtttgccatcatatgatgccttaaacactaaaaacaccatcccatcttacggtcttagcatccattcctctgcctggaatgttctttctctagacagacaaattccttcaacccttctttatccttcctcatcacatgagagacagcccctctatctactctagctaacatcacattctctccatctctgccctttgcctgctttgcttttgcttcttagaatttttcacaactgg

SEQ ID NO: 123362 - DNA, 653 bp, Homo sapiens
tgcaagcaaggcacttatactttagtattatatacatatacagagagaacaacagcaagaaaaattctacttaactgaggcttcattgtatttgggcttctctcttttcaatcacaggcatcaaatctttctggtaagcatgaagagttattatcaaacagttgtgttagtgttttccaaggtgtgattgaaaatggagatttcttacctcatcccagtcctgctaaaccaaaatctcttagggaaggatgggccccccagcattcacagtttaagcagcattacaggagattattatttacatcaaaatttaagaatcattggcttaaacacaaagaaaaaaatgtaattttattcttccagaattggcaaatgcacagccttaaccagtcaacaaagatcttcacctgtgggctgtttactacagctgggtggagcaggcaatgacccaaacctgcatgagtctcccaatatgaattgattttcctttgaagaatatcaattactggcaatcagctagtgagaatccagttctgctctcatcttgatttcatccctcatctcttctagagaactgagggaaaataaatgcaccaagaactaacatgggattttggaaagacagtaatgccctcaacagatgatttcaaaac

SEQ ID NO: 123363 - DNA, 484 bp, Homo sapiens
agcaacacaaatgggaagtaatattcttatcatcattttacaaatgagaagaccaaggcccagaagagttgaatatcttgctcaagatcacacacctttttccaccccccattccaagtcccataggcaactcagactcagcacatccatgatgtaacttatcatctttctctccaaaccatttcctcacttgtgccctactctcagtggggacatctctaatccccaggcccaagctggaaactggaagccatttctgactcctccctctccctcacccactccatccaaatggaacccaagtcctgtacattgtacttctcgggtattgatcaatcccggccctcgtctccacgcccatggtgctgacccattgttaggtgcctggctgctgctcctgggtcatcacttcccagcactctctttgcaggcccatctccaccatttccagcatcctacacactgtggctcaggtgtgctttct

SEQ ID NO: 123364 - DNA, 371 bp, Homo sapiens
cacagacataacccagacaagtccagctttggggagaaagcagagtagagaagggtggaggatggagctccactcctagccagcatcaggccatggtctcctttattctagaacaactccttcacttctgtgagtctctcatggctgttgacagttttgaaatattcatgtgagttgttttggatttttggaattaaactccccacttgatgtgtgtgcggcttttttttgtttgtttgtttcattttattttgtttagagacagagtctcactctattgcctcggctggagtgcagtggcacaatcatagctctgcagccttgaactcctggacttaagcgatcctcctgcctcagactcacaagtagct

SEQ ID NO: 123365 - DNA, 341 bp, Homo sapiens
cagggatttaagttagaggttacaaagaactttctgtccatgaagaggacagaaatacagaataccaggactgcagtctttctagtccttctgtttggagtttggagacgcaaagatgctcttctgcctgtgaagttcaagggccaggtgcatggacaggatgacaagatgacccgtggccttaggacagcctcacagttcacatggcagtagtagtgaggaaagtgccagcaaaatagcatggttgggtgggtaggttgagtggctataagtgccagatactggcttggggacaggtcttccatgcactgtctaccttgaacaataaagacagaccaggt

SEQ ID NO: 123366 - DNA, 476 bp, Homo sapiens
gaattcaggggtctgtgaacttggatgggaaataagattttctttattttcactgaccccaagttgaaatttagcatttctgttcattatggccataggcagtaaaccacagtaattcatttacctgtgatttcattgccaatagaaagcacagatattttcgtattatattatttgttgttgcagacatctcaagagtgtttgtgctcatcatgtcttcagcattacagtagatattagaccaactgctaaatcttgttatataaatcttgtgcattcatatttaaaattatttgatactgtgcgcttcgatataatttcttttgaaatcttatgttttttattttatacttttacaaatattattctgagaagggatctgatccgtaggcttcactagactgccaaagaggatcaaatacaaaaaaaaaaaggaagaacacctgtcttgtctagaatcttttcatcctaaatca

SEQ ID NO: 123367 - DNA, 407 bp, Homo sapiens
tgatctccctacatatagcgagggatgactgtaatgcatttctatgttacaaaatttgcacactttatttagatttgcaaaggacattaaggctcataaatacagttcacctataacctttatcatccacgactttataaatacagcaaaaaaattgatgttactgctgggagaaggatgcgtagaaaacaataaaatgatctgctataatcacttggctaatcagcctctgagctctagccattcaaattaatgggtcagcaaaattacaagtaaatatcatgtcctgtatcttcagaatcgcttaaaaatagtccaaaccattattattaaattagaaaaggtcaagggtctactataatgcctatatttctactttccctcaacttctttgccccaaaaagggg

SEQ ID NO: 123368 - DNA, 271 bp, Homo sapiens
agaaattagataaaatgttagtgaatactactgtaattttgccttcccccaagaaagagtataatggaaaaattgttagtaccacttgtatcaatcatgtaacatttctaaaacagtttcttcattagtgaaagaggaataataccttgcaagtttatttgttcaggattttttaaattgtgtataaaatgtacagtatgctgacatatataatggatactaaataaacgatggctattatatatatatatatatatatatatatatatat

SEQ ID NO: 123369 - DNA, 473 bp, Homo sapiens
ggtggctcatgcctataatcccgtcactttgggaggcctaggcgggtgaatcacctgaggtcaggagttcgagactagcttggccaacatggtgaaacccatctctactaaaaatacaaaaattagctgggcatggtggcaggcgcctgtagtcccagctacttgggaggctgaggcaggagaagtgcttgaacctgggaggtggtggaggttgcagtgagccaagattgcgccattgcactccagcctgggcgacagagggagactctgtctcaaaaaacaaaaacaaaaaaaaagagcttgaggctagtgatatcattcctgttgtttctgtagcaatggaggtgtcttcagcctacttcctagatgatgaaattgaggaacagacccaggatggaggattcttgtttctgttcctcttctaccacctactacactgtgctggtcttattcatagttttggttggggacag

SEQ ID NO: 123370 - DNA, 313 bp, Homo sapiens
cccttccgttttcccttcccttctgccttcccttctttctctctgccttgccttgccctgccctgccctgccctcccttgccttcccttcccttcctttcctttcttctctttctctttcttttgtttcttctctttctctctttctctttctttgacagggtcttgctcggttgcccaggctgaagggcagtggtggaaacatggctaactggagcctcaacctcccaggcccaagtgatccccccgcctcagcctcccaagtggctgggacaaaggtgcactaccatgcttggctaatttttgtatttttt

SEQ ID NO: 123371 - DNA, 530 bp, Homo sapiens
acaggaggtttcagggccagaaaagcagatataccagctctttggtaaacaaagtagttttactatctgcgtaattctaaccagaaggcatgggtgggaggaggtcaaccaaaacagtaatgagtgaactttcctcctccagagatcacagcaggagtccaaaaaacaccaccactcaggactgggcaacagagagtaacctagagataagtgactaacatggacaccttccataacgatggggtgttatccttggactcttgcttgagaagaggaggaatgagggaaaccaagatttccatgaagtctcagaagagaaaagacccaagttctttcccactaaatagtagagatggcaagagctgggtttcagaggacaaaattgggatatgaaagtcagagaggcaatctccctttattaaaataagactgctctatgcacatcatagaagatgtgtctatatggatttacttaacaatgcaaccaaatttcatgtttctgaatataggatgagcttttaccacttgta

SEQ ID NO: 123372 - DNA, 747 bp, Homo sapiens
cttgtaaatgttatctaatgagttactaaaaattatacatatagcccatatgctgatttcaaaaatcattttaaaaaaatcacagacagcttgtttgcccagaatgcagttgatttttgatcattgttgtcataagacatggatgtatgtaatcatctgaaatttacccaaatatcattgagcttttagttttgactttccagcaactggtgcacctggagaaacttgtgctgtctgctgtctttagatagaaatttgctggaagtatgaaagagcaattgaaataattatttttactttcttgatctcctcttgttgcctgctaatcagggaaataaagaaaaaagtgaacagacaaataaagaagcaaaggtcctccccagtcagctctgaagatacctatgctctgtgctccccgttgatctagcgaggccttcaaaaatgatttagcccactaggagttctccagttcttaggataagcatttatgcccaaattgccattatagtgattttctgtgctctctagtctgtggcattgtatttttatcatccaagcaagtgattagtggaatctattcatgctttatctgtggcaaactcaaatttacattctttcccagcttgagggctgtatagttggatggagtgtagagctacttataaagggcctgcaagaagaagtgatggaggttggttggctaatgggtagttttattcaatataatttattttgaaaaatcagcta

SEQ ID NO: 123373 - DNA, 392 bp, Homo sapiens
ctgacatgagagatgtggaaaaaatgaagtgcattcccaaaacaacacttctgctagcagcagtctcttgttttaaatcagttatcttaaactgacttaacttgctttgaggtattcttgagatacttctttttatataaaacttttgttgttttaaatcaatgtgtgtctaaaccatggaagcattcaagtagaacacacacactgtacaggtgcacataggtatcttcaaacaggaacaactgtagtctgataatcacattcccctataaatactgtttaaaaattttacaatgcaagatcatgtctatttggatgggaatcaaatataaaatatctttagtaatctcaaatagtcatagggctctcccccaatccagtaagcatttact

SEQ ID NO: 123374 - DNA, 377 bp, Homo sapiens
agatgacacagcagtgactcctgctgtgctgacgggggatccctgtcctggccccctatgctctatctgcctcttctgcctgctttgcttctagggcaaagcctggttggtcttggtctggctgggcttctgagtttctcctgggagtgaaactttgacatctaagccaaagggacatgacctggctaggatgagggccagcatagccctaggagtattgcccaccacctgtcacacccctctgaatctgagcactctctccaagagggagtgactcagagagggccaggctgccttccatgtagagcagtacctgccccaggaaccgctgggcccattccacacagaggcaggacatgcaccttcataaatgacca

SEQ ID NO: 123375 - DNA, 490 bp, Homo sapiens
tttccccaatcttccacaaggagagcagagtgttttccagattcaatcaaggatctatggtgcttaaatgaagattctaagagcaggtgttatggtccttgccctctgtcacactgctgcggatgctctgagagacatacacacatctgatgtacttgtgtctctcccaatttcgagaactgttctttgcacacagtcagtaaaaaacatctggtggatacaatcactccacagatacttattgaatgtctgctatatgccaggcattgttccagatgctgggaatagagcaggaaacaaaattgacagaatctttgcactcctagcttttagatgtgcaaaataatgttagcaggagataagtgctacagggaaaagcaacgcaggaaaaggagccaggaagtatggaggctgctgccatttcaacaacagttgatcctggaaggttcactgggagcctgacgtatgataaggtcctgaaggtgaggga

SEQ ID NO: 123376 - DNA, 377 bp, Homo sapiens
caaacaaccgaaatgctcatcagcaaaagaatggataaacgaactgaggtatagccgtacaaggaaatactatccagaaatagaaaagaatgaactaatgtccagaataggcaaatgaatagagacaaagtatactaataattgcctatggctggggtaagggaaggagacagaatgaggagtggctattctaaaatttgatcatgtaacgggtgtacaactctgtgaatacagtaaaaatgtaattgaattgtacaacgctttaaatgggtgaaatatatgctatatgaatatttcagtaaatccgctaaaaaaggaatgaactgttaataaatagagcaccacatacaaacattaggtttaagcaaaagtctgac

SEQ ID NO: 123377 - DNA, 284 bp, Homo sapiens
attcgcctggcaaaattcttctcgattttcagtttattttactaccacagaaaagtctgaatgactcagtgaataaataaattgctgactaaagaggtactgaggaagagaactgtttcctgttctactcacaacctgcttgcattgccgagtcaggcatttccccttttgacttccacaaaggtccctgcttcctgcctgtacacctttggtgagctctgcaactctggagtggacagacctccggggggagccaagtggccaaggtgtcctgaatcctctga

SEQ ID NO: 123378 - DNA, 521 bp, Homo sapiens
caggtgattcttcacctctctctaatatgcagaacacagtctgccaaactccctaaatcagttgacatttcttttgatcacctgattaccttccatgtgtgtaagaaagtctaattagtgtttatgaaaatgttttgtgatcttcaagtgctgatgttacaaatgttaattattttcagcaaatgcagaaacattgtgtcttctctcccagaaacaccgtaggaaaagggagagtggaggaattgactaaaacttttactgtaattaaaacagggtttttttgtttgtttgtttgtttttttagacagagtctcagtctgtcacccaggctggagtgcagtggtgcgatctcggctcactgcaagctctgcctcccgggttcatgccattctcctgcttcagcctcctgagtatttgggactacaggcaccgccaccatgccaggccaattttttaatatttttagtggagacggggtttcagcgtgttagccaggatggtctcgatctcttgacctcatg

SEQ ID NO: 123379 - DNA, 427 bp, Homo sapiens
ctgaaggctgagacgggaggatggattgagaccaggggtaatttgaagctgcagtgaactatgattgtgacagtgcactccagcctggactgcagagcaggaccctgtctcttgtacatacacacacacacacacacacacacacacacacacacatacatacccaggttctacctctggtgattctgactcagtagggtggggtatcccctagggatcctgctgtccagcctggtctgggatccacttttcattgggaactgagacactggctgtgagcctttctgtcctgagatgtagaggtcatggcgatgcaggttcaagcttaaggagacctgactgtgcgttaggtattgtgctgaacatcatctcttactctcacagcaacatccttagaaggttaatgatgtatccgtgctctacagat

SEQ ID NO: 123380 - DNA, 814 bp, Homo sapiens
ggcttaaacatcatcaactgggaatggaagaaactggagccaatctatggagaagccaatgcctatggacaagactttgagaagagaattttctagcagagacatcattgaggaactgaatggagcaatttgttagagaggcctgtgtttattatagacagtacccagcatcctttacagcagtgattcctgttaaaatgcaaggagaatatacatgtctcttagacacttgtcttacttttctcccctcgtttcccactgccattagcctaattcagtgcctaatctgctcacctctaaaccagtcccctccctgtggttccttagggtctcaacctaatgttatgcaggttgcatacagcacaaggatgtctgagtgatgggcaagtggggctgaaatctaacatattctcccggccaacccatgggtgcttatgtaggcctgttgcttcctggataatttttctcacaggggcgtggcaagctcatggagccttgaccctgcatggctaggttcactcagaggggttgctttcactattggcacagtgatgttgaagtggctagtagcagccctgagtcccatggcaacaatgaactagacacagtctctgccctcaagattgacaggttagtagagatggataatttcagagacaactatcttcaaagcaaatactttaaagaacgattgctatcatatcaatcttctttcaaaatgctccaaaggctctctattgccttccttaggctggaattcagaactttgtgtaatctctccaagctaatctggcatcctctactttgacccctg

SEQ ID NO: 123381 - DNA, 439 bp, Homo sapiens
tgtggtagctcatgcttgtaatcccagcactttggtttgggacgccgaggcaggcagatcacctgaggtcaggagtttgagaccagcctgaccaacatggtgaaaccgtgtctctaataaaaatacaaaaattagctaggcatggtgttgggtgcctgtagtctcagctacttaagaggctgagacagcagaattgcttcaaccagaaggtggaggttgcagtgagctgagatcgtgcctctgcactctaccctgggtgacagagctagactccgtttcaaaaaaaaagaaaaaaaaaagataaatgagtttctccttttcttacaaagatcttagtgacactatcaggagtaagagttgtggaaaactaaaccaaagtttggctgggtatgcgataaggcagatttaaaagttctaaggaaataagttctcaaaggga

SEQ ID NO: 123382 - DNA, 351 bp, Homo sapiens
cccttttgaattctactgcccacagaatgaggattaaactcctttgaataacatacatggccctttacagtctgccccaactggtttttttcttattttccaatttccttctacttgctaccgtacaaagtttgccccagttaccgagaaccactcgatgtgcctaaaataccccctgctcttccatctctgtacctctgctcatgctgttccatttttcttgaatgctttcctactatttctctcttcccgctctgtcccctaccctaaaccacctcccaacctgaaaaactcaagtatttttcagggaccagctcaagtgtcatttcttacacagagtttctctatttc

SEQ ID NO: 123383 - DNA, 425 bp, Homo sapiens
atgcttttcataatggctatctaaaaatccattaagctaaggctaaagcctagccagaatcacttcccttcttttggcactaacaccctgacacatctttcggaaacaccacctacctcattttcagtctacctggttaaggaatggtttacctctcttccggctccagggaggcccacatgatgtaagcctggccaataagagcatacccttgcccctgtgattcacaaaggaactgacctagaaaagagtgagggccctgcccttcctgggaatgaggtaagtgagcctcttcttctttctgaaatcaggagcattcaagcttgtaaatctggaggtgctggagccattcttgctaccacatacagactccatttgagaacaagcaatgcagaggaagtaaaactgaaaggttgtgaagtaag

SEQ ID NO: 123384 - DNA, 503 bp, Homo sapiens
ttgaaataacctagattctaatcatcaccagtagaatagacaaataaattgtgctatgttaatacaatggaaaactacatggtgctaaatatgaatggatgattgccacatgcagcaatataggggttgatcttgcagtgaaagaagctagacactaagaaatgcacacaatataattccatttatagaaatttcaaaaaccagcaaacctaatccgtggtgttagaagtcagaatagtgcttacctttggggtaatgatggtggtatgaagggggcttctggtacaatagaatgttgcttttttaaaaaagaatatgggttgtgaatatgctggttcatgatgtaatagtttattaagttgtacacttatggtttgtcaactttttgtttgttctacatcaataaaaaaagttaaaaataaaaatgctcaacaagatacattgtaatgaaatgaaagaacaatgaagacaaagagagaaatctgaagatccagatttaaagg

SEQ ID NO: 123385 - DNA, 805 bp, Homo sapiens
gtggcacttaaaccatgacctgttcctttcctcctccccgcagcttactttgaaggaagctctctattacaggtaggtgtggctaagaaggtggggctcccttgcccctcatctcccaatcaagggatatggcatcttacccagaagagcaggctgccaacatttcttattccctccgactctgagatgcagaagttaagttcctggtgaggtcagccaagaagtcagagactactgttctctgcccactccccccaactcaaatgtggcagttctaccacaggtgaagctaactgagaacacttgggccctcatcattcttgctcaagaatgatggggtggagggtccacactgggagaggcaagctgagaagactggagagtgtcatatctgcctcagtctctggagcagtggcttggaggtttttctcagtgggagagcagtccataaatacatagagctctgaagctctgaagctctccttaggggaactgtctttgaaacagagtgagggaagttcaaggctaagggtactttcttccataatgaagattttggtggtaattaagaggagactaataactccatgagagcaaaaacttacaccagaggcaagcaagtttactagagagaaccatggaaacagatagctaagaactctcctgggttcacaaaaaacctaaaggactagcctcaaaaacttcccctacccatgtacaattcagtggcatctataacattcacagtattgtgcaatcatcaccactatctctttccaaaacactgtcatcatcccaagaagaa

SEQ ID NO: 123386 - DNA, 229 bp, Homo sapiens
actaacagcactagacagatcattgaggtagaaacttaacaaagaaacattggccttaaattggacttcagaacaaattgacttaatagacatttataaaacattctacctaataaatagagaatatgcattattttcacaatcgcatggaatattctctaagatagaccaaatattaggccaaaaataagtattaacagattgtaaaaaatcaaaatcatatcaagta

SEQ ID NO: 123387 - DNA, 302 bp, Homo sapiens
ttgagttcgttggtgaagtagtgtttcctcagatccagaaccatctatgtccacctatcttcctatgcccactgccaggaatatagtaagtattcataagcacttgctgcaaaatggcaatgacatacaacttttgcttacttactggaacccaatctttaacaaaagctagaaagcccagagtttggcatacataagagaattttggccacaactatccatctaatccacttccattctgtgtgttaagtctatatatttagttgatgcaaaaaaaaaattcagttgaaattctttttttt

SEQ ID NO: 123388 - DNA, 365 bp, Homo sapiens
tcagatttataattaatgactgggaaggctcgattagggtaatgtttttaactttaaaaaataacttttaaagaccaacttgggagtggctcctaacataattctttcactgaatgcccttttctgacacttggagtcttaaataagtcttcttggatttcgctatctatgacttctgtgccactctgtgttctcagtggttgacttcccctttgagaagtgagaattagaaatgggcatctcctcaggctaggcgcggtggctcacgcctgtaatcccagcactttgggaggccgaggtgggcggatcatgagatcaggagttcgagaccatcctggccaacatggtgaaaccccatctctact

SEQ ID NO: 123389 - DNA, 508 bp, Homo sapiens
atctatcatctacatctatcatccatgtatcttatctatcatctatctaatctatcaaactatcatctatttatctgtctatataatcagtctatcatctctatctatccatccatatatagagagagagagagagagaagagagtgtctcgtctctgtcaccacaggctggagggcagtggcgcgatctcggctcactgcagcctccgcctcctgtgttcaagcaattctcctgcctcagcttccttagtggctaggattacaggcgtgcgccaccacacccagctaatttttttttttttttttttttttaagaagagatggggttccaccttgtgggccaggtgggcctagaattcttgacccaggggtctatccatctcagcctcccaaggggcggggatttaaagggatgagccaccggacccaggctaaagacaatttttcaccttggctttaataatggaaattggatggtatattcaagtaaatacacttataaggtata

SEQ ID NO: 123390 - DNA, 375 bp, Homo sapiens
gttcagagatatgtttgacattcctttagtcttaactgcatctgttattcatgcttttctagataactgtataatattttcttttactactaatgaaatgtgattctctcatgtccagtgatgtgttttctgaaatgatataaacaaaaagtggttaatatgattttattaactgtgttgggactcagaaaatatcccaaaatgaaggcctcagaagaagccttagaagcaaggctttctctgaccttctcctgccctcctgtctcagtcgcattctcccccgaatctacccatagaaactagaatttgtcttccccaaggcagatcatagaaaccagaacccctttccccatagccagccataaaacctaaaag

SEQ ID NO: 123391 - DNA, 148 bp, Homo sapiens
aagaatggtgttgttccagatattgatgattctcccctaactcttacaaagagttatgaaccagtatttaataagcacttaaaacattcatactcaataggtgtttaaaacatggagaaaagaatgcttttccagtaataagctggaa

SEQ ID NO: 123392 - DNA, 536 bp, Homo sapiens
aagaagaggggttggttttgctgtctcaggtggcagaggagcaagacagtctgcgtataattggaccagcacagtttaaatctctgctgttcaaggttcagttgtattctttaaaagccaaaatgaccctcaggactaatgtgtctgagagagattttgttaggtttacctcccctgttcattcagatatttttcagcagatattgtagactcggattctttcattgacttttggttttataacaaaaaaagtattgtttttattttttcactgaggtttggaaatgcattagcatttcattctgcttgagtgaatgatagcagtcttatttcatacagtgtctttcagtctgtgttattgttagtttccatagctaaataataaagttatgttttggggttggcgaaaatgagaccagttttgttaagggtatcctaatgaatttgtcaacttagcaagggactgaataggcagatttgtaaaccacccatgagatgtcagtgtggagcctaccttaagatacagcaagtcaaca

SEQ ID NO: 123393 - DNA, 396 bp, Homo sapiens
gcggccgcctactactactagcctactactactaaattcgcggccgcgtcgaccgcggccgcgtcgacatttatttcctagggctgctttaacaagctaccaaaaactgggtggtttaaaacaacagaaattgatttggtcaaaattctggaggccagaagtctgaaatccaagtgtcagccaggttggttcctcctggagggtctaagggagcatctatttcatgcctctctcctagcttttggcatttgccggcaatctttggcattctttggcttgtaggcttgtcactacaatctctccctccatcatcacatcacattctctatgggtgggtctctttgcatccaagtgtccctcttacaaggaaactagtcattgaattaagggtccacc

SEQ ID NO: 123394 - DNA, 513 bp, Homo sapiens
taaattcccatgccctttaccttacctgtgaagttgctaatctgatactaattgttcattctcctgctgttctgctcagtgtcccttcccgtgtgttgatacaataactagggtttataatcatcctctgagaagataaatgttgggcacatagaaggaaaatagatggagtggtggtggtatgcatttatttcctagggctgctttaacaagctaccaaaaactgggtggtttaaaacaacagaaattgatttggtcaaaattctggaggccagaagtctgaaatccaagtgtcagccaggttggttcctcctggagggtctaagggagcatctatttcatgcctctctcctagcttttggcatttgccggcaatctttggcattctttggcttgtaggcttgtcactacaatctctccctccatcatcacatcacattctctatgggtgggtctctttgcatccaagtgtccctcttacaaggaaactagtcattgaattaagggtccacc

SEQ ID NO: 123395 - DNA, 5071 bp, Homo sapiens
atcgcggcggtcgcggccttggggatgggcggagccccagccgctagtgctggtggccgccgctgctgccccagctggagcccgagccgccgcctctgcgtccgcgcgtcgctgcttcccagggcggcggtatgctggggaaaggagtagtcggcggtggcggcggcaccaaggcccccaagccctccttcgtgtcgtacgtacgccctgaggaaattcacacaaacgaaaaggaagtaacagagaaggaagtaactcttcacttgttgccaggtgaacagctgctttgtgaagccagcacagtactgaagtatgtccaggaagattcctgtcagcatggggtctatgggaggcttgtctgcacagacttcaagattgccttcttgggtgatgatgaatctgcattggataatgatgaaactcaatttaagaataaggttataggagaaaatgacattacactccactgtgttgatcagatttatggagtgtttgatgagaaaaagaaaactctctttggacaactgaagaaataccctgagaagctcatcatccactgcaaagaccttcgagtgttccagttttgtctgaggtacacaaaggaagaggaagtcaaaaggattgtcagtggcataattcatcatacccaggctcctaaactgcttaaacgattatttctgttttcctatgcgactgctgcacaaaacaatacagtcactgatcccaagaaccataccgtaatgtttgacacacttaaggactggtgttgggaactggaacggaccaaaggcaacatgaagtacaaagcagtgagtgtcaacgaaggctataaagtctgtgagagattgccagcatactttgttgtccccacccctcttcctgaagagaatgtgcagcgctttcagggtcatggcataccaatatggtgttggtcctgccacaatggaagtgcccttttgaaaatgtcagcactgcccaaagaacaggatgacggcattttacaaatccaaaagagcttcttagatggaatttacaagaccatccacaggccaccctatgaaattgttaaaacggaagacctgtcaagcaacttcctgtccctgcaggaaatccagactgcatactctaaatttaaacagctatttctgatagataacagtactgaattttgggacacagatataaaatggttttctctgttggaaagtagcagctggcttgacataatcagacgttgcctgaaaaaagcaatagagattacagaatgtatggaagcacaaaacatgaatgttcttcttttagaggagaatgcatccgacctctgctgtctcatttcctctctggtgcaactgatgatggacccccactgcagaaccagaattggtttccagagcctcatccaaaaggagtgggtcatgggtggccactgtttcttggatcgctgcaaccatctccgccagaacgacaaagaggaggttcctgtgttcctgcttttcctagattgtgtctggcagctggtgcaccagcatcccccggcatttgaattcacagagacttacctgactgttttgtcagatagcctgtatatacctatttttagcaccttcttcttcaattcacctcatcaaaaagatactaacatgggtagagaaggccaggatacacaaagcaagcctttgaatctgctcaccgtgtgggattggtcggtgcagtttgaacccaaagcccagacattgctcaaaaaccctctttatgtggaaaagccaaaactggacaaaggccaacggaaaggaatgcgcttcaaacatcaacgacaactttctttgccacttacacaatctaagtcatctcccaaaagaggatttttcagggaagaaacagatcatttaattaaaaaccttctgggcaagagaattagcaaacttattaattcttctgatgagctccaagacaactttcgagagttctatgacagctggcatagcaagtccactgactaccatggtttgttgttaccgcatatcgaggggcccgaaatcaaagtctgggcccagcgctacctacgttggattccagaagcccaaatcctaggtggtggccaagtggccactctgagcaaactcttggaaatgatggaggaagtccagagtttacaagagaagatcgacgagagacaccacagccagcaggccccccaggctgaggccccctgcctgctgaggaactctgcccgcctctcgtctttgtttcctttcgctctgctccagcgacattcctctaagcccgtcttacccaccagtggctggaaagctttgggagatgaagacgatttggccaaacgagaagatgagttcgtggacctaggggatgtgtgacctgtttgttgagtgattgtgaaagaggaatgtgggagattgggacagctgatccctggatttgtgtcacgctacagctcatgctggctgggtccttagcccggcactccgttagaataaacctgggccttcgggaaaagaggtggctctcattatttttcatgattctaaaagactatgcaattaaaaccgcatctgtagtattattaattggaaggaattattacttgacccgtaatagggttgtggccgttttctgatgcctaagtattatacagagcccacaatggccagtttactaccagaaagggcttcagtaagatattcttggacttgatactttcttcagatcctctttgtgccaagataatttatccagtcattgggaatagtaagtttctgtgtaacccatctcaattatagaagcaagttcagctttatgtatttgtatggggagttgaagattcagatagaggtattaagatgtgtggcatttacttaaaccatcacatttttttctttctacgcccccttgcctgtaaaacacctgggaagttccactggtgtcatccatcctgatgcttcagaccaccctcccttcttcacagaccgtgtcactttgcctgtgggtgggggctagccagccaccaccctcttttctgtgctgccagccccaggtcttcctccgcctgctccacaccactcgccgctgtccctctgcactccctgccttggtgcgtgtagtcccagtgtctcactgccaaacctcttggttacgctgcggggatctgtttctttgcctgagatccttcctgaggagcgtccattcctctggagtctctccttgtttggaacaaatcgcttcgcctttttctacttgcctgctgaagctttggagcacttgtgattgcagttttctgccgcaacccctgagccgagttcctcacattcttttacctttatggactgatgggattgggtcacttttgaatgtggctttcataggaaagcagcttaaacataaatatcagaagtgatgattatcatatgatacctcagtgattttaaaagccatagaagaaacttgactatgcctggtcaccttcttggatctgctgtctaaatgatatatatatgatatatatatgatatatatatcatatatatgatatatattttttttaatgcaggaaagtatactttgtaaggagcagatttttttgttctcagtggaaccctgtcaaatcgcataaaagaggaaaaaaacaaaactcattagaatgttttaaattgaatgttcgccttttacatatatttgctcttcagtatggatcccaatttgaatgttacatgttcggaaaaactttcagttgctcaagggcaataagaaaatttgaggccgggtgtggtggctcacgcctgtaatcccagcactttgggaggctcaggtgggcgaattgcttgagcccaggagttcgagaccagccggggcaacatggcaaaaccctgtctctactaaaaatacaaaaattagctgggtgtggtggtgcatgcctgtagtcccagctactcgggaggctgaggtgggaggatcccgtgagcctgggaggtggagtttgcagtgagctaagatcgtgccactgcactccggcctgggtgatggagcaagacctcgtctcagaaaattggaaactattgactaagagaagtttctaggtttgcactgaattgtcttttgtacatacagtgaattgttttgctgttctccccactccatattaatgcaggagccaggttggtctgttaggatgaacaaaggttgaggggagggcaggattcgtgcatctgggggccaaacacatgttccgtcttgattgccttaagagttactagcgaggtcagtgttaggcttgcaatagggattttaaaatacactaactagttccttagctaccttcacatacattctataggccttcttaaattagcactaacctccacttccttctctgccccattgcctcccaaatatgctatggagctatttttgttaccacgttataacgtgaatatttatacagtagcctcttcaggctttgtaattttcattccaaaaatgcccggtgtgatgctttacactctacaaagtatggtttaaaggcacaaggtcatggcctttgtcatagcagttgaatgtgcattgacatatttttctatgattttttaaaattacaatagaaaaataagctgttgtaacgtgtaaggtcatgacaatttttgtatttatatttgaaatcagatttctataactcgtatttgtgtacagaattctcaatggatttatatattgtgaaatttttatctgagattgggatgtggattatgcttaacagtgagagctgaaatgagaccatttactttgtttaaaatgctgtactgtgcaagtttggaaatgtaaattaatttactgtatataatatcttgagtttgtttatacctccaagtttttacactgaagataaactagctttaattcaaaactttttttttctttataagggaataagctgttgagctaaacctgtatacttgtgctttttattttctggatgcacaatgaaagtttatacttgtatctcactgcatcatatctgattgcagaaattaaagcacaatttacaagcaaaaaaaaaaaa

SEQ ID NO: 123396 - DNA, 2513 bp, Homo sapiens
atcgcggcggtcgcggccttggggatgggcggagccccagccgctagtgctggtggccgccgctgctgccccagctggagcccgagccgccgcctctgcgtccgcgcgtcgctgcttcccagggcggcggtatgctggggaaaggagtagtcggcggtggcggcggcaccaaggcccccaagccctccttcgtgtcgtacgtacgccctgaggaaattcacacaaacgaaaaggaagtaacagagaaggaagtaactcttcacttgttgccaggtgaacagctgctttgtgaagccagcacagtactgaagtatgtccaggaagattcctgtcagcatggggtctatgggaggcttgtctgcacagacttcaagattgccttcttgggtgatgatgaatctgcattggataatgatgaaactcaatttaagaataaggttataggagaaaatgacattacactccactgtgttgatcagatttatggagtgtttgatgagaaaaagaaaactctctttggacaactgaagaaataccctgagaagctcatcatccactgcaaagaccttcgagtgttccagttttgtctgaggtacacaaaggaagaggaagtcaaaaggattgtcagtggcataattcatcatacccaggctcctaaactgcttaaacgattatttctgttttcctatgcgactgctgcacaaaacaatacagtcactgatcccaagaaccataccgtaatgtttgacacacttaaggactggtgttgggaactggaacggaccaaaggcaacatgaagtacaaagcagtgagtgtcaacgaaggctataaagtctgtgagagattgccagcatactttgttgtccccacccctcttcctgaagagaatgtgcagcgctttcagggtcatggcataccaatatggtgttggtcctgccacaatggaagtgcccttttgaaaatgtcagcactgcccaaagaacaggatgacggcattttacaaatccaaaagagcttcttagatggaatttacaagaccatccacaggccaccctatgaaattgttaaaacggaagacctgtcaagcaacttcctgtccctgcaggaaatccagactgcatactctaaatttaaacagctatttctgatagataacagtactgaattttgggacacagatataaaatggttttctctgttggaaagtagcagctggcttgacataatcagacgttgcctgaaaaaagcaatagagattacagaatgtatggaagcacaaaacatgaatgttcttcttttagaggagaatgcatccgacctctgctgtctcatttcctctctggtgcaactgatgatggacccccactgcagaaccagaattggtttccagagcctcatccaaaaggagtgggtcatgggtggccactgtttcttggatcgctgcaaccatctccgccagaacgacaaagaggaggttcctgtgttcctgcttttcctagattgtgtctggcagctggtgcaccagcatcccccggcatttgaattcacagagacttacctgactgttttgtcagatagcctgtatatacctatttttagcaccttcttcttcaattcacctcatcaaaaagatactaacatgggtagagaaggccaggatacacaaagcaagcctttgaatctgctcaccgtgtgggattggtcggtgcagtttgaacccaaagcccagacattgctcaaaaaccctctttatgtggaaaagccaaaactggacaaaggccaacggaaaggaatgcgcttcaaacatcaacgacaactttctttgccacttacacaatctaagtcatctcccaaaagaggatttttcagggaagaaacagatcatttaattaaaaaccttctgggcaagagaattagcaaacttattaattcttctgatgagctccaagacaactttcgagagttctatgacagctggcatagcaagtccactgactaccatggtttgttgttaccgcatatcgaggggcccgaaatcaaagtctgggcccagcgctacctacgttggattccagaagcccaaatcctaggtggtggccaagtggccactctgagcaaactcttggaaatgatggaggaagtccagagtttacaagagaagatcgacgagagacaccacagccagcaggccccccaggctgaggccccctgcctgctgaggaactctgcccgcctctcgtctttgtttcctttcgctctgctccagcgacattcctctaagcccgtcttacccaccagtggctggaaagctttgggagatgaagacgatttggccaaacgagaagatgagttcgtggacctaggggatgtgtgacctgtttgttgagtgattgtgaaagaggaatgtgggagattgggacagctgatccctggatttgtgtcacgctacagctcatgctggctgggtccttagcccggcactccgttagaataaacctgggccttcgggaaa

SEQ ID NO: 123397 - DNA, 628 bp, Homo sapiens
ccccccccccccccgcgggggggtttttgggtttttttaaaaaaattgggggccccctttttttaaccacttctacaaagtatggtttaaaggcacaaggtcatggcctttgtcatagcagttgaatgtgcattgacatatttttctatgattttttaaaattacaatagaaaaataagctgttgtaacgtgtaaggtcatgacaatttttgtatttatatttgaaatcagatttctataactcgtatttgtgtacagaattctcaatggatttatatattgtgaaatttttatctgagattgggatgtggattatgcttaacagtgagagctgaaatgagaccatttactttgtttaaaatgctgtactgtgcaagtttggaaatgtaaattaatttactgtatataatatcttgagtttgtttatacctccaagtttttacactgaagataaactagctttaattcaaaactttttttttctttataagggaataagctgttgagctaaacctgtatacttgtgctttttattttctggatgcacaatgaaagtttatacttgtatctcactgcatcatatctgattgcagaaattaaagcacaatttacaagcaaaaaaaaaaaa

SEQ ID NO: 123398 - DNA, 5102 bp, Homo sapiens
atcgcggcggtcgcggccttggggatgggcggagccccagccgctagtgctggtggccgccgctgctgccccagctggagcccgagccgccgcctctgcgtccgcgcgtcgctgcttcccagggcggcggtatgctggggaaaggagtagtcggcggtggcggcggcaccaaggcccccaagccctccttcgtgtcgtacgtacgccctgaggaaattcacacaaacgaaaaggaagtaacagagaaggaagtaactcttcacttgttgccaggtgaacagctgctttgtgaagccagcacagtactgaagtatgtccaggaagattcctgtcagcatggggtctatgggaggcttgtctgcacagacttcaagattgccttcttgggtgatgatgaatctgcattggataatgatgaaactcaatttaagaataaggttataggagaaaatgacattacactccactgtgttgatcagatttatggagtgtttgatgagaaaaagaaaactctctttggacaactgaagaaataccctgagaagctcatcatccactgcaaagaccttcgagtgttccagttttgtctgaggtacacaaaggaagaggaagtcaaaaggattgtcagtggcataattcatcatacccaggctcctaaactgcttaaacgattatttctgttttcctatgcgactgctgcacaaaacaatacagtcactgatcccaagaaccataccgtaatgtttgacacacttaaggactggtgttgggaactggaacggaccaaaggcaacatgaagtacaaagcagtgagtgtcaacgaaggctataaagtctgtgagagattgccagcatactttgttgtccccacccctcttcctgaagagaatgtgcagcgctttcagggtcatggcataccaatatggtgttggtcctgccacaatggaagtgcccttttgaaaatgtcagcactgcccaaagaacaggatgacggcattttacaaatccaaaagagcttcttagatggaatttacaagaccatccacaggccaccctatgaaattgttaaaacggaagacctgtcaagcaacttcctgtccctgcaggaaatccagactgcatactctaaatttaaacagctatttctgatagataacagtactgaattttgggacacagatataaaatggttttctctgttggaaagtagcagctggcttgacataatcagacgttgcctgaaaaaagcaatagagattacagaatgtatggaagcacaaaacatgaatgttcttcttttagaggagaatgcatccgacctctgctgtctcatttcctctctggtgcaactgatgatggacccccactgcagaaccagaattggtttccagagcctcatccaaaaggagtgggtcatgggtggccactgtttcttggatcgctgcaaccatctccgccagaacgacaaagaggaggttcctgtgttcctgcttttcctagattgtgtctggcagctggtgcaccagcatcccccggcatttgaattcacagagacttacctgactgttttgtcagatagcctgtatatacctatttttagcaccttcttcttcaattcacctcatcaaaaagatactaacatgggtagagaaggccaggatacacaaagcaagcctttgaatctgctcaccgtgtgggattggtcggtgcagtttgaacccaaagcccagacattgctcaaaaaccctctttatgtggaaaagccaaaactggacaaaggccaacggaaaggaatgcgcttcaaacatcaacgacaactttctttgccacttacacaatctaagtcatctcccaaaagaggatttttcagggaagaaacagatcatttaattaaaaaccttctgggcaagagaattagcaaacttattaattcttctgatgagctccaagacaactttcgagagttctatgacagctggcatagcaagtccactgactaccatggtttgttgttaccgcatatcgaggggcccgaaatcaaagtctgggcccagcgctacctacgttggattccagaagcccaaatcctaggtggtggccaagtggccactctgagcaaactcttggaaatgatggaggaagtccagagtttacaagagaagatcgacgagagacaccacagccagcaggccccccaggctgaggccccctgcctgctgaggaactctgcccgcctctcgtctttgtttcctttcgctctgctccagcgacattcctctaagcccgtcttacccaccagtggctggaaagctttgggagatgaagacgatttggccaaacgagaagatgagttcgtggacctaggggatgtgtgacctgtttgttgagtgattgtgaaagaggaatgtgggagattgggacagctgatccctggatttgtgtcacgctacagctcatgctggctgggtccttagcccggcactccgttagaataaacctgggccttcgggaaaagaggtggctctcattatttttcatgattctaaaagactatgcaattaaaaccgcatctgtagtattattaattggaaggaattattacttgacccgtaatagggttgtggccgttttctgatgcctaagtattatacagagcccacaatggccagtttactaccagaaagggcttcagtaagatattcttggacttgatactttcttcagatcctctttgtgccaagataatttatccagtcattgggaatagtaagtttctgtgtaacccatctcaattatagaagcaagttcagctttatgtatttgtatggggagttgaagattcagatagaggtattaagatgtgtggcatttacttaaaccatcacatttttttctttctacgcccccttgcctcctcccttcttcacagaccgtgtcactttgcctgtgggtgggggctagccagccaccaccctcttttctgtgctgccagccccaggtcttcctccgcctgctccacaccactcgccgctgtccctctgcactccctgccttggtgcgtgtagtcccagtgtctcactgccaaacctcttggttacgctgcggggatctgtttctttgcctgagatccttcctgaggagcgtccattcctctggagtctctccttgtttggaacaaatcgcttcgcctttttctacttgcctgctgaagctttggagcacttgtgattgcagttttctgccgcaacccctgagccgagttcctcacattcttttacctttatggactgatgggattgggtcacttttgaatgtggctttcataggaaagcagcttaaacataaatatcagaagtgatgattatcatatgatacctcagtgattttaaaagccatagaagaaacttgactatgcctggtcaccttcttggatctgctgtctaaatgatatatatatgatatatatgtgatatatatatatcatatatatgatatatatatatatatcacatatatatgatatatatatgatatatatatatcacatatatatgatatatatatcatatatatgatatatattttttttaatgcaggaaagtatactttgtaaggagcagatttttttgttctcagtggaaccctgtcaaatcgcataaaagaggaaaaaaacaaaactcattagaatgttttaaattgaatgttcgccttttacatatatttgctcttcagtatggatcccaatttgaatgttacatgttcggaaaaactttcagttgctcaagggcaataagaaaatttgaggccgggtgtggtggctcacgcctgtaatcccagcactttgggaggctcaggtgggcgaattgcttgagcccaggagttcgagaccagccggggcaacatggcaaaaccctgtctctactaaaaatacaaaaattagctgggtgtggtggtgcatgcctgtagtcccagctactcgggaggctgaggtgggaggatcccgtgagcctgggaggtggagtttgcagtgagctaagatcgtgccactgcactccggcctgggtgatggagcaagacctcgtctcagaaaattggaaactattgactaagagaagtttctaggtttgcactgaattgtcttttgtacatacagtgaattgttttgctgttctccccactccatattaatgcaggagccaggttggtctgttaggatgaacaaaggttgaggggagggcaggattcgtgcatctgggggccaaacacatgttccgtcttgattgccttaagagttactagcgaggtcagtgttaggcttgcaatagggattttaaaatacactaactagttccttagctaccttcacatacattctataggccttcttaaattagcactaacctccacttccttctctgccccattgcctcccaaatatgctatggagctatttttgttaccacgttataacgtgaatatttatacagtagcctcttcaggctttgtaattttcattccaaaaatgcccggtgtgatgctttacactctacaaagtatggtttaaaggcacaaggtcatggcctttgtcatagcagttgaatgtgcattgacatatttttctatgattttttaaaattacaatagaaaaataagctgttgtaacgtgtaaggtcatgacaatttttgtatttatatttgaaatcagatttctataactcgtatttgtgtacagaattctcaatggatttatatattgtgaaatttttatctgagattgggatgtggattatgcttaacagtgagagctgaaatgagaccatttactttgtttaaaatgctgtactgtgcaagtttggaaatgtaaattaatttactgtatataatatcttgagtttgtttatacctccaagtttttacactgaagataaactagctttaattcaaaactttttttttctttataagggaataagctgttgagctaaacctgtatacttgtgctttttattttctggatgcacaatgaaagtttatacttgtatctcactgcatcatatctgattgcagaaattaaagcacaatttacaagcaaaaaaaaaaaa

SEQ ID NO: 123399 - DNA, 5216 bp, Homo sapiens
atcgcggcggtcgcggccttggggatgggcggagccccagccgctagtgctggtggccgccgctgctgccccagctggagcccgagccgccgcctctgcgtccgcgcgtcgctgcttcccagggcggcggtatgctggggaaaggagtagtcggcggtggcggcggcaccaaggcccccaagccctccttcgtgtcgtacgtacgccctgaggaaattcacacaaacgaaaaggaagtaacagagaaggaagtaactcttcacttgttgccaggtgaacagctgctttgtgaagccagcacagtactgaagtatgtccaggaagattcctgtcagcatggggtctatgggaggcttgtctgcacagacttcaagattgccttcttgggtgatgatgaatctgcattggataatgatgaaactcaatttaagaataaggttataggagaaaatgacattacactccactgtgttgatcagatttatggagtgtttgatgagaaaaagaaaactctctttggacaactgaagaaataccctgagaagctcatcatccactgcaaagaccttcgagtgttccagttttgtctgaggtacacaaaggaagaggaagtcaaaaggattgtcagtggcataattcatcatacccaggctcctaaactgcttaaacgattatttctgttttcctatgcgactgctgcacaaaacaatacagtcactgatcccaagaaccataccgtaatgtttgacacacttaaggactggtgttgggaactggaacggaccaaaggcaacatgaagtacaaagcagtgagtgtcaacgaaggctataaagtctgtgagagattgccagcatactttgttgtccccacccctcttcctgaagagaatgtgcagcgctttcagggtcatggcataccaatatggtgttggtcctgccacaatggaagtgcccttttgaaaatgtcagcactgcccaaagaacaggatgacggcattttacaaatccaaaagagcttcttagatggaatttacaagaccatccacaggccaccctatgaaattgttaaaacggaagacctgtcaagcaacttcctgtccctgcaggaaatccagactgcatactctaaatttaaacagctatttctgatagataacagtactgaattttgggacacagatataaaatggttttctctgttggaaagtagcagctggcttgacataatcagacgttgcctgaaaaaagcaatagagattacagaatgtatggaagcacaaaacatgaatgttcttcttttagaggagaatgcatccgacctctgctgtctcatttcctctctggtgcaactgatgatggacccccactgcagaaccagaattggtttccagagcctcatccaaaaggagtgggtcatgggtggccactgtttcttggatcgctgcaaccatctccgccagaacgacaaagaggaggttcctgtgttcctgcttttcctagattgtgtctggcagctggtgcaccagcatcccccggcatttgaattcacagagacttacctgactgttttgtcagatagcctgtatatacctatttttagcaccttcttcttcaattcacctcatcaaaaagatactaacatgggtagagaaggccaggatacacaaagcaagcctttgaatctgctcaccgtgtgggattggtcggtgcagtttgaacccaaagcccagacattgctcaaaaaccctctttatgtggaaaagccaaaactggacaaaggccaacggaaaggaatgcgcttcaaactctgtctccaggcccagaatttctcccccacagagtccacaaaggagagagcagtgatgcatcaacgacaactttctttgccacttacacaatctaagtcatctcccaaaagaggatttttcagggaagaaacagatcatttaattaaaaaccttctgggcaagagaattagcaaacttattaattcttctgatgagctccaagacaactttcgagagttctatgacagctggcatagcaagtccactgactaccatggtttgttgttaccgcatatcgaggggcccgaaatcaaagtctgggcccagcgctacctacgttggattccagaagcccaaatcctaggtggtggccaagtggccactctgagcaaactcttggaaatgatggaggaagtccagagtttacaagagaagatcgacgagagacaccacagccagcaggccccccaggctgaggccccctgcctgctgaggaactctgcccgcctctcgtctttgtttcctttcgctctgctccagcgacattcctctaagcccgtcttacccaccagtggctggaaagctttgggagatgaagacgatttggccaaacgagaagatgagttcgtggacctaggggatgtgtgacctgtttgttgagtgattgtgaaagaggaatgtgggagattgggacagctgatccctggatttgtgtcacgctacagctcatgctggctgggtccttagcccggcactccgttagaataaacctgggccttcgggaaaagaggtggctctcattatttttcatgattctaaaagactatgcaattaaaaccgcatctgtagtattattaattggaaggaattattacttgacccgtaatagggttgtggccgttttctgatgcctaagtattatacagagcccacaatggccagtttactaccagaaagggcttcagtaagatattcttggacttgatactttcttcagatcctctttgtgccaagataatttatccagtcattgggaatagtaagtttctgtgtaacccatctcaattatagaagcaagttcagctttatgtatttgtatggggagttgaagattcagatagaggtattaagatgtgtggcatttacttaaaccatcacatttttttctttctacgcccccttgcctgtaaaacacctgggaagttccactggtgtcatccatcctgatgcttcagaccaccctcccttcttcacagaccgtgtcactttgcctgtgggtgggggctagccagccaccaccctcttttctgtgctgccagccccaggtcttcctccgcctgctccacaccactcgccgctgtccctctgcactccctgccttggtgcgtgtagtcccagtgtctcactgccaaacctcttggttacgctgcggggatctgtttctttgcctgagatccttcctgaggagcgtccattcctctggagtctctccttgtttggaacaaatcgcttcgcctttttctacttgcctgctgaagctttggagcacttgtgattgcagttttctgccgcaacccctgagccgagttcctcacattcttttacctttatggactgatgggattgggtcacttttgaatgtggctttcataggaaagcagcttaaacataaatatcagaagtgatgattatcatatgatacctcagtgattttaaaagccatagaagaaacttgactatgcctggtcaccttcttggatctgctgtctaaatgatatatatatgatatatatgtgatatatatatatcatatatatgatatatatatatatatcacatatatatgatatatatatgatatatatatatcacatatatatgatatatatatcatatatatgatatatattttttttaatgcaggaaagtatactttgtaaggagcagatttttttgttctcagtggaaccctgtcaaatcgcataaaagaggaaaaaaacaaaactcattagaatgttttaaattgaatgttcgccttttacatatatttgctcttcagtatggatcccaatttgaatgttacatgttcggaaaaactttcagttgctcaagggcaataagaaaatttgaggccgggtgtggtggctcacgcctgtaatcccagcactttgggaggctcaggtgggcgaattgcttgagcccaggagttcgagaccagccggggcaacatggcaaaaccctgtctctactaaaaatacaaaaattagctgggtgtggtggtgcatgcctgtagtcccagctactcgggaggctgaggtgggaggatcccgtgagcctgggaggtggagtttgcagtgagctaagatcgtgccactgcactccggcctgggtgatggagcaagacctcgtctcagaaaattggaaactattgactaagagaagtttctaggtttgcactgaattgtcttttgtacatacagtgaattgttttgctgttctccccactccatattaatgcaggagccaggttggtctgttaggatgaacaaaggttgaggggagggcaggattcgtgcatctgggggccaaacacatgttccgtcttgattgccttaagagttactagcgaggtcagtgttaggcttgcaatagggattttaaaatacactaactagttccttagctaccttcacatacattctataggccttcttaaattagcactaacctccacttccttctctgccccattgcctcccaaatatgctatggagctatttttgttaccacgttataacgtgaatatttatacagtagcctcttcaggctttgtaattttcattccaaaaatgcccggtgtgatgctttacactctacaaagtatggtttaaaggcacaaggtcatggcctttgtcatagcagttgaatgtgcattgacatatttttctatgattttttaaaattacaatagaaaaataagctgttgtaacgtgtaaggtcatgacaatttttgtatttatatttgaaatcagatttctataactcgtatttgtgtacagaattctcaatggatttatatattgtgaaatttttatctgagattgggatgtggattatgcttaacagtgagagctgaaatgagaccatttactttgtttaaaatgctgtactgtgcaagtttggaaatgtaaattaatttactgtatataatatcttgagtttgtttatacctccaagtttttacactgaagataaactagctttaattcaaaactttttttttctttataagggaataagctgttgagctaaacctgtatacttgtgctttttattttctggatgcacaatgaaagtttatacttgtatctcactgcatcatatctgattgcagaaattaaagcacaatttacaagcaaaaaaaaaaaa

SEQ ID NO: 123400 - DNA, 3409 bp, Homo sapiens
acccacgcgtcgcccacgcgtccgggacaaaggccaacggaaaggaatgcgcttcaaacatcaacgacaactttctttgccacttacacaatctaagtcatctcccaaaagaggatttttcagggaagaaacagatcatttaattaaaaaccttctgggcaagagaattagcaaacttattaattcttctgatgagctccaagacaactttcgagagttctatgacagctggcatagcaagtccactgactaccatggtttgttgttaccgcatatcgaggggcccgaaatcaaagtctgggcccagcgctacctacgttggattccagaagcccaaatcctaggtggtggccaagtggccactctgagcaaactcttggaaatgatggaggaagtccagagtttacaagagaagatcgacgagagacaccacagccagcaggccccccaggctgaggccccctgcctgctgaggaactctgcccgcctctcgtctttgtttcctttcgctctgctccagcgacattcctctaagcccgtcttacccaccagtggctggaaagctttgggagatgaagacgatttggccaaacgagaagatgagttcgtggacctaggggatgtgtgacctgtttgttgagtgattgtgaaagaggaatgtgggagattgggacagctgatccctggatttgtgtcacgctacagctcatgctggctgggtccttagcccggcactccgttagaataaacctgggccttcgggaaaagaggtggctctcattatttttcatgattctaaaagactatgcaattaaaaccgcatctgtagtattattaattggaaggaattattacttgacccgtaatagggttgtggccgttttctgatgcctaagtattatacagagcccacaatggccagtttactaccagaaagggcttcagtaagatattcttggacttgatactttcttcagatcctctttgtgccaagataatttatccagtcattgggaatagtaagtttctgtgtaacccatctcaattatagaagcaagttcagctttatgtatttgtatggggagttgaagattcagatagaggtattaagatgtgtggcatttacttaaaccatcacatttttttctttctacgcccccttgcctgtaaaacacctgggaagttccactggtgtcatccatcctgatgcttcagaccaccctcccttcttcacagaccgtgtcactttgcctgtgggtgggggctagccagccaccaccctcttttctgtgctgccagccccaggtcttcctccgcctgctccacaccactcgccgctgtccctctgcactccctgccttggtgcgtgtagtcccagtgtctcactgccaaacctcttggttacgctgcggggatctgtttctttgcctgagatccttcctgaggagcgtccattcctctggagtctctccttgtttggaacaaatcgcttcgcctttttctacttgcctgctgaagctttggagcacttgtgattgcagttttctgccgcaacccctgagccgagttcctcacattcttttacctttatggactgatgggattgggtcacttttgaatgtggctttcataggaaagcagcttaaacataaatatcagaagtgatgattatcatatgatacctcagtgattttaaaagccatagaagaaacttgactatgcctggtcaccttcttggatctgctgtctaaatgatatatatatgatatatatgtgatatatatatatcatatatatgatatatatatatatatcacatatatatgatatatatatgatatatatatatcacatatatatgatatatatatcatatatatgatatatattttttttaatgcaggaaagtatactttgtaaggagcagatttttttgttctcagtggaaccctgtcaaatcgcataaaagaggaaaaaaacaaaactcattagaatgttttaaattgaatgttcgccttttacatatatttgctcttcagtatggatcccaatttgaatgttacatgttcggaaaaactttcagttgctcaagggcaataagaaaatttgaggccgggtgtggtggctcacgcctgtaatcccagcactttgggaggctcaggtgggcgaattgcttgagcccaggagttcgagaccagccggggcaacatggcaaaaccctgtctctactaaaaatacaaaaattagctgggtgtggtggtgcatgcctgtagtcccagctactcgggaggctgaggtgggaggatcccgtgagcctgggaggtggagtttgcagtgagctaagatcgtgccactgcactccggcctgggtgatggagcaagacctcgtctcagaaaattggaaactattgactaagagaagtttctaggtttgcactgaattgtcttttgtacatacagtgaattgttttgctgttctccccactccatattaatgcaggagccaggttggtctgttaggatgaacaaaggttgaggggagggcaggattcgtgcatctgggggccaaacacatgttccgtcttgattgccttaagagttactagcgaggtcagtgttaggcttgcaatagggattttaaaatacactaactagttccttagctaccttcacatacattctataggccttcttaaattagcactaacctccacttccttctctgccccattgcctcccaaatatgctatggagctatttttgttaccacgttataacgtgaatatttatacagtagcctcttcaggctttgtaattttcattccaaaaatgcccggtgtgatgctttacactctacaaagtatggtttaaaggcacaaggtcatggcctttgtcatagcagttgaatgtgcattgacatatttttctatgattttttaaaattacaatagaaaaataagctgttgtaacgtgtaaggtcatgacaatttttgtatttatatttgaaatcagatttctataactcgtatttgtgtacagaattctcaatggatttatatattgtgaaatttttatctgagattgggatgtggattatgcttaacagtgagagctgaaatgagaccatttactttgtttaaaatgctgtactgtgcaagtttggaaatgtaaattaatttactgtatataatatcttgagtttgtttatacctccaagtttttacactgaagataaactagctttaattcaaaactttttttttctttataagggaataagctgttgagctaaacctgtatacttgtgctttttattttctggatgcacaatgaaagtttatacttgtatctcactgcatcatatctgattgcagaaattaaagcacaatttacaagcaaaaaaaaaaaa

SEQ ID NO: 123401 - DNA, 1699 bp, Homo sapiens
  misc_feature (18)..(18): n is a, c, g, or t
  misc_feature (20)..(20): n is a, c, g, or t
atatcatatatatgtgananatatatatatatcacatatatatgatatatatatgatatatatgtgatatatatatatcatatatatgatatatatatatatatcacatatatatgatatatatatgatatatatatatcacatatatatgatatatatatcatatatatgatatatattttttttaatgcaggaaagtatactttgtaaggagcagatttttttgttctcagtggaaccctgtcaaatcgcataaaagaggaaaaaaacaaaactcattagaatgttttaaattgaatgttcgccttttacatatatttgctcttcagtatggatcccaatttgaatgttacatgttcggaaaaactttcagttgctcaagggcaataagaaaatttgaggccgggtgtggtggctcacgcctgtaatcccagcactttgggaggctcaggtgggcgaattgcttgagcccaggagttcgagaccagccggggcaacatggcaaaaccctgtctctactaaaaatacaaaaattagctgggtgtggtggtgcatgcctgtagtcccagctactcgggaggctgaggtgggaggatcccgtgagcctgggaggtggagtttgcagtgagctaagatcgtgccactgcactccggcctgggtgatggagcaagacctcgtctcagaaaattggaaactattgactaagagaagtttctaggtttgcactgaattgtcttttgtacatacagtgaattgttttgctgttctccccactccatattaatgcaggagccaggttggtctgttaggatgaacaaaggttgaggggagggcaggattcgtgcatctgggggccaaacacatgttccgtcttgattgccttaagagttactagcgaggtcagtgttaggcttgcaatagggattttaaaatacactaactagttccttagctaccttcacatacattctataggccttcttaaattagcactaacctccacttccttctctgccccattgcctcccaaatatgctatggagctatttttgttaccacgttataacgtgaatatttatacagtagcctcttcaggctttgtaattttcattccaaaaatgcccggtgtgatgctttacactctacaaagtatggtttaaaggcacaaggtcatggcctttgtcatagcagttgaatgtgcattgacatatttttctatgattttttaaaattacaatagaaaaataagctgttgtaacgtgtaaggtcatgacaatttttgtatttatatttgaaatcagatttctataactcgtatttgtgtacagaattctcaatggatttatatattgtgaaatttttatctgagattgggatgtggattatgcttaacagtgagagctgaaatgagaccatttactttgtttaaaatgctgtactgtgcaagtttggaaatgtaaattaatttactgtatataatatcttgagtttgtttatacctccaagtttttacactgaagataaactagctttaattcaaaactttttttttctttataagggaataagctgttgagctaaacctgtatacttgtgctttttattttctggatgcacaatgaaagtttatacttgtatctcactgcatcatatctgattgcagaaattaaagcacaatttacaagcaaaaaaaaaaaa

SEQ ID NO: 123402 - DNA, 1071 bp, Homo sapiens
tcggataatgcctattcattgcgatatgtgtttcctgatttgaaacctcgtctcagaaaattggaaactattgactaagagaagtttctaggtttgcactgaattgtcttttgtacatacagtgaattgttttgctgttctccccactccatattaatgcaggagccaggttggtctgttaggatgaacaaaggttgaggggagggcaggattcgtgcatctgggggccaaacacatgttccgtcttgattgccttaagagttactagcgaggtcagtgttaggcttgcaatagggattttaaaatacactaactagttccttagctaccttcacatacattctataggccttcttaaattagcactaacctccacttccttctctgccccattgcctcccaaatatgctatggagctatttttgttaccacgttataacgtgaatatttatacagtagcctcttcaggctttgtaattttcattccaaaaatgcccggtgtgatgctttacactctacaaagtatggtttaaaggcacaaggtcatggcctttgtcatagcagttgaatgtgcattgacatatttttctatgattttttaaaattacaatagaaaaataagctgttgtaacgtgtaaggtcatgacaatttttgtatttatatttgaaatcagatttctataactcgtatttgtgtacagaattctcaatggatttatatattgtgaaatttttatctgagattgggatgtggattatgcttaacagtgagagctgaaatgagaccatttactttgtttaaaatgctgtactgtgcaagtttggaaatgtaaattaatttactgtatataatatcttgagtttgtttatacctccaagtttttacactgaagataaactagctttaattcaaaactttttttttctttataagggaataagctgttgagctaaacctgtatacttgtgctttttattttctggatgcacaatgaaagtttatacttgtatctcactgcatcatatctgattgcagaaattaaagcacaatttacaagcaaaaaaaaaaaa

SEQ ID NO: 123403 - DNA, 4544 bp, Homo sapiens
atcgcggcggtcgcggccttggggatgggcggagccccagccgctagtgctggtggccgccgctgctgccccagctggagcccgagccgccgcctctgcgtccgcgcgtcgctgcttcccagggcggcggtatgctggggaaaggagtagtcggcggtggcggcggcaccaaggcccccaagccctccttcgtgtcgtacgtacgccctgaggaaattcacacaaacgaaaaggaagtaacagagaaggaagtaactcttcacttgttgccaggtgaacagctgctttgtgaagccagcacagtactgaagtatgtccaggaagattcctgtcagcatggggtctatgggaggcttgtctgcacagacttcaagattgccttcttgggtgatgatgaatctgcattggataatgatgaaactcaatttaagaataaggttataggagaaaatgacattacactccactgtgttgatcagatttatggagtgtttgatgagaaaaagaaaactctctttggacaactgaagaaataccctgagaagctcatcatccactgcaaagaccttcgagtgttccagttttgtctgaggtacacaaaggaagaggaagtcaaaaggattgtcagtggcataattcatcatacccaggctcctaaactgcttaaacgattatttctgttttcctatgcgactgctgcacaaaacaatacagtcactgatcccaagaaccataccgtaatgtttgacacacttaaggactggtgttgggaactggaacggaccaaaggcaacatgaagtacaaagcagtgagtgtcaacgaaggctataaagtctgtgagagattgccagcatactttgttgtccccacccctcttcctgaagagaatgtgcagcgctttcagggtcatggcataccaatatggtgttggtcctgccacaatggaagtgcccttttgaaaatgtcagcactgcccaaagaacaggatgacggcattttacaaatccaaaagagcttcttagatggaatttacaagaccatccacaggccaccctatgaaattgttaaaacggaagacctgtcaagcaacttcctgtccctgcaggaaatccagactgcatactctaaatttaaacagctatttctgatagataacagtactgaattttgggacacagatataaaatggttttctctgttggaaagtagcagctggcttgacataatcagacgttgcctgaaaaaagcaatagagattacagaatgtatggaagcacaaaacatgaatgttcttcttttagaggagaatgcatccgacctctgctgtctcatttcctctctggtgcaactgatgatggacccccactgcagaaccagaattggtttccagagcctcatccaaaaggagtgggtcatgggtggccactgtttcttggatcgctgcaaccatctccgccagaacgacaaagaggaggttcctgtgttcctgcttttcctagattgtgtctggcagctggtgcaccagcatcccccggcatttgaattcacagagacttacctgactgttttgtcagatagcctgtatatacctatttttagcaccttcttcttcaattcacctcatcaaaaagatactaacatgggtagagaaggccaggatacacaaagcaagcctttgaatctgctcaccgtgtgggattggtcggtgcagtttgaacccaaagcccagacattgctcaaaaaccctctttatgtggaaaagccaaaactggacaaaggccaacggaaaggaatgcgcttcaaacatcaacgacaactttctttgccacttacacaatctaagtcatctcccaaaagaggatttttcagggaagaaacagatcatttaattaaaaaccttctgggcaagagaattagcaaacttattaattcttctgatgagctccaagacaactttcgagagttctatgacagctggcatagcaagtccactgactaccatggtttgttgttaccgcatatcgaggggcccgaaatcaaagtctgggcccagcgctacctacgttggattccagaagcccaaatcctaggtggtggccaagtggccactctgagcaaactcttggaaatgatggaggaagtccagagtttacaagagaagatcgacgagagacaccacagccagcaggccccccaggctgaggccccctgcctgctgaggaactctgcccgcctctcgtctttgtttcctttcgctctgctccagcgacattcctctaagcccgtcttacccaccagtggctggaaagctttgggagatgaagacgatttggccaaacgagaagatgagttcgtggacctaggggatgtgtgacctgtttgttgagtgattgtgaaagaggaatgtgggagattgggacagctgatccctggatttgtgtcacgctacagctcatgctggctgggtccttagcccggcactccgttagaataaacctgggccttcgggaaaagaggtggctctcattatttttcatgattctaaaagactatgcaattaaaaccgcatctgtagtattattaattggaaggaattattacttgacccgtaatagggttgtggccgttttctgatgcctaagtattatacagagcccacaatggccagtttactaccagaaagggcttcagtaagatattcttggacttgatactttcttcagatcctctttgtgccaagataatttatccagtcattgggaatagtaagtttctgtgtaacccatctcaattatagaagcaagttcagctttatgtatttgtatggggagttgaagattcagatagaggtattaagatgtgtggcatttacttaaaccatcacatttttttctttctacgcccccttgcctgtaaaacacctgggaagttccactggtgtcatccatcctgatgcttcagaccaccctcccttcttcacagaccgtgtcactttgcctgtgggtgggggctagccagccaccaccctcttttctgtgctgccagccccaggtcttcctccgcctgctccacaccactcgccgctgtccctctgcactccctgccttggtgcgtgtagtcccagtgtctcactgccaaacctcttggttacgctgcggggatctgtttctttgcctgagatccttcctgaggagcgtccattcctctggagtctctccttgtttggaacaaatcgcttcgcctttttctacttgcctgctgaagctttggagcacttgtgattgcagttttctgccgcaacccctgagccgagttcctcacattcttttacctttatggactgatgggattgggtcacttttgaatgtggctttcataggaaagcagcttaaacataaatatcagaagtgatgattatcatatgatacctcagtgattttaaaagccatagaagaaacttgactatgcctggtcaccttcttggatctgctgtctaaatgatatatatatgatatatatgtgatatatatatatcatatatatgatatatatatatatatcacatatatatgatatatatatgatatatatatatcacatatatatgatatatatatcatatatatgatatatattttttttaatgcaggaaagtatactttgtaaggagcagatttttttgttctcagtggaaccctgtcaaatcgcataaaagaggaaaaaaacaaaactcattagaatgttttaaattgaatgttcgccttttacatatatttgctcttcagtatggatcccaatttgaatgttacatgttcggaaaaactttcagttgctcaagggcaataagaaaatttgaggccgggtgtggtggctcacgcctgtaatcccagcactttgggaggctcaggtgggcgaattgcttgagcccaggagttcgagaccagccggggcaacatggcaaaaccctgtctctactaaaaatacaaaaattagctgggtgtggtggtgcatgcctgtagtcccagctactcgggaggctgaggtgggaggatcccgtgagcctgggaggtggagtttgcagtgagctaagatcgtgccactgcactccggcctgggtgatggagcaagacctcgtctcagaaaattggaaactattgactaagagaagtttctaggtttgcactgaattgtcttttgtacatacagtgaattgttttgctgttctccccactccatattaatgcaggagccaggttggtctgttaggatgaacaaaggttgaggggagggcaggattcgtgcatctgggggccaaacacatgttccgtcttgattgccttaagagttactagcgaggtcagtgttaggcttgcaatagggattttaaaatacactaactagttccttagctaccttcacatacattctataggccttcttaaattagcactaacctccacttccttctctgccccattgcctcccaaatatgctatggagctatttttgtagccgcgatccgtatctctggcgtaccgagcgt

SEQ ID NO: 123404 - DNA, 438 bp, Homo sapiens
cagaaccagaattggtttccagagcctcatccaaaaggagtgggtcatgggtggccactgtttcttggatcgctgcaaccatctccgccagaacgacaaagaggaggttgagttccctcactgcagaactgtttccgtcataggagaactactgaatctcttattaagtacctgtcatcagatgtagtaggattgctgcttgcaaagtgtaagccaaacaggtttgttaagaaaactaggatcgtttcattgtgtgatgactttggatactttaaataatagtgaaacctttcccagaggaaagagatattaacaagtatgttcagagttttctaaattgtgtacaccaagggtgtatacatatttcacagtgggaataatatttattaataagacttaaatataaagtaactcagtgagggagactcctaccttttc

SEQ ID NO: 123405 - DNA, 2185 bp, Homo sapiens
atcgcggcggtcgcggccttggggatgggcggagccccagccgctagtgctggtggccgccgctgctgccccagctggagcccgagccgccgcctctgcgtccgcgcgtcgctgcttcccagggcggcggtatgctggggaaaggagtagtcggcggtggcggcggcaccaaggcccccaagccctccttcgtgtcgtacgtacgccctgaggaaattcacacaaacgaaaaggaagtaacagagaaggaagtaactcttcacttgttgccaggtgaacagctgctttgtgaagccagcacagtactgaagtatgtccaggaagattcctgtcagcatggggtctatgggaggcttgtctgcacagacttcaagattgccttcttgggtgatgatgaatctgcattggataatgatgaaactcaatttaagaataaggttataggagaaaatgacattacactccactgtgttgatcagatttatggagtgtttgatgagaaaaagaaaactctctttggacaactgaagaaataccctgagaagctcatcatccactgcaaagaccttcgagtgttccagttttgtctgaggtacacaaaggaagaggaagtcaaaaggattgtcagtggcataattcatcatacccaggctcctaaactgcttaaacgattatttctgttttcctatgcgactgctgcacaaaacaatacagtcactgatcccaagaaccataccgtaatgtttgacacacttaaggactggtgttgggaactggaacggaccaaaggcaacatgaagtacaaagcagtgagtgtcaacgaaggctataaagtctgtgagagattgccagcatactttgttgtccccacccctcttcctgaagagaatgtgcagcgctttcagggtcatggcataccaatatggtgttggtcctgccacaatggaagtgcccttttgaaaatgtcagcactgcccaaagaacaggatgacggcattttacaaatccaaaagagcttcttagatggaatttacaagaccatccacaggccaccctatgaaattgttaaaacggaagacctgtcaagcaacttcctgtccctgcaggaaatccagactgcatactctaaatttaaacagctatttctgatagataacagtactgaattttgggacacagatataaaatggttttctctgttggaaagtagcagctggcttgacataatcagacgttgcctgaaaaaagcaatagagattacagaatgtatggaagcacaaaacatgaatgttcttcttttagaggagaatgcatccgacctctgctgtctcatttcctctctggtgcaactgatgatggacccccactgcagaaccagaattggtttccagagcctcatccaaaaggagtgggtcatgggtggccactgtttcttggatcgctgcaaccatctccgccagaacgacaaagaggaggtcatcaacgacaactttctttgccacttacacaatctaagtcatctcccaaaagaggatttttcagggaagaaacagatcatttaattaaaaaccttctgggcaagagaattagcaaacttattaattcttctgatgagctccaagacaactttcgagagttctatgacagctggcatagcaagtccactgactaccatggtttgttgttaccgcatatcgaggggcccgaaatcaaagtctgggcccagcgctacctacgttggattccagaagcccaaatcctaggtggtggccaagtggccactctgagcaaactcttggaaatgatggaggaagtccagagtttacaagagaagatcgacgagagacaccacagccagcaggccccccaggctgaggccccctgcctgctgaggaactctgcccgcctctcgtctttgtttcctttcgctctgctccagcgacattcctctaagcccgtcttacccaccagtggctggaaagctttgggagatgaagacgatttggccaaacgagaagatgagttcgtggacctaggggatgtgtgacctgtttgttgagtgattgtgaaagaggaatgtgggagattgggacagctgatccctggatttgtgtcacgctacagctcatgctggctgggtccttagcccggcactccgttagaataaacctgggccttcgggaaa

SEQ ID NO: 123406 - DNA, 5156 bp, Homo sapiens
atcgcggcggtcgcggccttggggatgggcggagccccagccgctagtgctggtggccgccgctgctgccccagctggagcccgagccgccgcctctgcgtccgcgcgtcgctgcttcccagggcggcggtatgctggggaaaggagtagtcggcggtggcggcggcaccaaggcccccaagccctccttcgtgtcgtacgtacgccctgaggaaattcacacaaacgaaaaggaagtaacagagaaggaagtaactcttcacttgttgccaggtgaacagctgctttgtgaagccagcacagtactgaagtatgtccaggaagattcctgtcagcatggggtctatgggaggcttgtctgcacagacttcaagattgccttcttgggtgatgatgaatctgcattggataatgatgaaactcaatttaagaataaggttataggagaaaatgacattacactccactgtgttgatcagatttatggagtgtttgatgagaaaaagaaaactctctttggacaactgaagaaataccctgagaagctcatcatccactgcaaagaccttcgagtgttccagttttgtctgaggtacacaaaggaagaggaagtcaaaaggattgtcagtggcataattcatcatacccaggctcctaaactgcttaaacgattatttctgttttcctatgcgactgctgcacaaaacaatacagtcactgatcccaagaaccataccgtaatgtttgacacacttaaggactggtgttgggaactggaacggaccaaaggcaacatgaagtacaaagcagtgagtgtcaacgaaggctataaagtctgtgagagattgccagcatactttgttgtccccacccctcttcctgaagagaatgtgcagcgctttcagggtcatggcataccaatatggtgttggtcctgccacaatggaagtgcccttttgaaaatgtcagcactgcccaaagaacaggatgacggcattttacaaatccaaaagagcttcttagatggaatttacaagaccatccacaggccaccctatgaaattgttaaaacggaagacctgtcaagcaacttcctgtccctgcaggaaatccagactgcatactctaaatttaaacagctatttctgatagataacagtactgaattttgggacacagatataaaatggttttctctgttggaaagtagcagctggcttgacataatcagacgttgcctgaaaaaagcaatagagattacagaatgtatggaagcacaaaacatgaatgttcttcttttagaggagaatgcatccgacctctgctgtctcatttcctctctggtgcaactgatgatggacccccactgcagaaccagaattggtttccagagcctcatccaaaaggagtgggtcatgggtggccactgtttcttggatcgctgcaaccatctccgccagaacgacaaagaggaggttcctgtgttcctgcttttcctagattgtgtctggcagctggtgcaccagcatcccccggcatttgaattcacagagacttacctgactgttttgtcagatagcctgtatatacctatttttagcaccttcttcttcaattcacctcatcaaaaagatactaacatgggtagagaaggccaggatacacaaagcaagcctttgaatctgctcaccgtgtgggattggtcggtgcagtttgaacccaaagcccagacattgctcaaaaaccctctttatgtggaaaagccaaaactggacaaaggccaacggaaaggaatgcgcttcaaacatcaacgacaactttctttgccacttacacaatctaagtcatctcccaaaagaggatttttcagggaagaaacagatcatttaattaaaaaccttctgggcaagagaattagcaaacttattaattcttctgatgagctccaagacaactttcgagagttctatgacagctggcatagcaagtccactgactaccatggtttgttgttaccgcatatcgaggggcccgaaatcaaagtctgggcccagcgctacctacgttggattccagaagcccaaatcctaggtggtggccaagtggccactctgagcaaactcttggaaatgatggaggaagtccagagtttacaagagaagatcgacgagagacaccacagccagcaggccccccaggctgaggccccctgcctgctgaggaactctgcccgcctctcgtctttgtttcctttcgctctgctccagcgacattcctctaagcccgtcttacccaccagtggctggaaagctttgggagatgaagacgatttggccaaacgagaagatgagttcgtggacctaggggatgtgtgacctgtttgttgagtgattgtgaaagaggaatgtgggagattgggacagctgatccctggatttgtgtcacgctacagctcatgctggctgggtccttagcccggcactccgttagaataaacctgggccttcgggaaaagaggtggctctcattatttttcatgattctaaaagactatgcaattaaaaccgcatctgtagtattattaattggaaggaattattacttgacccgtaatagggttgtggccgttttctgatgcctaagtattatacagagcccacaatggccagtttactaccagaaagggcttcagtaagatattcttggacttgatactttcttcagatcctctttgtgccaagataatttatccagtcattgggaatagtaagtttctgtgtaacccatctcaattatagaagcaagttcagctttatgtatttgtatggggagttgaagattcagatagaggtattaagatgtgtggcatttacttaaaccatcacatttttttctttctacgcccccttgcctgtaaaacacctgggaagttccactggtgtcatccatcctgatgcttcagaccaccctcccttcttcacagaccgtgtcactttgcctgtgggtgggggctagccagccaccaccctcttttctgtgctgccagccccaggtcttcctccgcctgctccacaccactcgccgctgtccctctgcactccctgccttggtgcgtgtagtcccagtgtctcactgccaaacctcttggttacgctgcggggatctgtttctttgcctgagatccttcctgaggagcgtccattcctctggagtctctccttgtttggaacaaatcgcttcgcctttttctacttgcctgctgaagctttggagcacttgtgattgcagttttctgccgcaacccctgagccgagttcctcacattcttttacctttatggactgatgggattgggtcacttttgaatgtggctttcataggaaagcagcttaaacataaatatcagaagtgatgattatcatatgatacctcagtgattttaaaagccatagaagaaacttgactatgcctggtcaccttcttggatctgctgtctaaatgatatatatatgatatatatgtgatatatatatatcatatatatgatatatatatatatatcacatatatatgatatatatatgatatatatatatcacatatatatgatatatatatcatatatatgatatatattttttttaatgcaggaaagtatactttgtaaggagcagatttttttgttctcagtggaaccctgtcaaatcgcataaaagaggaaaaaaacaaaactcattagaatgttttaaattgaatgttcgccttttacatatatttgctcttcagtatggatcccaatttgaatgttacatgttcggaaaaactttcagttgctcaagggcaataagaaaatttgaggccgggtgtggtggctcacgcctgtaatcccagcactttgggaggctcaggtgggcgaattgcttgagcccaggagttcgagaccagccggggcaacatggcaaaaccctgtctctactaaaaatacaaaaattagctgggtgtggtggtgcatgcctgtagtcccagctactcgggaggctgaggtgggaggatcccgtgagcctgggaggtggagtttgcagtgagctaagatcgtgccactgcactccggcctgggtgatggagcaagacctcgtctcagaaaattggaaactattgactaagagaagtttctaggtttgcactgaattgtcttttgtacatacagtgaattgttttgctgttctccccactccatattaatgcaggagccaggttggtctgttaggatgaacaaaggttgaggggagggcaggattcgtgcatctgggggccaaacacatgttccgtcttgattgccttaagagttactagcgaggtcagtgttaggcttgcaatagggattttaaaatacactaactagttccttagctaccttcacatacattctataggccttcttaaattagcactaacctccacttccttctctgccccattgcctcccaaatatgctatggagctatttttgttaccacgttataacgtgaatatttatacagtagcctcttcaggctttgtaattttcattccaaaaatgcccggtgtgatgctttacactctacaaagtatggtttaaaggcacaaggtcatggcctttgtcatagcagttgaatgtgcattgacatatttttctatgattttttaaaattacaatagaaaaataagctgttgtaacgtgtaaggtcatgacaatttttgtatttatatttgaaatcagatttctataactcgtatttgtgtacagaattctcaatggatttatatattgtgaaatttttatctgagattgggatgtggattatgcttaacagtgagagctgaaatgagaccatttactttgtttaaaatgctgtactgtgcaagtttggaaatgtaaattaatttactgtatataatatcttgagtttgtttatacctccaagtttttacactgaagataaactagctttaattcaaaactttttttttctttataagggaataagctgttgagctaaacctgtatacttgtgctttttattttctggatgcacaatgaaagtttatacttgtatctcactgcatcatatctgattgcagaaattaaagcacaatttacaagcaaaaaaaaaaaa

SEQ ID NO: 123407 - DNA, 5095 bp, Homo sapiens
atcgcggcggtcgcggccttggggatgggcggagccccagccgctagtgctggtggccgccgctgctgccccagctggagcccgagccgccgcctctgcgtccgcgcgtcgctgcttcccagggcggcggtatgctggggaaaggagtagtcggcggtggcggcggcaccaaggcccccaagccctccttcgtgtcgtacgtacgccctgaggaaattcacacaaacgaaaaggaagtaacagagaaggaagtaactcttcacttgttgccaggtgaacagctgctttgtgaagccagcacagtactgaagtatgtccaggaagattcctgtcagcatggggtctatgggaggcttgtctgcacagacttcaagattgccttcttgggtgatgatgaatctgcattggataatgatgaaactcaatttaagaataaggttataggagaaaatgacattacactccactgtgttgatcagatttatggagtgtttgatgagaaaaagaaaactctctttggacaactgaagaaataccctgagaagctcatcatccactgcaaagaccttcgagtgttccagttttgtctgaggtacacaaaggaagaggaagtcaaaaggattgtcagtggcataattcatcatacccaggctcctaaactgcttaaacgattatttctgttttcctatgcgactgctgcacaaaacaatacagtcactgatcccaagaaccataccgtaatgtttgacacacttaaggactggtgttgggaactggaacggaccaaaggcaacatgaagtacaaagcagtgagtgtcaacgaaggctataaagtctgtgagagattgccagcatactttgttgtccccacccctcttcctgaagagaatgtgcagcgctttcagggtcatggcataccaatatggtgttggtcctgccacaatggaagtgcccttttgaaaatgtcagcactgcccaaagaacaggatgacggcattttacaaatccaaaagagcttcttagatggaatttacaagaccatccacaggccaccctatgaaattgttaaaacggaagacctgtcaagcaacttcctgtccctgcaggaaatccagactgcatactctaaatttaaacagctatttctgatagataacagtactgaattttgggacacagatataaaatggttttctctgttggaaagtagcagctggcttgacataatcagacgttgcctgaaaaaagcaatagagattacagaatgtatggaagcacaaaacatgaatgttcttcttttagaggagaatgcatccgacctctgctgtctcatttcctctctggtgcaactgatgatggacccccactgcagaaccagaattggtttccagagcctcatccaaaaggagtgggtcatgggtggccactgtttcttggatcgctgcaaccatctccgccagaacgacaaagaggaggttcctgtgttcctgcttttcctagattgtgtctggcagctggtgcaccagcatcccccggcatttgaattcacagagacttacctgactgttttgtcagatagcctgtatatacctatttttagcaccttcttcttcaattcacctcatcaaaaagatactaacatgggtagagaaggccaggatacacaaagcaagcctttgaatctgctcaccgtgtgggattggtcggtgcagtttgaacccaaagcccagacattgctcaaaaaccctctttatgtggaaaagccaaaactggacaaaggccaacggaaaggaatgcgcttcaaacatcaacgacaactttctttgccacttacacaatctaagtcatctcccaaaagaggatttttcagggaagaaacagatcatttaattaaaaaccttctgggcaagagaattagcaaacttattaattcttctgatgagctccaagacaactttcgagagttctatgacagctggcatagcaagtccactgactaccatggtttgttgttaccgcatatcgaggggcccgaaatcaaagtctgggcccagcgctacctacgttggattccagaagcccaaatcctaggtggtggccaagtggccactctgagcaaactcttggaaatgatggaggaagtccagagtttacaagagaagatcgacgagagacaccacagccagcaggccccccaggctgaggccccctgcctgctgaggaactctgcccgcctctcgtctttgtttcctttcgctctgctccagcgacattcctctaagcccgtcttacccaccagtggctggaaagctttgggagatgaagacgatttggccaaacgagaagatgagttcgtggacctaggggatgtgtgacctgtttgttgagtgattgtgaaagaggaatgtgggagattgggacagctgatccctggatttgtgtcacgctacagctcatgctggctgggtccttagcccggcactccgttagaataaacctgggccttcgggaaaagaggtggctctcattatttttcatgattctaaaagactatgcaattaaaaccgcatctgtagtattattaattggaaggaattattacttgacccgtaatagggttgtggccgttttctgatgcctaagtattatacagagcccacaatggccagtttactaccagaaagggcttcagtaagatattcttggacttgatactttcttcagatcctctttgtgccaagataatttatccagtcattgggaatagtaagtttctgtgtaacccatctcaattatagaagcaagttcagctttatgtatttgtatggggagttgaagattcagatagaggtattaagatgtgtggcatttacttaaaccatcacatttttttctttctacgcccccttgcctgtaaaacacctgggaagttccactggtgtcatccatcctgatgcttcagaccaccctcccttcttcacagaccgtgtcactttgcctgtgggtgggggctagccagccaccaccctcttttctgtgctgccagccccaggtcttcctccgcctgctccacaccactcgccgctgtccctctgcactccctgccttggtgcgtgtagtcccagtgtctcactgccaaacctcttggttacgctgcggggatctgtttctttgcctgagatccttcctgaggagcgtccattcctctggagtctctccttgtttggaacaaatcgcttcgcctttttctacttgcctgctgaagctttggagcacttgtgattgcagttttctgccgcaacccctgagccgagttcctcacattcttttacctttatggactgatgggattgggtcacttttgaatgtggctttcataggaaagcagcttaaacataaatatcagaagtgatgattatcatatgatacctcagtgattttaaaagccatagaagaaacttgactatgcctggtcaccttcttggatctgctgtctaaatgatatatatatgatatatatatgatatatatatatcacatatatatgatatatatatcatatatatgatatatattttttttaatgcaggaaagtatactttgtaaggagcagatttttttgttctcagtggaaccctgtcaaatcgcataaaagaggaaaaaaacaaaactcattagaatgttttaaattgaatgttcgccttttacatatatttgctcttcagtatggatcccaatttgaatgttacatgttcggaaaaactttcagttgctcaagggcaataagaaaatttgaggccgggtgtggtggctcacgcctgtaatcccagcactttgggaggctcaggtgggcgaattgcttgagcccaggagttcgagaccagccggggcaacatggcaaaaccctgtctctactaaaaatacaaaaattagctgggtgtggtggtgcatgcctgtagtcccagctactcgggaggctgaggtgggaggatcccgtgagcctgggaggtggagtttgcagtgagctaagatcgtgccactgcactccggcctgggtgatggagcaagacctcgtctcagaaaattggaaactattgactaagagaagtttctaggtttgcactgaattgtcttttgtacatacagtgaattgttttgctgttctccccactccatattaatgcaggagccaggttggtctgttaggatgaacaaaggttgaggggagggcaggattcgtgcatctgggggccaaacacatgttccgtcttgattgccttaagagttactagcgaggtcagtgttaggcttgcaatagggattttaaaatacactaactagttccttagctaccttcacatacattctataggccttcttaaattagcactaacctccacttccttctctgccccattgcctcccaaatatgctatggagctatttttgttaccacgttataacgtgaatatttatacagtagcctcttcaggctttgtaattttcattccaaaaatgcccggtgtgatgctttacactctacaaagtatggtttaaaggcacaaggtcatggcctttgtcatagcagttgaatgtgcattgacatatttttctatgattttttaaaattacaatagaaaaataagctgttgtaacgtgtaaggtcatgacaatttttgtatttatatttgaaatcagatttctataactcgtatttgtgtacagaattctcaatggatttatatattgtgaaatttttatctgagattgggatgtggattatgcttaacagtgagagctgaaatgagaccatttactttgtttaaaatgctgtactgtgcaagtttggaaatgtaaattaatttactgtatataatatcttgagtttgtttatacctccaagtttttacactgaagataaactagctttaattcaaaactttttttttctttataagggaataagctgttgagctaaacctgtatacttgtgctttttattttctggatgcacaatgaaagtttatacttgtatctcactgcatcatatctgattgcagaaattaaagcacaatttacaagcaaaaaaaaaaaa

SEQ ID NO: 123408 - DNA, 487 bp, Homo sapiens
catgctttctgccatggtcagctgtggcttttattttaaatttaatttgctcaaccagacacacagtgtagcagacgctattaccgtatttcagtttttggtgctgtagtgagactttgaaattctaggaattgagtagataacacaagtgtgatgtgggaaaggtccctgggaaacaacagtgattctattaggctggtgcacaaataattgtgggttttgccattactgttgtacccacataatagctcagtgcatgcaatttacaaagtaataagtgaaatgctccccatagttgactataacatttcctcatttttctctgaatttgctttttaaaaaactcttccccttgccattcccttccccattccagattgtaactgcttctttccagccgcatccgaagaaggggactttccatgtaggtgttattctcagaaaaggccagaaaagaccaggtcatggtggggatgatttgctccaa

SEQ ID NO: 123409 - DNA, 1145 bp, Homo sapiens
gcctctgcctcctgggctcaagctatcctctctcagcctcccatcccaagtagttgggactacaggtgcatgccaccatgctgagctaatttttttttattatttttagagacgggggtcttgctttgttgcccagactcgtctcaaactcctgtgctcaagcaatcctcctgcctcagactcccaaactgctgggattacaggcttgaaccacgagtgtgttttaaattttgatagtgcataccaaattgtcttccagaggccatgccggtttaagttcacaagttttcagagtccctgtttcctcacacccttgccaacacagcgtgttatcaaatgttttgttctttgccaatctgataggtggttttaatttgcattcctcttactgtatttcattgattctaagatgtcactgattctaagatgcatcctgatttcagaagttcacatgtaaaaatgtggctgggtgtggtagctcacgcctgtaatcccagcactttgggcggatcacgaggtcaggaattcaagaccagcctggccaacatagtgaaaccccgtctctaccaaaaatacaaaagaaataattagctgggtgtggtggcgggtgcctgtaatcccagctacttgggaggctgaggcaggagaattgcttgaacccaggaggcggaggttgcagtgaactgagatcgcgccactgaactccagcctgggcgacacagcgagactctgtctccaaaaaaaacaaaaaaaaagtaaaaacgtatagcttcaaatcactgaaatacaatatgttttgtgagattgggtatcttactgtgagtttaaaatgcatttgcatttcctcatctgttcatgtccttttcctatttttcttggaagggagggtagcattggttaagagtgtagggttcaaatcccagttctgccacttacaagcttgtgactttgggcaagttacttaaccgttctgtgtctcagtttcctcacctgcaaaatgggaataataatggtacctacctcataggataggtgtgaagattaaatacattattatatgcaaaataccatgttcctggaatatggcaaatgctcaataaatatttgctgtaactgtcatctttgagttattttttcttaatgag

SEQ ID NO: 123410 - DNA, 742 bp, Homo sapiens
gaaatctgttttcccaacttttgtttcattcatctgcactgtatgttttcttcccctttaagtattttatctctctgctgcctttaggtttataggcttttaaaaaaatcatcatgcagcacttgtctttcaagttgcctgcttggccctcttccaagtgtactctccttccttttgtttaaaaaataaataaataaaggccgggtgcagtggctcatgcctgtaatcccagcactttgggaggccgagacgggcggatcacgaggtcaggagattgagaccatgctggctaacacggtgaaacgctgtctctactaaaaatacaaaaaaaattagccgggtgtggtggcaggcgcctgtagtcccagctactcaagaggctgaggcaggagaatggcatgaacccaggaggcggagcttgcagtgagctgagatcgcgccactgcactctagcctgggtgacagaggaagactctatctcaaaaacaaaaacaaaactcatcatgcgatttttatttggaaaaaaattttcctttatgtatcctattcaacctaagccaatatgtcatccctcaaagggaactttgagcattcgctctgcactgtagaactcaggctggcccagcatgctgtttcagacagctttttctccatttccactctcacttcacagtgcagtttagattgctacccagtacttcccaaagcacagcgccgtcccaaagcataagcgatcgtctag

SEQ ID NO: 123411 - DNA, 741 bp, Homo sapiens
gaaatctgttttcccaacttttgtttcattcatctgcactgtatgttttcttcccctttaagtattttatctctctgctgcctttaggtttataggcttttaaaaaaatcatcatgcagcacttgtctttcaagttgcctgcttggccctcttccaagtgtactctccttccttttgtttaaaaaataaataaataaaggccgggtgcagtggctcatgcctgtaatcccagcactttgggaggccgagacgggcggatcacgaggtcaggagattgagaccatgctggctaacacggtgaaacgctgtctctactaaaaatacaaaaaaaattagccgggtgtggtggcaggcgcctgtagtcccagctactcaagaggctgaggcaggagaatggcatgaacccaggaggcggagcttgcagtgagctgagatcgcgccactgcactctagcctgggtgacagaggaagactctatctcaaaaacaaaaacaaaactcatcatgcgatttttatttggaaaaaaattttcctttatgtatcctattcaacctaagccaatatgtcatccctcaaagggaactttgagcattcgctctgcactgtagaactcaggctggcccagcatgctgtttcagacagctttttctccatttccactctcacttcacagtgcagtttagattgctacccagtacttcccaaagcaagtgtgtttttcttttcttataccttttggcc

SEQ ID NO: 123412 - DNA, 470 bp, Homo sapiens
accctttctcttcagtctctttctcttgactttcccctagatcttgcccctagaccatcactcagctggttcctcttcattgcctccatcttagttcaaatgtttcttctttggacagtttggagttttgctccccctcttccctgccattctatagtaggttttttttttcttaaaatagtgcatatcatctgggtgcggtggctcatgcctataatcccagcactttgggaggctgagggggtgtatcacgaggttaggagataaagaccatcctggccaacatggtaaaaccctgtctctactaaaaatacaaaaaaattacctgggtacggtgatgcgtgcctgtaatcccagctactcgggaggctgaggcatgagaatcgcttggagccgggaggcagaggttgcagtgagcagagatcatgccactgcactccagtctggtgacagagtgagactccgtctca

SEQ ID NO: 123413 - DNA, 359 bp, Homo sapiens
aataatgtaacaaccttaggatatgtaacaggaaggaatttttatgaaattcatttccagaattcaaagaagacagtttgtagactgagtaaaaattataagcttcagtggttaacagtgtagctttctaaactggtttctgttacagtatatttacttgaagcaattgggggggtactttcttaaaacagtgttttgccttctcttaaaacactattccttctagactgtgtttttgctgctgaatttaaggtgactttcatttttctaaaaaagttacaccaaaagcacactgcaccttcttcattaaggtgaaatcatatgcctttagcttgaggacagtctctttgaaactgctt

SEQ ID NO: 123414 - DNA, 418 bp, Homo sapiens
agaacatttctgattcacgggaggaggtcaaaatatcaacacaaataggagtctgaaagacgttgattccaactctaatggatgactttgaagggttcaggatttcagtggaggaagtaactggaagtgtggtggaaataggaaaagacatggaatctgaagatgtgactgaattactgtaacctcacgatgaaacttcaacagatgaggagtttgaggagttgctccctgcttttttggagacagggtcttactctgttacctaggctgaaatgcagtggcgtaccacagctcactgaggcctcaaccacccacgctcaagcaatcctcctgcctcagcttcctgaggagctgggactacaggcatgtgccaccacacctggctaatttttgtattttttgtagagatggggtttca

SEQ ID NO: 123415 - DNA, 427 bp, Homo sapiens
tttgcccccttccccatgcacttgcagaattcttgaaagtagttatgttcctaattcaccttggtggtttccaatgctccatgcatacccaacaaatatttggagactagaaagtgaatatactcagagcacagagtcatttactgaacatgaatgaacagattaattgctctgttttctcaaatgtctttcttttctcatgtctttcctctcaaaagatgattaagaggacatgatctctcaagttcttaggagagaaaaattaaacaagtcagaattgctcactaatttcaaggcttattcaagcttgggctgcccccctgggagacattatagtggccctgagggaggcggcgcagctgctgctccagcctgccactcatctctgtattctgtggagacagaggccatgccggggccccacaag

SEQ ID NO: 123416 - DNA, 398 bp, Homo sapiens
cctgcctggtcatccacaggggagtgccagctcccacccccagccacatactgttctcagcttctgagtggctgggctgtcccagagggccatgctgggcctgagtgctgtccttgggcatatgcagatggtgttgtatccagggggttttcagggaagctttagcactttcatattaaaacaaaaaatgttggaatctccattaaatagtcaagtcttagggatagtagtaaaaacatggctgtacatggctggccaggcacagtggctcacgcctataatcctagcactttgggaggctgaggtgggagggttggccaagagcttgagaccagcctggtcaacatagcaagacccgtctctacttgatttttttttttaaagtacatggcaaaggg

SEQ ID NO: 123417 - DNA, 261 bp, Homo sapiens
gttctccttccaagactggtgctgggacaaacaaggtgttgaacagtacctgacagggccacactcctaatttcaactcaaattttgccagagaagctggactttttcaggctaccttctagcacatcctgtacttgtttcttcatgcactggcctctagcacctgccctctctaaggttacagatgattttctcttcgtttattcagtggctttcccttaattcacataaagttaatcactttaaagtgagcagttctgt

SEQ ID NO: 123418 - DNA, 216 bp, Homo sapiens
aaaagttacagtgaaatcctttctagtttctgttttctttagaatcttaggatttaaatgcagtaaaatttaaatcctaagattctaaagaaaacagaaactagaaaagttacagtgaaatcctttctttctttttttctgtatttgttgggttttgtgtgtgtgtgtgttttttttgttttgatggaataattaagactgttttctgattttgtt

SEQ ID NO: 123419 - DNA, 350 bp, Homo sapiens
atggccacacaggcagggaataactgatgcacagaattcagccgggccgcactcagcaccgcgctctccagatgcaaacggacacacgcaaaccggccccagactcgagaattcgtccgcagagatgcatccactacaactcaaacatcattccaccttaaaaaccctgcttaatgacatcagccctgctctgccggttttgtggcctctttgacacaggccgagatcctcccttctctggcctccccgctggctgccagatctcaccaagccacaagttacagacgcagggtgcaactgaggaacatgatcagtgaaggaagaaataaggaagggggagctttacgagt

SEQ ID NO: 123420 - DNA, 316 bp, Homo sapiens
ccggcagccgccccgcgaagagtgggacagacactcagcactgacacagaggccacggcagccaccccatgaagagtgggacagacactcagcactgacacagaggccacagcagccaccccatgaagagtgggacggacactcagcactgacacggaggcccaggcagccgccccgtgaagagtggggcactcagcactgacacggaggccacagcagccaccccgcgaagagtgggacagacactcagcactgacacagaggccacagcagccacccgatgaagagtgggacggacactcagcactgacacaga

SEQ ID NO: 123421 - DNA, 483 bp, Homo sapiens
ggctaccctgctcccatctctgcttattactatgtcatgttttccataagactttcctcatatccctccaagtagactaacttccctctttcctgacttaaggcattcttgattatgtttatattctagaacttctcatattttgtcatgtattatagttagctatatacagttaagtcttagaccccactagattaattaaaggctgatcagaaggaattgtctagagctcagctgtcatgacctattgttaaatatattcccccaacaaccctagaaaggaattctgcatggtttagataatatgtttgattgattaacctcatcttccatctgtgaaacatgcttcccgcatttttcttttttaattctcatttgacaaagaaggctggctctaaaaagaacagctcaggctatgcccaaaaagtcaaatgattactaacaagcaagttacttaaaaaacagtatccggtatttgtgaaa

SEQ ID NO: 123422 - DNA, 240 bp, Homo sapiens
ggatagaagtgtccagcatcaagagaaacagacatattggcagccagtattttacaaagcacattacagggaagcaaagatttaacaacttgaaattattcatacttaatgaataaaactggcattttacatgtatgaagaccaagaaaacacagaagtgacaaatccccacataacaaaaacagaaccatatggagctaaagaaaaggatcaggagaactcagtattttagttcatact

SEQ ID NO: 123423 - DNA, 790 bp, Homo sapiens
gtggggagaggcaataacttaatcagaaactttgtacgtggcctagtaaaacagaaatacagagtccacatctctcaacatctcactccttcaaatactttttgccaccattccaagtagtctatgtttaaaatacatttaaaaatagaatacgtatcatatattatcctgaaaattaaaataatacgtaggcaaagttcttggtgcagtattagcaattcttgatatcattattattatttattgtaactatagttaactatgtattagctgcatagtgatcattttgggtgagattaataatttgactgaaaaccacctcaggctcttctttattcaggtctatccttcattccagcacaataaccacggggatttttaaaaaagctaacatccaagttagccttaatattttacatcttatattacatttcaccccaatgtacccgcttaaggtctattttttaaaaggccatgacaacgacagtctcttgtttgttagagggagaagttctgacatggcttattcatatatccattctcacctgagaagatagttttcccacagtctggttatataacagtaaatattttattaactgtagctatatagaacccataatggtgaattacaacccttgttatttttttcaaaactggtgtttcaagagatgattatactatcacacacacaaaaatgacctgcaatgttcaagagtgagccattgaacagcaacagagaggagttacacagaaaaataaacaagcaaacaaataagcaaataaacaa

SEQ ID NO: 123424 - DNA, 209 bp, Homo sapiens
acagctacaagtatcaaagaagaataaagaatcaatagagtaaaaaggcatcctatggaatgggagaaaatatctgcaaaccatgttatctgataaggggctaatatccaaaatatataaggaactgctacaacagtggcaaaaaaaccccaaataacccactgaaaaaatagaccaaagactcgaataggtatttctccaaaaaaaaa

SEQ ID NO: 123425 - DNA, 366 bp, Homo sapiens
gccattgcttttggtgttttagtcatgaagtctttgcccatgcctatatcctgaatggtattgcctaggttttcttctagggtttttatggttttaggtcttacgtttaagtctttaatccatcttgagtaaatttttgtataaggtgtaaggaagggatccattttcagctttctgcatatggctagccagttttcccaacaccgtttattaaatagggaatcctttccccattgcttgtttttgtcaggtttgtcaaagatcagatggtggtagatgtgtggcgttatttctgaggcctctgttctgttccattggttccaatggtactgttccaatggtactgtaccagtaccattatagttt

SEQ ID NO: 123426 - DNA, 803 bp, Homo sapiens
ctacaggtagtattatactcaagagtgaaagactgaaagctttcctcccaagatcatgaacaaggcaagaatgcacacttttgcccttttcttgtacacttaaaattctagtcagggtcatcagacaatgaagatatataaaaggcatccaagttgaaaagaaaaaaaagaaaaaaaaaatggaaattatctctcttcataaagatgatgatattataaaaatgctttaaactgcagaaaaaccatattagagctaatgaacaatattcagcaagccccacaggatagaacattaaatcgtaaaaatcagttatagttgtgtacactagcaatgaacaatctgaaaattgaattaagaaagcaattccatttataatagcatcaaaataaatcatattttaaggagaatatttcactaaacagatgaaagacttgtacattgaaaaatcacaaaatattggagaagaacttaaagattacctggatttttaaaaaggacatcctgtgggtaatgagttagaagactaaatatttataatatggcaatactagccatagagatctacagatttaatgtaatcctaattattattcccatgagcatttatttttgggaaaaagaaagagcaaattctaaagatcctattaaattgcaagagatctgagtaaccaaactttgagtaagaaaaaccaaggtggaagacacacttctagatttcaaaatttactagaaaatctagagtaatcaaagcaggctgatgatcaaataagaatacacacagtgattaatggaagagatgaag

SEQ ID NO: 123427 - DNA, 400 bp, Homo sapiens
agttcagaatgaagagagaattgtttcaaccacctgttctgcatgagagcctttcaccattttctgtgtgtttgtgaaatgaccattctgaagttcagatccacatataagactcattcaaaatgatcttcctcaatggaaaccgggggtgagatttgaacctgagagagacagtctgctctggttgatgaacagcatagctctggacccagactgcctgggtttacatctcagctctgccacttctaactttgtgattcaggcaaattatttaactcccagtttttttatctgtaacatggggataataacagcataagagcactagccacactggatggctataagattgaaatcaattactatgtgtaaaaatcttagaatagggcctggcataaag

SEQ ID NO: 123428 - DNA, 307 bp, Homo sapiens
tagggtccaggtgcttttacttgaaagggtttcagacatcaggaatatttatcttttgtctattcttacaacgttattccttaagaacttaccagattgatgactcatcagttctactcatagagaaataaaaatatataaatacactaatattgtacacaagtgtgtgcagcagcattacttatagtagccaaaaagtggaaacaacccaaatgtccatcagctgatgaatggataaataaaatatggtatgtacatacaatggaatattatttagcaataaaaagagatgatgtactgattcctg

SEQ ID NO: 123429 - DNA, 652 bp, Homo sapiens
cacccggaactccagctggcccgcaagggccgcacgcagccccggttcctgctcgtgcctctccctccacacctccctgcaagctgagggagtgggctccagccttggccagcccagaaaggggctcccacagtgcagtgggggcgctgaagggctcctcaaatgccgccaaagtgggagcccaggcaggggaggtgccgagagcaagtgagggctctgacgactgccagcatgctgtcacctctcagtatgactaaaagttgatgaaactgatttttatagaagcttactatttagaacttaatgatacataacactagtgtactttgaggaaatttcattgaattgttgggcacaactgttgttcttgtatacttagcactttcccctttgttgtgaagacagagcccttctcttgctttaggacactatactttgcatcgatccttcacccacagtaagaatatcgataatattgccttgcttatattaccataagtgaccaacactggcctatctgtttatcacctactcctggaaactgtgattgattcagaactaacaggtataccaaccagggtgattagaatcctattcttggtaattgacgtaatgtcaacactaaatacgatacaaacctaaagcaactgtg

SEQ ID NO: 123430 - DNA, 417 bp, Homo sapiens
ggttttggtgaggagatttcccaccccagccaactttctttgggcacctagcatgcataaaaaatagtcctttgattttgataagctattgaatttggaggttttattttactgcagcctaacttagactaacctgaataatacattatctaccataatcttttcatcatcaaaagagaaattcacagcagtgcccagtctcaggtgaagatttctgtcagagagacaattcatacttactgtgtaataaatttctttttcaagcttagagaaagagatgaagaagagagactgccaatggctctgtggagatacagctaaggaccactgtgaaatttttgtttgtaaaatgcttctagtgaaatgttcagagttttaaccttttgtattcacagatataaatcaattttctggctt

SEQ ID NO: 123431 - DNA, 319 bp, Homo sapiens
gtccagtccatcacgttagcaatgcaatagaacacgataactaagcaatgatgcttgtttaagcataatggcagtcagaaagaaatcacaattttagggttggaaaatatctccaatgccccaaaggaaagatgatcttatgataaccacatttcttccggatgccttcccctcaataaaaataaagttgcaaccatttaaaataatgcaaaacagtatgatttaagtggaatacaaagtggggactctgactgtataatccttggttactgactaggagaagattctgcataattatgcaaacccttcaaaatactgg

SEQ ID NO: 123432 - DNA, 304 bp, Homo sapiens
cagctatttgacagggaggcactattcttggatgtccatctgcacactagattcatgagtgttggggattacctgggcatcccaaaccatattacagtgaattatgttattgttatttatttaacatgtacatatattttcaaaatatatagaaaatgtcagaatcggaaaaaaaatcatagggacttaggcagttattggagcttgctttaaaaacccatatcagtgttgaccagtatctgggtttcaagagaattgtcaggaaaagcagtcttaggtcaggagtggtgctcacacccataat

SEQ ID NO: 123433 - DNA, 589 bp, Homo sapiens
tggcagtggtaatggacagagctgatgttgagacccggaatcctcgcattgcactcacgtgtcaagtttgctgaaagtgaagcccacctgcctttctgaacgctgagattagacctataatttaaactcttaaaatttttcatatttataaagtaacttttgtttttcataaaacatattgttgatctttctaatttaagaaaaagatatttctggtggtggttaactgtccacttaatttctcagtcagccgggggtgggtagtccttctggccttagcttaattactaaccttgaaaatttttattgtttttagggcctctgtctgtttcagtattgttgctgttgtatcatatgataatgcagcaaacacccctgtaactaccaccaggttaaggactagaacattgctgtgtctggaagctctctgcatcctacccaattacaaccccttctcttctcccttgaggtagccactaacctggcttttgtgataatcatcccctcattttctttacattttcctgaatgacatgttgtttacttttacctgtttatgaactttattaagcaactggctcatgatcat

SEQ ID NO: 123434 - DNA, 751 bp, Homo sapiens
tcagtgccaaaagcaatgctcatcagtagcatttgacatatttgagcatttattctttcttgaagctcttcatttggtttctagaacaactctctgtcttgagaaaagtgactctcctcctatcacttagtctccttgaggatctttctcatctccatgacctccatttgagggccccagaggtgattctaggacctcttcgccatacccactccctcctttggttgcatcacccatcttactattgtcaatgcctactgctatgcttgactcccaaatttaaacctccagtgcagatggctttcctgaacaccatactctatattcagctgcctaaccaatatctccacttataagtctaataggcatctcaaacttaacatgatgaaaactaaagtgatattttcaccagacctgctcctctgggttactttttcccatttcagtaaatgacaattccattttccacttgtccagaagaaaagtctttctctttctcacatcccacatccaacacatcagcaaatcatgtcagcttcttagcacctctctcttcttacctattccacatgtgcaccttaatgcaagccacaatcatcttttccctgggccattccagtagcttcctctcctgcttccacccttgctgcaccatcatttaatctccacatgggtagccagagccatgcttttaacacatgaggcagagtatgtccgtcctttacgcacaactcatccagtagctccccat

SEQ ID NO: 123435 - DNA, 317 bp, Homo sapiens
ccttggcttatagatgcactgtcagtccagtctctgcctccatcatcatgaggcaaccccacccccatgcctgtgtatcctgtcgcgcacgaccttcctgtgtgtgtgtgcatttgtgtgtgtacatgtgtgcacgcatgcatgtgtgtgcacctgtgtgttctcattcccctcctcttctaaggacaccagtcattggatcggggcccacctcttaccttcatcacatctgcaaagaccttatttccaactaaggccacattcccaggtcctgggggcagggactggtcgacgcggccgcgaatttagtagtagta

SEQ ID NO: 123436 - DNA, 761 bp, Homo sapiens
gcagggaggagcaaagatggccgaataggaacagctccggtctacagctcccagcgtgagcgatggagaagacggtgatttctgcatttccatctgagatatttctgcagccaccccaaccttcagcaaccaccacccggatcagtcagcagccatcaacgttgaggcaagaccctcctccagcaaaaagattacaactcaatgaagactcagatgattattagcatttttattagtaatatattaataaatattgtgttttattaatagcaataaagtgtttttaattaagtgatctggaactgaacctgtaatatgtccaaggtatgcttctaatcagccaaaatgataaaccatcagattgaaaaaacttccagagttaatatattaaaagagtttcactcttgttgcccagtctggagtgcaatggcataaccttggctgactgcaacttatgcctcccaggttcaagcaattctcctgtctcagcctcccgagtagctgggattacaggcgtctgccaccacacctggctaattttttgtatttttagtagagatggggtttcaccatgttggccaggttggtctcgaactcctaatatcaggtgatccacccgcctcggcctcccaaagtgctgggattacaagtgtgagccaccatgcccagcttggtcattttcttactgattttcaaatgctctctctgtattagaaagactagcacctgcctatgttataactagcgaatatttttccaag

SEQ ID NO: 123437 - DNA, 417 bp, Homo sapiens
tatctgagagtggtaattgatgtgcaagcaattcaaagtggatggcacatgtatatgtgtatgtttcatgatatatatatatgtgcgctgtgtggtgtcgagccctgaattgtgaaggcagagtgagagaggtatttatagaggatccgtgtcgctctcctgcaaaacctgtgtcacgcggttgcccagcctccctggaatgagcatcagtcaggtgtattatcatgcaatgaccttgggactgttccttctggtctaaagcactgagcacctgagtcatgagggtgtccaatgagcagggaggtcctcatgggctggagcatcagggcaggggccatgcagagcagacgcacctggagcctgacctcgaaccttcatatggatccccaagaactagcacatggggagagagaccct

SEQ ID NO: 123438 - DNA, 525 bp, Homo sapiens
aggcagggagggaggcctggaggcccggacgcggccgttagatggcttcagagtgtggcttcctgacccttgcagctcacgatacgatcgcccaatggagcaaagaagaacaccccagccaccccctggaagctactcccattcccctcaaacggctggcacccaaagtggaccgcaggcttcacagctggggctctagggccaggcaggcccaaagcagcatctcagatttctgtccttgctggagtttgaccttgggcaagacacacagctgtcctgaagctaacgagtcttgtttctaaactggggtaataatggcacccacctggcggttggtggaaaaggctgaataggatgtgtgctcccagtgctcgggccagagcctgccacttagcatttgctcaataaataagagaaagactggtgggaggaggagagttagagcaccaccctccctgaaacagaggtgcagaatggccaggagtgacaggcaccacttgcacagctcaggacacacacccagag

SEQ ID NO: 123439 - DNA, 366 bp, Homo sapiens
cccgtcattcacctcactgcatctcaccaggtaggcatcgtatcatctcacgtcatcacgagaagaacgcacccctgctcagactgaatgggaatactgataaacacgaaaacatgctcaacttctctaataatcaaagaaatacatattaaaatgagatgccactgtttcttctatcactgggactgaaatggaaagtattcatcatatcctttgctggtgagaaagccggacgaagaaagatcagagagagcgccacccccattccccacagcgttccagctctggccctgctctgtggctgcccctcaagcctgaaaatcacctcatattcttacaataaatcccttctcctctcttgcttcc

SEQ ID NO: 123440 - DNA, 309 bp, Homo sapiens
agaggcgtaccaccatgcccggctaattttttagtagaggcagggtttcaccatgttgatcaggctggttaagagcaggattttcatcaaggccttgaataatttcctttatcttttcatagttgactaccttaagagtggctttattcatgcctgccaggaggcatgttatcttatgatcttgcctttacctgtctggggaagttggctgataatcccactgggatcagttctggggacaacgaaggccccaactgggttatgagctgcatcttggtggtggagagcatcagtgtgagcctgagcagc

SEQ ID NO: 123441 - DNA, 494 bp, Homo sapiens
aactgtcaaatctgaccagagacgtccccatctttgtgtgtgccatggccttccccacggtcccatgtccactccacgtttttgagccccgctatcggcttatgataagaagatgcatggaaactggcaccaagcggtttggcatgtgtttatctgctgagcacgcggggctttcagagtatggatgcatgctggagattaaggacgtgagaacgtttcctgatggaagttctgttgtagacgcgattggcatcagtcggttccgagtgctaagccaccgccacagagatggctataacacagcggacattgaatatcttgaagatgaaaaggtggagggtccagagtatgaagaacttgccgctctccacgattctgtgcatcaacagtctgtttcctggttcgcgtctctccaggatcgcatgaaagaacaaattttaagtcattttggggtaatgccagacagagaacctgagcctcaggtatgccctccc

SEQ ID NO: 123442 - DNA, 886 bp, Homo sapiens
  misc_feature (675)..(675): n is a, c, g, or t
  misc_feature (678)..(678): n is a, c, g, or t
  misc_feature (682)..(682): n is a, c, g, or t
  misc_feature (687)..(688): n is a, c, g, or t
  misc_feature (690)..(690): n is a, c, g, or t
  misc_feature (692)..(694): n is a, c, g, or t
  misc_feature (697)..(697): n is a, c, g, or t
  misc_feature (703)..(703): n is a, c, g, or t
  misc_feature (719)..(719): n is a, c, g, or t
  misc_feature (726)..(726): n is a, c, g, or t
  misc_feature (876)..(876): n is a, c, g, or t
agtgggggctcacgtctgtaatcctagcattttgggaggccaaggctggtagaccgcgaggtcaggagttcgagaccagcctgaccaacatggtgaaaccccatctctactaaaaatacaaaaattagccaggcatggtggcgcatgcctgtaatcccagctacatgggaggctaaggcaggagaatcgcttgaacccgggagatggaggttgcagtgagccgagattgcgtcactgcattccagcctgggtgacagagcaagactccgtcccccaaaaaataaaataaaataaaaataaaaataaaataaataggaaaaataacaagttgagaaggggagggcactaggtgtgtgagcaagtaattggcagggaagaaggaagtaggagttcagttgtagacatagtgaatttgcagtatttgtatgacagcaaaaacacaagatttttagttttaaagacaaaaacagaagcgaagaagtaaaatggaaatcacataatgtacttaatgggtagatcctaaaactactactataagccagtggctgatgcctgtaatcccagcactttgggaggcaaggaaggaggatcacttgagggccaggagttcaaggccagcctgggtaatatagcaagaacccatctcttaaaaaatactaagtcaaaaaaaccacnttnggtnacccnntntnnnganagtggnccgaaatacgcggggntaccttngggcgccaaggcatcggggaccgggagccccctaaaggaagcgggggggggcgaaaagggcaagtaagaacccaccccaggtaaccgccaaaaatgcaaaaccgggccataggggagaccccgcgcaaacccgcgtgccgcctctagtgnccccgcgcct

SEQ ID NO: 123443 - DNA, 631 bp, Homo sapiens
gaacaagtggggagaaatcttaacatcatgcacaagggcaacgggtcccagtaacatctttaacgttatgggccttagtcaggactgctttgtccccactctacacagaagagcctaaaaagggaagggaggaagaaccatcatctaccttaccacctcctccttctccctcagccccgcgttaccgagtaaaggtgccacagaggagacaaatattttccctgagccctctctcccaatatattggaaaaaatacaagggatacactactgttatgggaccctgtcttagtcaagtggaattagaagggagctcttgacctgcccagtgatgcaagatcaacaagacaatcagtaagaaacgtacaaacattaagaagagcctattcagaaaagacagtcttccagttaccttataaaggcaaggaagaactggtagtttgaaataaaataatttcaaaaagtgctgtaccccctgagtattctgctgtaataaggatgaaatcccataagtcaattttttctcgggattgtgaagttcactgcacacaaccagccttattttacatctctttcttttatttcaaccatctggggactgggcagaagtcatggtcagaggggcacatatg

SEQ ID NO: 123444 - DNA, 708 bp, Homo sapiens
aggggcagaacaagctggggtgtggagtcaggggtcagggcacagacagcacctcttgtcttgcagagagaatgctagcaatttgcaagttacttgaaaaggtttgtgattttccaacgccctgagtaattctagccaaaatgcgtgactcgcctcacactagatgcttgctgtaattgtgtctctgtattaaactgaccgttctttggagcttcagaatggaccaggaggaaaaggtaaataccaacctcgctacaacctcagaggcatcaacgccctcctgctacagacgcatctgttctcgcctggctcctgccggctgccctgggagaggccacaaaatgccctccacggagacaaggcctgagaaccttcgggacgcccgctgccgctcactgtgttgaagaactgcccgttccgcaccctgggccctacacacacggctctgcggaggacgaggaagtgccgtcaggtgagacttcaccgtgaaatatcttctgagacacaacaatctccctgaattaaaactacagactctaatttataaaaactgtctgtttcaaaagctccaagtgtttacattctccatcattccttcttctaatttattttaggaaataatgcagagtactcacaaaaatttatatagaaagatgttcattgcagaattcattataataaaaacctttaaatgctctgagtgcccag

SEQ ID NO: 123445 - DNA, 397 bp, Homo sapiens
catatattataaggtttttggaaacatttacatttggtctcacatattcacagaagcaatctgactaaaatctgagatttgtaagtataagtagcaaaattttaacccaggggactttaaaatgttttctttgcaccgatttgtattcattcagtaaatgtattacatgacttctgtagggttccgatgtctaatagctgaggtaacaaagaaaataagtcacagtccttggaatttacattctagtaaatgtaggttgctaaattgtattagactatggtgtagtcagtgtcacatgcatggcaaggaaaagtgaatacggggaccaatggggtcaccataaaggggaatgatagactgtaccagggttggggggtggagagctaatgaaagctga

SEQ ID NO: 123446 - DNA, 317 bp, Homo sapiens
atccgcggaaagcctgctttcagctgctcagcaggtgggaacacttgctcctccagcattccaccatgagacaaaggaaaaagtcgcttctgtgtgtccaccagcacacgactcccatgtactcctgcacgtcacgtggacgagctaaagaagactcctctgctccacagccaccatcacactttcttgtttttgttattttttgagacggagtcggagtctcgctctgtcgcccaggctggagtgcagtgacacgatctcagctaactgcaagctccacctcctgagttcacgccattctcctgcctcagcctccc

SEQ ID NO: 123447 - DNA, 620 bp, Homo sapiens
agctggggaacaatcacttcccagttgctgctgggagccgtggcatagaggtgggaatctatcagtcatctcccagctcccatactggtctaagaggcgggcattccagggggaagacaaggctttgggagtggcactgccacagagttctccttggagggctccagaggatgggcagggcttccatctccccaggcagccctcagggagggactgtagctgctggagcctgagtgccatatgagggaggtgtgagcacttcccttctttggatttgaggtcagacctacagcgacacttctagctagtggggactgcccaaggccaggtatgagcagctgtcagggctgattggtgttctaagctccccatgtggccttaaacagcaggaatgaacagtcagggcatctgccatggcagggtattgccatgccagcctgctgatggcatgagctaaacaggcacagggaagaaggcaggcagatctcacatggaaaagctaaatgtctctggaaaggggacttctgcagtgggtggccaattcctgccaatgcaaggtggtgcctagatttcagttgcactttctccagatttcacatatgggtggttgccactgagct

SEQ ID NO: 123448 - DNA, 637 bp, Homo sapiens
tctgttctcccactacaatggaactttcttgtcttattcactgaggtatcctatggtcgaaaagagcttggcagatagtacataaaatttacatgtgtttaataatacatagcgcaaggtgcagtggctcacgcctgtaatctcggcattttgggaggtcgaggtagggagatcacttgagccaggaccagcctgggcaatatagtgagacctcgtctctgtaaagaattgaaaaaaacaaatacacgaataaacagcaccttgctgtctcaagggccagcagaatccttactcatagcccagagtccttctcttctctagcaaggctacatcctttctgtaaacctctctcacattgaactcctctcttcttcccatgcctaaaaggaacccttgtccccagaacagacatttacactcacccacagagcttcctgaaataggtgtaaagaccctgctgcaaacataagactatgatgggcagaactgagcctgggtccacacactgcacccaacacaaggcatagggaaccacctgtccctcttcccactttaagcaggcctggctctccccaccatgctgtagcaggaatgggcagggcagagattggggctgggatgcaagtgaaggaggtgt

SEQ ID NO: 123449 - DNA, 836 bp, Homo sapiens
gcctgaaatgccaagtaggactcaggactctcctgtcctcaaaggctgactttgaagagccctgaaactcacaagcaacatgatccatttcccgtctcagatacagtttcctcctgaactggtttttatttgcaaccattatttctccatcatcagaggctggaaaatgcaaaaaataaaggcagatttagaaagtgggtacaaataagtttcaaaaaataaagctaagattctttattttaattagagacgatggctagaaaccactgaaggggagaattaaaaaagagaaaggctttcacagacaaaaaaaattaagtgagctaaaaaagcaactttacagagacaaacatccctgacttagcaattttgctagaactgttcattttcgtctcggctgggaccaacagaaactgcatggcaaacgtttttcatgtcccgcatggcctgctgcccacgtaacacctcaatggaagccacatcaagctccaaacttggccgccttgctcaacatgagcgagccagcccgtgacagatccaagaaggagaatacaaatcctcaccatggatgatggctgcagacagcctattttttaaaaataatagtttaaagtgaatttaacagttccacattacaaagggccttcaaactgagtgctccatttccccatggcatgaagggcaatttcagctcctcctggcccaaacttcaactattaaacaggctatccattcagtttctatagacaagactactactactcagaaaatggtattcagaatataatatactgatgtagtaagattgcactgcaatgctattgtttccaactcaa

SEQ ID NO: 123450 - DNA, 783 bp, Homo sapiens
agggcaggttcagaaagggagaagactgtgataatttactattcccacatatctctaaacctagcaaatgtcttccgcacaatgcctagcccagtcagtgcatgtacccattatgtgttgctgctgctattggatgtagaaaaatagactagaacttaatattggttcaattattctttttctttttttctgagacaaggtctcactctgttactcagggtggtgtgtagtggtgcaattacagttcactgcagctttgactcctgggctcaagcgatcctcccaccttagcctacagaatagctgggactacaagcacatgccaccacatctgcctatttttttttattttgttgtagagatggggtctcattatgttgccccaggctggtttggaactcctaggctcaagtgatcttcctgccttggactcccaaagtgctgagatttaggtgcaagccacggtacccagaccaattattcttttactttgaaaaaaatagactgtaaatatttttacaagattagatattaacagctaggatccacaaagcacataaagtttatacttttacacctaagttacaattaaaaatatataaacttacattttaaatttatatttatgcatgtttacatccctctactcaagcatgcagtgaatatgggtaacataaaatatgaaaagagaaaaatagaaaaacgcattctctaaagcctatctctttagatcagaaacagaaactcaaagttttgagatgagaggctttctggactctgcga

SEQ ID NO: 123451 - DNA, 310 bp, Homo sapiens
aataatgagaagtgggaaggtatggcttttctttcactcttctctcattttccttttggttgtcggtggcattgaatgagatatggaggctaggattctggcagaggggtttgtgtgtgtgtgtattcacacagagaattcatagtcttacgtataaaacatgttttgatgttttatgtctcattgaataaagtacttgatgcccttgtctttttcaaatgggattacttaggcttctattgatgttacatttttgtttatgtgattgttttttagtaggtacagtcataatgatgtttcagtcaatgat

SEQ ID NO: 123452 - DNA, 317 bp, Homo sapiens
caaggtgtggccatgagactaagtgtgaaccaatgaaatctgaggatcattcgggcttcccaggcattcacctccaagcttacccccaccagccagcttgatgcagacaaacatgccgactgtgggaagtattaaagatggcaggaaggccaggcgtggtggctcacacctgtaatcctaatactttgggaggccaaggtggaggaattgcctgagctcaggagtttgagaccagcctgggcaacacggtaaaacccagtagctactaaaatccaaaaaattagatgggcgtggtggtgtgcccctgtaatcccagc

SEQ ID NO: 123453 - DNA, 449 bp, Homo sapiens
gtggaggggcctcatctctctggtccagctggaaatgtgattgctgcctggggtggccatgactaagggattcctgtctcagctgcctctatatggagaactgagctgaactggtaaacgctcagtttccctttcagaaaagaatgttactctcaagagcagcagtgattcaaatggccttttgactttaaaaaattctccatttaaaaatgtagaagcattttatcctatacaattataaacattattggtagctaataaaaaattttgatgaggcagcagatcattaagaaaatacatatagaccttgcacacttcattttgacttccaatagataaatagatccatttcacaaagcatgtgcatttgtcaggttgctttttcttggttttgtttttttatttgacttaagataggtctatagatgagtgtttgccttcgttttctg

SEQ ID NO: 123454 - DNA, 283 bp, Homo sapiens
ctctttgccttcatctcccaggcttctcctgctcactgtgtgtctgccctatgcttctatgtgtgcctgccctccccctaatctcttctctcgcttggcagtaaataacacgtgaccccaggtggtcactctggaaggccattctgaaactctaacttctgccagctcacatcacagacccagtctttccacttcccacttcccaattccaaattctctagagggacaatctgattggcttagcttgggttccacgctcaccgtatcggttttactgttgcag

SEQ ID NO: 123455 - DNA, 932 bp, Homo sapiens
acatgttttcatgtccccttctattgctgagcggattcaatcccaaggatatgccattcagttgttagtgaacatctgtgttgtttccagtgtgacgccattccaaataaggcttctaggaacattcacattcaaactcttaaaccttaataataagaggaaaaaaatctaaaaatcaggaaaatatttgaacagacacttcacccaaaaagatataccaatggcaaataatcacatgaaaagatgcttaaccccatttatcactggagaaattcagattaaaacctcaacaagatatccctccacaagtattagagtgactaacatttaaaaagaccaaccattgcaagtgttggtgaggatgtggagctattggaatgcttgtccactgctgctgggaatataaaatgacacagccactttggaaaacagttcaaccatctctcaaaaaaggtaaatatgcatctatcatatgaaccagccactgcatttttaggtggttacccaagagaaatgaaagcacctgtgcacacaaatgcctgctcatgaatgttcagagcaactttatgtttaataagaatctgtgtttttaaaatcagccaggtaatcctaataatgagacaggttttggaaccactgggctggacactcggttatatatgattgcttgagaaaaatcctcttattcctcagatagctatataagcagggaaggggttaaattccaaatttagcctgtcggggaaggaatgtcatttaatgaatctatgtaatgttggacaagtcactttttatctttttcgaactgtattttgtacatttgaaccctaagagggaggttgagcgatccccagcctgcaggattctatactttgatgatctcagagaactccacaataaacccactcggtgtccctaacagggtagcatga

SEQ ID NO: 123456 - DNA, 1108 bp, Homo sapiens
gagaattaaatgaggaggccagagccctagctgctgcctcccctccatgccctcagagaaagtgggagtgctggcatttggctaacaggacaggctattttgggcccaggtgttctttctgacctctctgtgatttctatggtgggtgtcaaaggatggctgggaaaggggatttttaggtgtgctaacatcccttgcctatgagtgattcactatcttctcgcaccatctggtttcacccgggctgcaaagcctagtgtggtgtcccataccctgcaaagccctatttgggttatttaccaaatgccaccatgccatctccacagcatctggcagacgaaccaggtggggctgctattgcttctgggtatttacgggatgcagatttttctgcccaccgttgttttgggagggatttccccctccctcaggtagagttgttctcagagatatctgtaattggcccttcccatttaagagtcagccacgaatgatttattctaaaatgatagacccaggtagagaggttacccaccctccgtcacagagtggccagctgtgtcccctgcttccgggaggtgggaatgcatgtggaggggtcgttatttcctaactctcttgctctggcagcctgaagagctgtctgtgccctgaacaacagcttagggagctggaggaaagagaaggaggtatgcatttgagggagagaggcccactgggttggacaagaaggtaaaagagggctggtttggcccctaagggaaggacaggaaagcacccgcttgttccctgtgtggatgcagtgtttgtccagctgaaggcagcctcactcggctgactacctgatgagtgattttccccaagctgacagctgctccaacacatttcacctacaagtcctgacaaagtggtgtgttcttttggggctgttattactgcagcaggcatttggaacaatctggaagaatggggtgccaaaggacacccttgaagccgtttctgagtatccgtcccttcttttctctccgatcctctagctttttttggcttatgaaaaattgggcccatccctttcgaatgtccattgtgctgttagtaatgaggatac

SEQ ID NO: 123457 - DNA, 683 bp, Homo sapiens
taagaagtttcattatatgaatgcaaatagttcaatttacctgtggttcccaacctttgctgcttaaaaaatgatgctgaagtaaatatatctgtaacatgaattcttagcaataggattgctctgtcagagaacatgtgtgatttggattgatagtgtcaaactgccctccataatggcctctattatggaggctagtggggctatgagttcccactaggagtgtatgcaagtgcctgtctccccacagcttcaccaatgttgtaaatatatgtctaacttttggatttgtgccaaaccaatagacaagaagtggaaatgcggtttggttctaattagtatttctctgataaaacatttgaacatgttttcatgtttaagggtcagttgcattaatttttctgggaactatctactcatgttttttgaccattattctgtcaggctatcctgtttgttttctaggaccttctcatgtattaaaatgattaatggtgggtgtagtagttcatgcccataatcctagcagtttgggaggctgaggcgggaggatagctagaccccaggagttcaagaccagcctggacaacatagcaagaccttctctctacaaaaactcaaaaaattagccaggtgtggtggtgcatacctgcggtcccggctacttggcaagctgaggtggg

SEQ ID NO: 123458 - DNA, 580 bp, Homo sapiens
cttttctatccacaagtaccaataaattattacactaatatgttaaatattttcatatacaaaaccaccacaatctgtaaatcactaacttgctgggtcatcctgtgaaattaaagcctttctaagtttcttccctcatctgtacaatgtagatatgagattaatctctattgccctgtgtgtatatctctttgcttctatggtcctgaaaagaggaatggttgacgaaaagatataaagtgatcattagaatgaattggtagtaaatccagagatggccttgcctgtggccagggtacacacctatgaagcccaactcagagcaaactgctgaagacaggaaagggagtaatcactgtccttatcccacataagagtcttaagttgcaaactagttaaaagaattccaaagcagtcacaatggtctttgatgagaatggcagtcaaagataagggaaattacttacaaaagaatacttctaaggcaagtactccaggagataaataaaacccgaaaaatataagattgtgtatgcatgtgtatagatacctattaaaacacaaattttaaacagctcca

SEQ ID NO: 123459 - DNA, 412 bp, Homo sapiens
aactgaatctcaaacttgatttaaatctctctttcacctagagcatctggacccttctctaaagcacctgaagggagagaagagatagagggcattctgtcctttttctccttctgcctctttctcatctgggatcaacctgtctcccgcaaaggttggggacagagaggaagcactggggtcacagggaaggtgaatgaacacctctctgctcagctggatacagatgctgtcctcttattgctgctcagatgttagctcagtgtcccacatctcagctccgtgactcgggctctgccttcagttggaacttttcccactcttcctgctgccctcctactactgcaggggtcctctcccccaagggcagccatcttggttggggtacaggcaagatagcacaagtcaggct

SEQ ID NO: 123460 - DNA, 440 bp, Homo sapiens
tttgtaaatatactttaaaaacattgattcttaccactgagtttaaacaaccaaaaaaaaatcccaaggtgcattgaattgtgtacttcaaatgggtgaaccttaataatatgtaaattatatcccagtaaaggtgttaaaaaatagtactttaaaggaatctatggtagttttgaaaataaggcagttttccatactttgttaaactctggagaagatgacactttactactggtacctgctagagtaagacttatctagtattaacaaaattagggtttattaatggtataggatgatccaggtaatgggggaaaaaaaccgagcatcctgttatctaatgtactatccagtaaactactctagctttttttcatgaactttttctaaaggctttctagggcctcgtcttggtttgaaagttcacagctacccttcag

SEQ ID NO: 123461 - DNA, 4025 bp, Homo sapiens
gtttttcttgttttttgactgttaggttgataagactatgaactgtgtaatagtagaacagtggctaacatttattcatacttaagaacatgaataatttctgccttgctaaaatgtgactgaaatggttttgacttggcatctgaaagtatacaatgtgttcaacaagtcatgcatcagatttgtgggaggtattgtactgaaacctaaatttcagtcaacatttgaaaagaagagctgggcattccttcctggtgatctttacctatagtttatctatctgtttttcttctgtttctttaagattagtttgacttttattattatttttttaattaacttctgtgaagttgtttactctgaaaattgtactggaatattttaagccaagctgatctttcaccaggtgtactgtatgtaagggcttttcctgctagcaagatgcttaaacaggatcatgttattggtcgtctgagctatttagttgttttacaaaaccacagcattgtatcagataagattttgataaaaagttttgtgcacatttccaggggcgggagggttgacatttccctgaaatttcttgattagaatgagtaaatactggtgtttgatacctgtcttaatgaacatgctcataaggtgactgataagttgtaaatatacctgagaaacaaaggggtagttttgatattctggtgtcagtatggaagatcttacacatttatttaatactcaaatgtatgaagatgtttgtttgtagcataacaacagcacagtagccttgacttagtttcctttggttagtactgtaccttttttgccatggccagtgctccccatccctatgaagacattttatttatttcactctgtaacctgaaatgaataggaacaagggttttaaaccatgttacattaacttatttctgacattataaattagcctagaatattacaggaacatgattgttatataatttatatcagaacctttctataaatatgtgcttattacatttgaaatgcttccaatgtactttatttgctgtttgtaattccaaaaaggatatgcaaaccagtctgtctatttcatggatatttaatagtgagatcttccatgttgaaggtaatgtatttttttttaagattttaaaattgctattttgttacaaaatagagacctattaacagtttgagagctccttatgtgccctcagggaaagaaccctctgtgcaacagaactacacaaaacatcttcagcacgttctgagggtgaatatatactacataaattgatcttgtgtatttaaccttatctttttaattttaaaattgaaattttgaaacttggttgtgctctgctggagggggttgggataaactgcttagatgtttgcctacttgtccagtgaaattacatttgcatcagtatatgtatatacctgccaaccttattggtatgtctcagaacatttatattaaaataatgcttgtcttgcagcaggtgatcccataaaacaataactccctgttcttaaaaacttactctctttttcactaacaacataggaattgtttctgtgttgagattattctgtgttgcatccattctctatgtagtggtcaccttctgtctgtcatggtgggcttaatgtgaagtaaagccattggttctctgccactttcgaagaaagggcagttcatctgatccttcttcagaatggtacctactgatatcatcgaggaaaatgttacaaatcagacctaggatatgactttttaaaattgaggcatttcccgtcatttggcctttttaccaacaagatgtgatgtacaaatttggaatcaaaggatacaaagcaacaagagaggaaatgtgtaatgtgggtaaccaaactgcatatgttacctattgtctaatcagaaaaaatagtctgaggtctggaaagcaggaaagtggtggttattttctttcattttttgtgtttttgttttttaatttctaagttccattctgaaatccatgtgccgcattcagttactgtggttgtagcatcagtttttttgtggtttcatttcattttatgaattcagaggaagttacatatatattttttctagttggtacctgaacaaagcagattcccttgcctttgctgccacgtcttattttcaatgccatgtgataaaccagtgtcatacatgaaagttgtgcattgtaattttcaaaaaaaagggagttcattaggccagtggcactgatttttccttcccatcatagctatttattctagtaagaggataataaaagaaatttcctatacaagaactgaaattttccatttgtatggatctagtcactttcagatttcaatttgaggttaagtatataaagcacatcccaattttatatgctgccttgagaaaattacaggatgcacggcaatttgtaggaatttcaaatgggatcatttaaacatttgaaaaattattttaaaaaccatctagtttgcttttggattttagacattaaagcctatgttgtcttgttaacaggggtggaatgtataaccatcagattcagcatgtgatttcacctttgaatctgagtatttcttccctatcttctttgagtcatttttggagcagactgtcaccagtattgataactaagcattaaagggaaaagttgcattgcaactatgcattggtttcctggaagaacttttcttttgttttagtgaatgaagaggcttgatgggatcacttactgtaactccttctacataaggaccccttctgcaagcagaacacaaaagaacatgctcaaggagtatcccattttctggataaattgaagaagtttgctagtaatgtctttatactagcgtcttccttgtatccctttgctggcaagggaatacaaggcgtcaagaccacagatcaaaacaccccacatttgagtggagtcttatttttactccaagagcagttattcccttctagtctaaaattggcagttttttcttttttttaataaaatttttaaaatattcccaaaccagtggaacacagacactggctgcacttagtactgccaaaagccaaggtcatttgcacatattccatcaacctgtcgagaattaggcctcactttataacccaaggcatggaagtgcatgcattctcttagctgggcaaacaattatactgtagttgtgatacaacacatgtggcttttatttgtactgcacatatccactgtacagccacttgggagtatcgtggttagcttgcagcaactgctgtctgcatttatactgtttattgcatattcttttccctggaagtgaaagagaaatgtttttcttgttgcattgattacattttataaatttgcttagctggaaagtttgggaaaagaggcctgtttgtcaattgtacaaccgattgtgaagctctagtgtgaatatttttacgtctgtattagacattttctttgcaaatctattgttcgattgaaatgtaaatgaaattaaagatggtgtacacccatcatgtaaaaagcaggcaccatctctaagatggatttaatgctcatttttaaggcatatactcagcttctatttaaaactataatttaaaataattctgtacaatgaaatggggaatatatatgggaataaattctattccatttatttcaatttgaatttccaaattgtaatgtttccctttgtgctataggaataggattaaatgggggaagactaggatttataaggcctgtatatggggggagggcagagatggaacaatgagggttgtgatgatagtgaatagcaaagagtgaattctgtgtgtttttgctgtagcactgaagtgaagagatattagctttggctgttcacaaaatagagcatcatgattttcagtgtttgagagaaaattgatggaaaaagtttgcagtacttgacatgtatttgcatgcacaaaataaaattatttgtccaccttaaaa

SEQ ID NO: 123462 - DNA, 3971 bp, Homo sapiens
gtttttcttgttttttgactgttaggttgataagactatgaactgtgtaatagtagaacagtggctaacatttattcatacttaagaacatgaataatttctgccttgctaaaatgtgactgaaatggttttgacttggcatctgaaagtatacaatgtgttcaacaagtcatgcatcagatttgtgggaggtattgtactgaaacctaaatttcagtcaacatttgaaaagaagagctgggcattccttcctggtgatctttacctatagtttatctatctgtttttcttctgtttctttaagattagtttgacttttattattatttttttaattaacttctgtgaagttgtttactctgaaaattgtactggaatattttaagccaagctgatctttcaccaggtgtactgtatgtaagggcttttcctgctagcaagatgcttaaacaggatcatgttattggtcgtctgagctatttagttgttttacaaaaccacagcattgtatcagataagattttgatacttgattagaatgagtaaatactggtgtttgatacctgtcttaatgaacatgctcataaggtgactgataagttgtaaatatacctgagaaacaaaggggtagttttgatattctggtgtcagtatggaagatcttacacatttatttaatactcaaatgtatgaagatgtttgtttgtagcataacaacagcacagtagccttgacttagtttcctttggttagtactgtaccttttttgccatggccagtgctccccatccctatgaagacattttatttatttcactctgtaacctgaaatgaataggaacaagggttttaaaccatgttacattaacttatttctgacattataaattagcctagaatattacaggaacatgattgttatataatttatatcagaacctttctataaatatgtgcttattacatttgaaatgcttccaatgtactttatttgctgtttgtaattccaaaaaggatatgcaaaccagtctgtctatttcatggatatttaatagtgagatcttccatgttgaaggtaatgtatttttttttaagattttaaaattgctattttgttacaaaatagagacctattaacagtttgagagctccttatgtgccctcagggaaagaaccctctgtgcaacagaactacacaaaacatcttcagcacgttctgagggtgaatatatactacataaattgatcttgtgtatttaaccttatctttttaattttaaaattgaaattttgaaacttggttgtgctctgctggagggggttgggataaactgcttagatgtttgcctacttgtccagtgaaattacatttgcatcagtatatgtatatacctgccaaccttattggtatgtctcagaacatttatattaaaataatgcttgtcttgcagcaggtgatcccataaaacaataactccctgttcttaaaaacttactctctttttcactaacaacataggaattgtttctgtgttgagattattctgtgttgcatccattctctatgtagtggtcaccttctgtctgtcatggtgggcttaatgtgaagtaaagccattggttctctgccactttcgaagaaagggcagttcatctgatccttcttcagaatggtacctactgatatcatcgaggaaaatgttacaaatcagacctaggatatgactttttaaaattgaggcatttcccgtcatttggcctttttaccaacaagatgtgatgtacaaatttggaatcaaaggatacaaagcaacaagagaggaaatgtgtaatgtgggtaaccaaactgcatatgttacctattgtctaatcagaaaaaatagtctgaggtctggaaagcaggaaagtggtggttattttctttcattttttgtgtttttgttttttaatttctaagttccattctgaaatccatgtgccgcattcagttactgtggttgtagcatcagtttttttgtggtttcatttcattttatgaattcagaggaagttacatatatattttttctagttggtacctgaacaaagcagattcccttgcctttgctgccacgtcttattttcaatgccatgtgataaaccagtgtcatacatgaaagttgtgcattgtaattttcaaaaaaaagggagttcattaggccagtggcactgatttttccttcccatcatagctatttattctagtaagaggataataaaagaaatttcctatacaagaactgaaattttccatttgtatggatctagtcactttcagatttcaatttgaggttaagtatataaagcacatcccaattttatatgctgccttgagaaaattacaggatgcacggcaatttgtaggaatttcaaatgggatcatttaaacatttgaaaaattattttaaaaaccatctagtttgcttttggattttagacattaaagcctatgttgtcttgttaacaggggtggaatgtataaccatcagattcagcatgtgatttcacctttgaatctgagtatttcttccctatcttctttgagtcatttttggagcagactgtcaccagtattgataactaagcattaaagggaaaagttgcattgcaactatgcattggtttcctggaagaacttttcttttgttttagtgaatgaagaggcttgatgggatcacttactgtaactccttctacataaggaccccttctgcaagcagaacacaaaagaacatgctcaaggagtatcccattttctggataaattgaagaagtttgctagtaatgtctttatactagcgtcttccttgtatccctttgctggcaagggaatacaaggcgtcaagaccacagatcaaaacaccccacatttgagtggagtcttatttttactccaagagcagttattcccttctagtctaaaattggcagttttttcttttttttaataaaatttttaaaatattcccaaaccagtggaacacagacactggctgcacttagtactgccaaaagccaaggtcatttgcacatattccatcaacctgtcgagaattaggcctcactttataacccaaggcatggaagtgcatgcattctcttagctgggcaaacaattatactgtagttgtgatacaacacatgtggcttttatttgtactgcacatatccactgtacagccacttgggagtatcgtggttagcttgcagcaactgctgtctgcatttatactgtttattgcatattcttttccctggaagtgaaagagaaatgtttttcttgttgcattgattacattttataaatttgcttagctggaaagtttgggaaaagaggcctgtttgtcaattgtacaaccgattgtgaagctctagtgtgaatatttttacgtctgtattagacattttctttgcaaatctattgttcgattgaaatgtaaatgaaattaaagatggtgtacacccatcatgtaaaaagcaggcaccatctctaagatggatttaatgctcatttttaaggcatatactcagcttctatttaaaactataatttaaaataattctgtacaatgaaatggggaatatatatgggaataaattctattccatttatttcaatttgaatttccaaattgtaatgtttccctttgtgctataggaataggattaaatgggggaagactaggatttataaggcctgtatatggggggagggcagagatggaacaatgagggttgtgatgatagtgaatagcaaagagtgaattctgtgtgtttttgctgtagcactgaagtgaagagatattagctttggctgttcacaaaatagagcatcatgattttcagtgtttgagagaaaattgatggaaaaagtttgcagtacttgacatgtatttgcatgcacaaaataaaattatttgtccaccttaaaa

SEQ ID NO: 123463 - DNA, 4389 bp, Homo sapiens
gtttttcttgttttttgactgttaggttgataagactatgaactgtgtaatagtagaacagtggctaacatttattcatacttaagaacatgaataatttctgccttgctaaaatgtgactgaaatggttttgacttggcatctgaaagtatacaatgtgttcaacaagtcatgcatcagatttgtgggaggtattgtactgaaacctaaatttcagtcaacatttgaaaagaagagctgggcattccttcctggtgatctttacctatagtttatctatctgtttttcttctgtttctttaagattagtttgacttttattattatttttttaattaacttctgtgaagttgtttactctgaaaattgtactggaatattttaagccaagctgatctttcaccaggtgtactgtatgtaagggcttttcctgctagcaagatgcttaaacaggatcatgttattggtcgtctgagctatttagttgttttacaaaaccacagcattgtatcagataagattttgataaaaagttttgtgcacatttccaggggcgggagggttgacatttccctgaaatttcttgattagaatgagtaaatactggtgtttgatacctgtcttaatgaacatgctcataaggtgactgataagttgtaaatatacctgagaaacaaaggggtagttttgatattctggtgtcagtatggaagatcttacacatttatttaatactcaaatgtatgaagatgtttgtttgtagcataacaacagcacagtagccttgacttagtttcctttggttagtactgtaccttttttgccatggccagtgctccccatccctatgaagacattttatttatttcactctgtaacctgaaatgaataggaacaagggttttaaaccatgttacattaacttatttctgacattataaattagcctagaatattacaggaacatgattgttatataatttatatcagaacctttctataaatatgtgcttattacatttgaaatgcttccaatgtactttatttgctgtttgtaattccaaaaaggatatgcaaaccagtctgtctatttcatggatatttaatagtgagatcttccatgttgaaggtaatgtatttttttttaagattttaaaattgctattttgttacaaaatagagacctattaacagtttgagagctccttatgtgccctcagggaaagaaccctctgtgcaacagaactacacaaaacatcttcagcacgttctgagggtgaatatatactacataaattgatcttgtgtatttaaccttatctttttaattttaaaattgaaattttgaaacttggttgtgctctgctggagggggttgggataaactgcttagatgtttgcctacttgtccagtgaaattacatttgcatcagtatatgtatatacctgccaaccttattggtatgtctcagaacatttatattaaaataatgcttgtcttgcagcaggtgatcccataaaacaataactccctgttcttaaaaacttactctctttttcactaacaacataggaattgtttctgtgttgagattattctgtgttgcatccattctctatgtagtggtcaccttctgtctgtcatggtgggcttaatgtgaagtaaagccattggttctctgccactttcgaagaaagggcagttcatctgatccttcttcagaatggtacctactgatatcatcgaggaaaatgttacaaatcagacctaggatatgactttttaaaattgaggcatttcccgtcatttggcctttttaccaacaagatgtgatgtacaaatttggaatcaaaggatacaaagcaacaagagaggaaatgtgtaatgtgggtaaccaaactgcatatgttacctattgtctaatcagaaaaaatagtctgaggtctggaaagcaggaaagtggtggttattttctttcattttttgtgtttttgttttttaatttctaagttccattctgaaatccatgtgccgcattcagttactgtggttgtagcatcagtttttttgtggtttcatttcattttatgaattcagaggaagttacatatatattttttctagttggtacctgaacaaagcagattcccttgcctttgctgccacgtcttattttcaatgccatgtgataaaccagtgtcatacatgaaagttgtgcattgtaattttcaaaaaaaagggagttcattaggccagtggcactgatttttccttcccatcatagctatttattctagtaagaggataataaaagaaatttcctatacaagaactgaaattttccatttgtatggatctagtcactttcagatttcaatttgaggttaagtatataaagcacatcccaattttatatgctgccttgagaaaattacaggatgcacggcaatttgtaggaatttcaaatgggatcatttaaacatttgaaaaattattttaaaaaccatctagtttgcttttggattttagacattaaagcctatgttgtcttgttaacaggggtggaatgtataaccatcagattcagcatgtgatttcacctttgaatctgagtatttcttccctatcttctttgagtcatttttggagcagactgtcaccagtattgataactaagcattaaagggaaaagttgcattgcaactatgcattggtttcctggaagaacttttcttttgttttagtgaatgaagaggcttgatgggatcacttactgtaactccttctacataaggaccccttctgcaagcagaacacaaaagaacatgctcaaggagtatcccattttctggataaattgaagaagtttgctagtaatgtctttatactagcgtcttccttgtatccctttgctggcaagggaatacaaggcgtcaagaccacagatcaaaacaccccacatttgagtggagtcttatttttactccaagagcagttattcccttctagtctaaaattggcagttttttcttttttttaataaaatttttaaaatattcccaaaccagtggaacacagacactggctgcacttagtactgccaaaagccaaggtcatttgcacatattccatcaacctgtcgagaattaggcctcactttataacccaaggcatggaagtgcatgcattctcttagctgggcaaacaattatactgtagttgtgatacaacacatgtggcttttatttgtactgcacatatccactgtacagccacttgggagtatcgtggttagcttgcagcaactgctgtctgcatttatactgtttattgcatattcttttccctggaagtgaaagagaaatgtttttcttgttgcattgattacattttataaatttgcttagctggaaagtttgggaaaagaggcctgtttgtcaattgtacaaccgattgtgaagctctagtgtgaatatttttacgtctgtattagacattttctttgcaaatctattgttcgattgaaatgtaaatgaaattaaagatggtgtacacccatcatgtaaaaagcaggcaccatctctaagatggatttaatgctcatttttaaggcatatactcagcttctatttaaaactataatttaaaataattctgtacaatgaaatggggaatatatatgggaataaattctattccatttatttcaatttgaatttccaaattgtaatgtttccctttgtgctataggaataggattaaatgggggaagactaggatttataaggcctgtatatggggggagggcagagatggaacaatgagggttgtgatgatagtgaatagcaaagagtgaattctgtgtgtttttgctgtagcactgaagtgaagagatattagctttggctgttcacaaaatagagcatcatgattttcagtgtttgagagaaaattgatggaaaaagtttgcagtacttgacatgtatttgcatgcacaaaataaaattatttgtccaccttaaaaaaaaaaaaaaaaaaaaaaaaaaacaaaaaaggaaaaaaaaaaaaaaaaaaaaaagaaaaaaagcaagaaaaaaaaaaacagggaaatcacgagtaacataaaggggccgggtatcatgattagattgcaccaagggcgcacccactaatgtcgggcacttatttatgatgaagagtacgcgctacttaaaaggcgagtttgatgatcagcggtgcggcagtcataattagagacgagcaccacaaccactgcacgtgtattacacgtgaaacaacatgattatttgaggagaacaaggccacactcgagtatgggctaaaacctaattatacggtactgggactaacgcttcgtggctatatct

SEQ ID NO: 123464 - DNA, 657 bp, Homo sapiens
taagggggacaaataattttattttgtgcatgcaaatacatgtcaagtactgcaaactttttccatcaattttctctcaaacactgaaaatcatgatgctctatttagtgaatagcaaagagtgaattctgtgtgtttttgctgtagcactgaagtgaagagatattagctttggctgttcacaaaatagagcatcatgattttcagtgtttgagagaaaattgatggaaaaagtttgcagtacttgacatgtatttgcatgcacaaaataaaattatttgtccaccttaaaaaaaaaaaaaaaaaaaaaaaaaaacaaaaaaggaaaaaaaaaaaaaaaaaaaaaagaaaaaaagcaagaaaaaaaaaaacagggaaatcacgagtaacataaaggggccgggtatcatgattagattgcaccaagggcgcacccactaatgtcgggcacttatttatgatgaagagtacgcgctacttaaaaggcgagtttgatgatcagcggtgcggcagtcataattagagacgagcaccacaaccactgcacgtgtattacacgtgaaacaacatgattatttgaggagaacaaggccacactcgagtatgggctaaaacctaattatacggtactgggactaacgcttcgtggctatatct

SEQ ID NO: 123465 - DNA, 504 bp, Homo sapiens
gtttatcattatcttgacttcatgccttttctctagaggatcctgctttatgccaggtcagggtaccaatgggctcatgtgattgatgccctatttccataagtctgtgttgtaaaagaaaaaagaatccctgctaatgtagagctattccagactggggaggagagacattttaagggtttacacaattttctgtaacagattttaatatgcttattttacattgcttctaacgccttttgaagttgaaatttcctcattgccaaacttgtcatttctttggctcccctcatttccacccctccaccttttatgagcaaatcactgcagttaatgggtcactgtgtaagtttcattctctaagatgaaaaaatgcttattccatttatttaaaaagaaattggcgagcagaatttgcttggcactctgagagtgactttggcttgaactatgtattagacatcaaggcagagttagttgaaaaggatgttaatgaaataatgt

SEQ ID NO: 123466 - DNA, 341 bp, Homo sapiens
gcaccgttacttcccaatgacaggcaaaggaactgaagcacagaaaggtttcgcttaaggtcactcagccagcaagtggcagaaccgggatttcagtttgggcagccagactgcagagcttgctctctgcagattataacacagatatggggctgtgcgcctccatctgtgcacagagggagacttctccagaaagacacaggtggctggtaaggaaattgagaagatgcctgagttgctcggtggcttcctggaagccctagttttcccctccagagtggcttcctccccagagggagcatgagagttctggtctacctgggtgccactgggactttagt

SEQ ID NO: 123467 - DNA, 477 bp, Homo sapiens
aaggccatatatgattagcccacagccgataaatctaacggtgaaaagttgaaagcttttcccctaacatcaggaacaagaaaagggagtccactctcaccacctcttcaacagaatattcgaagtcctagtcaattaggcaagaaaaagaactaaatggcacacaaactggaaaatacaagataaactgtctctatttgcaaatgacatgacctcatacatagaaaaccctaaagcctgcataaaaaaattgttaaaaactattatagtaagttcagtaaagttgcagaatataaaatatacaaaaattagttgtatatttttgtatacaactggctgaaagatttgtacactaaaaactagaagacaaaggaattgaaaaagatacatacaaatggaaagataatctgttcatgaattgaaacaattaatgttgttaaaatgtccatactactcaaagcaatctatggattcaat

SEQ ID NO: 123468 - DNA, 492 bp, Homo sapiens
tgggctcccggcaggcccgggtggggagccaccgcccgagcacaatgtagctccttgttccccgcctcggcctcctggaattggcccatttcctgcctgggccgtggggccttttccaaggtaaataaacaaatacagagaagttggggcctggggtggaaaggggtacgctgggcttttcctccctgcatcccaaccccatagcaatagctgctgtgtgaccacaggggccgggacaccaaggctgagctcccacaccctgggcttcattgatccctgggagaagagaacgggatccactggagggtttgtgccgctctgcctcaggggctgtggttccccatccaggacgcccaggggccaccgattcctgcaggaattgcctgagtgcagggctgggacagccgctgagagacggaaaaggctccagggtggatgacaattccctaggctcccgtcctggctgtgccaccttggagcactatgacatca

SEQ ID NO: 123469 - DNA, 263 bp, Homo sapiens
aaaatagaagctaagagatcagagtttagttctacccttgacttgggaccaagttctaacaagttatctcactttctggccctcagggctccctgtgtataactccttcccttccacctcccaagattgctgagaaaatgagttgatgagattatgactgactgtgtcagtcattgctgcaccaactattttcaggagtttgcacttctttggttaggggttcccccatgatactggtatttgtacaaaattcagatcaggct

SEQ ID NO: 123470 - DNA, 308 bp, Homo sapiens
aacaacaaaaacctgttaccaaatcttaatagacacctcacttaccatcttacaccatctctcaaaaattcaacaaagatgactactactttccttgaaattattttgcttgattctcaggctcccccagtttcttcacctcatcagtcactcctcctaatcgcctttgctgtgtgcccttcccctaggtgttttcccaatctaacgtcaaggccccaggattctgtccagagccctcttctcttacttagactttgcctagatcatctcgtaaacccacagcattaaacactattgttaagactggt

SEQ ID NO: 123471 - DNA, 611 bp, Homo sapiens
cttcctcacaggctttatcgccactgtgcgtatctgcatatggcagattcttcttgatatttcaacactggttaaatttttccttcttggagaagccttccctaaccatccagtctagagcagccagctatttcctttaagtgggttatttaacagcatctatctctgacactttttatttcttttcctcctccaattagaatgtaggctccactacagcagagaccttgttcatctttatctgatgtatccctaggcctcaaaacagctgttcaggaaatgtttgttaaaggaatgtattaatgaatgaagcaatgatgtagccagtatttctaagttaattgataagtttccaacataaagcaaaaaagccttgtcagtgtgtacagccatgtcactgctgaatgtacactttcctttaaaatagcaaaacgaaatcttagataatcaggcctcctttgctgaacctctgaagttcaggaatcctagtctgggaacttccttgcttttgacagagtgttcacagtgcagagatcctagaacagaatttgaattggttcttctgccactccctcaatagacttaatttgcaagtagttttgcccccaggg

SEQ ID NO: 123472 - DNA, 355 bp, Homo sapiens
tcctactagagcctaagtctctagaaagtagataacccaattcagccaaaagaaccagctttccatggggtgggggtggtatatgttcagtaaacaaaaaaaaagagaaacacacacacaatatgtcagaatgattttaaaaaataagacaggaaatattaaaaacaaaaaaatctgcccttttttcatccacttgtcaacctaatttcccccaatccttttgcctttcatacttttgctaaagataccgttttctaccttccaggcaaaaagcaagacaagcaaccccagacaaagaatattgccaatgccagtgctgactcaaagaacacgcaacagatgaatggtttcgtga

SEQ ID NO: 123473 - DNA, 303 bp, Homo sapiens
acgtgtgatgtggggtcatgtgagtgcggatgtgcacagtgtgggatcgtgtgagtgcacagtgggttgtgtggacgtgcacggtgtggcgtcgtgagttcaggcatgcagggtgtggggtcgtgtgaatgcgggcctgcacggtgtggggtgagtgtgggcacacgtgatgtgtcatgtgactgcggatgtgcacagtgtgaggtcgtgtgaatgcgggcgtgcatggtgtgcagtcgtgagttccggcgtgcacgatgtggggtcttgtgagtgcgggcgtgcatggtgtgggatcgtgtg

SEQ ID NO: 123474 - DNA, 834 bp, Homo sapiens
  misc_feature (1)..(3): n is a, c, g, or t
nnntaacaaagaaaaaaggaagacatgcaaataatcacagtcagaaatgacaaaggtgacattacaaccagtcccacaggaatataaaagaccctcagacactactatgaacatcactatgcaaacaaactagaaaatctagaggaactggatgaattcttggaaatacaccatctccaggattggactaagaagaaacataaatcctgaacaggccaataatgtgtaatgaaattgaatcagtatttttttaaaaaacataccaaccaaaaaaaaaaaaaagccttgaataggatggatttacagccaaattctaccagacatacaaagaagagctggtactagtgctactgaaattatttcaaaaattgaggagaagacactccttcctacaatattctacaaaaccagtatcatcctgataccaaaatctggcaaagacacaacaaaaaaaggaaactacaggccaatatcactgatgaacatagttgcaaaaattcccagcaaaatgctagcaaactgaatccagcagcacatcaaaaagttaattcaccatgatcaagtgggctttattcctgggatgcaaatatggttccacatatgcaaattaataaatgtgttttaccacataaacagaattaaaaacaaaaatcttatgatcatctcaatagaagcagaaagaacatttgataaaatccaacgtttcttaatgataaaaaagaactcagcaaactaggcatcaaagaaacatacctcaaaataataagagccatttatgacaaacccacagccaaaatcatactgaataagcagaagctggaagcattcctctct

SEQ ID NO: 123475 - DNA, 438 bp, Homo sapiens
accttaatttatatttttttgtctatttgacataagccaagtacccatgccatgattcaacacagaaaattacaaagcccaccttactgtagactgctgctcttattgcatcaacattcgtatcttccacggaaaataattaacttagttctataatcaggatatgcccggtttatttacaaggaaatacctatcaggtgctaatttctcttagaattagaaatcttggccaggcatggtggctcacacctgtaatcccagcactttgggaggccgaggtaggtggattacctgaggtcaggagtttgagaccagcctggccaacgtggtgaaccctgtctctactaaaaatacaaaaattagtcgggctaaggtggtgtgttcctgtaatcccacctactcgagaggctgaggcaggagaatcgcttgaacctggga

SEQ ID NO: 123476 - DNA, 880 bp, Homo sapiens
cgccattcctcagtttcctgcaacatttcttggcaagccagccaggagtggagatgacaggcttactgtctcctttgcctatagggggctggagccctgggccaagggagacctgtgaccccaggtgccgccgggagaacttcagcccagaggggaaatcagctctccgtgacccagcacccctacccagcagcgcaacagatcctgagaggagctacaggatgattctagaaacagcgcacttcaggaatcatgttgcaggtgttgtgcattggatccaccacagtcggctgaaactgacaactcaagacaagtggaccagccagcaggacccagatcatccaactcggctgatcctgagacgggaccaaactgctgccgaagacgaccgccctgttctggtcactccggaggctaaccagcctacgcatggctgaagtttgaggaaacaacaagccctgctctagtcacacactgaaagctgactagtctatgcacggccaaagcttgaggactcatcaagcaagtaaatgtagttagaaatcttagaactagtagttttccttgtaatattaactgttttactattgttctgtcactgtgctcaacctcctctcccaaataaggacctcttctgtccttactagatatgaatatactgtacattgttttactgttggtaccccacctaaccatgctagaagaaacacccatagaagggtgtccccatcgtacacatactacatggtcagaaaacagtataaccaggactctattataccatacttattatgagtatacagggactcacctaggaacttgtacttacaatcagatcacctattcaatttatgacccaggaaatggccagctacctagg

SEQ ID NO: 123477 - DNA, 366 bp, Homo sapiens
tggaggcagggccggggaaggtgccacaagatgcagactgcagactagggaagcgggagccggtgccgcaggctaagcgtcaggcgaggcagaggactgtggacgtccacagatggccagggtggcaagggaaaaggacacagagggaagggaggcggtgccagctcctcgccacacccaggccaggaagaatcaagaatgtaggatgcagaacccagccacctctccagcccactgctgccccaggcagggcttccccgaccgtcttgagggctctgcccgaatgtgaggggtcaggacagcaaggtgacgggatgtggctgaacccttccaggactgcctggcagctgcacctctcacagactc

SEQ ID NO: 123478 - DNA, 842 bp, Homo sapiens
ggcgttaaccactaaattgccctagctgtaggtacaaatccttctccttgtaaaactgcttcagagctgtgtattacatcatatctcctaggaactggctccagggtatgataaaagtatacagaattaagttactcctcctatcatggaaagtcacttattttatgtgtgttgtgcttagtggagataaggaaacgctgctcaccttccacttaataaccagaaaactcatccttaagagatccttgtggcttaaacaaacaaacctctgcaagccttttagcatccccagtctggctggggccaagtagtatcttgtaattaagctatggggattatgttgctgttgctgatgttcccaagaatgtgggtaggaaatggtgtctgaatatatagaagtcctaagaagggaccatggtctaacattgggactttttaagttttggggaggttgaggatggtgtttattaagtcaccttggtgcttagctgtgaggactgctggagtggagggcttggagctttattcaaaactggaagaaaaggatcctgatgcttcaaaaaccggaagactgggatgagcgggcaagatcgatgatcccacagactccaagcctgaggacatggggacaacgcgcgagcatatcactggaccctgatgctaagaagcccgaggaactgggatgaagagatggacggagagtgggaaccccaagtgatcagaaacctggagtacaagggtgagtgaaagccccgggcagatcgaaacccagaattacagggcaattggatccacccagaaattgcaaccgaagtatactccgagaccagattatgctatga

SEQ ID NO: 123479 - DNA, 583 bp, Homo sapiens
ggcgttaaccactaaattgccctagctgtaggtacaaatccttctccttgtaaaactgcttcagagctgtgtattacatcatatctcctaggaactggctccagggtatgataaaagtatacagaattaagttactcctcctatcatggaaagtcacttattttatgtgtgttgtgcttagtggagataaggaaacgctgctcaccttccacttaataaccagaaaactcatccttaagagatccttgtggcttaaacaaacaaacctctgcaagccttttagcatccccagtctggctggggccaagtagtatcttgtaattaagctatggggattatgttgctgttgctgatgttcccaagaatgtgggtaggaaatggtgtctgaatatatagaagtcctaagaagggaccatggtctaacattgggactttttaagttttggggaggttgaggatggtgtttattaagtcaccttggtgcttagctgtgaggactgctggagtggagggcttggagctttattcaaaactggaagaaaaggatggcaatggatgagctgagcagatgttgaagccacct

SEQ ID NO: 123480 - DNA, 193 bp, Homo sapiens
gccaagtgccagtaacagaggcttcagcagcgctcttaaagctcctatgctatattcgtacagccacaaaagctggctaaagccaaggcttgtcctccaaagtacgattcaagatctcctgtacatatgtaagaggaaaatctttaggggcttttggtgttttgtgtttttttataacaccacatcaatttgc

SEQ ID NO: 123481 - DNA, 511 bp, Homo sapiens
agacaggcacagagtcctataatgcccacgatgcatgcctctagcagctttgaattctgctggatcatctgacgcaatgggcagagcaggtttggccacagcctatatctgctgtagagatatctatatgttctggattccacttgaaaccacgtagtctttgcattcattctgcaacccatctagttttggcagaggctaggtaggttaactgaacagggatttaaaaaggactttattaacacgttggagcaatatcctctattgtggtatttgtggactctgaaaccccaagaggctcaataaacactgtgcttcctttttagtgataagaagtatatatagggcaacatgccatttaccttaaaaaggatgtttctgctgggcgtggtggttcaagcctgtaatcccagcactttgggaggccaaggtgggcagatcacttgagaccatgagtttgagaccagcctggataacatggtgaaaccctgtctctacttaaaaaaaaaaa

SEQ ID NO: 123482 - DNA, 209 bp, Homo sapiens
tacacacatacattttgtttatcatacatcttccctagtactatgtaatcagcataaaaagagaggtaatagctgtcttgctttctcttgactcacaggatctaaaagccacactttgggaggccaaggtgggcagatcacttgagaccatgagtttgagaccagcctggataacatggtgaaaccctgtctctacttaaaaaaaaaaa

SEQ ID NO: 123483 - DNA, 365 bp, Homo sapiens
agccaagatagactaacaggaataaattagccttcctgcctgaaaagaataaaacacagaacagaatatatgaaaatgtggttttcatgatattggacactaagcaacaaaaaacagtgacccgtgagagaagggaaacaacagtgtgaaccttttgacttccgcagcttgctgcctgaaagggtttttccaggttgtgctacaacatggaagtttgccccacctgtggctcacaggcttcatgcagcccaggagagctttgaatgcagcccaacacaaattcgtaaactttcttaaaccattatcagggttttttttcttttttctttttttggtcatcagctatcgtcagtgtattttatgtg

SEQ ID NO: 123484 - DNA, 216 bp, Homo sapiens
gcctcgttctgaggatccctgcctacctgggagtattgttgggaacgaggggaagtcactcccaccaggcctcacctccaacactggggattacaattagacctgcaatttcctagggacacagatccaaaccctttcagtgaggtattcatcgagtctcctgcacatagattctccctctgccaaaaaagatctatttttccacaaaagaaagtg

SEQ ID NO: 123485 - DNA, 479 bp, Homo sapiens
agtcagtctggacagagtgccacagaagttcaggcgagaaagaggattcttccaactgagtggggccatggaaaaactcgagttccatttattagcggtaggaaacacatgttgagaatgaagaatggagttaaacaattggtctttccctcagatcccagggtttttaacctgttactaaaaaagtatagcaatttatggccaggcacggtggctcacgcctgtaatcccagcactttgggaggccgaggtgggcccatcacgaggtcaggagatcgagacaatcctgcctaacacggtgaaaccccgtctctagtaaaaatacaaaaaattagccgggtgtggtggcgggtgcctgtagtcccagctacttgggaggctgaggcaggagaatggcatgaacccgggaggcggagcttttggtgagccgagattgcgccactgcactccagcctaggagacagcgagactccacctca

SEQ ID NO: 123486 - DNA, 301 bp, Homo sapiens
gggatctggtagcattctatatcccaatcttggtgtttaaacaattggttcatgttatagaaagtaatcaagaagtatacttattatttcatcctgtttatttatgtaaaattaacacagtaagtaaggtacacaaatcacaagtgtgtgataacagtcagtgtccattcaggagctagaaaacaaacaatcaattaaaacaagaaaatgtaacataaataaaaaattattaatttgtaaaaagttgtcaagtgctaatagatgtaaaagacaatttgaaggaatatggaactagcaaata

SEQ ID NO: 123487 - DNA, 350 bp, Homo sapiens
cactgcttgagtgtttgggagtacaccagttgttgtagcagacacggaatccttgtggtcttggagctttcattctagtggggggctgcggggagccagacagtagacatgaagtcagttacgtcgtgtgcagaaaggtgctgtgtgctgtggaaaaaatagagcagtgtatggggattagggatgagggcggaaggatagttgcagtattaaagtggtgatcacgtaggctcatggggaaggcaggattggagctgagactaagagggagccattgtggttccctctgcttcagaggtagcccctggtttcatcttcgtccagcctctttttcggtgatctctctactc

SEQ ID NO: 123488 - DNA, 225 bp, Homo sapiens
gagcggaccagatcagagaagcaaggctaggaatcatgagcttaggaacaataatagaagtcaaggaataactgatctgaaggagagtatgtgaacaaaacagacagacactaggtactttgggatgccagccccatattggtacaggcatttggcagttaaaaaaaatatattctataaaaatataatctgcagccaggcgcagtggctcatgcctgtaatccc

SEQ ID NO: 123489 - DNA, 298 bp, Homo sapiens
caaagtgctggaccaatgttgacatgagcactgtacctggtcactttttgtatttcaaattgaagatgagaaggaacaattccaagtgggagattattagttgtctcatgttttctacatataaaccatccgttttcttatcatttatcttcttttaccttcttgaagtggtggtcttagaatcatacaatgtcagaattgaaagtagcttaggaatcacctaattcagcatctctttagctgcagaaacctagtatttccatttgactcctgttttatattacatctccctgctgaa

SEQ ID NO: 123490 - DNA, 313 bp, Homo sapiens
tttttgttataaggagtcagaatttaatcttagaagaaggaagagagaaactgttggccttttgaaacttttgagctccttttgactatcctggtacccaaatccctcagtaccacatgttattgatatttagtgtaaaaataaagtggagacttgtgctttattttaaaacatccagattttaatgttgatatttagtataaaaataaagtagagatctgtgctttattttaaaacatccagattttaatgtactagtaaattttttttcactttcctgcaaagatctggtaagcaggaagaaatgtacatc

SEQ ID NO: 123491 - DNA, 272 bp, Homo sapiens
ctgtcagcaaaagccaaagagaaggacatagcaaagtggagctagtgctgtgaagatgtgttagggcaagggcacttataatcaaatacgtttccactaatctccgagtccatgacagcctctgaccttacaggagttccaggcaagcaacacctgcagagcccgtgcggacaagaagctggagaaccgtgcagaaagacgatgtaaaaacacaaacccccaagagagcgagccaacagggttgtgtcctggtgagtgtgactccccaataa

SEQ ID NO: 123492 - DNA, 176 bp, Homo sapiens
tctttggatgctccacatgcaccatcaactcaacttgtataaaattaaacacattatctgtagtccaacaactaaatgtgctcctaataccaccagccacgcagtcatctggaaagtctgagttgtcctggactcctccctcttcctcactctcctctccctccctactgcactga

SEQ ID NO: 123493 - DNA, 306 bp, Homo sapiens
cccacgcctcccctgccgtggacagccccctgctgccatcaataggactgttaagaaccttctttgtgataggcagtgataggtgctgccaagtggaggatggtgccactggtttccttccccaagagagtgcagtcttttttgcaaaaaaacatgtgctgtgtcagggagggtgaggtaacttggccgctggtggaatccagaaaaaagtattctctcccaaattgtggcagcctcttggggtcctgtccgagaggacactgacctcaggaaacactgggtgggaattctagttcttcccccatg

SEQ ID NO: 123494 - DNA, 216 bp, Homo sapiens
tgctgggattacaggcgtgatccattgcacctggcctactgttggtgttttaaacatttttttccagaattccactgttgggaatgtgtcttaaggatatgtgaaaatgaatgcagagaaaagatgtttatcgtaacttattttaagaggaaaaaaaagatgtaatacaactattgagataggatcttgttctgcccaggctggattgcagtggcg

SEQ ID NO: 123495 - DNA, 474 bp, Homo sapiens
tgttcctagggccctctgatgcacaaagctttctaatttgaacaggaaagcagatgctcaccttagttttcttcacatacctgttctttacacctatttatctttactagattattactttgcctggaacccactcctacccctacacccggaaccccctcctaaccctacgcctttcccatctaaccccttcccagtcttagtccaggcctcgactcctcaagaccttccctgacgttcctcccctgcctcgccccacccctcctagtcgcctcctctgtgctgccacctggccctgggcatgcttgagtatacaccattaacgcagctgtcccagttcagtgagcttttccagggtagggatcaccatctcttcatctgtgggttgttggtgccaagcagtgctagcagtgtctgggagaatgttgcataaatccagccttggagtttctctgccctcacccttacagataa

SEQ ID NO: 123496 - DNA, 764 bp, Homo sapiens
gaaccactcaagaattattttgggaaatgaattagtagaactcactaagctatttgaatatgttagtagcagtatagtgaagtgatcatagaaatctaacatcttaatttgaataaccctaccccttatttgctctgttatcttggactacttaactagtctttctaacctcaatgttatgatctgtcaaatgaaataataatagtgcctactttataggcttatttgagacaacataagattctgtttattagtactgtatctttcacatggtaaacattaagcgaatatcactgctattattactctgcttttaaaactttaaaaaaaaatgctttcaggctagggacaggggctcacacctgtaatctcagctgaggtgggaggatcacttgaggccagaaatttgagaccagcctgggcaacatggcaagacccactctctaaaaaaaaacttttaaaaattagccgagtgtggtggcatgcacatgtaggcctaggtgttggggtggctaaggcaggaagagcactggaactcaggagtctgaggttataataaactatgatggtgccactgcactccagcctgggcaacaaagccagaccatatctctttaaaaattaaaaaatggggccaggcgcggtggctgaacgcctttaatcccagcactttgggaggccgaggcgggtagatcacgagatcagaagatcgagaccatcctggctaacacagtgaaaccccgtctctactaaaaatacaaaaa

SEQ ID NO: 123497 - DNA, 550 bp, Homo sapiens
ctcaaataacaatttagttgaaaggccttagagcctaaaggtggctcttaggttggagtaaggatatttagtctcggcagagtgggcatcactattccactctgtgactccagggatgtgggggtgtaattgcaaagctggtgaatgatccagcccagtgaggccactccaatgtttctgctgtcccagaagggggagataatgtcatgactatctagaagggaatgacttgcaaacatgaactccaaaatggtaaaaggaagaaaaatcactaattttaataaaacccaatagaccagaatgtgtagtttgcaggagctccccaggtgactcagctcatttgttaagattttggtactgctgcagcaaaggagaaactgacatttgcatcatgactattcctaagtggtcctcaagcttttctgctgaggggggagcctgagacacaagtgagaacaggctggtgcccgagtgagtcactgtgatggagtgctggccgcatggcatccacagcctatatcatttcagggccagctactcctgcctactg

SEQ ID NO: 123498 - DNA, 408 bp, Homo sapiens
tctcttcctctatgcatccacaagcatttataaaaaaagtttcattgtataacatctgatatggcatattggcatattctaccactattccacatgccaaatcttaaattgtgttatatttatttgtatgaatttcttttccctcctagttggtaggagtttccttgagatcatgtctacttattctgaatcctggagtgtctaccagagttcaccactcaaacagctattatattgtggtgttttgtgtttttcactagactgcaagggcctaatgaggaagacatgttctctaactttgtatcactattacctaatcacaggccaagcaggtcctgtggcagagcacgtcatgagaaactacttgccttggtgctgaccattaagtcagtgtccaaattcacagtt

SEQ ID NO: 123499 - DNA, 563 bp, Homo sapiens
aggcttacaggtgctcggtggtaagctgagccactcagccgtgtagctttcaccatgttttacaggccaaaggaggtcatgcatgtattcttggtgtagagctgagcaccaaaactatttattcaggattgttgttatttctccttagcaacttggcaagatctggacactgaggaggtgtgtctcttatccccctctttagaatgcaggtcaacgcaatagatggtggtaagcttcacagtaggtaccatttatggagctcttactatcggctaggtctttttgtcaattgttaactgtaataggagatggatatttatagaccccttttatagataaattgagtctgagagttttaagtattaataacatgtgccaacaagtaagggggcaacactgagattcatagacggggctttcttgtactaaaggtggcgtttccttatccactatggtattctgtcagctaaaaataaaagtgcctataccaatataaggggctgtcacatccgttggacactattgtttcttctaaaaaggactcattattactcctagttcca

SEQ ID NO: 123500 - DNA, 351 bp, Homo sapiens
aggattacaagtttcctgattctcccattaatctctccaaacacgaaactcttagttaagggagtagcatttcaaagaagacatcactataatttatcgtttataaatgaaaggtgcagagaccttttcttaccaatttgtggacctcttcgtttttctttcattctttcttcctttctttccagtgttggtaaggttttggcctgctgtactccaggtactttttgatgcttgagatgtataagtaaaacaaagactcctatccttgtggacaatcatgtgaatgtgggattatcttctgccttaaagcaggagaataactggcttatttgggcagtagcaaggaggagc

SEQ ID NO: 123501 - DNA, 584 bp, Homo sapiens
tgtgatggtcagctcttgggtatggttatcttgtgttttgggtggagggatggactctttgtgtcaaagccattattctgagggacatgcagttgttcatatatcatttctaaaattctaatgtaaccttccctatatatgaaaatgggaatgtggctgcattgtgggataactttttagtaaaagcaaaatttaacttctgagactgttcagtaaaagggaaaatattgtaggaattacccttatctcccttgttaacactaaaagaattgaactggctgtacttcctctactttgatagtcatctagatgcagtttgtatatcacagtttctgagttttatcatccacgtggcctcttggcattttcatgcatcttgctgaattagtaaaattataatggaaagttgtgttttgtggctgtgggtatattctagaataaagtttttatttttctaattaacaggtttttttcccaccacacagaaaaatgttttagagctctgcatagtattaattctggctgcattcaaggtggcaataaatgatcagcagctccaagtcgtaatggatatatgaacagat

SEQ ID NO: 123502 - DNA, 312 bp, Homo sapiens
atagagttaataaagatcaagagtagtaactaaccttgagatcagcaaggcttattaatttttactgtggaccaaactgaagtattcattgtatgctactttatagcactctgaataaaacatccatgtttatatctacttttctagaaactatatactataaatgtgaacaattagttaaaatagaatcttttaggccgagcatggtggctcatgcctataatcccaacactttgggaggctgagatggatggatcatttgagaccaggagtttgaaaccagcctagccaacatggcgaaaccccatctct

SEQ ID NO: 123503 - DNA, 329 bp, Homo sapiens
cattttccacactcactttaggatgcctatatatatagtgtgtggtgtaatatcataaagattttaggatatgtagattacacacacacacgcacacacacacacatatatacatatatctatatactttactgcatactagagatacagagaaataaaaataaagactatctttgcctacaagaagctttcagtctgagattataatccaggatactattttgggaaagcatttgtaaggcttttaggaataactcatatgtaatagttaaagataagttctgttataattcccataaagatgggtaaggacaatgttactgtggaga

SEQ ID NO: 123504 - DNA, 509 bp, Homo sapiens
agctttatgtccttaacctcactgagatcccatttactgtctattaaatggaatcattccctctgccacaaggctgtcctaaggtcataatgagacatgcatcaagggcctaaggatacataatagagccttgattaactcgtctttggtactaccgtaagtactagtgagaggctgcccacccagcatccagttcatccacacactctcctttctagtagaaaggagaactcccatttttctttcacagttactgtattacacatgggtgtatgaagcaattctgcaccaatgagatttgaggtgagtcagctttggttggaagttagttctgagttagtcctttgttaaattaaatttggggtcgggtgtggtgtctcacgcctgtaatccaggcactttgggaggcagaggcaggtgaatcacctgaggtcaggagtttgagaccagtctggccaacatggtgaaaccccatctctactaaaaatacaaaaagagccggggatggg

SEQ ID NO: 123505 - DNA, 691 bp, Homo sapiens
tactttgcacagggagtgctaagggatgctgcctcgggtgtcccacgaggaacatgttatcatccaggtttggaagtgtcttagctcaattatttatagcctcaggcaggaattctatcattacaggcatgaaaatgcaccgcaaaatgatgatgaatttggaatactggaggtactaattttgctcagaatgaagaaagagaggaaaatcaatatgaaagtcagtttgtctgtccccacctccctactgtgtgacctcaagcaggctacttaccctctctggtctcaggttccactaatgaaaaggaaatcataatgatccctacaatattaaaagattaatatgtgcaaagttgtagaaaagggccagacacttagtaaacactctataaatgtcaattgtggctgttattacttctacaatcttcctaccttttgcatgtcattgagtcatcatcttcaaattgtgcgtgctcttctttgaaatgtttcttgggcccctgccttccttccacccagccttatgccttcccaggccttgtcacttcacccagtggctgatgctcacattcatcccccgagaacgtgggcaactcttcttcccgtgtgaaaagtaccctgtggaaaagtaccctgtggaaaagtaccctgtggaaaagtaccctgtggaaaagtaccctgtggataagta

SEQ ID NO: 123506 - DNA, 490 bp, Homo sapiens
taaacagcttttgattatctgctagtggaatcatgctattgctaaaacctattgttctgtgtatattaattcagagaaagtagaaactgagctacagaagatctatgctcaggcaggactagttatctgctctatacctgcagtcccctttagactcatttgttgaattcttcaatttcaattgccttattctgggcacttgggttactggctgagcaccatcctctagggaggcctgagtatcctcctagcccaggttctcccagtgatcttgtgaagtgctgtatcaaagtggcagggattctcagcaaactaggaatagagagtaactttctcaactcgacagagaacatctacaaaaaacctacagctaacattatacttgatgagaacctagaagcctttctgctaagaacaggagcaagatagggatgtcacctctcaccagtgcttttcagcatagtactggaagtcctagctagtgcagtaa

SEQ ID NO: 123507 - DNA, 442 bp, Homo sapiens
taacacagtgttgcccaaagccccaggtatgcaaaaacagacaccatgagtcatggtgttagcataaactatccctctgtcccacccaaggcccagatgtgtacagatactgttatcaggcaggatattccaaaggcttagagcttaaggagtggtcaagggccagtttttttctttggaatgttcaatacttaaggacccatgccagcagagttaaggctttactgcacgtggccctacttctgccaatgaacttggagcttacgtagcatcttttttttttttctttttgagatggagtttcgctctttttgcccaggctggactgcaatggcacgatctcggctcaccgcaacctccgcctcctgggttcaagtgattctcctgcctcagcctcccgagtaactgggattacaggcatgtgccaccatgcctggctaat
